United States Patent Application Publication US 2014/0057251 A1 - sequence listing, part 144

SEQ ID NO: 274713 - DNA, 945 bp, Cannabis indica
gtcgaagtggggagtgggatggtgaacgtacgggaagctgtggtaagtaatactaaaaatttaatgtgctataatgtgctatacaatttaattggtactcatttcattgttataacgttatgtagaaaaaggacctcgaagttgcagatcctccccgccaccgtgtttggattaaatctcgcaccaagagtagaaaacttgtcactgattacgacaaggaaattgccgagaagatagtaagtatatattaattcatatactaattgcttgaatatataattcaattagagttagtgtatataattcatatactaattgcttgaatatatgcgtgcattaggctcaattagaggagaagcttagtcagggacaaattcaggtccagggccaaaacgatatcctcacgcaggcgctcgggacaccagagcatcctggacgtgtcagggctgctgggtatgctattacttcaaatgttatttatttagttacacaaatgaaatcgttgctaatttgcattttatgatttgtaggttcctgaccagggcatctcaactgttcggcaggaagaaaagggaagtgtctgatgttgtggctcggcaagcgaaggagattgaaaaattaaaagccgaagtccaatcccttaagcagcagaggaacgctgccgaacaagaggaagaaggagaggtggctggtgaggcgtatgttccacaaccatacgctcctcaggatgaggtacaaccacaaatttatgctgaggagtttatttccctcaacgaccaaggtatcctatacaattttgatgaccatgcggcccttaatcagcaagtacatctctgctctgacaacatcgacaatattgtggcccgagggtatttgtacgagcatgtgggtatgatcaaagttcactgccaggattacgatgattcacatgctcggatcatggtt

SEQ ID NO: 274714 - DNA, 386 bp, Cannabis indica
atattaggttgttaatcaacatacttgttagtaaatctagatccttgtaaaataatttccaacacaaaatgcgaagaacttacataaagcttgagaactgggcgttggtgttggtcgacggtaaagagttgattggcagcgacgaaggaaaagaagtaagaaatctatggtgtttgaatgtttctgtttctctctggaaaacttgagaaagtttggcgaaattttgaaagtaaccaaatgaagtgagaagggtggcttctataggccaaaacacatgtgaaacagctgtgatcagataccatcgaacggctgggaagacacacgattcgaattcccaagatccaacggttggattggatcgtcatccgtctgacacccattaatgc

SEQ ID NO: 274715 - DNA, 544 bp, Cannabis indica
ttcgaacctcaaccaaatcacagagtaaaaacacaaatttcatgcttaaattcaccacagaatatgtatcccacaaattagattaacaacactcaagccaagctcaacacttgagcaaaattcaacctagaaatcaagtccataaccatgaacatcaaaaccccaaatacctcatgcttgaacacaacaaaaatcagaacttaaggttagatttcaaacacaatataaccttagaaatctcatctgaaattactagtaaacatactcctcaactcaacaatataatcaagctaaaacattaagattaagaccaaaatcacctccaattccactatcatgcatccataattttaagaaaaccaagaacaccttaattcattaaataacatctgagattaataaatcaaaaaggctaaagatcattaccacaagttcctcaagttcttctcaagcaagaacatccacaaagctacaccaaatcaagcccttttctttttttctcaaaatcaagatttctaaaagaaagggttagagagagagagag

SEQ ID NO: 274716 - DNA, 769 bp, Cannabis indica
gagaaaaattgagtgccttctctccctaacctagccgccactttaagtcttcttcttcaccattaaaattcgaaacccttgagtgatagagtagtgcccacacacatcaagtggtatctcaatcatagtgtggaagattgtgaagaatccaaccaacaagaaggagaatcagcatcaaggaaggagagaaagagatccaggttcagatcttggtgatgctctgctacagaaaggaatcaagggctagagatctgaacggaaggagtcattatatttcgctgcacccaatgtaaggtttcctaaactttatatgtgtttatttcattgttttagaattcatattaggatgttaatgaaacatacatggtagtaaatctagatcctggtaaaatatttccaacaaagtttcctcgtaccgagatagtcatctcgcattcttgtccttcgagccgatccgacttttatacttagtttgcttactgtaagctaaggtaagtgttactcttctctggtggctcgctattctcctttagcgacatatggtgtctcggtaatacactaagtactagttcgtacattgattcctcacctaaggccttataatcagtaggttacaaatatactctgatactcacgcagttaatgagttattccataaaagatacagattcacattcccttttctattgacacttgtccttaagccaaattttgggtagaccaggaataactcattaaaatgcggaagtgatagagtatattttacaac

SEQ ID NO: 274717 - DNA, 498 bp, Cannabis indica
ccgcaatcactataaaaacagaagaaaaataaacagtttagaaactaaaaaacaacataaaataaacttaaaagaaacactcactttttctgctgagacggcagaccactaatctccacgattcttaagggagctgtagggtcagaacctgaagcaggagcatgtgacctattcttccagaaaccaagtaaatcgaaaaacaaaggcagcaacacagaataagccttcatggcattcctagctgcagcattcattttcgcagtcctcaaagaattatacagaaacagaatcccttcattcaagtcaagacgaccaaacacccaatgactttcccttcttagattgatgatgaataacacatgatcggcttcataccaaggcttggaacagggaatgcgcatacctcggatgtaatgcgctattgggtgggcagcgtgaatgtgtgacatcttagtcttcattgacttggccttgttatatttgtggtacaaagcttgg

SEQ ID NO: 274718 - DNA, 507 bp, Cannabis indica
cgggtccaggttcttccctaaccggagtactttggtggagtcgacgtcgcacactgatacttcttcgacgtcctccattggttccacgattctttcggaccctacacgagggtccaactcatcctcttcagccacttctggctcagcgcactcccggaccataagtacgggcaggtgggttgcgacattataacattgccttgcttccccctgatttcccctcacagtcccgactccggcctcccgggtagggaactttaggcacagatgtcggattgaagtgactgcgccaaagtctactagggccggtcggccgaggatcgcgttgtaggctgtcagacagtccaccaccacgaaggtgcagtatttgaatgtgctctggggagtgtccgggcacagggtgactgggagcctcacttttcccattgggataagtgtcgtcccgttaaaccctgtgagctgggacccactaggcgagaggtcccgatctgtcaagcctatcgcggt

SEQ ID NO: 274719 - DNA, 817 bp, Cannabis indica
tgtacccgagtcatatatcgtgacattttctagctagtttgcaatttcattaattatagcagagaaactgtacttataatcaaagttataaatatatatattatatatgaatgtatgtatattgacataattagtttctaattttcatatcctatcgaatatagtacaataatcaaactgaatgccctttttaattactttctaatctttaatatttatttacgatagtcaatattatcaaactaattgacaattttagagtttagaattttatcataaagaataataatccaatattcaaagtgattcacattcaataaaaagaccaagtcgcgcttcaatatcaaacctaaattaattaaccatgcaagaaaaaaaatacaactaaaaaatgtcgaatggaaatcgatctctgttttgttatcaagtaataatatacttaaaaaaactgctacatttagtgataattttttagtcataacataacttttttatgatttaataacatgcttgtggctaaaacataatatttagatacaaattgtcactaatttagttttagtcacaacaagtattgtgactaaaaatacatttagtcacattaaactataatttttctgaataatacatttaaccacaaacctttttgtgactaaaagtaagatttttgtagtaataataataaaaatatatatacaggcatttatttacaaaacttattctgaaatttgaatgtttttttttttgcactaaataaggttagatataaaatataaagaagggagaaaattaacaaatataataatatattaataat

SEQ ID NO: 274720 - DNA, 801 bp, Cannabis indica
cgccaccacaaccacggaccgtcgccaccaccacaaagctcagtcaaaggtaagtttttctttttcaaaaaaaaattaattttttaatagatttggatgtgaaatattgcatgctgttgaaattagtggaatttttgtatattttgtgctctttcttgtgataggttgtatatgttggatatgtttcaatggtgtttgtgtgtttttacgtagttatcgatgaaatgtcgataggatatcgataggatatcgacatatataggtttctgtttataggttatcgatataatgtcgacaagattggaagtgtttgagtctgtgttgttagtgtatgtcgataggatatcattggtatgtcgataggatgtcgaccttatttggaataaaagtggaggtctataatatcgataggatatctaccttatgtcgatatcttgtcgactattgttatgtagttgatatatgttagtgtatgtcgataggatatcattggtatgtcgatcggatgtcgaccttatttggaataaaagtggaggtctataatatcgataggatatctaccttatgtcgatatcttgtcgactattgttatgtagttgacatatgtttgataatgtcgacaacatgtcgacaggatgtcgacagattgtcgacatgttgtccacaatgttattttaaactgtttctgtgataatgtcgactacatgtcgacagtatgtcgactgtttgtcgaccaaattttttgtatacttactgtttgataatgtcgacagaatatcgacatgatgtcgatgttatgtc

SEQ ID NO: 274721 - DNA, 832 bp, Cannabis indica
aactcatcttcttcagccatttctggctcaatggtttcccggaccatcagtacgggcaggtgggttgcaacattgtaacattgccttgcttccccctggtttcctctcaccgtcccgatcccagcttcctgggtagggaactttaggcacaggtgccgaatggacgtgaccgcgccgaaatctaccaaggccggtcggccgaggatcgcgttgtaagcggtcgggcagtccaccaccacaaaagtgcagtacttgaatgtgctctggggggtgtccggacacaaggtgactggaagtcttacttttcccattgggataagcgtcgttccattaaaccctgtgagttgggacccactgggtgaaaggtctcggtccgtcaggcctattgcagtgaaggcctccttgaagagtaggttcacggaacttccgttgtcaatcaagactctggccaccactttattagcgatgggggtctctatgaccaacgggtcatgatgagggaagcgcaccgtcttggcgtcttcttccgtgaatgtgatgggttgatccatcagccggggcctttgagctgggagttgagtaacctcccaaacctcattgtgtttcacggcccccgcgtaccgctttagctccttgcgagtagttcctccaatatggggacctccggagatcatggctaccctcccgttgggtctgggcggcagaccggggatgtgctgggcatcgcccgcgggagcagctggagccaatgctcctgctgcaccccccggtgttccctggggcacaccccctgtcgcctggcccggattgaggtgaggcagcctattcttga

SEQ ID NO: 274722 - DNA, 652 bp, Cannabis indica
caatacttataataacccgcctaccgcgccgatcgcgaccactgggatcaatgtcccagcaaatctcgccgcagtagttgcgagtcccgcagtcgtagcagccccggctcctgcgactggagggattgaccaaagcatgcttctgcaggctttgaaaatgctcgagcagcaacgaaagcccatatacaagttgcatggtacctcgcccttcactacagaagcgacaggctcaacttccaaaggggtttcgtctatccgaatccctcaaatataaaggtacttctaacccgatagattatcttgaaaaatttaatactataatggaagtggatcaggtaccacagctcgcaaagtgccgcattcttgcggcaacactcgaggaaaatgcccatgattggtttacccaattacctgaggcgtcgatatcgacgtgggaaaccttcgtcgacttattcctcacacatttccaggccacaatgacgtataggccaccttatacgactttggccaacatcaaacaagaacctggtgagtctttacaagactattttaaacgctttaatgcagaagtaacaaaggtcgagaaggctcccgagtcttcgcttgtttgcatgctgataacaggtatcttgccgaggaccgacttttggaa

SEQ ID NO: 274723 - DNA, 552 bp, Cannabis indica
gggtcctggttcggcgattcttgttcatgttctaattatgggtcctaggtctagctaggtctgggtttcgctttagttcttcgttctggttctggtcctactctgagtcacagatctagaccccgactactagtctgttccaggccccgttaccgaaatcttgaatcaagatttggatcactgtcacgggtctcggttctgttctggttcaggtcccaggtcccatttctgagtttgggtcgggatcgagactggggtgcggttctagatcccgacccttgttctgtttccttagtgtggttccatgtttgggtctgagttcaggttcaggttcgggtcccaagtccatgtttgggttaggatccaagtccggctgccaattaggttacggttccagatctaggtccatattcatttatgattccatgtccaagtccttgttctagtcccggtgaactttagtttttgttccaattttgggtcacagggtacaggttcggttccacttttgggtttgggacggggttcaggtccgggtgagggtttgggtcc

SEQ ID NO: 274724 - DNA, 614 bp, Cannabis indica
tagtctttaaccagttctagccatcttctctgcctcatgtttagatctttctgggtgaaaaagtacttgagacttttatgattaatatagatctcacatttttcaccataaagataatgccaccatatctttagagcaaaaaccacaacagcaagttctaaatcatgcgttgggtagcgctgctcataatccttcagttgatgagcggcataggctatgactttgtcagtttgcatcagaaaacatcccagaccctgttgggatgcatcacaataaacaacaaacttttctcgatctgatggcaaagctaacactggagctgttatcaaacgttgcttcaattcctgaaaacttgcttcacatttgtctaaccacacgaatcgttgatttttcttagttaactcggtcagtagcatagaaattttagagaatccctcgacaaaatgtcggtaataccctgctaaaccgaggaaactttaaatttatgtcactaattttggcctcgaccaattcttcactgactcgatcttgcttggatcaaccacaattccattcttcctgacaatatgccctagaaaagataccttagacaatacaacttgtgatccctaagt

SEQ ID NO: 274725 - DNA, 507 bp, Cannabis indica
ttttatgtgacccgcttttatattttgtgtcaagcgtgtcgacccgttttttgactcgtgtctaattatctcaaccctaaccctacctgtaaaaaatcgtgtcgtgtttgtgtcgacccactgtgacccattttgctattgttaaagctgggattgtagagaaaaataatagatttaagctccattagaaaacttatagggaaatttgattttttatgcttacatattcttgaaatttttcccttaaactcataatatttgatatttgtgggatatgacacattttataatattcctaaaatacccccatttacattaccccctctcttttcttctctctttcactacactgtagaccatcgggcaccatcgggcccactatcgggccaaccatcaggcccactatcgggcccaccatcgggcccactcgtgcccactcggacccgactcgggccgactattaaattactatttttttacttacatgcaatcgggcgtccactcggg

SEQ ID NO: 274726 - DNA, 559 bp, Cannabis indica
gggataatatatgaaaaaaataaattatgtattgttgttgcaccgaagtgaagatgtgtaaacagaaggattggtatgcaatacaaccgtgtgttgtagatgcattaaggaaatttcagcaattcaatcaatcatctcataataaatctgggtaataactcaactatttttgtctactttttttcaatattatattattacaaattgattcttagaaattttatgtacgcgctacatgtatattcaggtaatgttgacgaagtgttcggactggtggattaggctggagggaactacttgagacgccgccaaatctcccacccaaccgaacctacccaacctcccgtagtccacaaggccatcggcggatgagtgtaatcatatttgacacagccgtcggtgcgccaaacactggacgaaaatcgacacgcggggtggaaaactaaagtcttgagtcagataaagcatcatgtgataatagtactgatattatagtatatctcaatacaacctacatttttcagtgtaaaaaacatcctaattaatttattttgggata

SEQ ID NO: 274727 - DNA, 652 bp, Cannabis indica
gccgcttgcacgggacgtggcctagatcctccaagagacgtcgtggtgcgcctaggccacgagtctcaacacgagatgacacgggtagtcattcgtgggctagtttgcatacacgcatgggacggatgcaccatgttggaaagggacagaggtctaatgtatgcaactagtttggtggcttgtcttgagggcctgccaacatgcgtggaggcatggcgccttgaggattggtccatggacgtatgggagtccttgggcgacgagggagactgttcggacagtatcgaatggggcatgatagaggcgttggcacgttggcttggtgttggcatcttgccacacatgctaccttggtcacgagtgacaaggtgagcgtcggtgtttgaatttgtcttaccatggtgggaacctatggacagtgtgagtatcttggctagagagcctcgatgcatggatgcactcgtagatgcttgcgagcatgactcggcgggagttgttcgagagacagaagtgtgtacgaggcacacagtcgcgcgaaaaatgagaagtcaaggtgccgcacgggtgttctgctgcctaaaaaggtgagcccgtgacactctggaaagaacatagcatttagggtttcagatgaatttatacattatataca

SEQ ID NO: 274728 - DNA, 520 bp, Cannabis indica
gatcttgagttagaccaagcacgcagaactcctttctcgccggagatcaatctcctgccactgcccacaagttgaaaatgctgacgtggaaaatgtacacgaggagagaagatcccctttcccatctcaagtactttgaaatgcaaatggatttgcaaggggtacgaggagatgtatgttgcagaatctttccggccactttctcggaagccgctccgcaatggtatttcaagttggctgttggaaagtttagttcatggaaaatcttctcttcgaaattccatgcacaattctcctcctcacaccaactttaattgcattttggagacttggtcgaagttaagcaacgaccaggccagccactcctggcatacatcagcagattcatgacggaggcaaccaaagtttcacgggtaaccgaggatggaaagttatccgtgatactggggggcatcgaagtcctcggtgaactttgaaaggatataaggaagaacgggccggtaaactcaatgagtgattt

SEQ ID NO: 274729 - DNA, 579 bp, Cannabis indica
aggtttatggaaatcgtgattaatttaaaattttgctttttaattaacacttatatattacatacaaaatatttcgggatcccaattaaaacttatcgactaactacaaaagcgttgttactccgaggatcgtacgctccaggcctaaccgccccgacatgtacaatcttcattggctcgtcctcacggttcctcagctttggccttgcccttacctacacataaacatagcactgtgagtcgacagactcagtaagaaaagcataatataataaacatactaaatcccgggttataaccaagcgcccatacacctgaccataaccctaactgaatcagggacgtccatgacaacgtatgattaaccgcgaatccagcctatactcggtactctagtcgtaccgatgtggtagcagttaatccatactaactgatagcctagcatatatctgttggcatctcggtgcaactctatgtacacctcactgttgccctgatatgctaatctgacggctatataaaatttgcctaacatatatctaatatgttaatctgatggcaactgacatgtacgctaaa

SEQ ID NO: 274730 - DNA, 614 bp, Cannabis indica
tctaaaatttaaagtcaaagactttaatttataccaattataaatgagtaatctttcttggagcaccactactaatctaactctaagtttaatttgccttcagtaagcatatacaagtaggagattctaagattgaggattgatatcatttcgggatagaatgtcgggaatataattcacatgcgtcattcaattgtcttaagagtaaaatagaatgacattatatgatttataaaccattcatccaatgatatattatttaagctaattcgaaatgaacaagctaagaggaataagtaaaggataattttgatttaaaataagaatccaacgatgtcccgattagcgagaatcaaagttattcttattcttccacgaaatttacaactacaattaataacagaaaacaacatggttcaatataaattcacacacaattcaaaaattatcaagcatttagcaaataaaaaagacatgtgaaaatacaaaacacgcacatcttaaataatttctaaggtttccaacaaactgatacagtgtcccggtaagcaaatagtcaaagtatcattcattgaatagagtggtcagctcatctaaaatcgaaaccatctagc

SEQ ID NO: 274731 - DNA, 773 bp, Cannabis indica
taaaatcccaggtcgcgaccagggtcgcgactaccaaaagggtcgcgacccagaacctggtggtcgcgaccactgggctcgaggtcccgaaaataattatttttttttattttttatattttttttcacgtttttcacgattcaactggaaaaaaaataatgtcttgtactcagctaaaaatttaaaatactaaaaatactaaaacataaactaaaatgaaagaaaacacttgggtagcatcccaagagcgctgtctttatcgtcatatagccggacgctgagttgttgtttagagaggcgccagaataatgtcggacttggcttggtcaaattgacctcccaagtagagcttcaaacgctgtccattaactttgaaagttgctggaccttcaccttttaactccacaactccatagggaaacaccttgaccacgttaaatggtcctgaccaccttgacttcagcttaccaggaaacaacttcaaccttgaattgaatagtaacacttgctgcccaggttgaaactctttcctaactaagctttggtcatgccacttcttggttctctccttgtagatctttgcattctcataggcctcattacgaaactcctctagttcattcaattgcagtagtcttttctctcctgcagctttcaattccatgttgagagtcttcatggcccaaaaagctttatgttctaacgccaccggcagatgacaagcctttccaaacaccaaccgatatggtgacatgccaatcggtgtttaaaa

SEQ ID NO: 274732 - DNA, 470 bp, Cannabis indica
tactggtgccaaagccaaatgggacattgcgggtgtgcatagacttcaccaatctcaacaaagcctgcccaaaagactgcttccccttaccccagattgaccagatggtggacgccacctccgggttcaagctattgtccttcatggatgcctactccgactataaccagattaagatgcatgttgcggatcaagaatgcactagcttcaggaccgataagggggtatactgctacttagtcacgcctttcggactaaaaaaatgcttgtgcaacatatcagagaatggtgaaccggatgttcaagggccttttgggacgaaatatggaagtttacgtggacgacatgctagtcaagtctaaagcgtgcatgagccgtgcagatgatctcacaaaatgtttcgaagtggtccggagatatggaatgaaacttaacccgaagaagtgcacttttgtaaagaccgcttagtt

SEQ ID NO: 274733 - DNA, 616 bp, Cannabis indica
ggagaatggttccttttcttagagctcttagaatagtatatttgaatatgaattcttagacaaatgtttcgaccctttgcccagtgaatatgaaccactatttatagggctataagcttgggagggaagtatttcccttctgattagaattgatataagtggaaagattgcatagtaaatacagaatacactaatcgtcggattcagacagcttgccatatctctgtgatttgatcccaaagttatagggatttctttgatgactcacgatgcgaaagttgaatttgctaagtgttggtgtgctgcgcggattgctcactgcccggctgagagggcttcgccgagcgaatatatgaggtgccctattcggcgtttctcttgtgagcaggtacatagagtatattccacgtgtcaccatcgtgtgatgccacgtcagagtgcaaaattgggataacagtatgggtctgggcctatgtccaggttagggtttaggggtaagtgtaaagagtttaggatttagggtttaaggtttagggtttagagtttaagggtccaattccagtttcggctccaatttttggtcacagggtacaatttatggttcgggtgtgggtct

SEQ ID NO: 274734 - DNA, 543 bp, Cannabis indica
tgtaataaatatttttctataattttttagtttaaattttagaaatttaagtttctataataatattataattaattttgttttataagatacgaaaacaatttttttttcttacttatttttataattaagtaattcttgtattaaatgaaaattttaagagtttgtaatttttggggtggttagtcttacatcattatttgttaatctatattaattattgcattaggtaaactataaaaaagagaatttatatatataaaaaaaagtacaaaagagaggaataaaataaagtggtagtgctataaaatttggatcatcgtatattggatatttgtaatagcaacaaatgtcttttacttttttatttaacttttcttatttggtttcatagagtttgacattagtagctaacttttttctctctcataaaatatgatgtttgctgactcaatttttagccaacaacgaaatcacaaatacaatactacaaaaaagaccatctttagtgacaactttttagtcacaataaaaaaaatttgt

SEQ ID NO: 274735 - DNA, 561 bp, Cannabis indica
taacctgactaggactcggactcaaaccctgacctagacccgaactgggacccagatccggatcccaacccagacctagactcgagacccaaacctagacccgaactcagacccaaaaatggaaccagactcgagacacagaactggggccgcgacccaatcgcaccctagtctcggtctcgaacccaactcggacctggacacgagacgttaacactagactgagacacgtgaaagagatccaaatctgggactcaaaccaggatccgaacccagaccatgacccaaaccgagaccttgacccaaattcaggacccaaaactggaaattgaacaagaactgccagaccaggacccggacccaaacctagaaccaaactcggacctagccccagacccaaaccgaaacaaaaactcaggcccaaacacgttcgtatacccagaccgtaaccgagaccaggacccgaacccggagaaggacctagatctgggacccgatcccagacccagacttagacctagatagggattcggatacgaagttggagtcaaacccaaacta

SEQ ID NO: 274736 - DNA, 1316 bp, Cannabis indica
attctcatgttcaacctaaaaaagaggtttgtgctagtacttgtcataatgatcaatcatgtccttcttttcttgaaacattttccgaagaggctaatgcattacattcatatggtaaaccaaatgatagcccattttctaacacatacaatcctaattggagaaaccatcccaatttttcatggagacaaaaccaaccacaaatgaaccaaggaaaccaattcaacatgccaaatcgaatcatgcccaaccaagtcaaccttaccctccacaaagaaagccttccttagaagacactttacaacaattcatgcaatccacccaacaaatcatgcaaaatcagtctcaatccattgccaaacttgagacacaattgggtcaacttgccaatgccgtaactgagagagaaaaagggagatttcctagccaacccgtcccaaatcctaaaggccaatatgaagtaggagttccaagtcataaagaagaagccaagtctatttcaactcttaggtccggaaaacaaattgccaaacccgattacatacctcaagttgaaaaagaccaaagccaacctcaaagttccaacacaaatgacttgtcaaaagataatgatcaaattcttccttccattccaaaagctccttttccacaaagattacttccactcaaaaaaggcaaccaatatagtgacatcttagaagtgttcaaacaagtaagtatcaacatcccattcttagatgccattaaacaaattcctgcctactccaaattcttgaaagacctttgcactgttaaaagaaacactaatgttccaaaaaaggcatttttaactgaacaagttagctccataattcaatataaaagccttgtgaaatataaagatcctggttgtccaacaatttcatgcatcattggtgatcattttattaacaaagctttacttgatttaggagctagtgtgaatttattgccttattctgtttataagcaacttggtctaggagaattaaaaccaacttctataacacttcaattagctgatcgttctgtgaaaattcctagaggtattatagaagatgttttaattaaagtggataagttctattttcctgttgatttcattgttcttgatactcaacctgttgaaaatgctcatgctcaaatacccatcattttaggtagaccatttttagctacatctaatgcaattatcaactgtcgtaatggtgtattgaaattatcttttggaaacatgactgttgaattgaatgtttttaatgttgctaaatctgttgagtgtgaggaaatacatgaag

SEQ ID NO: 274737 - DNA, 704 bp, Cannabis indica
ggttttctttggtttatctccctcttcagcagtaaccaagggaggggaccatccttcagacacaaccatccagactctttcgtcaacagctttcaagaatgccctcattttggtattctagtagggataatttgctccttcaagcatgggtggccgagaggtggagcctccttcacgaaacatctccatacctaattttcctgtagaaaatcacaaccagcacagaaacacaaggggtaatacctcaagaaataacttgaggtccgttaatttttagaggaagcaaagtaaaagaaagaaaaaaaactgtgaatcaagaatacagagcaacacactaaagaacacaacacaccaagatctcgatctcaacttgagaaagatctgctctgataccaaatgaaaagactagcagtgttgaattcttaatgtatgttttaatgctttttatactgaacttaacatgcatgaaactaaccagaaaacactcaaatttacaagcttcatcggaccctgaaaactcatttcaggcgactagtgcttgggttcccttgaaccggggtaataactatcactatgaatcaaaagatacactttccagtttcaattacaattacaccaaagtaatctgaaactaattcatacagaaattacccaaatgatttgaacacactcaaatcagtcaatcatccaagagccttggactt

SEQ ID NO: 274738 - DNA, 975 bp, Cannabis indica
aagaaaaatagaaataagttcaaacaaaagcaaagaaaaacaacttagtctcggtagagtttaatcaaagaagacaattgcttggacatctcatgctggacttcttccattgctccaaggcgattatgcacattctgaagttcagacttgacttccaggagttctgctgcagcagaacttgaacttgcagcagcagaagcagcagcagcaccagcctttggccgtttttgaaacacaccatcaaagtattcagagggctggaatgtaggtccactgataggaggctcaagtgtttcatgtgattgggccacattcttctgagaagataaaaccttatagattagatttggaaacacaagtttaaaggttggctttttacctcttcggaaggagacaatctggttcagaatgtgggaggccaaatcaattgaagttccagaagtgatgcggtataagagtgaagccacatcttgagacactacggtcttgtttgaattaggaacccaattgcttaaagcaaaccgcataagagatgcatgagcaaaagtgaggtgagtgattcgaagactctcccctggtttcaactctgaacgagcacccgtgagttcagagtgcatcaactcacgatccatggacatcactgcattggagacattctcgggcaattgcaaagcttgagcaatatccttttcagaaaaagagaaccaatgacccctaacataaactcttcgataaagtctagaattctcatcaaggaaatcatcagtgagattagcataaaaatccttaacaatgtttgcaatgtatccaatgaaaccagtgagagtgttttcccattgatgaaattgaataaactttacaataccataaacacgatgagcatgcaaatcatagttcctctcactttcaaacttacggtttgcatataaattccagtcacgttcattatcacgatgaagggacattaccagaaga

SEQ ID NO: 274739 - DNA, 494 bp, Cannabis indica
tttccacttcggggtgatgcttgtctgttattaacttcgcattgttgatgtcgatttctggatccagttttttactggtgttttcaagtttttctaccatttcttcagcaaccagatttgcatagtcaattatgtcgaatttgtcgttctcatcttctattgtttctgactgttccccttcttctgtttgctgtcccgttgtgtatgattctgttgttgatgttgttttcaagcgttgttgtgttgttttcgatcattgccacattatattcatacggtgttgttgtggatatcaaatttggtgttgcagcaggtgttgtgttgttgttttgctggttgacgcatagtggatatgtggtgaaatctgtttctttgattttcaattccaagtaaaagtagaggcttcgatcgttgcatatttttatcggtggtattccttctttagcttggtactgtatttgtagtgttgtgctggtgttttcgcaccccaatga

SEQ ID NO: 274740 - DNA, 492 bp, Cannabis indica
gttgatgcatgcatggttgtggaatgttgttgctgctgtagtttagggttgttttctttgatttttctatgtttgaattgattggaattaagtaggttttatgcatgctagttacttggttcaagtttatgagtttttgttcaaaagctttgattttgaaaatatatgtggaatctgttattacttgctgtagttggttgttttcattttcagaggcttagttatgcatgattatgtaggtttgatcaggtttgaatgcatgttagagggatttagccaagcttgagttttgaactcaaagcttgaagctttaatggcaattttcgtatctgtgatttctgggttattttaatgctttgaaaatgttctttggggtatttagaacaggtctggaaggtttggtatgaattgggtttgatttgattgagttaggaatttttgaaaaattcctgcgaggaaccggaattccggatgagggtccagtaattccca

SEQ ID NO: 274741 - DNA, 581 bp, Cannabis indica
ctttcattgtccgaatggacatggaaggttctctaggaattcgccggtcctactagctactggaagaaacctatccttaacacccactggttttgaatataaaaatcgtttaagtgttaatacttgttgaacgcaaaataaggtgttcatgctcaccttaacaaagcatggatgattggtcacaatatgctaaagtactagattgatcggctacgagatcaagcacaaaaacagagacaaaaacttggttatatggaacaatggagtggacacggaagtatggaggattgatcagaatatgcaaaagtatgcactgtatgggctttcattgtcccaatagacatggaaggttctctaggaattcgccggccctactagcttgtggaagaaacctatccttaacacccactggttttggatataaaaatcgtttaggtgttggtagatattgagcgcaacataaggtgttcatgctcaccttaacaaagcatggaagattaatcacaatatgcgaaagaactaaattgagcgtctacgagatgagcataaccattgtgaaacaacttggttatatggaacaa

SEQ ID NO: 274742 - DNA, 774 bp, Cannabis indica
gagaatgaaacgctgccagtaattattttagcatggttagaagctgaagctgaaggtttgttgctagaagtgttgaagaaacataaaagagcaattgggtggactatggcagacataaaaggaattagtccaatgatttgcacacacaagatacttctagaagctggctgtagtaactccattgagcatcaatgaaggttgaatcctattatgaaggaagtggtgcgaaaagaagtaataaagtggctagactatggtattgtgtacccgatttcagatagttcatgggttagccctgatcaatgtgtgccaaagaaaggaggaatcatggtggttgctaataagaacaatgaattgattcctactagaactgtgactggttggagggtatgcatggactatcggaagctgaataatgccactaggaaggatcatttcccgctaccatttattgatcaaatgttggatcgtttggcgggtaaagagttctattcctttcttgatggctattcgggctacaatcaaatttctatagcgtcggaggaccaagagaaaacaaccttcacttgtccatatggcaccttcgcctttaggaggatgccatttgggctatgcaatgctcccgccactttccaaaggtgcatgatggcaattttttcagatatggcggagagcattcttgagattttcatggatgattttttcaatattttgggggaatccttttggcacttgttagtctaattttggagaaagtgttgaagaggtgtgaag

SEQ ID NO: 274743 - DNA, 669 bp, Cannabis indica
ttgactttttgttagctttttttaacagataatctatggagccaacaaggatggggttatttacatgtgggatcttcgtggaggaagaccagcatctgcttttcgtagccataaagaagtaatatgccaatttccttactgtaggtacttgtttaatgtttggattgaattgtagcagcatgaagaacttgagaaagatagcaacaatacaagtagtttgacgaaatcaaagaactttaattgtaaaagaatgtttcttgattgaatctttttgtgacatagaatgagtgtccttttgaggtaagtgtgttttaaaatctgccttgaatgatgaatggtgttaagtgaatctaagtcttatgtttattaattggggaaaatagtagagttaatatactttggtaactcaaaaatgcaacttcaatataaatatttcttgctatattgatatagtggtgcttttaaatttttagttgttgatcataacagacgtgatttttgtttatccagatttgtcattctcccttaacatcattaaagttatcatcagtgataatgaaaattggacttctgaaggtataatttatttcagaaagaaaatggtcttatttttattcttaatttatcacacctccattcaaaaaaaaaaaaaaaacaaaaaacgtaaaa

SEQ ID NO: 274744 - DNA, 530 bp, Cannabis indica
aaatatcataccaatagaaaaaataaaaaatataccaataaatcattggactttgccattactcacaggggatactatacacagtttccacattttaaagtatacatcaaaggatgaaaatcagattaagacaagaaacaaaaacctaaactggcattcccatttggacaaacactagaaataatagtagcaaattcaacgtggattaagtaagcatttaaataagtgagcgaactttaagcattaacaataacaagaaacctggagtgcacgagttgcaaatgttggttgttacagctgcttcagatactgatccaggaagccacacaacattcctgcactaaatcatgtaatacatagatgtaaaatttgtcccaaatgtgaacaatgaaaatgattattaagagagttgagaagtttcgatttcagttacagtgaacacatgtcgtgaaaaaacaataaactcagctccctaatgttttttcactcaaaatgtgagttccttgatagcaacaaataggggtgggcaa

SEQ ID NO: 274745 - DNA, 715 bp, Cannabis indica
aatgtgagggcgcctgccgcggagaagatcttccgggacgagatcatcgccactgccgagaagaagtaccaggaatatctctaccggaaggctcaggagaaagcttactccaaggctcaagcagcttccgggaggccacttcgcgtggggagcccggtcgagaggagaagccaggcgatcgctgggaagccccttcgcattggggactcagctgagagaagggcttctaggccaaagccttcggctcaggagccgaacactggggctcctggcgccagcacttccggctccggtaagtctcctttagcagtacattacgtcccttctgttggcgaatatgccagtcttaggcctgtagggttcgatgagcgtcttcataggtttaggatgccctcgacccggtggggagaccatatgaaggaattttatttttccaacttaggagatttcctaggtcggtcccggatgggttctggtcctccggagcccgttcccttagacccttcggcttatatttcatccagctggttccggccttcggacagctatctcggagacgatgctgccagcgttaagattcggaactttgctagggccgaattagagagtcagggtaggactagcttgattgctatatctgagtgtttgttgttttccatggatgttctaacacttgccttttttcttttgttgtagcaggtacttccatggatgc

SEQ ID NO: 274746 - DNA, 535 bp, Cannabis indica
ttgtgatctcttgttgttggtatgttcctctaactttattttaagttttcttgaaattttgatgaaaaagatgatgttttgcatgcttagttgagttgatattgttgctgtgtttttgatgttgtttctgaagtttaaagcatgattatttgagttgaattgagctgctggtagtgcatgattagtggtgttgtttaaagttatggattttctattcaaaagcttaagtttcaaagagaaattttcgaaattggtggatgtagttgttgcatgagttagagattgttttctgcagctttgttatgcatgaatatgtaattttaatcaaggtttgatgcttgtaggtgagctttagccaagtttgagtttgaaactcaaagcttggagctcacatggcatttttagtatctgtgtgttctgggctgttttagtgctttcgatttgtcctttagggtatttagaacaggtctggaagttttggtatggtttggaattgatttgagcaaagtgtgaatttttgaaagtttcctgcaag

SEQ ID NO: 274747 - DNA, 605 bp, Cannabis indica
aaatgtattcctatgatttatcagtacacagggtttaactgataggataatctacaatgtagtttacttgcaccttggataaatgttatgtccttttcagagtattgattaaagtaagcttgggttggatgtatggagtatgcatcggaagggaccgatattgaatatggataagatataataaacttactgtaatatctatctgataaatatcacctagttgatcttaaatcaaatgatctcaatcttgagatgcttaggttctagttcagttgaattatttatgttcttcaatctgttcgttaaagttgaccaatagatcttctcgtgacatatagattaaggacattgtagttcaattaagtggcaacgctaatcatagatacagaatttatagcttctatctagagatagaagtgatacgatgatttacttcgagcttggcttaatagagataaatggttgagtactcattgttgtgattatattgttcactgaaatttcatttataggtagctaagtgttttaaggataaaatacattgaagggtgtaacggtaaatgtaacaccctaactagcataggcgtattacgtgatttttttaa

SEQ ID NO: 274748 - DNA, 503 bp, Cannabis indica
tttaactaaaagcggaagcgaaactgaattactttaaaagtaggaatcaagaaagtactattcaaaacaatctgaacactaaacggtaattcaagaattaatgtgccaacataaataacgtcaactccaatataagtgcccactgtaagcattgactccctctcacttggctttctgagatcccttagcccctggctgtggttgcttattttcatattttctttatcctttgttgggcttgagttgagaaacatagtgagaagatgtatgaaaagcttgatgaatgatgcaagagtcaggaagagaaatattatgatctttcaacttgtactgaactttaatgatttttaaaatgaaacctctcactcctttgatttatcatactgaatggttgtcatagcatccataagatgtccaactgcagcgatttcactagtgttaaatagtttttttcacttctttgaaatattcattagcatttgtggtgtttggcaaaccaccaa

SEQ ID NO: 274749 - DNA, 738 bp, Cannabis indica
aggagaagaagtggtctttaatgtgttaaaggcaatgacatacccaaaggcaagtgataactgtctcttcattgatttgattgatacaattgtgagtgagaaaaagctgctagatgatcctctcgaactgagcctaactgaagatgaattgacggagcaagagggacaagatgtaatgggttatgtgaaatggcttgattcctatgggccattgaacagaaggtattatgaggagttgggagtagtgccaaaagagctgatgccatctactgaaaaacctccagagcttgagttgaaggtgcttcctagtcacttgcggtatgagtttttgggtgaagataaaaagctgccagttattgtgtcagcttctctttctgatgtggaaactgatagattgctaagagtactccgagcgcacaacaaggccattgcttggacactgggtgatgtcaagggaatcagtccttcaactgtgatgcaccgaatcttgatggaagagaatgctaagccaacaattgatgcacaacgtagactcaatccacctatgaaggaagttgtcagaaaagaagtagtcaagtggttggatgctggagtggcctatcccatctcagatagtaagtgggttagcccggtgcaagtagttccaaagaaaggtggaatgaccgtgatcaagaatgaaaagaatgagttgattcccacaagaacagtcactggttggaggatttgtatcgattatag

SEQ ID NO: 274750 - DNA, 238 bp, Cannabis indica
agagtcaaagataccatccattgaatagagttgtcaactcatctaaaatgaaaaaacattctagcaaccttttattcgatcaagatgagagtccaacgttatcccgtttaggcgagagtcaagatcattctatcttatgagcttctaccattgtttcatacttttgtaagtcttactcttagtcgccaccattagggtgatccatactaagaataaaatacttacaaataatacttat

SEQ ID NO: 274751 - DNA, 797 bp, Cannabis indica
attgtaacttttaaataactccagatatggaaagctatatcatataccatatatttgtactaaacgaaaccattacatatatgtagggatcacaaccctgacatcatactcatagcaataacatatagtaattatttcaatcatatcatgtctttaccataatgtggcgtatcatagccactccatacacaacctgggcttaactggccctacaataacctgggcacatttagccctaccattgctatggaataaggtatctctatattcaacagcattgtcgctgtatcataccttaccataataatgtcatacacaaatcagacaaatgtagggtagggtatctctacattcaacggccttatcccgtatcataccccaccataataatttcatacacgactcagaaaaatgcagggtagggtatctctacattcaacggccttaccccgtatcataccccaccatggtccctcactttacctgagacgttagcatacaacttgcagcatacaacacacaatatatgaatgcaacatacaacatatacaagtcaaaacaaccctaatcaatatatcaattcataaactcatattgtgtccataccacacattctcagtaccacatacatattcataataacaaagcataaaccatattccaatacataaagaatttaaatttatgcaaataaacacaaacaaaactatctaatttccttacctcaaatcccgctgcttaaacttgttatctcgtcactactacctataataacacatgggtcaaggccctaacat

SEQ ID NO: 274752 - DNA, 774 bp, Cannabis indica
cattttttcgtcatacttacctaatttgtatgcttcggagtcgagaactttgaccacttaatatggtccttcctagttaggtccaagtacacctgccgcactgtctttggtgtttaggaatacccttctcagggccatatctcccacgaagaatttttgagccttcacttgtttgttgaaatatcgagttacttttgttaatgggccatcaactttaagtttgcagtggctcgtttttcttcaatttcatcaagtgattctgctaggagtatgtgattggtatcttgattgtacatcaatcttctgtgggaaggtggcttgatttctacaggcagcatagcttcataaccgtacgccattgcgaatggtgtctgttcggttgccgttttatcagttgtgcgatatgaccatagaacttcaggaagctctcctggccagtttcttttggcatcttcgagtgttttcttcaatgtatccttcaaggtcttgttgactgcttcaacttgaccatttgcttgaggatggccactgcgaagaaacttttgatgataccatggttcacacaaaaatcagtgaaggattggctgtcaaactgcttgccattatctgaaactatcttgtgtggcagtccgaactggcagattatgttcttcacaataaagtcttgaactttatttgatgttatggttacgagtggttcggcttcagtccacttagtaaagtaatcaaacgctacaattgcgtactacactcctcctttacctttgggtaatt

SEQ ID NO: 274753 - DNA, 545 bp, Cannabis indica
gcattaatcgcaggattgaaactggctctcgagatgaaagtcgaatatcttcaggctttcagcgactcccaaatcgtggtatgccaggtgaatggagaatatctggcaagaggcgggagattggttaaatatttagccattgtctgcgaaataatgcagaagttcaaaaaagtagtcgtgtctcgagtaccgcgtgctcaaaattcacacgcagacgcactggcccgtttggcctcaactagagaagccgaattgctcgatgtgattccggtagacgtattggctcacccaactataaatcaagaagtgatcatggaaatagatactgttcaggagatcacctggatgactcctatcctcgcatatctggaaaaagggctcttgcctgatgacaaaatagaagcaagaaagttgcgacagcgagccgcccgttatgtaatatatgaccaaaggttgtatcgcagaattttagtcaacctctctcaaatgcattagcggagaggtgggggtatatacttcgtgagatacacgaggggatttgtggc

SEQ ID NO: 274754 - DNA, 1078 bp, Cannabis indica
cactccagaacatctgctacaacctaaagttttatttagtaaaccaaaaatcttttgcaaatcaagtgaggttctaatgcagaattgcaataaaattagtggatctttctgctaaggctgattcactaagaaaactctcaaagttcaataactttacaatgatttacgtttttaccaggagggaacatggaagcaagtatatattaagttcaaaagcataaatgaatttgagcatactataaagtttagtggctgaaagcctagaatagttagctatgtcgcacctcctttccaagttgaaccatattatcagctagacgccgaacctctttagcctgcaaatgggtatagaaaacagatgagtccgaattcaacccttaataaactcaattcctagggtaaataaatgatcaacaagttcaagtgttacaacatttcaatgacatcaaaaagaagcaataaaaagatcagttcaacttaactgagatcacttcttcccagaaaagaaaaacaaattcaaaagagactgtatttaaacaaaatcaccttgtactaatctaagaacccaaggaaaccccagattagattaagcagggtaattaaataaaaggttaccttggcaacagtggtttcaatgcgctcatgcttaaccagctgcgaaaccatggtcctaaacaatgcaaaagaagagattattagaatgcgcaaataaatgagctgcacaagaatttaaattgaaatggaaaccaaaatacctgagcatggacatccgatggcccgtaggccgacctagtttcctgaacttcgtcattctcacaaagtagaatcagaaagagagagagtggaggaggagagagaaagagaagaactgataaaccctaagctaaattcttcactctctttgggttttggaatttgggcttcaatcccgtatggccgatgggattcaagaacccaactgttgggcttcaattcatggacttgggcttaaggaaatgtaaacattactcaaaatatgggaaaattttaagagtttattatggcataaataaataaagctaagtggttatgggttttt

SEQ ID NO: 274755 - DNA, 171 bp, Cannabis indica
aataattatttatactgttattgttgaattctgaaatgcattttatgtcatttagtgattttcataattttgcatttccggtgcccggcaacatggaactcggtgtttggcttagtaaaatcacaacttagtatgttattattgtgggacggtttattagacatggggaat

SEQ ID NO: 274756 - DNA, 225 bp, Cannabis indica
aagtatacatggaattaagcttagtagggggggcccggtgatttcccatcttttcttcgctgatgacctaatcttggtgggccgggctaacctaggtgaagcaaaagcctactgggagtgccttgacaagttctgcacgtggtcgggtcagacagttaacaagcttaaaacctcaatttttttcagcaaaaataccccggtagggatgaggagaggaataaagga

SEQ ID NO: 274757 - DNA, 624 bp, Cannabis indica
aacgattcgttttctgtccatttattgatacggcgcattaaatgggtgtcagtcgagtactcaaacattttctaccgccttgatgtgcggttattccaaccgttggatatgtagaattcgaatcgattgccatcctgaccgtaccatgatggtcgatcacagctatctcacacctgttctggcctataaaagccagccttcttacttcatttggttactttcagcattttaccaaattttcttagagttttctcagagagaaaagaaacttcaaacaccatagattacttgcttgtattccttcgccgttgccagtcttccttctaccagcgatcaacaccaacccccagccttcaaacttcatgtaagttcttcgtataccttatacttgcttactgttcgtttatatagcatgttttatgatttttgggttggatgtcgaacttctaggaatgagtttgcctgaatttactgtatgatgcgttaaattcctcttttttgcgtcttgattgccccttttcactacgtttctgttgaggaatcgtccttatcttatgtaataacgtctttagggcttagagtagatcttgctttctcggctttgcccttttttccttttttttt

SEQ ID NO: 274758 - DNA, 669 bp, Cannabis indica
aaacagcaacaatgaaggcaacctatgaaagaactgtacatcctctaccaaatgaaagagaatggactatacctgagagcatggaaagaatagtgtggccaccaaaatcaagaaaaccagccgggagacctagaaagaaaagaataagatcaaaaggagaaccaaaagttgtcttgaaatgtacaaggtgcggaaaagttggccacaaccgaagaacgtgcaataacccacagctttacaaaccaccaaaacagaataacaaaagcaacgagtcaaagaagaatgaatgaacagctacaatagaaatagatattcattgacagttttataaaaactggtttctcagcattgaataaagtagaacattatataattttagtgattgacagttttatagaaactggtttctcaactttgaatgaagttgaacagaatataattttttcacaaggatacacacaacatttttacacttttgaaattttatctgtttacataatcattgttttaaagattttttctaaatatcttagattatttcaaaaaggtacattcaaaaatataaattttataaaaacaagaaaccagttattgagaaagtatactaaaaaaaccaagtgccacttaccaaataaataaaaacacatactgccattggtatcacctaca

SEQ ID NO: 274759 - DNA, 502 bp, Cannabis indica
aatacgtcatagtacctaaaatagggtttctatcttttacacttgcaaagtgaatagtttctgcgacgatacgtataccactattttgaacctctcgagcatcatctcttgactttgtatgaaaatgtataccactatgtcgaaaaaagatggcggaaaaaacttttccaggttgcacaatgttttgactacatgttcatgtaatgcatctaacttatccaattctaattccttcccgcacagcctattaaagaaaatgcaaacatgtgtcaaacactctcgaacattttttggcaagactgatctaatggcaattggaagtagatgttgcattaacgcatgacaatcatgtgatttcagacccattagtttcaattcagtctcattcaccaagtttttgatgttagacaagtaaccatcgggtactttcatatttgcaagtgatttgcaaactgtttgtttctcttttttggacaaagtgaaacaagcaggaggcaaatat

SEQ ID NO: 274760 - DNA, 800 bp, Cannabis indica
aaatagggcgtttttgctgatgagtacttcatggtgaaggatccgaacatcacccggactcggttttagtagattttgacatatcaccgccctcccctcacccttactcttagggatagggctcaaaaacttgcccggttgccaacggaagacagggatattatccagttgacctccgatgcaaatctggtgcagtacgggctctatcctgaggacttttcttctgagtccgggacggggaagaagaggaagtctgctactgctcggcctgaacgagctcataaggagaatgagctgattcaacttaagcgtgaagctaagttgaagggtggtgctcgggcaaagcagtatgctcatgagtctatgcatcctgaagattaggtcgaggctgaggctgaggcgagcaggtggctcctttgaggaggaagaacgaaactcccgaccacgcccaggcccgtggaacacggcattcgcataagggagcccatttaacctgttcggccatcccatccttatgctggaaaagggaaggccgttatggctgagataaagtcgatgtcaggtgatgatggacttctgactttctgggcgggcagtcactctgcgctttacttctttttcagcttcttggcttccatactttgtattttttgttggtttttgctaaccatgctgtttttgctcttgtacaaacatgtctcggcagatgatggacgccttaaggaagaggatgagcggaggctctagtgcttcccctctcggccaagaagtccaaggtgggagaggggtctcagagaaga

SEQ ID NO: 274761 - DNA, 487 bp, Cannabis indica
tggacagtaatattaactgtaagcggtactcttgttgtagcaatcaaatattgacaataaatcctgtcaaacaatttgtcaatctttggactgtacatattgttcacatggaaaccttataattgtcacatatttatcaccacaagtatgtgtgccctcaaaataagtataaccttcctttgggccgatcaatacttacatgagaaacacacacacaaacatctaacattcctcatgagcaatctacacaagagaggttgctttggcgacatcatgtttcaatcaactcatttagaatgagagacaaactttaaaattttagtatgccaaatttgaacaaaattgattcaaatgagttttgactttatctcaatatataataacacatcaatcccaaataaaaaataataaatacaataaatatatactaaataacattttaccaaatccttaatttccatatatatatatttaaataatgaataca

SEQ ID NO: 274762 - DNA, 507 bp, Cannabis indica
ttatcacttccaccatcatcattggaagagtcactgcctttgtcctaaattgaaaatataatttaaattagtataaaacaacttaaaaaaaactgaaaaacaaccattgaaaaactaacataccttagcataagaatcggcaaaaacagtagaaaactgtgtctgcattgaagccatctgagcaccaaaagaaacaaactgtgcagacacaaactctttcaactcaaccaaatcggaagaaatcttctgttgggaagtatgcagcaaatcgatcttcacctccaacccatcaaatttctcagaaaaagcatcaagcttgacagaaatgtcactctgagcaacagaaggctcttcgggaacaggaacactcttgtaagaattgtagtcagtgtcaaacttgaaactgctcaatttcaaagctttgaactcagcagcagtgggcctcatatttgatagttccagctgattaaaaaacaacaaaatgaaaatttcaattataaagattat

SEQ ID NO: 274763 - DNA, 504 bp, Cannabis indica
cttcttctatcactactattgctgattcaggtaaacaaaattcgtgtctcctttcctcgtcttccaaatggatcattgattctggtgctacagaccatatgacaggtaattctagcttcttttctaatcttcaaccccacgcttccacttctactgttacgttagccgatgggtcaccatctcgtgttcttgggtctggtaaaattactcctactccaatgcttcctttgtcgtccgtcttacatttacctaatctttcttttaatttgatctctgttagtcaacttactcgtgatcttaactgttgtatttctttttattctgatcattgcgtatttcaggatcttatgacgaagcaaattattggtaaaggacatgaatctggaggactctacattcttgatacaccaatacctaaatcagttgcttgttctggtgtacaatcccccttcgaggcacattgtaggttgggccacccatctcttcctctgcttaaaaagcttt

SEQ ID NO: 274764 - DNA, 441 bp, Cannabis indica
ctcctttccccctgaagctccggaagcctcagccttccgtttgtgctcagggttgccactgtcggtccccttactgacattaccaccagcaggagggtttgatgccatggcggcatcctttgcagcctgctccttcattacttgctgctcggcctcctcagcaattaaggccaagtctaccactctcttatacagagtgtcatgtgatgtggtaatcttcaagtcccgactaattgtagcatttagtcctcgaacatatttctgctttctggtaaaatctgtaggcaccagatcaccagcaaatttagataaccgatcgaattccagagtatattcggccacagacattttcccctgagtcaacttcacaaaatcttcttggtgtgaagtcctcactgcaacgttataaaacttttcttcaaaaagtttcttgaactcttc

SEQ ID NO: 274765 - DNA, 547 bp, Cannabis indica
tgtttagtattttaaataattgtgaatgtgagagcatgttaggaagcatattagattttaattaattattttaaagtgcgttgccttagaatccataagtgcggtagaaagtttgtaatggggtcgttgcctgaccagactgacttactaattggcaggtttgtcctatagtatggacacctggtgcaatatggggagtctggatagtgtggtcagggctagtaacggttggagagaatggagtttgagttctccccgcaaccaaggtgaaagcctttggatggcttctgatgggagtgatggtcgttcgtcacaggctccgtgggagttggagcaaagattcgcagaaatggaagctatgattcaacgacacgatgaggagattcagaggttgaaacaacaaaggtttcctgtactatctttacctcatatgccaggcattctcaattcggtattaccagcagagcatagtatggctgataaccaagtgggatcattgcatgagaaaatttggataaatgaacctacagtccttcagggagattca

SEQ ID NO: 274766 - DNA, 844 bp, Cannabis indica
actcgccgattaaatcaattccccatattgcaaagggccagggactcgtgatagaatggaggttactcgggggctggtgtgtgtaagtggctattcgctggcatctatcacacctttttgcaaatgcgagggcatcttgtcgcaatgttggccagtaatacccttgccgcataatttttaaggcaagggaattacctccagtatgattgccacaaattccctcgtgtacttcacgcagtatgtaaccgcagtcttctccactgatacatttgagaagtggttgactaaaacttctgcgatacaaactctggtcatatatcacataacgggctgctcgctgtcgcaatttccttgcttctattttatcatcaggtaggagccccttgtcaaggtatgcgaggataggagtcatccaggtaatctcctgaacgtcatcgatctccatgattgtttctcgatctatggttggatgagccaatacatctaccggaattacatcgagtaattcggcttctctggtggaggccagtcgggccaatgcgtctgcgtgggcattttgagtacgcggtactcgagacacaactacatgtttgaacttctgcattatttcacgaacgatggctaagtatttaaccaatcttccgcctcttgctaggtattctccactcacttggcataccacgatttgagagtcgctaaaagcttgtagatactcgactttcatctcgagggccaatttcagacctgcgattaaagcctcatactcggcttcattgttagatgcagagaattcaaaacgcaaagcagcgtgtaccttgaaattattgggactgattaacaagat

SEQ ID NO: 274767 - DNA, 684 bp, Cannabis indica
tctcaagtcccgagctccaattgtttagtccaaacttacatattactctcacctataccatcaaatggttaaataattatcatcatcgcattctacattcaaaaccgagtccaacgacatataatatgactatatttaaaatttggggttccgaagcctcacctaagcggtgcacattaacaatcggtggcggtaaaaattggtgtaccggaaatgtcgccgaaaataggagtagtatatatcaaaacgaccacctcgacgagtagatcacactcatgccaaccgtttgtcaaaacggtacacgatgtcaccggaaagtcgccggaaaggggcggagctacaaaaatgtcaccggaaaaagttgtgaaccgggaaaaatggtttagtgtaggttgttctcctcgacgagctgagtgtagtggtgaagacgattcgtcaaacggacgccggaggtgaccggaaaatccgttcaaagtttgaaaccccaaactttgacttgcgatcccgagttaacggcggcgagaggagcggcgccgcttggggggtgaggtcgccggcacttgggcttccgatttgtccggcgcgtggggtcgggcggtggccggaggtgggtcgccggagtgtggtggttatggaggtttatgggttttatttttgtattttaaagagagagaaagagagaaa

SEQ ID NO: 274768 - DNA, 530 bp, Cannabis indica
gccgtctccgagaacgctgtcagtgcagccttagtccggaagaagaaaaagtccaacatcctgtgtactacatcagcaagcgtatgataggggctgagatacggtatccattgattgaaaagttagttttttgcctcctaatggcttcaagaaagttaagaccatacttccaggctcaccccatcaaggtattaacaaaccatccgcttcggcaagtcctacagaagccggaagcgtccggaagactcctcaaatgggccatggacttaagccagttcaacatacactacataccacgcacttctataaaaggacaagcactagctgacttcataatagagtgcaacaaagcagaagctagcgcaaatgtaccaataccacaaaccccagcatggaaagtattcgtggacggagcgtcaaacaaaaacggatccagagctgggataactatgatatctcggaatggacttcgactccaggcgactctgcgttttgaattcccggcttccaacaatgaagctgaatatgaa

SEQ ID NO: 274769 - DNA, 504 bp, Cannabis indica
aaggtccaggagattgaagagcaacacgacgttcgtcctagcagtccctctgaggcggaggaagaggaggtggttgaacccccaaactacgggggatacaatgaggctggggagccagtcgatgctgatggagatgtcctggttgagggcatggactatgtcagtgaggagcttactgctgtagttcctcacagaaggcaaggtgccttgggcgctaggtgggtgagtcctccgtccagggttactgaggcgcgcctgcggactctcgaccagggtggctacctagacgaattggactgctacattcccatccacataatcatgccacaaaccctaaaaaggggatgtgtgcttggtcgggcactcatgcccagcaaggggcattgatgcctttgcaccaatactttaagaatgtggcggacttcttcggcctctgcccggcccagttcactcctaaaggcattaagtatttgtttgccatttttcgtcctttatgcctcccag

SEQ ID NO: 274770 - DNA, 694 bp, Cannabis indica
ttaagggatttagtttcatgttgtactttctgaggaccttgaggcatttgtccaggtcgtctatgtgccccatagccttcctagatttgacgagcatgtaatccacatatacttccatatttcgcccgatctggcctttaaacattttgtttaccaatctttggtatgttgctccagcattttttagaccaaagggcattactttgtaacaatatagacccatatttgttcggaaacttgcatgttcttggtctggtggatgcattttgatctgactgtaccccgaataagcatccatgaagcttactatttcatgccctgatgttgcatccatgagctgattaattcttggaagtggaaaacagtctttggggcatgctttgttgaggtctgtgaaatcaatacacactcgccatttcttgttcggcttgggtaccaataaaggatttgtgacccaagctgggtagaaagcttcaataatgaaattgttgttgcgtagcttttctacttcttcttttagggctagtgcttgctctttgtccattagccttcgcttttgttgaacaggccgaaaattgggatcaatattcagaacgtgcgaaatgatagaaggatcaattccaatcatatccgcatgtgaccaggaaaaaaacgtataggttttttgtcagacctttttcgatctttagctttc

SEQ ID NO: 274771 - DNA, 684 bp, Cannabis indica
actggagttgcacattgactccagcaatcaaatgcaaacgggcaagagatgaggacatgtctgatggtttcaggttgtagattacagacagggcaggtgactgaaatatcgacatgcttaatcactagttagacacaagttggtaatgtacatgtaacggctctccataaaaagtttttgacttttgggggaaccttcaactgccatagttgccgccagaagtctgagtttgcaaccatctcttcggtacacttttgttgttgaagcatgttataagcacttttgactgagaactcgcccgttctttccccctcccaagaccatgtatcaatggagacatttgagcttagtgggatgcctaaaataatatcagaatctcgattattgaacatatctcgtacaaggtcatagtcccaagagcggctatgcacatgaaaaagcgagctaacatgttggttcattaaaccagggtgtattgttgaaacatagggttatcctgtacatgtagccacgagtagtttagtatgcttactgtaatacccagaattaagaaaaggattagcaaaaccctaattagataattgtgagttaattgaggaattatattattatatagttcaatatatgtgaaattatatgaaatttaacatgttaaagaccccgttggtaagccaggggcatttt

SEQ ID NO: 274772 - DNA, 1345 bp, Cannabis indica
ccttcttccaaaattttatacgagaagcaaaattacccgaataatctttgccccaaaccgaaagagattccccacaccgttgtattttctcttggatacccgctagattatactcctcccaacactcctttaccacctgataacacagaggttcccgaagccagcaattttcaaagcgaaatttgcgactcccggaagctatattatgccgaaccaagtcaaggaaaatgggacaatgatcagaagaagatacctcgagattaataagtttagcccgtgggaacagttggagccatctgtctgtcaccagagcacgatctaaacggacctctatccaattatcggttccacgacttttctcccaagtgaactgatgtcccacaatgtctaaatcaattaacccacactcctgaatagtgtcccggaagccgtcaactaaccagttaggatagggatgtcccccttttttgtcctcttgagataaaacattgttcatgtcaccaattacacaccaaggaagagtgtttccacgagccaacgtccggagttgctcccaagaagccccacgcaaacttctcttagattccccatagaaccccgtaagacgccactccccaacatcagtaggccgcacctccacatccacaaaattcgtggcatagttcaacactttgacgtcttccttattcctccatagtaaagcaactcccccactcctaccacatgcatcaaccgcaaacataccttcaaacttcaacttagctcgaactcgctccaacacatccttacgacacaaagtttcacataaaaagatataatccggtttcctatgggctacagtatcatataggaattgtatcgcccgtgggttgcccatcccacgacaattccaacttaatgtactcataatgcccggtgggcctggaaaccagaacccacctcgaactcgttttttgagagtccattaacatccataccagcactatcctccgcttccatatcaacatagtcgggcccaccaaccccttcatgttggcgcctccttttggactcagtagaaggcccacggcctccttgtcctccatgtggaccaataataccaccaaggaaaagtgagggttgacctttcccacttggcacatgattgccaaacacaactgactttcctctttcattgacaatagacttggaaacattagtcttgttgccattatgactcaaattttcattaagaggaatattcccatcatccaccaaatctggaatatcatcaaccacctttgactggggattattctcaagctccaaacaaggtaacttctcagtttgcatggctggccgaaca

SEQ ID NO: 274773 - DNA, 936 bp, Cannabis indica
aaccagatcccaaacacagacatgcaactaaatagggatccgaatacgaaactggactcggaccaagacccagactagggtcgaaatgctggacctagatctgatccgagatcctgaccaagacccaaacttggacccgcactcggaacccgaacttggacctggacccgaacctagacccagatcggggtccagacctagacaaaaacccggacacagactcgtagtcgaactcaaacacccacacctagaatcataccaaaagctagacccggacccggagccaactcgaacccagaccaggatcagaaccaagcacttagacccagaaccgaatccagactcagatcgggattggaacttgggactcggacccaacctagaccaagacccaggacgcgaacccacacccgaagcctgatctggacctagactgaaataaagacccgaacccaaactaaaccaggactcgaactccgacctgaactcaaacccaaactcgaacaaagaatcgcaaatagaactagaaccgaactaggactaggaccaggaccaggacctaaccccaaacccgaaccaagatcaaaacccagacagagacctaaacccgaaacgacactaagactcgaacccgaacctagacagggacccaaactcacacaataaccaggacctagacccataatcaggatagagacctggaaacagaaccaggaccgggacctagtacccgactcagacctgaacttcaacctaggacccagctcgtgacccggcacaagaaatggaaccagactgggactcgagattgggatccggatctggacccagggcttggacaaaacccagtcccaaacccaaaagtggacgcgaacccgtaccttgtgacccaaaattggaagttgatcgggactggaactaggacttggacttgga

SEQ ID NO: 274774 - DNA, 498 bp, Cannabis indica
ggccatagggccctttatctttatatatggttttggctttacatgttgacttttgtttggcgtgagccacatagcgtgggtatttatccatagtcaaccattcaccacacacaagttgctcaaaacattgagtattgcaccgacactttaataacaatcatacaagttgcgtcattatatgaaaataacttgcaattttattgataaatgaaattggcgacaacgccttattacatcactacgtagtagtatgtgattaaaactaaagcaaatctaaaagaaaagactaaacactaataaagattctaagttgcttacaggcatacccttagcatgaattgtcgctaaaaaacaactgttattgataatatttgtggaggtgttggcctttccaatattggggtactggtataaggttcaggctagagtcataccggcctagcctatacgtgccggggggtacaacttcgtaaatttgtatggaccttcccaatttgg

SEQ ID NO: 274775 - DNA, 825 bp, Cannabis indica
tcattgttccggtcaggacggttgaatcgagtttccacttctcgaaagtacattgagcaaaaggttaatgcctcattaaccacaaaagattcagcaatagagccttccggacgggcacgattcctgacatattgcttgtacacagacattgaccgctcaatgggatacatccacctgtactgcactggtccacctagtatagcttctttagggagatgcataactacgtgaaccattatgtcgaagaaagccggtggaaaaattgtttctaacttgcacaaaatagttagaatatttgtttgcattttttctaaatccgaaacatgaagtgttcttgagcataattgtttgaaatacacacacagctcaatgattgtgtcccggatttcttttttcaagaacttacggatacctgccggtagtaaacgttgtaacaacacatgacaatcatgtgatttgagcccggaaatcttgcccgtatccaaattgacattttttttctaagtttgctgcaaaaccgtccagaaatcgtacagactttatgaagtctgcaaattcaatccgttcttgaacactaagtgtgtaaagcccgcttagttaatttggagattatcagttaattatgatcaattatgaaattatttatagctatttaaataatttattttactgttatttatggaattcagaaatgcatggttatgttattcagtagtttttcatattttgtcatttccggtgcttcggtattttggaactcggcgtttggctcaatagaaatcacaacttagtatgttagtagtttggggacgggtttttagacga

SEQ ID NO: 274776 - DNA, 288 bp, Cannabis indica
attttcctatttttcttcttttcttaatttttcctcaaatgaaaaagggattttcccaattaattcatgctgaaaaattacttggctaggtatcaaataataaggcagccacctaactctcaccaaagaaatgactaaaatgccctttaacccaatactaaggtttttctaaagctaggggtaaaattgtcaaaatccataaccccgctcaatcctgatattttatttcctcaaaaatatttcccactaagaaataaggttctaaacttacccatgtgatcaatctag

SEQ ID NO: 274777 - DNA, 602 bp, Cannabis indica
attccaaataattcgaaccaatcaacttatggtctgtgattttagacatcacgggtacaacatcagaaacaacaactgattttgaatctgatcgtatctctgccataatctcaaaagcaaacacaaaggacagagaaaaagaacaaaagaccaacaaagaatgaacacccaaacacgaagaagacaaacaaacaccgaattacaacctagaacagatgcgagtgggctgagaagaacccagtagagaatcggcaaaagaacgccgtcgaaggtgccgtcacacgcgcctccacgcgccggcacgtgggagaacgggcagtagctttgggcggcgcgtgagccccacgcgcgaggaatccggtgaccggactttggggttctgtagatcggcggctgggcaacactcttgagtgggcggtgagaattgattcgcactccagaaaagatttttgaaaaaaaaccctaaactctttttttttttttttttttttttttaatgaagcctaatttcgaatttcgaatttcagatcacaatgctctgataccatgtagaaaatattgattcgaattgtgtgttgatttcatagaataatacatattta

SEQ ID NO: 274778 - DNA, 521 bp, Cannabis indica
caccgcctcctaattttttcatgttattttaatttttgtgatacttggtgtatgattcgctgggaacgaaattctaaaaatcgtttggtaaaaagaaaattattgtgggttgaaattaaaagtgaaaattctgacatcatggaaccaaatcaagtaaatgtggaagaaaaaactcttattgatcatttttctcccatttctgctaatccaccatcatgcattatttttcctgaaacaaatgctacacattttgagctgaaaccttccataattcaacttttgccatctttttatgggttaggtaaagaggatccatacatgcatgtgaaagattttttagaaatttgctctacatttagatttcaaaatttttctgatgaatctgttaggcttagactttttccattctcattaaaagataagtctaaagcctggttaaattcactcccagcccgatctatttctacttgggatgaattagttaataaatttttgtccaaattttttccaatgtctaaaac

SEQ ID NO: 274779 - DNA, 555 bp, Cannabis indica
ggtattttattgacttattaaatctatctatttggtgattacataactgtggggatattattgttcttttatactgatgagtggtcctgattttgttactaatattttcttattaatataggagttaatccattacttttaaattagtattttgtaatataaataaaaggatcatttataagctttatcttcctacaagggtcaaagtgtgacctttgaccacccaagttatggatattacatatctgccacagcctagggctcgggtcgtgacagaaaaatggtatcagagcaccgggtttaattacctcggagtgtgtcaccaaatagtttagatttattttaaataataatagtaataagtatcttggtatttatatgtataagacatatttatattattagcatccaatcctcactaactgattagcttttggttctcagacctaagaaaatgcctccaaaaggaaggaagacaaggagaacggttggagaagacgcccctcaagctaatgtccaacctccacaagctgaattccctatgaacgcccttct

SEQ ID NO: 274780 - DNA, 653 bp, Cannabis indica
gaagagcttcctgaagtcctatggtcataccctacaactgaaaaaacagcaactggacaaaaaccattcgcaatggcatacggttatgaagctaagctgcccgtcgaacttgagccaccttcccacagaagattgacgtacgatcaaggtaccaatcacatactccttgcagaatcacttgatgaaatcgaagaaagacaagcaactgcaaacttaaagttgatggcccatcaacaaaaagtagctcggtatttcaacaaacaagtgaaggctcagaaattcttcgtgggagatatggttctgagaagggtattcctaaacaccaaagacagtacgacaggtgtacttggacctaactgggaaggaccatatcaagtggtcgaagttctcgactccggagcatacaagttaggtaagtatgacgaaaaaatgcaactcattctagtaccacggtattggaatggagaacatttaagaaaatactaccaataaagtaccaggtcggatgaccactttaagtactaaatgaacatttgcttttaagtgaatggccttctgggtggactacactcaatgatttcgataaaagaaacaaagtactcaggtcgggtgaccactttaaagtacagtttcttatgtctgcaatttgtttt

SEQ ID NO: 274781 - DNA, 824 bp, Cannabis indica
gctcgtctttcttcgatttcatcaagtgattctgccaggagtacgttattggtatcttgattgtacatcaatcttctgtgggaaggtggctcgagttctacaggtagcatagcttcatatccgtacgccatagcgaatggtgtctgtccggttgctgttttctcagttgactgcttcaggaagctcttttggccaatttcctttggcatctttgagttttttctttagtgtatccttcaagctcttgttgactgcttcaacttgaccattggcttgaggatgcgacactgcaaggaaacttttgatgatacgatggttcgcacaaaagtcagtgaaggattggctgtcgaactgcttgccattatctgaaactattttgtacggcattccgaaccggtagattatgttcttcacaataaagtcttgaactttctttgatgtaatggttgcgagtgttttggcttccatccacttagtagtgtaatcaactgctaccactgcatattgcactcctcctttacctttgggtaattgtccgatcaagtcaattccccaaatggcaaaggtccacggactctacatctgagttaactcattaggtggagctcgaggtatctttgaaaatccctggcatttgtcacacttcttaacataggcttttgaatcttcaatcagcgttggccagaagtaaccttgccttagaattttcttagataagctttgcccggcggcatgatttccacagaatccgtcgtgcacctcagataggggtcgtgcagcttcttcttgagtaacacatctgagcaatggcattcagaatcctc

SEQ ID NO: 274782 - DNA, 590 bp, Cannabis indica
ttcgaggagtaaaaggtcctccaagggtagcacccggacgggagagaagcgccagaaaagggggtacaccccccagtatactcaatacacggagctgtcggactcccaagagcgtgtgtactttgctactaggcaaaatacacactaccggagaccacaaccgttgtacaaagatagctcccggagagatccgagcaagagatgcgagtaccacaacgacatcggtcatagcaccaatgaatgtaagaatctcaaggacgagattgaaaatctaatccgattaggccacctctacgagtggatcaaaaataggttgccccacctcaatccgggccaggcgactgtgggtatgcctcagggaacaccggggggtacagcaggggcattggctccagctgctcccacgggcgacgcccagcacatccccggtctgccgccccggcctaatgggagggtagccatgatctccggaggtccccatatcggaggaactactcgcaaggagcttaagcgatacgcaggggccgcgaaacacagtgaggtttgggaagttactcaactcccagctcaaaggccccggttgatggacc

SEQ ID NO: 274783 - DNA, 651 bp, Cannabis indica
gaaaattgaattaaaaagtcttaccaacgcaattctaattaattaaaaatttcaaaatagctaatttattcctaaaaaaaaaaatgaaatttttacaccaaaaatctattttgcacattttattacatttttacccctacacgcctacatcaacttttttacttaccatctttgttttattacaaaaataccacttactcatcattcccatgcacagacacgtgtgccatccccatcacacatcaatcaaatcccactctcttccctctcttttttccttttcttttaatttgattttcgattttccttcagtttttttgttgtttggaagatcaataacctccattgataagcttaaccacccattattcatcacggttttttccctctcgttttttgttcttccaaaaaatttcaactcccactcaacccacgattcctcaactgtttttccctctcagtttcatcttgtttcaaatttatttataaaatggccatcactcgttcatcctcatctccttccccagttcagaaacaaaaatcgaaaatgggcaagaaaactttggctaacaaatcaaagggtaaacgcccgatcgttgaagagtatgattctgattttgatgctcctctgaccaagcgtgggaggccaca

SEQ ID NO: 274784 - DNA, 685 bp, Cannabis indica
gtgtactgcactccgcctttacctttaggtaactgtctgattaggtcaattccccagatggcaaagggccacggactttgcatttgtgtcagctcgttgggcggagctcttggtatctttgaaaatctctggcatttgtcgcacttcttgacataagctttcgaatcttcaatcatcgtcggccagaagtagccttgccttagaattttctttgataagctctgtccggctgcatgatttccacagaatccgtcgtgaacttcatatagaagccgtgcagcttcattttgtgtgacgcatctgagtaatggcattgagaatcctcttctgtacatgatcccgtctacgatgatgtaccgtgctgcctttcttctcattttccgagcttcatttcggttatctgggagttccccagagttgagataggctgctattggcgtcatccagttcggagatgtgtcgatcatttcgatttcttccgtgccggtgatgctaggctcttcaagaaactggatcgggaccaggttcgccttgtcacttatattgctgctcgccaatcgggctagcgcatctgctgttgtattttcttctcttggaatttgcctgaggctgtagcttttgaattgtgcgagcagatcatgtattttgctcagatatgctatcattttttctccccgagcctcgt

SEQ ID NO: 274785 - DNA, 522 bp, Cannabis indica
taactaactaagtttctcacacaatttattcatattaatttataaattactcaaattttcgttttagattagttcatgttattaggttgtttagttgattagaatgttggtaaaattaaaaagtttacataaatgtgaatattattattttttatgtgacctaacttcttatcactatgttataattaactagttatttgtgttatgtaaatattatgaatggttttagtaagatttatcctaattctaccgaaatttcggcagcataacggctgtaattggacgttcccaaaaattttacaagtgcctaaaataacaaacaaaacagataaacaatacaaaatttatccacccatccgaccgcagtacatgtattcgcagaacctacttcactacggatgaatatttaagatattcaaactcaactaacatgcattgataattaattatataataagaaaaagttagttaaagtatatacctataattgcaagcccaaatacgctacacacaaaattatgc

SEQ ID NO: 274786 - DNA, 497 bp, Cannabis indica
ctagtttgcatacgcgcatgggacggatgcaccatgttggaaagggacagaggtctaatgtatgcaactggtttggtggcttgtcttgagggcctgccaacatgcgtggaggcatggcgccttgaggattggtccatggacgtatgggagtccttgggcgacgagggagactattcggacagtatcgaatggggcatgatagaggcgttggcacgttggcttggtgttggcatctcgccacacatgctaccttggtcacgagtgacaaggtgagcgtcggtgttgggatttgtctgaccatggtgggaacctatggacagtgcgagtatcttggctagagagtctcggtacatgaatgcactcatggatgcttgcgagcatgactcggcgggagttgttcgagagacgggagtgtgcccgaggcacacggtcgcgcgaaaaatgagcccattgttactcggatggttggaaggctgaccttggcttagagaagtcaa

SEQ ID NO: 274787 - DNA, 612 bp, Cannabis indica
tctctctctctctctctccttaattatcaagaccatgataaacaggattggcttctagcaggtctgcaaactcctcgagaatctctttcacaagattgaataaaccatccctatctacttctgaagcagtcttattgttttccatatcagcaaagaccgaatcatacaaaagtgtcacagcctcattggcttcagatggtggtggtatacccatatctgaaccgtttttctcaacaaagcttctcaataattctacaatccctgagctttgcttcgcaccatttttttcttcttgtattttctctacaacataattcacttgcttctcatcagccaaaagctgcaattgatcaaaaaggagttgtcacatagttagcccaatgaattatataaaaagtttaaaacacgtatgaagtggttgaatcttgtgtagcacactcactcacccaaccaccatttttgaaattttagttaagccaaaaatcttttaggtggcgtttggttggaggtaatgaaatggaatggaatggaaaggaaataattttcatttcatttctttgtttggtttttaaagtattagaatggcattccaatggaatgctctttccacca

SEQ ID NO: 274788 - DNA, 393 bp, Cannabis indica
agtccgacatgaggactcaacatccagagctattcaggttagattttgaggatgaaatcctttcaatagggggataattgtaatgaccgctttagtaatttggattagtaaaggcaattatcactaatttctgttatttttataattatttataaatttaattaattgtgggccccattattagaaatgggcattagagttataatttctcaattccagagattttattaaactctaggtgtattatatgaactatatgtgaattatggatggcaacgtaaaatgcaatggatggctagtttgatcacatgggtaagtttagaaccttatttcttagtggaatatatattggaaaaaataaaatatcgagttaaagcgtggttatggtttttg

SEQ ID NO: 274789 - DNA, 512 bp, Cannabis indica
tgtaggatttttaccgttttaaccctacaccaacaaagccacaatatcagttatcaaggtcaaaaatgacctttcctagtctaagtaaacccttagactaaacggcaccgtattaaccccacgacatcaatcttgatgtcgtatgaatcctttgattcaaagactcagtagaagagtctagaatcccaaacactcagacacaaatcactcacacactcacaaactcgaaaccctagcagagcaagttctctctgagaacttgctcgattccaaaccctagaaacccagaaaacccagaaaaactcagatctaaacacacacacacatagcttttaggttagatgaaaagaaaatgaaagataaggagagaaaacaccagaaatttgtttcagagttcacccaaatctgggctacgtctctgtcaagctcttctcagagatagaagcttgatatccactatcacaaggtttgtttacaaacttttgggagcttcctgtcacagaaatcgatca

SEQ ID NO: 274790 - DNA, 669 bp, Cannabis indica
actaaatgtgaagtgactgttcgaacttcccagagatgccttgttatagttctagcctcccggagagtaggggcgtgtctaatgctctcctccgggaggctcactccattagatgcacttccctgcccaagacttcattgattttcgtaagtggatgtcctttcaggtccacgtgtcaccttcggccgctgccacgtattttgggaaaaatctgaggcaacaacaatatacttactttaatttttttttaataaaatattaggaaaaataataaaataaaatttaaaattataaaattaaagaattaaggagagaataaaaatattgtttagatatatataataagtgtatattttatatctcattttaacacttttacactctccaacaaattttattttattattttctttagaaaaataaaatacaaacacttatttatttttctctctctttttattttcttactattttcacttaaactatttctaagatattttctttaataatatgattctctactttcatcattttctcatatttctaacactctctcttacaaaaacttaagagcactcctccaatatatttctatcttttacatgattaataaaagtaatatattttttttggatattttgtagtttattcagagttgatttatgaatg

SEQ ID NO: 274791 - DNA, 662 bp, Cannabis indica
ctctcacacgtctatatacaataaggccttagtagggtttacctcggtttttgcttaccgagcgtaacctggttatgccttgctcgcataaccctattcttatatatatacgtaatccatacattacgttctttcaatggtttatcctggtgatatataccaggtctaacccagttatgtctcattcacataacttataacatacatgcgtgtattcaacatttactacaacatatataatcttagggtaataaccctaacttacaaacaagtaatcactcatataatacacttctatatactcagataacatttactaagaatgttaaccctaactcatgctttcactggattcttaatattctagggtaataaccctagatcgcattaaaattaaaagtctagcttaattatgccttaagcgcataattcataatctcaatatatgcatttatccaacatggcagagcatttatacatatatttcagtagggtaataaccctaggctaacagaccgttcctattagggtaataaccctaatcccagttactaaacattcatgcatactatattcacataagcgccactgcgcatactctacgtgcaaactactgtcttacctgttgtccagctataaaaggagattccgaatccccgggt

SEQ ID NO: 274792 - DNA, 783 bp, Cannabis indica
ttggattcacttgaaactagctgaaaatcccctagagcttctgaagaaacccaatccctagctggttctatggaatttcaaaaatgagagagagaattgagagaaaaaaatgaaattttcctttactttgtttttttgatgaaaatgagataacaccatttgttttaatcaaaataaaccatttaattaactttaaaaaatcatattaaaataacccacaaaagacaaaacacctcttgcttaaaagaccattttgccctttaacaccaaaattcactaaaagtcactaaggggtaatttgggaaattctaaatttccgactaatcttgacattcccaatgtctactaaatcgccccactatactaaaatactaagatgtgactcaactaaaccatacaccgcgttccaatgctgtcggacactgaacttgcaaaattatgaaatttctatatatgacacataaaatgcattctgaattcaaataaatcatcataaattaataatttagaattaataactaattttcataattaaattctaattatctgctaatttccaaatttaagttaagcggtctttacatcgcacctcgtttttgtcatttggaagttccccgtcgagtaaataattgataatatgcgtcatccatgttggagatgttgggttttgtgccctaaataaaacccattttaatataatcaaagttactaattaataaatatcaaaaatcacattttatattgcatggttcacatgatttatttcatgtttataaattctat

SEQ ID NO: 274793 - DNA, 1007 bp, Cannabis indica
taaccaattggacacctgctttgtatataaagaggtgatccaccatgaaatggcacctacgaatcctttgctacagtggactaagcagatcacaatctgactgaaccactataattctctgtcttgttgctattttccagttttgttgattgttttcccattcccagtcgagtactcgccgttctaggttgaatactcgcacttgtcggttctcttaaaattctctttcatattagtaaaacaatataatttggtgttgtgaaattcactcgacaacaacttacatcttgggaacatgatagtataattgagtgggagagctaatcatcgatatagaatatatagcttctataagtatttagtagtgaaacgataatttccttcgagcttggctcaatagagataaatgattaaggcctcattttagtaattatattagtttactgaaatatcatttataggtggttaagtgttttaaggataaaatacattgaagggtagaacgctaaatttgtccctattcgatgtagatcaactataaaggatctttgactatttggattgtaacgatggataattcataatgtatctatatcttgatacatatagagcattctatataattcatagtgtgattccgaatctatagtggcacaaggatgaattattaagttagagaatttattttgtaaattctagatctgcttattggaagtttgattatatgggcccatggtccccacattagttgagataatactgcttgcacactcagtttattggttttaattaatcaattataattctaaaattagactatgtcttatttatgactttttactaagaaagggctttattgtgaagaaaaaagcttttggagtttatttgttaattaaaaaacttggtaaagtctaattaataaataagataaatggcaattttatttgataattaattataagtattaaataaatatttttgacatttataggattaaaattgaaaaa

SEQ ID NO: 274794 - DNA, 669 bp, Cannabis indica
acttttttaaaatatagtgtaattactaaactgtgtaattatcatcctagtaattactctatctagtaattacacagttacttctaaacacacccttagtatttttcccctaaacacataacatgtaatatttgtgggatatgaaatattttacaatattcctaaaatacccacatttacattatcccctatcccctctcttcttgtctctttcttcatacccatcggacccaaaaaaatttacccagcacatgcatcggaccccaatcggggtccccattggacccgtcggacccaaaagttttttcaacacatgaatcgaacccaaaaataggatttttgcaacacatgcatcggaccccattaggccatcatcttacccaaactgcgattttcccaaatcgcaaatctgaacataaatcgaaccctaaatctaacaaaactcacggtgcacacataaacacatacattatacattataaccctaaaatcaatacctaataatactccaaaacatatatcacacacacaaaaaaaataatgacaaaaaaaagagggggtcaaatcttaccctggacatttcagttttgatggggctgacgatgtaggcgttaggcggtgagaagtgctcggttttgatttgggaggggtcggcgttgtaggcaatgg

SEQ ID NO: 274795 - DNA, 692 bp, Cannabis indica
cagagacggccagatatagaaataggtcctctccgagaacgggttttgataggatcggaggtttggccatatgttctttcaactttttgaatgcctcctcgcactcgtctgaccattcaaacttttggcacttcttcaatatgttgaagaaggggatgcacttatctgtagaccgggagataaaacggctcagggcagcaacctttccggttaggctctgcacgtctttatgcttcttgggggacggcatgctcaggagagcttggattttttctgggtttgcctcaatccccctctggctgacgatgaagcccaggaactttcctgatttgaccccaaaggtgcatttctttgggttgagcttcatgccatatctccagactacttcaaaacactcttctaagtcgtccgcatggctattgcatgctttagacttgacgagcatatcgtccacgtatacctccatgtttcaccccaagaggcctttgaacatccggttgaccattctttggtaggttgctccggcgttcttcagtccgaaaggcatgaccaggtaacagtatactcccttatcggtcctgaagctagtgtactcttggtccgccgtgtgcatctttatttgattatacccgacgtaagtttgaatccagaagtggcatctaccatctagtcgatcctgggcagcgggaagc

SEQ ID NO: 274796 - DNA, 660 bp, Cannabis indica
cccgttcccattcgcattccaattcccaatcccttatccatttccattctcattcccattctcattctctcgcccattcccattcctattcccactgctattcacatactcattcccattcccaatctcattcccatttcctggcacattcccattccccggctcattgccattcccattccctggcccattcccattccaattccctgacccatgcccattcctattctcatcccattcctagtccgttcccaatcccattccccaaaccttaaaaccccaaacgccaaaatcacaaaacccgaatggcatgtaaactaataagtaatgggaatcaatggtatggtaatgattcccttacatttgtttacttacatttttaaaattaggaaagggagatcttgattaaataagggagaaaagaaagggaggactttccccaccaattttgtaaggaatgccgttaatggcatgtttactatacagtattcagaattagaataaattaatagagaaatgtaccggaataaatagaaaataatcacaatcaatctttgtaatatgttgtttactgaatttatatgaaaatataatagttgtgatttatcttgtttactttattaggaaacgtaatcataatccttaaattgactaaattgc

SEQ ID NO: 274797 - DNA, 706 bp, Cannabis indica
tgaaatttccccaaccggtagaccggttgtccaaccggaattccggttctgggaattttcaaaacccatccggaattccggatgcacaaccggaattccggttcctcgcaggcagaaattcaaaaattcataactcaaccaaaacaaatccaattaacctcaaaccttccagacctgttctatatatcccctagaacatttctaaagcaacaaaaccgagcttcacacacagaaactcaattcaccattaaaggtcaaagattgagttctaaactcaaaacttgactaaacaacataacaagcatcaaacctagattagaactacataagcatgcataaaaacactgcagaaaacaaacttaaactcatgcaataatcacagccaccaaattctcaattttctctttgaaaactaaacttttgcatagaaaaaccataactttactcaacctaactatcatgcatcacaaacagctcaaatcaactcaaataaacaagcttaaatctctgaaaacatcaacaacatcccagcaacaacaatgacctaaaactaagcatgcaacacatcattttcatcaaaattcatcaagaaaacttaaaagagaagctagaggaaacataccaacaacaagaggtcaaaatcaatgcaaaaaccagcttgaaatccaagaggaaatcctcttttcttgctgctcaagtggccgaa

SEQ ID NO: 274798 - DNA, 649 bp, Cannabis indica
atttcagtaaactaatataatcactaaaataagagctctttcatttatctctattaagccaagctcgaaggaaatcatcgtttcacttttatgtccagatagaagctataaattcaatatatatgtttagcgcgcctactcaattatactatcatgttcccaagttgtacgtgtgacccaaaccaaatggtaggctttgactaataacttaaagatcacaaataacactcttgagatcgaacctaaccatgtcaggattaagatcttttgatctaagatcaaccagtgatattaacttagaaatatacaacgataagattataatatctttaccaagatcaatatcggtcctagtccaatgtatactccatacatccgatactagcatactttgccaatgtcctggaaagaacataacacttatccaaggcgtaagtaagctttatcgatgactatcacattagtgtaaatctagtgcactgatgaatcatgggacattatcttttgaagtatataatcacaattacctttcactgtgttgacatcactgtaattgtgaataactatatgttccggacttaacaaaaactgtacacattaaaccataaacataaaagctacatgtaaatataaatgacgtctaatcttc

SEQ ID NO: 274799 - DNA, 521 bp, Cannabis indica
ttggtatcaagtataaattatctgttaaacattcacatagattatgaactatccaaacatacattaaacatcattgttcataatcattaaaccaaaatctatactttatttagagcatcacaaatgtaaaacacatacctcccatattgctattctccattgttgctaagacaccaaaaccttcaatgtgaaaaacaccaaattggtagaagagaacctatgagagcaaacccttttcttttcaccacacaccctctcttaactcatactaaacacatattaccctttttatatacaacacttaaccctaaggggttatattaggcttattggggtaatgagtataattaatggtggactataatttaatgggccaattatagttttagggtgctcccatgtgcctctaatacatttattaattattaaccatcccattatggtagtgaataaatattgggcacatagttaatgattgtgattatggtattatattagtccacaaataaataattctaaca

SEQ ID NO: 274800 - DNA, 603 bp, Cannabis indica
gacttggcagatttgggggtagaagggtttgcagcaattagctcctcagaaaggtcaatgacctctccagaaggtctcttctacgaggacccctcaccgcccttagagttcttggccggaggagaggcgctagagcttccgcccattctcttccttagagcatcgagcatctgccaagacatgtctacacagaaccaaaacagtgtggttagaaagaagccatcagaaaacacaaggcatgaaagtcaagaagctcaaagaagaagtaaaatgcaaggtgaccacccgcacagagaatcagaagtccatcatcacctgacatcgactttatctcagacatgacaaccttcccttttccaacaaaggggggagatggccgaacaggcgaaatgcgctcccttatgcgaattgcatgttcaacaggcctgggcgtggccaggagtttcttcttcctcttcaatggggtcacctgctcagccttagcctcatcctcaggatccaaaggctcctgagcatactgcttggccttgatgcctcccttcaacttagcctcttgcttaagttgaatgagctcatcctgcttatgagctcgttcaggtcggc

SEQ ID NO: 274801 - DNA, 379 bp, Cannabis indica
aatcttctctttgccaattcccatgtaattgaagtcaaatttatgtaaaatcaacttgcgaaggaaaaaaatctaattaaaatcgcaaataataaaggaaaaataaatgtaaatatcttatctgaagaaacattacctaaaggaggggcaattaggtgtgaatactttttgtagttcaaaagataaaaaaaaaaaatatgaataaagataaaaaattatacatactttttatattatttttaattatatagttgagactgattatatatttctttttttttttttttgagagaaagggagcccactagacagaaagaagctcgataagattacaggggtcatctccaatccagatggctacttcatctaaccctagagc

SEQ ID NO: 274802 - DNA, 484 bp, Cannabis indica
tgagattattataagtaatacactactaaataaaagtgactcatggactaaggcttgttgattaatgtgcaaatttgtatattttaagcctctagttgtatacataagattaatttaattaaatattttcatggttttaattgtaaaattattttaattgaaatatttaatttattttgattttgtgttaattctcaaattttgagcaaataatgataataatatatatgtgaatgaaaatgtaagaacccaaatgagtccaagcccaagttcccagcccaacatatcaacgttaatcaccatgggctccatttatctatcaatacacttctcctcaatctatctattaatggccctttgtagttgggttgatattcattaattgaggggctttgtccacctggtccatgttgggttttatgccctaaataaaactccatttcaatgtaatccattttatctaacatcaataaagaaacaaaag

SEQ ID NO: 274803 - DNA, 745 bp, Cannabis indica
cagctccaaagaagagttgttgttagcactagctagttgctcactaacctcaggaaccaaccggttcatgtagtaggcgagcatcttcttgcctttcttggcctctggaagcactggcaaaggtggagtaggagcccgcatatgctctgtaacaccttaactagcataggcgtgttaacgtgattttaaacatactgtgcagctcgttgctaatcaacgaggttaataaaaatcgtgattaattaaaatttgattatttaattaataacttataatattacatacaaaatatttcgggatcccgtttacaaacactttacaaaagtttgctattcagttacaaaatatttgtcgcccagtgactaacaacaaaagccctgatgtcccgaggatcgtacgctccaggtctaatcgccccgacatgtacaatcttcatatgctcgtcctcacggttcctcaacttaagccttgcccttacctacacataaacatagcactgtgagtcaacagactcagtaagaaaagcataaatcatataacatacgtatatcctggattatgatcagacgcccataccacagatcataaccctaatccccgtgtcccacacggtatcgagtctagaacgttcgtacgacggtactattgaccataatatcagcctatactctgtacgctagtcatactctagccgtaccgatgtgatactgtatcagccaatattcggtacgctagtcatactcta

SEQ ID NO: 274804 - DNA, 774 bp, Cannabis indica
tccgaaggccggaaccagctggatgtaatataagctgaagggcctaagggaacgggctccggaggaccagaacccatccgggaccgacctaggaaatctcctaagttggaaaaataaaactccttcaaatggtctccccaccgggtcgagggcatcctaaacctataaaggcgctcgtcgaaccctacgggtctaagactggcgtactcgccaacagaagggacataatgaacttctaaaggagacttacaaccggagccggaagtgctggcaccaggaaccccagtgttcggctcctgagccgaaggttgtggcctgggagcccttctctccgctgagtccctaatgtgaaggggcttcccggcgattgcctggcttcttctctcgaccgggctccccacgcgaagtgacctcccagaagctgcctgggccttagagtatgccttctcttgagccttccggtagagatattcctggtacttcttctcggcagtggcgatgatctcatcccggaaggtcttctccacgaccggcgacctcacgttgggacagataacccgggaaaggttagagtcctccacagattggtgcggaaggatgagttttgccttcctgcagttctctgtagtgaccaggcccccgacgtcaagatcagcccggtcataagaggcaaaggcctgggctccccgaagaaagacctgagtaggtgcagtccgttcgtaagggggaatcctaacccactcaatgaggagctccggatggtccactgcccgg

SEQ ID NO: 274805 - DNA, 525 bp, Cannabis indica
tttgttatgctttataaagtagtctggttatgtagaaaagtaacctaatgtatgtatgttgacattacattccactttataaagtaacctgatacaatcaaaattgaatttgtgtagaaataacttaatatgagttgttaccttgtaaaattgaatttggttgagaatgttggctttatgaagcataataaaaatgctaaatataattatctacttactttttaaagtaaacgagttaagttgtaaataatagaagtaacttgctaccttgcaaattgaattttgttgagttatgatagagttttatagaagaaagtaatctatttatttacaatataaatcatgatatgtgttttagtaatatacctagttgagtaacatgttaattttgaaaaataacgtagttgttaaattttagactttatttttatttcagaaagtaacctgatacttttactttgattttggttatactttattaagttttaattgtcatttttgtcataaagtaacatagttgttaaa

SEQ ID NO: 274806 - DNA, 536 bp, Cannabis indica
atgatgttcgcagatcttattggaaagacaatggaggtatatgttgacgatatgctcgtaaaatcgcaacatgcggaggatcatattgcccacttacaggccatgttcgacatattgcggcgatacaagatgcgtctaaatccgttgaaatgcgtcttcggggtaggttctggaaaattccttggttttatggtaaatcagcgaggaatagaagccaatcctgcgaagatcagggcattggtagaaatgccatcaccgactaagccaaaggaggttcaaagcctcacgggtaaagtcgcggctttaaaccgcttcatatccagatcctctgacaagtgtaaagagtttttccagactttgaaaggcaacaaaaggtttcaatggaacgaaaaatgcgagcaggctttccaagctttaaaaacgcatttggggcaacctccaatcttatcaaaaccgttgtccggagaaattttgtctatctatttggccgtctccgaatatgcgattagttcagtgctaatccgcgtggaccaagg

SEQ ID NO: 274807 - DNA, 507 bp, Cannabis indica
agattattcataccagtagattgtactctttcaacgtatatttacaattcaacgtctatatgagcaactcattacaaaattaagagtatttatagctatacataatcaacaatctcagcatttcctaaaacaccttaatcatgcattatcataaatattcattttcaatgcttcataaagcaccctagttcacacattagcatatccacacaatttcagtgcttcataaagcactccaatcatacatcattacaacctgttttcttacatccctaagccacagagactgtaagaaaaatgaccaatttcataagcaatttaacatttattcaatcctaccttaacaaaaatgtattcaattacaactcatcacataataacactcttgatcgttccacaacttcataaccacataatttaggtacttcataaagtacccctaccactcgttaaccacgagctgtatatgtcactatcgttgtccgatacaacaaacgataagtaaga

SEQ ID NO: 274808 - DNA, 558 bp, Cannabis indica
aggcggcgtgcagtatgcagtggccgcagttgattacttcaccaagtggacagaagccgaaccattagcaaccattacgtccaaaaaagtgcaagacttcattgtgaagaacataatctgccagttcggattgccgtacaaaatagttttggacaatggcaaacagtttgacagccagtcctttactgatttctgtgtgaaccatggcattatcaaaagtttctctgcagtggcacatccccaagcaaatggtcaagttgaagcagtcaacaagacattgaaggatacactaaagaaaagacttgaggatgctaaaggaaactggccagaagaacttcctgaagttctatggtcgtattgaacaattgagaaaacggcaaccggacagactccattcgccatggcatatggatatgaagttatgcttcccgtagaactcgaaccaccatcccacagaagattgatatatagccaagaggccaatcatgtactccttgctgaatcacttgataaaattgaagaaaagcgaaccacaacaaacttaaaactgatggccca

SEQ ID NO: 274809 - DNA, 713 bp, Cannabis indica
atagacctaatccaccttttggagataactaactctccgccaggtaatagggttccaaaccctgattcatatctatcatgcggtctatccaatttactaaagattctggctgccacataagaatgtgtggccccagagtcaaacaatacagagtaaaaagagttgttgaccgagagctgacctgtcaccactgaagggctggcttctgcatcagcctgagtaatggcgaacaccctagctggagtgggtctcgccggagcctttggtgcttctgttctaagttgagggcaatccctcttgtagtgtcctggcatgccacactagaagcacccctgtcctctacactcacccagatggtgccttttacaactggggcactctgggtaagtataacgggtctcagaactaccctgacgactgcctcgaccctggttcccccggaacctcttgttctgacctgagccaccggttgcagtggattctttccttatctggtccatggccgaaccactacctcccctgctaaagcctgatgcaggaggggtaggagccccgccaaccactggagtcctagctgactcagtcatacacccaactgcgccctcagctcgcagtgctttttccaccatttcagcataggtggttttgtcgtctgtagtaatcctcaggtcatgttgaatctttgcacttagcccatctaggtatttttcctt

SEQ ID NO: 274810 - DNA, 428 bp, Cannabis indica
aattctaaaattagactatgtcgagtttataaattttcactaagcaatggcttaattgtgaagaaaaaagattctagtgtttgtttattaattaagagactttataaagtctaattaataaatatattaaatggaaattttatttgataattagttttaattattaaataaatagttttagcatttaagttgttagaattggaaaaatgacattttttgagaaaataaggaaaattattaaaagtggcaaaattctaaatgggggcccacatatccatggcaggccacttgtagggtatttttcatttaatttttccattattttgatgcctaataaatcctaacgtaaacctaggtggttgcctatatatagatagtgatggctcacattaaaagatgataaaaattcaccttcagtaaaattttcc

SEQ ID NO: 274811 - DNA, 615 bp, Cannabis indica
acattacgtcttccattatttcattttcctcgattagtgattccatgtacttcattacaaacattccacaatcgtgaccattttgttgttgtgggtagtccttgcttgaagaaagaattacaaattccttgaaattcaggtctcctggcttgacaggggcaaacaattggtccaaagtctggagctgcaaaaaaattaaaacaatcacagttgagattattgcaattacactaataaaacaacaaaccatgtacacacgtgcataccatctctacgcaggtgctcaaacgtgacctcttatgcattgtagaagacaacgagtccctaatttccactgttgtattatccatgctcacattcgccgcaaaccagtgcggagcactctcggtatccagtaggggtaccaccatctgcgacaaagtaaagcaaacaacgtcatctgaaaattgaactacacacatttgattcaacacaaaagtttcaagaaaatgcaaattacagtgtgacataaactcaaatctgcatcgtaataaagagtggaccactcttgctgcttctccatcctctccacagtcatcgttcttccaagtacttgctctgcacaataagcacaca

SEQ ID NO: 274812 - DNA, 648 bp, Cannabis indica
tttggtggacagtaatagcctacagaaggcccgagataaatgacgtcggactggttttggataatgaaaagtgtgttcggtatccagattacgggcaaatattttactttcttataaacaccttatcttagttattaatctaacacggataacaaacaacttcgttaacaatttcaagttcatcccttaagatttccaatttgaaataaattgttattttggtatcaattcgttcattatagagtacttttaacggttcatataaagaccttattttacttattaatctaactgaaggtccactcaaattttttatttcaataaaaaaaattatgatgatgttccgatgactgtaactgataaaagtaattgttataggttgctcgaatcatattaaaacctaagaaaaatctgtagaaaaaaaaatcttcaaataaaaaacattgccatgaaaggttatttcgctataatgtacaacccattattggggataggttttaatgttttatggattcgcacaatttaaaatttaaaaaaaaaacaaattattgtgcaagatggatcagacaaattaggcttgatctctcgaaagaagataaataaatgcgctcagtataatcagcttcgatcatctggggaaatagtcat

SEQ ID NO: 274813 - DNA, 876 bp, Cannabis indica
acagttcctaatattagatgttcattcagctttaacgtaatgcttggccggccggccttatatgacttaaaggttgtcacgtcaatatttcactcgtgcctgaagttcccaacaaagaatggggtagggtgtctgagaggaaaccagcagtctgctcgggaatgttataaccttgcagtggccaaggctaagaaggaagtatcctccagtcagagcacagacaagggaaaaagcattgccaagtagggaacttcccaaggcagggatgaagatgtggatccttgacttggggacccaagcagcaatgttggacatgtagaaaaattagaagcgatcaagatcgatccagatatcccgaccaaaaagctaaagatcggaaaaggtttgttgctcgaagtaaaatcagaattgataaaatttctaagagcaaacctaaaagtttttgcctggcaacatgcggatatggtcaaaatcgatccttctatcatttcacatgttctgaatatcgatcccaacttccgacttgttcaacaaaagcgaaggctgttggacaaagaacgagtagtagccctaaaggatgaagttgaaaagctgcgcaacaacaacttcataattgaagctttctacccggcttgggtcgcgaatcccgtactagtgcccaagccgaacaagaaatggcaagtttgtattgatttcacagacctcaacaaggcatgccctaaagactgttttccacttccaaggatcgatcagctcatagatgcaatagcagggcacgaaatattaagcttcatggacgcttactcaggctacaatcaaatcaaaatgcatccaccagaccagacatacaagtttccgaacagatatgggtctcta

SEQ ID NO: 274814 - DNA, 845 bp, Cannabis indica
ccaagcttactagccctataaaaagtgatgcatattcactgggcaagagatcggccgaaaaacagttgagctaagactataccctatatatattatctaagaactatatattcagagatattgttgtaagagctataagaaaaggaatcattctccttgatcttaagtcaatacaagtaacgaggattaggctattaccgaactgctcggggctgaacctctataaaattcctgtgtctttttattgctttatcatatatttgttattataaatcatttatcgcttacaaaatagactcgttgtcgttggctaaaagcgaggtcaacattttggtgctttcattgagagcttcctgaagtcctatggtcataccgtacaattgaaaaaacggcaaccggacaaacaccattcgcaatggcgtacggttatgaagctatgctgcccgtcgaactcgagccaccttcccacagaagattgatgtacgatcaaggtaccaatcacatactccttgcagaatcacttgatgactgcaatttgttttatttcatgttaagctaaaagatcagattagatcaaatagctctgatgtaagttactacggtaacaaatacacttttcgatcaataaatgaataaagatagttatttcaaaattcaattgagtcgaaattatcagcatgtttataatttaccatacaatgcgtacaaaaggtttggtcaaaccgaaaacaccgaacatataattaatatatttgtaaaagagaagtgaccaagagtcatacgtttgctcggtcacttgggggcacctatacctgtacaaatcatctggtaaaaataaaacaatc

SEQ ID NO: 274815 - DNA, 742 bp, Cannabis indica
ttcttgatttttgatgaaaagaaatagtttgcatgcttagtttgagttgttcttgctgctgtgttttgatgttgatttcagaggtttatttatgatttaaaatgttgattcaagcatgatagggatggtgattacttgattttattaagatatgaaattttggtctgggtcagggtctctgtccgaatcaaggtctcgagtttcaatctcggtctagggcttgtttgggtttgagtccaggttcgtgtccagatccctatctaggtccgagtctgggtttgggatcgggtcccaggtttaggtcctggtctaggttctggtctaggtctcggtcccgttctgggtacacgaatgtgtttgggcccgagttttcgtctcggtgtgggtctggggctaggtttgagttgtgttctaggtttgggtccgggtcctggtcttgcagttctttttcagtttctagtttcgggtcccgaattttggtcagggtctggctttgggtcctgcttctggttcagttcaagtttcaagtcacagggtacgagtttgggtcgagtttgggtctgagtctgggttcgagtcttgatttgggttcgggggaggttcaggtccgtatttcggtctcggttagggtctgaggttgggtacggtattcggttctgatctgggtcgaagccccgatccctttgaaagatcccagtccggttccagttcaagtttcagttttggttcccgagtgtgggtc

SEQ ID NO: 274816 - DNA, 450 bp, Cannabis indica
agatcctggtaaaatattatccaacattttaggggtttccattgctcgtatatccctttgacattaagtagttaatagcctactttacgcacgagcaatttatgttctgccatgcattcgatttgcgagcagtcattgattccgcctcgcaataatcagttataatctatttcaaacaaacttgaatatattttcaatgaccttgtcactttgtatatatatttttattgcttacatgaatagttagatcctctacccatgtgttaggtttaagtactttttttcaagacaccttgatgtctcgtttaatactttcctttagtgcgagccgttagtatttagcttcacatgcgggttatgagttatatctcatttataactttttgattttccttttccatcagttaggtttttaatcaaaaactataattgtttgatccctttctcatc

SEQ ID NO: 274817 - DNA, 647 bp, Cannabis indica
atgaaaatttttaggtttcctacactgaaccaaaattccggttcagtatggcttgtaggaaccggaattccggttggtgttctgggttcctcccagaaccagaattctggttgtagaaccggtctactggttggggaaaaattgggaaccctagttcttcccatttttatgttgtttagggtattgccatgctttttatcaatagggaaacttttagtttctagtttaagtccacgggaagtgatttagcgtgtcacttatcaagtgttgtgattgttatggtttaggagtctgtaaatcgccgtgcagttcgttccactcaagttgactggcacacttgaattcggaatcgaggtaagattagtataacagtatgcatatgtatttacatgttttagcgtgcatgttaggaagcctgttagattacattagatatgtatgttggctttgtaccattcgacagtatcacatcggtacggctagagtatgactagcgtaccgagtataggctgatattatggttgatggtactgtactgtttggctatatctcatcggtaaggctagagtatgactagcagctagagtatgactagtgtatcgagaataggctgatactgtaacacatcggtaaggctagagtatgac

SEQ ID NO: 274818 - DNA, 637 bp, Cannabis indica
gatggcttgaattatatgcatcagacatcttaaatcctttagtgatttgcatgtaaatatcactatatagtgatctatacaaataagatgtgactacatccattaatcgcatatcaagtttttcactcacagccaggctaaccaaatatctaaatattattgcatccaccacaggagaatatgtctcttcataatcaatacatggtctttgagaaaatttttgtgctacaagtcttgctttgtatctcacaactttatttttctcatttttttaacatacaaataccatttgtatccaataggtttcacaccttcaggtgtttggactataggtctaaatactttgcgtttagcaagtgaattcaattctacttgaaatgtttctttctattttgaccaatcttttctattttgacattctctaacagatttaggttcaagatcttcgttttcatttataatttctagtgctacattataagcaaaaatattatcaacaattacttcgagtcggtcccattcttttcctgtattgacttaatttattgagttctacataattttttaaaacttttaggtacttaaatctcttcaagagaattttttatgtcaacatcttcctcaaaatttttagcct

SEQ ID NO: 274819 - DNA, 532 bp, Cannabis indica
acgaatataaactacaaacatctaaaatcgaattgttacctaaaaaagaacagcaaacaactatacctaataatattcccaaaacacatcatacataaacagattaaactattaaaaaactaggagaaaactaaaacccactaattagagacactaaaacgaaacagatgtttcaaaatatctaaaaaaactagaaacacaaacagaacaaaaacacaacaaaaattaaacgaaagaaataagaaacaaactaaaatgcgaaacccacaaaagaacaaaataaaattgatcaaacaaaattaaagccctaaaaatccaaagaaaaacaaacgaaattttaaaatgaaaaccctaaaatgtcacaaaccagaaaaaaccaaaacgattaaatggaactacaagaaaatgttcaaaatgggagaaacaaacctcgtttcgaacaggagcaccagcattatcatcccagaaacagcttcagccatttttcttgcacaccgacctttgttatcttcttaggaggagctctcccacg

SEQ ID NO: 274820 - DNA, 355 bp, Cannabis indica
tttaaaaataagatagattattacgcaaaaaagatagatactaactatttttaaattcaaattacactaatatcttgaattaaattaatgataattagaattgaattaggaatagtaatagtataaatacagaactacacaaaaaatcgaaaattaattccatgaaaaagcaagagaaaacgaagaaaaacgaaaaaattgcaagctgtacggacagtatgccaagccaagcatactgtccatgggcgcgctggtgggtgcttgggcgtgcaacctcggcggaatgcaggatttgcatgaaatccgcgcgcgcacgagggtgctgctcaaccccgattttttcgaaacttcaaaa

SEQ ID NO: 274821 - DNA, 547 bp, Cannabis indica
tcatgctttttatttgtccgttagtcctaattttaactgagccgtttaagtgcaaataattgccacgtgtcaaaatattattggtccagaatattatttaatttttaaaaataaaaataaattaatcaattatttaaaaatatttttttcttttttttttctttttctttcttatcttcttggtcttcttcgtttttgttttcttcttcttctcactgccataacacaatcaaccaccaaccggcccccaaccccaaacccagcacaaccactgtcttcttcttcttctcagaaataagtgaagctcgctgagttttaaatcgtcagagatatggctgacggtgagatctgccattgctctggttcttcttcaataaagagctgacgggaatcgaggtttttgcttccacattttgccaaaccatggagacgatgagaaaagaaagtcacggtcgccgccaccaccgttgccgacctttttgggtttgttgtgtttggaaaaatttgtagggttttgggtaaggaatcttcttggttgttgttggtg

SEQ ID NO: 274822 - DNA, 530 bp, Cannabis indica
tctaattaatctcttaattaaactaacatgtaatcagcattaagcaataatctaagtgttacataggtcatgcaaatactctcgtttcacagagaacctcgattatccaattttagcattcttaattctcacttttcggattttgaattgagatcatagaacatgtagaaggtgatcaagcttacacatggaattaaacacaaatatagataatttcacaaatcaagattgaaggaatggcaattattcattaactaggcaaaacttaaaacaacattcatcatcctccctaaataggagtttagttcataacatccataatcaaatccataattaaaattgaaacagaaaatagcatagaaaaattaaagagaagagaaagaactagttgaagcaattgatctcggtcgccacaagccgctcttctagcatcctcctttgtttctagggctccaaatctgaatgaaccctaattttcacgaactccttctatttaaaccaagtctcatctttaaaattcgtgaaattac

SEQ ID NO: 274823 - DNA, 734 bp, Cannabis indica
aataataataataaaaggtaaatcttaagcagaaagacaaagatggtaaaggaagcaaaagagaacgacacctgtcccctaatagttgtcaatgcccggatcaggtgttttgcatctttcagatctctccaatcaatttcggacaccaatttatttaacatccaaactctaatatctcaacttttgtttgtattattgttaacaaggttattagcctactactagttcagtattaactaattaattttttttattgaaggagtattaattcactaattaatatattatatattttcccttactcctaattattgggaggaaattaggagagtcagcagcaagagcaagcaacatacgtcaaagtattattaaactactactactcaattagtttaatagtgacaattaaaataagctaattaggatttttgacccgtgaacttttaaggttgttgaaaatgctctctgaactattgagattgttggatttaaggacttttgtctaatttcactcaattttactatttcagtgattgcttatgtactaaaccatgctcctcagattttgatatctaccaaatcatgccccttgaactttgatatgtactaaattatagcccctgaacttttatctatgttagacttttttctaatttagtccttaaatccaacaatctcaatagtgcagagagtatttttaacgagcttaaaaattcaagagacataatttaata

SEQ ID NO: 274824 - DNA, 533 bp, Cannabis indica
tctccaccatttttgttttgttgtaatgcagtgtctacttccagacgcttccttcagctctcaatgaaagcaccaaaatgttgaccgaggttttcggcaaccaatataataataataataattaagagagccataaggaattaagagagagatttttacgtggttggggcattaatgagccttagtccacgagtctgtgtatttatgatagtatttattacagagaatgttcttggtggatttttcctcttctagttcttatgaaacccagaattctcgacccccgctttaatgagtttgggggatatttatagtgtttttgtggggtgatccctagaattgaggtacatgtctttctgtcactatcagtaaagccacaccccaatgaatatatatatcattggaaatgctgttaggctatttttagcctaagtttcgggtcacattttatagttgtttttcttctttattattatttttggaatagaattacacttgttttctttggtttcaggtttctacacttggaatgt

SEQ ID NO: 274825 - DNA, 505 bp, Cannabis indica
ggttctagttttcttggcaattttcgaaaagcttaccgtaaatcgtcatttttcatcatttttgagtttttcttgtttgagcaattttgttttatcatatttgaggtgctaaaaaaatttggggtcaaacggttggacaaaacgggttttcaagcaattttcgggaaattggcctgctgcagaaaccggtttaccggttctgcgtgtacctgataaaccggtaaaccggtttttcgctgggcccgattccaaggctgtttcagtcttttcaaaactgattttttgctataaaaaccctattaacgacttcctcaccccccattcagataccttaaccctaaatagagcctcaaaccctttttctctcaaattctcactctctaaacctaatctccttattctcttcaacctcctaccaccatggcctcttcttcaagaccaaagaggcaaaaagtgtcaatgcaacaaaaggagcaaaggactaaggcaaagcatgatctcttct

SEQ ID NO: 274826 - DNA, 822 bp, Cannabis indica
aataataaatatataaaaatatatatttaaaaaaacaaataataagcatacatgttttaattataaatttatttttaaattttaataaacacgttatatcaacatatcatctcaaacttggttaaaaaaaaacatatcatcacaaacattatcataacaaatatattagattaattattaataaatattattatcaataataagataaacatagtgtttatacataaggtcacatttaattataattttatttatttttttaaacatatctttcaatatctaataaacgtaagtgttacattttaaattgtttatgatcttttaataaacaaaaaaatatttatttaaataaataaataaacttacgcgttttatttttaaaattgttttatttttttaataaataaattatatctattatcatactaaacaaactagatgaataatagcattataaacattatataaataaattaaaagttggaaatgtgtttgtatatttttttttaaaatttcatattaaattttagtaaacttagtaatatatcaaatataaatattaacttttatgtttacatatttaactttatgtgttttttttagaaagttaatcaaataatttaaattgtaaatatatttatttataaatattaataaaattgtatagaactatgttattatgttttttttgcacatttttttttttgtaaaagttgtatatttagttgtatataaatgaaaattgcccattaataaatttatgtaaaaaaaattatcttatgatttcaaaaccgtcgtcatcaccacatctcacttctagtc

SEQ ID NO: 274827 - DNA, 853 bp, Cannabis indica
ttttgattgaatccctttgcaactaacctagctttaaatctgacttcttcacctggtagaccttccttttctctgaaaatccacttgcagcctatcaatttctgccctggtggtcttgttacagttttccaggtcttgttcttgagtagagagttcatttcttcattgattgcagcaagccatttccttttatttcttgagttaatagcttccaggtatgaactaggtgtagtagtatcaatttcttctgctgatgcaagagcaaaagctgtgcaatcagcaaagccaaatctttctggtggcttgatttgtcttctttctctgtctctaaccagcatgtattcttgtgagtcatcaggtaagttctcttcctcagttgcatgctcttcagtttctgaatgtgagtgctcatgtgtatccacctgatctgtagtttctgcattttccttgatgctttggatttctaaacctgctgtgtctctgtcagttttcttgtgatttgcagcatcagttttcatggccatttcatgttctttgaaaactacatccctgctgatgatgcattttctgtggccatcttctaaacaccatagtttgtatccttttaccccttcagggtaaccaaggaacaaacacttgagagctcttggctctagtttgtcttgtctggtatgtgcaaaggctgtacaaccaaacactttgagatgatcaacacttggaacatgtccagtccagacttcttgtggtgttttaaatttcagggctgtggatggacatctattaattagatagcaagcagttttcaatgcctctccccaaaatttcttgtcaagtgcagcaccctttagcatgc

SEQ ID NO: 274828 - DNA, 559 bp, Cannabis indica
ggtgtaggtacatcgtcgctgtgaaacattttttgttcctcctctgttaactcgtctagttcaaaagaagcttttaaacaatcactattttgatggatcgtgactcctttttgcttcttgaaatgaacctttttcttcgctgtgttgaaggttttcggagttacagaagtggaggacgttttattgagggtaatgactcttttatttttcttgctatctttaccaaaggaaactgaaatttgcattttacccttgggtagtgactgattgattttccttagtggtaaagtaaagctcgtcattagggctgtcatcgaatcttcgatcggtgtcaaagctttttgccctattcctcattgacttttagggatatacttaaaggttcgtttttggttagataccttcaagttctcctctttggactgaggagatttcacaagggatagttgcttaatttgtggagagttttgtacgactgagctttcatgacgtttgctctcctcaggtttccctttcaagatggtaacattagctggcttgtaaaattttgcatcagcat

SEQ ID NO: 274829 - DNA, 433 bp, Cannabis indica
gtaaaataatttccaacatagagctcaaaaacttgcccggttgccggcggaagacagggatatcatccagttgacctccgacgagaatttggtgcagtacgggctttacccagaggacttttctcctaagtccgtgacgggcaaaaagaggaaatctgatgctgaccggcttgaaagaactcatccagagaatgagtggattcaactgaagcgagaggctaagttgaagggtgtgctcgggcaaagcagtatgctgaggagcttatgaatcctgaagatgaagctgaggctgagcaggtgactcctttgaagaggaagaagaaacacctggccacgcccaggcctgttgaacatgcacttcgcataagggagcccatttaacctgttcggccttctcatccctatgctggtaaagggtgttgggttttatgcc

SEQ ID NO: 274830 - DNA, 524 bp, Cannabis indica
aaagagttttatttagggcataaaacccaacagctctaattgaagagtgtagcgccattctgcaaaagaaactccctcccaaactcagagatccagggagtttcactattccttgtaccattgggagaattgaaggaataaatgcactatgtgacttgggagccagcattaacttgatgcctttgtcagtgtttaaaagattgcaattaggagaagcaaagccaaccacggtaactctacaattggcggatcgattactagctcatcctagaggagtaattgaggatgtgttagtcaaagttgataagttcatctttccagctgactttattgttctggatatggaagaagatagaaatgtcccaatcattcttgggagaccattctttgcaactggccaagccatgatcgatgtccagagggtgaattaaagctgagagtccaaggagaagaagtggtctttaatgtgttaaaggcaatgacatcccaaaggcaagtgataactgtctcttcgttgatttgat

SEQ ID NO: 274831 - DNA, 596 bp, Cannabis indica
aagttttttcttttttcctgagaagttgggatttttaaggtatttttgaattgggtgttcgaaaaaagatgaactattttcctgacgaggtagtagaacatgtgttcgactacgtaacatcgcacaaggaccgaaacgcgttgtcgttggtgtgcaaatcatggtatagaatcgagaggtttagcagagaaaaagtgttcgtagggaattgctatgcaatcagtcctgagaggactatcaatagatttccaggtctaaagtcacttactttgaaggggaagcctcattttgcagatttcaatctggttcctgatgaatggggtggttatgttcagccatggattgaagccttggctagtagccgtgttgggttggaagagcttagattgaagagaatggtggtatctgatgatagcttggatttgctttctaggtcttttgtcaatttcaaaactttagttctcgttagctgtgaagggttcaccactgatggccttgctgctattgctgccaattgcaagtaagaattttgaattgacttctttacttttgtcatgactatgttgagctttgtctttgcctttttttttttaaac

SEQ ID NO: 274832 - DNA, 678 bp, Cannabis indica
gacacggggaggatgctcgcatatatttgatatatgcgagctactctcttgtctcggatgcgattagacttcggtcatgatcgccacctctcgctgattctatcttaagcgaggtttaaaacttcgaggagtccctcagggacgtctcagctttctttggaaaatctgagtatacgtgtcctctaagtaggggtctggtctcgagtttctaggtaagagaaatctcactataacactgacgacactataatcatgaacatatatatattttggacttaatagaatttatacattaacatataatcataaaataaatcatgtgaaccatgcaacataaaataatgtaacaccctaatgctaaggcacgctacaattatttttcaattgcagtgctatctttgctaatcaaagaattttcttgaaaattgtgtcaaattaaaactttagtactaactatgaatctttataaactttaataaaatatttacaagtgtcgggatcctgttgttaaattttacaaaatatacaaaatacagatgtcaagtcgcacagcgactacaaaatggaaaccccagatatcccgagaccaaacactctaggtcgcgccgccatgacatgtacagcctcatcctagctcaagctcactcctgttcagccttcgcctttcctttacctaca

SEQ ID NO: 274833 - DNA, 839 bp, Cannabis indica
gaaggaccagcatcagcctcagcttgagtcagggcaaacactcgagcaggagcgggtgtatcatccttcttttgctatagtcgtagcagctatggacaatttctcttcatgtgacccaccaccccacagtggaaacaggccctggcctgacactcgacctggtggcgccttttacatctcggacattcaggaaaagtctgccagttttcgttcccaccaggacggaaaccttggttaccctggaaccttttatttgggcctgcagctgataattcactaggtcttttcttacagtcacagggatcagtacccctaccagaactagcacctgatgtttgcttccatgaatctcttctggcaatatttttctttcgtatttgagcttctgcaccctcagaaactagggccagttcaactatttgagcataagttcgagcaacccccggttgtttagaagcaacaatcacatctcgtgctatatgttcatccaaccctcgaatgaactttcctttcctagcagcttcagtagccacctcatctgaagcaaacttttccagtcgatcaaacttagtggcatactctgtcacagtcacgctgccctgagtcaaacgtataaactcttctgcctttgctgcctgaatagattcattataatacttctcataaaacaaggcccggaaggcttcccaggatatgttattcagatcatgaccctaagatacaatctcccaccaaatatgagcatcatctcgcaacatataagtagcacacatgacccggtcattatcttcaacccacatataatcaaaaatggatgttatcatactcatccattgctc

SEQ ID NO: 274834 - DNA, 523 bp, Cannabis indica
gcttcagtaaaatattctttgtcttatgtgaggtgtgccacacctcaaatgcaagtgaggagctacataagccccctttattaaaacataaaaaataaacaacaaaggaagttatactggggagcggctagatctgaaacggcgatttcgattagggaactaagaacatagcagggatggcgacgagaagaagcatcttttccctttcggcagttgcattcactttaatggctgcctctctctgctctgctgcatcagagaaagcattcatcaggaagactgtttcttcccacaacattgtcatcttctctaagtcctattgcccgtactctctctctctctctctctctctcgattcttttacttgttcacttccttcttgtcctccttaatgttcgttattatcgttattttttcttttgagtaacttcagctgtattttgtttatgtcgttacaacaaaactcaatgattcttaaattaaaaaaacaaagacttttaactttttttttttaattttaact

SEQ ID NO: 274835 - DNA, 671 bp, Cannabis indica
tccttgttctagcttctttcattttcttggaatttttggaagaaaataatggtttgcatgcttagttttggttgatgttgttgctgtgattttatgttgtttttgaggtttaaagcatgttaatttgagtagattagagcttgttatgatgcatgttagttgctttgattcaagcttggaaatttttactcaaaactatagttttcaaagaaaaatgaagagtcttgttgctgtgattgctgttgatgtgtaaatgtgttttctggtgttttattatgttgaaataggttgagatatgcatgatttagtggctgtttggagggttagtcaagttttgagtttttgaactcaatcttgaacctccaatggtgaaatgagtttctgtgattgaagcttggttcttttgctttggatttgttcttaggggtatttagaacaggtctggaaggtttggtatactttgggtttgatttgattgagttatggaattttgggtgtttcctgcaaggaaccagaattccagttgtgcaaccggaaatccggattgggttcaggaattcccaaaactggaattccggttgtgcaaccgatctgccggttggggaatttttaggaaccctagtttttctcgtttttatgttatttggagtattgccatgcttcttatcgat

SEQ ID NO: 274836 - DNA, 498 bp, Cannabis indica
ttttagggtctctcctgtcgcgatttcccctgatggggggcggcttcttgaagactccgtttctttcttcgattgcgtagatatggtctcgggggactgcgagttcagtatagttgacgaagcgaggtccacctttccttttcggcgaggattccttctttggaggagacttggccaacttcagacttcgctgtctccgcgggctgcgtcttcttgggcttcggcccctggagttcttccctcggggactgcgagatcgtgaacgcggtataggtgaccggcgtttgtcctttcccttctctaactccgctagagaattctcgattctcttgtgaggttcggccatggcgaagaattcaactaaggattcgggccttcgagcttgtaactccttccaaaagtcggtcctcggcaagatacctgttatcagcatgcaaacaagcgaagactcgggagccttctcgacctttgttacttctgcattaaagcgtttaaaat

SEQ ID NO: 274837 - DNA, 1199 bp, Cannabis indica
cttgaattacccattgagaaaggcactcttgacgtccatttgaaagagtttgatcttcaaaaaacatgcaatgataagaagtagccgaatggattctaatcgagccacgggtgcaaatgtttcatcaaagtcgatgccttcgacctgactatatccttgagccacaagtcgtgctttatttcgagtcactgtcccaaattcatcagacttgtttttaaacaaccattttgtccctataacatttgcaccatctggtcgagggaccattatccagacacccagtctcttgaaatttcccatttcatcctgcatggcagccaaccagaactcatctaacaatgcatctcgaacacttttgggctcaatctgtgacagatagcaggcaaaggctaacaaattctgcagtttacgtctagtgaccatggtatcattcggatttcctatgacagtggcctgaggatgagctttctcaacccaggatgggggtccgtttttatgtactttgacttgttggggttcattggtcagggcactatcaacttcatttcctcttcctggaccactggcactggcttgattgtcacctgatatgcctgatgctgtatttagagactctgtagaagtgtcagggtacacttgaggctgtctagtgaggactggtctagagcctgagagaacaggagagtcatcttcgatccacacttcttcatgtccttctaaatcatcaaatttcacattcattgattcaactacagagagagtccgtttgttgaatactctgtaagcccgactgttggtggagtaccccagaaatgttccttcatcactcctgggatcaaacttggtcaagtgatcccgatcgttcaggacataacacgtacatccgaaaatatgcatgtggctcacgttaggaggtcttcctttccatagctcataggcagtttgagaggtaccagtgcgaagatgaactctattgcacacgtagcaggcagtattgacagcttcagcccaaaatcgttttgaaatatctttggcctgcatcatgacccgagccatttcctgtagagttctgttttttcgttcaacaactccattctgctgaggagtttttggggctgaaaactcgtggtgaattcccatgccattacagaactctgagaatatggaattttcgaactcttttccatggtcacttctca

SEQ ID NO: 274838 - DNA, 507 bp, Cannabis indica
ctttccttcatttcggttactttccattccttgccatttctgctcgaatttcctagagagaaaattcctcaaagtagcacgaactgtcttaatacccagacacttcattcagttttccggtgtttgactttgccagttcttctcaactctcactcaaccacattcagtacctccagttcaacgatcgactgtaagtttcttgcatccttagataataacatgcttatatttacttcgttcgttttctgggttcgtacttagaggcttctgtgagtgtttaagttcttcgagttctgctgtatgtttactgcgttagttgtagaatcgccattatcatgcccctgttgtagttatacagttctgtttgaagagggccatgtgttcttcgtttaacagtcgcttagggcataggatggcttttctctttttttttcttttttgcaaaaccactttctgcgatttcactgcacccgacacttgttcagggattctctccagagtttccca

SEQ ID NO: 274839 - DNA, 571 bp, Cannabis indica
agcatggcaccggccatcaagtgagtctgactccaagccccgaagccgtcataattgtgattaggcgtctccgagtcgcgaggtggccggtgataggtccctgaagtggaaggtttgatcccagcaacgtctataatattctccagctggtgaggacaagttagggtggaacgaagctcagccgcttcccacccggtcgctcgggatttgtacccctcctgggcaacaggccccagggaaacctcctccaaagtggccatgcctttcccgctcttcttcgaagatttcgaaccagaagcagacattttgtattctgtgaaaaacaaaaagagaaagagaaaattccagcagttaggtcccataccaaaccctaagtcaagaaaaagggagtgggggtcccctaaccgctggaaagaggccccctccggacacgtgtcacatgggaaaccctagaaagattccctgaacaagtgtcgggtgcagtaaaatcgcagaaagtggttttacagagtaaaagaaacaaaaaaagaccccattctatgccctaagcaactgttgaacgaagaacata

SEQ ID NO: 274840 - DNA, 722 bp, Cannabis indica
ttaattccaggtccatcatctcctgggaaagacatagatgtattcatgagaccgttaattgatgaactgaaacagttgtgggagacgggtgttgaaacccgagatgcctacaacggaactgtgttttcaatgcgtgcggcagtgttgtggacaataaatgactttcctgcttatgctctaatgtctggttggagcacaaaagggtatatggcgtgtcccacttgcaatgaacatactccttccattggcctaaatagtaagattggatatgttggccacagacgctttctcgaaatgagtgatccgagaaggagaagcaaaaagtacaatggtaagcctgagaagagagcaccacctcctgtattgacgggggatgatattttatctcaattagaccgaattccattgactttgcctggaaaacacaaacagttcgggggtgtgaaacggaagcgttctagtgaagagctcaattggtctaaaaaagtattttttttgagcttgagtactggaagtcaaagtccttacgacataatcttgatgtaatgcacattgagaaaaatgtgtgtgacagcttagtaggtactcttctaagtatcgacgggaagtcaaaggataccgacaaggcgagaatggatttgcaagacttgcaaatacgacgagagttgtggttgtatgaagaccggaatgggaagtggaagaagcctccagctagttacaca

SEQ ID NO: 274841 - DNA, 240 bp, Cannabis indica
atcttgattggttgaatagtcaagttgacattagttggatgagtgagagtatcatgttccttttatagtgtttcaactagggcttagggctgaattatatggattaaaaaagaataaaatattaggcaaaaatcaatactagggccagacatgtaaaggaccaatctctagttacaattttccaactttatttcaaccacttattcttctttcaataataccatattatctaattcaatc

SEQ ID NO: 274842 - DNA, 635 bp, Cannabis indica
cggttttctgggaggtccagatgtcgtgaaagccgagcagtggctaacagtgattacgaaaatatttaattttatgagtgtgatggaatacactacgcagttgatcggtcggcgaggttggcctcgggatttatgccaaccgatttcagtaagaaagaaaaatatcttgatggacttaatgtgaagatcaagtatgaccttatgattactaccgacgacaagaccacctatgctgagatggtggagaaggcagtgcgagctgagggcgcagtcggatgtatgtcggagtcagctaggactccagtatgtggcggggctcctacccctcctgcatcaggtttcagcaggggaggtagtggttcggccatggaccagaggaggaaatcatccactgcatccggtggctcggggcagaacaagaggttccgcgggaaccagaatcgaggcggtcgtcagggtagtgttgagacccattattcctaaccgaagtgtctcattagtaagagtcatcctccgggtgagtgctaaggtcagggatgctttcactgtggcatgcccagacacttcaagagggattgtccccagctccgatcagaggcaccgagggctctggcgagacccactccagctagggt

SEQ ID NO: 274843 - DNA, 739 bp, Cannabis indica
tcacctaagtaatcaaaatttgcgtcaggattagctttccagaagtcataaaaaatctcgagacccactgtctctagggcatgtactttctcttcacgcctcgccacctccgctctctgctgatcagcctccgatttgtacttcttgaccccagctgtaagctcctcctccttagacttcttctgtaaagcccgcttagttaatttggaaattagcagttaatcttgattgattatgaaaattatttatagctatttaaataatttattactctgttatttatggaattcagaaatgaattgctatgtcattcagtagttttcatatttggcatttccggtgcccggtattttggaactcggtgtttggctcagtagaaatcacaacttagtatgttagtaggttggggcagtttattagacattgggaatgtcgggaatggcagggaatttagaatttcccaaaattacccctttagtgatttttatgtggttttagtgtggaggggcaaattggtctttttgccccattgttgttttgtcttttagtgagtttattattgagaaatgaaatgtttattttattaaagattggctgaaatgaaatgttataagtggcttttatttcattccctttattttacaaaaaattacaacttagaaaattcaaaaattctctcaacctctctctctcctttcggcccttcttgagcagcaaggaagtgaggttttccttggtg

SEQ ID NO: 274844 - DNA, 619 bp, Cannabis indica
tccaagtttccaaggatgagatctgaaggatgattctttttaaccctggaggatggttccctctgtattggatcagtgattgaatttaaaggatactcggattcttttgttgttggattttctgtagcaacagattcctgcacagtaacctcgacgactgcttctgaagcttcgtcaggttccttttcctcagcagcaggcttttcaagcaaatcttcaatctgttcttctgtggaaaactcagaaaaatcttttagatcatcaacaacaacattagcagattccataacagtttgggttctcatgttatacacacgatatgccctactatttgtggaatatcctaagaaaacaccttcatcacttttagaatcaaatttaccaatgtaatcacgatctcgtaaaatataacacatacatccaaacacatgaaagtgacttacatttggtttcttacctttccagatttcatatggtgttttgtgagtacctggacgcaagaatactctgttgatggtatagcaagcagtgttaatggcttcggcccaaaggcgctttgtgagcttcttgctattcaacattactctagccatttctgttagagtacgattctttcttt

SEQ ID NO: 274845 - DNA, 781 bp, Cannabis indica
ccaccttcccaaggtgaccttcttcatcgagattagtcaatctcttataagttagcacgaatggtggtgagacccatcaagcacccttcagacttcgattgtttaaaggtcgagcctctgtgtatttctcctaaacataatctcgacctgctactaagacatctccctcctcaaagatagactctccagcctcattgtagccaccaaaaggaagcgcccaaacttcctcctcttcttcttcttcctcgccctcgaccttggagggactaacatggaaaacctcacactggtcctcaatatcttggacttcaatgtcccctccaacaactacttcatcctcgctcagaggcttggcttgctccaccccaactgtagcaaatagccaggcaaggtgaggatcagataccaaggccttcctcatagtttgcttggtttgtgcaatcattctatgtttagacagtcattttgtttcagatgtatgcctcgcaacagtcacagtgatatcagctacaatagtactcctagcagatggggttgcccgaccctctataagtgtatcaacaacacccagatggaccctatacgtccaagaagagaaagataacgcctctaactttctttagttcccagataaaacgattgtacccttctccacgtattggttggggtatcgatggtgctgcatcacaggctatagggattctgtatgattgatgttgacttcccaatcctcaaaattggaatttgaaaggttgtcactagacgaagacaagttcgcacc

SEQ ID NO: 274846 - DNA, 867 bp, Cannabis indica
acttgcgaagtgtcgcattcttgcggcaacactcgaggagaatgcccatgattggttcacccaattacctgaggcatcgatatcgacgtgggaaaacttcgtcgacttattcctcacacatttccaggccacaatgacgtataggccaccctatacgactttggccaacatcaaacaagaacctggtgagtctttacaagattatttcaagcgttttaacgcagaagtaacaaaggtcgagaaggcccccgagtcttcgcttgtttgcatgttaattacaggtatcttgccaagaaccgacttctggaaggaactacaagcccgaaggccggaatccttagtagagttcttcgccatggccgaacctcacaagagaatcgagaactctctggcagagttagagaagggcaagaacaaacgacgatcacccataccgcggtcgcgctctcgcagtccgcgagggaagaattccaggggccgaagcccaagaagacgcagcccgcgcagaccgcgaagcccgaagttggctaagtcacccccaaagaaggagtcctcgccgaaaaggaagggaggacctcgcttcgtcaactatactgaacttgccgtacctcgagaccatatctatgcgattgaggaaaggaacggcgtcttcaagaagccgccccccatcaggggaaatcgcgaccggagagatcccaaaaaattctgtaagtaccacaaggacattggtcacactactcttgaatgttgggtcttgcaggatgagatagaggaactgatcagaagagggaagttcgacaagtataagagaagcgaggagggacatccccaagcggatggcaaaggagatagccagaacgcgagtgg

SEQ ID NO: 274847 - DNA, 541 bp, Cannabis indica
gagtctcaaatacggatggcagcttatcaaaagaaggtgactaagtactttaactccaaggttaaaagtagaaatttactattggtgatatggtcttaagaagagtcttcccagccactcaagaactcggagtgggggtacttgggccaaattgggaagagccatatgaaattgaggatgagatcggctccggaacctataaggtaaaaagattggacgaaaccattgtgcccagggcgtggaacgccgatcatctcaggaagtattaccaatagtccaaaaatgtaaacttaggccttgttaaaagaatttgtaccgtgaagtgtatgcaatcactaaatttcgaataaagttgagtgccttaaaaacaatgttttcatgccactcagggggtaataaagcacaccacacggacaaatgtaaaacaggccaaaagtaaaaacaagcagaatatatatcaaagtgaaaatatatatatttaaatatcctgacccaaaagtaggtcccaaaaaataaaaaatatatactaagggcctgggga

SEQ ID NO: 274848 - DNA, 652 bp, Cannabis indica
aagccaatgtagtggctgatgccctgagcattaagggtcccaggcaggttactagcatgattcagattttgcctcaattagcagaagacatggtcagatcaagcattgagtttgttgtaggaaaacttcataacttgacgctgcaatctgatctgttagaacgaattaaagctgctcagttaatgaatccagagttagtaaagattagagaagaggtttcagctggtcaagctagagattttacagtgtcagatagtgggatgctgttatttaaggctagggtttgtattccaagtagtgcagaacttataaatgaaattcttgaagaggcccataccactccatattccttgtatcccggcaccaccaagatgtatcaagatcttaaaccctacttctggtggagcagaatgaagaagaatgtggtagaattcgtatcgtgatgcctaacttgtcagcagatcaaggttgaacatcagagactggtaggtttgttgcagcctttaacactacctgagtggaagtgggaagatatcacgatggactttgtggttggattacctagaaccacgagtttgttagattcaatttgggttgtggtagatcaattcacaaagtttgcacattttctaccagttaagacaaccttttc

SEQ ID NO: 274849 - DNA, 503 bp, Cannabis indica
gccatttttgctcgaatttcccagagaaaattcttcaaaacagcacgaaccttctgaacacttcgccattttttccagtttttccttgtttgctatcatcagtccttctcgtctttactcgactaaactcaggacccccagttcaacactttactgtaagtttcttgcatcctttggtaatgacatgcttttacttgcttagtttgttttttctgggttcgcattttgagatttctgggcatgcaagtgtttaggttcttcaggtgttctgttttgtgtttattgctttagttgtaggatcgccattatcatgcctctgttattatcgtgcatttttgttgaagaaaaccatatgttcttcgttcaacggttgcttagggcatagaatggggtctttttccttctgtttctcttactgtgtaaaaccactttctgcgattttactgcacccgacacttgttcagggaatctttctagggtttcccatgtgacacgtgtccgga

SEQ ID NO: 274850 - DNA, 358 bp, Cannabis indica
gggagtccgtcagctccgtgtactgggtgtactggggagtgtacccccttttctggcacttctcccccgtccgagtactgcctttggaggatctctaactcctcaagccctgggaagggcctgccaggctagcggtcggagcggagtgcgagggagcttgtccattcatccctgaggggtttccaaaatgggatgatgctggcgccaaagcctggccctgactatacccgggggtggcagagaactgtatgccgcttatcggtggagccgcggtcggggcagtacccgagggcggtactccgggcatgtaccctgctatcccggtgggatagtatcctccataggccactatttgggc

SEQ ID NO: 274851 - DNA, 559 bp, Cannabis indica
gtctgcccctgtcctgaagatcaaatcgaagggcggaacaacgacgacttcgccggttgttgcccaaaagatgaagagcgatgcgatggctacacttgtcgcagactcttccaagaagctggccaagaccacacaggacaaggggaagaaagtcgtaattgatccacctgttcgagctcgcgacttcctagccatgcaagagaagttcctggctgagattccttatgaggatcttgttacgcgatctgccgagctggccgcgcagtcgatgactctgttcataaaagctgctgctactccttcgaaggaagccgactcgctgaagaggcaaaatgctcagtttcaggagaacataaaaaagctgaagcaagaagtagcgaggagggagaaggagctcgaggaactcagcaaggccaaggagaaggagctcgaagaactcagcaaggtcaaggagaaggagcttgaagaactcagcaaggcgaaggaacaggcggagcatgaggtcaagaaatcgcaggcgacgatcgtggagatggcccgcgatttggagactgagaaa

SEQ ID NO: 274852 - DNA, 1046 bp, Cannabis indica
atttgtcaggttttttttttttttgtaattgctagcgccacatttaaaaatttaaaaagtaaacttagttatatataaattaaattagttatttaagtatgaaagggtagagatatataatgtgtgcacagtactagtgactatatataaatgtagggatatgattttatcttgtgattgtactttcatggaatgtattccgtgatgtacggcagccgttagatgatggagttatttgatctgacggctgagattgatataggggtaattaaggttaaaaagtagaaacgtactctgacactcatttaatgtaccctgagacccatttaatgtaccacggaatacattccgtgaaagtacatcacgggaaaaaatcgtatccctataaatgtaatactaaattaaatttattttgattaaaaaaacactatattttattaactaatgacattattatttatttaatattttaatattatttaaatgtcatttgctttctttttattttttattttaaatttatcactaagttatttctcaattaatgaaaataatttatataaagatatatcttattagttttaaaaaaataataattatataaagtactagtttttataaaaaaaattaaatttttacgttcaaagaatttttcttgcatttttatagatttctataagaacaacatgaaatcaacaaaaaaaaaacctacattaaagtatcagaaaaatatcatctgaacaacattaatacaacaacaaaaaataacaaaataattaacaagtgtataacataaaaatacatcaaaaaatcttattttctataaaaagaagtataaaaagggattttttcaataatatacttaaaatacaaattaatcacaaaaatccctttataaatctcaattacaataataacttgacacatcatgaaaaaatacctcaattccaaaataatatgcctgaaacgaaaataattccaaattctgttttttttttttaaattttcctgtgttttcaaaagtaaccttttggttacttatatgc

SEQ ID NO: 274853 - DNA, 597 bp, Cannabis indica
ccgaaagacatgcaacaatcaagcaataaaatagatacagatgaattatttgaattgtttaattctgtgtgagaattcacacaggttgatatgttatattcgatacacatgggattttatttttgaaaaattttaaatagtttggtaatagttgcaaaatcgttttatgacagttttgacacttgttaaatatttactacgaaaataacttctttattaaagttttaaaaaaagtcagataggaatttataaaacataattaataaaggataatgaaaaaaaaaggaaaaatagtgaataaatacattaggcaattaaaattacaagtacgctgaacagtggacattgtttgtatatagttgtataatagtttctatatagttgtgcgactggatataaaaactagaaaaattagaaaaacataaaacttctactgatacaaacatacagaagaaacatattataaggattaaagtcaaatatcctaaaaagtttaaaaccagatccacagtataaaaccaaatataatacctagaaacataaaatcactaacaattgtctgataatagattcaaccaataacaccaaattgtcact

SEQ ID NO: 274854 - DNA, 561 bp, Cannabis indica
tccgcgacgtatactatccggaatggctagccaatccggtccaggtgcccaagccaaacggaacttggcgagtttgtatagatttcaccgatctaaacaaagcttgtccaaaggactgcttcccgctgcccaggatcgatcagatggtagatgccacttccggatttaaattaccatccttcatggatgcctacaccgggtataaccaaataaagatgcacacgacggaccaagaatgcactagcttcaggactgataagggggtatactgctacctggtcatgcctttcggactaaagaacactggagcgacctaccaaagaatggtcaactggatgctcaaggtcctcttggagcgaaacatggaggtatacgtggacgacatgctcgtcaagtctaaagcatgcaatagccatgcggacgacttagaggagtgttttgaggtagtccggagatacggcatgaagctcaatccaaagaaatgcaccttcggggtcaaatcagggaagttcctaggcttcatcgtcagccagagggggattgaggcaaacccagaaaaaa

SEQ ID NO: 274855 - DNA, 302 bp, Cannabis indica
tctgtgacccatataacacatcttgtgtcaattttccaagtgacgagccgatgtgttagtgcaataaatcggacaaccttcgtaaccttttgtgcttaagcctgataaattactataagcagagaaatcactgacagtccacaataacacagctttcagattaaagaattcttttttaaaaccatcataggcctgaacaccattctcatacaattctattaaatcgtcaatcaatggtttttttgaatggttgtgatgaaatagaagaagagaacattgatgttttcttgaaattttggatt

SEQ ID NO: 274856 - DNA, 410 bp, Cannabis indica
aatcaggctcaagaaggagagaaagagatccaggttcagatcttgataattctctgctacagaaaggaatcaagggctagagatctgaacggaatgagtcattatattccgctgcacccaatgtaaggttttctaaactttatatgtatttatttcattgttttagaaattcatattaggattttaatgaaacatacttgttagtaaatctagatcctggtaaaataattccaacaatattctcaaacccgcttaaatctaaaatcccgttagtcattgttgagatgataaagacgtaagtttagaactttaagttattcattctaatataatcatcaattaataaattccaaatgcttaacttataatttttttagggctcgtttggaacgccgtattaggtcgtattg

SEQ ID NO: 274857 - DNA, 233 bp, Cannabis indica
ttaagttgattttgaattatatccaaacttacctccccagaaattcgagttacatattgatgattagttactaatcgttgcctaagtccttctggatcccgattacaaaacatttagaaaagttcactgactatacaaaatacttgtcgcctagcaactaattacaaaaatagtccttgctgtcccgaggataccggctcgctctcacggtccttcagccttagccttgccct

SEQ ID NO: 274858 - DNA, 320 bp, Cannabis indica
aggaatcctaggcattagttattaaagattcttaagatattttttaagttaatattttttaaagataaatcaacttaaaatagaatatttttcaaattaggtggttacaacttaattttgatatttaattaaattttatttgaaaaatatttaagttggatattttagattttttctataacaacttaaattggatactttttcaaattttagaaaaacacttagttaattgaaatatattctagatagttatttctagtactagttatattttctaatatttaattaggaaaatattttaagttgtaaattaattattt

SEQ ID NO: 274859 - DNA, 834 bp, Cannabis indica
tggttgtctgaggtgtcttttctgggtcatattgttggaaagaatggaattatggttgatccaaacaaggtagaatcagtgaagaattggccgaggcccaagtctgtgacggaagttcgaagttttctcggtttagcagggtattatcgacgtttcgtcgaaggattttctaaaatttctatgcccctaaccgaattgaccaagaaaaatcagagatttgtgtggtcagataagtgtgaaacaagctttcaggagttgaagcaacgtttgataacagctccggtgttagctttgccatcagatcaagagaaattcgtggtttattgtgatgcatccagacaaggtctgggatgtgttctgatgcaagctgacagagtcatagcttatgcctctcgtcaactgaaagattatgagcagcgctatccaactcatgatttagagcttgctgctgtggtttttgctttaaagatatggcgacattatctttacggtgagaagtgtgagatttatactgatcataagagtctcaaatactttttcacccagaaggatttgaatatgaggcaaagaaggtggctggaattggttaaggactacgactgtgaaattttatatcaccccgggaaggccaatgttgtggccgatgctttaagcagaaaaggtcccgggcaagtttgtaccacgattttgatagcccctcaactagcctctaaaatggttagtgcagggattgagttcgtggttggaaaattgcacaatttgacacttcagtctgatctgttggagagagtcagaaaggcacaactagaagatcccgagctagttaaggttcga

SEQ ID NO: 274860 - DNA, 683 bp, Cannabis indica
ccaataatcaatgtttcaaataaaaactgtattccctttgtatttcagaaatttaaattcctcaatatctcattctcaaaacgtatgtgtagttttcttttgtttttccactgttgttctgttgttgtttttattcccttctacgtcttctgctgcatgttcttttgttatgccccagttcaccacatttgctgcacttgttgtgttgatccttttcccatccagccttccttcttaatgtttttggtcttcctgattttactctttcatgtggaggcaagactataatattcttcacttcttccggtacctcccactcactttggtgtcctattgggtaaactgtccctgaataagttgccagccaatttttttttgtgtagtaatctgaacagtaggtgtacgggtccatgttcatctccctcatcacggccactgcgtgcccgcatggcatttcatctatttggaacctgttgcacgtgcatgttcttttttctaggtctacttcccacgattctttcattcttgttacctcaaacaagtaatctgttgttgctttaacctgttttaaattttattaaaaaaaaacaaacatagctgtaattcctacaacaacaatacaaaactattaaaacaacactacaacaacacatttacttactgtttgtttagttttttttttt

SEQ ID NO: 274861 - DNA, 570 bp, Cannabis indica
gaaaacttttagtttctagtttaagtcctcgagaagttatttcgcgtgtcacttatcagtgttgtgattattatggtttaggagcctgtaattcgcggagcagttcgttccactcaggttgaccaacacacctgaattcggaaattgaggtaagattagtataatgttatgcatatgcttatacatgtttagcgtacatgtcagttgccatcagattaacatattagatatatgttaggcaaattttgtatagccgtcagattagcatatcagggcaacagtgaggtgtacatagagttgcaccaagatgccaacagatatatgctaggctatcagatagtatggattaactgctaccacatcggtacgactagagtaccgagtataggctggattcgcggttaatcatactttgtcatggacgtccctgattcagttagggttatggtcaggtgtatgggcgcttgattataacccgggatttagtatgtttattatattatgcttttcttactgagtctgtcgactcacagtgctatgtttatgtgtaggtaagggcaaggccaaagc

SEQ ID NO: 274862 - DNA, 613 bp, Cannabis indica
gaaaaaattgattacaactcaacactttggatgatgcaaccattgcgagagagaccctccaacaccgcatcccataacattttattccgatgtaaaaataaattttactatcaatatttaacaataaatataaataaatataaaggactttttgattacactttgttaatgttttggcctttctttagttttgtgggaatttttatttttataatttttaaggtacaagtttataaaaatatgattttattttcaagaaaattattttatgaaaaaaatttaaaaagaaaataaaataacataaaaaaatatataaaataacataaaaaaaatatataaaataattagttaccctttacggttatttattaattacaatatttttttaagaaaatttaacacaattatgcaacaatctatacttaattataggaaaattctataatgcaccctcttaaagtggatatattgatgcacccctatctgttttatcatctgaaataattttttagtcaaattttttcttatggtcatatacgttatagttattgggaaatttgattttctatgcttaaaaaatcctaaaattatatccctaaacctaaatgttata

SEQ ID NO: 274863 - DNA, 560 bp, Cannabis indica
tctgcgatactggggggcattgaagtccttggtgagctttggaaggacataaggaagaacggtctagtagactcgatgagtgattttcttgaccgtgcagaaggttttatccaacttgaagaggccattcagcgggcagaaggtgaacaaaaacctggcaagtcaaaaactccttctcctagcacatccgtccagctcccccattacccaagcaattcaagttcaaacagtaaacggtccagcaacaataataggcaagggaatggaaaaaagggaaagttcactggcaagaccgaacaggctccccgggagaatcctaccaagtatactgcatttaacatcctgatggaggacatagaaagtgtttatatggccactcagtcactagcctcggacaagaagcccacacccatgaaaaaagatgtcagcaagagagacatgaccaagttttgtcgatttcatggagactacgaccacgacaccaatgaatgtaacaatctgaagcgggaaattgaatttctgataagaaaaaataactcgcacgtacagaagtatgtaaa

SEQ ID NO: 274864 - DNA, 622 bp, Cannabis indica
ctcggttcgggtttaggtctctgtctttgtattgatctgggctcaggtttgcgtttagatccttgtcgttgtcctggtcctagtcctactttggttctagttccatttgtgattcagagttcgagttagggttagagttcgggtcagagttcgagtcctcgtctgtgtttttgttcgggtcctgatttcagtctaggtccagatcaggctccgcgtgtgggttcgcgccgtgggtcttgctctaggttgggtccgagtcccatgttccaataccgatctgagtctggattcagttttgggtctaagtccttcgttttgatcctggtctgggttcgagtttaggtctgggtccgggtctagctatgggtctgaatcaaggtgtgggtttgagttcgggtctgagtctgtgtccgggtttgtgtcttggtctggaccccgatctgggtctaggtttgggtccaggtcaaagttcgggtgctgagtgcgggtcaaagtttttgtctggatcaggatctcggtccatatctaggtcaagcatttggatccaagtctgggtcttggtccgagtcctggttcgtatccggatccctatctacgtccaagtctgtgtttgggatcgggt

SEQ ID NO: 274865 - DNA, 663 bp, Cannabis indica
ggattggtcggaattgatccttctatcattcgcacgttctgaatattgatcccaatttccgaccagctcaacaaaagcgaaggctattggacaaagaccgagcactagccctaaacgaagaaatagaaaagctacgcaacaacaatttcataatagaagctttctaccaagcttgggttgccaatcccgtattggtgcccaagccgaacaagaaatggcgagtgtgtattgatttcacagacctcacaaagcatgccccaacgattgttttccacttccaagaatcgatcagctcgtggatgcaatagcagggaatgaaatactaagcttcatggatgcttattcggggtataatcaaattaaaatgcaagaacatacaagttttcggatagatattggactatattattacaaagtaatgtcgtttggtctaaaaaatgctggagcaacataccaaagtttggtaaacaaaatgtttaaagaacagatcaggcgaaatatggaagtatacgtggatgacatgctcgtcaaatccaggaaggctggggggcacatagatgaccttgacgaatgcttcaaggtcctcagaaagtacagtatgaaactaaatcccataaagtgttcctttggagtcagctccggaaagtttctgggcttcattgt

SEQ ID NO: 274866 - DNA, 590 bp, Cannabis indica
aaaaatctaccgaaatactattttaaaagttgctatcaaatagtaatatacattgaaaattaatccatatatataaacaaaaagaattatacataaatgttttgtaatttaattgttgggttatttgcggcaaaaccacctaaagtagggaggtttttgcaactaacgcccaattctaaaatttttacggtaaaactctctaaactcaagttctgttagcacttagccctttccgtctatttttagctgttaagtgacaggttggaatgtccacgcgtacacagtgtacacgtggcacaattttattggtctacgtaaataaatatttaaaaaaataaaaaattaattattttaaaaataaaaaataattaaaaattaatttttctttaaaaattagtaaaaataattttaaaaaaataaaaatttaaaaaaaaaaaaacctaaattaatttttacttttacttttctttcttcttcttcttcttcttcttctatcctgcgcacacctcctcctctttcttcttcttcttcttcttcttcttcttattacctttctattctctccctcacgtccaaacacagcccagttt

SEQ ID NO: 274867 - DNA, 572 bp, Cannabis indica
gttactctttatttgtgtctaggattaaataatgtacttatacagagttgagcaatttttgtttcagacttgtcaggccccttgctggaatagagctacccatactgaggtgtgaaagccatcttttgagtaagctggaacattgtaattagcaactatgatgaggatgcactaccatagaaaagggctaccttcagtatggtgtgatagcatccagttgcgggatcaaattgaaaaaggcgaaaatgaaaaatcttgccaaggacaatgatcctattttcactgcacacacttatgtctgacaagtgtgttcaaatttgtaagtctcctctactaaattaaattgataatcctggttcacaatttttagtaacatgcatatctttttcctcaacatcaattaagtatgatttgttcctgagatactaattagttattttctttaaaagcataacatgtattttattttgtcaattttcaatgatatttgattacattgcttgtttagaatttcatatatgtattgtacacattttattttattttcggtttcttaaaaataaaaaaaataa

SEQ ID NO: 274868 - DNA, 370 bp, Cannabis indica
attatttctggataaactatttgtatttttcttgcatttaattaaataaagaattttaactaactagattctttctgaaacttacttttattatttcattaaatattcctatttaagttataaattagttattactaattttccttattaacttaaatttgaatatcttttgaatttaatattaagttgaggaattctaggaattggttattgaagattcttaaaagatattttttaagttgattttaaacttaaaatggaatatccttaaattagatagttactacttaattttgatatttaattaaattttatttggaaaattttaagttgcaaattatagattctttctataataacttaaatcaga

SEQ ID NO: 274869 - DNA, 550 bp, Cannabis indica
cctcatcccccggaatcggggtaagctcaatgcgaggaggagcaggattttcctccatcggagacaccccgccgtctaggccatgagcgggagtgtcggccctccgaggcctcttcggctcgtcttgggcaatcatcttgcccttgcgcttgcggatcagagccacttcagactcctcctcgtcctcctctgctaccactgggagagcttgagggtctccagcaccctcggcggcttcctccgagaagtcccaccctttcccctggccttctcccggaagcacctcctcgtcatccaccaagtcgatggtttcgggaggagcgccggaagaaaccttcaaggaaggggccgggggagagggggtgaaagccggaggagccaccggagtatggaccccagccagccgttccaggatggcatccatggaggtacctgttccaataaaacaagcaagtgttaaaagtccgtgagaaactacttacaaaaaggtgcagcaaataaactactcctacccggactccctagttcggccctagcaaagtcctgaact

SEQ ID NO: 274870 - DNA, 530 bp, Cannabis indica
tgttaggggcattggttctctttttctgaaaaggatattgctcaagctttgcaattgcccgagaatgtatccaatgcagtgatgtccatggatcgtgagttgatgcactctgaactcacgggtgctcgttcagagttgaaaccaggggagagtcttcgaatcactcacctcacttttgctcatgcttctcttatgcggtttgccttaagcaattgggttccaaattcaaacaagaccgtggtatctcaagatgtggcttcactcttataccgcatcacttctggaacttccattgatttggcctcacacattctgaaccaaattgtctccttccgaagaggtaaaaagccaacctttaaacttgtgtttccaaatctaatttataaggttttatcttctcagaagaatgtggcccaatcacatgaaacacttgagcctcccatcagtggacctacattccagccctctgaatactttgatggtgtgttccaaaaacgccaaaggctggtgctgctactgcttctgctgct

SEQ ID NO: 274871 - DNA, 597 bp, Cannabis indica
agagatctgagtggaaggagacatattattccgctgcaaccaatgtaaggttttcttaactttatatgtgtttattatcgttttagaaagttcatatttaggatgttaaacaacatacttgtgagtagatctaagatcctggtaaaataaattccaacaactggcctcagagccatggtaattgatttgcttgcaagaaatttggacttaaaacgatttgtatgtgatttggatggtttcatgttgatctatgtgttatatgatgattgattgatgtttgtgaattttcgtgaaaaataattgaaattctgtttctggaattatttttattggatagtttggaaaaaattaagcaatttacttttttacagaactcaatttcgattttatttgaattagttatgaatttttgaaaatcggaaaaatatcaggatggtgtcacccacctacgcgcgcggatgagggtgcaaccctcggatgcacgcgctcagacacgtgctcgaccgagcttcctcggtcaggacacgattttgtctgaaatcgtcccttgcgcgcgcggagaggctgcatgcagcctcctgcgccgagggacctcgg

SEQ ID NO: 274872 - DNA, 626 bp, Cannabis indica
atagagacccccatcgccaataaagtggtggccagagtcttgatcgacaacggaagctccgtgaatctacttttcaaagaggccttcactgcaataggcctgacggaccgagacctctcacccagtggttcccaactcacggggtttaacggaacgacacttatcccaatggggaaagtgagacttcccgtcaccttgtgcccggataccccccaaagcacgttcaagtactgcactttcgtggtggtagactgcccaaccgcttacaacgcgatcctcggccgaccggccctggtagatttcggcgcagtcacatccatacgacacttgtgcttaaagttcccaacccaggaagctggaatagggacggtgagaggaaatcagggggaggcgaggcaatgttacaacgttgcaacccacctgcccgtactgatggtccgggaaaccattgagccagaaatggctgaagaagatgagttggatccccgcgtggggtccgagaaaattgtagaaccgatggaggatgtcgaggagatatcagtgtgcgacctcgactccaccaaggtactccggctaggaaaaagcctagacccggaggaaaaagaaaaaaataataaagacactga

SEQ ID NO: 274873 - DNA, 954 bp, Cannabis indica
aaagctgcctctccgcagtaagatcctgaaggaccttcctgacttcgttcatgtccccaaagtcagacagaacgaagccatggttgattatgttcttggagaggcggccagcttcagcagcaagctaaacaacaacgcaagtgtaagaaagaatctccaaaaagaataaggggaaaagcaaaatcacgaagcacttaccacagtgagggagtggctgagatcctggacctggaagatggagttcagggaggcacaagtagcgaaccgcttaggcgcgcaccgggtaagctgagaagcaaactcgccaatcatctccgcggcgaagggagccaaggtgggcccaaggaagcgacggaaccagtccgatagggggtccagatttaggtcccacggatcctggtactccgggttgttgatggtgtcttgcacctcaacccgaagaaccctcctaagggcttccacctcagcaaaccctcaggagtattcatccatggcatagttatgcttggctatccggagctcttgcctcgcctcgtctccaggaaccagagtcagtacaatgttgggaggggcagtatgctcttccatgggagagaccccaccatcaagaccgtgggctggagtattagctctccgaggccgcttgggctcttcctgggcaatcattttgcccttacgcttgcgaatcagagcaatctttagagcaggggccattagggaagaagtaaaggcaggaggagcctcaggagtgtgaacccccgcgagctgatccaagatggcatccatggagatacctgctacaacaaaagaaagcaagtgttagaacatccgtgggaaaaccaccaacacaagttaacggcaaaataagctagtcctaccctgactttctaatttggccctagcaaagttccgaattttatgctggcagcatcatctccgagatagttgtccgaa

SEQ ID NO: 274874 - DNA, 592 bp, Cannabis indica
gaaaaaaaagaaaaaaagaagatggatgtgaacaaagaaaaaggggacaacaatattgcgttcattcacaaagaagaaaataagtctatcccagatttgtctgctggtttctcagatgaagctgtagatttgctgaccaagaactatgcaaaattcttgaaaaagaagtacaagaaactgtgttctgaaggtaaggaaaatgcttccaaaagaaatcctcttgggaacttctggcatggtcagcaacccagtgacaataagagcatgggcattcagtgtagagaatgtgatgggttcggacacattcaggccgagtgtgctaacactctcaaaaagaagaaagcccttgttgccacctggagcgatagtgacgaagaaaaagactctattgcaagcaaaagttctaatgaggataaacaggtagtggctttcatggctcaaagtcatcagtctgttgaatctgaggatgatggagtctccactgtgtctgaagtcgacagtaatggaagacaaaatgcatatgaagagatgtttgctcaatgggaatatatgaccaagcagattagaggtctgaatagtgccaaggagcaga

SEQ ID NO: 274875 - DNA, 427 bp, Cannabis indica
taacgcccgtattttatatttaccaaactcgaaagactaactttaatatattatatctttataactatatgggtcgggatcccgaatattaaaatacaatttaaaagtattttattaatatataggtacaacttttttttaaaaaaaaacaaccccaaaatacagactccaaaataataacaaaaaccgaaacccttcaggttgcactgccgcgatatgtacaatcactgccaagctctatctcactgttcctccagctttgcttttcatttacctacacaaggtagcaaactgatgagtcaacagactcagtaagatatgcaagaaatatataaaaataatgcgatgtcggctttatgattaagccgccctgagctcaataatcaagctcaccaaatggttaagaacgttcttaagggtagtacga

SEQ ID NO: 274876 - DNA, 557 bp, Cannabis indica
ttacccatgatccttcaaagtcaagcacacatgaccgtagcatgtcttctaaaatctaaatagtcctctcggattgcccatctgtctaaggatgaaatgttgtgctgaactttaactgagtaccatagctcgatggagactctcccagaatctcgatgtaaacttcagatctctatccaaaacaatggactttgggacaccataaagacgaacaatttctctgcatataactcagcataatggtcaatggagaaattcttcagaacaggtaaaaagtacactgactttgtaaacctgtccactatgacccacacagagtcaaactgtcccaatgttctaggcaaacctaccacaaagtccatagcaacatcttcccatttccactctggtatgttcaatggttgttgtaaccctgcaggcctctgatgttcagcctttacttgctgacagataagacacttagcaacatactcagcaatgtcatttctcatgcctagccaccagaatatggctttcaagtcttggtacatcttcgttcaccctcgatgaactgagta

SEQ ID NO: 274877 - DNA, 645 bp, Cannabis indica
ggaaaatttttgtccaaggttgttcttgaagccgctacacctccaagaaaagccatacagcttggagttaaaagcattgacacaacgaagacaatcaacctttggggcgcagtggctccagtcagaggcggcgatacgagatgaatcacgacatgaaggccaacctagcaaatcagatcattcagcggttttaattcctagaaatctggaggtagtgggggaagtagttggcaaattttaaggctgtgcaatcactaataatcagccacaaaaagagggatgtggtaatattaaggagaatatggcagccaatggagaagattcaacattaaatgttaccaatagaggaaatttctttgattcctctattaccaacataattgactctaaaagaagaaggcctgatagcatagggggacaggtgggctccctggaaaagcaatttaataatgctataaatgttatggatcatgacattgtggaaaatccaaaaaaatggatctttggcgggttctggtttccacgcccgttgttgtgaaaattgtatacgcaagtgcacgcaatcgtaacaagtaataaagtgataaatcgcgtatcgtctccacagtgattgaaaattaatttataaaactaattactcacaaa

SEQ ID NO: 274878 - DNA, 262 bp, Cannabis indica
ttattattattattattattgttattatatttgtgagatattagtgtgttgttttacttaattttttttttgttacaacatggtcatgtattttaagttggatcgttatacagttatttgtgtgttgttattagttgtgcaaacagtagaaaatttgaagtgtttagtttttttcatgagtacatgtattatgattgtttttgtgttgtgtttaaattttttttaaggttgtcaccaatatattttgatgtctaaataattt

SEQ ID NO: 274879 - DNA, 550 bp, Cannabis indica
gatgaagaaaccactttttggtgaagaaaccagtttcttgatgagaaaaccactttcttggtgatttttctagtgattttgctggcgacaataccaattctgacgacttttttgacgccggcaataactccggcgatttttccgacaccggaaactacttaggcgaattttccggcaccgacatcaaactccagaatagtcgtcggacttggcattgtcactggtaaaattactggaaaaatcaccaagaaaccggtttcttaaccggtttcttcttcatcaagaaaccggtttcttggtgatttttccagggacaatgctaattctgacgactttttcggcgtcggcagcaactccggcaacttttccggcactggcggctactctgacgacttttccggtgccgacagtaaacttcggtgactttttcggtgctgacagtaaacttcggtgacttttccggcacgagtgacaacttcggcgatcactataattttatttgttttactttttttttaaaaaataattatgaaaggaattttaatatttt

SEQ ID NO: 274880 - DNA, 512 bp, Cannabis indica
aacaatccaaaatagaaatatttaaaattggaaaaattccaaattgaaaatatttaaaattggaaacatttcaatttagaaatatttaaaataggaaaaataaatttgggaaacaatcccatgaaaaaatggatttttggggaaaaaccccaaaatcgcaatttttgggaaagcagcccagtaggctgcatctgcagcccaggagaggctgctagcagcctgtcacgcgcgcggatggagtgctcacgccgaggaagctcggcgcctgcagggtgcctgaccgagaaaactcggtcagctgcagggtgcacgcccaggcttacgcgcgcggagggggaggctgatccgagggtctggtgcgcatgagcaccacccttgacagccttgaatcccgattttccaaaattcatatctttctcaatttttatcggaatcgagttccgtaaaaaacaaaattgctcaatttttcacaaggaatccaaataaaatattttcaaaaattgaaaaaatat

SEQ ID NO: 274881 - DNA, 508 bp, Cannabis indica
atatcaaaatctgataagctcatttctattaggttagcacttaactccctattgtcaattctgatcggcatagacctaatccaccttttggagataactaactctccaccaggtaatagagttccaaaccctgattcataactatcatgcggtctatctaatttactaaagattctggctgccacataagaatgtgtggccccagagtcaaacaatacagagtaaaaagagttgttgaccgagagctgacttgtcaccactgaagggctggcttttccatcagcctgggtaatcaaaaacactctagctggagtgagtctcaccggagcctttggtgcttcggttctaagttgagggcaatccctcttgtagtgtcttggcatgccacactgaaagcacccctgccctctacactcacccagattgtgccttttacaactggggcactctgggtaggtatatcgagtctcagaaccaccttgacgactgcctcaaccctggttccccc

SEQ ID NO: 274882 - DNA, 626 bp, Cannabis indica
ttgaattttctgcatctaacaatgaagccgagtatgaggctttaatcgcaggattgaaactcgctctcgagatgaaagtcgagtatcttcaggcttttagcgattcccaaatcgtggtgtgccaggtgaatggagaatatctggcaagaggcgggagattggttaaatatttagccattgtatgcgaactaatgcagaaattcaaaaaagtaattgtgtctcgagtaccgcgtgctcaaaattcacacgcagacgcactggcccgtttggcctcaactagagaagccgaattgctcgatgtaattccggtagacgtattggctcacccaactataaatcaagaagtgatcatggaaatagataccgttcaggaagtcacctggatgactccaatagtcgcatacctggaaaagggcatcttacccgatgacaaggtagaagcaagaaagctgcgacaacgagccgcccgatatgtaatgtacgatcaaaggttgtatcgcagaagttttagtcaaccgctactcaaatgcatcaacggggaagattgcggctacatacttcgtgaggtacatgggggaatttgcggcaatcatacagggggtaactcccttgcattaaaaatcatg

SEQ ID NO: 274883 - DNA, 737 bp, Cannabis indica
actttactaaacattattatagtataatttgttttttgtgtcatttatcttgaacaaaatttcaccaagaaaaagaaaaaaattaatttaaaaaaacacattttaggttggtacaacagaaataacatagagaaataaggggtaataagggaattaagtcaaactccacagcacagcttttgcaataatattactcttactcgaacccgcgtacacggtacagccctatgtcctctgtcctcttctggtggaccccactccacctgagttcacacaccttaaacaacaatgcaccaaccaacccacgctacccttctctctctctctactaaaacaaagataggagagagaaaaccatgcgttacacaacatttccaactcatatataaaccctactcccacacccaccactttcaaaaatcacaaactgtctctcattctcaatctcattccttttctctgtcgtttttaatctttcactgtcgttttgttttactactactactacacacattacaatgccgaggaaaagtaatgacgtggcagggcgagcctggaacatcctccgtttagcgctgttatgggcgaggaaaggcggagtgtttaaacggcgtttgatgacggagctccgtttgttaccgaaactcatgaagagtatcggccacgacactcccaaggacagaatccggtacggcgagcgccagctatcgttcgataagaccccgattttcccggcc

SEQ ID NO: 274884 - DNA, 727 bp, Cannabis indica
aaaacccaacatacaattgttccgagattagttttttgcagcatgtgcaaaaaacttggcagtgttggggattattttaccaagatctagatttactaccatgtatgttatttaacatcctaaatatgaatttctaaaacaatagaatttaaacacatataaagttcaaaaaaccttacattggttgtagcggaattaaatgactccttctgctcagatctctaacccttgtatcctttctgtagcagagtatcaccaagatctgagtccgattcttcttcagttgaatggattcttcacagtcttacatactatgattgagtaccaacttcctatgcgtagacatgtattctatcactataagggttcaaattgaagagagaaagagagaggaaggattccaaaatatagagagaagagtgaaggctcaaattttgactgaaggcaagtgaatgcttaagctttcatcgtcattcaatttgagtccatcactatctatttataggaatacttctaggtttaggtttgaattatttggcattaaaaattgataaataaatcgtaaaatcatgcaatagtggccgaccataggatgtgggcccaccacttgcaattttgcaattttgccatttttcaactatttatcttatttttttttacaaatgccatattttccaattcaaccacttaaatgccaaaactatctatttaataattaaaattaatt

SEQ ID NO: 274885 - DNA, 226 bp, Cannabis indica
aaatggttgaattggaaaattggtatttttgagaaaatcagatacaaaagtgttaaaattacaaaattgcaaaaagcaaggcccaaatccatcaagccatggccggccacttttgtaggcattttaaactgatgaaagatcatcagcaaaagagtttcagcatcaaggattcatagaaagagatccaggttcagatcttgataatactctgctacagaaaggatac

SEQ ID NO: 274886 - DNA, 503 bp, Cannabis indica
acaaaagagactaccctataacatttaacagtaccatatatagggcctaaggtattctcctatatgtacgtcatgcatcatcatgattgtccagtactctctatcaaatactagtagtactgaatttactagctaactagctttcaccacacactgaccaaaatacttactgagctagcgctataccctaatccatatatatatatatacctcttattggagtatgtcgtccttgtgggtgtatgtaatatgcatgtattatacatcgtttttgtaactgctgggaccaaatcttttcaggtccacggaaaagatctatttactactactctatatatagatgccaactatcttgtctccgattaactcctacctaggggtgggcatcatccaatccaatccaattgaaccgaaccgatccaatccaatccaattacaaaaagttggatatccaattacaattggattggattggatgctaaaagttggattctaattggatt

SEQ ID NO: 274887 - DNA, 677 bp, Cannabis indica
agaacccttcatggacctctagcatgatctgcttagcttcagggtccgatacacaccttaaataaggcatgttgagtcctttcgatagagaattttgtccatcatcacataacggtgagcttgatactgaatccttctggacagtgccttttcttggggtaactcaccttttgttatgtagtcgatgatggggaccatccagctgggttcttgcccaaccgttattatggcttcttttattttgatgctcggctctgccaagcgttccacaggtaccacccccagtttctcaatttcgctatctgaagctaacttagccagacagtccgcgtgagcattctcttctctagggattctttccaccttatagttcgcaaactcgtggagcagctcccggactattgctacatacgcggccattctttctccacgtgtctgatattctcccgacacctggttcactaccagttgggaatcgctgtagacttctactcttttagcccccacagtttttgctaatctcagccctgctatcaaggcctcgtatttgacctcattgttagaagctgagaagtcaaaccgtagggctgcttggattcgaagtccgttcggggatatcattgcgacccccactccggatccattctcgttggaggctccgtctacaaatactttcc

SEQ ID NO: 274888 - DNA, 956 bp, Cannabis indica
taatggacgaccagcgaaacgttagaaggcagggtgaattggttgagaccggaggtggtcggggtggtagaaatccccaaaacccccgtggacgcggtagaggccgcggtcgtgtcccgagaggtggacaggagaatccacctcaggccccggttgattgggaacaaaggtttgctgagatgcaaactagaattgagcaacaagaagaagagatccgacgactcaggcaacgggatgctcctgttgagcttcccccgcaaccgcctgctgcggttcctgcagcccctgcggtgccagctgagcaacatgttgctggtaaccgtatggagcctttatatgagagattcagaaagcaagcacctccagtatttctgggaggtcctgatgttcttaaggctgaacagtggttgactgttatcgaaagaatattgaattttatgggagtggtcggaaatgacagagtggcatgtgccacgtttcaatttcaagaggatgccctgatttggtgggagatggtatccctcaccagggatgtgaccagaatgacctgggaagagttccgggaattattcaatgccaaatattataatgaggcggtccgcagtgcaaagcggaaggaatttgttgagttggtacaaggcgagggtatgtcagtgactgaatatacaaccaagtttgatcgcttggccaagctagcctctggaattgtaccgacagattttagtaaaaaggaaaagtatttggctggactgaatgctaagatcaggcatgatttggttattacaacgaatgataccacaacttatgcagaaatggttgacaaggctcttcgagctgaaggagcagttaaatttttgcaagaaacccgagagtctcctggtgttggtgggatcactattctccctatgtctggtcctgaaaaagagagtgggggttctacatttgaacagaagaaa

SEQ ID NO: 274889 - DNA, 633 bp, Cannabis indica
ttaactttccttgcagacaaactatctccggaagctggtttgcagcttattccagcaatccacggatccttgctccagtctcttgaaccattcttccgcggacccgctcaatgttagcgggaagcataagcacttggcgtcattgctgactctcatgaccgtcattactcggttgaaccgtgacaggtgatcgctagggtccgagttcccggtataagctgccatttcgggcatcttgaaatttttggggagctctgcttccaagatgtgcctggcacatggctcccggtcttcacagtcagagtcggagtcatcacctttttgtctccgggagactcgagcaatgtctttccggagtatggcaagctcagccatgattccttcatttagtgttcccgtggagatcgcgggcacgtgtttcttttggtctaggtgatcccggaggtcaccgtgttttctattaatctgatgtctcaaatcgacgggagggtatttttggccccttcttcctctccctccgggttcctggtgcacagaaacgatctttcggtcctctcgatcctgagggccaagactccctttttggagtttgcccctttgcggacctttccctttcgagaaatctaagcggac

SEQ ID NO: 274890 - DNA, 542 bp, Cannabis indica
acataaatgacttctaatcttatattgataacaaatcagattagattgaaatgggttttatgtaaacatggaactcggtgtttggctcagtaaaattacaacttagtatattagtagattggaacggtttattagacattgggaatgtcgggaatggccaggaatttagaatttcccaaaatacccctttagtgttatatatgttattttagtgtgaaggggcaaaatagtcattttgccccattattgtttgtcctctagtggactttgtaagtggaatttaaattttatttgatgttaatattggctgaagtaaatgggttatgtggcatttattttcttttcccaaacttagaaaaaattagaaaattttcaaaggaaagctctctctcttttcctctctctctcggcctccttgtgcagcaaggattcttgccatttttcttggatttcaaactcttttagcaaggttttgtgacctcttgttgttggtatgtttcctctagcttccttttaagttttcttgaagaattttgatgaaa

SEQ ID NO: 274891 - DNA, 1168 bp, Cannabis indica
aattctgcattataatcctaattcctatgtttctctgtttgtccggttgtcttgaggaaattgagtcaatattgagaagcatattttttgagcaagtgtatagggcagctttcccatttctgtttgtgagaatgggaagaagtgtaagcctttctttacttttttagttttaggttatatagcgtagtttggtttttgttaattggtttctcttttgatgtggttttataacttaaactaaaaggtttctgatcgttaatttcttttaacttcccataaccatgttcattaatttccttaaactccataaccatgtcatgaagagaaggtttcgtgttttactaaaattagctttcattgctgattttttttttttttttgtgcaactttggttctctttaacattttttttttacggtgcttaccttatgaaaatagaaaatagttgctgaactgaacttgtataattaaaagattactatcaataatatttatccaaactttctgattggttagggcaaagccaaaattaccacagctgtaaagctagtgttattgggtaggtaggaactatttcactatggggtcatagggttggagcttgtccaccatcagtttaccacagctgagaaacaagtttgacaaccccagacatcggagcatcattctgcagtcaaagcatacataaaattagaagttgcatctgacaattgtgtaccagagtagaaaaataagcactggaccataagttgctttcaaagataagataaatgctaaccttataaacaattgcataaaagtttataaggttgaaacaacataagcaaatgatctaagcaatgatgtttgacttaccaagtaaacaacatcaaaggcattgcggtaggcatcgagcgagctttcaacgttatcattcctgaaacaccaacaggaatcatcaatgaattttctaagaatcaaagttaggtagaagtacaaagtagctctcatttgttgaaattcttaaaagggtaatgtagcagacataacacagctttgtcacaatagagaagtcaaggaatcttattataagatccaagagggtgctgttaacccttctagaagaataaatttaggtgccattaggttggaacttggaaggaatgaaaacacaagaatatgaatggaa

SEQ ID NO: 274892 - DNA, 595 bp, Cannabis indica
aaaaattctaaataatttatactgtcaaaaacaaaattaaaaaatagttagttcgatgcatataaaataaataaataaacaaaactaattgttttataaatctaggaatctttattcacatagtcatgtttactttccactgtgttgacaacacaataaacaggatcaagtatgtgaaaagggtttggatgaatttataaatcaaatagacaagcaattgataagatgaaccaaaacatacaaatgaatgaaaaatacttctgtttctttattgatattgaataaaatggattacattgaaatggagttttatttagggcataaaacccaacatcctcgcctttgattgatgccgcaagttgttagaacgccaccaacataatctcctatggctcttattcttgactcgatgagctcagccaaaatgtgacattagggtcttttgtttactaggcttggaacacataattacaaaatcaaggtcaccttgtcaaaagtaatagtgactctgggtaaaaataagggcttagccaaaggaatagaagataatgataaaggttcaggccaggctgcatctcgtaagtaacgaaattta

SEQ ID NO: 274893 - DNA, 273 bp, Cannabis indica
tcctaataattcaaccctaaccctattgaagaaagtataaaaggaaggctatggtctcttcatcaaaactaatgcctccaaagctaaaaacctagctttttgatgagacctcttccttcttctttcttcttcaattcgaaacacttagtctttctttaccaaataatattcagccactagtgattgagtaagtgcccacacacatcaagttggtcctcaatcatagtatgtaagactgtgaagaatccaaattcaaggaaggagagaaagaga

SEQ ID NO: 274894 - DNA, 700 bp, Cannabis indica
taaggcttcgaccttcactgagtcgagggacgtcgtttctcctggaccggcggcatatccgggttgacatttaggacatgagtgatggcgtggggacttatgccagtcatgtcttcttggcaccatgcaaaaacgtcaatggcacccctaaatgtcttcattattttttctttttcctccgggtctaggctctttcctagccgaagtactttggtggagtcaaggtcacacactgacacttcctcgacatcctccattggttctacaatttttttggatcccacacggggatccaactcgtcttcctcagccatctctggctcaaaagtttctcggaccatcagcacgggtaggtgggcagcaacgttatagcactgcctagcctccccttgatttcccctcaccgtccctatcccagcttcctgggttgggaatttcaggcacaagtgccgtattgacgtgaccgcaccaaagtccaccaaggccggtcggccgaggattgcgttataggctgtcgggcagtccactaccacgaacgtgcagtatttgaaggtgctctggggtgtgtccgggcacaaggtgactggaagcctcacttttcccatcgggataagtgttgttccattgaaccctgtgagttgggaaccatttggcgaaaggtctcgatccgttaggcctattacagtgaaggcctctttga

SEQ ID NO: 274895 - DNA, 1114 bp, Cannabis indica
agttgatcaagttcttcaaattgcggaggaggagcgctattggaacgttctattgtctgattcttctcttcgagacagcactttgtgggatcacgttccccgtcaacccgaaggtatatctcatcctaagaatcgtgctaagtctcaagttactatactccaaagaagtttggagattttgggatgcgaacctttatttctacctgaattgacatcagaaggacgagattttgcagatcgattcatggcccaatcttctttcactcttcctctggctggtgacggtgctatggaacgtttacgctcacgcaaacagaagactaggacgactcctagtgttgagaaggaggttgttactactgctgctccttcttgtccttctgcgagggctcagaagaagaataacaagagaccgtctccggttgagtcgaccgattggttgagtaatacagttgatctttcttttccatcttcagcggctgcgcattctgagtttggcctacaccttggtgaggccagtaagctattatttccaaaggatcgagctcgttttgagaacatcggagaaatagcttccatggagttgtccatctcttgctcctttcaagtatgcttgcattcccatgttacaatttatgtgtggacaaactcgcgatattattgtgtctgactattatggtactttatattgcatgacaggggcttatgtacgccttggataagatccagaacatgaaggagcaaacgaaggacatgaggactgagcgtgatactttgcgcggggagattaaggagctaaagagctgcaagagagagcttgaccgtgtcagagaagagttgcgaactcaacttgatgctaaggagcaagactctaatcgtttgaagtctgccttggctgatcttgctactgcccaagctcgtgtggtcatgttggaaggtcggttagtcgaaattggactggaggctgagatccagtgtcgcggaaaaatggcgatggagtatcgagacaacaaggccgagtcttgggacataccccagtacattgctgactatgaagaattgctgcggatgagggccgaggaagacgctcaaactagccaactggctaactcgt

SEQ ID NO: 274896 - DNA, 670 bp, Cannabis indica
aggttacgtgttttgggtaaatgaaactgggtaacattcatagaataggacctgtaaactgacataaccgcacacaattcataggcactgtttcacgtctcgaatactcgcggatattcggatgaacaatttgaatgttcgcgggtgttcagatgaacagcttgaataatcgcatatttccaagacttatttccacttaactgttagctagatcttttaggatttttatatgtcgcgggctgagttgtgagggtattaattgctattccaaatggtgggtgtgtcacagtattctaatggccatatatgcgattatatgccccttgagatactgagatacacccagccatttgtgacatgcgttaatactcgaatgatcgcactctttggttgataggtagtctcggaacggtgggggtctcacagtaacttcagggttatgctcgaaaatgcatacctcttgagtcactgtgaaactcccagccgtttctggaggtataccgtttaaccgaggatgcgtgaattacttgcccaagatagttgtatctcttctcgcacattgacgggatggtcagtattcgcatggaggctgacctttctgtcgaatgcgactttataatctactgcgggtgagatcacttactttatttttcacacatccatcacgctg

SEQ ID NO: 274897 - DNA, 518 bp, Cannabis indica
agagctgaaggaagcgtctgaaagtagacagtaacattacaaaacaacaatggtggagactcgaaacacacgtcaacctcgtcctcctcaagacgctcaagacccagacgatgaggatgtggcctcaagagcaaatgtgggctctgaaaagggagaaggaacccacgatgacgaatacgaaggaaacttcgatgagtacgacgcctacgacgaaggcagctatacagagctagtactcttgagacaaaaggctgctgatcatgaagctaaaatcgcagcccaaaaagaacaaaaccaaaagatgcaagaggtgatgctggccatgcaaaaaagacatggaggtagcaggaatccacgtgcatcataaagccatccctactggacttagagagacaccaggagagtcctcgccaagtgcccaaaagaagaaatctagggaacctagccctataaggtatccctctgaagagaaccatcagaaaaaccctacttccactcctgggaaaaagaaaaaggtg

SEQ ID NO: 274898 - DNA, 762 bp, Cannabis indica
agttagctcatgattttccattatatcttcctttgtccacataggagctttgaacttggtacaaacttcaaaagaggagaacgttgagaaggttgcatgacgagaaggagcatgttcttcagttctgccttgtcgactactgctagttccaggtgtagtgcgattttcactacggggttgtcgttctcgctgtgtaccatggttgctcggtacacactctaacctcaaggaaggtcccgctacggcttcatcgactgccaaatcatgttcatcgtccatattcaaatctacaataggatcgttattgtagaaggttgtatcgaactcctcaaactgatgaaatcctgtcgcttcttgttgttgctctacattggtcggaacctgtacattggtcggaacctcttcattcacaccaatcccaacatctgtttcgcgaatgcaacaccctacactccgagggagaggattagtaggcggcgtagacccagaattcctaacttttctcaccttggtcacgaataatggcataaactctgtatttgacattgttgccctcatctctaagaacgttctcagttggcgttctttcttaataacctttggcagaaccatttggcccttcatgtacaaggaacaaatctccaactttaaatcatactctaaaggatcaacctccaactcttcatataaaatttggctcggtaactgtaagggtcaagctgccttctgctttgtaaatccaattataattctcacataacc

SEQ ID NO: 274899 - DNA, 388 bp, Cannabis indica
acaccctaaaaaaaaataagagaatgaaaggctgtcagcacaataaaaggatatgagatcatataaatatgagcgtgcacataagaagataggctattatcaatacattttgataaataatccatcacgtacccgaaggatgtcttggactcctttagtgacagtatcaccttcgtagttggacatttcacgcaccacctcaacggtttcagtttttcgaactaaggaggtcaatgttgtcatgcacagactctagcatctgaattgtggcatcatcgggacgaattatgggaaccacgatggaaggtctcctcatgcggccaccaatatttgggacagaaggagaggcttgagcattctcctcgccttctaccgcggtaggacaagg

SEQ ID NO: 274900 - DNA, 308 bp, Cannabis indica
ggtgcatcatcagacacgtctagaagtaatgcacatatgcagggggagccttcagcctttgatcctgtcaccagttcagcacaacctgatctagatcctccaactgactctgcaacacccttggtgtcgactggagcaccttcccagggggagtctggcacagcacaggaacccacagatcatattcaatgaaggggggtatatttgtaattcgtttcgtttttgtagtggctttgtttatattcctaaagacatttatatctggattattaactctgtttttttttgtgtggtctttagttttgttt

SEQ ID NO: 274901 - DNA, 714 bp, Cannabis indica
tgaatatataaaatgtggctatataaacaaattttggtttatgagaaattattgactgactttttttaaaaatattatcttttttttatataaaatgtggctatgtaacagaattcttggtttaatattattatttatttttctgtcaaaatattaacagaatattctaatacttgacagaatattctgattagaaaacgttaattataattgattaattttagataaataatcctaccaaaatttaatctaacaaatttttctctctagagcaaaaatcccagcctccaacataacgtttaccagtttataaccttagttataatttcttaagctatattttataattttaattttcatattaaaatttgaaaaatactaatgaagacaacatgctacatgctattatacaaaagtattgcatttatatatcccacgatgtttcaaaaatacttttgaaagttcatcttgaattaattattaatatgtaataaaagatattagttattatattattacttcaaacaaaggaaagttctagcggtgcttttactttctaatcatctcttggtttcgggcagaaagtcatattcatgtgttatgtgtacgttaaatttttgttaataggccagggaagagagtatagtcttacaaaacttgaaatgtgaacctgagttgtcagcatatacataacctcaattttggcttctttaa

SEQ ID NO: 274902 - DNA, 604 bp, Cannabis indica
atatctaatcgggaaattaaaggcatattggagaaggttgtaaatcccaacagaaaagattggtcccaacgcctcgatgatgcactttgggcgtataggacagcatataaaactcctctaggcatgtctccatatcgcctagtttatgggaaagcatgccatcttcccgtggagttagaacacaaggcgttttgggcactaaaacatctcaatatggatatttcagcagctggagaagcaagaaagttacagctgaacgagttggatgaattgcgtttgttttcctatgagaatgctaaattgtacaaggagaagacaaagagatggcatgatgagagaatcaaggaaagagtttttgcaaaaggacaagaagtgttactttttaattcaagactcaaactctttccgggaaaattaaagtcccgttggtctggcccgtttactgtgcaagaagtgactccttttggtgcgattacagtgaaagatcaacaatccgggagggaatttaaagtgaacgggcagcggttgaaacactattggagaggcgaggtcaaccgagagaagacctcaatttctttgaaagatgcttgatcattgtaatttg

SEQ ID NO: 274903 - DNA, 780 bp, Cannabis indica
tcgcgaatattcattttcaataaatttaaataaaatacagaacagtaaagaaacatacccgactgttgaataacagtgcaatgtcggttgccttgacatcttgtttccgctggccctccggtgttttccagctcaacattctggggaacttggtcccgttgcagtgggcatacttcttccccaacttctcaattgcttcgtatgcccagtactgaaaggcaggtacatagccactaactgtgtactttgcctcctgagcaatcttcttccccttcttcttgtcaacattatccttgtaatgttgcatattctttcctaatgtctccatcagcttacgaaaagcgcgctcgccccacggatacttaaagaagaagtcgagatcgttaacaaacttcaacatctcaggccaaacttggacattgccctcctttgatactaatacaccttcaatgaaagcgatcagtccaagcttgtaggcatcatctttatcttcgcacctctcaagttggatcataagggagtccaactgaacagaactcttcccttcaaaataagtccgaactagatggtcgttggacttggcgtgtatttcctcgtctgtaggggcactacccataggtaagccagtaatgagtccaaactctatccgtccgaatctcatgtcatttctccctacatgaaaccaaacctcatcctccttttctgtgtccactttcatttttcgtaagaggaggctgtggaccaacgcgccagagaaagttaactctccagcttcccaaa

SEQ ID NO: 274904 - DNA, 784 bp, Cannabis indica
ttttcttctgtgcaggccggtctgaagttggcctacacttactcccgggctaagtctgttgcttccaagagcgcagctctgtccgacaccttgaaggcggaggcggacttggccaagaaggaagctgaggaagccagggcggaagctggagctattcggttggagttgggcgaggccaacaagaagctgttcgctgctgagaagaagatctccgtgctgacaaaggatctcgaggctgctgactgttttgaggagaccatcgagatcttatctgctgaggtaaacagtcttcaggatgagaggacttctctgcgagcagttcttcttcggatgaaggaggagaaggacgccaaggagggggagcttacggccgaggtggacaggttgaaagagaaggtcaatgccttggagatagccggtctcgagctcttctttgatttgtggaaggctaatccccgggccaactttgactacttgggcgaggctaaggacatgtaccttaagtactgcgcggcccaagtggcttatggtgggaacgaggcggctgcttcaacctccggccaagctgcttcaacctccggtcaggctgctgatgcttctcctgttcaaacaactgatcctcctactccagttggcccagaaggaccgaacaaagagcttgggactccagccgtttaaacacttcttttatctctttttttatatatcttattcggcctccgggccttttctaagacatctggactggccaagcggtctttaaacttggaattgtttttcattt

SEQ ID NO: 274905 - DNA, 1535 bp, Cannabis indica
tatactaatcttacctggattctgaattcaggtgtgccggtcaacctgactggaactatctgcgcggcggattacaggcccaaataacataaaaacgaggagaactagggtttctgaaaatcacccaaccggtagaccggttgcccaaccggaattccggttctgggaattttcagaaccccatccggaattccggatgcacaaccggaattccggttcctcgcaggcagaacttcaaaaattcacacaatgctcaaatcaactccaaacaacctcaaaacttccagacctgttctatataacccctagaacatttctaaagcatcaaactcacccagattgcacataaacaaaaatcaccattaaagcttcaagctttgagttctaaactcaaacttgatcaaacactaccaacatgcaatcaaaccagtccaaacctacttaaacatgcataaaatagcctctgaaaacaactacaaacttcaacaacatcacagcaacagattttaaccatttctctttgaaaaccatagttttgagctaaaaacttccaagcttgaaatcaaagcaattaacatgcattatactagctctaatctacctaaaacagcaagattaattctctgaaacatcacaataaatcacagcaacaagaaccacaaaaacaagcatgcaacaacacttctttttcatcaattttcaaaaaaactaaaagaagagctagagagaacataccacaacaagagttcacaaatttgactagagagagcttgaaaatcaaggaaaactcagccctagaatccccatgcagccgagagagagaagagaggaaaagagagagccttttttgaaatttttttatttttcttttcttaactttgtattttgtgaaatgaaaatgaaattaaatgtcacttactcctattttactttcagccaaaacaataataaaataaacatataattcaactattaaaatcactagaagacaaaataataatggggcaaaaagaccattttgcccctccacactaaaatcacataaataacactaaaggggtatttttgggaaattctaaattcccggccattcccgacattcccaatgtctaataaaccgtcccaaactactaacatactaagttgtgattttactgagccaaacaccgagttccatgttaccgggcaccggaaatgcaaaattatgaaaactactgaatgacataaaaatgcatctctgaattcaataataacagtataataattatttaaatagctataaataatttcataattaaacgtgattaactgctaatttccaaattaaactaagcggtctttacagcaaccatggtttgttacgtgcttggagccaacctacctttaggtccctttgaaggttttgcacgctgaatttggaaagacaaaggagtggactaagtgggaattctaaaacccaaggtattcattgagagatttcaagcaattaatacttaggatgcgatattggatggtggttatctatttttcaatag

SEQ ID NO: 274906 - DNA, 600 bp, Cannabis indica
aaatgagcaccaaagacctccttttataatgtataggtgatcacttagaattcaaaatacacaacactcatttctctcatataaatgagtattaatatagtttgtaacaactatatttcataccatttgaatcctatcatcaaattgtgtaacaacccttttattacactaataatgtgtgatcaacacatgagttacaagtgacaacaaattgtaactcctctccaagttacaacatgtaggttacaaaagtgtaggttataaaatcataggttacacatttatttaccatacacttaatatatattattcacatatatttatcacattttaatctactttattattatattataaaataatataacatggtatacaccctcaatagtactttcctcacagtgataattaactcataaaaattcaactattgctagctaaatttgagttcgaacaacttatggtgcgtttggtaacacttttttaattaattttttgtttttaaaattaaaaaagtaaaaatattttccaaaatcatgttctataaaactgtttttacttttcaattttttaattaagaatctaaaatttaaaaataaa

SEQ ID NO: 274907 - DNA, 528 bp, Cannabis indica
agttttgcatttggtttcggggggggaatcgttatgggaatgggaatgggaataggaatagcaattggaatgggaatgggcatgggtcgaggaatgggaatggggattgagaataggaataggaatgggaatgggccagggaatgggaatgggaatgggaacgagaatggaaatgggaaggggtcgaggaatgggaatgggaatcccaatgggaatgggaatgggctggggaatggaaatggggatgggaatgggaatgggaatacgaatgggaatgcgaatgcgaatgcaaataggaatgggaatgggaatgggaatgggtcggggaatgggaatgccaatgctaacgggaatggggatgggaatgggaattggaatgggaatcagagtgggctagggaatgggaatggttatgggaatgtgaataggaatgagaatgggaatgggaatgggtgggaatgggtataaaaatgggaatgggaatgggaacgggaataggaatgggaataggaatgcgaatgggattgg

SEQ ID NO: 274908 - DNA, 588 bp, Cannabis indica
cggggtcttcaagaagccgccccccatcaggggaaatcgcgaccggagggatcctaaaaaattctgtaagtaccacaaggacattggtcatactactcttgaatgttgggtcttgcaggatgaaatagaggaactgatccgaagagggaagttcgacaagtataaaagaagcgaggaaagtcatccccaagcggatggcaaaggagaaacccagaacgcgagtggctccagaacacctcgcaatatcttaactataatcggaggaccacacatcgcaggcgactctcgcaaatcgcaagaaaggtatgccagagaagccaaggagaggccgctaaccaatgtgaacaatcttggtgaacggccagagaagctctttaagaaagaatgcgacgacatcatctttatggagagcgacgcgagatgggtccatcacccgcactctgatgcactggtgatagtcgccaatattggtggagacaatgtccatcgtatactggttgacaatgggagttcagtgaatttgctgaatttccaagccttcaagcaaatggggttgcaagagaaggatttgcgacctatgacatcaag

SEQ ID NO: 274909 - DNA, 750 bp, Cannabis indica
aataataaaataaaagaaattatttgaaattaaaactaccaccagtatttaatggtgggcacttaatgtttcaatgtgggcgatgctaagcttattactagtattcctaatggagatagggaaaaagaagagaaggtgttatggcattatagtcgaaatggatataaaaagacatttaaaatgagggaggtgtcctcacaatctaatcctttcaacgaatgaattcttggtggaattcgttgtggaagttgaaggtgcctttgaaaatcaaacatattgtgtggaatgttagaatattttatgtggactaacataattaagtgttgctcactcaatgtcgatattagcgtataatgataactatataatcggtaatgcatggtattgtcatcgagccataatgggatggacataacgtactaacacgctcggggtccatggacacgctctaaaatatttttggtcagcccattgggccaagacaatgaattctctctatttggactataagaccaaaagacccactaatccttataaaaggggggtcatgtcccttattggtgactaaggatgtgtgtgggtatgtgtgttttgagagtgaaaagagtagtgttcatacacaccccttgcccatatattttctttgatgtgtacattgaaagaagaggattgatcaagaaatcaatacacattagagaggtatgtttattatcttttaatgccctaaatataatgatttgattttgggtt

SEQ ID NO: 274910 - DNA, 521 bp, Cannabis indica
tgaagcactgagattatggagttattgtaatgtgtgaattagtgtgttttatgaagcaccgaaggtgagtatttataatgataaatgtttaggaggttgtatgaaacacagagattgttgattataaataactatgaatatacttgattacgtaataagtgtgctctcatagacattaagttatttatgcgccttgagtatgtatgacctattggtatatatattacattgtaatgaaatttgctggcactttctatgattttatatagtagcttttcttgctgagtcattgtgactcacgggtgcttcgtggtgcaggtaaggaagttagaagctgtgttcggccatgagtcagaggtctcccagcaatgtacatatcagccgtggggtcttggcttctgggaagcaggatcgaattcctttctatgtttggaaatgtaatctattgtaaaaaagatttttttttatatatatatatatatatataaacaggggatccctaatagtttttaaaatggaag

SEQ ID NO: 274911 - DNA, 535 bp, Cannabis indica
gtctgcccctgtcctgaagatcaaaccaaagggtggaacagcgacgacttcgccggttgttgcccagaagaggaagagcgatgtgatggcttcacttgtcgcagactcttccaagaagctggccaagaccacacaggacaaggggaagaaagtcgtcattgatccacctgttcgagctcgcgacttcctggccatgcaggaaaagttcctggctgagatcccttacgaggatcttgttacgcgatctgctgaactggccgcgcagtccatggctttgttcataaaagctgcggctactccttcgaaggaagctgactcgctgaagaggcagaacgctcattttcaggagaatataaaaaagctgaagcaggatgtggcgggatggagaaagagcttgaggagctcagcaaggccaaggagaaggagctcgaagaactcagcagggcgaaggaacaggcggagctcgaggtcaagaagtcgcaggcaacgatcgtggagatggcccgcgatttggaggctgagaaagagaatggga

SEQ ID NO: 274912 - DNA, 664 bp, Cannabis indica
cataagtttcaaccattggaattttaacagtccctccaccaaattcttcacttttgcagtcttgcaaggcctcatttggtagtccgcgggtttctgaaccaaatatgagataatcacctcttctgtaagaaatttcctgaaaacaattaatcactaccaattaatcacaatcattgtctaacagcatatagcaaaaagctaaagaaactgttcttaagctccttccgttttgtgttgtgtattccatgcaatgtttaaaaaggcgtttttgaggcgcgccttgaggcgcactgttcaagctgaggcgtttgaacagtgcctcaaggcgtgcgccttgctgagaagaagtgaggcgtacgcctcatgtggtgaggcgttgagttgaggcgttgaggcgtaagaggcgtgcgcctcaaattttgtgtgtgaaatgggctatttcagccctaaaaaaaaggcccaaattagtattttaaatttagttttctgctgcctaatttaaagacttgaaaaactttaaaaaagcccaataaatattaataaaaagcccaataaatactaagtgagccaataaactaaattaaaacctattttatcttcttcatagcagctcatctctttcttcaccagcagcacaccagctgctgcatattgcttcaagttc

SEQ ID NO: 274913 - DNA, 709 bp, Cannabis indica
aatagaaaatttgtcacctccagtttctgtaaaaggagtgaggagtttcctgggacatgctggcttctaccgcagatttatcaaggacttctctaaaatctcaaaacctttatcgagcttacttgtaaatggagttccatttgagttcggagaagattgtttaaaagctttcaagattttaaaggagaaattgattacagcaccgatagtaacttcaccaaattgggaactgccgtttgagttgatgtgtgatgctagtgactatgccattggagcggttctgggtcaaagagttgacagagtattccacacaatctactatgctagtagaactctgaatgatgctcaattaaactacgccactacagagaaagaaatgctggcaatagtgtttgcttgtgacaaatttcgaccctacctaattggaaataaggtaattgtctacacagatcattcagcaatcaaataccttatgaccaagaaggatgcaaaaccaagactgattcggtgggtacttttacttcaagagttcgacttagagataaaagataaaaagggcaccgagaacctggtagcagaccacttgtcaagattagagctgcaagagagtcagaatacaaaggaggtacaaataaatgagcaatttcctgatgaacaactctttagtgtgagggaaaacctgatggtaccgtggtacgctgactatgtt

SEQ ID NO: 274914 - DNA, 536 bp, Cannabis indica
taaaataatttccaacagttgaccacaactgaaacacccgtatggtccactacgagtctttccagatgaaccattactagtgctacccccactaaattgttgtccttgggaccactgtccttgattcttcttagtcatctttcggtcatttactcttcctctgcttgtgttcttcttctcattcccttctacatgagcctcagttcgcaaggctgctgtcacacactcagtcaggtcgttaaaggtcaaatgggttataggaccacgtatcgcaggcctaaaacgacgcatgaactgttcaatcaccaagggttgatcaacaacaccagcatatgcataagaggatagctctacaaacttcatgtaaaattcattcacagtcatatccccttgtcttagaccatcaaatactccaataagagccctcctgtgagatggactaaaatattgttccctgaaaacttcctcaaaatctcgccaagtcatcccatcaatttccattgtcctggacaaggtctcccaccaatctgctgcac

SEQ ID NO: 274915 - DNA, 604 bp, Cannabis indica
aggaaaaatggtaactttattaataagaagattcaaccattacaatagaaagaaaatcagcgggaacattatcctcgctaaatatacgatctgaatacaaacaagagctacgagcaagacaatgtgcagctttgtttacagaacgtttaacaaaattaattgtgactaacggcaaatcggccataagagaacgacaagccgccacttgaaggccaaaaggagaaggaatattcaccgtgctttggattgcctgaacaacaaccaaagaatcggtttcaaccacaaccgatccccattgtttcctctttatccaactcaaagcctccttaacccctaccaattcggccatagccgaatccacacacccctctcgcaaaactgtgaagccttcaatgaatcgaccctgatgatcccgggccacccctgccgctccaaatcgactatcacttgcaaagattgcaccatcgacattaaccttaatctttcccataaccggtttcacccaatgctctaagtccattcttgaacccgtaggaacaagtaaagaccccattctcctttgttgagcatttctccattgattaaggactactcttgccaatag

SEQ ID NO: 274916 - DNA, 681 bp, Cannabis indica
actaggattaccggcacctggtcaggagcacccggggatttggaatctctgcctttgcgggacaacaggtaagacagtagttgcacgtagagatatgcacggtggtgcttatattgaatattatattggtgataaattagaaaccgagattagggttattaccctaaagtgagcggtttaatggcctagggttattaccctagtaattattaatgtgtaaatgctatgccatgctaaatatattgtaataaagaattatgcgccaaggcataattaagttagactcggtaaattagtaccttgagtttgatagtaatgcggtctagggttattaccctagaatttatgtgaaggtaagaaagcgatgatgtacaataatattgctaatcaagtgaaagcatgaattagggttattaatctctataagtgttattttgagcatgcaataatatgttatatgagagactatttggtatgcaagttagggttattaccctaagattttatatgttatagtgtatatggaatgtatgtatatatatcaagagttatgtgtataagacataacttggttagacctggtatatattatcaggataaaccactgaaagaacgtaatgtatggattacgtaaatatatatgaatagggttatgcgagcaaggcataaccaggttagact

SEQ ID NO: 274917 - DNA, 636 bp, Cannabis indica
taatcatttgctttattaatcttgtgatcaattaatcaagaaaacgaaaagttgagctatcaattcacacactttattaggttgccacctgagaaaagtgcatcatattgaatatagctatctatatttattcatagaaccgtgcgtctctttttctaattttattttgtttttatttttttcacttttttcttttcttttcttttttcaaagaaattgtgcaattttattgtaaccaatcgactaaaataatagcttaaaactccatcacgacatctcccctattagaaacactatcagaattcagaattaaaatcaaaaaaacgaaccaaccaatagctctcctgattctcgaattgtttaacaaaaacaaaattaaaacaaaatctgatgaaaaccattgtgttaattgtcacacgtgtagcttattgtagctatagtagcttattgtatagttatttaaggaactcttcagttttgtattattcaattcagtaaataaatatattgcgtaatctgggccaatctatcatctaaaaaaaatagcaaaaatttcctttgaaacaactgaaggaagctcaaaagtttcatcacaagccaccttcactcaactacctgccctgtgatgatttgttc

SEQ ID NO: 274918 - DNA, 547 bp, Cannabis indica
tagtgcaggaattgagttcgtggtcgggaaattacataatttaacactccaatctgatctgttggaaagaatcagaaaggcgcaactggaagatcccgagctagttaaagttcgagatgaagtggtggccggtcggcctagaggtttttcagtctcgaacagtggaatgttgttatataaggctcgagtctgtgttccttgtgtgaatgagcttaagaaagaaatactggatgaagctcacaccactccatattcattgcatccgggaaccaccaagatgtatcaggatttgaaaccctacttctggtggtatgggatgaaaagagatgtggtggactatgtgtccaagtgtttaacctgccagcagattaaggctgaacatcagaggccggcagggttattgcaacctttagtccttccagaatggaagtgggaggacatcgcaatggactttgtaactggtttgcctagaactacagggatgtatgattctgtttgggtcatcgtggacagattcacaaagtcagctcacttcctaccagtgaaa

SEQ ID NO: 274919 - DNA, 770 bp, Cannabis indica
ctggtgtatcataagggagtttgtccctttccttattgattcctacagattggatcaaaaacaattcttgaatgaggtattcaactccagggatgaatcgaaaaagaaatatttattggttctacctcctattttttatgaagaaaatgaatctttttatcgaaggatcagaaaaaaatgggtccggacctcctgcgggaatgatttggaagatccaaaaccaaaaataatggtatttgctagcaacaacataatggaggcagttaatcaatatagattgatccgaaatctgattcaaatccaatatagcacctatgggtacataagaaatgtattgaatcgattctttttaatgaatagatccgatcgcaacttcgaatatgtaattcaaagggatcaaataggaaacgatactctgaatcatagaactataatgaaatatatgatcaaccaacatttctcaaatttgaaaaagagtcagaagaaatggttcgatcctcttatttttatttctcgaaccgagagatccatgaatcgggatcctaatgcatatagatacaaatggtccaatgggagcaagaatttacaggaacatttggaacatttcatttctgagcagaagagccgttttcattttcaagtagtgttcgatcgattacgtattaatcaatattcgattgattggtctgaggttatcgacaaaaaagatttgtctaagtcacttcctttctttttgtccaagttacttctttttttgtccaagtttcttc

SEQ ID NO: 274920 - DNA, 634 bp, Cannabis indica
atggtcggtcggttttcggattataactatggaaaccgaaaaccaaatttcgattttttttgtgtaaaaaacgaccaaaccgaccgttgctcacccctatatatcagtgcgccacttttaaagaagtgtattaatttttttctaagttttataggatgtcttaaataattataatatacactattataataaaaaaatagaactaaaaaaatatgtcgggtgccgaaacaaatataagtaattcgtacatcacttttataaatgtgcattgtaaatttctcaaagaataattcttaattttacaaatacaataatataaatatatataaaattaactatattatatataataaaaatattgtcaggactaccgtgcactgtaaaataaaactacaaaatgctgtaaagaaatgcaactttcttggaaagatatatacatggcatatattgttttttgcagtctcataactctcattcgagctgttcttaggatgtaattggagagattagcaatatactgatttaatttaccaaaaaaagaaattctaggtggcgtttggtaacacttttttaatgagttttctatttttaaaattggaaaagtgaaaatattttttaaaaacatgttttataa

SEQ ID NO: 274921 - DNA, 616 bp, Cannabis indica
ggaatggaatgaaaattgtttcctttccattccatccatttcattacctccaaccaaccgctaccttaattctaaaccctagtcagactactttcctaagtcaaattacatattcaacaaagttgatgttgggcagaagtagacattgccataaaaatgccattgatcatgtttcaaattgaagaattaagccagaaataagatgcaaaagctaagccagacaagacatacctcataaccatctgtgaggattttcgtcttcttttcaaggtttgtggccttcttaatatcatcttccacattctttctgacgttctcatactcattctgcaaggcagcaagtttctccatgtttccagcaacactcgataggccataagcattacgggtaggaaagtacatgagatcatttaaacatgtattgtgtgcatccacaaactgatcaagtgattcaccttcatgccccattgctagacgaagatacccggcctcttccttgatgaaattatcagcctggtagcaaaatcatattttaccattacaatcaatgtttaaaaaaacgcaaatgagccttgaggcgttttttttttgtaaggcgaggcgtaagcctcgaggc

SEQ ID NO: 274922 - DNA, 583 bp, Cannabis indica
agtcaccctactagaccattttttattctttccaatagatcaaactacaacgtgataccaacaagttctcctatcacgaactcaatccgtgctctgtttatatttctagcaaactttggtaaaatctctttctagttatatctaaacctctttgacctaaagcatccactatcaattactttccaagggtggaagaaaatcttacagttatcatcttcaaataaccctgaccattattgcggcttcatgcttaaatccttccaagtgaagatatgtttgaggcccttgtgatcagtataaattttacacttttattacaagataggtaatgacgccaaactttcagtgcatgaatgaccactgtcaattaatatcatgattagaacactactattcacactccttcaattgtccaggtgcgcaagcaataagcctcttgaactgtatcaaaacataatctaatccgtgtttattggtgtcccaataattcacaatcttctcctcacagactgacaacgttagcactggtgcaataggtaactttatttcaattcctttcatttaattccactaaagacataga

SEQ ID NO: 274923 - DNA, 656 bp, Cannabis indica
gacaattataaacagagaatgaagttcattaaggataacaaaagcacgtaatactgggattaaaagttgcccggtcagcctgttgtccgaaaaatgaaaaataattccaagtttaaagaccgcttggccggtcatgatgtcttagaaaagggcctgaggccaaataagatatataaaaataaagagataaaaagagaagtgtttaagcagctggtgtcccaggctcttggttcggttcttttgggccaatcggagtaggaggatttgttgcttgaacaggaggtacatcagcattctgaccggaggttgaagcagctgcctcagttttaacataggccacttgggacgcgaagaacttaaggtacatgtcctttgttggaaatattttaccaggatctagatttactaacacgtatgtttcattaacatcctaatatgaattctaaaacaatgaaataaacacatataaagtttaggaaaccttaccttgggtgcagtggaatataatgactccttccgttgagagctctagcccttgattcctttctgtagcagagcatcaccaagatctgaacctggatctctttctctccttcctttgatactgattctccttcttgttgagtggattcttcacaatcttccacactatgatt

SEQ ID NO: 274924 - DNA, 575 bp, Cannabis indica
ggttttgatctgggttcgggtttgggtttaggtccttgtcctagtctaagtcctagttctgttatagttccatttgcaattctcagtttgagtttgggtttgagtttgggtcgaagttcgagtactggtctgagtttgggttcgggttcggatttcagtctaggtccagatcaggctccgggtgtgggttcgcgtctatggacttggtctaggtttggtccgagtcccatgttccaatcccgatttgagtctggattcagttctaggtctaagtcctttgttctgatcttggttcgggtcttggtctgagtccaggttcgtatccggatccctatctaggtccaagattgtgttttgggatcgggtgccagatttaggtccaggtccgtgtctcagttccggtctgggtacacgaccgtgtctgggcccgaattccaatctcagtttgggtgtgaggctaggtctttgttcagttttaggtcatggttcgggtcgtggtcacagtccaagtcttgttctagggtcctggttcggcaattcttgtttaggttctaattttgggtcccaggtctagg

SEQ ID NO: 274925 - DNA, 463 bp, Cannabis indica
ctttccttcatttcggttactttccattccttgccatttctgcccgaatttctcagagagaaaattcctcaaagtagcacaaactgcttcaacacttaaacacttcttttaattttccagtgtttggttttgccagtgcctctcaactctcattcaaccatactcagtacccccagttcaacaatcaactgtaagtttcttgcatctttaaataataacatgcttacatttactttgtttgttttctgggttcgcacttagagacttctgggtgtgtgagtgtttgagttcttcgagttatgctttatgtttactgtgttagttgtagagtcgccattgtcatgcctctgtcataggcatacagctttgcttgaaggaggccatgtgttcttcgtttagcaattgcttagggcataggaagacttttctcttttcttttcctttttgcaaaaccacttttctg

SEQ ID NO: 274926 - DNA, 816 bp, Cannabis indica
accggaattccggttctgagaattcctgaaccctcatctggaattccggttgcacaaccggaattccggttcctcgcaggaacttttcaaaaattcacatattgcacaaatccaatccaaacaacctcaaaccttccagaccagttctaaacatcctatagaacaattctaaagcatcaacacagcccagaaagcacagaaatgaaaatcaccatgtgagctccaagctttgagttcaaactcaaacttggctaaagctcacttacaagcctcaaaactagcttagaactacataaacaagcataaaaacactgcagaaaactaaccctaattcatgcaaacactacagccaccaaaacctcaattttcactttgaaaaccatagctttttaacaagaaaactaaccaactaaagcaagaacaactagcatgcatttcaacctaactaaacatacttaaatcaacattttaaacatggaaacaacaacaacaattagcagcagcaacatcatcaaaatcatccatgcattactcatctttttcatcaaaatttcaagaaaaacttaaaagggaagctagagaaaacataccaacaacaagaggttaaaatctatccaaaaaccagcttgaaatccaagaggaaatcctcttttccctgctgctcaaatggccgaatagagagaggaaaagagagagagttttgagaaattttctatttttttctaactttgaaatgaaaatgaaatttaaatgccacttactcctttttacttcagccaaaataataataaaataaacatatattttccaaatatt

SEQ ID NO: 274927 - DNA, 637 bp, Cannabis indica
gggcacaaaacccaacatacactgatcttaaaagtctgaaatacttctttaccctgaaggacttgaatatgaggcataggcgttggctagaatttgtgaaggattatgattgtgagatcatttatcatcctggtaaggccaatgtggttgctgatgctttgagtagaaaaggtcagagtcagttgagtactatgaagcaagtctcccaacagttagcaaatgaaatgactcgagctcagattcagttggttgtggggcaattggctaatattattctgcaatccactcttctagagagaattaaagaagcacaagtgcaagattcagaattagtaaaaacccgagttagggtttcggctgggaaggctagtgatttctcagaagatgaaacgaaaatgctgagatttgggaatcgagtttgtgtgcccatggatgagtgtatcaagaaagagattatgaatgagtctcatacgactccttattcagttcatccatggtcaacaaagatgtatcaagacctgaaagccatgttctagtggctaggcatgaagcgtgacattgttgagtatgttgttaaatgtcttatttgtcagcaagtaaaggctgagtatcaagggcctgcagagttattgtagcc

SEQ ID NO: 274928 - DNA, 702 bp, Cannabis indica
aatcaagtaaatatggaaccagtcaggaggacggttactactccctaataattagggaagtaaccaatttgaacgagtccaacgggtgacgtggacagaggccaacggcactgagaacacacgataaaaggaaccatacgatagacgctagacagaacacattcgatactcacactactcactgactcaagcagacagtcgccttttctaagcttttctcttaagcctcaccatcggagttacactttcagtccgtctgtccgcttgtccactcatccgtccgactaccatttatattacatttattttccgttattgttattttttactataatcgtactgacttgagcgtcggagtccctttggctgacaccccaccggtgctcccaattgaacttttgtctctctctttgttcttgacaggttgctggtgcccaaattccgtaattgtagatttcacccactacaatttggcgccgtctgtgggaacctagcaatcgttcattcgacaaagactccaaaggttcaccttgagcaccatggccgacgtaactgagactccagacctagcttcctagatcgctatcctcattgctgaggcagccaaggagcgagagcaagcagccaaggagcgagagcaagcagccaaagatcgagagcaagcggctaaagaccgtgagcaactagaaaagctgcaagctg

SEQ ID NO: 274929 - DNA, 790 bp, Cannabis indica
ataaatatatatatgtatgtaaaaaaaaaattattattttgaatatatactgaagccttttcgtccccctctctctctatctatatttctctctttctctctctttaaaatacaaaaataaaacccataaacctccataaccaccaccactccggcgaccaacctccggccaccgcccgacccaacgcgccggtcagaacggaactccagctgccggcgacctcaccccccaagcgccgccgctcctttcgccaccgttgactcgggatcgcaagtcaaagtttgggatttcaaactttgaacggattttccggtcacctccggcgtccgtttgacgaatcgtcttcaccactaaactcagctcgtcgaggagaacaacctacactaaaccatttttcccggttcactactttttccggtgacatttttgtagctccgcccctttccggcgactttccggtgacatcgtgtaccgttttgacaaacggttggcatgggtgtgatctactcgtcgaggtggtcgttttgatatatactactcctattttcggcgacatttccggtacaccaatttttaccgccaccgattgttaatgtgcaccgcttaggtgaggcttcggaaccccaaattttaaatatagtcatattatatgtcgttggactcggttttgaatgtagaatgcgatgatgataattatttaaccatttgatggtataggtgagagtaatatgtaagtttggactaaacaattggagctcgggacttgagagcttaagatcgtcttttgga

SEQ ID NO: 274930 - DNA, 673 bp, Cannabis indica
aaccttccagagcacctattcaatgcataaacaataaaatccaggcagtaattcacagaacaaaacaacaaatctcaacttgccattaaagctcaaagctttgaactctaaacttaaaattgcataaaaccatcaacaccaattaaaaccagcagctaggacttagaatcaactcaacaagaccctaaaattcgaaccctaggcaattcaaaccttaacagcccctaatttacaatttcacatattcaaaccaaagaaaaagcttaaaatcacatcttcaaaagttctagggctttacctttgatgaaacctccttgaattctagctaaatcccagaaaaatagaaggaaaaatctgctccttgccctagctttgtcccagccgaaagaaggaaagagagagagttcaagagataattcaaatttctaattttcttctttttctcttaatttcctcaaaagaaaaggattttcccccaattaactcttgctgaaaaattaaagtgctaggtgtcaattaattgggcagccacctaatcctatatttaaaattactattttgccctttaagttataacttgggtatttctaaagctaggggtaaaatggtcaaaatccataaccccgctcaatcccgataatttattttctctaaaatatttcccactatgaaa

SEQ ID NO: 274931 - DNA, 841 bp, Cannabis indica
agggttatgcgagcaaggcataaccaggttagactcggtaattataaccgagataaaccttactaaggccttattgtaaatagacgtgtgagcgtaatacgtaggtctatgccacatagacatatatagacgtgtgagagcaacacgtaggtctatgccacatagacatatataggcgtgtgagcgtaacacgcaggtctatagcaaatagacaaatagtgcagtggcaccattaattatgtgataaatatatatgttgagattaagggttatgcgttcaaggcataatcaggttggactcggtaacaagaaccgagatgaactgttctaaggccttattgtatttagacgtgtgagcgcaacacgtaggtctacgccacgtagacataaataggcatgtgagcgcaacatgcaggtctgtgtcacacagacaaatttgaatggcattgttgtttatattatatgatgagcatattattgatatgttttatactgtcttgctgggcttggctcacgggtgctctactgtgcaggaaagggtaagactattgctgatcagccatgagtgcaggagctggacgaagaatgtacatgtccgggccatatcagaccaagcgggttggggtctaccagtgttgtgtttttgaaactctattttgccgcttaggccggctgaaagaaaaggacttgtaataatattttgtaaatatttttgggatcccaacatctgtaacttttagtttataaagtttaaagtattacaagtttattttcattcctattgttattaaagtttaaattctgcgccatttttattagtaatcccgtttaggggattagg

SEQ ID NO: 274932 - DNA, 586 bp, Cannabis indica
cagtcttgatctcagtctacgcccttgcatattgtctatctgcagcttgcagcaatcatgcaagtcttcaccctgaacaaccaatctgttgtagtgtttccctctggattcacacaccaaaactgaacaagtaccctgattcttcaaacacatgaattagtgggctcccccacttcaacttgggaaacaacttctctcttagaggaatatccctcaagatatagctcgcaagctaaccgcatactcgcatacggttcctccactccacatttcactttgatgaagatgttgaactaatgcctcgatcattctgactcttcgcccctcgacatttcaatgttgccttagtattgtagtcctgctgactttcaccctaggccaacattgccatgatgttatcttagtacctgagtccagcagactttcaccctagataactggctctgcctgtgtcctgagtcttcttgactttacatcctgaacaacaatcaatctccatgatactcatctcgatgcttgtaatgaataactagtcttgttgagtgaaccgtgaaggtctctcccccacttcatctgttggcgtcct

SEQ ID NO: 274933 - DNA, 534 bp, Cannabis indica
ccggactccaaatcagacctagaccagaattgggagttggacccggatcccaacccaaacttggactcgagacccaaacccgaacctgaactcaaacccaaacatggaactagactagggacacagaaccagggtggggacctagaaccgcaccccagtctcgatcccgaacccaaactcagaaatgggaccttggacctaaaccgaacaagaccgagacccgtgagagtgatccagatcttgactcggattcgggtaacggggcctggaacaaacaagtagtcggtgtctagatctaggactcagactaggtccagaacccaaacgaagaaccaactcgaacccagacctagaccttggacccaaaattagaacctaaacaagaatctccgaactaggaccctcgaacaaagatcagaaattagatttacttagacccaagaatctctgatctttgaattagaaaaaaatcaggcatataatcagatttacttattaataaagatcagaaataacattttatgttgcatggtt

SEQ ID NO: 274934 - DNA, 569 bp, Cannabis indica
acggaaacgctttttcggtcctctcgatcctgagggccaagactcctttggagtttgcccctctgcggacctttccctttcgggaaatttgagcggacctttcgcggatcctgcgcctttttctttctcccaggggtagaggtaggatttttcttttggttcccttcagcgggataccttatagggcttggttccctagacttttgctgttgagtgttgggcgaggactcctctggttccttgccaagtccagcagacatagccttgggatgcacgtggatgccagccgcctccatggctttttgcatggccagcattacctcttgcattttttggttttatgctttttgggatgcgatctcggcttcatgatcgacagccttttgtcttagaagcaccaactctgagtagctgccgtcatcgtaggcgtactcatcgaggtttccctcgtaattatcatcagaaattccttcttcttcctcggagccctcagctgctcttgaggttacatcttcctcattcgggtcttgagcatcttctagagggcgaggttgacgagtgcttcgagt

SEQ ID NO: 274935 - DNA, 746 bp, Cannabis indica
tttttgaatgcctccttgcactcatcggaccattcaaatttttaacatttcttcaagatgttgaagaagggaatgcatttgcctgtgaaccgggagataaaacggctcagggcagcaacctttccggttaagatctggacatctttgtgcttcttgggggaaggcatgctcaggagggcttggatttttttctggatttgcctcaattccccgctgactgacgatgaagcccagaaaattccccgacttaaccccgaaagtgcacttcttcgggttgagtttcattccgtatctccggactacttcgaaacattcttctaggtcatccgcgtggctagtgcacgcctttgacttgaccagcatgtcatccacgtatacttccatatttcgccccagaaggcccttgaacatctggttcacaattctttggtaagttgcaccagcattctttagtccgaaaggcatgactaggtagcagtatacccccttatcggtcctgaagctagtgcactcttgatctacggtgcgcatcttaatctggttgtaaccagcgtacgcgtccatgaaggaaaatagcttgaatccggaggtggcgtccaccatctggtcgatcctcggcaagggcaaacaatctttcgggcaggctttatttaggtcggtaaagtctatacaaacccgccatgtcccgttgggctttggcaccagtaccagattggctagccgttctgggtaatcaacatcccgaa

SEQ ID NO: 274936 - DNA, 599 bp, Cannabis indica
attattaattatgtagatgtccaaattttttatttattattattaatgtaattaacatttcctttttattagtttcattttttcttaatttcttaatatttgacttttgtatgtgtataaatagaagattactattgaaataaaacactcagaaaattttaatatcttctctattttctttctctaaattataatattacataatactaatatttcataataatataaaataattaaagctgtacatctcaacttctgaagagtactcaaaataattttgttttaagttgacaaggaatatatagaataaagaaaaggaagttggtatattaaaatagaaacaaggttgattatcaaatatgatatgagtcattgataacatcaccaatcaaccattggttttacccattaacaagcatcggcctttgtctcactctccactaactcagcaatgttccacaaacattgtatgtaattgtatttatcaatatgttttttttctttaactaaggctatttctaatggaagatttaaaaaattgtgttatattttgacataaaaaaatatttttgtggtaaatttatattaaatttttaact

SEQ ID NO: 274937 - DNA, 701 bp, Cannabis indica
gattgttgcgaaccttttcccattcatcccagagtattttttgccactcctctagaggagcgtaccaagacaaaatgtccatttggatttcgtaggctggtttatttttttcttgttcgaggaacgactgtatagcagtgtgaagagccatagtttggacttcgatagccattgtacagaggcatgttaggtaccaaaaaagatgggctatggactttggagtgaaaagtgcagtccgaaaggggacgagatgggcaaaaggatactttgggtgaatcaaaaaatcgtattgaaaatagggtccaagtttggagagaatctgttcgtgagtataaatagccctgtgagaggccttttcctttgctgaccttttggatttagaaaggatgagctttgcatctcggggaaatgagcagggaaatgagcaattcttttgcgatgatgatgatgatgccatgatatatatgtatggaatggtatgggacgagttgtggctgattaaagggatggttttgagtgggtgtgaggagaccatatttatagacttaggtctagataagaggtcggccaagatattttcttttccgggaaggtgttttatttcaaaagagtaatgatcaaaccatgttgccaatctcaaaagttgagtattggttgtcttattcttttttaggcctatcattccctttgatgcagcaaaa

SEQ ID NO: 274938 - DNA, 638 bp, Cannabis indica
acagatatggacaaatgatctatagctgctaaattatccttatcacgacgaagaagatccatgataagagattcatcaagactaagggcattctcaacaacttgagcagaagcgagagacttttcttgggccttgagcaaatcattgacagagtcagtgaaccatgcaacctctgctaaaccacatttataatgcccgcaaagggtactcaacacgtcgagttgcatactcacgtcagcacgatgttttgaaatatctgatgtggtcaaaggagaagatgacaaatgaagaatgtctttcatgcattcaatcacaaactttttggtatgctcattcaagtttgagttggtgattgctgaagctgacactgtcaacactgggtccggtcgaggaataagcgaatctgagggaacaactgatgatggaacatctgtctttgctgagacaatcggttctggtagaatggttggctctgcaggcaatgcctcactgtcaaatcctttgttaacataatcatcagacccatcaaagttaataagttgttcatctctagagctagaagcgccaaagcaagtatcagatggtggcatttctgaactctgagtaagtgggaagaagacatcttcaatacgactaga

SEQ ID NO: 274939 - DNA, 531 bp, Cannabis indica
attgatcttaagagtgggtatcatcaaatacgtatgaaagaaggagatgagtggaaaactgcatttaaaactaaacatggattgtatgaatggttagtcatgccttttggactaactaatgcacctagcactttcatgtgattaatgaatcatgttttgcgtgctttcattggaaaatatgttgttgtgtattttgatgatattctaatttatagtaagagtttgcatgatcatgcttcacatttgcaatcagttttggatgtgcttcgaaaacagaaactatatgctaaccttagtaaatgcactttttgcaccgataagattgttttcctaggatttgttgtgagtgctacaggtattgaggttgatgaagaaaagatcaaagccatccaagagtggccaaccccctcaactataggtcatgtttgaagttttcatggccttgctagtttttacaggaggtttgtgaaggatatcagctccatcgcaacaccgcttacaaaagttatcaaaaagaatgttgcttttgaa

SEQ ID NO: 274940 - DNA, 746 bp, Cannabis indica
tgacgctaagtgtttgtgcttcccgcttactctaagcgtgtccgcagaagagtggttcaagaaattggaaccaggatccgtggactactggaataagctacaaaccaactttcggagacaatttgtcgccgcaaggaaagtcaacctggaggacagcgtcttgactaacatcaagcagctgcctacggagacactaaagaattacataaagaggttccgggaggaagcctcaaaaaccaagaaagtagatgatggacaacagcttgcccttatccaagcaggcatccgtacagggactccattctggaacgaactacaacaggaaggagcttcaaaccttcaggacttccagaagagagtccaaaaatacattaaccttgaagaggcccaaatagtggcctatggaggatattatcccaccgggatagcaggatatgtgcccggaacccagccctcgggcattgtgccagcaacaattccactgatgagcggcatacagttttctgccactcccggatatagccaaggccaggccctggcccccgcatcgtcccattttggaaatccctcagggataaatggacaagccccctcgcactccgctccgacagccactctggccagtccttcccagggctcgaggtgttggaatttattttatcaggatcttagatctactcagaagtatgttttttaacaccctaaatatgaactttctaaaacaataaataaacacatataaagtt

SEQ ID NO: 274941 - DNA, 886 bp, Cannabis indica
ataatcgtttcataatacttccctcgatcataatcgagtcaaacgatgataatcgtttcataatatttccctcgatcataatcgagtcaaacgatgataatcgtttcatatcattaccctcgatcataatcgagtcacaacgatgataatcgtttcctattaatttccctcgatcataatcgagtcacatccaatacatatcattaacctcgattaagattaagtcacaacaacgtataacaagatttcgatcttaatcgaaactgtaacaatcataacattaaccttatacaatatttaatacttttcttacctcaagtccaaagtcaagtatgtgggccgacctgagtggaacgatgcccgacactttcgagtcctatgtcacggcaaaggtaaatcaataagggtctattccaaaacactgtctaaaactcgcataaaataacctagggttttctaccaaatcttatcgtaagaacaccctaaaataaaatatatcttttggctctaaactatgtctcatactgtagagctcttcataagcttcgaaacggtatatagaatgtctaaaacggacacccgagtgaaaagttatggctaaaatacgaaaaatcggcgattcctgaaaattgaccatccggaattccggttggtgcagccctgtaccattcggaattccggttcatcacaccagaaagtcgaaaattttagatcttcaaagtcccaaaacttgctccaaacctaaccaattgttcccaaacttcacagaacagttctataacatgtatgcaacatatctcaacactcaaaaccaacaattaacttaaaatcacaacttcaccattgttgagtgagttttgagctcttaaactctaactcactcaac

SEQ ID NO: 274942 - DNA, 532 bp, Cannabis indica
tgaaacttttcaaacgtttcagatttcttatgcataaggtaaatatgaccatatctagagtaatcgtcaatgaaagtgacaaagtactcataaccacctctagctttgacattcagtggtccacaaagatctgaatgtactatgcctagtggttctttggcacgctctccctttgcagagaaagaacgttttgtcattttgccttctaggcaagattcacaaactggtaattcacctaaggtgacatttttcaatggaccacctttggttaatctgtgaagtctatcatagcctatatgaccaagacgtaagtgccatagatatgtttcgtcttcattatcgatcttttgctttttatggtttctaggtttagctactttaaacagttcgttatgaagcgcaaatggttcgtctggtcttagaacataaagcccctgttccatagatgcaacacaaatttgaatgtcatttcgagaaatggtagaaccagaactcgaaaatctaatttgtattgttgcaattgtaagcatga

SEQ ID NO: 274943 - DNA, 588 bp, Cannabis indica
ttctagttccatttgcgattctgagttcgagtttgggtttgagttcgggtcggagttcgagtcttggtcgcagtttgggtttgggtcttgatttcagtctaggtccagatcaggctccgggtgtgggttcgcgtcctgggtcttggtctaggttgggtccgattcctaagttccaatcccgatctgagtctggattcaattctaggtctaagtccttggttctgatcctggtgtgggtttaagtttgtgtccgagtccgggtctagctttgggtctgattctaggagtgggtttgtgttcgggtccgagtctgtgtttgggtttgtgtccaagtctgaaccccgattgggtctaggttcgggtcgaggtccaagttggggttccgagtgcgggtccaagtttggtctaggtcgaacatttcgatcccagtctgggtcttggtcctagtcaaggttcttatccagatccccatctaggtccaagtctgtgtttgggatcaggttccaaatttaggttcaggtccaggtctttgttccgttctgggtacacgatcgtgccaggcccgagttccagtctcagtttgggtct

SEQ ID NO: 274944 - DNA, 497 bp, Cannabis indica
attttctttgctttatgtttgtttaagagatttatgtatttggttattttctgatcagaaataaagttttcagtttattcactctgttttgttatgtttaagtttgacctcactttggtttaaggaggaccagttggaaataggcatgttcggttcacattgcatgtaatttccatgctacacatccatgattgatctatgtcattcggttatatttatatacgtgaccattgatgggtttagtcatgattgatatgacgaaaatcgctttgatcctatatgggtatagttgatggacgagattgttgtaaatacctttacataatagcaaattttgagctcataaggttatacattaatcaggtaacatatgttgcccaagtggacatatgttgcccaagtgggagattgttggattaaaaatcctatgcgggcacatatgtataatgtatatgctattataaagtgtgatacaaaattaagtgaccaattatgtt

SEQ ID NO: 274945 - DNA, 664 bp, Cannabis indica
aagacaattgacttaaacaagtttagactctccctctaaattattgccgtaatcctttgtaatgcactttataaatctgacttttgaaacacctccaaacagtgaactcctttcgtctttgaagtgtgcgtgcttactttctcccgaagtaagacttgaacaagtcttctcccgaagactactctcttgtttagtcaagtcttctaacaaactctaagacggagtaagaactgatatgtaaaatactagaacctagatgaacaactaggttctcacaaaacaaaaactctcttctcacaaaaaaaatgcaaaaaaatgaatactagaagacttacaaaagtcatcataaactgagttctcaaactccttaccatgatcactccgaattcgaacaattttcccaatattacatccttttttaactcttaatctcaaacaaagaattttaaaagtatcaaaagtgtcagacttttctcttaaaaattctacccaagcaaaacaagagaaatcatcaacacacacaaaaatatataggttaccatttagactttcaacttgaattggacccataagatccatgtgaagcaattccaatacttttgagatattgatatcagacacacgtttgtgagtgattttttattgtttaccaagttgacatggt

SEQ ID NO: 274946 - DNA, 532 bp, Cannabis indica
agtggacatagattagagccaaaaaaatgtatttgattttagggtgttttcaccataagattcggttgaaaactcttggttattttacgtgggttctagatagtgttttggactagatcattattgatttacttttgtcgtgacataggacccgagattatcaagcatctttccacacaggtcagcccgcacacttgagttctgaattgaggtaagaaaagtggtaagcaccgtatgtggctaaatgttagcggttgaatgattatagccttgaatattatcaagattctaattaaatgtttgttgagtctcggttgtgaccgagggttggaagcagttattatcattatgagtaattactcctgaaactgcgaataagtttcttacttatcgtttgtatcatcgggcaacgatagtgacatattcagcttgtggttaacgagtggtaaaggggtactttataaagtaccaggactgtgtgtttatgatattgtgtaaatgtgaaagcatgttgatatgagattgaattgat

SEQ ID NO: 274947 - DNA, 503 bp, Cannabis indica
aatcctttaactgacgggaggcataagcgataacccgatcggcttgaatcagcgcacaccccagaccctgtctggatgcatcgcaataaactaaaaatttctcattgtctgaaggcaaagctagcactggagcggtaatcaatctctgtttgagctcctggaaactagcttcgcacttatctgaccagaaaaaccgctgattcttctttgtaagttcggttaagggtgttgaaattttagaaaacccttccacgaacctacgataatacccggctaaacccaagaagcttctaatttctgtcactgtcttcggtctcggccaatccctgacggattctattttcccgggatccaccttgatcccatctttgctaacaatgtgccctaagaaggacacctgagatagccagaattcacatttcttgaatttggcataaagcttgtgttcccgaagccgttgcaaaaccatctgaagatgtaactcatgctcctcttctgattga

SEQ ID NO: 274948 - DNA, 647 bp, Cannabis indica
ttataattgtaaagttagactatttctaagtctagacgttgggaatgtcgggaatggccgggaatttagaatttcccaaaaatacccctttagtgtgatttatgtggttttagtgtggaggggcaaaatggtctttttgccccattagtattttgtcttttagtgatttttattaaatgaaaaataaatgttatttatgttttatttggctgaaaagaatcctttttacttaattttactcttcatagcctcatttcaacacttagaaaaaaaataaagaaaattttcaaggaaacactctctttttcttctctctttttcggctgggtgcatggaattctagggctggttttcatcaattttcaaagctagattcaacctataattgtgaactcttgattgtggtatgtgatttctaactttctccctttattttcttgaataaaatggtgaaaatgatgagtaaatgcatgatgagtttgagttgttgctgctgtagttttaggttatttttctatgtttttctatgcttgaattgaaggaatttaagtaggtttcatgcatgctagttgcttggtttaagtttgtgaaattttgtataaaactatgatttttgaagaaatatgtgaatctgtaatttgtttgct

SEQ ID NO: 274949 - DNA, 551 bp, Cannabis indica
gaccactgttctatttaggccccgttacccgaatcccgagtcaagatctggatcactgtcacgggtctcagtttggttctgagtttgggttcgggatcgagattggggtgcggttctaggtccggacccttgttctgtgtccctagtctggttccatgtttgggtctgagttcaggtttgggttcgggtcttgagtctaggtttgggttcggatctgggtccggctcccagttcgggtctatgtcttatttggagtcccggacctggtccggtacggttctagatctaggtccaatttcagttatggttccaagtccaagtcctagttccagtcccaggcaacttccagttttggttccaattttggatgacagggtacaggttcgggtccactttcgggtttgggattgggttcaggtccgagtgagggttcgggtccttgtcagggtttgagtccagggctgggtcccaaatctagacaccgactataggttttgtccaagcccttggtcaaaatctggatcccaatctcgggtcccagtctggtttca

SEQ ID NO: 274950 - DNA, 695 bp, Cannabis indica
aattaaaaatacactaaactaaaatttttcaaatataacacattttccattcacaatacacagtatacatacatatataatattttttacagaaaaaaaattatttttatgagatatatatacacaaatattgtaagaactaacctccaaatatttagtacaccaaccgatcccggcgttttactcagaaatttcttccccacagattatttatcccaaactttaaagatggagaaaaaattagatattaagaaaaaaataatatatgtaaaacagagaaaaagaaaaacaaatcattaccgatgcactggcggtggacaggtgctgcactagtggtggacgggcggcgcactggcggtgtcggggaaaagatgccggagaagggggcggaatgtgtatgaaaacggggaggggaggtggaatgggggaaggtggggagtgaggaaatggaaaaaatggtattctgaaatggggaggggtttatatagatttttaataccggcgagacccgccggtattaattgggttccgccggtattaataaaaacggtcagaatcccagattaataccggcgggtcccgccggtattaatccgccggtaatacgaagttcaaaagtttgggcggtaaaaatcccgccctctttttttcgaggcgggattctgccggtattaatccaaacccgccggtaataa

SEQ ID NO: 274951 - DNA, 632 bp, Cannabis indica
atttataacctaaattcactgacttattaattcttcgttgaatctacgcatagaacttagaattgcactctcagtatgttatagtgagatttctctcacctagaaactcgagaccagactcctatttaaaggacacgtgtattcagatttccaatgaaagctgaattgtccatgagagactcctcgatgttttaacctcgcctagtataaaaccagtgagatactgcgagtatgacctaagtcgaatcgcataactttaactcatattatacaagatggatccaacccgcatgtgtcaggacatatgcgagtatcctctctatacttctgcgaaagcatagagatcaactctctatgatgtgatttggtcccaacgatccaatagccttgataaaccgatatagactcgcatgtctaggttctatcagctcgacatgcgatgtctacaagaggcaattacctaagggcgcagacgttccaaacgtactgataaccctgcgagctcgacaacggaacatgaacagtcaattcgcagatgcagaagacgcatacgttgatggacttagtaactgtcgttcatttattaatgttaacgttgcttgggtttaattattgcaattcaatatgtaaat

SEQ ID NO: 274952 - DNA, 837 bp, Cannabis indica
cgtagacctacgtgttgctctcacacgtctaattacaataacgccttagaatagctcatctcggttctggttaccgagtccaacttgattatgccttgacgcataacccttaatctcaatatgtaacacataattattggtgccactgcaatatttgtctatttgctataggcctgcatgttacgctcacatgcctatttatgtctacgtggcgtagacctacgtgttgcactcacacgtctatatacaataaggcctcagtagggtttacctcggttctggttaccgagcctaacctggttatgccttgctcgcataaccctattcgtgaatatacgtaatccatgtattacgttctttcagtggtttatcctggtgatatataccaggtctaacccagttatgtcttatacacataactcttaacatacatgcgtgtgttcaatatttactacaacatatataatcttagggtaataaccctaacttgcacactatgtaatcactcatataatacatttctatatactcagataacatttactaagagtgttaaccctaactcatgctttcattggactcacaatattctagggtaataaccctagaccgcattaaaattaaactcaaggtactagctaccgagtctagtttaattatgccttaagcgcataattcataatcccaatatataaatatatccgacatggcatagtattacacaacatatatcactagggtaataaccctaggctattaaaccgctcatgttagggtataaccttaatcccggttgcaattactcacatatatcatattcaacataagcgccaccgc

SEQ ID NO: 274953 - DNA, 700 bp, Cannabis indica
gtggtatttttgtaaatatttgtatgtggattgtataaatatttaatgggccggtccatagtattttcgtaatctttttttccttttttgtatttttctgtttttttcccaaaattataaaatacatttactacttattattttttaaaaaatatatataatagttaaattaagttataattttttttagtattacatattattatattgtaacaaaaacgaataaatatattagatcattaaatatatacaacagtatttgatatattgtatcactgaaaattaatataccgtagtaataaaattatataccacaaaaaattataataatactaaattaataatcaaaaaatgtatatcatgctaacaaaattatgtatactactattaaaatatgtatatatacaaaaaataaatatcatattaaataaatgatataagacaacaaaaattatatactatacaacaaaatatatatacttgctataaaaaataaaataaaataatatagtattattaaataaaattgtatatactatattaacaaaattatatacaaccataaaataattatgccatacttacaaaattatatatcacatttgtatataataaaataaaaattaaacatgcatgatctaaataaaaatgaaaatactatataataaaaccttatataccatataacaaaaaatataat

SEQ ID NO: 274954 - DNA, 616 bp, Cannabis indica
tttttttatatattatccctatacatacgtctacagatagggagtgagttctctaggaaagaaaacaatactaaattgagatgtgaaggagtaaggagaggtagaggggtatatatagtacttgtggatgtgattgttgagtgtagtcttgtcaaaaattacaaaataataattaatataaccctaggtacggctaaaaaaggggtggtataaccccaagataaatttgattttgtcaatcccttgaaaaacgtaatttgaacaaacccaaccccctattaacttttccttggaagacgtaattcgaaccaacgaaattctcggttttgttctggtttggttgactgtggttagaaaaattatttatttaaataaggtaaatgttgttcccattgttcccattgttcccatccgttaagaacaacaatggccacataaacttttcacatgtagcaacaaatatcctaatattatgtcgaaataaacatgtgtggcgaaatgaataagaaattaaattaggatgtttactaataatgagaactcaatattttttttaaaacgatttaaatatttcattaaaatattattcgttggaataaatattgcaataattttt

SEQ ID NO: 274955 - DNA, 896 bp, Cannabis indica
tatttcagttgcaaaacagtgttttcttggttgcactccaggacatctttgagtttctgttgcaaatcttcatagttacaattggctgaaatgtaatgtccactggcttcataattttcataattcattcgatcatcgaattgtccattgtagaagactaggaatggaatgtctttcctttcctgtgtttttgcaatggttattagtccgaggcaacgaattttaaaactggtttgattctgttatgaaatagagtacaaacttacttctatctctgtccctttgttcaagcattgtatttcctgtcctgattcctgcttttgccatttttttgttgttgttaataaactacaaagaaacgagaataaaactattaagaaacttcattaaatatttgggaaactaaccatttctcaaactgttttgtcctctatcttttccaaaataaattcctgcaaaaaatgtaatgaaactattattaaatgattatgcaactgtaaatcaacttaaaaaccacaactctttcctcaaaattacatagttcttactcattgtcacttttcatcatgtttattcgaatcagatcaatttccaactattataaaactaatttgctaccatttacataaatcgtaccttgtatatatgctagcttttggtactcgtcaattgacacttcttcatgatttgtaaaccattttaaaacgataatgcaactgtaaggcaacgcaaaaaattaaaaaaagaccttattagtatcatgtggttccttaattagaatcagttcttgttttttgtttttagaatctgaatttcctgttgtacaccagtgaatcaaccagaatgcaactgtgtatgacgtatatcattgttgaaaaaaatttcatttcatacct

SEQ ID NO: 274956 - DNA, 645 bp, Cannabis indica
ttgtaaggcgccaaagccataaataatggcgcaaaatagaacaaaatcaatataaaataaacctataacaaaattaacagtatatcccattatatcagctcacccaaaaaagaacaaaatcaataacaaacaacaagatgaaatcaactatccaccatttcagccttcaacccaacacgacactgaccgagatctcccaggctcaaaactaaatttaaaaaatttaactcaaaaacttcatcacactgtgcaaacattcaagcaaaaattctaaaatctataggtctttcactaactcaaaaagaaaccagcataaattcccaaacaaaccaactacaaacaatcttaatgaatctaaaactaaaggactagtgttatctagattcacatactgtatgtatatacaatctgtggcacaaaaatgaaaaataaaataatataaactagaggaatagtgttactatgttttagaaatccgtctcctatggagaaattggggtctcacgggccaagaaaatttaggggattaaagattttgggttcgaaaagatatttctaaaattcataactcatatgaatatctaaaaagaatggaagatttaattcaaaaacaaaaaagaaactcacctcataatcgagttttca

SEQ ID NO: 274957 - DNA, 649 bp, Cannabis indica
ataacccgggaaaggttagagtcctccacagattggtgcggaaggatgagttttgccttcctgcagttctccgtagtgaccaggcccccgacgtcaagatcagcccggtcgtaagaggcaaaggcctgggctctccgaagaaagacctgagtaggtgcagtccgttcgtaaggaggaatcctgacccactcagtgaggagctccggatggtccactgcccggaacccggaggagaagaaaaaacgatggcgatactccttaacatgagtttgcctattatacgggaccaccccttcattagcagggtgggcccggaacccgtaaaaaccgtccttaagtttgtcccccttcttggggacggaaacaagttcataaaaatacaatatttccgccgggcggggagatccccatccccgggcggaataaaaaataaataagcctgaaagcaggcggtatgcttggggaataagttggtatggcgcaaggccgacaaaaactaagaaattaacaaaataatcttgaagaggaagcatggccccagccatcagatgcgtctggctccaggccccgaagccgccgtaattgtgattgggcgtctccgcgtcgcgaggtggccgatggtaggtccctgatgtggaaggcttgattc

SEQ ID NO: 274958 - DNA, 675 bp, Cannabis indica
acacatggtcccctacttgaaactcagcatctctgcgtttcggatctacataacactttttcctgctttgagaggcaagcattctagctttaattttctcaattgcctcattggtccgctgcactgattctggacctaggtatttcttttatcctgtctcatcccaatgaattggagacctacacttcctaccgtataacaactcatagggagccatccttatcgtactctgataactgttgttgtataaaaattctatcaacggtagaaatttactccaagagccctcaaaaatccataacataggctcgtaacatgtcctccaatatatgaatcgtcctttcggactgcccatctgtctgaggatggaatgctgtactgaatttcaattttgtacccattgctcgttgcaaactctgccaaaacttggaggtgaatttcggatctctgtccgaaactatagactttggtaccccgagaagccttactatctccttaacatacaattccgccagctgatccactgaataggttgttttaaccggtcgaaaatgagcagacttcgtgaatctatccaccacaacccagatggaatcgaacaaacctgtggttctaggtaacccaaccacgaagtccatcgtggtgtcctcccacttccattcaggtagggttaaa

SEQ ID NO: 274959 - DNA, 585 bp, Cannabis indica
ccccattagtattttgtcttttagtgaatttttatttgaaaattaaatgtttattttaattgtatacttggctgaaatgtatattgcatatagtttattcattttctcttttagcaaaaaaatcactaagtttagaaaaagaaagaaaatttccaaaattacactcaaagctctctctcttttcctctctctctcggctgtgcatgtgggtgaaaaagggtggatttttgctttgattttctagtggattctcatccaaagctaagcattcttcaagctaggttagcttctttagttttctcttgaattttgttgaaaatatgatgattcttgcatgatttttagttgttgttgctgctgtgattttgttgttgatatatgtggtttaaagcatgttaattgatgttaattgagctatgttgaaagcatgttggatagattgtttaaagctttgagttttctatgcaaaaatgtgatttttggaggaaaatatagtgattctgtttctgtgttgttgctgtagtttctaatagttttcagaggtgatttcatgctagtttgagtagaattaactagtgaaatgca

SEQ ID NO: 274960 - DNA, 409 bp, Cannabis indica
ttcagctaatatgctctgacaattatattttgaaaatccaaatttctctctccacggcttacggttgcactcgattattttgatttcccatatttgctttcaaggcaggaattcgaggcatctaaggttcctttacgtacagttacccttttgcctataaatacttggagtactggcacattacctcatttcatcacccttcgctgttaagcaaacttcagagcaaaaagagagagttttcaggcttcaaagttgttaaagagtttacagacgattttaggcttacttgaatccggacactcgaatgtttgagtaagtttctaatcccctttatgtttttcctttgcatgcttgtgctttgaatgtaactttgctgtagaaagaacatcgtaggaaaccctagggtttg

SEQ ID NO: 274961 - DNA, 530 bp, Cannabis indica
gagatcacttatttttgttttcacacattcatcacgctgaaaagatcttctatctttcagatgagcgacctgtcggatagccaactgctcggctcgggaggccatgcattcgatggcgacgatgaccaggaggaagacagttttctcccagcttcgatttcagaagaggaggtcgcaccaatagagctaggcccgatgtcttctgcagacatcgaaagaatggtgcaggaactcgccgaacctgggaccatcgatattcgagacagcgagtctacggtgtcggctcgcgactaccttattcattcgaggcatgctcctgacgtcgaggtcgaggagatggacgatgactggacggccccagctcgcgaatcaggcgaggatgaagaagaggcggaagggagtgggacagactcggtcgatgacgcccagctgaacgagcctttcgcgtgcgaggatctgatttcgagggttaccaaatcagacttcactacctttacgaggttaaacctgctgcgacttgcgtttcagcg

SEQ ID NO: 274962 - DNA, 549 bp, Cannabis indica
aataaagtggtggccagagtcttaattgacaatgggagttccgtgaacttgctcttcaaagaagccttcaccgcgataggcttgacagatcgtgacctctcgcctagtggatcccagctcacagggtttaacgggacgacacttatcccaatgggaaaagtgaggctcccggtcaccctgtgcccggacactccccagagcacattcaaatactgcaccttcgtggtggtggactgtccgacagcctacaacgcgatcctcggccgaccggccctagtagactttggcgcagtcacttcaatccgacatctgtgcctaaagttccctacccaggaggccggagtcgggactgtaaggggaaatcagggggaagcaaggcaatgttataatgttgcaacccacctgcccgtacttatggtccgggagtccgctgagccagagatggctgaagaggacgagttggaccctcgtgtagggtccgaaagaatcgtggaaccaatggaggacgtcgaagaaatatcagtgtgcgacgacgactccaccaaagta

SEQ ID NO: 274963 - DNA, 911 bp, Cannabis indica
gttctttgacctgaagtctaccctcaagcaaggcaggtcgtggtatttttacttctctcagccaggcttcaagtggttgagcgggacggacaaataggccatcagtaaaatagggcattttgttgatgagtacttcatggtgaaggatccgaacatcacccggactcggtttcagtagattgcaacatatcaccgtcctcccctcactcttacccttagggataggctcagaagcttgcccggttgctggcggaagacaggaatattatccggttgaccttcgatgcaaatctgatgcagtacgggctctaccctgaggacttttcttctaagtccgtgacggggaataagaggaaggctgctgctgctcggcctgaacgagctcatttggaggatgagctgattcaacttaagcgggaggctaagttgaagggcggtgttcgggcaaagcactacgctcaggagcctatgaatcctgaagatgaagtcgaggctgaggctgagtaggtggctcctttgaggaggaagaagaaactcccggccacgcccaggcccgtggaacacggcattcacataagggagcccattttacctgtttggccattccatccttatgctggaaaagggaaggtcgttatggctgagataaagtcgatgtcaggtgatgatggacttctgactttctggacggacagtcactctgcgctttgcttcttttttcagcttcttggcttccatactttgtatttttttgttggtttttgctaaccatgatgtttttgctttgtgcagacatgtctcggcagatgatggacgccttaaggaagaggatgagcggaggctctagtgcttccctccgaccaagaattccaaggtcggagaggggtcttcagagaagaggccttctggag

SEQ ID NO: 274964 - DNA, 475 bp, Cannabis indica
ctttccttcatttcggttactttccattccctgccatttctgctcgaatttctcagagagaaaatttctcgaagtagcacagactgctttaacacttaaacacttcttttaatttgccagtgttcggttttgccagtgcctctcaactctcactcaaccactctcagtactcccagttcaacaatcaactgtaagtttcttgcatctttagataataacatgcttacatttactttgtttgttttctgggttcgcacttagagacttctgggtgtgtgagtgtttgagttcttcgagttctgctttatgtttactgtgttagttgtagagtcgccgttgtaatgcctctgttgtaggcgtacagctttgcttgaagaaggccatgtgttcttcgattagcaattgcttagggcataggaaggcttttctcttttcttttcctttttgcaaaaccacttttctgcgattttactgc

SEQ ID NO: 274965 - DNA, 542 bp, Cannabis indica
gatgacgcattgtgggcgtatagaacagcttttaaaacaccgattggcatgtcaccatatcggttggtgtttggaaaggcttgtcatcggccggtggaattaaaacataaagctttctgggccatgaagactctcaacatggaattgaaagctgcaggagagaaaagactactgcaattgaatgaactagaggagtttcgtaatgaggcctatgagaatgcaaagatctacaaggagagaaccaagaagtggcatgaccaaggcttagttaggaaagagtttcaacctgggcagcaagtgttactattcaattcaaggttgaagttgtttcctggtaagctgaagtcaaggtggtcaggaccatttacagtggtcaaggtgtttccctatggagctgtggagttaaaaggtgaaggtccagcaactttcaaagttaatggacagcgtttaaagctctacttgggaggtcaatttgaccaagccaagtccgccattattctggcgcctctctagacaacagctcagcgtccggctatatgacg

SEQ ID NO: 274966 - DNA, 592 bp, Cannabis indica
aatcccttgtgcagcaactgagctcctcttcaacatgtcttcaatctgaaatcccttcagatctgatgatgaagatgacactgaaatcccttcagtttgaactcaacaattccagattcagatcattccgccattgacgaacactctcaagcttcaagatctaacctgtaatcacaatcacaagaaacaagatacgactatctctctaaaaacaaccgaaataactgtctgaatgattaatggataaccactttactaacagaaactgattatatatatgaccacaacgataagtccagctggcactaactaacacttaaaaagactctcgtaaacaaacgttagtgcagatataacagtctaaaaatccagacacgactagacattgaacagaacatacactgtcacaaaataataacactaacattctcccccttgacaggttatgttcaatgactaacacacaaaactaaagaccagaaaatattgataaaccagatataaaagtttttaggaatataaacaaatcaactacacaagcaaaacaaatagacatatatctcccccttcattgaatatgatctgtaggttc

SEQ ID NO: 274967 - DNA, 695 bp, Cannabis indica
ttatggattttgaccattttacccctagcttttgaaaagccttagtttttgggttaagggcattttagacatttggtttaatggtggattaggtggctgccatgagtgagtgacacctagcacattaattttcagcaagagttaattgggaaaacccttttcatttgagaaaattaagagataaagaagaaaaattggaaatttgagttatctcttgaactctctctttccttctttcggctgggacaaagctagggcaaggagcagattttttccttccatttcattgagatttagcaagaaatcaaggaggaattaaccaaggtaaccttagttattctctagttatgttttttctcaagttttgcttagtttcaagaggtgatttttaggttagtggctgttaggtttagaaatgatttgggttcagttgttatgctcaatattgattgatttaaggttctagctgctggttttgttgcttggtgttagttctaagcaagcttgagttttgaaactcaagctttgagctttaatggcaagttggaatttattggtttgttctgtgattttctggttggtttaggttgtaaatgcactatacaggtatactggaaagtttggtgaagtttggatggattttgaggtcaaggggagaatttttcgggttcccagcacagaaccggaattccggt

SEQ ID NO: 274968 - DNA, 611 bp, Cannabis indica
gtatcaccaagatctgagtccaaatctccttctcttgaagctggattcttcacagctttacacactatgattgagtaccacttgatgtgtgtggacactcactctttcactataggctttggttttgaagagaggaagagagagaaagagaggcttcagttaggtataggaagagaggctaaaaaattttactgaaggaatgagatgcatcatcttttccctttagccatctctacctatttataggaaaccatttagggttaggttagatttattttgcgttaatataatgaaaaaaaattaaatggtaattgcaatagagtggtcggccatggatagtgggccccactttgtaattttgccattttttaaacttttcatcttattttctcaaaaatgccatttttccaatttaacaacttaaatgccaattctaattatttaataactaaaaattaattattaaataatattgtcatttaatatatttatttaaacaagacttatcaaagtctcttaattaacaaacaaaccctacgaatctcttttctttcacaatcaagcctttcttagtgaaaattcataaactagacgtagtctaattttagaat

SEQ ID NO: 274969 - DNA, 538 bp, Cannabis indica
cgtccacaaacactctccatgcgggaaccgatggtgttggcacatttgcggttgcctcggcttcgttgcattcggtaatgaagtctgccaaggcttggccttttatggagattcggggaacgtagtgtaagtcgaactgacttaactccattgcccacttgaggagccttccggatgcttcaggtttttggaggacttgccggagcgggtggttggttagtaccttgatcggatgtgcttggaagtatggccttaattttcttgaggccatcaggaggcagaagaccagcttctcgatgatggggtaccttgtttctgctcctatcatgcgcttgctaacatagtacacgggatgttgagttttctcttcttcccggactagggcagcgctgaccgcgtgctcggagacagccaaatatagaaataggtcctctccgagaacaggttttgacaggataggaggcttggccatatgttctttcagcttcttgaatgcctcctcgcattcgtccgaccactcaaacttttgacacttctt

SEQ ID NO: 274970 - DNA, 493 bp, Cannabis indica
atacagataacaaaaaatcaataataaattaacaatagtacaacataaaaagaccatatttattgtaaataaaattaaaaaaatcctaaaaatatttaaaattttgtaaaaccgtatttgtaattttttttcttcttatttttgtatatttgtgaaataatcccttaaatttacgtaagcccaatatctaaggatcaaagatgggccaaacccgaaacttgaacaatcattcactcttgctagctatgccaaatccgacccaaaaacattcaagcccattgtgaaagaacctaacccacatccgtgatgattatagcccaatgggctgaagactctcaaatttcacttttcttgctggacttaaaagttaaaattgtgtgtgtaggtccttttctataaaagtaaaaagggataagttgaaaactacccctttttattacacattaactaaatataactccaaaataattttaattgataaataccctctttt

SEQ ID NO: 274971 - DNA, 638 bp, Cannabis indica
ggggcaagccttagaaggttttttggccagaggagggaagtctggatgttaatggcagcaacttccttcacccaagaagttagggccgcctaagttttctctgtgtcagggtaggaagtcttggggtcggagctatactaactagaggaggaggagtatcccccaacttcttttatttgacaagagacttctggccaaaacagttgccagccttccccgtgaacaagttcttcaatctgttcgacatagatccacagaatcaaacccttaataaatagttatgcaagtcataaaaagtagagcttgtgctaaaatagctaccctaaacctctaagggacaccctcccaaactacaaagatggagcaacgtcatccaaggaatctcctttgtgttgctccttgactacccgttttccctttccagttactccctggacggcgggacaagctgcttcttcagaatcatcttttatctgaataggccattctactaagtcctgacctggcttcttttggttcttcctcttcctcttcttttgtggaacctcttgctaaggagtaggatccttggctactacatcatatactcgtactacttcgaatggatataacccgcaagtatgttgattaacacccta

SEQ ID NO: 274972 - DNA, 613 bp, Cannabis indica
aatggcattgagaatcctcttatggacatgatcccttctactatgatgtaccgtgctgcctttcttctcattttttgagcttcatttcggttatctgggattccccagagttgagataggctgctattggcgtcatccagtttggagatgtgtcgatcatttcgatttcttccgtgccagtgatgctaggctcttcaagaaactggatcgggactaggtttgccttgtcacttatattgttgctcgccaatcgggctaacgcatctgccgttgtattttcttctcttggaatttgtctgaggctgtagcttttgaattgtgcgagcagatcatgtattttgctcagatatgctatcattttttctcctcgagcctcgtattcgccagatacatgatttaccactagctgtgaatcactgcagatctcaatgcgctcggccttcatctccttcgctagtttaagtccagcgattagtgcttcgtattcggcctcgttgttagaggctttgaatccgaatttgaccgctgcatgcaggtgttgccccccaggtgtgacaagggcaattcctgcaccagatagttgatctgttgccgacccgtccacatgtagctt

SEQ ID NO: 274973 - DNA, 538 bp, Cannabis indica
tattggctcgagatcgctttccggtatgctttcagttttgcccggcttttgttcaccttcttctcgttgaatggcttctttgagcttgatgaagccttcggcccgatcaagaaaatcactcattgagtcgactggtctgtttttccttatatccttccacagttcgccaaggacttcaatgccccccagtatcgcggataactttccatcctcggttacccgcgacaccttggtcgcttccatcatgaatctgttgatgtatgcccggagtggctcgcctggtcgctgttttacttcgaccaaatctcccagatgcaatgggagctggcgtgaggaagagaattgtgaatggaattccgaagagaaggttttccatgaactaaactttcaaggagccaacttgaaataccattgttgtgcggcttccgacagagtggcggggaagattctgcaacatacgtcccctcgcactccttgtaaatccatttgcatctcaaaatacttgagatgggaaagaggatcttctctcccagtgtac

SEQ ID NO: 274974 - DNA, 641 bp, Cannabis indica
ttactgagtagttctggtacctttcagtctactggagaactggttatttttccagtaggtggtctaaacccttcccagattgtgagggcaaggaaatagttggttgtttcaattgtgctgaatttagagaaatctaatattatattagggttgaactaatttgcaaggtataatgcaactatcgattgaaaagaaaggtggcaactcctgaatcaaaaaaaaagtgaggacccatttgcgttcttgtgcaaggttcaaagatcccaaaatccattaatcccggtgtttaaggctgaaggggttattataggagggatgtatcaacttttcagttagtgtggccaatattataaagggaacattagtgagattgggacaatcttgtggctcaaggtttctagatgcttttagaggagtcactagggttattggttaagcgggacattgattctgaattgaaatggtaatgggagtaaaacctgtatctaaaattctgaattggatggtaactgtagaattgaaaggagtgaagattcagttgtaggaaaagttgggcttgaaattaccagtttaagtatttcattctggagtacaccagttttatttgttgaaaaaaaaagtatcctttgataaggacagat

SEQ ID NO: 274975 - DNA, 624 bp, Cannabis indica
atttttgaaaaaatctgaatagtttacagtaccgaaaaataaagttcctgatatttcaatttaccacgcgcgttcaaaaaatttcaaacgtatttttggcacggtaaactattcaaaaattttcaaaaatttatagggatgatgttgtaagcataacgagcacccccgtgaaaaaaaaaatttaaaaaaatattctgacatatgtttttcaggtgtagaagttgactaagaggttgacggtagtactcctcaaggaaaaaaaaaatatctgctaagcaccactaaaacagctgagtctttgatcatctatttatttattttccgaaaaaataagaaatgttgtcgatttcatagtagaagaggataactaaatataagataatgaatgttgaggaagtttttggtaacaattttattttaaaatttttaatcacaaattaaatttgtttttaaaattttattttgaaaactaaaaatgcgttttataattatttttatttttaattttaaaatagtaaacaaaagtttgtttgtaaattttatttttattttcttttttgtatgttatttaagtcggttctaaggtccaggtccgggtctggggtagggtctgggcctggggtc

SEQ ID NO: 274976 - DNA, 656 bp, Cannabis indica
aatcgaagaaaaacgagcaactgcaaacttaaagttgatagctcatcaacaaaaagtagctcggtatttcaacaaacaagtgaaagctcagaaattctttgtgggagatatggtcctaagaagggtattcctaaacaccaaagacagcacgtcaggcgtactaggacccaactgggaaggaccataccaggtggtcgaagttctcgactccggagcatacaaactgggtaagtatgacgaaaaaatgcaactcattctagtaccacgatattggaatggagaacatttaaggaaatactaccaatgagtactcaggtcgggtagaccacttcaaagtactcaggtcaaatagaccatttcaaagtactcaggtcgggtagaccacattaaagtactattgaacattcgcttctaagtgaatggcctcttgggcggactacgcgcaaaggcttcagaaacaaaagtactcaggtcgggtagaccactttaaagtacagtttcttatttgttttatgtcatgttaagctaaaaagatcatattagatcactagctctgatgtaagttactacggtaacaaatacattttcgatcaataaaagaataaagatagtatttccaattctattgagtcgaaaaaatcagcatgattataatt

SEQ ID NO: 274977 - DNA, 678 bp, Cannabis indica
attataatacttacctttgtatctttctgagtcaatatcactagttgatcttagatcaaaagatcttaatcccgacatgcttaggttcaatcttaggagtgctattcatgttctttgatttgttagttaagcctactttttggtcagggtgatacgtacatttttggaacatgatagtatgattgagtgggagcgctaaacatagatatggaatctatagcttttatcaggacatataagtgaaacaatgattttcttcgagcttggctaaatagaggtaaatggaagagctcttgattcagtggttatattttatttcagtgaaatatcatttacaggaagctaagtgttttaaagataaaacacattgaggggtgaaacggtaaatttatccctactcggtgtaaatcatctatagaggatctctgattattgagattagaacgatggttaaatgtttatagtgtatctatatcgtgaaacatatagagcgttttatgtaactgagagtgcaattccaagttctatgagtggatgcaataagaaattaataagttagggaatttacttgttaaattctagttctgcttattggaagctcgattgtataggcccatggtccccatactagttgagaccatactgcttgtaagacttagataattaattttaattaat

SEQ ID NO: 274978 - DNA, 376 bp, Cannabis indica
aatcctttaactgacgggaggcataggcgataacccgatcaacttgcatcagtacacacctcagaccctgtctggatgcatcacaataaactacgaacttttctttgtcagaaggcaaagctatccagaaaactagcttcacatttttctgaccatacaaaccgctgattctttttggtgagctcggttaagggtgttgaaattttagagaacccttccacaaaccgacgataataaccagctagacccaagaaacttctaatttctgtcactgttttcggtctacgccaatccctgacagattctatctttcctggatccaccttgatcccatccttgctaacaaaatgccctagaaaggacacccgagatagcc

SEQ ID NO: 274979 - DNA, 576 bp, Cannabis indica
atctgccatagcctccagtctttactagctgcaagtgctaacagaactcgcactgttgtaattttagcgactgggctaaatgtctcgtcataatctagcccatattgttgagagaatcctcgagcaactaaccgagccttgtatctctcaattgaaccatcaggacgagtttttaccttgtagacccatttgcacgaaatgggtttcacttccttcggctttggcaccaactcccaagtctgattctttgctagcgcacttatttcttctttcatagctcctagccacttggagttttggtatgcctcttcatgactctggttctctgaacttttcttcttcagctacagcagcattagcatatttcggatttggctttcgcgctcttgttgatctccgaagttctggttgactatcatcatgtccttctctttgatgcacccctgtttgccatggattctgaggtgcctcgtcctcggtgttttcttcttcatctgtatcttgagttgtaggtaactcaacaatttgctcccccattttcttttgcaattcatcttccatttctttagaatctgg

SEQ ID NO: 274980 - DNA, 837 bp, Cannabis indica
tttttaaaatcgaacaaattccgagaaaaaaaaactccaacgtcgatgccttagcaaaactagcctcgcagaatgacctggatgaattgaatctagttccggtagagatgttgagcgagccaagtatatgtgaaattgaagacgtcgagatgatagatagctttccaacatggatgacacctattatcaattatttactcgtcagacaacttccaaatgacaaaagcggggcgcgaaaactattgtattcagtgcctcgctacacaattatcgaaggcaaactatatagaagaggatattcaatgcccctacttcggtgtgttctttctatagaagcaaatgaaatcatcagaggaattcatgaaggcttctgtggggatcatgcgggctggcaaagtttgtctaaaaagattattagacaaggatattactggccaacaatcaataaggacacacaggagtttgtcaagaaatgtgataagtgtcagaggttttcacatatacctcgcataccaccaacaaaacttagaatgaagacctcaccctacccatttgctatatgggggatcgacctaattggggcattacccactgggcaaagaggagctaagtatgcggtagtagcagtcgacttcttcactaaatgggcggaggtcgagcccctcgtctccataacctgctagaaagtccttgactttgtcgtcaagaacattatctgtaggtttgtaattcccatgaagatagtatccgataatggaacccaatttgatggcgacttcttcactgaattctacgagaggaataaaattatcaaaagcttctcgtcagtatccaggc

SEQ ID NO: 274981 - DNA, 456 bp, Cannabis indica
gttggggtcatagttcgagtcctgttctgagtttgggttcgggtcaggattttagtctaggtccagatcaggctcctggtgtgggttcgcatcctaggtcttggtctaggttgggtctgagtcccaagttccattcccgatctgagtctggattaatttctgggtctaagtccttggttctgatcctggtcagggttcgagttcgggttcgggtccgggtctacctttgggtcttattcgaggtgtgggtttgatttcgggtctgagtttgtgtccgggtttgtgtccatgtctagaccttatcagggtctaggttcgggtctaggtccaagttggggtcccgagtgcgggtccaagtttgggtgtgggtaaggatctcggtccagatctaggtccagcattttgatctcattctgggtcttggtccaagtctacgttcgtatccggatccctatc

SEQ ID NO: 274982 - DNA, 416 bp, Cannabis indica
gcataaaacccaacagacccaacgatgaatacttcccagactactaatggtcagccgcccaagccccggttacgagttccgctcgtgagcctagtggtaggcgagcagaccttgtccggtaattcatcaggaggagtaatacctgacggttccaaccagactaatggtgttattccacctgtcaaccaagcgaatcaattactaaggcaaccaggctcttctgtgttcgaaaggttgggagcaacccatgacctaaggaatgatctaaacagaagaaggggaacagaagagtagaatactacaacgatcctgcaaccaggagcccgtactcaaatccccgctcagaaagacgctgacgtaatccaagttgaccagaatgccgagcaggtcagcccagccgtacaggcccagcttga

SEQ ID NO: 274983 - DNA, 744 bp, Cannabis indica
gatatgtacgataaaacatatataataaataataaaacagaaccaaaaagaaaaccatacaataataatacatttgtttaaaaaaaatcgtactaaagaaagcttgtcactattcttcttaattttcctttctctataagtggtccatggagggcacaacacagttatatacaaatataaaattattaagaagaaaaaactaacaaataaaaagatagatgtgattgaaaatgttgtctaaagagctacaagaagatttgaattgaggatttgatatatatatatagattaatttattgatcaaatgccacgtattccacatggatgtaatttatatatatttgcagatagttcaataaattatgagtgagatttatatttatgttaccctttttacaagcaaaacataaagatttaattgtattagttaattagttacatatatgctaattactttcgtgtatatatattacacaacaaataataataataataataataataataataataataataataataataatatattattagtgtataatatataacatatgtgtcggggataggggactaaatgacaacctcattttctggggctttttctatttgttttagtgtaggaactgggactgggagttaaagttgcttttttcatgcccttggctttttcctaccatgctattttgcttgccatattgataattgcataatctctcactactgtatatactcccccat

SEQ ID NO: 274984 - DNA, 507 bp, Cannabis indica
gtggtgacgtcgtgaatctgagacaccatgtcccaccagaccagagcgtcttcttgaaactggaaagtggcacacaccactctgtcgttcccggtgacacccataaagttcaggattttggtgatcaccgttagccactgctcggccttcatcacatttggacctcccaaaaagaccggaggtgcttgctcccggaaccgttcatacaagggttccattcagtttgccactaccactatctcggcctgagcagcaggggcgggtgccactggaacttctggcaccggcactgcaggagcaccctgctgcctgaatctctgaatctcattatcttgctcctctattctggcttgcatttcagcaaacctaacttcccaattctgggcttcctgattgacctgggcagcctgtggcgagttgacatcaccccgaccacgagccctgcccctgggacctctacctcggcccataacactttgggggaagaactgagctccttgaccttga

SEQ ID NO: 274985 - DNA, 506 bp, Cannabis indica
ctaaaaatatagccactggttgcctgggagtcatctgataaagtgttccaattagcatcactgtacccctcaagtacagttggaaacttttgataatgtaatccaagagttaatgttcttttgaggtaactcatgaccctctctatagcatttcaatgctctgcactaagtctactagtaaacctgcataataatcccacgacataggcaatgtcgagtctagtacaatcagtggcataccgaagactcaatgatgctcgcatatttagattgtcttacaccatcaccagtgataattttacactgggatcatatggtgtacaagcaggtttacagttaaagtaattatatttctttaagatcttctcaatgtagtgagattgatccaaagaaatttccttttcagacctagtgatatgtataccaaagattacattcgcttcacctagatctttcatgtcaaaattttcacataacaaagatttcacattgttcatgacatgaat

SEQ ID NO: 274986 - DNA, 556 bp, Cannabis indica
gtttgttcttttctgggttgcactcgaaatttctgggcatgcaagtgtttaaatccttcacatagtctgtttgagtttactgctctagtgataggattgctattgtcacgcctctgttgttattgtgtattttctttgagaaggccatacgttcttcgtataatggttgcttagggcataggatagacctctttttttttctttctgttttccttatcgcgtaaagccgtcttctgtgaatttactgcacccgacacttgtccagggaatccttctagggtttcctgtgtgacacgtgtccggagggggcctctttccagcggttaggggacccccattccctttttcttaatttagggtttggtatggggcctaactgctggaatcttactctttttacagaatagaaaaatgtctgcttctggctcaaagtcatcaaagaaaagtggtaagcgcatggctacccttgaggaggtctccctgggacccgttgcccaggaggggtataagtcccgggcgaccggatgggaagcggctgagctttactccaccttga

SEQ ID NO: 274987 - DNA, 392 bp, Cannabis indica
tttcctttttgctaactctcccatgtttatttcaactaatttttgtcattcactctcaccacctacccgattctatttctttgtctctcttgcttgtttgctgttcattgtctctttcattgtctctacccgattcgaagccttgtttgcttgtttgattatattaggaaagatacaacggtaagtacactgatgaacagggactaagccttttgaatcatataatcacaatcacattccactgtattgacaatactgtaattgtgaataactatatgttctggatttaactgattttgtgcatttattaaatatatattaaaccataaacatgtaaacataaatcacttcaaaaattctaaattgataactaatcagattgtaatgggttt

SEQ ID NO: 274988 - DNA, 287 bp, Cannabis indica
cactaaggcaagtctagaaatcttatttggtgtagtctaagagtatcacccttatcgactgacatatagttcctcttcttgatgttaagatttacttgattgtcttccaatgttcctttcctggatgaatctgataattactcattactgccactcaacagcaggtgtctggtctaatgcattgcaaagcatatctgagacctctcactgttgatcctaaggaatacctttgtggctttatcttttctggaatagttaagacttttccttagataagtaaaatctat

SEQ ID NO: 274989 - DNA, 678 bp, Cannabis indica
tctactttgtagtccgtgaactcgtggagcagctcccggactattgttacatacgcggccattcgctctccgcgtgtttggtactctcccgatatctgatttacgaccagttgggagtcgctgtagacttctactcttttggcccctacggccttcgctagcttcaaccctgctatcaaggcctcatattcggcctcattatttgaagctgagaagtcgaaccgtagggctgcctggagtcgaagtccggtcggggatatcattgccacccccgctccggatccattttcattggaggctccgtccacaaatactctccatgtggggatcgatggtgttggcgcattcgcggttgcctcggcttcattgcattcggtgatgaagtctgccaaggcttggccttttatggagatgcggggaacgtagtgtaagtcgaactgacttaactccattgcccatttgaggagccttccggatgcttctggtttttggaggacttgccggagtgggtggttggtcagtaccttgatcgggtgtgcttggaaatatggccttaattttcttgaggccatcaggaggcagaaaaccagtttttcgatgatggggtaccgcgtctccgctcctatcatgcgcttgctaacatagtacacgggatgttgagttttctcttcttcccgg

SEQ ID NO: 274990 - DNA, 727 bp, Cannabis indica
gatcctcgtaaaataatttccaacaagagggtggtctatggacctgaagagagtccaaggaaccaagagaggactaggagtcacccctccaacagggttccccacaataataatcgaccacccccagccgatgaccaagtcctactcggtcatcatatgggacgcgatgactcccacaatgtttgtctaaggcggagtggtggaggaaactctagaaacaacaatggtgaccgtggcagaaacagtggaaggacgccccaacgtagggagtggcaacccggcgatcaacgtggccaaccatgagatggcgatgatcgcccaagaaattgtaggtctagcgggagaagagaagaccctgaggttaatagtgactaccatcaaaactgttggaattattttaccaggatcttagatctactcacaagtatgttgatttaagaacctaaatatgaacttctaaaacgatggaaaattaaacacataaaagtaagagaaatctgacattgggtgcagcgaaatatatgtctcctcccactcagatctctaacccttgattcctttgtgtcgtggagtataatcaagatctgagtctgaatgtccttctttgttgaatctttattctacacagccttcctcattatgattgaggtattacttgatgtgtgtgggcactactctatcacttagagaatttcgaaaaacagagaaggtagagagagagagagtg

SEQ ID NO: 274991 - DNA, 491 bp, Cannabis indica
taatttcccctttattttttaattgtaatcggtttaaattattgtgtgttacttgtttgtattcattatgttatataaccgattctattttagttatagtcggtgttgcccctgattttgcccaatatacgtggaccaatcagataaggacacgtggatcgaacaagcttaacattcaaaattattttctaagtctttatataacaaggcagcatccgggacatgcctcccggagaagacatagggagccccatacgctcccggaagcccaagtaatactaaggcatctccgcgaggtgtcaggcttcccctgagcaatcaagtcgcatttaatgccgcatgggaggaaacgtgttgggactgctacacgcaataaaatctgacggcacaacccccaatctgcagctacaaagtagtgatcatttaagtctatcgacggctacactgtgaagagtcacatcagttaaaagacaataaggacattccacata

SEQ ID NO: 274992 - DNA, 817 bp, Cannabis indica
ttagttaatttctatacttatagttttactaaaaaattgcgcctctaaatgtcaattttaaattagacaggtattatcatgctcttaagtttctcattttataaaaaaaattaaaaaaaaaaaaacaacctctaaaaatctacattaaccaatttgagtcaaactctaacacaaccgcccctattaaaagaaacatataaattaaggagtgtatcttataggaaaatgtgcatctctgataagataataacatcatgatattcttattattactattattttcttaactgatattcttatttacttatttatctcttttagaaaagaaaaatgaaataacacaacattcttatcgtggggagacttatctattaatttgtttgctccataaaaattaaaatttataatatacctctaccaaaagaaaagaaaaaatcccactaacttgttatacctagtaaatattaaacacgtatatgatctatgcctaggccaagttacccaaaaatgcaagttattaattcgaggtgataaatcaaaagatattggagtcatatcacatgtttctcagtgccttggtttgcatgaaacatgaattggttgccaacttcgttacaacttgttgcacatggacaaatatcgttttgctttttttttttcagttatagatccactattaaaaaattattgaaaattaaagtcgcatttagttggaaagataaaaatatataagaatagaaatagaaatatgcatacaaaagattaataaaaaaattataaaattttttctcttattatattggaatagtctttcctt

SEQ ID NO: 274993 - DNA, 574 bp, Cannabis indica
gcttctccaaattatccaggactgtttgtccgcatggatagtttgggcttgttttatacttatagtatgatctattgcttatttgattatttcattagtagatattttggtacaacgtcttcttacacgttcttgtaagtcggcaaacttaattactacaagtttgctaacttataagaactgtggggaggtgctgccgaaatttttacaaaaatgaaataatcttaagagcgtagattgcactatatgtatattacaaacctgaatgggataggttctttacccttttagtaatggagtgagaaggtggattaggacacttgcacatttttttgtttgtttttaaattgtttttgttaaatacttcgtagtggaagatgcctgccaaccgaagttggatgaaggcgcaccggcgctctgcagagtttcgaagtggcgttgacgagttcgttgcggtagcaacgaaccacgtgaacgctgacggattagctcgatgcccatgcatgcggtgtttgaatgtgaatttccacacacctgcaactataagggttcatttatttctcagcgggatcca

SEQ ID NO: 274994 - DNA, 629 bp, Cannabis indica
gatttatttatgtttttttttttaatttttatttgttgttttgttggtgtttgtttcgttttattttagggcaagggtaaatcccctgtaaaggtgttgccatcatcaggtgtggctgaggaaattcctgttaataggattgttgaggtttgtcatgttatgcattctgttttatattttttttattgttatttcgtagtgttttatggtgttttagcagtgtttttattgttctgttttttaggattgggaatgcaagtacacccgatctcaattctatcattctagagtagtaacatctgggtattactctgtacttggagacattaagagaattctaactgaaagccaattggaaattttttcaaaatctgtgtttggttattttcttcggattccggagtacataattcattaccaattgcttcattgtttgctgttgagggaggttcagcagcctaatgggttggagttttgggtttgtgtccaagggaaatatcttaggtttagtatcgaagagtttgcgttggtcacggggttagattgtcatgttgattctgatttttatcagtttaagcaagatgataatgaattggtcaaacattgttttaaggggtacaaaaaaaatt

SEQ ID NO: 274995 - DNA, 1061 bp, Cannabis indica
tcggtttgagattacttacgaacccgcagccagttcgccgagcgcggctttttctccctcgccccggaagccttttacctgcatatattacaatttgattgcgagcacagtggagaattttgtgcaattcctaagcccgctgtggcctcggttgcccctgaagttttatgctgcacttatccaaagtatcctgatgtcgttagagtgaggggtcagagtgtccccttttctcctgatgtgattaacgacttatatggattgagagctccgcttgaggatgagtttgctctttggaggattaacccagcctctattccatatgacgccgtgcttcgtgctgttgctcacctgggttctgaatggtctatctcgtcttcaggccaccgcactttgttacactcatctctacggcctgaagcgagtgtttggcttgcttttattaagtgctctttgatgcccacaacacatgacaccacagtgagccaaacacgcctctgtttattgtattgcatcctggcaggcaagaaaataaatgtgggcaagatcatttatgaggaaatttggaagtgttttcagaaaaaaggcggcaagttatttttcccagctctcatcactcagatttgcctagcgggtaatgccgctattggggacgatgaagaacttctaagagagcggatcagcattgatttggtctcgattcagcgtgttgccactcattgcacaccctcgactgctcctcccaaacgtcaccagccatctagcagtcagacgacttccgccaatcttcctcgcactcagcacgaacaaatcatggatcgcctagcacaccttgaggagaagcaacttacctactttcgctatgttcaggcacgtgacactgcattagcaaaatctctaaagcgaatggcgccaaggccgatagttgacttcccagtgttcccacaagaagtgtttgctcgatgggctgatccagaagctccggaagactctagcgcttcagaggatgaccccgagggatagacaagggtaagtctttttttttctttcagcttcagtattta

SEQ ID NO: 274996 - DNA, 807 bp, Cannabis indica
gtaacggggtctggaacagaccagtagtcggtgtctagatctaggactcagacttggaccagaacccagacgaagaaccaaacccaaacccagacctagacctgggaccataaattagaacatgaacaagaatcgcctaaccaggacccttgaacaagactaggaccgtgaccaggttccggacctagacctagaacccaacacagacctagcctcagacccaaattgagactggaactcaggcacggacacggtcgtgtacccagaacggaactgagacccggaccttaacctaaatcatgcacccgatcccaaacacaaacttggacctagatagggatcccgatacgaacctccactaggacaaagaccaagactaggatcgaaatgctggaccagatgtggaccgagatcttgacctagacccaaacttgggctcgaacttggacctagacccgaacctagacccagatcgggtcaagacctggacacaaacccggatacagactcgaacccgaactcaaacccacacctagaattagacccaaagttaggccagaacgcgaacacaaactcgaacccagaccaggatcaaaaccaaggatttagacccacaactgaatccagactcatatcgggattggaacttgggactcggacccaaactagacaaggacccatgacgcgaacccacatccggagcctcatttggacctagattcaaatccagacccgaaccaaaaattcagaaaaggactcgaactccgacacgaactaaaacccaaactcgaacttagaatcgcaaat

SEQ ID NO: 274997 - DNA, 645 bp, Cannabis indica
catgggttaaaatcagatcattggatctgtcaaaaagttaaccatgacaatttagatcaagcaataatatgttttagaaaaacttacaaacaatctaaaacacataatcctacaacaaattagttaggatagttggatgtaggatttatttaatttaaaatattgatttcgaaaataataaataaataataaaaaaatattttcagtttttaagtaaaataaattaatatttaaaattaaacctacaattttgaaaaattaggtttcaagtaacctaaatatcatttccaaaataaatttgctaagttaccttttaaatttcatgttattttataaattaaatattcaataaaataaaaaataaataaatacatacccttttctgattttataatttaatttgagtaaaaataacaaaatttaaaagttaacaaaaatatcttatttcccttttttaaaatttcatgattatggtatcttatttaaatctaaataaggtcaaattacttaaaatagaatattttataaaaaaaaatttaatatctgacctttgatttaaaaataagataaaataatcaaaattaaaaaaaaaataagaaaagaggtaagcaaaagttaatttttacctattttcaaaatcaaatt

SEQ ID NO: 274998 - DNA, 781 bp, Cannabis indica
tatttaaggcataaaacccagcaagcgctgccctagtccgggaagaagagaaaactcaacatcccgtgtactatgttagcaagcgcatgataggagcagaaacaaggtaccccatcatcgagaaactagttttctgcctcctgatggcctcaagaaaattaaggccatatttccaagcacatccgatcaaggtactgaccaaccacccgctccggcaagtcctccaaaaacctgaagcgtccggaaggctcctcaagtgggcaatggagttaagtcagttcgatttacactacgttccccgaatctccataaaaggccaagccttggcagactttattaccgaatgcaatgaagctgaggcaactgcaaatgcaccaacaccatcggtccccacatggagagtgtttgtggacggagcctccaatgaaaatggatccggagcaggagtggcaatgatatccccgaccggactgcgactccaggcagccctacggttcgacttcccagcttcgaacaatgaggcagaatacgaggccttgatagcagggctgaggttagcaaaagccgtaggggccaaaagagtggaagtctatagcgactcccagctggtcgtaaatcagatatcaggagagtaccaaacacgcggcgagcgaatggccgcatatgtaacaatagtccgggagctgctccacgagttcacggactacaaagtagaaagaatcccccgggaaaagaacgctcacgcggactgtctggctaagttagcttcagatagtgaaat

SEQ ID NO: 274999 - DNA, 519 bp, Cannabis indica
gccatggtaattgatttactttcacgtaatatgaatttaaaacgatgtatgtgtgatttggatgtgattcatgttgatctatgtgtttattggtgattgattgatgtttgcaaaaattttatgaacaataattggattttcgttttggaattattgttagtggatagtatggaaaaaattaagcaattcacttttttacagaacttaattttgatttaatttgaattagttatgaatttttgaaaattgaaaaaattagaaggtggtgacacctcccttacgcgcgcggatccccttgatttcaggggtgaacgcgcattcggacaaggccctatccgagatttctcggtcaggatgggctgatcttctttgaaggggtctctgcgcgcgcggacaggctacatgaaacctctctatgtgtgttttctcggccagatcctccctggtgcgcgcggatggtatgcaatgcatactatccgcaccaaatccaatttttttttttcaaatttttcatttttt

SEQ ID NO: 275000 - DNA, 680 bp, Cannabis indica
tccaaccaaaacgtttccaaaccaaactttccagacctgctaattagaccccaataaacattttccaagtgataaaacaaagcttcatgcacaaatacaaaaaacgccattaaagctccaagctttgagttcaaaactcaagcttggataaaccccaatcacatgcatcaaaacctgctagaacctactcaaatatgcataaataagcctctgaagatagcagcaaacaactacagcaagcagagcaacaaaattcaacatatttccataaaaaccatagttttgagttaaaactccacacttgcttaaaatcaactaatcatgcatcaaaacctattctatttcattcaattaaacatttttaaactatagaaaacaacaacaacaaccaacaacagctatcaacattaaatcaccaagcatgcacttatttttcttcaaacaaatcaagaacaccaagaaggtttcaagaaccataccttcttagcttgagatcactaccaacaagctgaaataatcaagaatttcagagcaaaatcccaccctagcagccccaatcaaaaccaaaaagagagagagagctcttgagagaaaatgcaaaagttgcttcttttctttgatttttttttcttatttttgcaaagtgaataataaaagagtttttacatacttttattcag

SEQ ID NO: 275001 - DNA, 527 bp, Cannabis indica
gccacatacaatatctacctcaacagcaacccaatgtttttgatgatcgaagtacaggacgaagtatatgaagttcaaatccttccaacatggcatgtaacggctctccatacccagatagtactggttcactgcatctggccattcaaacgtacttctgtcaccagtctcgcagccccaaatgcctatgaggaattgtggaagtgttgtgtccaaaatcacacctggctgagggtacaactctggaaaatgatggcgtctcctcctcatcaagtgtgatatggcatctatgtgctgcataaaaaaaagagaagattaatcaatgtcgtaaataaagtcgcgaaacgtcgcgaacaatgtcgtgagaagaatttgcctagtgtcgcgacactgtcgtgacaatgtcgcgacatgtcgttaaacagaacgtactaaaaaagtgaccatgtcgcgagaatgtcgtgacaatatcgcgacatgtcgacaaataaaacagaaagaaaaaacttctgtatcagcaacaatgt

SEQ ID NO: 275002 - DNA, 566 bp, Cannabis indica
ccgatttttcgattttagccataacttttcactcgggtgtccgttttagacattctatataccgtttcgaagcttatgaagagctctacagtatgagacatagtttagagccaaaagatatattttattttagggtgtttttaccataagatttggtagaaaaccctaggttattttatgcgagttttagacagtgttttggaatagacccttattgatttacctttgccgtgacataggactcgaaagtgtcgggcatcgttccactcaggtcggcccacatacttgactttggacttgaggtaagaaaagtattaaatactgtataaggttaatgttatgattgttacagtttcgattaagatcgaaatcttgttatacgttgttgtgacttaatcttaatcgaggttaatgatatgtattggatgtgactcgattatgatcgagggaaaataataggaaacgattatcatcgttgtgactcgattatgatcgagggtaatgatatgaaacgattatcatcgtttgactcgattatgatcgagggaaatattatgaaacgatta

SEQ ID NO: 275003 - DNA, 507 bp, Cannabis indica
ttcgaatcactcacctcacttttgctcatgcatctcttatgcggtttgctttaagcaattgggttcctaattcaaacaagaccgtagtgtctcaagatgtggcttcactcttataccgcatcacttctggaacttcaattgatttggcctcacacattctgaaccagattgtctccttccgaagaggtaaaaagccaacctttaaacttgtgtttccaaatctaatctataaggttttatcttctcagaagaatgtggcccaatcacatgaaacacttgagcctcctatcagtggacctacattccaaccctctgaatactttgatggtgtgtttcaaaaacggccaaaggctggagctgctgctgctgcaagttcaagttctgctgcagcagaactcctagaagtcaagtccgaacttcagaatgtgcataatcgccttggagcaatggaagaagtccagcatgagatgtccaagcaattgtcttctttgattaaactctaccgag

SEQ ID NO: 275004 - DNA, 538 bp, Cannabis indica
gttttatcatttgccactacacaaaggtaggtggtattttcacaagacttgggactttccagtgtgaaatcccctcttatgtactggcgtgcctctattttgtccattcattcacttccttccttcttgttgcttttcttttttttttctttttttttggtcattgaattttaatatataaatataaaattttggtttctagattttgaaacttgttgcccaatttagaagttgaatctttttgtggggtgggtttgatatttaatgtgatgttgatgggtgatattgttcaggaaagtaaaatttagcttggcgatgggttgtggttgctttggtgaattgaattggtgtagagaaagctgtaaatctggtgagccacaaactccaggtgagatttgtattctagaatatattgattaactttctggtttttatgtctttttcacataaataatcgtgctagagtaatctgtggaatgcagactttcttctccgttggaggtggtggcctcggtcgctctctcggttcgctcccgtg

SEQ ID NO: 275005 - DNA, 686 bp, Cannabis indica
acacagtgcatgcgtttcatattttacggttacacatttaatgttaataaattttacctacgttcccaacaacccttcccaactgccacgttgcatgtcagacacgtgtcctatcgacaagctatcgacatgacatcgacattgtatcgacaaataagttagccgtgccactaaattggcatgttgtcgacatcatatcgacatagtatcgatattcagtcgacaaatacaccatttcatgcgtttcacctgtacagttacacatttaatgaccattaaatttttctacattcccaacatgtatactgctctataaaagcaaatccctttcttattcataagtgctcttgtcttctacttctctcttactcttaaaaatttctcttattcttaagttctaaatatggcgccaagaaagaacaagagcaagttccccatcttaactcctgaagagctgaagcaggaggatgatggcataattactcctgtaatgcagaatgtttttgacaccgatagagctttcgaaagagaacgaaatcgtaacgagttcaagttcatgcaacttgaaagagaattttgcaaaactggtgtatggctggctccaccaccagggttccccgaaagatgccgtcgttgcaaactaggcatctttaacggtaaaccggtgaagcctggaacattatgca

SEQ ID NO: 275006 - DNA, 545 bp, Cannabis indica
ggtagaaaatgggaagactttgtatacctatttacaactacccaaatggcatcatgctgctttatagtcttgggtaacccagtcacaaaatccatggaaatctcttcccacttccactcagggagtttcagtggctgtagtaatcctgttggtctttgatgctctgctttaacttgttgacatgttaaacatttggccacaaattcaactacatcctttttcataccagaccaccaatacaatgctttcaggtcatggtacattttagtggtcccggggtgaactgaataaggtgtagtatgagcttctaccaatatccccttcttgagctcatcattatcgggcacataaattcgtcccttgaaccgaattaatcccgtgtctgatatttcataatctttggcgttactattcaaaatttcttgctttagttcactgagcttttgatctgtcgtctacccctccttaattctttctaacaaggttgattgaagtgtgacctttgcaagctgacctgtgataaactctataccagctcgttccat

SEQ ID NO: 275007 - DNA, 554 bp, Cannabis indica
tcctcatctgggacatgaacctatggccaagaagaatacttgggatatttataatcacaagtaaacttcttgtcagttaggagatccgtagacctcaggttgaccttatttaaaagaaagtcacatgacctaagaccgtatgggagagtcaacaaaagcctgcgtcgctcaaccatctcaggagtaggggcaggtcttttcgagacagctgtcaaaaacaaagtagaattacaatcagctaaacctgaagaaaaggcatggactaatttaaccaagtcttgtgcaaataatcacttatgtataatgcggaaagtggttatactgatgggggagagaccggtcgtccagaagaattcatccttgaaggaagttttatttggaaaatccacaatgatcttgggatcgcgtgtgtgagtcccaagatgtaaaaacctcctgttgcatttatcctcgctggaacagccttaacagagtagagatactctatttccaagagagtgggcactcccaattcaagattttgtataaaaccctcaaacttgcaaggattctat

SEQ ID NO: 275008 - DNA, 508 bp, Cannabis indica
ggtgccgcaagcaacacccaccaaattttaagggggctcagatccaatggaagctgaggaatggttaagaacagtggaaggtattgttgagtacatgcggctcgataacggagatagtgtagcttgtgctgctagtttattgaaaaaggatgcccgcatctagtgggacattattaaaaaaacacggcatgtggccacaatgacctgggctgactttgtacaagtgtttaacaaaaaataactacagtgaagcaatacgctcagctagagttaatgagttcacaaacctaaggcagggtaagtctacagttacagagtatgctcgccaatttgacagattagcaaagtttgccacagatatggttcctactgagtttcgtgaggattcatcgctttactgaaaggctcgactcccaaataagtcgggacatagcgatgtctggagtaagggcaaccacgtatgctgaggtactggaaaaggccctagaagctgagttgtgtgaaagtc

SEQ ID NO: 275009 - DNA, 629 bp, Cannabis indica
actatttgggcctcttcaaggttgatgtatttttggactcttttctagaagtcctgaaggtttgcggctccttcctgttgtagttcgttccagaagggagtccctgtacggatgcctgcctggagaagggcaagctgttgtccgtcatcaactttcttggtcttcgaggcttcctctcggaacctctttatatagtttttcaaggtctctgtgggcagttgcttgatgttagtcaaggcactgacctccaggttgacctttcttgcggcgacaaactgtctccggaagttggtctgtaacttgttccaacagcccacggatcctggttccagcttcttgaaccattcctccgcggacccgcttagagtaagcgggaagcacagacattttgcgtcattgctgactctcatgaccgtcatgacacggttaaaccgcgacaagtggtcgcttggatcggagttcccggtataagctgccatttcgggcatcttaaagttcttggggagctcggcttccaggatgtgcttagcacatggctcccggtcctcacagtctgagtcggagtcgtcccctttctgtctccgggagactcgggcgatatcttttcggagtatggcgagttccgccat

SEQ ID NO: 275010 - DNA, 515 bp, Cannabis indica
aaatagaagatccagggttaagcatttgaatatttttcttgaaattttcaagttccttctttaatagaataatttcttcatcttttaaacaaaaatcagtctcaaattctttaattttcaattcaagagattcagtttgattagacaattgtttatttatttttgacaatgatctattttcagaagtaacctgtatccacttttcatacataaccttgtaagactcagccagtgactcctcacagatgtcagattcatcagaatcagaatcagaattttctttttcaatggtattattcaaacataccaatctttctttcacctgtgaatcacaaacaaacttagaagaaactgaggttagtgcaacatttttagaaatatcttcatcactatcagtttcatcgtcactccatgtgacattgaaacttttcttattctttttcagtgtatttgcacattcagattgaatatgtccaaaaccatcacattccctgcactgaattccctttttgtta

SEQ ID NO: 275011 - DNA, 480 bp, Cannabis indica
gtggactgagatcatgacccagacccaaacttggacccgcactcagtacccaaacttggacctagacccgaacctagacctagattggggcatgacctcgacacaaacctcgaaacgaacctggacccgaacacaaatgcacacctagaatcagacccgaacccggacccgaactcgaacccagaccaggatcagaaccaaggacttagacccagaactgaatctagactcagatcgggattgaaactttgaagtcggactccacctagacaaggaccgaggacgcgaacccacacccgaagcctgatctggacctagactgaaatccggacccgaacccaaactcaaacccaaacccgaactcagaatcgcaaatggaaccagaaccgaactaggattaggaacaggaccaagacctaaacccaataccgaacctagatcaaaacccaaaaagagacctaaacccgaaccgagactagg

SEQ ID NO: 275012 - DNA, 634 bp, Cannabis indica
tccaatgatctgattttaacccatgtttcaattgtcaataggtcaaaccaataatttgtaacatgtaaattttacattcttctttcgtgtgtgtatgaccttgtaatatgataggatccatccaaatctgtgtgcctgtgtgagcctatatgtttactttgggtttagatgcatataggtagcccatttaatttttatttaaaatggactaggttgctaaataaaatgtcacaccatgataggttgcaaagtggggcccattatccattccatggccggccactttgtatggattttatcatttattttttccattattttaatgctaattaaatctaacctaagcctaggtggtttcctataaataggtagtgatggctttaggaaaaagatgatgcatctcattccttcagataaaatttgagcctccttcactaaccctagccaaaactgttggaaattatttaccaggatctagatttactaacaagtatgtttcattaacattataatatgaatttctaaaacaatgaaatgaacacataagcgtttaagaaaaccttacattgggtgaagcggaatataatgactccttccgttcaaatctctagcctgattcctttctgtagcagag

SEQ ID NO: 275013 - DNA, 649 bp, Cannabis indica
aacccagtgacaataagagcatgggcattcagtgtagagaatgtgatgggttcggacacattcaggccgagtgtgctaacactctcaaaaagaagaaagcccttgttgccacctggagcgatagtgacgaagaaaaagactctattgcaagcaaaagttctaatgaggataaacaggtagtggctttcatggctcaaagtcatcagtctgttgaatctgaggatgatggagtctccactgtgtctgaagtcgacagtaatggaagacaaaatgcatatgaagagatgtttgctcaatgggaatatatgaccaagcagattagaggtctgaatagtgccaaggagcagatagagtctgaaaaagtcaagctggaggacactgttaagaatctcaacaaacttcttgatgagaaggacaatgagatctacaagctttcagctgaactcataagagctaaacaggctttagagtttatccctccaggaacggctgccatcaatcaaactcttcaacttcaaaaaccttatggtgatcgaacctctatcggatacaagatgttgtataagcaaggagataacttgggggtagaagagtccattacaccagtgatcaacctagacaaaaaggatgacaagcaatcatcatttcc

SEQ ID NO: 275014 - DNA, 527 bp, Cannabis indica
aaaagatgaggttgcatgcatagtttaaatggttgttgctgatgtgattctattgttgttttaagagatttaagcatgttaaattgaggatatttgagctgttagtaatgcatgatagttaggttgcttgagttatggttttttctatgaataagcttgagttttcaaagtggatttgtgagttttgttgctgtgtttgttaaggtcgaattcttgtgttttcagaggttattttatgcatgattaagtagatttgggctgatttgaatgcatgttagtggggtttgatcaagcttgagtttagaactcaaagcttggagctttaatggcatttttggtttatgtgtgttctggactgtgtagttgccttagaaatgttatttgggtcctttagaacaggtctggaaggtttgaggttgtttggattagatttgagcattgtgtgaatttttgaaattctgcctgcgaggaaccggaattccgattgtgcatccggaatttcggatgggttttgaaaattcccagaa

SEQ ID NO: 275015 - DNA, 666 bp, Cannabis indica
ataccgcacggacaaacagaaaaacaaactaagtaaaatatcctgacccaaagggcaggtcagaaaatatgcacagaaataaaaagcataagtataaaaatcctgatccaaaggacaggttaagaaacataagtgtgacaaaagaaagatcgcataaaaaatatcctagcccaaagggcaggtcatatacatataaacggcccggggacaggccttaataattgtctccccttcgaataaaagctgctacctatatgtatattgttctaaggcagcagcaaatatgtacaaacaaaaaaaaagagttataaaagaaatgggtggaatctgggtcaataatacggcagctcagtcggcccgcggaggaagacgaggtccagtccgtgcctcaagcgcggcatcaagcttcttcttcttttcccgaaatttggcaatcatctcctcgggtttgggataaaaagtaagcttgatattttgatcgttgttggaccaagccatgtagactccatcgtcgaagcgcttcggacaccgggcgcaggaaacgggagagaggagctcggccctcttggccttcctgatggattgttctttgaagtccctcagctccttcagctccgcagctagagcggccttggactctatgtccgcctggtgagtttcctctaa

SEQ ID NO: 275016 - DNA, 580 bp, Cannabis indica
acaaagactttaaaaatcaccaaaattttctgaaaaataattttgagatttctttgttttttcaaagtggattttcatgcttagaacaatctatattaatatatgaatgtattaatacatatacaatatatatataaatatatatacatatatatacagaaaaataaaaatactgtatgtatatatataaacatgaaatgtatatatgtatatatttgtatatagcatttagatatataaataatatatatatatacaacatatatacgtaatgaaatgaagaaaatatatatatatatgtatatgaatatatatatatagaactgaatgaataaacaagtatatatgtatgaaaatatatatgtatatatataattgggattgaatgaatatgaatatataaatatatacacaaacgaaaataaatatatatatcaacactgaattaaatatatatatataaacactgtatatacgatatatatatatatatatatataatgaaaactcaaaactaaaactcaaggcagagataaaaaaccgctctgataccaactgttagacaatttatatgtataaa

SEQ ID NO: 275017 - DNA, 822 bp, Cannabis indica
ggttacccggtttttgcagcggggggtgaaaccagttttttcagctggtcattttgtgttagtttcagattttcaggcagtttattccctgctagtttgagttattgttgtattaagttacagtaggttaagttttggttttaaacctttgtcccggttgtgatttagtggatcacttatatgttttgaatccgatgtgatttaggagcctataattcgccgaactgttgttccactcaggttgaccggcacacctgaattcagaattgaggtaagattagtataatatcatgcatatgttattacatgtttagcgtacatgtgttattgcctgttagaatacattgatagcaataatagtatacatagagttgtactgattattgataaatgtatgttggctagaatactgattgatgttgtcagatcaatatggctagagtatgactagcatattgagtataggctgacattatggtcgatagtattgtcttaagaacgttctagactcagtaccgtgtgggacacggggattagggttatgattgggtgtatgggcgccaggttataacccgggttattagtatgttttatgttatgtttttcttactgagtccgtcgactcacagtgctatgtttatgtgtaggtaagggcaaagctaaagctgaggaatcgtgagaacgagcagatggaggttgtacatgtcggggcggttaggcctggagcgtacgatcctcgggacatcagggcttttgttaattagtcgctgggcgacaaacttttgataatatgtatagcaaacttttataactgtattttgt

SEQ ID NO: 275018 - DNA, 628 bp, Cannabis indica
tcccatgacacaagggagcccataagtactatgttcatctgcaagtctcattctaaggatcccacacaatcggtctcgagcagtattaggcacattattactgaagaacacagaggacttactgaaattaacctgttgaccagaagcgatctcaaatagctgaagcatatataatatattcaaagcctctctatcagttgcgcgacaatagacataaatatcatcggcaaaaagcatatgagatataaccggagcaccagtagccaccttgcaacctttaagcccaccatcccgctcaaacttccatatcaaagatgagaagccctcagcacaaataagaaataaataaggtgatagaggatcaccttgtctaatacccctcccaggaacaatcggacccaactcatgctcgccatgaattattttataccgcacagagttaaccgtagcaataacaagatcaacgaaacgcaaatcaaattccattttactcatcatagctcgaagaaagccccactccacacgatcataagctttactaagatccagcttgagcgccatatagccttctttgcctttacgctttcttttgagatagtgcatagcctcaaacgctatcataatatta

SEQ ID NO: 275019 - DNA, 619 bp, Cannabis indica
ttcagatggttctgcaacggcttcgggaacataagctttatgccaaattcaagaaatgtgaattttggctatctcaggtgtctttcttagggcacatagttagcaaagatgggatcaaggtggatccagggaaaatagaatccgtcagggatcggccaagaccgaagacagtgacagaaattagaagctttttgggtttagccgggtattatcgtcggtttgtggaagggttttctaagatatcaacacccttgaccgaacttacgaagaaaaatcaacgatttgtgtggtcagataaatgcgaagctagttttcaaaagctgaaacagagatttattatggctccagtgttagctctgccttctgacaaagagaagttcgtggtttattgcgatgcatccagacagggtctggggtgtgtactgatgcaagccaatcgggttatcgcttatgcctctcgtcagttaaaggattatgaacaatgatacccgactcatgacctagaattggccgcagtagtttttgcgttgaagatctggcgacattacctttacggaaaaaggtgtgaaatctaccgaccacaaaagtctcaaatacttctttactcagaaagatttga

SEQ ID NO: 275020 - DNA, 813 bp, Cannabis indica
ttgcactctggcgtggcatcacacgatggtgacacgtggaatcaactctgggtacctggtcgcaagacacaggccgaacaaggcacctcatacatttcgtcagacgaagtcctctagaccgagcagtgagcaattcgcacagcacgccaacacttagcgaattcagctttcgcatcgtgagtcatcaaggaaatccctataaccttgggattagactacatagatattgcaagctgtccaaaaccacgattagtgtattctgtatttactatgaaatctttctacttatatcaattgtaactagaagggaaatacttcttctccaagcttatagccctataaatagtgattcatattcactgggcaaagggtcgagagattttttctaagaattcatattcagagatactattgtaagagctataagaaaaggaaccattttccttgttcttaagtcaatacaaataacgaggcttaggctattaccgaactactcgggcctgaacctttataaaattcttgtgtctttatttgctttactatattttattcgcattaaactacttgtcgcttacaaaattagacacactgtcgttggctaaaagcgaagtcaacaaaatctatcaagtgtgataattttatttagcaacctagtccattttaattacaaaaaattaaatgggctccctatatgcatctaagccaaaagcaaacatataggctcacacaggcacactgatttagatggatcatatcatgttactaggtttatacacaaataaaagaagattgcaaaatttacctattacaaat

SEQ ID NO: 275021 - DNA, 1260 bp, Cannabis indica
ataaaatagactcattgtcgttggctaaaagagaagtcaacaaacatatatgttcaagtcatgattataacattcaagctaatcatgaccatttctaagtgtgactaagcaggacaatctaatttaattttgaatattgtaaatgttgcccctgattttgcccaatatacgtggaccaaccggacaatgacacgtggatggaaagggtttagcatttgaattaaatagctaagtctttataaagaaaagcattattttggatatgcctcccggagaaggcatgcaaggtctcatatgctcccggagagcaagatggcatcaaagcatctccgggtggtgtcaggcttcctctgaacagtcatctcgcatttaatgccgcatgggaggaggcgtattggaactgccacacgcaataaagtctgacgacacaacccccgatctgtacctactaggctatgaccaataaagtctagtgacggctactctgtgaagaatcacatcagtcaaaagggattaaggactgccctcataaaatccctacagcacctagggattagaccatgcattacccatgatatattcattgggaatgtacaactttactgatagttacagaaatgcatgtaccttaattctggggatcaccccacaaaaacactataaataccccccaaagctcattaaagaggggtcgagaattctgggttgcataagtgctagaagagtaaaaactcaccaagaacattctctgtattaaatactatcataaatacacagactcgtggactaaggctcattaacgccccaaccacgtaaaaatctctctcttaatttcttatagctctctaaactattattattttattggttgccgaaaacctcggtcaacattttggtgctttcattgagagttgaagaaagcatctgtaagtaaacacacaatgcattacaacaatggtggagactcgaagcacacgtcaacctcgccctcttcaagatgctcaagatccgaatgaggaggacgtggcctcaagagaaaccgagggttttgaggaagaagaaaggattcctgatgacgattacgaaggaaacctcgatgagtacgcctacgacaaaggtagctactcagaactagtgctcttaaggcaaaggctgtcgatcatgaagctgaaatcgcagcccaaaaagcgcaaaatcaaaagatgcaagaggtaatgctggccatgcaaaaagccatggaggcagctggaatccacgtgc

SEQ ID NO: 275022 - DNA, 600 bp, Cannabis indica
aaaatacccctttagtgttaattatgttatttttgtgtggaggggcaaattggtctttttgccccaatgatattttgtcctttagtggactttatttagttgatttatgtgttttatttcattaagtgttggctgaaatataagggaataatattaattcttttctttattcaaaaatcaaagttagaaaaaatagaaaatttctcaaaactctctctcttttcctctctctttcggccccctttgagcagcaagaaaagaggattttcctcttggatttcaagccctccttagcaagtttaagtgttcatagttgttggtatgttttctacacctttcttgtatgttttcttgaatttttgaagagaaatggtaggttgcatgcttagttttaagttgttcttgctgctggattttgatgattaattctgaagttaaagcatgataatttgaggttaattaagctacttgtggtgcttgatagttagattgattatagttatggtttttctatgcaaaggtttggtttttcaaagtgaaattgagattttggtggctgtgattattgcatgagtttgttttggttttctgcagctttag

SEQ ID NO: 275023 - DNA, 839 bp, Cannabis indica
tttagggcataaaactcaacagccttctacccgtatgggttgcaaaccccgtgttggtgccaaagccaaacgggaagtggcgaacatgcatcgatttcactgacttaaacaaggcatgtcccaaggattgcttcccacttcctcgcattgatcaactagtagatgctaccgctggtcatgaacttatgtccttcatggatgcgtattctggatataaccaaatacccatgaatgtggcggaccaggagcacacgagcttcactactgacatggggctttattgttacaatgtgatgccctttgggttgaagaatgccggtgctacctaccagcgacttgtaaataaaatgttcgccgatcaaattggagtcaatatggaagtgtatgtggacgatatgctcgtcaaatccaaactctcaaagaaccacgttgacgacttggaagagtgtttctctatattgaaaagatacaacatgaagttgaacccactcaagtgctcctttggggtatcatcaggcaagttccttggctttatcgttaactcaagaggtattgaagcaaaccccgagaagataaaggcactaattgacatgccttccccaaaaagaaagaaggatgtccaaagcctgacaggacgcatagctgcactcaatcgtttcgtgtccaagtccaccgataggtgtttaccattcttcaacttattgcgaggaagcactaagattgaatggacagaagagtgtgaacaagcatttcaatcattgaagaaacacctggctgaaccccctatcttgtcaaaaccaatcatgggggaggtgttgtacctatacttggctgtaact

SEQ ID NO: 275024 - DNA, 769 bp, Cannabis indica
ctctatgccagatttttgattgtctgattgtgccttattgtcgctattcttctctattgagtatattgtatatttttttgatctttagttttaaataggatttttttgaggcgaggggctgatgaaattcttcaaatagttttacatacaatctcgatcaaagatttgtaattgcgttggttgatctttgagtgcaatatgagcggcaaaattggtcacaaattcttctctttttttgtgtttgattaaacatatgtgattttttgtagatacttggttcaccaccatgattctcctccaaaaatcatggggataatgttggaatatcgtccttctagcatcaaatgatatcagaagaatttagaaagtaccaaatatctacgagtattcaaaggtcatctgaatctccaataataaacatggagtacttacttagaatagcaagtactcaaagaatatagtgtaaaatatatacaagtacgtagtaatataataaaaaaaaacacaagaattatagtggttcagcataagctcacattcgacttgcctagtccactgttaaatgaatactcttgctctatgattttcttttgattagcatagtctcgtttgaatacttgtaggtagtaggaaaatgttacaaatcatagtcattataagactgttacaaataataataataataataatagacacttaattgtactaattacaatagttataacaatttcttgactgttatttgttggaatttattttaccaggatct

SEQ ID NO: 275025 - DNA, 341 bp, Cannabis indica
gatctctttctctccttccttttatgctaattctccttcttgttgattggattctacacaatcttccacactatgattgagataccacttgatgtgtatgggcactactctatcactagggtatttcgaaattaaagagaagaaaagagaagaagagggtggcggctatagagaaagaaataggaggctcaggtttttctctaaaagaataagatgcattgtcattctttcctaggccatcactatctatttatagtaagccatctaggtttaggttagaattatatggcattaaaataatgaacatataaatggtaaaatacttgcatagtggccggcca

SEQ ID NO: 275026 - DNA, 805 bp, Cannabis indica
taaagccaaaagcaaatttcaaaaatctagaacaataagaccaaattgtgaaggcataaaaatagcgctttgaatcgcttggacacacaccaagttatttgttttcaacatgactctatcccacgaatgagctgcaatccaactcaaggcttctttaatgcctattatcccagcaatttcaggttgaacacatccaatcttcccattcttgaatgcttctaccatagcaccatgatgattccgaactacacaacccatgccaaaagacaagattcaaaccagaaaaaactaaaaggaaaagactaaagaaccatgtcaaaagacaagactaatgagaaaaactaaaaggaaaaactaaagaaccatgtcaaaagacaagactaatggaaaaaattaaattagtttcaacacataaacacgatcacagaattaaaattaattaaggaatgaactccttataattctaaccccatataaacattaattagagttaaactaataatagtaaattaataaacaaaaacaaaaatctaaaacagaggacgtcgatgagccaaaccgaaccactctcagacgactgctcttaaacccctcacagacgaccgaagacgactggtgttgaaaccactctcagacgactgctgttgaaactactctcagacgactggtcgtcgttaatcaacgacgccgaccgactgaaccgaacagaagcttctcgacgtcccagccaatacacgatatcttctctctccaatacgcgtgcgatatttctctctccagtacgcgtgcgatatttctctctcca

SEQ ID NO: 275027 - DNA, 194 bp, Cannabis indica
atagtagggtgttacggtaatctaatccctttacagtgtagatcattcatatagaggatcattgatcacatctatttgtgaatttttcactgagtaagggcgaaattgtaaagaaagagttgttaggggcatatttgttaattaaaattccaaaaagcaaggcccaaacccaacaagccatggccggccatttt

SEQ ID NO: 275028 - DNA, 760 bp, Cannabis indica
aaagggtgagatgtatgctgagaggtagcgtggcctagacaagaaagttttggagagaagctttgcaaactgcaagctatctcagtgtgttggatttatgtttttaccaggatctagatttactaccatgtatgttatttaacatcctaatatgaaatttctaaaacgatagaaaataaacacataaaaggtatgagaaaccttacagtggttgcagcagaattatatgactccttccatgcactcagatctctaacccttgtatcctttctgtagtagagtatcaccaagatttgagcccgaaactccttcctagtatttggattctccacagtcttacacactatgattgaggacttacttgatatgtgtgggcatgcactcaatcactaaggcttgaaattatttgtcaagagaggctatagtgtttcgaaaattgaagagaaagaagaaggcagaggtctcatcaaacctagagagaaaattaggttgttagctttggaggcattagttggataatgagaccatagccttccttttatactatcttcaatagggttagggttgaattattaggaataaaaaaattgataaaaatagagcaaaatagcacattgtggccgaccacttaatgggccccacacaagtttgggttattgtcatttttcccaactattttatctatttttcacaaataccactttttgcaacttcaaccctataaattctaaaacaatttatttaataattaaaacaacta

SEQ ID NO: 275029 - DNA, 940 bp, Cannabis indica
cacctgacccagcgagagaatatgagcatgacagaatatactactcagttcgatcggttggcgaggttggcctcgggatttatgccaaccgatttcagtaagaaagaaaaatatcttgatggacttaatgtgaagatcaagtatgaccttatggttactaccgacgacaagaccacctatgctgtgatggtggagaaggcagtgcaagctgagggcgcagttagatgtatgttggaatcagttaggactccagaatgtggcggggctcctacccctcctgcgtcaggtttcagcaggggaggtagtggttcggccatggactagaggaggaaatcatccactgcatccggtggctcggggcagaacaagaggttccgagggaaccagaatcaagacggtcgtcagggtagtgttgagacccgttattcctactggagtgtctcattagtaagaggcatcctccgggtgagtgtttaggtcaaggatgttcttatgtggcagccagagtctttagaaaattggaaagaccgtatgatagatatgaatcagggtttggaacccttttacctggcggagagttggttatctccaataggtggatcaggtctatgccgatcagaatagatggtagagagttaagtgctgacttgatagagatgagcttagtagagttcgatattattttaggaatggatttcctatctaaatattcagcgagtatggattgcaaaaggaagatggtgatcttccaaccggaaagtgaagaaccatttgtgtttgttggttcagttcggggatctcagatcccggtgatttcggccatgtcaactagagaattattgcatagtggatgcttagggtttctggccgtggtggtggacaccactcggccagataccatgcggccagaggacatcaaggtggttcgggaatttttgga

SEQ ID NO: 275030 - DNA, 581 bp, Cannabis indica
ttcttcacagtcttacacactatgattgaggaccaacttgatgtgtgtgggcacttactcaattactaatggctggatttattttgtgaagaaaggcttagtgtttcgaaaattcaagaggaagaagaaggaagaggtgtcatcagaaagttaggtttttagctttggaggcattagttggatgaagagaccatagccttccttttatactatcttaaataaggttagggctgaattattaggaataaaaaaagaagataaaagtagggtaaaaaaccacttgatggctggccactttttacaacttcaaccctataattgccaaaactatttatttaataattaaaataactatcaaataaatttttcatttataatatttattaattagactccataaagtcttttaattaacaaataaaccccaatacactatttcttcacaatcaagccatatcttagtgacaaattcataaactagacatagtctaattttagaattataattgattaattaaaatcaattaactgtgtcttacaagcagtttgtctcaacttgtatgggaccatgggcctatata

SEQ ID NO: 275031 - DNA, 471 bp, Cannabis indica
atttcagtagttggtgggggaggcactgtcgattgagtttgagggattggtttctttcctttgcccttgagccttttacccacgcctctttgatagtcagatctttggcctagaactgtttccataacgtcaaactgataaccagtatcagattcagattcagtcccagtatcgctctgggattgtcgttcaagtcgcttcctatcaagctccttgatcagttcctcctatttaaatcaaaattattagaatatgtaattaatataaaatataaattttaataataaatcattttaatcacttacataatcttttgcagctaattcattaacgaaagttccagacggttttttcacatggatctccttccatgcttcaactacatgctctccaggaggacccccctatacaaatataaacaattaaattagtttattataaggaaaaaatattattaactattaaagaatt

SEQ ID NO: 275032 - DNA, 1065 bp, Cannabis indica
gaatgttgatgtgtagtcttttgaagacctctagaaattttgtgaactgcttgtctagattggtcttacggagtctctgaggataaggtatcttttcatgatgctcaatactgattggtggggactgttgtggttgtgttgagctatcagtagccttctctactgttggtgttggggttggcattggttgaactttattctccttatttacatcaattggttgtgtcaattcaggcccatcatacttcttaccgctcctcagggtaattgcattgcagttttccttaggatttacttcagttgtgctaggcaaattcccttgaggacgggttgctacttgagttgctagttggcccatctgtgtctgcaggtctttgattgaagatctagtttcagtcatgaattgaacaataaatctgtctgcaaactagaatttccaccagaggtttgttgctgattaaactgttgattctgattctggttctgatttcgttgctgatagaacccactgtttcttcggttattaccctggttgaacccatagttgttgttgttgttctgtgaatagtttccaatggctttagcttcatccattggcaaatcatccacatcagcttgacattctgaaaagtgatggcttcccccacataactcacacacaacttgggcttgtttagcttgccctgcaattatctttgtcaatgcctcaacctgtgctgtcaactttgtgatggcatcgacctctaacacaccagctaccttctttgattgactcctttcagttggccactgctgattgtttagagccatctcctccaatagatcataagcctcattagcactctttctcataaaggctcctccagctgctgcatctattagagttctagtgtttcctaccaacccattgtagaagttgtggaccagcatccacttctctataccatgatgagggcactttctgatcagatctttaaacctctcccaagcctcatggagagattcattatcttgttggcagaagttattgatttctcctctcagctttgcagacttggctggagg

SEQ ID NO: 275033 - DNA, 553 bp, Cannabis indica
aacgcttaaatttatttcgcaaactaaccatttgtccaagtgttttctctttttcttctgtccaaaataaattcctgcaaaaattgaattaaactattatgaaatgatgatgcaactgtaaatcaacttgaaaaaacatggtacttaactccaattaacatagttgttgcttgattttattttgaaatcataacaaaacgactatgcaactgaatataacttatatgtattggttatacctgatttggattgattgggagctcctgatcttttcgttatttcaattcagttcttactaattgtgatccctatgcttttcatcagttttatttgaatcagatcaatttccaactattataaaactaatttgcagctatttacataaatattaccttgtataattgctatttgttggtacccgttaattgaaattcctgcataatttataaactattataaaacgataatgcaactatatggcaaccacaaaaaataataaacggacttatacgtaacatgtcgttccttaattcgaattagatcttgttattgt

SEQ ID NO: 275034 - DNA, 556 bp, Cannabis indica
aagtcgggccatgacacatcgtgtacccagaccaagactgagacctagaccaaaacccggatccagaccaggatcgaaactcggaacctagatctggaacgagaccctgacctaaacccagacctggacccgcacccgggactcaaacttgaacctggacctaaacccagacccagatcggtatccatacttggaccaagacgcagactcagactcggacaaggaatcagacctcaacccagacccagacccaaactcgaacccagacactgaatcgaaattgaaactgggactaggacccaaatcggatcataggactcggacctggatgggggacctggacctaagccacggaacccagaccaaaatcggaacacggtactccgacccaaacttggacatcggggccaaactcaggacccaagaaccagactgggacttgggactcgaggcccagacctagaatgggactgtgacccatacttagaccctaacccaaatcgcgacctaaactcggaccaaacccgaacccgaacctgaacacgaacttggattc

SEQ ID NO: 275035 - DNA, 575 bp, Cannabis indica
gcaagcccaaattgaggaacaaataatgaaattcaacggttacgtcagcagggtgctcctgcaatgcctgctccagaaattccagtggcacctgcccctgctgttcaggccgaaccagtggtggcagtgaatcggatggaacccctgtatgaaaggttccgcaagcaagcacctccagtttttctgggaggtcctgatgtcatgaaagccgagcaatggctatccgtaattactagaattctgaactttatgggtgtcaccggaaatgacagggtggtctgtgccactttccagtttcaagaagatgcactggtctggtgggacatggtgtctatgatacatgatgtcacgacaatgacctgggaaaagttccaggaactttttaatgcaaaatattacaatgaagcagttaggagtgctaagagaaaggaattcactcatctgactcagaaagaaaatatgagtgttactgaatatacaacgcaatttgaccgattggcgaggttggcctcgggaattgtgccaactgacttcagcaagaaagaaaaatatctagatggattaaatgcaaagat

SEQ ID NO: 275036 - DNA, 536 bp, Cannabis indica
attatatatttaattagtaattttttttaagaacaagtaattttctttatattgatatcacaaaattattaaaaaatataatataaaagaaattaattaaatattagtattaaatataagagtgacctaatgaaaaaaaatatatgtatgtacagacattttttgtgactctacctaagcattattctttattataatgggagtttattattgatccatttagaataaatttactaatcaagaactatacatagagtgtattttgttcaactctactagatgcatcagtaatctaaattatactttttcacagcgctatcaactgtgttctcattagataatttattagagaaaagatggaggattgttaagtccttttttgacaatataattattaaaatattatttaatttatttgtgaagtaaatgatattttttttttgggtatatccctatttgataccttctattttgcttctattttgttgaaatacacttttaataccctctattttcaataatgatgaattagtacc

SEQ ID NO: 275037 - DNA, 515 bp, Cannabis indica
aaaaatggcacctaagaggactaggaatgtagaggagggttcgtcttcaaacccaccaccaacgggttttgataggacccgctttggaaacattgaggcccaaaatcgcttcatgaggctaaagaatagggcttatattgatgatcggggtattgaattccccaatcctttgaggcgtcaacctcgatttgaaacaatcagagctcaaatagaaagaatgaagtgggggagttttgtggatgctcggggtcgggctaatgttactatggcttgtgaatttcttgcaaattggcccgaccgccggaatggggaagtaaaagtccgcgggaagaaagttccagctactgctgatgcatttaatgtgatgttctctgtccaagattacactagggaagaacaacgcctccggattattgaggaggaagagcagtttgatatggtggatgtggcggagacagtgggattgttaggttttatgccctaaataaaactttttacaatctgattagttatca

SEQ ID NO: 275038 - DNA, 421 bp, Cannabis indica
catctagagtctcttaattaataaacaaacctagaatctattttctttacaatttcgcccttgcttagtgaaaattcacaaactagacatagtctaattttagaattataattgattaatcaaaaatcaattaactgagtcttacaagcagtatggtctcaactagaatggggaccatgggcctatatttctgagcttccaataagctgatcaagaatttaccaagtaaattcactagcttattaattccttgttgcatccactgttacgaaaattataaacactacgcaagtatacgcaatcaagtagtaaactcacacaggtgaggtcgaaccacagggaattggattaaatactactaaactatacctataattctatttggcaaatcgaaaacaattatgatttaagagaatgaaag

SEQ ID NO: 275039 - DNA, 598 bp, Cannabis indica
attgttgccgtgtgtaatcatattgtggaggcttttgttttttttgttttttgttgttttttttttttgttttttttttttttgttttcattttttcttattttttttttatataatatatttggttttagaagggttcggtgctgtgttggaaggattttgtaaagttcatgttttgtttttcttaagatcttttgtttaatatagtgtaaattatcattattatcccaatcttatgtttgtggacacaaattaacaagattaataaaaaatattccatttcttgtagaataaagaatcttgaccgaatatatgagattagctgggattgtaacttttaccccattcaaacctgaatgtttgtacttttcactcttaagaaaacaattgtttgtccaaaaattaaagacaccaattacataatcaatctcaaaacatcaaatgctcaagatcaatcaaaactttcaatcttaaataaatcattctatggtgataagtcccaattcaaaattaacctaatcagttgtcgtcttcacatactctatccatctttaactattgtggatattgtcccacatgaaataaatggtagagaatt

SEQ ID NO: 275040 - DNA, 802 bp, Cannabis indica
gtctgacctacgtgccttgtgggttcgcaggctaagtcctaattaatggacgaccagcgaaacgttagaaggcagggtgagttggttgagaccggaggtggtcggggtggtagaaatccccaaaacccccgtggacgcggtagaggccgcggtcgtgttccgagaggtggacaggagaatccacctcaggccccggttgattgggaacaaaggtttgctgagatgcaaactagaattgagcaacaagaagaagagatccgacgactcaggcaacgggatgctcctgttgagcttcccccgcaaccgcctgctgcggttcctgcagcccctgcggtgccagctgagcaatatgttgctggtaaccgtatggagcctttatatgagagattcaggaagcaggcacctccagtgtttctgggaggccctgatgttttaaaagctgaacagtggttgaccgttattgaaagaatattgaattttatgggagtggtcggaaatgacagagtggcatgtgccacgtttcaatttcaagaggatgccctgatttggtgggagatggtatccctcaccagggatgttgccagaatgacctgggaggaattccgggatttattcaatgccaaatattataatgaggcggtccgcagtgcaaagcggaaggaatttgttgagttggtacaaggcgagggtatgtcagtaactgaatatacaaccaagtttgatcgcttggccaagctagcctccggaattgtaccaacagactttagcaagaaggaaagtatttggctgggctgaatgccaa

SEQ ID NO: 275041 - DNA, 658 bp, Cannabis indica
tttaatgatggcttttaatgcagcgattcactttttgcaggggtcgattcgtttcgcgcccattgattgatacggcgcattaatggtgtcagacggatactcaaacgtttccaccgcctttattgccaatcgatctggtccgttgatctttgagcattcgaatcgtgcgcttcccccaccgttcgattggtaggtgatgacgcctgttcctcatgcagctttgcctataaaagccaccaccttttcttcatttcggttacttcccatttcttgccaactttgctcaaatttcccagagagaaaattctcagacctaaaacaaggcctttaaacactttgcaattttccccagttcctcttcgttcgttgctatcagtccttcttgtctctattcgattcacagcaggacccccagtttcaacacttcatcgtaagttctttgcaccctttgctttattattgaatggcatgctattacttatctgtttgttcttttctgggtttgcattcgaagtttctgggcatgcaagtgtttaaatccttcatataatcggtttgagtttactgctctagtgataggattgctgttgtcacgcctctgttgttattattttttttttgtagaaggccatacgttcttcgtataatggttgcttag

SEQ ID NO: 275042 - DNA, 557 bp, Cannabis indica
accctcagctcgtagtgccttatccaccatttcagcataggtggtgctgtcatcagtagtgatcattaagtcgtgtctcatcttcatattcaaccgatccatgtatttctctttcttactgaaatcggttggcacaattttcgaggccaacctcgccaaacggtcaaattgagtcgtgtattcaataacactcatgttctccttctgagtcagctgggtgaattcttttcttttagcacttctgactgcctctgtaatatcccgataggtctaatggtaattaattagggtttatatttatattatgtgttaatcaggtaataagtgggattatgatcctacttatttatttcagcataaaatttaaattttgctataagtgaataaataagcgtaatttataaattacggagatttatatagaatgtgtgaatgtaatatgagctatatatggaataaaaatattttcaggttcggtgaccttgaagacctgattagtggataaataagcgtaatttgttaattacggagatttatttgaaatacgtggatataat

SEQ ID NO: 275043 - DNA, 679 bp, Cannabis indica
gtgagtagatctaagatcctaataaaataaattccaacaccacctcgactccatctttggaaactatatgtcctaggaatgccaccttctctaaccagaagtcacatttcttgaatttggcatatagttggttctccttaagtcgacttagagtcatcctcaggtgttcctcatgttcctccacggttttggagtagataagaatgtcatcaatgaatacaacaacaaacttatctaggtactccttgaacaccctattcatcatatccatgaaggctgcttgggcgttagttagtccgaaagacattactaagaactcatagtgtccatatcgtgttctgaatgctatcttgggtatgtcttccttatggaccttcagctggtgatacacagatcttagatctaactttgagaacaaaatcgagccttggaattgatcaaagagatcgtcattccttggcaaaggatacttattcttgatggtcaccttgttgagctcacagtagtctacgcacatcctcatacttccatctttcttcttgacaaagagtaccggtgcaccccaaggtgagtactcggtctaatgaaccctttgtctaagagctcctgtagttgtattttaagctcttttaactcattagggtccatgtaatatcccagaaaataaataatatttaaa

SEQ ID NO: 275044 - DNA, 270 bp, Cannabis indica
taattagaattggcatttaaatggttaaattggaaaattggtatttttgagaaaatgggaatgaaaaataacaaaatgggaaagttgcaaagtgaggcccaatttccttatatggccgcccactatgcaaagggtttaccattttatttttccattattttaatgccatacaattctaacctaaacctagatggcattctataaatagaaagtaatggcttcaggaaactatgacttgcatattgttcctttcagaaaaagccatgcgcc

SEQ ID NO: 275045 - DNA, 666 bp, Cannabis indica
tgtgaaacgaaagtatttacatagccttagtgacaattagattattgcataatgctgatttgatgttgatttaattaagaagttaattagagaacatgagatttagaacctaaaagatctgaaatgagttaggttaattcataatctgtcattcacattaagataaggatagcaattacgtattaacattggtaacttatcaacatgattcacctccctaatctctcatcttgattaatcttcgtatattctttttaattttctgaattattttcattaaattgcaaaaagtattgttttatcagatagaatcataagtatagtttagtagtacttaatccaattccctgtggttcgacctcacttgcgcgtatacttgcatagtaatcataaaattcgtaacaagtttttagcgccgttgctggggaattttttaaagattaatagtacacaaaattatactaacttatactttggtatattttctcttgctgaatttctaacatttctcttgcaaaactgttcttatctatttcagggatttttgagtgcatgcgccgccaagggcaagcagttatattaccagctgaccctgaaattgagaaaacttgtaggagaaaccaaaggaacaagaggcaagaaagagtttcagaaactgctgaaaca

SEQ ID NO: 275046 - DNA, 908 bp, Cannabis indica
gctgcagcagcagatgaaaaattaggtttgttgggggttcgtctagctgcagcagccacactgactgacatgtttatgtaaaattgattgtatggtcttaaatctaattagttctgaattacttcctacatatatgcattgcatgttaagaagtatattctattatatatatatatatatatatatatattgatatgaacagtcaaattctgaattttgatgaaaatgcagctaacttttgcttaactaatatgtttttgatgtgctttctaaacatagtaatcattggtcatgggcatttttatttttcttttttatctaagagttgctattagatctgattagtctattttttctttttcttttaggttgtggtcatgtatagctaattattaaatatatttaatatttattgtttttttttctttttacaatttaaaattaaatattaaatataagcatttgagctcatttaagaaacaaaatgacaattggacgttaaatgaagtattttgtaatttttaaaacagtacaaaatcgaaaattgagtttaattttattatttttttaatataattaattcaaaatcagtgtaatgcgaatacatgtaaaaagagaactgttgggtattgtggtacttacactaaaaaagggactagatactcgtaatgttttttaacaattttcatataaaaaatataatccgtttgattatgtcaaatttattttaatagaaaattaatttagtatactattttgaaaaattcgtccaaattattaataaataaaacagtaaatcttaattaaatgtaatggtttagttccttataaataaaatgtaatattttggtagtgaaaaaaatgtaataataataataataaataaaatacatattataacaaatccg

SEQ ID NO: 275047 - DNA, 564 bp, Cannabis indica
gaccatgggatggtccacccctaatcacttagaatagctatcaaacatgcaaaccttagttaacagttctagctttcttaaggccacgatcaagacatccatgagtctagtaatggtttacactaaggtggcgtttggttggaggtaatgaaatggaatggaaaggaaaggaaacaatctccattccattcctttgtttggttgcatattaaagtgttggaatgtcattctaatggaatggtctttccatcattttggtggaatgacaattctattttgaaatggaaggaaagaccattccaatgcatgatgagaaaaatttaataattttttatcaattttttatgcattttaaattttattccattccattcttattctcagtcacattcccattcctatgttttcattcctcccaaccaaacgccacctaagtacacaaccattccatcattctgaaattttcctatcactagcgtattccctagaaggacttaggcaacaactagtaactaatcacaaaccttatactgtcatcaatatgcaaatcgaatttctggggag

SEQ ID NO: 275048 - DNA, 895 bp, Cannabis indica
agaatctatagaaattataggtgtaagtcaatgagaatttggggaacaatccccaattatatttccttgtcagaatataaaagccttgcctcaggaacaagacaaattacccagaacatgctctattaatttatagcagttttttgagagaaattatacgcagtacaattcaaaaccctaagatttaaaggagaaaacaaagcctaccttacaatacaataaaattgttagtctacaagggtggtgctttgaatcccgtaggctataccgattcagattttcaggcatgtcttgatgacagaaaatctacatctgggatggtgtttacttttgggggtggagtagtggtttggagaagtgttaaacaaaccgcaatttcaaactcttccatggaggcagaatacatagctgtcgcggaggctgttaaggaacttgtctggcttagaaagttcttcacaagacacggtgttgttcctggaatggaaaaaccactggttttgctttgtgataacactagagccatagccaacagtaaagagcctcgaagccacatgagaagcaaacacatagaaaggaaatatcacatcatcagagagtatgtggcaagaggggatgtactgatggagaaagtggacactaaggacaacctagctgatccattcaccaaagttttggtaggaactgcatttaaaaagcaccgactgaatttacgattaattgaaatgtactgattgttttatattagtgcaagtgggagtttgttgggctttgtgccctaaataaaactctatttcaatgtaatctttatcattaaattatcaataaagagacagaagtattttcatcacttatttagtgtgtcatttagttcatgtgatcatttatatgtttattt

SEQ ID NO: 275049 - DNA, 427 bp, Cannabis indica
attatatgagtttattaataatttattattgtaaaactaaaaatcatttacatgtatattaatgtgttttttttattagaagaataggagcttgattgtggaatccaattgtcttaatattattcatattcttaaaaataaaacgctacaatacttcttagttcttacttaggctatcattgttagaaaaatattattaccatccaatgatttttttgatattaccatgaatcattctcctagaataactaatgaggtgttgttcattatttatatttttaggattggaagatgataatcttgtctaggggtcaaatataattttttgtgctgaaattcttgtgttggcaattgccattattcaataatgtttatgacacttttttcttccttcatttttttttgttaaaattttcttcattggttt

SEQ ID NO: 275050 - DNA, 627 bp, Cannabis indica
gaacaagactaggatcgtgaccaagactcagaccctgaccaaaaactgaacacagacctagcctcatacccaaattgagactggaattcaggcccggacacagtcgtgtacccagaacagaactgagaccaagacctggacctaaatcttggacacgatcccaaacacagacttggacatagatagggatccggatatgaacatggactcggacaaatacccagacttggatcgaaatgcttaacctagatctggaccgagatcttgacccagacccaaacgtggacccgcactcgggacccgaacttggacctggagccgaacctagacccagatcggcgtccagacctggacacaaacccggacacaaactcaaacccagacgaggatcaagagcaagggtttatacacagaactgaatccagactgagatcaggattggaactcgggactcggaccaatctagacaagacctaggactcgaacccttacccggagcctaatctgaacctagactgaaatctggacccgaacccaaactcagaccaggactcgaactccgaccctaactcaaaccaaaactcgaactcataatcgctaatggaaatagaactgaactaggactag

SEQ ID NO: 275051 - DNA, 796 bp, Cannabis indica
agtggcatgaaaatattgtttttaaggcactcagctttaatcaaaatttagaggttgcatacacttttacggtacaaattcttttaacaaagcttaagtttacatttttggactattggtaatacttccggatatgatcagcgttccaggccctcgacacaatggttccgtccaatctttttagcttataggttccggagctgatctcatcctcaatttcatatggcccttcccaatttggcccaagtacccccactccgggttcttgagtggctgggaagactcttcttaggaccatatctccaatagtaaattttctacttttaaccttggagttaaagtacttagtcaccttcttttgataagctgccatctgtatttgagactcatcccggagttcttcaatttgatccaacgcttcttgtaataaagccttgtttgttgttggatcgtaagttgttctcctgtgggacgggaataacgtttccaccacgaccattgctttgcaaccatacgccattgaaaatggcgagtggccggtcgtggttcttggggtcgtccggtaggcccataacactcttggcaattcttcgggccaattgtttttgcaggccagcagctttttctttagggtgacctttaggattttgttgaccgcttctgcttgtccgtttgtctgcggccttgccaccgcgaagaagcttttaacgactccgtgttggctgcaaaagtcagtgaactcttcgtaatcgaattgctttccattgtcagagactattttgtgaggcaagccgta

SEQ ID NO: 275052 - DNA, 702 bp, Cannabis indica
aaaaaatcaatgtatttttaattaatttttgtgtatattaattacaaaataaatcaatgatttttaattaattcaatattattaagctcttaaaacacctaaaacaaataaataactatactaattatacagtctgaattggttagtaataaaaacaaaaatcaagatagtaattagtaattactaagcaatatatattatacatttaaaagtattaagtagtactatatattttctttttacctgagttggttttaattgctttaccaaatcggtaacttcgttgttcttaacatattctcgttttgcagcagatgaatttggagaatactgagatgtaggtgcttgaatagtaatattatttatgtctgctttgttattttcagcccttgacattgtaatttaaatgttagcttacttattaaagtaataaataatcaatattatttaattaaaaaatgatattaaatgaaggtaaatcaatttgtttaagagtcgtaccattgatgaagagtagttgcttcgtaattatcaggattgatttcgattgtacttgattcacggcttgacaacgacagtccagtaggaaaataatattttcagcatatttaaatgtacgcaattgatagaaatatatacggtggtagttagtatataagtacctctcttagtttgaacaatcatctttgttcccattattat

SEQ ID NO: 275053 - DNA, 597 bp, Cannabis indica
gtccgattggtcggacccaatggtccgaccatcggactgtggggtttttttttccgtatttcaaagagagaggaagagagtggggctgggtccgagagaggggggctaggtcggaggtggtcggaggtggtggaggtgagctgtggtggtgcgtttgggtcaaaggtggtcggagatggtggtcgaaggtgatggtgcggccgagagaaagggatgcgagagggtgagagagatagatgcagagagtttgagggaggagagagaaagggtttgagttatgaggggggaatttttggggttttgaaaaaagtggcatattttttgtagtttaaaatgtattggacttaaaaaaaaaaattaaatttttaagtatagaaaattaaatttccctaataattctactatccatatgaattataatggaatatagtctataaaagtacataaacaatttgggaattgaaaactcacaactttaccctaaactcaagttcaatctccttttttccgggaaacttattttgtaatgaccgagaggtctaactattttatcttattaattgaatgatgacgctggttttcaaaaaaaaaaaaaaa

SEQ ID NO: 275054 - DNA, 513 bp, Cannabis indica
accgaacctacccaacctcccgcagtccacaaggccatcgggggatgagtgttatcatatttgatacagccgtcggtgcgccaaacactggaccaaaatcgacacgcggggtggaaaactaaagtcttgagtcagataaagcatcatgtgataacagtactgatattatagtatatctcaatacaacctacatttttcagtgtaaaaaacatcctaattaatttattttgggatacaactaagttatgtacaaattctgttctattgtgtatgtctttgtaactgtaaacttaaattttatttggaatggaactatgttgacccaatatgtgccattgagtttcactatttccaataagttatgaacaacacttgcaatgtcagattttaaaaaataattccataataaaataagtggatgagctagggttttcaaagtagatggtacaccctaatgttgtgaccttatacggattaatggtacaaaattagtaaaataatgacatataacta

SEQ ID NO: 275055 - DNA, 543 bp, Cannabis indica
ttttcattctaaattggagattttaattaaataaatatatatatttaaaataaatattagaagaaaatacactttaaataatgagctttattatgaggacatttgatctccattgttggttctacataattcttgttttagtgagtaatcctccctaatggaggaacgttcattagtaatttaacgccgtagaatctcgatagataagtactatttgtaagtgtttattttagtaaatagatcacccaaatggtggcgactttaatagacttacaaaagtatgaaacaatggtggaagctcataagataaaatggccttgactctcgcctaaacgggacaacgctggattctgatcttgatcgaataaaaggttgctagaatgtttatcatgttagatgagctgacaactctattcaatggatagtatctttgactctcgcctaaacggaacactgatatcaatttactaaagaccttggaaattattaaggattgtatgttgtagtatttcgtttgtcattcctacttgctatatgtttaat

SEQ ID NO: 275056 - DNA, 566 bp, Cannabis indica
catgtgatcaagcattcctcaaaatattactatttaagatactctaattatacagtttctcaattactttattatatcattttttataatatgtttacctcaccaaattttctctaaaattttatatatagtttacgatttttcattattaaaatgcatttagtaatggccaactacctaacgaaacctactttattaattaagtcagacaagacatgcggtccttgaaatttacaccgacacgggaaaagtgcaaaaaaaagttgaaactgcatcatgatccataaaatggagcaatgagacaaaactagtgcaggagaacttaataccatttgcaatatgtggtgtaaatttgatagcaaattataccatctcccattaaaggttgagttaatatagtacaaaaaaaaaattttgtttacttgaaaaatatatttacatttatgaattgagcattgctatctagaagaagaggtcttgtcgtatgacatgttggtaaaagttctctcaagtttttaaggtttttcttttgtctcttgattctcatggcgtctagtagtcaacat

SEQ ID NO: 275057 - DNA, 520 bp, Cannabis indica
tttttaaaagggaaatatttttttgggcccctaggctaggtgggccctaggcacaggctaggcccgcctatgcccagggccgggcctgttcacatccctatcaacaactgatttgaaaactagagcgcctaggcaaatacgcacttctgggacaaattctaaagcacaaaaaatggaatgaggaaacgaaaacccctaggacacctagcaacgggtcttaaaacgtgggccaaaaccccactgttgcgtatagaaaagaaaatgaacgaaattttttttcgctaattgtacggatatgatatattaacacagtacacagtataaaactgttgggttttatgccctaaataaaattccatttcaatgtaatccattttattcaatatcaataaagaaacagaagtatttttcattcatttgtgtatgttttggttcattttatcaattgcttgtctttttgatatataaattcatctgaaacccttttcacatacttcatcctgtttattgtgctgtcaac

SEQ ID NO: 275058 - DNA, 470 bp, Cannabis indica
gttgcatgatgttgcttatttaccctctattaggaggaatttgatctctgtatctattttggatagactaggttatagtcttcattttggaattggaaaactgactttgtatcatgactctatgttaattggaaatggaactttatgtggaaacttatataagcttgatttacatgatgttattcctgttacttctccctcttgtccttcttcttcttctcttaatgttgttgttggttctaaacgtgcaagatcagatttgaaatcttccatgctttggcacaaatgttaaggtcatatttttagagatagaatggagagattggtgaaagatggtgtgcttcaggatcttgatttttctgattttactgcctgtattgattgtataaaaggaaagtttactgccaaggttagaaagagtaagtcagacaggtctaaagatgtgttagagcttattcatactgatattt

SEQ ID NO: 275059 - DNA, 574 bp, Cannabis indica
aaaaaaaataaaatcaattaaatttctatgcaagtcatcccattgttgtgttgctaaccactacactttagtgacagcataaacaattttgttgctaaccactacactttagtgaggtaataatgtagcttaatggcagagtgtattgtttaaaatatataagtatgtttcacatcataactaaaaaattattttttatttttaaaaataaaaaaaaataattttttaaaaacaatttagcttgttttgtcttatttttttcaaaacagttttcaaaaaacaagaattttgaaaacaataaaatgttattttctgttttaaaaatcaattcacttttagtaattattatttttaaaaaacactaaccaaacataacttgtattttaaaaacttcaaaaactattttttgttctaatttctaaaaataattttttaaaaacaaaaaaacagaaaacaataacaaacattctctaaatttttcttgtttgttaaacgaagaacattataaaaacaaatttaacaaagtaccaaaatacttttctaaattacttttttttttttttttagtttaaag

SEQ ID NO: 275060 - DNA, 731 bp, Cannabis indica
tggtaggacctaacaaaagttccttacggtagggaatttttttttactattgattttagatcatgtggtaattatgatataaggtgtatattcttacgataagactgtttgtatgcaattaaaactttatacatattataataatatttaatgatatttatttttttaaaaaaataaaataatattaataattaaaaattaaaattaataaaaatttaatttttaaacaataatttttttataaagtttatttgaattataagactatgttagtaagtatccttatttcaaaatttgtagaaaaatgacccttagactatttattatttatattgtcttttaccatataaaaaaattaatatttttttttcatattttttttagaattagaagtaaattacttaaagattatgatatatctatattagttttgttaaaatcttttttatttgaaagttatgtggttttttttttaaaaaaattttatgagttgttgtgggttgttgtatatagattttgttgtacagtatatttctattttattgtatcgtatattattattctttgatgatatttattttttattttggttatgtataatagtagtatataaattttttggtatgtatatatattttaatagtagtttatttaattttgttagtatatgatatatatattttttgaattattgatttagtattgttgtaattttttgtggtaaataattt

SEQ ID NO: 275061 - DNA, 812 bp, Cannabis indica
tgagatcctggacttggaagatggagttcaaggatgcacaagcagcgaactgcttgggtgcgcaccaggtaagctgagacgcaaactcgccagtcatctccgcggcaaaggggcttcccagcgatcgcctggcttctcctctcgaccgggctccccacgcgaagtggcctcccggaagctgcctgggccttggaataagccttctcctgggccttccggtagagatattcctggtacttcttctcggcggtggcaatgagttcatcccggaaggtcttctccgcggcgggcaccctcacattcggacagataaccttagaaaggttagagtcctccactgattggtgcggcaggatgagcttggccttccggcaattctccgtcgtgactaggcccccgacgtcaaggtccgcccggtcgtaagttgcaaagacctgggccctccggagaaagacctgagtaggcgcggtccgctcataggggggaatccttacccactctgtgagaagctccgggtgctccactgctcggaacccggaggagaagaagaaacggtggcgatactccttaacatgagtttgcctattataagggaccaccccatcattggaagggtgggcccggaatccgtaaaaaccgtctttaaatttgtcccccttcttggggacagaaacaagttcataaaaatacaaaatctccgccggactgggagagccccatccccgggcggagtaaaaaataaataagcctgagagcaggcggtatgcttgtggaatcagttggtatggcacaaggccgaaaaaaactaaaaa

SEQ ID NO: 275062 - DNA, 1007 bp, Cannabis indica
ctatattaaagcacttttaggaatatatttacatctgtgatttatatatttcttgagtgttttataaaattagacaaaagtccttaagtccaacaatctcaatagttcagggggcattttcaatgaccttaaaagttcagggggcatgatttggtacatgtcaaagttcaaggggcaaaaatactaattagcctttattttatttattattatgttatatatatatttatacatataaagtcgctttccttaaagaaatattaaataatagaaatagaagagaaatgagttaatccaaaaattgtggtatatggggaagtgttttctttaaattgaaagtgaatggtgtcgacaattttgttgggagtaccaactttctttttctttgcattgaacactatttaataaattatagtacgtagtagagtagaagtagtagtagtagtaactagtaggctcataataattgaattaaattgctatgttttgtgcccaaaatcttggtatgaaatatcatatatattacttactaccacccaaccttgacctacccattctctctcgtaagtcataaccttattataatcttattaatcacaacacttctctgactttcatagctgtttttcaattttagttcacatattttctttttgaagtaggattaataacaaaattaacattctattatttagcaccataagttaacattttatattttatgaatagttagtaatattctaaaatagcgttattaaattagaatgtataagatttaatacttaattttaataatttaagcattctctaattaattacactcttcacaacaagccaagcagtgacaaagccagaaatttagttgagtgagggcttgaataaatattaagtcaaaactaataaaaataatgataaatgtatctttcaaattttcattttcaacaaaataaaataatactgttgacaaaaataaaataaaatattgtcaatggtattattttattttt

SEQ ID NO: 275063 - DNA, 925 bp, Cannabis indica
aaccctatatttctgttggatttaatggaatttattatatataaataaaaagtgacccatgaatttctcataaaccattttatttttaataataaaccatcttatttttaatataaataaaaagtcgtccataaatttatcaaaaaccaagaattctgttatataggcacactttatataaatagatagaatagatatatattctaattatataaaattttaataattatttattattaatttattaattgaaaaatatcttcaaactatcttatttaaatcttcctttttcttacgtttttacttcatttttgttttttaagttttttcaaattaaattttaatatataaagatttaaaatgtaaataagatagtttgaaggtattgttatatttagtttttgttctaggtaatgtatttctgttttaggtaatgtatttctgtttaagattaaattttattaaaaaataaaaattaattggaggcttaccttatgcctcatgcatgtatggtgggtttctttaatttaatttatttatttattttaaaaaatattttttttacgaattgctcgatgttttaggactatcattcaattattatttttttttctgtagtatgtaactatcatgtaagtactaaatattcatttaaaaaacttgagcaaaaaaaagtgcactaatttttattttaaaaaacacactataagcgtgacattttttttttaattatatcggtgttattttaaaattttaaacaaatataactgagagaaaaatattattactgttcgaaatattttcaataagcccaaaaaatagtgaactccattataagatgattatcacttcaaaaaaggtgatacacttaaaaatgttcatttcatcttagttcaaaaagcccaagtaaaggcatagataaaaa

SEQ ID NO: 275064 - DNA, 144 bp, Cannabis indica
ataattctcaagatagactgtgtctatttgagaatttatcacttattaagggcaaaacagtaaatagagattttgaaaggcatatttattttttctcacacaaaaactctctccaagccgccaccctctctctctctaccttct

SEQ ID NO: 275065 - DNA, 562 bp, Cannabis indica
gaatatcagtctggccttgcttctaagcaagctgttccttctcaacacgctccaatcttgccaatatggcagaagatattggtacctgaggttgtgaggtgctgggaatagatgttgactgcggcatagatgctgactgcggcatagatgcagaatcgggcattgaggcagacggtggaacagaacgggcccctgatggtggagaatgtggtggtgtatcatctctgaagattccagcttcctccgctcgctgttctagcgtgtgtgcaagctttgaagcttggctgcgcaaactatcctgagtaggctggccatcattgccaataaccaattcctccatatccacaaatagaggcgcctcacctccagtgacgtggctcaaaaactcggcctcattactccgcggacataaaacggagtacactgtcaactgcaaattataacaaattgattattaaacttaaattaaaataaaataaataaataaacgtaagcaaatacaatgaattaacaaactcacttttttttgcaaataatctgatgacttcctctttcccgagtg

SEQ ID NO: 275066 - DNA, 778 bp, Cannabis indica
ttcgtacaataagcaagacaacacccccacactttgaagtaaccaatatttggttttcttcctctccataactcatatggagacatgtcatttttcttcataggtattcaattaagaatatgacatgcggttaaaagtgcctccccccataagttgttgttcaacttagagtacactatcatagaattgaccatttcaagaaatgttctattcttccttttggctacaccattttgttgtggtgtatgtggtaccgaactctcatgaattataccattttcctcacaaaaatgagtaaattcattagagaagtattcacctcctctatcacttttatcaacatcttaagttgattttcaacctccgctttgaaaatcttaaaagcaccaaaggcctcatccttttgctttaacaaatatacataagtatatctactataatcatcaataaaagtaataaaataccttttaccacctctagttagaataccatttaattcacataaatcactatgaattaaatctaacaattttgaatttctttcaacatttggaaaaggttttttaaccatctttgcttttacacaagttttacatttaccataatttcttatatcacaatcaatcatgccacatttttttaactattttcatagtagaaaaaccaatatgagctaatctaagatgccacaaaaataaagaattatgcttaatcatataagtggaactagatgctttattattgctaacattaaaagttacatcattggtgcacaatt

SEQ ID NO: 275067 - DNA, 814 bp, Cannabis indica
atataaaataaaaaaattaaatattttgcagattttataatttaatttaaataaaaaataacaaaatctaaaagttagcaaaatatcttacttttatttaaaattacatgattatagtaatcttattttaaatttaaataaggtcaaataattttaaaaaaaaattaatttaaaaatatttaatatctgacctttaaatttaaaaataagataaaataatcaaatttaaaaataagatataaaatcaagcaaaaagatagatttttacttgttttcaaattcaaattacactaatatctaaaattaaatttaaaaaattcaaattaatttatttctgatattagatttgaaaattgaaaagtaaaaatcaaaatacaaaactacacaaaaaattggaagttaattccatgaaatagcatgaaaaattgaagaaaacgaaaaaatttgcgagctgtacggacagtatacattgcatactgtccatgggcatgcacgagctggactgaccgagaaaccttggcgcaggaggctgctagcagcctctccgcgcacgcaggtttcagtttcagacacgaattcgtgtccgagcgcgtgctgtccgagggaagcccctcatgcgcgcgcgtggcgcagtgacaccatcctgatatttttctgattttaaaaaaaatcataactaattcaaataaaattgaaattgagttctgcaaaaaagtaaattgcttaatgtttcccaaattatccaataaaaataattccacaaacagatattcaattatttttcacgaaattcaaaaacatcaatcaatcatca

SEQ ID NO: 275068 - DNA, 724 bp, Cannabis indica
aagatcgaggtagagtgactgtttttttttattttgcaagatgttgaaaacatctcttcgtagggagcctgccccaatctcgactggtatcatggccttgcacccataggaaagcgagaaagttgtttcaccagtcgtggagcgaggagttgtattgtaagaccaaagaacttgcgagagctcatctggccaggtccccttacgttcttcgagtttccctttgatggtatgctttattattttgttaacagcttcagtctgtccgttgctttgcgggtaagcaactgcgaagaatgcctttttaattcccagatcgtcacataattgtcgcatctctttacaatcgaactgctttccattgtctgagatgagtttgtaagggatgccaaatcggcaaattatggagttgtagaaaaactcgcgcaatttagtcgctgtaatggttgctagtactttggcttcgacccattttgtaaaatagttaccgcgactactgcatacttgactccgccttttcctttgggtagctcgcctattaagtcgattccccatactgcgaaaggccatggacttgtgatagaatgcaagttacacgggggttggtgggtatatgtggctattcgcggacacttgtcgcatttcttcgcgaaagtgaaagcatcctgtcgcaaggttggccagtaatacccttgtcgcatgatttttaacgcaagggagttacccc

SEQ ID NO: 275069 - DNA, 559 bp, Cannabis indica
tagatagccttagcttatagcgtttcggcatatgatttctcctctccttgcccagtgaacattcctcactatttatagggcaggaaacttgaggaggaagagtttcctatgtcgttacaaagcgcataatcacaagatcgtgggatcattgctgaatgctaggatcgtgggattaaggccgtatacaccgatagtggaatcgtgtgtatgccatatccacgcaagttgatccctgagttatagggattgagctggtgactcgcgaagtgcttggttgaattcgctaagtgttgctcattctgcacggctcgttgagtattccatcatggacatgccagcgaggcatcctgctcggcatgttcatctgaccaggtgctctaagttgatgccacgtgtcaccattcttgtgatgccacgtcagagtgccaattttgggataacatttgccccccaagtctgtgcgggacctccgaggttgcgtatagacttattccgagctggctctgcctttgaaaggggcacgtgtcgagcatgaccgttcgagactcgatgtgaggct

SEQ ID NO: 275070 - DNA, 995 bp, Cannabis indica
gtcatgaaagtcgagcagttgctgacggtgatacaaagatactgaacattatgggtgtcactgggaatgacagagtggtgtgtgccacctttcagttccaagaagacgctctagtctggtgggacatggtgtcccagattcacgacgtcacaaccatgacctaggaaaggttccaagaactcttcaacgcaaaatactataatgaggccgttagaagtgccaagaggaaagagttcacccacctgacccagaaggagaatatgagtgtgacagagtacactacacagtttgatcggttggcgaggttggcctcaggaattgtgccaaccgacttcagtaagaaagaaaaatatcttgatggacttaacgtgaagatcaagcatgaccttatgatcaccacagacgacaagaccacctgtgctgagatggtggagaaagcactgcgagctgaaggcgcagttggatgtatgtcacagtcgtctaggactcccgtgagtggcggggctcctacccctcctgcataaggtttcagcaggggaggtagtggttcggccatggaccaaaagcggaaaacatccactgcatctggtggctcggggcagaacaagaggttccgagggaactagagtagaggcagccgtcagagtggtgctgagagcacgttttcttacccagagtgcccctgtaaagaccgcttagtttaatttgggaaattagcagttaatcatgtttaattatggaaattatttacagctatttaaataattatttatactgttattattgaattctgagatgcattttatgtcatttagtaattttcataattttgcatttccggtgcccggtaacatggaactcggtgttgggctcagtaaaatcacaacttagtatgttagtagattgggtcggtttttttagacattgggaatgtcgggaacggccgggaatttagaatttcccaaaaatacccctttagtgttatttatgtgatt

SEQ ID NO: 275071 - DNA, 547 bp, Cannabis indica
cagatcgctcttttcaatattcgacatgatggtgcaaactcgtagaggcttgtccgacccagcaagctcacagacgctggatccgacattgcaggacctagggagttcaagggttccacccactgtcaatcttggacagacaggaagcgtggtgaatggtgggacaactcctgttactgaaactacgcctagtatgcaagagactgggaataacgattccgtacacagctagggcgttcataacacgactattccaccaggcatcaatgcccagacgaccatcggagacgcaactgaattgcaaaacctttgcgctgcgctcggactcatgcagggtcatagcaatgctctgcatcacgatcaggaggaattacttgctgcagtaaaccacgggtttgacgaacacaggcgtatgtttgctgagtggagggacaaagagatggaggcattaagggctcaccatgcagaaatcgaagatcgtagtcggcaagctactgtgctgatacgaatagcctattagactataggccagcaaacgctgagcgtc

SEQ ID NO: 275072 - DNA, 470 bp, Cannabis indica
ggttagagatctgagtagaaggagacattatccgctgcatacaatgtaagaattggcatttaaaatgttaaattggaaaattggcatttttgagaaaatgggaatgaaaaataacaaaatgggaaagttgcaaagtgaggcccaatttccttaaatggccgcccactatgcaaagccttttaccattttatttttccattattttaataccatacaattctaacctaaacctagatggcattctataaatagaaagtgttggcttcaggcaactgatgacttacacattgtttccttcagagaaaaatccatgcgccactttcctctctcttttcttctctttgaatttcgaaatccttgagtgatagagtagtgcccacatacatcaagtggtacctcaatcatagtgtgtaagactgtggataatcaacatcaaagaaggagagaaggagatccagattcagatcttg

SEQ ID NO: 275073 - DNA, 560 bp, Cannabis indica
tttgcccccgaaatctacctgaacaactctagatgctgagttttcatatcattctccaactcccaagtggcttcttccactttactattcctccagagtactttaaccaacgatatggttttggttcgaaggaccttttccttcctatctagaatttgcactggttgttcatcataagataggtcaggttgcaattccaacatctcataactcaaaatgtgcattgggtcagacacgtactttctcagcatagaaacatgaaatacattatgcactgctgacaatgaaggaggtaaggctaaccggtaagcaacttgtccaactttctccagaatttcaaaaggtccaataaacctagggctcaacttgcctttctttccaaagcgtctgatccctttcattggggatactcgtagaaagacatgatcaccaggttggaatgtaacatcccgtcgcttgggatctgcatagcttttctgcctgctttgagaagcaagcattcgagctttaatcttgtctactgcctcatttgttttctggaccaactcagggcctaaata

SEQ ID NO: 275074 - DNA, 794 bp, Cannabis indica
atatacatttagtaagcttaaagtataagataaattaaaaataagttaatattttcatgaaaataatgagatatatttttatgttgaaaatatttaatttagatttaatttattgtcttttttttgtaggaattgaaattattgtggtattttaaagtgaagaagtggagtaaaaataatattttaagaaattaaagaaaggatcagaatttggcttgggagaaacccactcgcacacagccaaaagctacaattcgagcagtcggatagctgatctagtggcctagattcgctcgtgttctttactccaggtagaggcgcgtgagcgcctgatctcctcctgccaagccagctgctgccatcacgcgtgggaccccctgttgcaccttgtctccccacgccagccacatttttcatccatttttcaactgctatttattcggatggatgaacaatgtgcccaaaataccaatttcaaaatacactataatttatattcctttgcatttatttggctcattttactatttgtctcagccaataaattgcatattgtatattttactattctacccttctcatatctcacctacctcatttatgccagatattttttagtaaaaaaaatattaaaataattaatttattaattattttaaacttcactcactttggctataaatatggaagagatgagataacttgggggggagtctctctttagaggatcttagacaatcttttggtgtaatttttagagtaaagaaactatagcaaaatttctcttcactttt

SEQ ID NO: 275075 - DNA, 582 bp, Cannabis indica
aacataaaatgttatttctgatctttattaataagtaaatctaattatatgaaatgtgttttatttagggcataaaacccaacagtttcaaaatcaacaaataattgtgtcccattcttcaatatcctacgaggaaacaagcagttcgagtggacggaggaatgtgaaaaagctttccaagagctaaaagcacaactttcaaaacctcccgtactctcaaaacctctgaacggagaagaacttggaatatacttagctgtcacggaacctgccgtgagtgccgtggtaatcagagaagagagaagcatacaacacctggtctattacatcagtaaaagactcattgaggccgagggccgatacccattaatagagaaactcgcttactgccttattctagcaacaagaaagttaaggccttactttcaagctcatcctgttcgggtatacactgacgagccgctacgccaaatattgcaaaagtcggatgcttctggacggctactcaagtgggcggttgagttgggccaatacaaaattactttccaaccccgaacagcaatcaaaggtcaagccttagca

SEQ ID NO: 275076 - DNA, 659 bp, Cannabis indica
agaatcaatgtgaaaggaacaactagtagaggtgggggctaaggatgtgtgttccgctgacccacaaatggttgatgttctagagaacccaatagtagttaaggctaacgatctaatagaggcattggaaggaatgtgagcatgactaagacgatttgttgaagagttttcacaggctcagcacaatagatcaccaacactagtagtggaacttgaagcacataatgaaatgtaccaattgccaactaagtaccgatgcatagaattgcacctgtctacaaatgttaaagatgaagtctccacacctagctatgaatggaagcccaacatataggaagtagggatgacttagaatagtagacgttataccagactgggacagtatattttacgaaacccacttattaagaaagatgaaagaatagatctttaaggagcaagtactatcttcttggatattccataagttacacactcctaagttagatgataagaagtatgaatagtgtatgcaaagactttagagagaagtctgttatagaaatgagtcaggagaggatgatgccatcatatagaaaggagtgtagcgtgctgaatagaatccaaaataaaaagttaaaaagagacatgataaaattgatagaggtaatgacttatga

SEQ ID NO: 275077 - DNA, 621 bp, Cannabis indica
actaggcaaaatacgcactaccgaagaccgcctcccttgtacaaagacagctccctgagggaccccaataagagatgcgagtaccacaatgacattgggcacaacaccaatgaatgcaaaaatctcaaagacgagatcaaaaacttgatccgattgggacatctctacgagtggatcaagaaccggtttccccatctcaacccgggtcaggcggctggggctttgcctcaaggagtgccagggggtgtagcagcagcaatagctccagttgctcccccaagagacgcccagcatattcccggccttccaccaagacccaacatgagagtggctatgatctcgggaggaccccacatcggaggaactacccgcaaggagctcaaacggtacgcatgggccgtgaactacgatgaggtctgggaggttactcaactgccagctcaaaagcccaggctaatggatcagcccattacattcacagaagaagacgctaaaacagtgcgttttcctcaccatgaccctttggtcatagagactcccattgcctataagatcgtggccagagtctttatcgacaacgggagctccgtgaacctatattcaaagaagccttcaatgcaa

SEQ ID NO: 275078 - DNA, 922 bp, Cannabis indica
cccctccatactaaaatcacataaaaatcattaaagaggtatttttgggaaattctaaattttcggccattcccgacattcccaatgtctaataactcgtcccaaactactaacatactaagttgtgatttctactgagccaaacgccgagttctaaaataccgggcaccggaaatgcaaactatgaaaactactgaataacataaccatgcatttctgaattccataaataacagtaataaattatttaaatagctataaataattttcataattaatcataaacactgctaatttccaaattaactaagcgggctttacaaagtctcctagatgcaatggaaattggcgagaggaggaaaactgtgcatggaattctgaagagaaggcttttcatgaactaaactttccaggggccaacttgaaataccattgctggggggcttctgacagggtagcaggaaagattctgtagcacacatctcctcgtaccccttgtaaatccatttgcatttcgaaatacttgaggtgggaaagaggatcttctcatcctgtatacattttccatgctggcattttaaacttgtggggcaacgccagaagattgatctcgggagagaaaggagttccgcgtgctcggtccagctcgagatcattgtttctttgtccaaccatgcctttgaacatatttttcagttcgtctagctgtgcctgtacggctgggctaacctgctcggcattctggtcgatttgaatcacatcagtatccttttcagcgggaatttgagcacgggctccgggctgaacgatcatcgtgatagtctgatcgtctactcctttccttctatttagatcattccttaggtcgtgagtcgtccacaacctttcgaatacagaaacgcctggctgccttagcgattga

SEQ ID NO: 275079 - DNA, 847 bp, Cannabis indica
tcttgatgtaatgcacattgagaaaaatgtgtgtgacagcttagtaggtactcttctaagtatcgacgggaagtcaaaggataccgacaaggcgagaatggatttgcaagacttgcaaatacgacgagagttgtggttgtatgaagaccggaatgggaagtggaagaagcctccagctagttacacacttagtgttcaagaacggattgaatttgcagacttcataaagtctgtacgatttccggacggttttgcagcaaacttagacaaaaatgtaaatttggatacgggcaagatttccgggctcaaatcacatgattgtcatgtgttgttacaacgtttactaccggcaggtatccgtaagttcttgaaaaaagaaatccgggacacaatcattgagctgtgtgtgtatttcaaacaattatgctcaagaacacttcatgtttcggatttagaaaaaatgcaaacaaatattctaactattttgtgcaagttagaaacaatttttccaccggctttcttcgacataatggttcacgtagttatgcatctccctaaagaagctatactaggtggaccagtgcagtacaggtggatgtatcccattgagcgctcaatgtctgtgtacaagcaatatgtcaggaatcgtgcccgtccggaaggctctattgctgaatcttttgtggttaatgaggcattaaccttttgctcaatgtactttcgagaagtggaaactcgattcaaccgtcctgaccggaacaatgacattgtccaaaacatgccaactcgacaattttctgtattcaagcatgttggccgacccctcggtatgaggacagtcgacacc

SEQ ID NO: 275080 - DNA, 1254 bp, Cannabis indica
tcaggccttgaaaagtgtgtgttgttataaaaaagggggagggacgaatctgagcgacacagggctgaatctcagtggatcgtggcagcaaggccactctgccacttacaataccccgtcgcgtacttaagtcgtctgcaaaggattctacccgccgttcggtaggaattgtacttcaaggcggcccgcacaacttgtccgctgtgcgagcttcaccaacgacacgtgcctttgggggccgaagcccctactgcaggtcggcaaacggacggcgggcgcatgcgtcgtttctagcccggattctgacttagaggcgttcagtcataatccagcgcacggtagcttcgcgccactggcttttcaaccaagcgcgatgaccaattgtgcgaatcaacggttcctctcgtactaggttgaattactattgcgacactgtcatcagtagggtaaaactaacctgtctcacgacggtctaaacccagctcacgttccctattggtgggtgaacaatccaacacttggtgaattctgcttcacaatgataggaagagccgacatcgaaggatcaaaaagcaacgtcgctatgaacgcttggctgccacaagccagttatccctgtggtaacttttctgacacctctagcttcaaattccgaaggtctaaaggatcgataggccacgctttcacggttcgtattcgtactggaaatcagaatcaaacgagcttttacccttttgttccacacgagatttctgttctcgttgagctcatcttaggacacctgcgttatcttttaacagatgtgccgccccagccaaactcccaccctgacaatgtcttccgcccggacgtcggcccggcccgaacgcggaccgttcgggtccgaaaaacgaaggggcgagtgccccgccttccgacttcacggaataagtaaaataaacgttaaaagtaagtggtagtttcactttcgtccgtttccggtcgtcccaccttatactacacctcctcaagtcatttctacaaagtacggactagagtcaagctcaacagggtcgttctttccccgtcctgattctgccaacgcccgttcccttcggcctgtggtttcgtctggatagtagacagggacgagtgggaagtctcgttaatccattcatgcgcgtcactaattagatgacgaggcatttggctaccttaagagagtcatagttactcccgccgtttacccgcgcttggttgaatttcttcactttg

SEQ ID NO: 275081 - DNA, 559 bp, Cannabis indica
ctaagtgaaatgagtactcaaccatttatctctgtttagctaacctcaaaggaaatcatcatttcactttctatttgccagatagaagctatagactccatctttatatttagcgctcccacttaattgcactaccatgtttccaaaaagtacgtatcaccctgacccgaaagtaggcttaactaacaaattaaggaacatgtgtaatacttttgagattgaacctaaacatattaggatttactttaaccaatgctctagaaagaacatagcacttattcacggtgcaagtaaactatgttgtagattttcatatcggtcaaaccctctgttttgataaatctaggaatatatattcaatcacataatcttgattactttccattgtgtcgacgacacaataaacaagaatataaatgtgaaaagggtttgtatgaatttataaatcaaatagacaagtaaatgataacatgagccaaatgacacacaaatgagtgataaatacttctgtttctttattgatatttaaaagaatagaaattacattgaaatggagttt

SEQ ID NO: 275082 - DNA, 500 bp, Cannabis indica
atattttcttcttgtaaccatgctctcatccaagtttccaaggatgagatctgaaggatgattctttttaccctggaggatggttccctctgtattggatcagtgattgaatttaaaggatactcggattcttttgttgttggattttctgtagcaacagattcctgcacagtagcctcgacgactgcttctgaagcttcgtcaggttccttttcctcagcagcaggcttttcaagcaaatcttcaatctgttcttctgtggaaaactcagaaaaatcttttagatcatcaacaacaacattagcagattccataacagtttgggttctcatgttatacacacgatatgccctactatttgtggaatatcctaagaaaacaccttcatcacttttagaatcaaatttaccaatgtaatcacgatctcgtaaaatataacacacacatccaaacacatgaaagtgacttacatttggtttcttacctttccagatttcata

SEQ ID NO: 275083 - DNA, 845 bp, Cannabis indica
ctaatctaggaaaatatcattgattgtgaaattaattggttaataattaattttggacttggaatcatgaaccctcactcggacatgaacccagtccaaaactcaaaagtggacccgagcccgtaccctgtgacccaaaattggaacaaaaactggaagttgaccggaagttgacccaaaattggaactaaaaccggtagttgaccgagacaagaactaggacttggacttggaatcataactgaaagtggacctagatccataacggtaaccgaactaggacccagactgcaaatcagacctcgacccgaattgggagccggacctggatcccaaaccaaacctggtctccggacccgaacccgaacctgaactcaaacccaaacatggaaacagacaagggacatagaaccagggtcgggacctagaaccataccccagtctcgatcccaaaccaaaactcataattgggacctaagacttgaaccagaactagaccgagacccgtgacagtgatccagatcttgactgaggattcaggtaacggggcctagaacacaccaccagtcggtgtctagatcttggactcagcctaggaccagaacccagacgaagaacgaaacccgaaccaagacctaaacctcggaaccaaaattcgaacctgaataagaatcgccgaaccaagacccttgaacaagattaggaccgtgaccaggacccggaaccagacctagaaccgaacaaatacctagcctcatacccaaagtgagactggaactcgggctcggacacggtcgtgtacccagaccgtaactgagacccgaacctggacctaaatctggcac

SEQ ID NO: 275084 - DNA, 542 bp, Cannabis indica
gatgtagatttcctgtcatcaagacatgcctggaaatctgaatcagtatagcctacgggatttaaagcaccacccttgtagactacgaattgccttgtactcttcaagtacttcaagatatgcttaacatcattccaatgttcttgtcctggatttgtctgatacctgctcacgattcctactgcataacagatgtcaggtctagtgcataacatagcatacattagactcccaactgcagaagcataaggaacccttctcatgtcctctatctcttgaggatcagtgggacactgttccttagatagacgaataccaaatctagaaggcatatttgcccctttggttttggtcattgagaatctctctaaaaccttatctatgtaagttgtttgagagagagcaagggatctgttcttccagtttctgataatctgaataccgagaacataagcagcttcacccaaatctttcatttcgaattgagtatctagccattccttgatgtcacttattttcttgacattgttgccaatgatcaa

SEQ ID NO: 275085 - DNA, 815 bp, Cannabis indica
gttcaaagcctcacaggtaaagtcgcagctttaaaccgctttatatccagatcttctgataagtgcaaggagttttttcagattttgaaaggcaacaaaaggtttcattggaacgaaaaatgcgagcaagcctttcaagctttaaaaacgcatttggggcaacctccgatcttatcgaagccattgtccggagaagttttgtctatctatttggccgtctccgaatatgcgattagttcagtactaatacgcgaggaccaaggacgccaatacccggtgtattacgtcagtaagcgattactggatgccgagacgcgttatcctcaaatggagaaattggctttcgccttgataatatcctcaagaaaattgcgaccctacttccaggctcacagcattgaagttttgacaaacttccccttaagacaagttttagcgaaaccagaagcatcggggagattgttaaagtgggcgatggagttgagtcagttcgacatcaagtataaaccgagaactgcgatcaaggggcaagccttggcagattttatacttgaattccccagcaccgaggtggcagttgtagaggacagaagtgacattgctatagcaggcaaagaagcatggacattgtacgtcgatggagcctcaaataacgaaggttctggcagtgggatcttgttaatcagtcccaataatttcaaggtacacgctgctttacgttttgaattttctgcatctaacaatgaagccgagtatgaggctttaatcgcaggattgaaactggccctcgagatgaaagtcgagtatctacaggc

SEQ ID NO: 275086 - DNA, 934 bp, Cannabis indica
agatgcagcttttacataacgcttgagggagaaacactaggtcatcacatatactcgatatatgtcgcgactgtgctaacttctctctacgtcccgcttttattatttttactatgcgatgcatagtgtgcgactagaccatatctcggtcgcaccttctcgcaagttttgatcatgcaaggaaatactgtgggaattgttcccttatcatgcccctagttcttgcgatgacatgttgctgtctaatcgttgaacttttcttgagggacatttgatctgtcacattgcaggtgatctttagttttaccttatcgagattttcataatgactatcaatcatcatttatattttaaagatgccctgtcagcagaactctttggagtctgtactgtccgttaggacggagaggcaattttttcatgaatcgtccaaataaggcatagatttggccatatatacgatgtgctagtattaaaagtaccgagcaccatcaggggtttgcaataaacttgttattttatcatgcaaaaatgagtctttggactcgcctatttatgattattaaaataattattgcaatagactcactaaataattaagcaaaaatgagcgcacatagctcgccaatttgcgattacttaagaatgagcatagttggcccaaataattatgcaaaaaatgagcacacattgggctcgccaatgaacgaataaatgtatgaagagcatacttggctcctaaatagccatgcaaaaatgagcacagacagtgctcgccaatttgcgattagataagcataatcgtgggcaaaaatgaacactattttcgacttgccaattatttgtgagcgtatgcaaaaatgagcattatagttggctctaagtatcatgcaaaaatgagcacacattgggctcgccaatttgcgattatgaa

SEQ ID NO: 275087 - DNA, 625 bp, Cannabis indica
tttttatatagttttcttatttttgtgttatttttacgaaaaaccgtaaaaatgtaaaaaaatattcatcaaacataaaaatgtaattttttttacaaaaaatagtgttttaagtaattattccttaatctattttataaaaacgaattttgggcccatttaatttagatagttatacaacttgaggccttttctgtataccattttagtatttttgaaaagtactagttacattttttttgtttcttcaaatgtagtaaaatacaaatatttcttttgtttgttttttgagagattatgatcaaatataggcctgtacaaatctttttacaaactacccaacttaaataaaactttcataccaaatcgagagaaaaaacacaacgataatccaaaccgtccatttaatacattggagatttggatattactccaacccgcccaatttaaacaaaataaatcgaataaaaaaaagaagtgaatatcgttttgaatggattaaaatcatggctcaagaagttttgcatagctttaaaagaaagaagggtaaacatggtgtgatggctgttaaaacggatatgagcaaagcgtatgatcgcttagaatggaacttccttcttcgagt

SEQ ID NO: 275088 - DNA, 667 bp, Cannabis indica
gtctgcccattttattccaatcaaaaaggattataagcttaccaagctagctcgaatttacgtagacaatatagttcgactacatggagtgccctcaagcattatttctgatagagatcctcaatttacatcaaggttttggaaggccttgcaacaagccttaggaactgaacttcacttgagtactgcccatcatccacagacagatggacagtctgagaggaccatacagactttggaagacatgcttcgctcttgtgttttggattttggaggtagttggggagaacatttgtcacatagtggaattcacatacaacaatagctaccaagccagtataggcatggctccttacgaagccttatgtgggagacaatgcagatcgcctttgtgttgggcagaaccagatgagcatgtcactattggaccccagattatcactagtaccactgaaaagattaagcgaatccaagaaagacttaaggttgttcagaatcgtcagaaaagctatgccgatctccatcgacgggaagttgactttgactgttgttgattatgtcttcttgaaagttactcctacgcatggagtaacgagatttggagtgaagggtaagctagccctgaggtatattggaccttttaaggttatcgagtaggattggggag

SEQ ID NO: 275089 - DNA, 942 bp, Cannabis indica
ggctgggtgtatcacagtatctcaagggacatataaccgcgtatatgaccattagaatactgtgacacatccaccatttggaaactcggttaatgttctcgcgactaaattcacagtatataaaatcctaaaagatctagccaacaatcagaagtaagtaaatctcgcaaatatgcgagtattcgaattgttcatccgaatacccgcgagtattcaaagcatgaaacagtgcctattcaagtatttcttacaccgtatgcggttatgccaacttacaggtcattctctatgaagttacccaggtttttacctaaaaaacatagcctcatacataccatctataaacattcattcttaaacaaccctcatgcatactaaaaacccagaaaatacagtccccactcaaacagaaaacgaaacacggtgaagattcgaaaactaaccttttactttgctaaatctgttcccacgaatcgcccttgacagcaatgtagaatcaagaaaaacccacgaagaaaggcaaaaatctgggcaatttatggaagtgtttcttagtggtttctctgagagtgaagaaacaaaggagttaagggagttgaagaaaaatgagggaaaatggggatttttggttcgaatcagggggtttaaatacccaaatccctcattaattgggatcacgacacgtggcagttggaatgcctagagtcgcccaatccaacggccagagatggccacgcctacacagaaaccgaagagttttgtgacgtggcaccataaatgcaataaaagtaatgattatagccgtcatttttcgaaaccctcgaagggacaaccaaaggtcacctcctcgtgacaacctttcacctgtctctcgagtatagtttcccttgtgaccgcacctgtcacatcgcgaaactaggggcatgtgttatagtgagattt

SEQ ID NO: 275090 - DNA, 707 bp, Cannabis indica
agtcgttgtagacttctactcttttagccccaacgacctttgctaatctcagtcctactatcaaggcttcatattcggcctcgttgtttgaagttgagaagtcgaaccgcagggctgcctggagtcgaagtctggccggggatatcatcgcaacccccactccggatccattttcattgaggctccgtctacaaacactctccatgtggggatcgacggtatcggcgcattcgcggtcgcctcggcttcattgcattcggtgatgaagtccgccaaggcatggccttttatggatatgcagggcatgtagtggaagtcgaattgacttaactccattgcccatttgaggagccttccggatgcttctggcttttgcaggacttgctagagcgggtgattggtcagtaccttaatcgggtgtgcttggaaatacgaccttaactttcttgaggccgttaggaggcaaaaaactagtttttcaatgacggggtaccgcgtctccgcccctatcatgcgcttgctgacatagtacacgggatgctgagttttctcttcttcccggactagggcagtgctgaccgcgtgctcagagacggccaggtacaggaataggtcctctccgagaacgagttttgataggatcggaggcttggccatatgttctttcaacttcttgaatgcctcctcgcactcgtccgaccattcaa

SEQ ID NO: 275091 - DNA, 507 bp, Cannabis indica
atgatcctctatagatgatctacactaaatagggataaatttactgttctacctttcaatgtattttatccttaaaagacttagctacctataaatgatagttaaataaactaatataattactgaaatgagatctcaatcatttatcaccatttagccaagcttgaaggaaatcatcgtttcacttttaaatacctgtagaagctatagattccatatctatgattagtgtcgcgggctcaccttttcaggcagcgaaacactcgtgcggcaccttgacttctctaagctaaggtcagccttccaaccatccgagaaacaatgggctcatttttgcacgaccgtgtgcctcgtgcacacttccgtctctcaaacaaaccccactgagtcatgcttgcaagcatcaatgagtgcatccatgcatcgaggctttctcgccaagatactcacattgtccataggttcccactatgataacgcaaatcccaacaccgacgctcaccttgt

SEQ ID NO: 275092 - DNA, 640 bp, Cannabis indica
atccaaaacaataaaaaaaggtatttggctaaacttttttgttgtttcattactttttaattgtttgtgcttcattgtaaagtaatgtagttagtttatgttcaatttttttgatttcgtttgaatttcattgttttggtatattttctggtttttttgcaaaatttgcgacgtatcgcgactatgttcacgacataacgcgacatcgtctagaaaagttggggattttatgataaccgtgtttttcacgacgtgttagcgatatactggcgacataattcgcgatatattgcatttagtacgtaggtttcatgatttttatcgacatgtatgtgtgtttggcgacatgtttgcgattatatgcgatatgattagcgatatataacagttgtacataggactagtttttcatcctcctttttgtgtttagcgatgaattagcgatatatttggcgatatgatcaaaaataacttaggattatgcttcacgatgtatagcgacatactgcgacatgtttcacgacatacttctaacaaatttgttgacaattttgcagatggctcctgaacttaaacttccaatttcctcgcatttcacgggacgtcttacctatcggggtacagataggtttagatatat

SEQ ID NO: 275093 - DNA, 600 bp, Cannabis indica
acattttagtttcttactatgcttttgtatcgtatgatttggtatttcttttttatttaatattttagtataaaatgtaggttgtcaaattgtgtggttagtgttttgagtgtttgttgtttatggtgtagttccattgatttgttgtagttctataagttactaataagtgatttattatgttttagtgatttgttgtgttttatatataatttagcgattcacagatcaccatatatgtattattttagtttcttattttgtgcttgatttttttctcctaagtgttgcctttttgtgtgtttttatgcactgtgtgttataagttactattttagttcatttttgatatatgtatgtatcagcttatgtattgtataagtattagtttattgcttttgattatgttatgatatgttatacttcagtttctaatttatgtgtgttttttgtgtgttgcagttgtgtaaatattgggtctttttttttttttttttattgtgatagaggtataagtatacatgagttactaaaggtgtgtaatacgcataatagttggtcatttttttaagaatgagtcagttgttgaaggcgatggtt

SEQ ID NO: 275094 - DNA, 504 bp, Cannabis indica
taattaatgtattaatgtgtaactttttgtagaccaaatttgtcctcccacgagataaccctgcattcgtagactacggtgagtacgagatgtcaaagggtttacgtgactggagggcagactgcaagaaaaagtggatacaaaacattgaggagcttggacaggagagggtcgacatgtcacctcctgagggagtaactcaagaggtgtggagcgactgcatcgcttattggagcacagacaaacaaaaggtacattttttaaaatttcaaattttggtaatgtttaatttatatagtaaataataaataattaattgttagaaaaattattaatttcaggcgagagcagcgaaaaataaagaaagtcggggtaagatgaaatttctaggaggctggggctccaatgtagaaacaacaaaacatgatgaagatgatgaagatgaaaattttattaaatctaaaattgcctatgggctaaattttaaatctaataaaattagat

SEQ ID NO: 275095 - DNA, 475 bp, Cannabis indica
aggaatggttcaagaaactggagccgggatccgtgggctgctggaataagttacagaccaacttccggagacagtttgtcgccgtaagaaaggttaattctgaggtcagcgccttgaccaacatcaagcagctgcctacggagaccctaaagaattacataaagaggttctgagaggaagcctcgaagaccaagaaagttgatgacggacaacagcttgcccttctccaggcaggcatccgtacagggactccattctggaacgaactacaacaggaaggagctgcaaaccttcaggatttccagaagagagtctaaaaatacatcaatcttgaagaggcccaaatagtggcctatggaggatactatcccactgggatagcagggtatgtacccagagcccagccctcgggcactgtgccagcagcagctccaccgatgagcggcatacagttctctgctactcccggatatag

SEQ ID NO: 275096 - DNA, 637 bp, Cannabis indica
aaggagcttaagttgcagctttaggggatgcttggcattggctttatctgacctagtgtatcgccctggggagctcctgttctatttgtgaaaaagaaggatggttccctcagaatgtgcgttgattatcgggaactaaataagctgacgattaagaacaagtacccgttacccagaatcgatgatttattcgatcagcttcaaggaaagacagtgttttcgaagattgatttgcgatctggttatcatcaactcagaattcgagaggaggacataccgaagactgcttttagaaccagatatgggcactatgagtttctagcaatgtcattcagattgactaatgttcctgtggcctttatggatcttgtgaatagggtattcaaggatttcctcgataactgcgttatagtgtttatcgatgatatttttgtatactctcaatcagaagaggagcacgagcatcatcttcgaatagtattgcagcgacttagaaatcacaagttgtatgcaaagtttaaaaagagcaaattctggttgtctggggtgtctttcctgggtcatattgttggggtgaatgggattatggttgatccaaacagggttgaatcagtgaagaattggccgaggccaaagt

SEQ ID NO: 275097 - DNA, 560 bp, Cannabis indica
cggtcatcaaatgcgtctggctccaagctccgaagcctccgtaattgtgagttgggcgtctccgcgtcgacggggcggccggtggtacgtcccgaaagtcgcaagcttgatgccggccaccaccacaatgttctccagttggtgagggcaagttaaggtggagtgaagctcggccgcttcccaccccgtagcacgaggtttatacccctcctgggcgacgggacccaccatcacctcttctagggtggccaggcgctttcctcccttcttggaagatttggaaccggatgtagacattttggttctgaaaaagagttaaaattccagcagtcaggccccataccaaaccctaaatcaaaaaagggaatgggggtcccctaaccgctagaaagaggccccctctggacggttgtcaacaagaaagccttagaaggatttcctggacaaaagtcgggtgcaagaatctcacagatagtgacatcacacataagcaaagaaagaaaaagaaagagaaagggtaaaaatcgagaaagacaatcttctctgtacccttgaaggcc

SEQ ID NO: 275098 - DNA, 585 bp, Cannabis indica
acaagaggtcatgggttatgtgaagtggcttgattcctatgggcccttgaacagaagatattttgaggaattgggagcagttccaaaagagctaaagccatctactgaaaagcctccagaacttgaattgaaggtgcttcctagtcacttgaggtatgaatttttgggtcaagataaaaagctgccagttattgtttcagcttctctctctgatgtggaaactgatagacttttgagggtactccgagctcataataaggccatcgcttggacactaggtgatgtcaaaggaatcagtccttcaacagtgatgcatcgaattctcatggaagacaatgccaaaccaacaattgatgctcaacgaagactcaatccacccatgaaagaagttgtcagaaaagaagtagttaagtggttggatgctggagttgcttatcctatttcagatagtaagtgggttagcccggtgcaagtggtcccgaagaaaggtggaatgacggtgatcaagaatgaaaagaatgagttgattcctacaagaacagtcactggttggaggatctgcatcgattataggaaactcaacaa

SEQ ID NO: 275099 - DNA, 668 bp, Cannabis indica
catgtgtgaagaaagaaactaaaaaaaattcactattaatcaaatatgaatagccaactttaagcagttgaggcacgcaaacattattgcctcaaattcacgtatccaaaaagatgagtcagcttttatctatgagcactcttttatgataaatgttaaaagggattgttggtgcttatcctccatatagtttaatgtaataatttttaaaaagtacactaactaattctaaaatgacacttctagaagttggtagtcactactgatgccaaatctccgtttgccacctagtacctgctactactatactacagagttatcataatgtcattattaatgatttgagtcatattaaataataaatgttatataagttgtcacgacatatttagacgaatcaaataaattattagtttacactaaattctgagacataacaaaataatattgtgtctcatcaagcaaaaaaaagaaagaaaaaaaaaaacaaaatattgtgtctctggatcattggctgaatggctgattagtttacttaagcatttggttgaacaggttttggaacttaagtggcatttggttggaggtaataaaatagaatagaatggaaagtaaacaattttcattctattcctttatttggttgcattttaaagtattggaatggc

SEQ ID NO: 275100 - DNA, 510 bp, Cannabis indica
tttttatattcaagcttaaatcaagataaaatcaatctaaataggaaaaatataggttagacaagaacttggggctttcatttggtatcagagccagctatttctgttagaaatattgatccttagagttcttgttagattcattattgctgcaattcttaatttttctgcattttttcctttctgcaacacccagttggaactaaccccctctccagacacgactctgggagtatactgctctctatctttgttttgatttttcttgattcgtacaggaatggagatattcagagaaggagggtccatatcacgacccccaatgctagaaggtgccaattacccatactggaaaacaaaaatgcgagcattcttgagggcggtgaatgaaagagtttggatggtcatagaagatggttggacatgcccaacgatgatggataatggtgtcaccaaaccaaaacctatgagcttgtggactccaaatgatatggagagggccaattttaa

SEQ ID NO: 275101 - DNA, 826 bp, Cannabis indica
tccgcgtgagcattcttttcccttgggattctttctacttcataatccgagaactcgtggagcagttcccggactatcactacatacgcggccattctttctccgcgcgtctgatactctcccgacacctggttcactactagttgggagtcactgtagacttctactcttttagcccccacagcctttggtaatctcagccctgctatcaaggcttcgtactcggcctcattgtttgaagccgagaagtcgagccatagagctgcttggagtcgaagtccactcggagatatcatcgcaacccctgctccggatccattttcgttggacgctccgtctacaaatactttccatgccgggacagacggtgttggcacgttcgcggttgcttcagcttcattacactcggtgatgaagtttgctagcgcttgtccctttatggaaatacggggaacgtagtgtaagtcaaattgacttaactccattgcccatttgaggagccttccagagcctctggcttttgtaggacttgccggagtgggtgattagttaacaccttgattgggtgagcttggaagtagggtctcaacttccttgaggccattaggaggcaaaagaccaatttttcaatgacggggtatcgcgtctccgcccctatcatgcgcttgctgacgtagtacacgggatgctgagttttctcttcttccctgactaaggccgcactgaccgcgtgctcggagacggccaagtacaagaacaagtcctctctgagaacgggttttgacaggattgggggcttggccatgtgctctttcagtttttcgaa

SEQ ID NO: 275102 - DNA, 517 bp, Cannabis indica
gtatattacataaagaaaaaaaaatcaatctaacatggtttctgtaagtgtcgttattttgtgacagattatttgagtacaatgtctagtcatgtttggagtttcagtctgttatatctgcacttgcgaactgttaagtctgttatcgttaggtgttagttagtgtcaggtggactgttttgttgggtataaatagtcggtttcattctgtaaacagattatccataaaatagaaatacttgtttctacaggtctgattgtatagcttgaagatggtcatctatggcggaaagatcagaacctgaagttgctgagttcaaactgcagggagttcagtgtcaacttcgtcatcagatctgaagggatttcaggttgaagaagtgtcgaagaagaactcagttgctgcacaagggattgtgcactagcaatcaagattcttgattgctgttggtaattcattactaattgctgtaaagtttgtattagattcctttagagagaattggaaattgtaata

SEQ ID NO: 275103 - DNA, 538 bp, Cannabis indica
aagatttctttcaaccatatcagaaaatattgcaatcatacatctttgaaatgttgcaggagcattacaaagaccaaaaggcatgcgacgatatgcaaaggttccaaaagggcaagtaaaggtagtcttttcttgatcttcgggggcaatggggatttggttatatcccgaatacccatcaagaaagcaataataagcatggccagctaatcgttcaagcatttggtcaatgaagggtaatgggaagtggtctttcctagtgacactattcaactttctatagtctatacacactctccacccagtttggactctagtagggattaactcattttgttcatttttaacaacagtgatcccagacttttttggaacaacttgaacaggactaacccatggactgtcagaaatagggtaaatgatccctacatctaacattttaattacatcatctcttactacctctttcatgtttggatttaatcttctttgactttctcgggagggcttagcattttcttctaaatgaattctatgc

SEQ ID NO: 275104 - DNA, 543 bp, Cannabis indica
tatgacgaaaaaatgcaactcattctagtaccacgatattggaatggagaacatttaaggaaatactaccaatgagtactcaggtcgggtagaccacttcaaagtactcaggtcaaatagaccatttcaaagtactcaggtcgggtagaccacattaaagtactattgaacattcgcttctaagtgaatggcctcttgggcggactacgcgcaaaggcttcagaaacaaaagtactcaggtcgggtagaccactttaaagtacagtttcttatttgttttatgtcatgttaagctaaaaagatcatattagatcactagctctgatgtaagttactacggtaacaaatacattttcgatcaataaaagaataaagatagtatttccaattctattgagtcgaaaaaatcagcatgattataatttacctaaagtgcgtacaaaaggttcagtcgaacccaaaacaccgaacagaaaagcaatatatttgcgaaagacaagtgaccaagagtcatacgtctgctcggtcacttggggggcacct

SEQ ID NO: 275105 - DNA, 513 bp, Cannabis indica
ttgtgttaagtgtgtttttttttaattaaatgctgcttatttgttgtgggaaagaagaataggaaaaaggaagtgaagcaaaggaaaagtttgaacaaaagctgaaaactggacagaaatgctgaaacaatgctatagcattttgggcagtttgggaagaaacgtagaaaaagtctaaaaaacgactttgacttatccacatcagcaaattcgtccaagtcacttaaaatgcaccaactggctgctgtggaagaaaaaagacaaaacctagtgggccaaagtggaaaaagattgggcttctatttttagggtatcattttgtaccctaaggacccaacacctaaaagaggagaaaagagtagtacaccatcatccaccataatgtgcagctgccattttttttttctgaagaagagctttaattgcagaaagtacaaagagaagaaaagtgaagggggacccaagtgcaaaagaagagaaggacacaagcttttttttttttgtttgcatttc

SEQ ID NO: 275106 - DNA, 960 bp, Cannabis indica
ctcttctagtttaatgaactcatcagctctatcaaggaagtctctcatagtatgggttggtttcccccttgtatccttccacaaccgacttcccaccagaatgccccccatgatggcggcccgcttgccatcatcgctcagattttttactttggttgactcctgcataaagtgttgaatgtagtcttttagtggctgatcgggcttctgcttgatggcgaccaagtcacccaactcgctggtatctgtcgggctgaagagaattgggtgtagaataacccttcaaactcatcccaagaagtgattcttcctgggggtagtttagtaaaccattgttgcgccgtgtcagtgagggtagcagggaaacttcgacacctaaggtcatccctgattccttgaaggtccatttggattttgaagttctccacaagagttagtgggtcttcactacccgtgtacttgcaagtgggtgtcttgaactttgctggaatagagaggtcgttaatcatttgggagaaggcagaccctctcctcctttccagatccaagtcagtgggttttggtgcggtaaggtccttgaccaatcgggttaactcgtccaaccgagcctgaatcaccggatctgtggctgtttgagcaatattggcaccaacattcgcttggtcccttggtctggctcaggtgggttcactatgttggaaccacgattgtctctatttctgttgagggcgtcccgcaggtctctaccccctcgggggcctacccgttcaaaaactaaccctattcttggccttcctccagcgttctgacaatcagcccttccatcagctgggggtggtacttggtcattcctacccctttggggtggatcttcaggttgatgttgcctattaggggcatacggccctctggcttgataaccttgttaggctatttttagcctacattttgggtcacttt

SEQ ID NO: 275107 - DNA, 599 bp, Cannabis indica
cataaaacccaacagattcttgttcaggttctaattttgggtcccaggtctaggtctaggttctgtgttagtctggttccatgtttttgtctgagttcaagttcgggttcggcacccgagtctacgattgggttgggatctgggtccgggtcctgttccggttacggttctagatctatgtccaatttcagttatgattccaagtccgagtcatagttccagtcccggtcaacttcgagttttggttccaattttgggtcacaaggtacgggtttgggtccacttttgggtttgggacttggttcaggtctgggtgtgggttcttatacttgtcagggttcgagtccagggctgggtcccaaatacagacagcgattataggttttgtccaagtcctgggtcaagatccggatcccaatctcgggtcccagtctggttccatttctggtgccgggtctgggtcgggtactaggtcccgatcctagttctgtttcctaggtccctatcctaattctcggtccaggtcctggttattgtgtgggttcgggtctcggtctaagttcgggtacgagtcctagtctcggttcgggtttaggtct

SEQ ID NO: 275108 - DNA, 764 bp, Cannabis indica
gatattgaactttgacttagatttattaaacttaccgtaatatctattcaagtcaatatcgcctagttgatcctagatcaaatgatcttaatcctgttatgattaggctcaatcttgaaaggctattcgtgttctttgatttgttagttaagcctacttttaggtcagggtgatacgtacattttgggaacacggtagtgcaattgagtgggagcgctagcataaacatggaatctatagcttctatctggcgaatagtaagcaaaggatgatctccttcgagcttgaccaaacgaacataaatggtggagtactcatttcacataagctgaaatatcatttatacggggtcaagtgttttaaggataaaatacattgtagggtgtaacggtaatctaatccctttacagtgtagatcattcatatagaggatcattgatcaaattaggattataacaatggataactaatgatgtgtctatatggtggaacatatagagcattctatatactgagagtgcaattctaagttctatgcgtggattcaacgaagaattaataagttagtgaattttagtgctaaattcttgatctacttattggaagctcggttatatagacccatggtccccccactagttgagataatattgcttgtaagaactcatgtaattggttttgattaatcaattacattaattaattacttcaaattaagtactatgtctatttgtttggaatttttactttacaacgttaaaggg

SEQ ID NO: 275109 - DNA, 508 bp, Cannabis indica
ttcaaaaattaagttgtgtaaccactctttacacacttaattagtgatcatgtggaagttacaaaatattaactccacctcttatatgttacaattatatgtaactcccaatcacataatattgtgattattacatgcatataattcccaattatattatatgtcataatatatataacatatcacaattttaatcttaaacattatattatataatataacatttaaggccactgacattgatgagttagcccttgctaccacccttgattgtatccctgcttagtgctttggttatgaatgatgtaatgatgagttagcctaaggctatgtttgttaggaaggatggagaataagaaggatggagagttggtggaggatgtagaataagagggagggagaggagagtagcaatccttttgagttgtttggtagaagggatgaagtgatggaaggatggagagtatttatttatgaaattattatattgtccttaaatgtaattttt

SEQ ID NO: 275110 - DNA, 678 bp, Cannabis indica
tgatgcaggaggggtaggagccccgccactcactggagtcctagccgactctgacatacatccaactgcgccttcagcttgcagtgctttctccaccatctcagcataggtggtcttgtcgtctgtggtgatcataaggtcatgcttgatcttcacgttaagtccatcaagatatttttctttcttactgaagtcggttggcacaattcctgaggccaacctcgccaaccgatcaaactgtgtagtgtactctgtcacactcatattctccttctgggtcaggtgggtgaactctttcctcttggcacttctaacggcctcattatagtattttgcgttgaagagttcttggaacctttcctaggtcatggttgtgacgtcgtgaatctgggacaccatgtcccaccagactagagcgtcttcttggaactgaaaggtggcacacaccactctgtcattcccagtgacacccataatgttcagtatctttgttatcaccgtcagcaactgctcgactttcatgacgtccggaccctcagaaaaaccgaaggtgcctgcttccggaacctttcatacaagggttctattctgtttcccgctaccactatttcggcctgagcaacaggggccggtgccacaagaacttctggcaccggcactgcaggagcaccctgctgc

SEQ ID NO: 275111 - DNA, 652 bp, Cannabis indica
gtaaccctagctcctttctttttcaagttcatgaagttgtattttggtttcaagaagtgattttgggttataggggctgttagggtttaaggtttgcttagttcgaattttagggtttgtttagcttaattttagttcatggtagctggtttagagattggttgttagttttgtgcaattctaagctttgagttcaagctttaagctttaatggcaagttgacatttattgttttgttctgtgaattactggctggattatattgtttgtacattgaataggagctctggaaggtttcatggcaattggtgaagaattgagcaacaaatgaaaagtttggggaatactggtgcaaaccggctagccggtttgcagtgccacaaaaaccggctagccggttttggcagggttccccgggcctttcattttctcaatttttgccatttcggtgcctcggttgggtgtttccccatttccagagttagaataacccctttagagtatagcagaacctagggttttggtttggtttcaccgggattagggttttaatcatgtggcttacccggtttcaatatgtgattagggcatccatctagcacgagaattccgttcaggtcggccaacacacttgaattcggaaaacaggtaa

SEQ ID NO: 275112 - DNA, 783 bp, Cannabis indica
ggatttggtcaaagatagtttgcttaatgaagaggccagaaggaaagcacaaggtgaatcttcttcttcttctggggttcttgttactgaaaagcatgacaggcggggacgaagtcagactaaaaatcagcatggttctagaagaagatccaagtctcgaaaagatatcaagtgttatcattgtaacaagccaggtcacttaataagggattgcagaatattgaaaagagagcagaatcaaggaaagaaaaatgagaaagtgactaatacagtttccactgaaggtgatgttgtcattgtatgtgatgatgggtgtgttagtcttgctacccaagattgtagttgggtgattgattctggcgcttcattccatgttactgctcgtagtgatttcttcacttcttacactactggtgattttggcactgtcagaatgggaaacaatggtgcatcaaagattgtgggtattggagatatttgcttggaaaccagtgttggtagcaaattgattctcaaagatgttaggcatgttccagacattcgccttaacttgatatctactggaagacttgatgatgaggggttcataaactggtttggtgaaagtaaatggaagctcaccaatggttctcttgtagtggcgagaggaaagaaagtgaatactctttatgtcatggaagctaagctacacaaaggagagattaatgcagttcaaaaagatgcaaacattgatctttggcaccagaggctcagtcatatcagcgagaaaggacttcaaactct

SEQ ID NO: 275113 - DNA, 637 bp, Cannabis indica
ggtcgggtactaggtcccggtcctagttctgtctcccaggtccctatcctgattttgggtccagaaccctgtttgtgtgggtttgggtcccggtctaggttcaggttcgagtccttggttctgatcctggtctggattcgagtttggatccgggtcctggtctatctttgggtctgattctaggtgtgggtgtttgagttcgggttcgagtatgtgtccgggtttgtgtcctagtctggaccccgatctgggtctaggttcgagtccaagccaagttcaagtcccgagtgcgggttcaagtttgggtctgggtcatgatctcggtctgaatctaggtccagcatttggagggtcttggtccgagtccaggttcgtatctggatccctatctaggtcctagtctgtgtttgggatggggtcctagatttaggtccaagtccgcgtctcagttccggtctgggtacacagccgtgtcggggcccaagttcttgtctaattttgggtatgaggctaggtttatgtttggttataggtctgggtccgggtccgggtccttctcacggtcctagtcttgttctatggtcctggttcggctattcttgttcaagttcaaattttgggtcccaggtctaggtct

SEQ ID NO: 275114 - DNA, 647 bp, Cannabis indica
atgagtctgggagccatctgaaaaatcaaagaccaaacaaatttaaatgtcaaaaaagttaagaaatgtcgacataacatcgacatcatgtcgacattctgtcgacattcaacactggtcgaaaaattgtcgacatacaatcgacatgctatcgacattatcataaaagcagtgacaaacgatcaacatcgacaacttatcgacatacagtcgacaaattgtcgacattctaacagtaaactaccaacagaatcaactgggatttataatcgacaacttatcgacatacagtcgacaaattgtcgacattctaacagtcaactaccaacaaaatgaactgggatttataatcgacaaactatcgacatacagtcgacaaattgtcgacattctaacagtaaactaccaaaagaatgaactgcaacttattatcgacaaactatcgacatacagtcgacaaattgtcgacattctagggcaaaactacataacatcaaacaaaggtaaaccatcgacaacctgtcgacaacaatgttcaaacacataaccagatacctatacatatcgacatcctatcgacatcctatcgacatttcatcgataactatgtaaaaacacagaaaacattgaaacatatccaacacata

SEQ ID NO: 275115 - DNA, 592 bp, Cannabis indica
gtcgccgaagtgccttcatacaaatgctggttggatagatgttgctcgaacccagacactcgaatcttgagtaagtttctgatttcctttatgcttatctttgcatgtttacatttcgaatgcaacttccgttgtgctgtagaaaaatgcttaggaaaccatagggttagaaacttctgcaattcttctttatcatgtcttcatgtgggtttacatccacaatgcttgtttctaaactgcatagcgtgtgtccttcatcttgcttattctaagcttcatgaacttttttgccctaaccaagaaaattttctgacttcttgagttctgacttttctttaaacatagatgttctttaatctgttgagtgctgctggtcggcatatttacttgtttatcgtttgatattccgaccaacactcatctcgtgtgttgtcttttgtagatgaactcaggtgagtcttgggaactcgaacatcggatcgaccaggacttgcttcaacttctccacgaggatcaccctcatcttcattctagtcctccttcttctagtgaaggaaattcttctggccctgtacccagccataggatgatg

SEQ ID NO: 275116 - DNA, 658 bp, Cannabis indica
agtctttataattgataccgattgtttgtcggcatctaactccaagccacgatatcatctctccatacatatctccaaagtattcccctttgtcattaacttcaaggtctattttttcacctttatccattctttggcatatccgcttcatccgtgtgggacctcgatggttaggaggttgcaaacaataacctaagttctcatctcctgagttctcatctcctgagcaatcatgtgtcggcacatcatctgccatatctgcataataaacatatttactaaatattaagatacaattacacatacaatggtagttacatatgtcaataaatcacataaaatattaagaaacaattcaacatacaatggtagttacatatttcaatcgcataaaatattaagaaataattatatatacctctagctcaagacttggaaaaaatcgtgttctcccttcaatttagattcttgatgcttaaccacaaaacctacaaataaatacaattaaaaagaatgttaataataacattggccatgaatagataacatgattgtattttacaacaaggcaattaactgctatactgataacatgatttcaatttggtgccttcaaatcattcaacacgagagaaatgaacttatttggaagatgagt

SEQ ID NO: 275117 - DNA, 606 bp, Cannabis indica
ttggtggagctgcggtcgggacagtacccgacggctgggctccgggcatataccctgttatcccggtgggataatatcctccataggccactatttgggcctcttcaagattgatgtatttttggactctcttctggaagtcctgaaggtttgcagctccttcctgttgtagttcgttccaaaatggagttcctgtacggatgcctgcctggagaagggcaagctgttgtccgtcatcaactttcttggtcttcgaggcttcctgacggaacctctttatatagttctttaaggtctccgtaggcagctgcttgatgttagtcaagttgcctgatctccatattaacctttcttgcggcgacaaactgtctccggaagttggtctgtaacttattccaacagcccacggatcctggctccagttttcttaaccactcctccgcggacccgctttgagtaagcgggaagcaccgacattttacgtcattgctgactctcatgaccgtcatgactcggttgaaccgcgacaggtggtcgcttggatcagagttcccggtgtaagctgccccactactaaaaattagacttttagtgacactatttagt

SEQ ID NO: 275118 - DNA, 519 bp, Cannabis indica
gcgggaactcgaggagggcgtcgagctcgactctgtccatctacctcggcttgtagtgttcgcagttgatcctgaattgcagcatattgatcagtggtgagctggaacattccctcgaatactaccgccggagtgacggggggaaaatgcatggttgctggtggtgtggacgtgtccccgacttgagggccagttgtttctgggaataggttgagaggtctgatattactcctccctactctgccgttgatgacatccacaggtggcactccagctccaggcagtggtacactcatcattccaatactgatgaacccgttgttagcttcgttagtgtgatttccagccatgatgaatagtgttctttgaagtgaatgaaatcttcagtcgaattcccacagacggcgccaaatgttgtcgagtgaatttcgcaacaccaaaatgtattatttaattaatataaaaaagagaattttcagggaagtgacaagtgcgagtattcgacctagaatggcgagt

SEQ ID NO: 275119 - DNA, 727 bp, Cannabis indica
tatcagagaaaaagatgggaaaaaaagataaaaatatctcacaaaaagatgatatttaaaatagagaaaattgtgcaagaaaataaagctgaaacctcaagcctgaattcgactatgtttatagattttggaaaaagtcgaaacatgaaatttctagatctctcttttatctttctggaacaacttaaatcgtccaattccaagcaatatcgagagagttatggccaaaatactattcgtcgacgcaacagaaaaatcacctcttcttctaatcccaagcagaataggttttctaatcctaaggagaataggttttttctcttcagcgaattttatcttattttatcattttttggctataaaagaagtggacttcaatatttttggggaagcaattttagagggaaaaatgagtacgaattttagagaccaaagtcaatactgaaggcattctatagagggttttcaacattattctattctctatcttcttctttttcttaaagctaatatgtgtcattttgcttccatgaacatgtgtagctaaacacttgattagggttcgatagatattgtttgatattgctttatggtattaatatgatttattttctcccaatttctatgtattctatttcatccgtgcttaactacttttaattgcctgatcaccaattaactgtctatgattttgatgcgagatctgagaagtgagtgtcaattatgc

SEQ ID NO: 275120 - DNA, 933 bp, Cannabis indica
aatccacccatccaacagcagtcaattttatcacagaacctacttctctaacatgcatatacatattaactaataacaaacactgctacgtatactaagcgaaagcaaaaaaacatacctgaatcgagtgcaaaaatgacaactgcaggcagctagcggtaatcccgagcggtcgaacacggacctaattccataaaaaagtaaaaccaaattaaaaatttaatacctataaaatttaaaaattttatcacatatccattaccctacactaacttacacatatacacacacacatacacatacacatacacatacacatacactcacacacactcacatacacttatacacacacacacatatacatatatatttacatacatatatacatacatacatacatacatacatacatatatatatacatacaccaatatacacatacaaatacatgcatagttatatatacacacccacacccacacccacatacacatacacatacacataaatacatacacacatacatacatacatacatatacacatatatatatacacacccacatacacaaacacaaacacatacacatacatacacatatatatacataatcccacatacacatacatatacatacatacatacatgtatttatacacatacatacatttatacccacataaatatacatacacatacatacagaaatacatacatatactaatacacacatacatacacaaatctatacatataaacaattaaaaaaaattaaaaataccttaaataaattggaggaggtggggttggtggtctgcgttggtggctggcgtagctcggccgccgtcgatggtggtggtggccgacggtggtggtggtgttggaggtggtggtggtggtttttttgaagagaaaaagagagggattga

SEQ ID NO: 275121 - DNA, 532 bp, Cannabis indica
aacgaacgactatatgttaaaagaaaagtcagaactcatgaagtcagaaaattttcttgagttagggcaaaaaagttcataaagcttagaataagcaagatgaaagacggacgcaatgcagttcagaaacaagttttatggctgtaaacccacatgaagacatgataaagaagaatcgcagaagtttctaaccctagggtttcctaagcatttttctacagcacagtgaaagttgcattcgaaatgtaaacatgcaaagataagcgtaaaggaaatcagaatcttactcaagattcgagtgtctgggttcgaccaacgtctatccaaccagcagttgtatgaaggcacttcagcgactttgaagccagaaaattttcttttcgctctggagcttacttagcaaagaagggtgatgaaatgagtgtatgtgccaatgctgtgagtatttataggaaagtcactgttgcccctaattttgcccaatatacgtggaccaaccaaacaaggacacgtggatcaagcaatgtacaat

SEQ ID NO: 275122 - DNA, 516 bp, Cannabis indica
ggtcgtgggtcttggtctaggtttaggggttattaggggtttagggtttagggtttagggtttagggtttagggtttagggtttagggtttagggtttagggtttagggtttagggtttagggtttagggtttagggtttagggtttagggtttagggtttagggtttaggggtttagggtttaggggtttaggggtttaggggtttaggggtttaggggtttaggggtttaagggtttaggggttttaggggttttaggggttttagggggttaggggtttaggggttttaggggttttaggggttttaaggggttttaggggttttagggggttttaggggttttagggggttttaggggttttagggggttttagggggttttagggggttttagggggttttagggggtttttagggggtttttaggggggtttttagggggtttttaggggggtttttagggggtttttaggggggtttttagggggtttttagggggttttaggggggtt

SEQ ID NO: 275123 - DNA, 602 bp, Cannabis indica
agagagatatcatcactttactgaaacttgtttttctgaaaacgaaaaaatataatagatccgaaccctagataacatttagcattattgagcaagaaaatatttcatacctcttcacatatttctattcgatgtctcaagcccgcaagccttgattataaatccaaaactttaagaatgaaggtagaaaataagaagaattgtggaaggtttgagaggagcaaacatgaagaagaatgaggctttgactaattggtttggagaggaaaaataaaactatgatagtttagggtttgataaaaagattatgagatatcgtattctgataggtttaggttaactaaaaataataatatataataaaatgctaaaatattattaaatcaacaaatatctaaatttttaaattttaaaagtaagccctttatttcgtaactttaggctcagttttcacctagaaaaattccgaattatgatataactatttctacaaaatttatagatctttgaattatctttccaacgccactggaatcacctcaatcggagctctaaaactctagatatgatcattttagtaaaacagtttttaatcctgcgaa

SEQ ID NO: 275124 - DNA, 521 bp, Cannabis indica
tgtgtagctcgagatcaacatggaaccatggtagatgctttcaagaaggggaaggttgggtatgtccaactcgaaattactgagatcataggcatcaaagaagctttgagttggattgcaactcatccctgggaaaatgtagtgttagaaacggatagttcggtgtgtgtccaagcagtccaaagtaatgtttttatgtcctcatagtttggtcttattgttcaagctgttaggaatttacttttggctttatcttttgcttagttatgttttgttaaacgatctgcaaaaaagttggctcattgctgggtgttacgtgcgtgctaagatggcacgttataagctaagtgatgcccaaaagttggccaagtggtggtcaagtggtggcgcatgttgtggtgcatgctggtggcatgctgatgcttagtttgtatgcagtggtattttcgtaaatatcttcaatattgtctggaacgggacgggacttggtattcgccttttattttggtctacaaatagaa

SEQ ID NO: 275125 - DNA, 580 bp, Cannabis indica
taagcatccatgaagcttagatttcgtgcccggctgttgcattgacgagctgatcgattcttggaagtgggaaacagtctttagggcacgctttgttgaggtctatgaagtcaatacagactcgccatttcttgttcggcttaggcacgggtacgtgattcgcgacccaagccgggtaaaaggctttaatgatgaagttgttgttgcgcagcttttcaacttcgtctttcagggctatttcttgttctttatccagcaatcttcgtttttgctgaactggctagatgttaggatcaatattcaggacgtgcgaaataatagaaggatcgattccgaccatatctgcatctcaccaggcgaaaacatctagggttgctctcagaaattttatcaattccgattttactttgagcaacaaaccctttccaatttctagcttgctggctgggatagctggatcgatctcgatctcttctaattcttccataggtccaacattggtggttgggtccccaagtcgaggatctacatcttcatcctcgtcttgggaagtttcctacttgggaatatttattccctt

SEQ ID NO: 275126 - DNA, 584 bp, Cannabis indica
aagagaggaatcgagtttacctggtcgatttctgtgacaggaagctctaaaagtttgtaaatcaaccttgtgataatggatatcaagcttctatctctgagaagagcttgacagagacgtagcccagatttgggtgaactctgaaacaaattccggtgttttctctccttatttttcatcttttactcatctaatctaatctgtgtttgtgtgtgggtatggatctgggtttcagagctagaatcgagcaagttctcaaagagaacttgctctgctagggtttcgagtttgtgaggctgtgtgtgagttgtgtctgagtgtttagggttctagactcttctactgagtctttgaaccaaaggttcaatacgacatcaagattggtgtcgtgggggtttaaacggtgccgtttagtctaagttttttacttggactaggaaaggtcatttctgaccttgagactgatatttaatctttgttggtgtagggttaaagcagtaaaatcctacagttttaaacagtcatttaactttattagcgaaggttttctaaaaaaaccgttttgaaaactgacgggaataagc

SEQ ID NO: 275127 - DNA, 504 bp, Cannabis indica
aacggaaggagtcattatattgcgctgcacccaataatctttatatgtgtttatttcgttgttttagaattcatattaggatgttaatgaaacatacttgttagtaaatctagatcctggtaaaatatatccaacactatatccccgtgatctgatcccaaagttataggaatttattcggtgactcacgatgcaaaagctgaatatgctaagtgttggcgtgctgtgcagattgctcactgcccggctaagaggacttcgtccgagcaaatgtatgtggtgtcctgttcggcagaccacttaaaggacaaatctctaattacaatttttccacttttcaaccacttattcttctttcaataataccatattttcaaattcaatcctataaatgccaaaactatttatttaataattataattaattaattactaaataaaattatcatttatataatttattagttagaccatgcaaagtctcttaattaacaaattgacccc

SEQ ID NO: 275128 - DNA, 498 bp, Cannabis indica
ttcaggaagttcttctggccaatttcctttggcatcttcgagtttttttttcagtgtatccttcacggtctttttgctgcttcaacttggccatttgcttgaggatgtgccactacggagaaacttttaatgatatcgtggttcgcataaaagtcggtgaaggattggctgttgaactgcttgccattatctgaaactattttgtacggaaatctgaaccgctagattatgttcttcacaataaagtcttgaactttctttgatgtaatagttgcgagtggttcgacttccatcaacttagtgaagtaatcaactgctaccactgcatactgcactcctcctttgcctttgggtaattgtccgatcaggtcaattccccaaatggcaaagggccacggactctgcatctgagttaactcgttaggtggagctcgaggtatctttgaaaatctctggcctttgtcacatttcttaacataggcctttgaatcttccatc

SEQ ID NO: 275129 - DNA, 603 bp, Cannabis indica
tcccagtggtcgcgatcggcgcgataggcgggttattatctgcgttgacaccctgatcgcccgcctggggatcacggagtgtctcagtattatgtgggccgcgggagcgtgccctgaaaactgcgttgagatgatcacgtagatcacctcggtgtacttgataacgtcctccctgttgtgtctgtacagagccggaccttgtatacctgctcggagtgcgtccatgcgatgacgaagaggctgactctgcgtcgttgtctctcgatggtcgactgcgaggattacggcgctcaggatcttcgtcaatttgtgcgctctggttaggaaaccttgcggattgatctcttgacatcggatggttcaagtccagagcttcagggttagttcttcgttccctgcgtacacggttagtatgacgtctagaagttgttacctgagggttatcgttgcgaatggcgggaactcgaggagggcgtcgagctcgactctgtccatctacctcggcttgtagtgcccgcagttgatcctgaattgcagcatattgatcagtggtgagctggaccattccctcggatactaccgccggagtgacggggggaaaat

SEQ ID NO: 275130 - DNA, 532 bp, Cannabis indica
tccaagtccaagtcctagttccagtcccagtcgacttccggttttggttccaattttgggtcacagtgtacaggttcaggtccacttttgggtttgggactgggttcaggtccgagtgtgggtttgggtccttgtcaaggttcgggtccaaggctgggtcccaaatccagacaccgactacggttttgtccaagccctaggtccagatccaagtcccaatttcgggtcctagtctggttccatttccggtgccgggtcatgagctgggtcctaggttcaagtttgggtttgggtcgggtactaggtcccggtcctagttctgtttcccaggtccctatcctgattcttggtccaggtcccggttattgtgtgggtttgggtccaagtctaggttcgggttcgggtcgggtactatgtcccagtcctagttctgtttcccaggtcactatcctgattctggatccatgtccaagttattgtgtgaattttggtcccggtctaggttcgggttcgagtcctagtctcggttcgg

SEQ ID NO: 275131 - DNA, 687 bp, Cannabis indica
aagaggttgctagcatgacggaacaaaaaatgattccagcattggatcttctagcaaatacaagcaatttaaagctatgaataaagttcttgggagtcggtcagactatcaaagaggagtgggttataaattgaaagacagctcagaaacaagttctagtactcaaagtcgagctcaatcacaaggacctactccatccattagtccggaagatatggaagtcttcaccgagtttatgttaaaaatgcgtgataagattgatcagtctcaattttttacaaaattttttaccatcacagtcgccaggtagcgcgcccagttccagccctccctccactgttagtgccacaacaacagcaacaacaacaacaacaacaacaacaacaaccacgatcgcctcagatgcctatgttctttcaacaacaacaaaattctcccaacatgtcagctggctcctcacaatcgcctcagttacattacatgttcgagcatccttcacagtctcctcctatattttttttggatgccgcaggaggatctcagacacaacctatggttggccattttggaggctcatcccaacaacaataccctatgtatggtcaatttgggtcatcccaacaacaacttgtgtacggtcaatttggttcattgttgcagcaacaacctgtgtatggtcaaatggga

SEQ ID NO: 275132 - DNA, 430 bp, Cannabis indica
tattaattataataattaaataattaaataaagagaaaatgagaaaggaagagagagagggaaggagagagaaatgaataaaaagatataaaatgaagaagcttttaaagcttctctacatgtaaagcaaagattttgtttctctaaaatagagaaccatatgaaggaggtgtattttttacataattctttaaatttttatagaatatactcttttaaaggaatttttgtgagtactactcttttaaaagaatccaaatttaggggaaaaattagaatttttcgtttctaaatttatagctatcgaaggttagtttttttctccagtcaggctcgtcggccttctttgagcttaggggtgttcattggaccacatctaatgttgttaggcctatccaaatttgatccaattatatattggatgttagat

SEQ ID NO: 275133 - DNA, 790 bp, Cannabis indica
cgttacattaacctattccaaacactcccaagtgttttaagaaaaaatacattgaagggtagaatagtaaacttgtccctactcgatgtaaatcatctataaaggatctttgattatctggattgaaataatgtataattcatagcgtatctaaatttggtatataaagcattttatgtaattagaagtgcaatgccaaatttatagtggagtcaagaggaattaataagatagagaatttgcttagtaaattctagaactacttattgggagcttgattgtatgggcctatggtccccacactagttgagatcatattgtcttgtagactcaattaattgattttaattaatcaattagaattctgaataagactgtcttgtttgtgaattttcactaagcaagggcttctttgagaagaaaagaggatttggggtttgtaaattaattaaggaattttataaagtctaattaataaataagttaaatgataattttatttgatcattaattataattattaaataaatagaattgatgtttatagagttagaattaaaacatggcatttgtaaaaagaatgattagtttaaataaaatggcaaaattaaaatacttgtagggcccactagggttcggccataggattcaattaaagccaatctttatctttttaattctaaacctaacactaaaacttatcctataaatataataagatggctcttattttctaggcttaacctaattctctctctatcaaacaaatagaaaatagaaaagagccacc

SEQ ID NO: 275134 - DNA, 887 bp, Cannabis indica
tgaaattactatctaagtaactaaatatagtataaactagtctaacacaatatttatttattcacataattagcagcagaatttgactcaaattttcaaaaaggtaagaaatttatcgaacttaacgcaagaatatactcagtacccccaactaaaatgagacagtgtcctcaatgtctaaatatgtatatgataagaacatgagatgagaaccgaaaaaacagagaatatgcacagtgatagatgttgattttctaacaaaaacaaatgacagaaaataaactaaaatactgaaaaataaagaaagcaattaaagataggaccagtagtgaaagaattcactaaccttggtaaatcgagtcgtgaaagagcgtttcctccacttcaggtggtgttaattctaaaaatggtttcaacctttgaccattgactttgaatacattaccaaatttagaattttcaatttcaacagctccgtaaaacagtacgaacagaaaatggaccagtccatttagaacgtaacttaccgggatcaaaaggaatgtcccaatcaggaggtcgaaataacttttgtggtctagggagtgattgtgattctctaggaattttcatagatcgatctgctaactttttcggaacattggtgtttctttttgcagtacacagatcttttaaaaaatttgagtaggcaggtatttgcttaatgacatctaagaaagggatatttatatttacttgcttgaatacctctaagatgtcaccatactgactacctcttttgattgggatcaatctctgtgggaatggagcttttggaatgaacgacaaagtttgactcattttttcaaccgagtcttggaatgtgaactttcaggctgactcttttc

SEQ ID NO: 275135 - DNA, 611 bp, Cannabis indica
aagtgagtcttgatattaaatcatactaatataatgacactttataaaagagttaaagcactattagtatcctctaacatttctcattatgaaaactcaatattatattataggataaatatgaattttattttctaaatttcgacacttatagtattttacttcttaaattattattaattttaaaaaaaaaatcttctcgaactttgaaaatatttgtaatttgctcattttgttgcatttcgttcactattgaacaaaaacttgtttggcgaaaagttaaataagagaaactaccaatctgttgcaggactaaaattttaaccgacctaagattgcccatttttgggccaatgaacgatggaatgaacctgagccatatgaactttttaagcactttagagaattcttagaatatttatgcaacgtaacgagcttgtatttatagcaagcaaaaagtctttatcattaatgattttttattagaattttaaatttttttttttttgacagagtaattataatcactcaagaatttacgacgcccacgtccgccgccggcgctggaacctcctcgaaccaggatagctcatcgtctaaccgcagagcat

SEQ ID NO: 275136 - DNA, 595 bp, Cannabis indica
tgagaaatttatgggtgactttttatttttatttaataaaataataaaatattatttatatataataaaataataataaaacaaatcctactaatatttgaactgatatttagcatatttcaactctatatataatcacaactataactctagaaattaaatatatatataaaataatcgtccatgaatttacactcacagaattacaatttacaacatgatcaccagttgtttttattcagataaaacagtaacgagtaacaccacactaaatatagactttaaagccaaaaaagacccaaccattcatggaatgggataaatgacaacctttccagtggctctagaagtctcaagataagcaaaagcctccatagtattggcaaaagggaataagcctttgggatcaatcactgccttaaccttaccattctccaagtaaggttccaatttctccaaagtaataccacttgaactcaaaccataaaatattgctccaactgctggcttagatattgacacaaccttcccaccttctttcactacttttaaaccttgttcaacttgtcctgttttttattcaatagatttttag

SEQ ID NO: 275137 - DNA, 475 bp, Cannabis indica
tccggttcctcgcaggcagcaacatcaaaatttcatatcttgctcaaatcaactccaattcacatgaaaccttccagacctgttctatatatcccctagaacatttctaaagcttcaaaaccacccagattgcacataatcaaaaatcaccattaaagctcaagctttgagttctaaactcaaacttgagtaaacctagctaacatgcaatcaaaccagtccaaacctacttaaacaagcataatatagcctctggaaacaactacaaacatcaacaacatcacagcaacagaacatacaattttcatgttgaaaaccaaacttttgcataagaaaactttagctttacttaacctaactatcatgcttcacaaacagctcatttaacttcaattaaacatgcttaaattacagaatttaacaacaaaacacagcagcaacaacatccaaataatccatgcataactcatatttt

SEQ ID NO: 275138 - DNA, 552 bp, Cannabis indica
gacacaataaacaagaatataaaatgtgatagtgggtttggatgaatttataaatcaaataaacaagtaaatgataacatgaactaaatgacacacaaataagtgatgaaaatacttctgtttctttattgatatttaaaggataaagattacattgaaatggagttttatttagggcataaaacccaacaatacatactgtagatgcttccatactgcctaaaatgaaaagcagtaaatagatgatcacacaaatagtaaagtatttactctcaatacttactgcaccatcagtcaagcatgtctctgacgatgaatgtccatgttcagccggtctacaggaagtttagaaaccttggcactctgataccaaattgtaacaacctaaataattaggcacactacccaagttacttacaaattcctaatcccgtaaatgggattactaatcaaaaaggcgcaaaatttaaacttttgtaataaacagaatgaaaataaaacttgtaataatttaaacattacaacagttggggtcccaaaaatatttacaaa

SEQ ID NO: 275139 - DNA, 132 bp, Cannabis indica
tctctctcaaccttggccgccaccctctctctctcttcttccttagaatttcgaaatcaccttagtgattagatagtgaggaagatcgtgaagaaagatcatcagctaaggagtttcagcatcaaagattca

SEQ ID NO: 275140 - DNA, 612 bp, Cannabis indica
catccatcccaccgcagcacatatattcgcagaacctacttcactatggttgaatattgaagatattcaaactccactaatcattagtaattaatttataagagaaattacctcggatgttacaattaagtgtttaggccaaggaaggaacatgtttgctacgtccctaacatatctgcacccttcaattgagattgggatttcagcatcctcttacagcatttttgaaatcagaattcgggcatgtgaatcatcgtagtctgtgcagtgaacagtgattttacaaacatgctcgtacaaatacgctcgggccacaatgttgtcgaagttgtcagagcagagatatacttgctgatcaagggccgcatggtcattgaaattgtacaggagagctggctcattgagggaaacaaactcctcagcataagtttgtggttgaccctcatccttacgagcgtatggttgtagaacatacgcctcaccagccacctctccttcttcctcttgtttgacagtgtttctcttctgtttaagggattggacttcagcttttaatttttcaatctccttctgttgccgagccataacatcagacacttcccttttcttcct

SEQ ID NO: 275141 - DNA, 645 bp, Cannabis indica
aaattttaattaatcacgattttcattaatcttgttgattagcaacgagctgcacaatatgtttaaaatcacgttaatacgcctacgctagttagggtgttacagaaggagttcacaagggtaagtctttcttgacaattttctttaatcctctttacttggctcaaatactcatgttttttctttgtgcaggccggtctgaagttggcctacacttactcccgagctaagtctgcttcttccaagaacatgactttgtccaacaccatgagggcggaggtggacttggccaagaaggatgctgaagacgccagggcggaactcagagctgttcgcatggagttgggtgaatccatcaagaagctttttaccacccaaaagaaaatagctgagctgactaaggatcttgaggcttctgaccgacttgaggagaccatcgagactttatctgctgaagtgaacagtcttctggatgagaggacatctcttcaagccgtccttcgtcgggtggaggaggagaagaaagctaaggaggaggagcttacggccgaggtgacgaagctgaaagagaaagttcagtccttggagatagccggtcttgagctcttctacgacttttgggaggctaatcctcaggcaaacttc

SEQ ID NO: 275142 - DNA, 665 bp, Cannabis indica
tacttaccacagtcagggaatggctgagatcctggacctgaaagatggagttcaaggatgcacaagcagcgaaccgcttgggtgcacaccgggtgagctgagaagcaaactcaccggtcatttccgcggcaaagggagccaaggtgggcccgaggaaacgattgaaccaatccgacagggggtccaagtttagatcccacggattctggtagttctaatcgttaagggtattttgcatttcaattcgcaaaaccctcctcaaagcctccacgtcagcatgcccccgggagtactcgtccatggcgtagttgtgtttagctatccggagttcctgcctcgcctcatctccaggaaccggagtcagcactatgttgggaggcactgtgtattcctccgcctcgggagagatcccggaatcaggggcaggggccggagtatcagccctccgctgccgtttgggcacctcctcggcaaccatcttgcccttgcgcttgcgaatcagagcaacttcttgctcttcttcaccttcttcaacttcctcaggaagagcccattgctcttcttgaccttctttagcttcctcaggaagcgcctcctcctcatccactaagtcaatagtgtctggaggggcactggaagaagctttcaagggagtggccacctgg

SEQ ID NO: 275143 - DNA, 500 bp, Cannabis indica
tttgttgatactcttgatctaaaaagacttagttaaattatctcgaaaccatattcctcaaatccacgtgtcgtggtcgcattggcccacgtattttgggaaacattaagggcaacatttaccccccaagccttgtttggtgggaagtaaacgaggcttgtttaggtgcctccggttgtcttattgactacctggcacgtgctttgggcgcatgaggtgcatttatgaccatcatcattgcagtttttactttttacaggcaacgattcgtttcctatccattaatgatccgacatatgtaatggtgtcagtcaagtactcaagcgtttccaaccgccatgatgaacgcttgtcccaaccattagatctgtagaatgtgaatcgattgctattctcaccgtacgatgatgcttgattacagctgcttcacacccgttttggcctataaaagccagccttctatttcatttggtactttcgctagtttgccaaattttctc

SEQ ID NO: 275144 - DNA, 526 bp, Cannabis indica
caacacagaataaaattttcaaacagcaactacagagccaaaggagtacttgaatatatacactcagatctttggggagctagtaggatcaaaacaactggaggtaatcaatatttcatgtccattgttgatgactatagtagaaaggtctggatttttctcttgaaacataaaaatgattgcttggaagcttttaaaaactggaaaacacttgtagaaactcaaacaaattcaaagattaaggtgctgagaactgataatggtcttgaatttgttaatgatgaatttaatgagctttgtttgaagtgtggaatagaaaggcatagaactgtgataaagactcctcagcaaaatggcattgctgaaagaatgaacagaaccttgctaaataaggttagatgtttgctactagaggctggaatgaacaagaaatattggggagaggcattacacacagcctgctatctcattaacagaagtccaaacagaaaacttgatgcaaagactcctgaagaactatggaaag

SEQ ID NO: 275145 - DNA, 546 bp, Cannabis indica
atttcctctaattttaatttgtacatactcactaaaaaaccaattgttgtcttatcaatatttaattttctgtctacgtcccacagtgtactcactgacgttaaatggaatatttcctatactttaaataatgtttgtcagagatttcacagtgtaacgtcaaatcaaactcagtacatgcagatctcatgggattccctgatttgagttaattaagatactatatgcaaacacgaaacctacctatattacttaaggagatttaatatttgttgggctctaatatactaatatgacatttttcttattaaaatttggacaaatgaattaggtcagctttaatacgatagtagtccctatgatagtattacccaacaaaattaacaaaactaagttaattaactatgatagtggtcccaacaacgattatgatgtcaaattttaataaattattgactactgaaatgagtggatgtcatatcacatttttaatttcaccatttaaaccatgtacttattatttcaagatggtgatgtgacattttt

SEQ ID NO: 275146 - DNA, 773 bp, Cannabis indica
aagcaagcacctccaatttttcttggaggtctggatgtcatgaaagtcgagcagtggctaacggtgataaccaatatactgaaccttatgggcgtcaccggaaatgatagggtggtgtgtgccaccttccagttccaagaagacgcgctagtctggtgggacatggtgtctcaaattcatgatgtcaccaccatgacctgggaaaggttccaggaactcttcaacacaaaatattataatgaggtagttagaagtgccaagagaaaagagttcacccacctgacccagcgggaaaacatgaacgtgactgagtataccacccagttcgatcggttggcgaggttggcctcgggaatagtgccaaccgattttagcaagaaggaaaagtatctggacggattaaatgtgaagatcaaacatgaccttatgatcaccaccgacgacaagacgacctatgctgagatggtggagaaggcactgcgagctgagggcacagctggatgtatgtcgaagtcagcttgtactccagtgagtggcagggctcctacccgtcctccatcaggctttaacaggggaggtagtggttcggccatggaccagaagaggagaacatccactgcatccggtggctcggggcagaacaagaggttccaggggaactagagtagaggcagccgtcagggtggtgctgagacccggttttcgtacccagagtgccccagttgtaaaaggcaccatctgggtgggtgcagaggtcagggatgctttcagtg

SEQ ID NO: 275147 - DNA, 688 bp, Cannabis indica
tattaggttttggatttttttttaccataacaatatgtgaagtacattattctgaaaatgaaactaaccaattttacattccttttcgcactatctgttttagtccaatgatgtccatagccaaaataataataatacttatacttatgtactttcccattattattgtgaatattattactgttgttatattttgccagtactattaggttttggatagtgaagtacattattttcaaaatgaaattgtttactccaattatgtccaaaataataaaaatacctacaatcaacaacgaaggcattaattctggccttggacataaatttggatcaaaaagagtaagtacagtacagttatgagcaataataataactctgtcacacaatttcctttgtaacaattttaccacttctaaataatgtaattaaaggctataaaaaagaactgttttccaaaaatgcagtgtattgaacatcaacctttacaacaattatatggatacctccaacatattaaaaattaaaaacaatggtaccaatctattcaacattaaacacatagttaaagtactgtacagtgatgagacataataactctgaatttcaccatttctaaataatgcaattaaaagctaccaaaaaaataaaggttagtgtttttaaaaaatgcaatgtattgaacatc

SEQ ID NO: 275148 - DNA, 560 bp, Cannabis indica
acaattaatatattctatcacatattttttttctttggttttaatagtttcctttttttcattaaagaaaaaaataaaaatagtttcctttttataattttatttttcctttatgtatagtctattatttttgtagtacttttttttgtctcctttatactccaaaaatatgttattttgtattttattttcctttcttttattatcttgtttatatttgaaatcttttttattttcttattttttttcccttgcatatatatttaacattttattcatttattctttatctgaagtaaaaaaaaatatacatatttattacacagacaatattttctttattttttatttaatttcttataattaatttgtttattttgataaaataccgatccctttttaatctgtaaagttctttttggcaagttagttgacaaaatatttttttatttaatggtaagattttatgcatttatgattcgattgtcttaccttgtatatttggattttagttgtatcttttcttggtttaggaaagatgcttttaatgctgaatcttt

SEQ ID NO: 275149 - DNA, 478 bp, Cannabis indica
ttctgtcgcagagtattatcaagatctgagtccgaatgtccttcttgttgaatctggattcttcacgatcttccacactatgattgaggtaccacttgatgtgtgtgggcactactcattcactcaaggggttcgaatcaataatgaagaataaagaaagataagtggcggctaggttaggtagaaggcactcaggtttttctctgaaaggaataagatgcatcatctttttctgaagccatcactacctatttatagtatgccacctagggttaggtttgaattatttggcattaaaataatgaaaatattaaatggtaaaacctacataagtggccggccaaggcttgtggatatgggccccacttttgcaatttgctgttttatcatttctacatctcattttctcaaaaacgccaattttcaaattcaatcatttaaatgccaatttcaactatttaataactaaaattaatta

SEQ ID NO: 275150 - DNA, 733 bp, Cannabis indica
aaggcaaggttacttttggccaacgatgattgaagattcgagagcctatgttaagaagagcgacaaatgccaaagattttcaaagatacccagagctccacccagtgaacttacacagatgcaaagtccgtggccctttgccatttggggaattgacctgatcgggcagttacctaatggtaaaggcggagtgcagtacacagtggtagcattcgactactttactaagtgaactgaagccgaaccactggcaaccattacatcaaagaaagttcaagactttatagtgaagaacatcatatgccggtttggactaccatacaaaatagtctcagataatggcaaacagttcgacagccaatccttcactgatttctgtgcgaaccatggtatcatcaaaagtttctccgtagtggcacatcctcaagaaaatggtcaagttgaagcagtcaacaaaaccttgaaggatacactaaagaagaaactcgaagatgccaaaggaaactggccagaagaactccccgaagttctatggtcataccgtacaacggaaaaaacagcaaccggtcagacaccatttgcaatggcgtacggttatgaagctatgctgcccgtcgaactcgagccaccttcccacagaagattgacgtacgatcaaggtaccaatcacatactccttgcagaatcacttgatgaaatcgaagaaaaatgagcaactgcaaacttaaagttg

SEQ ID NO: 275151 - DNA, 740 bp, Cannabis indica
cggcgaagagaaaaaattactaaatcaacaacaaatcaagaacgaacaacaatatttacatatatcattcctaagaaacgattaataatgtacaatataaaaatcaaggttgttttaaagttgtttttatcttattaacacaaatttattgctaattatagggataagcccaataataaaaaaagaacactagaaaacgatttgtgtgcattgttttgtagtgttattttactgttgttttaatatgaaaaaaaggccacgtaaataaaatattgtgaaaaatgacaggacatgaaatctataccagttctcataaagaacaccagaaaacgattgtgtgcattgttttgtaatgttattttactgttgttttaatataaaaaaaaaggccacgtaaataaaatattatgaaaaatgacaggacatggaatctatactagttctcataaagagcagtggacaatgggaaaaagaacataattattttaagagaatgtggcaatgctcaaaaacaacacaacaatacttgaaaacaacacaacaacaacagaatcatacacattggaacaccaatcagaagaaggaggagagtcaaaaacaagagaatttgaaaacgacaaatttgacacagttgactatgcgaagctggttgctaaaaaatagtagaacaacttgaaaacaacagaaaaaaactagatccagaaatcgacaacaacaacgcgaagctaataacagacaaa

SEQ ID NO: 275152 - DNA, 597 bp, Cannabis indica
ttggcatgtttaggccttaaaaatggagtttttgggtgttctgaacccagtcgtcgcgacgggattttcggccgtcgcgactgggtttggcagtgggaatgtctgtttttcccgttttgttttggccataacttttgactcgggactccgttttgaacgttctttatatcattggaaagctcgttccgagctctatttgattatctgtgttttgaatgccatgtttatactaagtgaaagtgaaattagggattaaccctatttgtgaaatctcgggttgtgtgactaggattaccggcacttgatcaggagcacccaggggtttggaatctctgttattacgggacaacaggtaagacagtagtttgcacgtagagtatgcacagtggtgcttatgttgaatatcatatatgtgagtaattgtaaccgggattagggttattaccctaatatgagtggtttaatagcctagggttattactctagtgatatatgttgtgtaaatactatgccatgtcggatatatgtatatattgagattatgaattatgtgcttaaggcataattaaactagactcggtaagctagtaccttgag

SEQ ID NO: 275153 - DNA, 971 bp, Cannabis indica
ccatttaaaagtccccatgactatccttccaggtcgagaaatctcctaatatttgtcaaaattcttagatcttaatggctttatctttctaagagatttattgtcattctcttctcgagcactataagacctaaaatgccacctctttaaccaaaaattggcactcattgaaagtttacctcttaattctccttgcggtgacactccaacatactcatgctattttctatgaatcataagtagattgtagtatcttgttccttgaatccatgtatgttgcctgagaatttaataatcccaacactcctctgaaaccagtatcgtcctttccatgccataaaattcttcaagacatgtcactttagtcttagttgtgtctcacttgtctctcatccctaagtgaggctttccaaacctctcctccttgagtgatgctccacacagttgttgttgtatcgatgagtattggaatctagggatgtcaccttgaatgtaaatttctccttttcctcaagttttgaatttgcgatctactctctaacttcttatcttagattctattcagcatactacactcctttacatgatggcattgtcctccttggactaatttctataacagacttatctctaaagtcttcacatacatacttcttactatctaacttaggagtgtgtaacttataaaacatccatcaagatagtacttttccttaaagatatattttttttcatccttcttaataatcgagtttggtgaaatgccctgtcccagtctagtatagcatcaactatcctaagccattacctacttcctataggttcggctttctttcataactaggtgtggggactgcttctttaaccatttgtagacaggtacaatcctatgcatcggtatttagttagctattggtacattttattatgtgcctcaagttgcactactagtgttggtgatctatggcgct

SEQ ID NO: 275154 - DNA, 1046 bp, Cannabis indica
acaagaccactatcagaaatctacgagacatgcaacttagtacttatggagccagaaagctttgaagcagctcataaacaagaagtatggagaaaagctatgaatgaagagataaagatgattatgaagaatgagacttgggagcttgtagatcgtccacaagacaaagatactataggagtcaagtgggtctacaagacaaagctcaacgcagatggctctatccaaaagcacaaagcaagattagttgcgaaaggatactcacaacaatacggagtcgactacaacgaaacatttgctccagttgcacgccttgacactattagggctttaatagctctagccgcacaaaagaaatggaagatttttcaactcgatgtgaagtcagcattcctaaatggttatcttgaagaagaaatttatgtggagcaacctcaagggttcgtggtacaaggacaggaagataaagtcctcaaattgaaaaaggctttatatggcctaaagcaagctccacgagcctggtatagcagaattgacagctactttaccgagcaaggattcaggaggagcaagagtgagccaactctttacatcaaaactcaaggtacgaatgatacactaattgtctctttatacgttgatgatctcatctacacaggcaataatgagaagatgataaagaagtttaaagaagacatgatgaaaaattttgagatgaccgacctgggattaatgcactactttctcgggatcgaaataactcaaaaagaagatgggatcttcatctcacaaaagaagtatacagagacactattgaagaaattcaaaatggagggatgcaagactgtatcaactccattagacaataacaaagctctcaagaaggaagatggctcaccgaaagctgatgaatcaaaatttcgaagtctaattggcatatctaactgctacaagaccagacataatgtacgcagttagtctcctatcaagattcatgcatgatccaagtcaagttcactacggagcagccaagtgaatcctcagat

SEQ ID NO: 275155 - DNA, 773 bp, Cannabis indica
tagaaaaaaattggaaaaaaaaactctttctctctcaaagctctctctcttttcggcctcttggtgcagcaaggaaccttggatttttccttgtgatttcaattctctttggtgttcaattcaagctaggttagcttctaagcttctcttcctttgttttcttgaaaaatgatgaaaaacatgagtaatgcatggatgatttggatgatgttgttgctgctagttgttgttgttgtttctatgtttaaaatgttgaattaaatatgtttagttaggttgaaatgcatgctagttgttcttgctttagttggataattttcttgttaaaaagctatggttttcaaagtgaaaattgaggatttggtggctgtagttattgcatgaattagggtttgttttctgctgctttagtatgcatgtttaggtagttttaatcatggtttgatgcttgatatgttgcttagtcaagttttgagttttagaactcaatctttgacctttaatggtgaaatgagtttctgtgtgtgaagctcggttttgttgctttagaattgttatttgggtcatatagaacaggtctggaaggtcttgtgtgatttggatttgatttggttgagttatgaatttttgaaattctgcctgcgaggaaccggaattccggttgtgcatccggaattccggatgggttttgaaaattcccagaaccggaattccggttggcaaaccggtctgccagttgggtgattttcagaaaccctagttttcctcatttt

SEQ ID NO: 275156 - DNA, 965 bp, Cannabis indica
gcattatctttctaagtttgttggcatatcttatccgagtgattatattagagtagtttcttaaaaaatgatttagagcaggtggaaggttgattcaaattctaaatattagtattagtattataattaaggttgaccatgttggctcttgataagagttttgattgtgtgtatagtggtatatttataggagaaattaataactcatggatacattcagcaatttcatggcatgtccccgaccaagttgggaagtgtacattggatgagaggaataggagtgttaggtgtcaacccatattggaagcataataggcctgggatttggactgctactcgatgaacatttttacgaggaaagagctcgcttaggtgtggtacaaggccagttaagacttttagaattgtgcaaaagtccttaaatccaacaatctcaatagttcagggggtacttttaacgatattaaaaattcagggggcataatttggtatatgtcaaagttcagggggcaaaaatctcaattagccttctaataatagttattacgatagttttcgtgtgatcatgtgaccaaaggctctattccttttaggatcagtttggcacagttgtgttatgggaaaaaacaattatagctgtgctgtgagaaaaaacagctgctgcagaactgtgaaaaaagtaacttttaactttttttaaaactatgccaaactgagggtattccatatatattgggataagcccttacaaaattttattataggcaggggaccacacccttttacacaaatgaaaatcgaaaaggcgtacaatagaacaacaaaatgtgccattagtggtgaggttactgtttcttaacataaagtagagttattctttctggtcttcaaccctaaatctacttcctcatttagtatattaagtatactcttttatcttcttccacttccttctataatccatc

SEQ ID NO: 275157 - DNA, 556 bp, Cannabis indica
atttgagagcctatgtgaagaagtgggacaaatagccagagattttcaaagataccaagagctcgcccaacgagctgacacaaatgcaaagtccgtggccctttgccatttgggaaattgacctaatcggacagttacctaaatgcaaaggtggagagcagtaggcagtggtagcagtcgactactttactaagtggactgaagctgaaccactggcaactatcacgtcaaagaaggttcaagactttatagtgaagaacatcatatgtcggttcgaactaccgtacaaaatagtctcggacaacggaaagcagttcgacagccaatctttcactgatttctatgcgaaccatggtatcatcaaaagtttctccgtagtggcacatcctcaagcaaacggtcaagttgaagcagtcaacaaaaccttgaaggatacactaaaaaagaaactcgaagatgccaagggaaattggccagaagaactccccgaagttctatggtcatatcgtacaacgaaaaaaatagaaaccggtcagacaccatttgcaatggcgta

SEQ ID NO: 275158 - DNA, 606 bp, Cannabis indica
gctggaactgaagggtttaattactatggcacacttgaagatgtaatcactatatcttatactggttcatatacagtgacattgtttgaatgtaaatggtataacactaatcctataagaaagaagacaatcactgaaaataatataaccagtatatacgtggattttggtatgaagatgagtcgtacatccttgctaaccaagccaaacaagttttctatcttgaagatccactcagaggtcgtgatttgaaggttgctgaagatattagtcatcgacaaatttgggacattaatgacaatgaagagacagatgttgatgttgttaatgattctaagtcttcaaattttgtgttgacgattgatcttggagagttgattttgcaatcgaatgaacctccagtacttattaaatcgtccgatcagttagtggattctgatataaagaataatgaacttgatgaaaattatgttgccgaagaagtagatgatttactagttgaacatgtggaggatgaaaatgaaaacttgataaatgatggaaatgatagtgattcttcggtgtaactttaattttactattgtttgttaaaaaaactctatataa

SEQ ID NO: 275159 - DNA, 524 bp, Cannabis indica
tttcccaaagactccttacctaatttaggtaatcctcgaacaatttctgcattagacaatctccttagatttttaaaatgaatatgaccaagtttttcatgccataaatcagtaatattatcaatgacaaaatgacatgtagcatatgtagtgagagtataacaattgtcactagatctgagcccttgaaaaacaatttcatcaagaatattatacacgaaataatgattactatcaaagctcatagtataaccctgattacaaatttgactaatgctaagaagattagcttttagttcatcaaccaacatgacattcttcagtctaggaagccctttaaaattgagagttcctattcctatgacttttccaacaagactgttaccaaacgtaacttctccacactgcattggtctaatgttcacgagatattctttttcacctgtcatgtgtctagaataaccactatcaaagtaccacatgttagtagcaataattttaaaataagaagaacctaccaagca

SEQ ID NO: 275160 - DNA, 835 bp, Cannabis indica
tacaattttgagtaaatggatgagttgtggtgttttgatgcattggttatgttgtgtttatgatattatattgatctggagcagttggacaggtttgatgaagatttggttcgagtttgggggaaaggaaccctagatttcctggtctgccagaaccggtcgaccggttggttctggtgtaccagaaccggtcgaccggttgctagcaggggaaatttttgggttttttcttcaggatttggttttggctcggggttgtatccggtatctattgtaggttaattatgtgtagtatgacatgttatggggtgttggagattaggtgttgtcgggatttaagaatttggattttcttagagattttttattaaaatatttatcgagagttgttatcgtgacataggacccgggattgccaagctttgattccttttagaagggatgcacactaaacttctggactgaggtaagaaaagtattaaatactgtataaggttaatgttatgattattacagtttcgattaagatcgaaatcttgttatacgttgttgggacttaatcctaatcgaggttaacgatatgtaatgggtgtgactcgattatgatcgagggaaataatagggaacgattattatcgtttgactcgattatgatcgagggaaatattaggaaacgattattatcgtttgactcgattatgatcgagggaaataataggaaacgattattatcgtttgactcgattatgatcgagggaagtattatgaaacgattattatcgtttggctcgattatgatcgagtaaaagaaacggttattaccgttatgagtaat

SEQ ID NO: 275161 - DNA, 1121 bp, Cannabis indica
gtcatgactccgggatcccctccgaggcggaggagtatacagtgcctcatggcattgtgttgactccgatccccagagatgaggagaggcagaatcttcggatagccaaacataactacgcccttgacgagtacacccgggggcatgctgaggtggaggccttgaagagggtcttacgagaggagttgcaaaacactcttaacgaggagaacttccggaatccgtgggatctgaacatggaccccctgacggactggttcaaccgtttcctcgggcccaccttggccccttttgcctcggagctgaccagcgagtatgtctcccatctgactcaattcccgcccaaacggtacgctgcttgtgcatccttgaactccgtctaccaggttcaggacatcagcaatgccctggctgcggtaagtacttgtgatttatttctttcctcgatattttgcctaaggcttttattctcactcttacttccttttccagattactgcagagaccagccgcctttccaagaccatagttaatcatggcttcgtcctgtccgaatttgggggcatagacgaggtcgtgaggatcctgcaggacttgtctgctgaaaggcgggcgatccaggaggaggctgagcgaaaggaggctcttgctaaggcgaagctcgaggaggaggctaaacagagggaagcccaggcggaggcgatgctccgagaggaggtcctgcggagggataggctagaggcgaggcaccgggaggcgctgagggcggagggcgaagccactgccaaggccaagcgcgagcttcgggaggccagggaggccatagacgagatggccgccaaggtcaggtccttagaggaattgcaccaggcggacttggagtccagggctaacttagccatggagatgaaggagctcagagatcaagccttaaagaaggctaaaagagatgacctcctctcccctgtttcctacaagcgttgtatcaagcgctttgatgatggcgcctacatggcccggtcgacaaatggccagagcatcaagcttgacttctaccccaaacttgaggagatgattgctaaattttgggagaagaagaagaaacttgacgccatgctcga

SEQ ID NO: 275162 - DNA, 543 bp, Cannabis indica
aggcggttttttggtaaaaaccgtaggtatatatagtagtaaaccctatcacgtcggttggaaattggggatttttttaaggggtttataggagaccctatgccgtcaattcctagcaaagaaccgacggcgataggtgcacaactttattgacacgtgtgcacctatgtcatcggttttttgtctaggaaccgacggcatagggtctcccctctataaccctctgcatcgtcttcttcttcctcacttcttcttctccagcctacccagccacttacagcagagagaaacccacgaaaaacccacgaaaaccctcgccaaccacctctaaaaacccacatatctctctcatttcttcaccatttcacctcatttttgtcttaaaagtttctattttcaatatctaatcccatacactaaaaaagttttgttttttcacccatttacactgtacccgaacctattttaaaaaaaggtggtggtttaactccgaccaccgcttttagcagagaaatcgttcaatctcaacgttcattaaggtat

SEQ ID NO: 275163 - DNA, 595 bp, Cannabis indica
attcaattaaataagaaaattaaatttaagttaattatgttctagacacttaaatatttgatatttttcttaagagatttaattaaatagaaaaattatatttatgttgaaaattgatttatttaattttagaccaacataaattagaataatttttccaattttattttattttatttttaagtgatttcgaaaatgtatttttatacattagatttcgaattcaattatatatttttagaaaaaattaaatttgagttgaaaattaattatttaattaattttggaccaacttaaaagtaattttcacaacatttattggaaaagtaatactgaggatggatttttattttttcgatcttcctagggtataaatttataaatattaattaaaatttatatttagagttatctaaattagtaattttaattaaataaatatatgttaaaataaatagattaaaataagtatcaaaagaaatacaactcctttaaaataatgagcttttgttataaggatattcgatctccattgttggtcctacatggttaattgttttcaatataatctcgagacgctagacttcgtctccct

SEQ ID NO: 275164 - DNA, 453 bp, Cannabis indica
aattaaaaagtaaaattttaattaatcacgattgccataaacctcgttgattagcaacgagctgcacagtatgtttaaaattcacgtaatacgcctatgctagttagggtgttacaatttgcctttttaaataatctcaagacattgatatacaaatcaagtgtagttgtaaactcctcgtaataggatctgacaggttgaattaaccacaaccttttctccaccattactcttccttaatcacaaaatccttgataatgtgaaattcctctctatatgtctactctcttgggatactagattctatacttttggcaactactttttggttattcaggaagtaacactagtagtagtatctttcctgcaactttaacattcagtctctctctggtagacctagagacttcagataggtttttacacttctccaaaatcactattccaccccta

SEQ ID NO: 275165 - DNA, 952 bp, Cannabis indica
ttcttatgattttttcgcccctttttaatctaacttgccattatttataatcacatagtaggtaattaattacaaagttgactgtaatctttacaacgtttaccccatgaaacgtggggtttgattacatatcacgtagtataaatgcagttattatttgaatatcacaacgtttaccccctcaagtactatcttgcatagcaaatagaaaagacgcttaaaaataataaaattaaataaaaaataatataatataatttgaaaatgtttataattgtgtatttaaatgttaaaatacaaaaataaccctatatggtagacccaatcccatataaaggcccaaaactaaaagggtaaatggcggcaaaacccccaatactttggttttggtttcactaaacccccacaacccaaatttctgcgggtaaacccccaaaaccactattctgttagcaaaaacacacttccgttgaaatttagctgttaactgccaagttggactggaccgaggacacgtggcacaattttattggtccacgtaaaaattatttaaaaaaattaaaaaatttaaaataaaattaatttaaaaattttaaaaaaaatataaataaaaaaaaatttttttttcttttttctttttctttttcttttcttctttttcttttctttcttttctttttcttttttcttttcttttttctatttttctacgattacctccttcttcttcttcttcttctttcttcttcttcttctctctctctggtatggatacaggtaaggtgcgacgaggaataccaagctggagccgttgccgaggaccaccaagccagcgtcgttgccgaggacgaggaccaccaagccagcgcttttgccgatcgatctcagccacgtaccgcgaagaaccaccgaggaccgccggttagccccgattcgattgtctactcagccc

SEQ ID NO: 275166 - DNA, 680 bp, Cannabis indica
aacaggcctgggcgtggccagcttcttcctcttcaatggggtcacctgctcagcctcagcctcagcctcatcttcaggattcaaaggctcctgagcatactgcttggccctggcacctcccttcaacttagcctctcgcttcaattgaatcaactcattctccagatgagatcgttcaggccggccagcaccagacttcctcttctttccctccacggacttaggagaaaagtcctcagggtaaagcccatacttcaccagattatcatcagaggtcagctggataatatttctgtcttcctctggcaaccgggcaagtttctgagctctatccctaagagcaggagtgaggggaggacggtgatatgttggaatctggtgaaaccgagtccaggtgatgctcggatccttcaccatgaagtactcatcaacaaaatgccctattttgctgatggccttgtcctccatgtcgctcaaccacttgaaacctgactgagagaagtagaagtaccccgacctgccttgcttgggggtagacttcaggtcgaagaaccaggcaacctcgtggggggaaggagcatcccatccttgggaagcgtaaaggacgaagagagcggacaaatacttaatgccctttggagtaatttgggtcgggcaaaggccaaagaagtctgccacat

SEQ ID NO: 275167 - DNA, 590 bp, Cannabis indica
atagttctgggatgtatggatttagaccatgcactaaggaatgaacaacctgcacctctcactaaggaaagttcccatgatgataaaagggaatttgagaggtgggatcgttcaaatcgcatgagtctaatgattatgaaacacagcattccagaagccttttggggcacagaatccgaaggggttactatggctaagaatttccttgaacaaattgaggaacgttttgctaaaaacgataaggttgaaatgacaacacttcttggttctttaatgaacatgaagtataagggtcaaggaaatgtaagggagtacattatggaaatgcatcatattgtctcaagattaaggacacttaagattgagctttcggatgatgtacttgtactcatggttttgttaacgcttcctccacagtttaaccaatttaaaattagttacaactgtcaaaaggagaaatggactctcaacgagcttatttctcattgtgtgcaagaggaagaaaggttgaaaaaggacaaaactgaaagtgctcatttggccactacccctaaggataagggcaagaaaaggaaatttgagaatgaagc

SEQ ID NO: 275168 - DNA, 774 bp, Cannabis indica
gtatttggttgaaaattggtgatttgcttggtattcaagcttgaaattgaagaattgtttgaggagttgtggcttgatcattgcattgaagcttgaggtagtttttctattgctgaaatttaatgaatttgctgctgtgattttatggttgaaaagcatgaaataggttgggatggtcttgagatgcatgttggtgttttcttgttgatttgagcatgtttgtacttggatcttttgaattgatgttgggttaggtttagacagaatttaaaaggaattttattgtgtttttattctgttattgaactttgaaattaattgttcaagttcaagttcttgagcttgaagttcttggtgattttgcttaagttggagctttgaagtttatgatgtttaatctgaatttttggggtttttaccattggatttttaatgcatgaattgtgttttaagcttttgatttaattactggaaaatctatttaatggatttaagttttggttgtgaattgagttgaaatggatgagttttggggctgaaattcattgttgaaggctgatttttagttgctggtttttggtgttgttggagagtgaattaggtgtaattcctctctaattacttggtttatgttaggtgaaagtttggtatgattgtgggttgatatagcatgaaaattggtgtttttggatgcattttcgtggctggaaactgggtttcctgggtttttaaacccagtagccgcggccatttttggcagcttattgtattttt

SEQ ID NO: 275169 - DNA, 567 bp, Cannabis indica
cgtaattaataaattacgatatttatttcattgagtaaattctcaataattaccctaagcaagatcataatcttacttcgttaccaaaataattacatatttaataaaatatgtctatttatatattatttattttctgggatattacaactatccccccttataggaatttcgtcctcgaaatttacctgaaaagctcggaatacaactcccgcatctgcgactgtaaatcccaagtcgcttcttcaaccttgctgttccgccacagcactttaactagcggaataatcttgttccgcagcaacttttctttcctgtccaaaatctacaccggttgttcttcatatgacaggtcggtttgaagctcaatgtcttcataacttaagacatgagttgtatcagatacatatttctgaagcatcgagacatggaatacgttatgaaccccagataaaggaggaggtagagccaactgataagctacctgaccttttctcaagaatctcaaatggaccaataaacctgggactcaatttttctttctttccgaaccttcaaattcctttc

SEQ ID NO: 275170 - DNA, 769 bp, Cannabis indica
acatataatttcatagttaaaattttattatacttgtaatattaattaaaatgattacacttccttatacttcttgtatttcaatgtatcttaataatatcctctcttgtattgtcaatattgtacttcatctgggttctgactatatttgttatcttattcttgtttagatttgtttcatcatcaactatgtgtgcttgaaaagtatgtttttttttatcgatccagcttgggtacagtttatgattgcaagataatgtgccataggaatgggagtcaattttaaatgttattgctgctgctagcactttctttctagaactagtttccattgatgagtgcctttcaatgtaattttaattaaagattcgggctcaaggctgaatggtatttcattatgtacagggcggcaaaaaggttaaaattccaatattccttgtcccagctacccaaaaggtttgtctcccaaatgcaatgctaaaataattggttgcttaaagttgtccataagaggagaaaaatttgtctaacacatcctaatctataggtgtggatggacttatatagtcttctaaatttttatcaatctgcaaaaaataaaaaatcactccaaacagctacatcaggatcaatccattcatggctaacatcttcagtgtcatgctcaattccactgttactcatgtcagagacatcttcttcacatttctttttcacaaaactcatgaaatgaaaaaaattatcttcatcttcggacaaatttgctata

SEQ ID NO: 275171 - DNA, 544 bp, Cannabis indica
ttgaaaatacttttcggttgcattctccgggatggtgtttcatgcaacgtgggcactcagggtaagaataaccctggcgtcctcccttgccttgaaaccttcggaaccgcttgttctgtcttaaacccaccactgatgacgtaggtttcctctttcgctcaatcatggagctcctaccacttccaccataatctggattcaggcaggtaatattctgaccctctaccataatctcctgaggtctcataataatttcctcagggctttcagcccaagaagcattcttcatatttgaacctccctgaaagtctgaaggttcttggatccaaatctttccatgcaatggttccacttgattaccagccattccatgcttcgctggtaataccgaatcaaaaatgattggcatatgtggtaaagatactacaggagacctttgttgtttcaacctctgaatctcttcttcatgtcgttgaatcacagcttccatttttgcaaacctttgctccaaatccaacggagcctgtgacggataaccatcact

SEQ ID NO: 275172 - DNA, 593 bp, Cannabis indica
ttttacactttgaagagcatgtcaagtatgtttatcttttgtaatttttatctagttatgagcttctaatcttttttcaagattattaagatgatgatgaagcaaaatgtaactagatagtgtttatgtttgtatgttgatttcccatttgtgctataaagttcatggatttttctatcaaaaatatgtctttttcatcttcaatatcatgtatttttgattgttaaagcatatttctacttagttcttcattatgcaaaaatataatactctttgattaaatgtctttcattaaattgtttacatctaattcttagaatataagtgttatattttgcctaaacatagtttctttgattttgtgtagtttcattaaattgtaacacatttaatgcttagaaattatacattttataagtgaagaaaaatcctacctttttgaaaataacttgtacttaaatgaaaaatatattttggaaaatatggtgagatttatttcaactatatctaaaacttgggaatcaatatacttataaatattattgaacttgcattttgtggattctaatatcttaataatcttattttacaca

SEQ ID NO: 275173 - DNA, 804 bp, Cannabis indica
tccgacccgaactcaaacccaaactcgaactcagaatctcgaatggaacgagaaccgaactcggactaggaccaggacaaggacctaaacccaaacccgaacccaaatcaaaacccagatagagacctaaacccgaactgagactaagactcgaacccgaacctagaccggaacccaaaccacacaataaccgggacctggaccctgaatcagtatagggacctgggaaacagtactaggaccgggacctagtacacgacccagaccctaacttgaaactgggacccagctcgtgacccggtaccagaaacggaactagactgggactcgagattgggatccggatctggacccagggcttggacaaaactcgtagtcggtgtctggatttgggacccagccctggacccgaacccttacaaggacccaaacacacacccggacctgaacacagtcccaaacccaaaagtggacccgaacccgtaccctgtgacccaaaattggaaccaaaaccagaagttgaccgggactagaactaggacttggacttggaatcataactgaaactggacctacatccagaaccgtaaccggaccaggacccgaactccaaatcaaacctagacccgaattgggagacggagctggatccccacccaaacttggactcgggacccgaacctgaacatgaactcagacccaaacatgaaccagactagggacacaaaaccagggttgagacctagaaccgcaccccagtctcaatcccaaacccaaacttagaaatgggacctgggacctgaa

SEQ ID NO: 275174 - DNA, 488 bp, Cannabis indica
ttctcgccagaaatcaacctcctgccactacctcacaagttcaagatgccaacgtggaagatgtacactgggagagaagatcctctctctcatctcaagtatttcgagatgcagatggatttacaaggagtgcgaggagacgtatgttgcagaatcttccccgcaactctgtcggaggctgcacagcaatggtatttcaagttggctccaggaaagtttagttcatgcaaaactttctcttcagaattccatgcacaattctcttgctcatgccaactccaattgcatcaaggagattcggtcgaagtaaaacaacgaccaggcgagccactctgggcatacatcagcagattcatgacggaagcgaccaaggtgtcacgggtaaccgatgatggaaagttattcgcgatattggggggcattgaagtccatggcgaactatggaaggacataaggaagaacggatcggtcgactcaatgagtgattt

SEQ ID NO: 275175 - DNA, 1236 bp, Cannabis indica
gtacgaatttcattttgttcatcagttatgatcctcgcagcgatttccaaacgtgcctcaaccgggtgaaactgtggcacaatacagacaaaaacaaaaacaaaaacttagaaaatgtaattaactctaatcaacttgacagtagaacaccgaattaaatttaaattacacaacgttaatctcaatcaaacttgcgtagtacattctgaactaactaaacagtggtatacctgatcaactacttcttcctcattagccacagcctccatgtacttcatgacgtatacaccgcaatctcggtcattgtcttgttgaggaagcccgcgatctttcctgtcaattccgaaatccacaaaagtcacattcttcgacctattctcatcaaacaaaaggtccaacgtcgacaactgcaaacgtatacaattagttagattcaatgaagaatgagttcacatcaaacaatgaaactttgcaactttaccatttctttcgtagcgtccacacgatacttctcatccattgcggtgtgtagcgagtccagaaatgagacaaccttggacttcatattaagttcggcaccaaaccaatgtggtgcaccttctagcgtcaacaccggcacaaacatctacaattgaatagaggaacaataaagtcataaataaattcaaattacagaccatatagatattcgacactacaatgaccaatatgcatcgctaacataactcagttttcaaaattacaattaagaacgaccatgtgtatatgatgaagtaccttgacgcattttttgaagttgtcttcgtaaaacagtgttgaccattctcgttctttcgcaatcctcttcacattaaacgaaccgagagttttttgctgcaaaagcattgttcatcttgtcaagtaacagaaattacaaccaaactcaagaagtacaaaatttaaaataagttgtacagcaaagcaattaccgagatgcgagtgggcatgtaccaaacacgaggttggtcaggtaatcggctatcacgttcgtacttgttcattagtatagaaaaacagtcaatgatctgcaacaaaatgaaatatgatttagacatgtacaataaatgatacatatttagtaactactttcacacttacggatccctcaacttctcgcaagggtcgcaacgatgccatgcacctcctatccacttcaaactttcgaaattttgcaagcacatatctgattcaattgta

SEQ ID NO: 275176 - DNA, 581 bp, Cannabis indica
cttgttcttctttagggaaaccatttcttcatccatagcaccatgccatttcttagcatcttttccagaaattgcctcttcataggaatttggctctgacaaacttgtagcacctaggtaagcataggccaagacttcttcccatacatttaacatgtatttctgatttggctttggaattcttcttgccctatcccttgcaagttgatagtcttcaagagcttcagtttctgtatgttgttcagtgtcaggttccacctgattagtgtcaacattcaattctggacccccttgttcttgaatatcaggttccacctgatttgtatcaggttcagggacattgtgttccacctgattggtgccaggtgtttgattttgactcaaaacttggtaatcaacttttgtacctgcattgttaggctgtaaagaagtttctgcactagataaactgttagtaacacaaggaaattcatcttccttaaaaataacatctctactattaatagttttaagaccaggtttagattttacccacaacctgtatcccttagtgccttctggatagcccaaaaatatgcatt

SEQ ID NO: 275177 - DNA, 439 bp, Cannabis indica
gggttggcaggctactatcatcactttgtggagaatttctctcgaatcgctatgcctttgacaaagttaacaagaaaagaaataaagtttatatgggatgatagttgtgaagaagctttcagagaattgaaggaaagattaacttcggcgcctattctcactgttcctaatagtgaggaaccatatgtggtattcactgatgcttcaggtactggattaggaggtgtcctcatgcaaaatggcaaggtggttgcctatgcttctcgacaattgaaaccacatgagaagaattaccctacgcatgacctagaacttgctgcagtaatctttgtcttaaaaatttggagatgttatttatatggcgtaaagtttgagttatactcagatcataagagcttgaaatatcttttactcaaagggacttgaacttgaggcaaag

SEQ ID NO: 275178 - DNA, 621 bp, Cannabis indica
agagggagagaggtctctggcagttgaggaggttttggttagagattttagggtttttttttttttgaggtctctggcagacgaagaagatgaagaagaagaaagaaaaagaaaaagaaaaaaaattattttaaataatatatttttatttttatttttttaaaattaaaataataatttggaccaataatatttcgatacgtggcaattttagaaaagtaaacggctcagttaaaattaggactaacggacaaataaaaaacatgaccttgaggactattgccgctatttttggaggttggggatttatctgtatcaaactgaactttttggagatttttaccgcaaatttatggtttaaataatatcacatgagaacaatatataatattgtatatataaataatatcagttcaaatatcaaatatcagtttaaatttttattttattattttattatacataaataatattttattattttattaaaataaataaaaagtcacacccatgaatttctcataaaccaagaatttagttatataggcacactttatatagaatagatagtgaaaaattaatataccaccagtatagtgaaaaatatatatataccaaaaa

SEQ ID NO: 275179 - DNA, 660 bp, Cannabis indica
tcctatgttttgactcgtgagaaaagacaacttttttgtcagtttgttaaaggaataaagtttcccgatggcttctgttcaaatttaaagagcaaagtttctccagatgagtctaacattattgggttaaaatcccacgattgtcatgtcattatgcagcgagtactagcggttggtgtccgtaaatttctacctcgtgacactgcaacaactattactcagctgtgtaatttttttcgacagttatgctctagaactctaaatgtaaaagatatggaggatgctcaaaataatttaattctgttattgtgcaagatggaattgatttttcctccagctttttttgacataatgatacacttggtattgcatttgcctgaagaagcgatattgggtggcccggtctttatgagatggatgtatccttttgaaaggtacatgaaaaaattgaagaattatgtgggaaataaggcacgtcctgaagggtcaattgcagaaggttatgttgctgatgaggcagtaaccttttgttcaatgtactttaaagggtgtgaaacaagatttaatcggcttgatcgaaatgaagatgcgccttctgtttgtcgctatctctcagtttttaattctcaatctcgtcctttaactagcggacttatcaag

SEQ ID NO: 275180 - DNA, 647 bp, Cannabis indica
agtttgaactatttgcgtggttccttgactttttgaccgttcgatggaaatcggttagtccgtagtcttcctgcattgctctttcttggacgacctacaggtttcttctccactggtacaccgattctcatgttctgcatgtgttctggaagcacccattcatcctcctcgcccacaacattaattgttgcatcgtaagtattcttccacgtctcctttgtgtaatagggggatgacagagcgtagacactgacattctgagtaagcgctgcggcacatgcatggggacaaggaattttcaacaattggaacatgccgcaagtgcatgttctctcaactaagttcacatctccgcctttttcaaagtcagaaccgtcagcacctcttccaacattaaacaattgtgcaccgttacgtaggacacttctacgtctaccatcctcgtgttgctttatcaaatcttcctcaaaatgagttgccaaaggggtaacacacttacttgccttctcaagacggttagcaaaccaattttgtagtgtgaaccttatgaactcaactagagtagttattggatatgcccggaattcttcagtcacgttgttaaggctttctgcagcgttgtttgtcatgatgttgtacctgtctcc

SEQ ID NO: 275181 - DNA, 600 bp, Cannabis indica
gtcttattattttattgattttcataactggttttttaagtaagttttcataactgatgaaactagtttaaattatttttattgtatatcatttatgttttgtttcataatcttcaatgttgttgtgtgacgatattaatttttatttgctattgctttcataatattcattgttgttgtatgatgaaattggtttcgatttattttttatggttttttttgaattaaatttattcctccaatataaatgcaatggaagtcgttgctaaagattttaagtgttcactttgaggagaaagtaaattgatccaagttttaaggattcatctttggtatattgtcatttcttttttatgtatgttcattttttttttcaatttatcttttcataattttatatgtttatttgcatgaaattatttttttaggtattttatgtttgttcaatttcttagttaattatttatagtttttgaaactggttttgtttaatagaaaactggttttttgtaggtgtcttattaatgttcagtttcttagttagctatactaaataattgattttcgtgtttaaatggtaggttttttttttttttaaat

SEQ ID NO: 275182 - DNA, 846 bp, Cannabis indica
cttacatcgttcaagccaaaatttcggagtatgcagttcgaggaaccaagacgaatggtatcgaccggtgaagcactctctcgggtaattgttcccaatctggccgagtacccaattgtgaaaagtcttgagcagcttccgatcaaccactctaagtgggtccgcattcacgagtgtcgaagtagccctagccttcttcttcatttcagtgtactcagcgaaccacctaggccgccttctcttcctccggttctccatgacttctggagctgtctctaacacctgcacctcagaatcctgagtatccccgatgctggtgatattcgtcttctcaggtgtacagaacatgtcatcatcatccggttggtaatcatttgggagaatgaagtcatcttccggtgtccgagcctcctcttccggttgtggctgtggctgtggctgtggctgtgaatctgctgccggccttccaggatcttgcaggagcgtcattatggtcttcaactgatccataatcgctgtttgtcctcttagcagagcggcctgccccctctccacagtctccaaccttgccaaaatggcagggtatactggatcgcgagcctccgaggtgctgggaatggaagctgacgggggaacaggaggaccctgtgacgctgcaagtgggtcaacaccagacccatcaggaactgaagctggagatgggtcaacaccagacccatctggaactgcaggcggtgcacgtggaggagacggtggaggtggtgtagagttttaaatattcgggctgcctccgctcgttcttccaatgtggaggcaagcttttcggcctggcttcgcaaagcatcc

SEQ ID NO: 275183 - DNA, 530 bp, Cannabis indica
ttttttggattttcagccatgaaagattggtttttttttttttttaagaagggagggtttttctaagctttttcacagaggctctcaatgaaagcaccaaattgttaacgcagattttcgttaaccaaatttgagcctcacaaaggtaatttaacacagaaataataaaagtcgtagaagtaaaaatatgaacacaaagttttttacgtggttttgcagttaaaatttagcatagtctacgagtcaatcttattcaaatttctgattgtttttcaggacctttccagtatgagttttttcgtccccctttttgatcttctttgtcactatttataattacatagtggacagttaattacaaagttgattgtaatatgtttacaacaatcatccctaaaatcatgggatttgattacatatcacgtaatgtaaatatggtttatgatttgaaaatcatatagctgtgattttcctgcttttactgggtcaaaatgatcgtgttttaaatcatgtctttaattattattttt

SEQ ID NO: 275184 - DNA, 556 bp, Cannabis indica
aatcctcaaaccaagagaacaatcgaatactttacaaatttccctgttaaccttcattcaccactgtcaatctacctttcctttgtttgatcgacaacagaacccccagtttcaacacttcactgtaagtttctcgcatcccttgctttactgtttgtgtacatggcatgctttacttatctgtttgttttttctgggtttggtatttgaagtttctgggaatgtattcttttgggtttttcacgtaacaggtctagattcaccatctctggtgttagggttactcttgttacgtacttgttgttattttttgcaaaggaccatacgctcttcgtgtactggccttctagggcatagagaagactttgtttttctcgattttctgccctttctttttcttttacgcgcaatgttgccttctgtgagttctttgcacccgacttttgtccaggaaatccttctagggttttctggttgacagatgtccggagggggcctctttccagcggttaggggacccccattcccttttttttgaactagggttgggtatggg

SEQ ID NO: 275185 - DNA, 659 bp, Cannabis indica
gtgtgtgtgtcattaccgttttattataaagaaaagttggttcaatgctttgtcaaccaaattttcaataaaatttgtgatgattacactatagtaaagttcaagttgaaagacactttactttatgcacttgagcaaagtctctatggatggtgttgatttattcaatcaaagtgggggatatatgagatattttgattgattaaataaagtgttacaatgagatgtcacaaattttaatctagtgggggaatgttatatatttgttatttaacaaatataatgaagattaaaatgtggcatattatatattaatatgagattaatatatattatgtgttggaggttatattatatcattatagtataataatacacataaattgtaacaaatgaggagttacaaatctgaaatagattgtaacctaaggatcaaaaattgataaatatgtaattatgtgagttgttacatatgggagttatggaattaatgggataagtttctagctgttagaaactgttacaatactcaattatatcatttaaatgggtattgggacgttggaaaatgatttaactcggagaggagttacattttgagttctcaggaaacagttgtttaatagttgtttgtatgttgttttatggttgttttcgaa

SEQ ID NO: 275186 - DNA, 520 bp, Cannabis indica
atgcttaacaacatttcaatgttgctgttctagatttgtctgatacctgctcacaattcctactgcataacagatgtcgggtctagtgcataacattgcatacattagacttccaactgttgaagcataaggaacccttctcatgtcctctatctcttgaggatcattaggatagtgttccttagatagacggacaccaaatctagaaggcattgttgcccttttggtgtttgtcattgagaatatctctaaaaccttatctatgtaagttgtttgagagagagcaagggatctgttcttccggtttttgataatctgaataccgagaacatatgcagcttcacccaaatccttcatttcgaattaagtgtcaagccattccttgatttcagtcattttctttatattgttgccaataatcaaaatgtcataaacataaaggaccaggaagactaccacttggttttcgttgagttggcaaacacaaggttcatcttcattctgaagaaagtcgtacgtc

SEQ ID NO: 275187 - DNA, 556 bp, Cannabis indica
ttttatataaatatatgggtaaatgccattttggatcatgtattttgtaaaaattactaattggaccgtctgttttgttaaatgacaaaattgaccctgtattttctaaaattatacaatcggatcctgaactgattttttgtcaaaataaaacttaataataatctgatctagtgatgttataacaaaactgattacattttctgtatctgtttgtgttagaaattatttaatgaagatcatggaaggtagcaattatggcaggggctacaagatctttctagtactgatccttggctagtagtaggagattttaatgatattcttaataaagatgagcgcataggtgaaagagtaaggcatagtaattcgaatgcctttgctaattgtgtttcttgcagtcaacttaaagatattaaatactcgggaagctacttcacctggagtaataagcagtgtgcaacatatagaatttattccaagattgacagggtcttagctaatgaagcttggatatagttttttccaactacagaagcaattttcctcacagaag

SEQ ID NO: 275188 - DNA, 1511 bp, Cannabis indica
gaagttttgcatgaggagttggaggtggaccccttggtgtatgaattgaagttagaagttctttacatgtacatgaaaggcactaagtttccacctgaggttttagtgaaagatagtcaactacgagtgttcttgagcatgaaggcaaaaatgagtgtggacaacttgttgccactatttgtgactaaggtgaagaagaatgtgaatttggagcagactccccgaaatgtaacccctagaagtgttgttgggacctttgtcccagaaactgatctgggggttggtttggacgagcaagttggcactaatgtagatgatgagagagtgggtatcgaatttcatcattcagatgagttcgatgctcccttttacaacaatgatcctgtggttgatttgggtgtggatgatgatgtggctacagatgtacctcccctgaggatggaactaactccaagcaaccaagtagagcgacaaagaagacccccccgtagtgagaatcgccaaacaccaggaactagtagcagtcggccaggtccttctgatagtgctcctgtatctgaatttgaagtttctactaaattcaaacctcttgtgtggacaagggaagacatagaggaaaataatgtgtatacaacatctcttagtggtacgccttcaggggagatatatcttggcaagttgtacaaaaacaaggaagaattgaagaatgtagtgggaaggtatgcactgaaaaataattttgagtggatggtaagtaagtctggcactgatgtgttttacgttacttgtaaggatgaaaattgtaaatggagattaagggggaagaagaaggcactttgtgacatgtttgaggttactgtgtttcacaacgaacacacatgtaacttggattctagacattctgatcaccggcaagcagcaccgtgggtcattggtcacattattaagaacaagtacacatcagatggatctaactacaaggcaaaagacatacagagggatatgtttgatgaatatggcatcaagatgagttatgagaaagcttggagatgtagagagaaggcagttatgtacaagaggggtactccagcagaatcttatacgaaattatatggttacttctacatgctggaacagaagaatccaggcactattactgacattgtcagcgaggataaccggttcaagtactgtttctggtcactcgatgcttgtaggaagggatttaagttttgtcgtcctgtgattagtatcgacggaacattcttgaagacgaagtatggaggaacactgttagttgctgttgcgtacgatgcaaacaaccaattgtttccggtagcctttgcaattgttgacagtgagaatcatgactcttggaagtatttcttgcggaagttgaaggaagccattggtgaggttgaaaatcttatgttcatatcggataggcatcaaagcattgaacatgctgttgatgttgttttcccagaagcatgccactgtgcatgcttcaa

SEQ ID NO: 275189 - DNA, 334 bp, Cannabis indica
gctaactgttgcgatattttgcacacgcaagtgtacgtatcgtttaaagtagtagactcaccaggagtgaggtcgatcccacagggagtgtagttaagtacgttaaaattaaacttttacttctatttggttaaataaaaataaagaaagaattaagaataagaaactagtaagaaacaattattcaagaaaattgaaagttaataaaaactagggcttcgatttcaattgtttctattgaatatggcctaatatgattattttcctaatattaatttctatgcaatagcaggtttactaaggtaatttatagtcttctcagatatataaatct

SEQ ID NO: 275190 - DNA, 577 bp, Cannabis indica
tgcggcaccttgacttctctaagccaaggttagccttccaaccatccgagtaacaatgggctcatttttcgcgcgactgtgtgcctcgtgcacactttcaactctcgaacaactcccgctgagtcatgctcgcaagcatccatgagtgcatccatgcatcgaagctctctagccaagatactcgcatcgtccataggttctcactatgataagacaaatcccaacaccgacgctcaccttgtcactcgtgaccaaggtagcatgtgtggcaagatgccaacaccaagccaacgtgccaacgcttttatcatgccccattcgatacggttcgaacagtctccctcgtcgcccaaggactcccatacgtccatggaccaatcctcaaggcgcaatgcctccacgcatgttggcaggccctctagacctctatccctttccagcatggtgcatccatcccatgcgtgcatgcaagctagcccaggaatgactacctgtatcatcccgtgttgagactcgtggccaaggcgcaccacaatgtctcttggaggtgttgggttttttgccctaaataaaacac

SEQ ID NO: 275191 - DNA, 710 bp, Cannabis indica
tcaaggtgatcccaaatttctttggcatccttagtgtcggtgtataggtcataaagcctatccgagagtgagttgaggatgtgtcctctacatagaagattgtcatcttctctcttcttcctttgtgccttgacctcatcggtatccttgtcggtaggtgcgggtaaggctccaaggtggactcaagaatataggcaatcttgagtgtggttaggaggaacctcaccttgtcttgccacctagtgaaattggtgccatcaaagcggtccaatctcaccaagtcttggttcatcatcttgatagtttctccttccattgaaaacaaaagataatcttcttgattgttagaaataatagagagattacaatggaagaataaaataagatgaataaaagactaagacaattacaactctaaacaaaatattacaaggacaatatattaaataaagagttacaatcccaaagcacaaaatacaaataaaagaaaagagttacaactcaaaactcaaagatacaagtaaatgtaaattatataaaagcatatatataatagtgtatatatatgatatagaatatatataatagagtatatatataatagaatatatacatatatatgatatagaatatatataatagagtatatatatatgatatagaatatatatattgtaagaccctaactagcataggcgtattacgtgatt

SEQ ID NO: 275192 - DNA, 463 bp, Cannabis indica
catatttaccaatatcagatacgtcgcacctgcgtttatcaaaccaaaaggcattactttataacaatacaaacctcgatctgtaattaacgaggtatgctcttgatctggttcatacatcaggatttgattatatcccgagtatgcatccatgaagctgagaagttcatgacctgcagtggcatcaacaagctagtcaatgctaggaagtgggaagctgtctttgggacaggctttatttaaatctgtaaagtcaacgcatgtgcgccatgagtcgttaggcttgggcacgagtacgggatttgctaaccaatcagggtagaacgactcccttatgaagccgcatgctaggacgcgatcgacttcttcctttagcacttggtacctcgcggggtccattttgcggtgcttctgtcggaacctcacactccggggtcaatgttcaagcgatgacacatgacct

SEQ ID NO: 275193 - DNA, 650 bp, Cannabis indica
tcccggttctgggtcaccaaccggtcgaccggttggtacagaccacccagaaccggaattccggttcatctgctgggaaccaaaaattatcccccttaattcaattcaatcccaaactttaccaaactctccagtatacctatacaatgcatacacaatgatttccaggcagtaattcacagaataaaccattacaactcaagttgccattaatgagtaaagctttgaactttaaacctaaaattgcataaaaaccatctacaccattaaaaccagcagctagaacttagaatcaactcaactaaaccctaaaattcgaaccttaaacaccttgaaacctaacagccacttactcccaaaatcacatgctcaaactaagtaaaaagctcaaaattaacataagcaagagttctagggcttaccttagataaaaccactttgaatcctagcttagattcaaggaaatggaagaaaaaattcaggtttgatccttggtttgcctcagccgaatagaaagagagagagagttcaagaggaaaatgctttcttctaatttcttttctttgattttccaaattgggaaaaggattaactaacccttggctgaaagtattcttgctaggtgtcaatcaaccaaaaagccacctatc

SEQ ID NO: 275194 - DNA, 707 bp, Cannabis indica
agccacatgcacattttcggatgtacgtgttatgttctgaatgatcgtgatcacttggccaagtttgatcccaggagtgatgaagggacatttctggggtactccaccaacagtcgtgcttacagagtattcaacaaaaggactctctctgtggtcgaatcaatgaacgtgaaatttgatgacttagaaggacatgaagaagtgtgggtcgaagatgatgcacctgtcctctctggccctagaccagtcatcactagaccgcctcaagtgtatcctgacactcctacagagtctctaaatacagaaccaggtgtatcaggtgacaatcaagcaattgccagtgatccaggaagaggaaatgaagttgatagtgccctgaccaaagaaccccaacaagccaaattatataaaaacggacccccatcctgggttgagaaagctcatcctcaggccactgtcataggaaatccgaatgacaccatggtcactagacgaaaactgcagaatttgttagcctttgcttgctatctgtcacaaattgagcccaaaagtgtccgagatgctctgttggatgagttctggttggctgcaatgcaggatgaaatgggaaattttaaaagacttggtgtatggataatggtccctcggccagatggtgcgaatgttatagggacaaaatggctttttaaaaacaagtctgatgaatt

SEQ ID NO: 275195 - DNA, 578 bp, Cannabis indica
ataaaatgaatatattgaatagtagttttttttttttttaagaatgtaaaagctttatttatcataaaattaatgtaaatatgaattaacagataattaattaaaataatttagaaaatgaataaaaatttagaaaaagaaaaatagagaaaataaaaaaaattaagctctttgaaaactcaaaggattacatcacctatcataacattagaattgtataattatataaatataaatatatagatagatatataaatatagctatatagagaactatttagggtgtgagttataaaaatgaaaaaccaatatattaatcatatttatgaataatttgatgatatttttttattttataggtagttatttaggatgtgagttatcaaaaatgaaaagacattatattaatatcctattaatgaatgatttaataatttatttaaataaattaataaaaaataagagaaaacaaagaataaaaaagaaaagctcatatatgatgccacatatcctctttcaaaaccttcctctatatatatatatatactaaaaagctacgtgccaggcacgtatactaa

SEQ ID NO: 275196 - DNA, 757 bp, Cannabis indica
aacttcggacttcgctgtctccgtgggctgcgtctccttgggcttcggcccctggagttcttccctcggggactgcgagatcatgaacgcggtattggtgatttgcgcttatccttgcccttctccaactctgccagagaattctcgattctcttttggggttcggccatggcgaagacttcgagtaaggattctggccttcaagcttgtaactccttctagaagtcggtcctcggcaaaatacctgttatcagcatacaaacaagcaaagactcgggagccttctcaacttttgttacctctgaattaaaccgtttaaaatagttttgtaaagactcaccgggttcttgcttgatattggccaaagtcgtataaggcggcctgtaggtcatcgtagcctggaaatgtgtgaggaataagtcgacgaaggtttcccatgtcgatattgatgcctcaggcaattgggtaaaccaatcgtgggcgttctcctcgagtgttgctgcaagaatgcggcattttgcaagctgtggtacttgatccacctccattctagtattgaatttttcaagataatctatagggttagaagtacctttatactttagggattcggatagacgaaatcccttggcaagttgggcttgtcgcacttctgtagtgaagggcgaggtaccatgcaacttgtatatgggctttcgttgctgctcgagcattttcaaagcttgcagaagcatgctttggtcaatccctccagtcg

SEQ ID NO: 275197 - DNA, 486 bp, Cannabis indica
atgagtttatagcatagaaagaaggaccttgtttctttgctagaaacttagggcattggggttccagtggcccttttcattgcaatagaagcattttccttttggcttgtctcttggagtagcagcctttttcttttaaactgttttcacagcttgaacaggcttcttgctattcttccacttcttcttgttgttgagtttggaagtagaggcaatgtttgcctcagccttagccgccccattagcgttgctagaactaggagctttagatcctcctttctgtggtcctccaataaaattttcaaatgtttgaaggttattgattaactcgtgaaagtcaagctccgacttgttcatgacatagtttgaagtgaagggcagaaaggctggagtcagactgtttaagatcaaactcacttgagttgtctgatctataacagctccatgattctcagcttcctggaagtaactagtcatctggagaag

SEQ ID NO: 275198 - DNA, 579 bp, Cannabis indica
acaaaagcgcttcagacaacagcatgtccgagcatcctcggtcaaatggggctgcttgcagcctctttgctcggcgtttcccttggatccgcgcgcgcaggggtatgcattgcacacccctatgcctcaaagcttgttttcgtcacaacttttgtttcaaaaatcgtttttcattgaaacaaaagccaaattttggtagaattttgtgtggagtctaaattttcaattaaaaatctgattgtcagaataaaattaatttttattaattttttaattaattaaaattagtttctgatattagtgggctttgaattttaaaaatctgatttctcacaaaggagccttatggttaattttgaaattttagattattttatttattttaattataagatcagatattattttttttattaaattttaaatgatcttactttgatattaaaatattatctttttaaaataatttttttttcaaatttcaaagtttgctaaccatatcatatatttttcaaattagttattttcaaagtatattttattaattaaaattataagattaggaatatgttaggttta

SEQ ID NO: 275199 - DNA, 511 bp, Cannabis indica
gaaagagggtttggaaccctaatgcctagtggggagttggttatctctaataggcgcattatgtctatgccggttaggatcgaagatagggagttaagcgctgaccttatagaactggaattaactgagtttaacattatactggggatggattttctgtctaagtattcggccagtataaattgtaagcggaaaatggtgactttccagccagaaggtgaagatccatttgtttatgttggatcagttcaggggtctcggatcccagttatttctatactgagggctagagatttactataaagtggctgtgtaggatttctagcagtggtgattgactccagcagacccgaaacatttgggcttgaggcagtcagggtggtaagtgactttcttgatgtgtttcccgaggagttgtcgggatttttgccggaatgagaaattgattttgtaattgatatggcacctagagtcgaacctgtttctaaagctccatatagaatggctccag

SEQ ID NO: 275200 - DNA, 564 bp, Cannabis indica
accccctttcagcagtaataggctagtccacttggagtgttactggtctcaatgcttgaggtgagttttccagagttatgttctccaagagttcactcctcaagtgagtttttagaatttgagagagggagctcaagagtatgatcttgtgagtatcaatttcagggtccctttacaagtgatttcaccccctttatatagatattcatctaggatttaaaatcccttaaacataggcatgccctcccgtaactatagttgggttaggttcaagatacaaaataataataaaataattatttacaaaataaatatcttttcacttatcattttttgactatatttttggagcagctctaacagcactcgtccctcgtatttagcggacacggacgatcatgggtacctgaggggagctgattgggtcggttcgtgcccatcaggtccttgagataatttgacagctgaggagccccttgcaccttagcacctgacggagttgggagcttagtgcccccaaaatgctcctccttggccaatgtgctcctccatggccaatgatct

SEQ ID NO: 275201 - DNA, 465 bp, Cannabis indica
tttttaccctcaatgtattttatccttaaaatacttagcttcctataaacgatatttcagtatactaatataatcactgaaataagagctcttctatttatctctattaagccaagctcgaaggaaatcatcatttcacatctatgtccagatagaagttatagattccatatctatgtttagcgctccctctcgattgtactatcatgttcctaagctgtatgtgtgacccgaaccaaatggtaggctttgactaacaactgaaagaacacaaataacactctcgagatcgaacctaaccatgtcaagattaagatctttagatataagatcaaccaataatattgacttagaaagataaaacggtaagattataatatctttaccaagatcaatatcgatctcaatccaatataactccttacatccgatactagcatactttgccaatgttctggaaagaac

SEQ ID NO: 275202 - DNA, 1038 bp, Cannabis indica
gtacaatttctattaagtccagaacatatagttattcacaattacagtgatgtcaacacagtggaagataattgtgattatatgcttcaaaagttaatgtcccatgattcatcagtgcactggatttacactgatgtgatagtcaacgataaagcttacttacaccttggataagtgttaagctcttttcagaatattggcaaagtatgctagtattggatgtatggagtatacattagactgggatcgatattgatcttggtaaagatattgtaatcttatcgttgtatctttctaagtcaatatcactggttgatcttagatcaaaagatcttaatcctgacatggttaggtttgatctcaagagtgttgtttggattctttaagttgttagtcaaaccctaccatttggtttgggtcacacgtacagcttgggcacatgatagtacaattgagtgggaacgttaaacatagatatggaatatatagcttctatctggacatagaagtgaaatgatgatttccttcgagcttggctcgatcctttatgctgtctagcatggttgacaccttgaaaacaaggtttgcaaacactctcacggctgcagaaatcatgaaccagttaactgaactgttcaggatggcatcaattcaagctctctttgaggcgactaagaatttcatcaatgcacagatgaaacctcattagagtgtgcgtgatcaccttctccagatgactagttacttccaggaacctgagaatcatggagctgttatagatcaaacaactcaagtgagtttgatcttgaacagtttgactccagcctttctacccttcacttcaaattatgtcatgaacaagttgcagcttgactttcacgagttgatcaacaaccttcacacttgaaaatttgattggaggaccacagaaaggaggagctaaagctcctaattctaagactgctaatggtgcggctaaggctgaggcaaacattgcctccacttcaaaacccaacaagaagaagaagtggaagaata

SEQ ID NO: 275203 - DNA, 656 bp, Cannabis indica
acctagacacaaacctggacacagactcggacctaaactcaaacccacaccttgcatcagacccaaagctagacaagacccgaacccaaactcgaaccaagaccaggatcagaactaaggacttagaccaagaactgaatcaaaactcagatttggattggaatttgggactcggacccaacatagaccaagacccaagacgggaacccacacccgaagcctgatctggacctagactgaaatccagacccgaagcaaaactcagacgaggactcgaactaggaaagagacctagtttatgacagggactcgaacttgaacctaggacccagctcgtgaccaacactaggacccgagattgggttccggatctggacccagggcttggacaaaacccgtagtcagtttctggatttgggacccagccctggacacgaaccctgacgaggacccggacctaaacaatatcccaaacccaaaagtggacaagaacccgtaccacctaaaattggaaccaaaacttgaagttgaccgggactggaactagcacttgcacttggaatcaaaactgaaattggacctagatctagagccgtaacaggacaaggacccgaactccaaatcggacccggatccccacccaaacctggactcgg

SEQ ID NO: 275204 - DNA, 459 bp, Cannabis indica
gtttaggatgccctcgacccggtggggagaccatatgaaggaatactatttttccaacttaggagatttcctaggtcggtcccggatgggttctggccctccggagcccgttcccttagacccttcggcttacatttcttccagctggttccgtccttcggacagctatctcggagacgatgctgccagcgttaaaattcggaactttgctagggccgaattagagagtcagggtaggactagcttgattgctttattcgagtgtttactgtttcccatggatattctaacacttgccttttttcttttgttgtagcaggtacttccatggatgccattttggccgagcttgccggggctcacactcctgatgctccccttcccttaacttcctcccagatggccacccccttgaaagcttcttccagtgcccctccagacactattgacttagtggat

SEQ ID NO: 275205 - DNA, 697 bp, Cannabis indica
tctgtccgacaccttgaaggcggaggtggacttggccaagaaggaagctgaggaagccaaggcggaagctggagctgttcggttggagttgggcgaggccaacaagaagctgttcgctgccgagaagaagatctccatgataacaaaggatctcgaagctgctgaccgttttgaggagaccattgagatcttatctactgaagtaaacagttttcaggatgagaggacttctctccgagtagttcttcttcggatgaaggaggagaaggacgcaagggtgggggagcttacgaccgaagtggacaggttgaaggagaagtcaattccttggagacagccggtctcgagctcttctttgatttttggaaggctgatccctgggccaactttgactacttgggcgaggctaaggacatgtaccttgaatactgcatggcccaagtggcttatggtgggagtgaggcggctgcttcaacgtccggccaagctgcttcaaccttcggtcaggctgctgatgcttctcctattcaaacaacagatcctcctgctccagttggcccagaagaaccgaaccaagagcctgggactccagttgtttaaacatttcctttatctctctcttttttttttatatatcttattcagccttcgggccttttctaagacatctcgaccgcccaagcggtctttaaacttg

SEQ ID NO: 275206 - DNA, 833 bp, Cannabis indica
agatccttcaaagaataaaaaatatcataattaatagtaatgtcgaagaatatcatttgcattgaaactataaaattaattttagtttgctaggaaggtaactttagtgaccttctaaggtgcacttcgtttccaacatctcaaaaattatttgaattttatttttaatgcattaaatttttttaatttttttaaaaatttacagaattttttaaataattaagttatatacttttatataaaataaaattatttaaatatcgaaaataaccatataatataatatataatttttttaaaaaaaaaattgtgaaaagtatataatttgttataaccatataattcttttttttataatatatattgtgaaaagtatttttttttaaaaaaaataaccatataatattttatatcatcaatctatttataaattatttaataattctaatattaattaatttatataccaaaaaaaaatagatataaatttttttaactaaaatgaaaatttttaatgaatatttttaattgttaaaaaaataaaataaaggaaatttttgtctaaatttatgttgcattctttgaaaaagattaaaattaaatttactaattaccacacataatgatgtaatattaatctttggacaaactaggagcatcttcaaggagacacctaaatttttggtgttacacttatctaccaaatttggtgtcaaaaattatttctactccaaccacaacaccaaaaattacactaaaaaaatatttcttattattatattaattttttaataaaataaaaaaataatatcatattaattaacaaaaataat

SEQ ID NO: 275207 - DNA, 311 bp, Cannabis indica
tttgaagaagaaaagagagggtagagggctcggctatgactatagattaggaggctcaatttttctgaagataagaaatttcatccactttaagtgtgagccctcactatctatttataggtaaccacctaggtttgggatagatttaattagcattaaaataatagaaaaataaatggcaaaatccatgcatagtggccgaccatgggttggataatgggcccactttacaattttgccattttgtcattttcctatcttattttctcaaaaacgctaattttccaatttaaccacttaaatgccaattc

SEQ ID NO: 275208 - DNA, 782 bp, Cannabis indica
atgtagtatatttggagtagatttcagcaatattatgggtatatttagcgatatttgggcgacattgggcgatgtttgtgcgatttagtttatatggagtatgttgtgcgatttcagcaacattaagcgatgtttgggcgacgtttgtgcgatgttacctgacagggacttgattttttatttgttttgttctgcattgttttagcgatattatgcgacctatgtgcgatatttatgcgattctttttgtgagtggcctattttttgctgcctttatgcgattgtaggcgatgtttgtgcgattattatgcgataaaacctaattaatctttctaaatgcagatggctcctgaacttattctcccattgtcagaccactttccagggcgtataacatacagaggcaacggatactttgcttcaataaaggccaaatttgaagcttttaacttgactcagaaggtgaaggagacgccttttggtgtgttttggaatgccagtgaattgaaattcagtggggttattgtccatcagttgttactaaggaagaagaaagtgagtgaggccaaaaatgatgaagtgtggttttacgtgggtaaaaccgaagctagatttggacggtctgagttcggtttgatcacgggcttaaagatgagcggtggtccttcgtcagaagaattgactgcacagtgtgattctgatcggatcttgcgagactatctcaacaactcaaaaagggtgacctttaaaaccctttggctagcgtttgaggcatgcgatgt

SEQ ID NO: 275209 - DNA, 599 bp, Cannabis indica
ccattcatgtggatagaaataacttatcaaaattatgagaataagatagaagagctcttgcatagtctattcgaatgacttgagccaagattcttaatcctcataacattttatggtatcttaatttgattacttaatctctagcaagtatttttcacttcaaatactagtctgctatgttgatgatttagtcttaaaagaaacttatagtttcagactaatacaataagtcacaactagataaccctccaaacaataagaggttaaaagtattatttaaccagacatctactattgagtgggagctatctgagatgtaatcaaataaggaacgttagaagatattcaagaaagatttatgaaagtgatctatatgttagatattaaggaactgtatatcagttatccttatatctaccccaactcattcaagattttgagatggtggttactctgggggtggaggagttattctataataattcaagctctaccagagaagatttataactttgaaaattcaaaattaccagaaagttattttactgaagaaaattctacactgtattatctcaattccaaattttaaaatatgagag

SEQ ID NO: 275210 - DNA, 661 bp, Cannabis indica
cagcatgttgtttgaagcttgttttaaggttgctcaaaatgtggtaaccgcagtaactgtgtgcaatttctggatagatttctcttgctgctttgatgaggctttcattcctgtctgaaattaggcattggtgttcccggaccccatacgcttctttaaattttttgaagaaccatttccaagattggtcattctcagaatctgcaacacaaaacgctagtggaaaaatatgacctgctgcatcttgtgtgcatgcgcacaacaaagttcccccataagctactttgaggaatgttccgtccacaacaactattggtctacatgctccccacccttttatggatgcgtccaacgccatgaaaacaaagagcaagttgtttgtcttctgttgttttaagatccacaactgatcctgggtttgttttttccaccatgtgtaagaaactcggtattaggctgtatgagttgttgtcgagtgaatttcgcaacaccaaaatatattatttaattaatataaaaagagaattttcagagaaacgacaagtgcgagtattcgacctagaatggtgagtactcgactgggaatgcgagaacaatcaacaaagctggaaaatatcaataagacaaagaattatagtggttcagtcagattgtgatctgc

SEQ ID NO: 275211 - DNA, 619 bp, Cannabis indica
gtagattgatgaattgtgtacgtttttccaactcagacttagatacaaattcacgacccctacttaatacgccatcttctacgatatatatatatatgtatatgtatatgagtgagattaattaataattagtgatgaaacttatttaattactcttatggcttataatacgtatttattatatgtggatggatcaaaagatgaaaataaatgaatatgtacgtactagcttagtgtgtttatatagtcaaatatatcataataatcctaatcctaatataattataacatataataataataatctttaaccctaattatattttagtgaaacgagtactctcctctaatatttgatttttttttttttaaaaaaaaaaaggaaattatatatcagtaaggaataaatcataaataaaaagatattattctctctctttcttttttttttttaatttcccagaaatctctcactaataattataatatttatattgactgccacatccactatcttatcttctatcagaattataatatttcttcattatatgatatatacaagaattatacgatagatagaagatccatctgtatatagatatcatcatctacattc

SEQ ID NO: 275212 - DNA, 654 bp, Cannabis indica
ctagattgatcacatgggtaagtttagaaccctatttcatagtggggaatattttagagaaaataaattatcgggattgagcggggttatggattttgaccattttacccctagctttgaaaataccctagttttaagtctaagggcaatttagtcatttgatctatttgaggttaggtggctggttattttggtgacacctagcacccctttttctcagccaagataagttaaatatattgcttaacttaattaaaaagaagaaaagaaattggaaaattagaaattggtgagaagttctttcttctctctctctctcttcgaaggcagcaagaatcaagggggaaggggctgggatttttctgtgttttcagccatagattcaaggggaaacaacctaaggtaagcttcaatggaactcttctttagttttcaagttttaagcttaggttgaaggtgtgaaattgaatttctggggctgttaggttttaaaatgtttagggttcgaattctagagttattttgagttgatttaagtccctagttgctggttttgatgcttgataatggttctaagcaagcttgagttttggaaactcaagctttgagctttaatggcataaattgaattattggtttgttctgtgatttgtt

SEQ ID NO: 275213 - DNA, 787 bp, Cannabis indica
acaacctgatagacaacgaagaaattaggatccttctctgcgagacaatcaagaaatcccagagccccttctgagtccgtctctatcttctcttctcgcttcgcaccagcaaccctgttgtacacatctcgaagttgacatggcattttctcgtaacctccactttgcaaagcaacatgagacattatgttggcagttttaattcctacggagttcatcgacctaacttgggcaagcaacccattggagacaactctatatgatctcaaaaattgtacctcacttgatgaagccagctcgtgattgtgcattgtgctgaactctttgcatttccaagtgttagacggttgtgtgagtaaaatacgcaatgctgcctgacatccggttctagtgacatcatgaggtcttttttttcttggtgtgtccggtgatgcgatttttttcgaaccctctgaacaacaaacccacctccgcattacaatgaccccatgagaacgtcgtacatcgtctttccttgtgccgaaacccatccgtttcgcatacatttcgtagaatgcttcccatttttccagtttgtcgagactcttgcctagcacgtcctgtatctcaatctcattcactggttttatgatgtttagctctgctgtgatggtttcccattcataagtgtgttcgtcattcatgttggcttgttattgatttgtaagaattgtagatgaggagtaaggtgtagagggtgctgaggggattgaaattagattttgtgagtataaaaggctgagataat

SEQ ID NO: 275214 - DNA, 517 bp, Cannabis indica
aaggatttcctcgattttgcgttattgtatttattgacgacatcattgtctactctcaatcagaagaggagcacgagcaacatctccggatggttctacagcgacttcgagaacataagtatatgccaaattcaagaagtgcaaattttggctgtcacaggtgtcttttctagggcacattgttagtgaagaagggatcaaagtggatccaggaaagatagaatccgtcagggattggccaagaccgaaaacagtaactgaagttagaagtttcttgggtctggcgggctactattgttggtttgttgaaggcttttctaaaatttcaacacccttaaccgagctcaccaaaaagaatcagcgttttatatggtcagataaatgtgaggctagttttcaggagctgaaacagaggttgattacaactccagtgctagctttgccttctgacaaagaaaagttcgtggtttattgtgacgcatccagacagggtctgggtgttggatatattttacca

SEQ ID NO: 275215 - DNA, 680 bp, Cannabis indica
ctagccgtaccgatgtgatactatcaaatagtacggtactatcaaccataatatcatcctatactcggtacgctagtcatactctagtcgtaccgatgtgatactatcggatagtacgaaagccaacatacatatctaatgtaatctaacatgcttactaaaatgcacgctaaacatgtaaatacatatgcatactgttatactaatcttacctcgattccgaattcaggtgtaccggtcaacctgagtggaacaatctactcagcaaattacaggctcctaaatcacatcaatcacaacactgataagcgacacgctaaatcacttcccgaagacttaaacttgaaactaaaagtttcccgatgaataacatggaaataccctaaataacacaaaaatgggaaaaactagggttcccaaaatttccccaaccggtagaccggctcctcaaacggaattccagttccgagaaaaattcctggaagccaaccggaattccagttcctacaggcctctctgaaccggaattccagttcagtgcaggaatgactaaaaatttcataactcgaccaaatcaaccccaaaccaattaaaactttccagacctgttctatacaccttagagaacattttcaaggcaataaaacattcacccaaacacagaatcaaaacttgccatt

SEQ ID NO: 275216 - DNA, 404 bp, Cannabis indica
tacctaagtttttttttttatgtttttgtacatacaaaagtagcatcaggtgaccatcggaccaccatcggactaccatcggaccccatcggactaccaattaatttttttttttttttttatgtttttgcactaaaaaaaagtatggaaaatttgagaggggtatttttgggttttagataaagtggtcatatattttcaatgatgatatgtattagtttagaaataaaatattaggtatatgtaagtatagaaaatcaaatttcccttataaaatactaaagataacagatttgcaaagaagagtgaataaattattttgtatatgaggatagaaacagggccagccccaactattttgggaggttcgtacaaaattttaaaattgagctctttaaaaaaaa

SEQ ID NO: 275217 - DNA, 884 bp, Cannabis indica
agagattaagaactgtaagaattagagaggatttttacgtggttgggcgttaatgagccttagtccacgagtctgtgtatttatgagtgtattaaatacagagaatgttcttggtgagtatttactcttcttgcacttatgcaacccaaaattctcgaccccatttaatgagctttgagggggtatttatagtatttttggtggggtgattcccaggattatagtacatgtatttctgtaaaaatccataaagttgggtattcccaatgaatataccatgggtaatgcatggtcaaatccctaggtgctgtagggcttttatgtggaatgtccttattgtcttttgactgacgtgactcttcgcagtgtagccgtcaatagacttacgtgatcgtgacttcgtaggtgcagatcggggttcgtgtcgtcagactttattgcgtgtggtagtctcaacacgtttcctcccatgcggcattaaatgcgaggtgactgctcgggagaagcctgacacctcgcggagatgctttgatgttgcttaggccttcgggagcacagggggcttcgtatgccttctccaggaggcagctcccagatgttacccttcttaatgaagacttagcaattaactcgaatgttaaactcttttgatccacgtgtccctatccggttggtccacgtatattgggcaaaatcaggggcaacatttaccccccaagccttgtttatttgaaaaatgaatcaacgcttgttcgagtgcctccggttgactcctcagtttcctggcacgtgctttgggcgcgtgaaggtgtatttaatgatcaccattaatgcagcgattcactttttgcaggcattgattcgtttcatgcccattgattgat

SEQ ID NO: 275218 - DNA, 563 bp, Cannabis indica
gtggttttgtcgtctgtagtaatcatcaagtcatgttaatcttcacattcaatccatctaaatacttttccttttactgaaattggttggcacaattcccgaggcgaacctcgccaaccgatcaaactgcgttgtgtactcagtaacactcatattttctttctaggtcaagtgggtgaactcttttctcttggcacttctgacgatctcattgtagtacttggcattgaaaagttcctggaacttttcccaggtcatcgctgtgacatcgtgtatcatggacaccatgtcccaccatactaatgtgccctcttaaaattgaaaagtggcacagatcactctatcattcccggtgacacccatgaaattcaaaatctttgtaatcactgttagccactgctcgactttcataacgtccagacctcccagaaaaaccgaaggtgcctgcttatggaacctttcatacagaggttccatccgattcaccgcgaccactggttcgacttggacaacaaggccaggtgccactggaatttctggtacaggcactgcaggagtaccct

SEQ ID NO: 275219 - DNA, 438 bp, Cannabis indica
tattttacatgttctttgatttgttagttaagtctacttttgaacagtcaaggtgatacgtacatttttggaacatgatagtataattgagtgggagcgctaacataaatatggagtctataacttctataggtatttagaagtgaaataatgatatccttcgagcttggctaaacagagataaatgattgagatctcataccacttcgctgaaatatcatttatacggagctaagtgttttaaagataaaatacattgaatgtttaacggtaattgattttgattaatcaattataattaatagtgtatctatatcggggaacatatagagtgttctatatgactgagagtgcaattccaagttcgacttattggaagctcggttatataggcccatggtttgcatactagttcagaccacactgcttgtaagactc

SEQ ID NO: 275220 - DNA, 519 bp, Cannabis indica
ctcactttcttacgggtgcgaggccatgttgccagttgagattggggtaggttccctacgcagagatgttttcaacatctcgcagaacaacgagaaacagctattctgccttgatcttctggaggaaaagcgtgatcaagcgcacttaaaaaatgcggcttaccagcagcgaactgcaagatactttaactccaaggtgaaagtaaaagtcctgcgagcaggagacttagtccttagaagggtaatgccaaataccaaaaacccatcacatggggtctttggggataattgggaaggaccatatctcatcacagaaaaaattggtgatgccacgtaccgactcgcaacactcgatggaactgcgattccacgagcttggaatggcgagagtttaaaattatattatcaatagtactcgcattattaaactatgttcactcttgtacttatacttagatatttttcataaaaaaaaaaatcctaagtataggggggtatatatgccagaatgtactattg

SEQ ID NO: 275221 - DNA, 467 bp, Cannabis indica
tgctcaataatgctaaatgttatctagggttcagacctattatatttttcgttttcagaaaaaacaagtttcagtaaagtgatgatatctctcttgatattgatccatttttagagatttttgtatcgttggaaagcttattcgatgatctaaaatttttatcaagaaactaataaccaattcggtgttcttctatgtcgaaaattatcatctttctgctattgttgtaattcgttttctttatatttccagaaaaagtactttcacttaaaatacaataactctctcaattctcatccatttttaatgatctatatgtggttttaaagcttattcaatttcccataagttttatgaagaaaagttttgttaattcgaagtcatactatgtcaaaaagttagtttttttcaatatcatgtgattcgtttctagaatcttgttcttgcaaaactgttttggtaaaatt

SEQ ID NO: 275222 - DNA, 1118 bp, Cannabis indica
catcgtcaatgcccgaggaattgaagccaatccagaaaagattaaagccctcctggatattaattcgccaacaaaaaccaaagaagtgcaaagcttaactggtcggatcgccgcactcagcagattcgtgtcaaaatcaacagacaaatgtgtcccattcttcaacatcctgcgaggaaacaaacagttcgagtggacagaagaatgtgaaagagctttccaagagctaaaggcacaacttgcaaaacctcccatactttcaaaacctctggacggcgaggaactgggaatatacttagctgtcacggaacatgccgtgagtgccgtgctgatcagagaagaaaataacgtacaacacccagtctattacatcagtaaaagactcattgaggccgagggccgatatccgttgatagaaaaactcgcctactgcctcattctagaaacaaggaaattgaggccttatttccaagctcatcctgttcgggtatataccgaccagccactacgacaaatactgcaaaagccagatgcttctggacggttactcaagtgggcagtagagttgggtcagtacgaaatcactttccaaccccaaacaacaatcaaaggccaagccttagcagactttgtggtaatatgcacaggaaaaaaagaaagcataccagaaagcaaccctgagccggtaccaatacctcagccaagtaacaatgaagaaaaaccgacctggaaactacatgtggatgggtcggccacagatcaactatctggtgcagggattgccctcgtcacgcttggggggcaacacccacacgctacagtcaagttcagattcaaagcatctaacaacgaagtcgagtacgaagctctaatctctggactaaaactagcccgggagatgaaggccgaacatattgaaatatgcagtgattcacaattggtggtaaatcatgtatccggagaatacgaggctcggggagaaaagatgatagcatatctgagcaaaatacacgatcttctcactcaattcaaaagctacagtctcagacaaattccaagagaagaaaatacaactgtagacgcgttagcttgattggcaagcagcaatgtaagtgaca

SEQ ID NO: 275223 - DNA, 1056 bp, Cannabis indica
caatataagttctttgagacaaccgaagaataccctttagatctacgtccccgaaagggatcctgtatatcccaagtacatatgaagcctcaccaaggtctttcatatcaaaatggtcagataacaattgctttgtctcagacaacagatttttatcattagaagcaagcaaaatatcatcaacatacagtaccaggaagatgaagctgctcccactgaccttcatatatatacattgatcaactttgttttccatgaaaccatttgcagtgacaactgcatcaaacttgagataccactgtcttgatgcttgtttaagtccataaatagacttattgagcttgcaaaccatatgctccttgccaggctcctcaaaaccaacaggttgagtcatgtagatatcttcatacaaatctccatttagaaaggcagttttcacatccatttgttcaagttccaaatcaaaatgagcaaccatagccatgatgattcgcaaagaatctttggtagagacaggtgagaatgtttctttgtaatcaataccttctctctggctatatcctttagcaacaagtctagccttatactttactggttgcccacttgaatcatatttgatcttgtaaacccatttgcacccaatgggtctgcaacctttcggtagaacaactaaattccatactttgtttcgcgacatggaacttgactcatctgtcattgcattcaaccataacttagattgaggactcctcatggcttcttgataagtaactggttcagaagcgtctcccacatcataatcatgttcttgcaaatagacaaggtagtcatcatgaatagcaggtttgcgagctctctctgatcttctcaacacaacttcaccaccctcaatatcaggattttcatcttgcatatgattctgaggttcatcatgagcttctgttggaatttgttcaatcacaggatcaatagtaggagcggaagcggaagcaacaggtacagggacataaatacgttcttccctgaacacaatttctcttgacccttgacttgaac

SEQ ID NO: 275224 - DNA, 414 bp, Cannabis indica
catacataaatcccggtcatgatcagatgcccatacccctgaccataaccctaactgccgtgtccaacacggtactgagtccccctaactgccgttccaaacacggtactgagttctgaacgttcatagggacagtactattgacaagtaacagcctaattggtcgaactggtcatactccagctgatggtcatactccagcctgtaccgacgtgttacagtatcagcctaatcggtcaaactggtcatactccagctgctggtcatactccagcctgtaccgacgtgatacgtcaaatagtacggaaccaccaacctaagtatcagcctgtactcggtcttactagtcatactccagctgtaggtcatgctccagcctataccgatgtgatatagtgtcagcctatactcggt

SEQ ID NO: 275225 - DNA, 899 bp, Cannabis indica
accccaaatccgaaaatacattggttcttcatcttcaacctcaaaccttcaaggatattcaacaatggaggtggagtaatgtgtcttcgggtttgtaagtattattctcgattacatttgaaaagttgcattagaattttaggtgttttttgtaattatttttggaattattgattgatataggaattgttacgtttatagtgtgatttgggattgtggatgtaattgtgtggattaattggtgagttttcaatttttgggatatagaaaaattaaggggaggtgctgctcaaatttttttagcaatagttagaaaaaaatcagaaaaaaaaaagaaatccgaaaaaaaaagaaaaaaaaggtattcatttttgctaaaaaaaaatggcacccaagagaactaggaatgtggagaagggttcgtcttcaaacccaccaccaatgggttttgataggacccgatttggtaacatagaggcccaaaatcgcttcatgagaattaagaatagggcttatattgaagatcggggtattgaattcctcgagaatcctttgagacgtcaacctcggtttgaaacaattcgagctcaaattgagaggatgaagttggggagctttgaggatgctcggagtcaggctaatgttactatggcctatgaatttcttgcaaattggtccgactgccggaatggggcagtaaaggtgcggggaaagaaggttcccgctactgctgatgcgttcaatgtgatgttctttgtccaagattacactagggaagaacaacacctccgaattattgtggaggaagagcagtttgatatggtggatgtggcggagatagtgggatttcctgggttgaggttccacgacaacgatggcacagaggggtcgccaaacat

SEQ ID NO: 275226 - DNA, 597 bp, Cannabis indica
attattcctgttcctccaaaatactattaactttggaagaaaaataagaaaatgaagtacaatttaataaatgagatatggagatgaagcataaaagaatcaatatcaatattaagaataaaaagtacaataactacactctaacctcaccaatattattattttaatacactcatttttgtcactaaaataagtataaataaaataataataagagagaaaaataaaataacaaagtgtattttttctactctaaaatctgatgtctttttcatttgctttggggtctatttatagtgaacctttgctctccacaatagtattttcgtgtagggtgttcatcaaaccggtcaaaccgcccgcaccacaccgcaccgcaaaaaacatgcggtttgaaattctttgcggtgtggtcccagtttgaatttttcctaaactgtgtgggtggtgcggtttgcggttttgaattgttaatatgcggttcaaaccgaaccgcaacgcacattataaaaatacaaatttttatatttatttaggtccaatatgtgaatgtccaacccaaagttcactaattattgtattgttgaaatttaattt

SEQ ID NO: 275227 - DNA, 421 bp, Cannabis indica
tagttagaattgacatttatagtggttgaatgtgaaattgcagtttttgagaaaatgggaaacagaaatgataaaataggaaagttgcaaaagtgaggcctatttccaaattccttggccggccacatgcatgggttttattattttaatgccaagtaattcaaccctaaccttgtgtggtattctataaatagaaagtaaaggcttcaggaaactacacacaacacatttgcatctcattcctttcatagaaatttcctgagtcgccaactctctctctctttcttcttctttgtttcgaaatccctaagtgatagagtagtgcccacacacagcaagtactacctcaatcatagtgtggaagactgtgaagaatccagtttcaacaaagaaggacattcaggcttagatcttgataata

SEQ ID NO: 275228 - DNA, 482 bp, Cannabis indica
ctgctgtgattttgttgttaaattatgtggtttaaagcatgttaattgatgttaattgagctgtgttggaagcatgttggatagattgtttaaagcttgagttttctatgcaaaaatgtggtttttggaggaaaatatagtgattctgttattgtgttgctgctgtagtttctaatagttttcagagatgattttatgctagtttaagtcgatttatgctagtggaatgcatgtttaggtggttttgctcaagcttgagtttggaactcaaagcttgagctccaatggtgatttttgattctgtggtttctgggttagtttgaggccttagaaatgttctagggaaggtatagaacaggtctggaaagtttggaaccaattggggttgaattggtcgagttatgaaaaatttggtttgctgcctgcgaggaaccggaattccggttgtgcatccggaattccggatgagggttctgaatttt

SEQ ID NO: 275229 - DNA, 533 bp, Cannabis indica
ctcgtctttatcgacttgcatcaggacccccagtttaacatttcatcgtaagttttttgcatcctttgctttattacttattctgtttgttctcttctgggtttgtgttaggctatttttagcctatgttttggatctaatttatgtgcgtttttagctgtgttgggacggaattacgcttgttttctatgtttttaggttctttggaataaaagaggtctcgggtgcagaaattcgataaaagacgtgctgagccgaagaaaacacaatttctgagtaattgtgcatatctggccgcggctaaacacaacttggccgcggctagatctcgaagggtttcaaaggcacagtcgccgcggcgatgaagagtctcgccgcggccatttaagagatacagagagacccctaatttgcaattatctcgccgcggcgagaggaagcttagccgcggcgagatcccgtacggaccaggggcattttcgtccatcgaaccctaaattttagttataaatagaaaactgcgattggaagtc

SEQ ID NO: 275230 - DNA, 639 bp, Cannabis indica
aaagataggttgtaaaacttccaaaaattgtatcattttaagttaccataaaaacatttataatgataccttcctgtacgacatagattacaaactaaattccataaaatttgacttcccaaatatatctgaacgcaataaaatcgcatttgacaattagtgttcccacctccttttattagaatatcttcgtatttattattcttccaattacttgattaattttaaataataatattagaatctgaatactaaattccaccacttttcctttttgctaataattcctaaaaatatgaaccaaccatagctaaaagctattatcgtttaaacttaatcctctttaaacctttcacttaaaaatatttttaaaatatcactttaaaattttctttacatcataccttaacttaaataacccttatattccaactagtaaaatttgtctagtacataacttgtttattttgcaattttattgtgccaacattttgttatactttcaatacaagaagtcgtgaaaattttaaacaaactaccctaaataattaggggccagccatataataggcgctatagccttgtaaggcgccaaagccataaaaatggcgcaaatatagaacaaaccaataacaaaaa

SEQ ID NO: 275231 - DNA, 591 bp, Cannabis indica
acgcatacgttgatgaacttagtaactgtcattcatttattaataacgttgcttagtttaattattgtaattcaatgtgtaaaaatggattaacaatgaatgcaatccttgtacaactgatcggacacctgctttgtatataaaggggtgatccaccgtgaaatacgacctacgaatctcttgctacagtggactaagcagaccataatctgactgaaccactataatttctctgtctcattgttattttccagtttttggttaactatttctcattcccagttgagtactcgccattctaggttgaatactcgccattctaggttgaatactcgcacttgtcttttcacgtaaattgcttcttgtcactaataatatcatataatttggtgttgcgaaattcactcgacaacatttggcgccgtctgtgggaaatcagaactaagattttaattcatttcaagaaaaataccatcatggctggaaatcaaacaaaaggaggagctaacaacgggtccatcaacattgggatgatgaacgtaccattatccagagctggaatgctgcctgtggatgtcattaatggcggag

SEQ ID NO: 275232 - DNA, 527 bp, Cannabis indica
aacatgaaagtaatataatgaattagatattatcagaataaattcttgatcttgattatatgttccagtttatatttactgctgtaatagaaattgataccaataaagttctttgataatgtatcacactaccttaattgagtgggagaattttaaaattctttacccatcttcatttggttgacacttgtgataggaacttaagaacactactgagaaagtaaatctaaccattcgtgtggatagaactaacttatcagaattatgagaataagatagaagaattcttgcatagtctattcgaatgacttgagcaaggatttctagtcctcattaaattttatggtatctcaatttgaatactagattgctatgttgatgacttagtctagaagtttcagactaagataatatgtcacaactaaatatccctcaaaacaatagtaagaggttaaaatgtataatttaaccagacacctactgttgagtgggagccatatgagatgtaatcaaataaggaacattag

SEQ ID NO: 275233 - DNA, 134 bp, Cannabis indica
gaagtgatttcggctataaagaataggaggctcaatttcatctgacaaagttcacaaaggttaagtttgaatgagagccatcactatcttgcttagtgaaaattcataaagtaaacatagtctaactttagaat

SEQ ID NO: 275234 - DNA, 380 bp, Cannabis indica
caactagtatggggatcatgggtctatataaccgagcttccaataagtcgaaccaaatttaacaagtaaattccctaacttattaatttcttattgaatccacccttagaactttgaattgcactctcagtcatatagaacgctctatatgttccacgatatagatacgtcattagttatccattgttataatcctaatttgatcaatgatcctctatatagatgatttacactgtaaagggattaaattaccgtaacaccctacaatgtattttatccttaaaacacttaaccctgtataaatgatatttcagctaagtgaaatgagaactccaccatttattttcgtttggttaagctcaaaggaaatcatcctttac

SEQ ID NO: 275235 - DNA, 480 bp, Cannabis indica
tttgcaaagaatcatcttgtcaaaactgctatgaacaagatgcaaatgccatatatatcttaatgtgctgtggtcttttgatgacttaggtctagttacaataaagagtttttagaatagtccaagtagattctggtcacagaatacaaaactcatattccatacattaacatacaatttgtatccattgacagaaaatggatattaataacttgtgaaattcatattgtattttctaatgtattctaagaaactgaaataaaaatatagttgcagattagagggacgtccatcagatggcagtaaattattgattgtgtgatagacttgcccttggcttcggaaagtatatattcctttattccttcgacacatcgatttgtcgtaagtaactcccattgatgtaaaagcaaatttattgttgtaagttcgaatgtatgttcgaaaatgtgtagattcttcgctcctggaagtaaacaa

SEQ ID NO: 275236 - DNA, 909 bp, Cannabis indica
cctaaaccaggacatctccgtcaacatcggctggctccccagcctcgttgtatcccccgtagtttgggggttcaacctcctcctcttcctccgcctcggaggaacttctaggacgtacgttgtcctgctcctcaatctcctggacctcagcgtccccttcatgatccccctcctcctggatagctggatcctgttcggcgctgggcaaagtggcatgccgagccacttgaggatcagacgcatcggccatacgcgttgttttcttcgtacgagccataattctatggctggataaaatatttgagggagaatgtccttcattggaagaaggtgggctagaatagagacgaggatggtcctcgtgcaaaagttgaagcaagtcctggtcgattcgatgttcgctctcccaaaactcacctgggttcatctacaaaagacaacacacaagatgagtgtttggccaaaatatcgagcgataaataagcaaatacaccgaccaggagtactcaacagatcaaagaataagaatgttcaaagaaaagccaaaactcaggaagtttgaaattttctcgaattagggcaaaaatttcatgaagcttagaataagcaagatgaaagacaggcattatgcagttcagaaagcaagcattatggactgtaaaatcgcatgaaatcatgacaaagaagaatcgcagagtttctaaacctagggtttcctatgaatgttctacggcaaagtcgaaggtgcattcaaaaaaataaacatgcaaaaataagcgtaaaggaaatcgagaacttactcaagtgtcagatgtctggattccaggaacgtcaaaccaatgagcagtttcgatgaaggcacttcagcaaacttgaagccaaaaaacctctcttttcgctctgaactca

SEQ ID NO: 275237 - DNA, 897 bp, Cannabis indica
gacattcctacctgttgcaagattgagatggtgaaggggtcttttgttaaagctgataagaagagagcagagcctaaagagagacttcgaacgattcggcgtcgttggaaaagattgatgtgtggtagttctgaaggtgaacttactcttgtgcaaaactctgagattagcaacattggaggtcaattttcttcatttggtacaaggaccctattggatgcaagaggtggacttgatccaatttgaagcagtaatgaggccaaaccccttctgatggaggttcaggtaagtccttctcaccttgaattttatatcacattggggacaatgtgaatctttagtttggggggagggattaaaaatttaattttctgcatttttttaattttctactttaattttctgtttttagttaggaatgggcaaaaagctagaagataattgtgtgctactgtttattggaatgtgctctaaaattgcaaaataactgtgtgcttaattctgttaactctttagattaatttggatgcttgtataacatgtgtaagaatgcagtttgatgatctgtgaaatatgttagaattgttttactatggtttgtggtaagattgtctggatagcttagaacttgcatgtcttattcttttgaggtgaaatccctgacaacattcaataggaatatgatttaggcatttgttggatagtttgagccttttcaagcctaccatgaatgattatccttagttaaccctcttgcgcctaaacttatttcgttcttcacctgttgaaccgaaatatgtatccacactgttaattttgttctcactattttatcaatgatatcataagctatataattagtttgggggagcaaaatatatggtgtgagagaagata

SEQ ID NO: 275238 - DNA, 548 bp, Cannabis indica
actgtaattgtgaataaacatatgatttggacttaacagattttgtgtataaacatattaaaccgtaagcatgtaaaattcatgcaaacataaatgtcttcaaatttcttatattgataactaatttgattgtaaaggattttatttacggcacaaaacccaacaggtgcttccttttgatagtgcatagatccttgataattttggcataagccggtacttgattgattacatgaagtaattgcaagttaaccttaacttgtgtcaaaaagtcaaggatctcactatgactttccagtaccttcccagtggatttcaaagcctaaggaaagggcacctttactggaaggttttgtggcacatcagcatctgggcgggcattggtacagtagtgatttttggtaatggtgataccgtactttgaccacttcgagtagtaatgacattagaggttgagcgggaagcttaccacgcccttgaatgactgaagaatcatttaactttgttaattgaatctttatgtctttcaattcctccatcacatgagt

SEQ ID NO: 275239 - DNA, 518 bp, Cannabis indica
tatttactcttgggggtggagcagttgtttggagaagtgctaagcaaactgcaaccttagactctaccatggaggtcgaatacatagttgccggcgaggctgctaaggaactattatggcttagaaagttcttctcagtacttggtgttgttcttggaatggaaaaatgtgatagtcagtagtcccgtgatccgtaaggggaaatatcgggtaagctgtgcaatccctcatcgcctggggaaggtcaagtgggatgattctcagactgtgtaggtataggactacacagtggaagagagcttaaatggattgattggtactatctatatcacaaggtgcatcttgtttttttcgtagcccatcatgaaagaactctacaattaagcatgtttgacctggggcaatttcaggatggggacgtcctgggaagttttctcagggagcatgcgagtgaggacaaggcacgctgaaaacacttgtgttggtctgtatggtcagtcgtcagtccatgaagcagc

SEQ ID NO: 275240 - DNA, 769 bp, Cannabis indica
gacttgattggcgttctggtcgatttggattgcgtcagcgcctttctgagcggggatttgagtatgggctctgggctacacgatcgttgcagtattctgctcgtctgtcccccttcttctgtttagatcgtcctttaggtcatgggtcgttcccagcctatcgaacacaaaagagcctggttgccttagcgattgattcgcttggttgacaggcggaatggctccattattctgattggatccgtcaggtatggttcctcctgatgaattcctggacaaggtctgcccgcctacctcttggcccacaagtggaactcgtgactggggattggacgggtgaccattggttgtttgggaggcattcatcgtcgggtcatcctccgtttctcccaggggaatgacgctcgacgtttgttggcctacagtctggtaggctcttcctatcagcacagtagcttgccgactacgatcttcgatctctgcatggtgagcccttaatgcctccatctttttgtctctccattcagcgaacatacacctctgttcgtcaaacgcgagattaattgtggcacgcagttcctcctgattatgatgcagagtattgctatgaccctgcatgagtccgagcgcagcacggagattttgcaattcggctgcatctccgatggtcgtttgggcgttgattccttgtggaatagtcgtgttatgaacgccctagctgtgtacagaaatgttattcccagtctcttgcacaccaggcgcagtttca

SEQ ID NO: 275241 - DNA, 547 bp, Cannabis indica
ttaaaggccttgaggccatatataatgtatataaatatatataaacaggagagataatgttacaatacttttatttattatttattttatcttaagtacaaaaattggccagttgtgaacattttcaaatgttaaataaaaatgtgacattatgattttctgcttttaacgcttgtaaataaaattaatatttttataaaagtacaggtgttacaatcataaacttaccgtaatatcattctaagtaaatatcacttagttgatcttagatcaataatttcaatcctgatatggttaggttctgatttaattatattgtataatttatgttctttgacttgttcgttaaagttgatcaaatgaatcttcccaatacttacatcttagaaacatggtagtacaattgtgatgagagcgtaatcatagatataaaatctctagcttctaaattaaatatttctaattgaaatatattaactattaaaaataagagtcaccattttaccccaaaaaaaaaactaattaaaaataagaaatatttaattta

SEQ ID NO: 275242 - DNA, 565 bp, Cannabis indica
aactatatctagagaaatcgtcaatgaaagtgacaaaatactcataacctcctctggctttgacatttagaggtccacagacatcataatatactaacccaagaggttgtttggcatgctctccctttgcagagagagagcgcttggtcattttttgttctaggcaagattcacaaactagtaattcacccaagatgacatttttcaatggaccgtctttggttaacctgtgaagtctatcatagcctatatgacctaatcataaatgccatagatatgtttcattattgttatcgatctcttttcttttatggtctctaggtttagcaacattaaaaaatttgttgttaagtgcgatttgtatttccggtcttaaaacataaagcccttgttccatgtaagcaacacataatttaaatccattacgagaaattgtgcaaatagaacttgaaaaattcaattgataaaattgtatttgtaaacatgaaactgttgggttttatgtcctaaataaaactccatttcaatgtaatacattttattcaacatcaataaagaaatagaa

SEQ ID NO: 275243 - DNA, 590 bp, Cannabis indica
atgattctttcatttaacgttcccatagagactacggacccatagttttttttggtctaggtgatcccggaggtcaccatgtttcccgttaatctgatgtctcagatcgatgggaggacatttctggccccttcttcctctccctccgggttcttggtgcacggaaacgctcttccggtcctctcgatcctgagggccaagactccctttttggagtttgcccctctgcggacctttcccttttgggaaatctgagcggacctttcgcggatcctgcacctttttctttttcccaggagtggaagtagggtttttcttctggttcccttcggagggataccttatagggctaggttccctagacttctgcttttgggtacttggcgaggattcttctggtctctctccaagtccagcagggatggctttatgatgcacgtggattcctgctgcctccatggctttttgcatggccagcatcacctcttgcatcttttggttttgttctttttgggctgcgatttcagcttcgtgatcggcagccttttgtctcaagagtaccagctctgtgtagctgccttcgtcgtagg

SEQ ID NO: 275244 - DNA, 495 bp, Cannabis indica
tgatcggcagccttttgtctcaaaagtaccaactctgtgtagctgccttcgtcgtaggcgtcgtactcatcgaagttcccttcatattcatcatcgtgggttccttctccctcctgagagcccacatttgctcttgaggccacgtcctcatcgtttgggtcttgagcatcttgaagaggacgaggttgacgtgtgtttcgagtctccaccattgttgtttagtaatgttactgtctactttcagacgcttccttcagctctcaatgaaaacaccaaaatattgaccgaggttttcgacaaccaatatagtaatagtatttaagaaagctataaggaattaatgagagagatttttatatggttggggcattaatgagccttagtccacgagtctgtgtatttatgagagtgtttattacagagaatgttcttggtggttttcctctctagttcgtgtgaaacccaaaattgtcgacccctgccttaatgagtttg

SEQ ID NO: 275245 - DNA, 673 bp, Cannabis indica
aaatgaataactttgaaacttttgggtgattgtgttcttgaatattgaagaacattatgaacatgcaaaatttcaaattccctccattttcccaactttattttcatgaaattggtaaaaaggtatttgtgggggtgtgataaacttggatgatttgtaggcttgaacacactttgttgaccatcaaccgccacaccctatgaagggtcgggggtgtaccccgagcttggacccttgggggtcgaggtggtacccctagcttggacccttgagggtcgggggggtacccctagcttggacccttgggggtcggggtggtacccctagcttggacccttgaggatcggggtggtacccctagcttggacccttgagggtctatgaatgtcatagatgtatgctttcttttttactttgaagctatgtgactctattactatatgctactatgtgttaacttgtctggcatgtaccacactatgcgtaagcatttttttttatagttaaccatgtacaacatgtaagttgctcaagacattgagcaatgcacaaacactttagaatttgaagagaaagtttcaaaattgtaaaatctatttaagtgagtgtgttttatgcttactagtccatgtatgagcatggttgccccacaagtgactaagtaggttcacct

SEQ ID NO: 275246 - DNA, 728 bp, Cannabis indica
gaattatatagaggttcagccccgagcagttcggtaatagcctaatcctcgttacttgtattgacttaagatcaaggagaaagatttattttcttatagctcttacaacagtatctctgaatatataattcttagataatatatttagggtatagtcttagctcaactgcttttcgaccgatctcttgcccagtgaatatgcatcactatttatagggctagtaagcttggggaggaagagtttctcttatcgttacaatgcgtataaacagaaagatcgtgggattgaggctgaatacactgatagcgggatcgtgtgtatgccatatccacgtaaattgatccctgagttatagggattgtgctgatgactcacgatgcgaaagttgaattcgctaagtgtttggccattctgtgcggattactgaatgctttgctctgggcatgccagtgaggcatcctgctcagactgtgcttcccgagcagatgttccaagtagactccacgtgtcaccattcatgtgatgccacgtcagagtgcaaaaattgggataacaccaatattgcatttttattcctacccaccacacaaggcaagcccaagtaaaggctagtttcattagcttcgttaatatttttgatacactcattgtaatcaaggatattttaggtactaaaatttaaaaagaacatttaccttaaaaaatttaaaaagggacattgactata

SEQ ID NO: 275247 - DNA, 473 bp, Cannabis indica
aacaaaatatttgaagaagccccattattgatcattgttctggacaccattttgtttgctatctggacttccacgaccagcgggtcgttgtgcgaaaatcttatctggacaacatcttcgtcattgaatgttatcgttggctcttttgctcgtgaaactttgggcttcctttcttccacggccaggatgaattcttcttgctcgtattgagctgtgtgggcatatcgctcccgagctatgcccgtgtctctagcaatgtgcgggcctccaatgatgccttgcaagtgcccatctattggcggaggtattagatcctggttattctgaccttggttggccttgacatacttctgtaggtgcgggttgttcttcttgatcagaagttctatttcccgcttcaagttgtagcattcgttggtgtcgtggccgtagtctccatggaacggacaaaattttgtcatgtccctcttgct

SEQ ID NO: 275248 - DNA, 855 bp, Cannabis indica
aggtgcggttgttttcttgatcaaatattctatttcccgcttcaggttgtaacattcgttggtgtcgtggccatagtctccgtagaaccgacaaaattttgtcatgtcccttttgttggtatctttcttcatcagcccgggcttcctgtacggaattaacgactgagttgccatatacacactctctatatcttcagttagaatagtgaatgcagtgtgtttggcatgatcacggggagtctgtccggatttgtcggtgaactttcctttcttcccatttccttgcttgtggttgttgcttgaacgcttgccacttgaattgttggaataattgggaagttgggcggatgttccagtggaaggagccttcgttttgcctggcttttgctcaccttctgctcgttgaatggcttcttcgagcttgatgaagccttcggctcggtcaaggaaatcactcattgagtcgaccggcccgttcttccttatatccttccatagttcaccaaggacttcaatgccccccagtatcgcggataactttccatcctcggttacccgcgagaccttggtcgcttccgtcatgaatctgctgatgtatgcccggagtggctcgcctggtcgttgctttactttgaccaaatctcccagatgcaatgggagctgacgtgaggaagagaattgtgcatggaattccgaagaaaaggttttccatgaactaaactttccaggagccaacttgaaataccattgctgtgcggcttccgacagagtggcggggaagattctgcagcatacgtcccctcgtactccttgtaaatccatctgcatctcgaagtatttgagatgggaaagagg

SEQ ID NO: 275249 - DNA, 772 bp, Cannabis indica
acataagtctatttaacacttactaggccaaacacttccatttattacaatgacacaacaaactaaacacaattacacaattatagacactaagtactccacaatttagcttaaaattcaagcttaaagatatcaaaataactctaaatcttagagttatcagatcaccccagaaaaatactataaatacccccaaatacactgagataggggtcgagaattctgggttcataagaattaaagagagcaactaagagagaaaactaccaagaacattctctgtaataaatactctcataaataagaaagactcttggactaaggctcatcaatgccccaaccacgtaaaaatctcatgcattaaacttcctacaactttctcatagatattattaaattggttgccgaaaacctcggtcaacattttggtgctttcattgagagctgaaggaagcatctgcaagtagacaacaaccttgtaagctaaacatcaatggtggaaactcgcaacacacatcagcctcgtcctcctcaagacgctcaaaaccctgaagatgaggaagtagcctcaagagtcaacgtggattccgaagagcgagaggaggccaccgatggcaaatacaaggaaaatgttgacgagtacgacgcctacgacgaaggcagttacacagaattgctgctcttaagacaaaaggctgctgatcatgaagctgagatcaccgcccaaaaagaacaaaaaagaatgcaagaggtgatggtcgctatgcaaaaa

SEQ ID NO: 275250 - DNA, 495 bp, Cannabis indica
caccttcaacccaggatccatgcttcctgggcaactatcgcacaaccacacagaaacccaacgcagtccaaatgaaaatttaaccagacagagaaccaccattaattccggtgacttcacctgagaagacgacaagaatcaatcaaaataggggctgttttgaattcataaaaaaaagtgtagaaaaactactacaaaactaaaatttaaccagaaatctagtttaatttacataaaactaatgtcctgactttaatttttagatgcatgaaaggaagatctcaaaaagttgaactggagttcccaaacagttcaactcaagtataatccaaaaaaattacatcaatgctatagtaaaatgtttatcctggtgtatttttgttgttttctaaatttctaatggtgaatttgttcatattaaatcataaagagacatgtgttggaattattttaccggatctagatttactaccaagtatgtttgattaacatcct

SEQ ID NO: 275251 - DNA, 465 bp, Cannabis indica
atctaatgaactctggattgtattcaactccacattatctctataacacttagagaatcatgatctttatcatggaagtaatataatgaattagctattatcaatataaatccttgatcttgattgtatgttccaatttagttttactgttgtagtaaaaaatgatacctataaaagttctttgataaataggaacttaagaacactactgaaaagcaaatctaaccattcatgtggatagatataacttatcagaattatgagaataagataaaagaattctagttcagtctattcacagcgtacgggttctggtccacttttgggtttgggacagggttcaggcccttgtcaaggtttgggtccacggctaggtcccaaattaagacaccgactacgcgttttgtccaagccgtgggtccaaatccggatccaaatctcgggtcccagtctggttccatttct

SEQ ID NO: 275252 - DNA, 1196 bp, Cannabis indica
attttttttttattgtgtttgtctttttttattttaagttttttattataaatttacttttatataatcaaaaccagtttcctgatgtagaaactagcttcttaatgaaaaagtcagttttcttgatgaaaaaatcagtttcttaatgtaagacaaccttcttgataaaaaaattagtttcttgatgaagaatctttggtgattgatttctatcgcatgagaaactaaataatttgaattgtaggagagagaaaaaaaatcttatgcatgtggctggagagagtagtttgattttttgtgtttttttcgagtacctctattttactgtgggttgcttcatttttttttaattgtgttttggctttttttttttttttataagtttgtcatattatctttttataaggtcaaaaactgaatttatatgtttttttgtatataaattttatttttattttattaaaacgagtttcttgacgaagaatctttggtgattgattttgatcgcatgagaaactaaacaatttgaatcgtaggatggggaaaaaaaaatcttgcgtggctggagagagtgcgatcctattttgaaaaattagttattttttttaatattttttaggggaattatcccatatactatttttttaatttttttttcaaatttacggtttgggtttctaaagtggttgcagcgctagttgcaataggggtttctatacgattttttgttgcgatttaagttgcaacgctagttgcaatagtagtttctatatagaattccgtaaaaatgcaaaaaaaaaaatgtttaaaagtgtaaaaatgaaaaaggccatcttttttatgacattttctatttaaatatccatatatttaattagtttggttataaaatgccatatttagtgccattagctttacatgccatatatatcaaaccttctatttatttttctatattttataaatatttctatgtaatatttattttttggagtgttacttgtcaattaaatattattgttaaatattgactaaatgattattgtattgactttgaaattttattgttaaatatacacagtaatcattcagttgatatttaatgataatatttaactaacgtcttaaatttaaaaaaaaaataattaaaacttaagaaaaatttcgcccgtaaaaaaataaaaacttaaaaacag

SEQ ID NO: 275253 - DNA, 785 bp, Cannabis indica
agacttaccaccggagccaaaagtactggcaccaagagccctagtgttcggttcctgagccaaaggctgtggcctgggagcccttctctccgctgagtccccaatatgaaggggcttcccggcgatcgtctagcttcttctctcgaccgggctccccacgtcaagtggccacccagaagctgcctgggccttagagtatgccttttcctgagccttccggtagagatagtcctggtacttcttctcggcagtggtgatgatctcatcccggaaggtcttctccgcggcaggcaccctcacgttgggacagataacccgggaaaggttagagtcctccacggattggtgcggcaagatgagttttgccttcctgcagttctccgtagtaaccaggcccccgacgtcaagatcagcccggtcataagaggcaaaggcctgggctctccgaagaaagacctgagtaggtgcggtccgttcgtaaggaggaatcctgacccactcagtgaggagctccggatggtccactgcccggaacccggaagagaagaaaaaacgatggcgatactccttaacatgagtttgcctattatacgggaccacaccatcattggcagggtgggcccggaacccgtaaaaaccgtctttaagtttgtctccctttttggggacagaaacaagtttgtaaaaatacaatatctccgccgggctgggagagtcccatccccgggcggagtaaaaaataaataagcgtgaaagcaggcggtatgcttggggaataagttggt

SEQ ID NO: 275254 - DNA, 589 bp, Cannabis indica
agatatatcttggcaagttgtacaaaaacaaggaagaattgaagaatgtagtgggtaggtatgcactgaaaaataattttgagtggatggtaagtaagtctggcactgatgtgttttacgttacttgtaaggatgaaaattgtaaatggagattaagggggaagaagaaggcactttgtgacatgtttgaggttactgtgtttcacaacgaacacacatgtaacttggattctagacattctgatcaccggcaagcagcaccgtgggtcattggtcacattattaagaacaagtacacatcagatggatctaactacaaggcaaaagacatacagagggatatgtttgatgaatatggcatcaagatgagttatgagaaagcttggagatgtagagagaaggcagttatgtacaagaggggtactccagcagaatcttatacgaaattatatggttacttctacatgctggaacagaagaatccaggcactattactgacattgtcagcgaggataaccggttcaagtactgtttctggtcactcgatgcttgtaggaagggatttaagtattgtcgtcctgtgattag

SEQ ID NO: 275255 - DNA, 507 bp, Cannabis indica
agttgttcattttaaggttaaattcctctcatttgggccttgtctgagagttaggggggccaatagaattagtgggtatgacaaactgagcctagctctccctcacatgaacaaccccaactgtgaaggcccatttgcctaatttggatagttgtactaggttaattaaattagtttaacctaacgaaattgattagcaacataattaatttcaaaataaatggaattatttttcattctatattttgaacttaatttaagaaaaacacacttcgtttaatgaaatttttctagataaactatatgtatttttcttgtatttaattaaatataaaattataactaactagattctttctaaagcttattttaattattttattaaatattcctatttaagttttaaattagttatttctaactaattttatttatcaacttaaatttgaatatctttttgaattttcaaaattaagttgaggaatttcgaggaattagttattgaga

SEQ ID NO: 275256 - DNA, 584 bp, Cannabis indica
catttgctcttcatgttctaatctatccaaggcgtacataagccttgcataccctgtcaatgcaatataaagtaccataatagtcagacacaataatatcgcgagtttgtccacacataaattgtaacatgagaatgcatgcatacctgaaaggagcgagagatggaaaactccatggaagctatttctccgatgttctcaaaacgagctcgatcctctggaaataatagcttactggcctcaccaaggtgtaggccaaactcagaatgtgcagccgctgaagatggaaaagaaagatcaactgtattactcaaccaatcggtcgactcaaccggagacagtctcttgttattcttcttctgagccctcgcagaaggacaagaaggagcagcagtagtaaaagcctccttctcaacacttggagtcgtcctagtcttttgtttgcgtgagcgtaaacgttccatagcaccgtcaccagccagaggaagagtgaaagaggattgggccatgaatcgatctgcaaaatctcgtctgtctgatgtcaattcaggtagaaataaaggttcgcatcccaaaatctccaa

SEQ ID NO: 275257 - DNA, 506 bp, Cannabis indica
cttaactgaaaatagttaagtcctaacaaacataactaatgtatggagtacaagtgtgtgtatattacaagggaaaatctaatacaacaattctccaccttgacctgtaatatacctagaagggagagctctggatcttaattctcataaagatttaaaaacactacaagaaaaggcatttttaccggcgcagttcgtcaaatgcgccagtaaaggttgtcgagatacaacaaaatctgaaattccacttacatttaggcttcacttttaccggcgcattattgcgccgatattaaaacattttgccggcgcaataatgaatatgcgccggtaaaactgacccaatgaagcgccaacaggcgcgagaagtttgccgcctttcatttcatttattatggcgcttgttcacttttaccggacgcacaattgcgccggtaaaagtgccaaaaaaatagaggaaaacttcccgcgttgatttccttggtaggtgggaatacttttaccgg

SEQ ID NO: 275258 - DNA, 541 bp, Cannabis indica
gctaagtcacccccaaagaaggagtcctcgccaaaaaggaagggaggacctcgcttcgtcaattatactgaactcgcagtccctcgagaccatatctatgcgattgaagaaaggaacggagtcttcaagaagccgccccccatcagggggaatcgcgaccggagggatcctaaaaaattctgtaagtaccacaaggacattggtcacactactctagaatgttgggtcttgcaggatgaaatagaggagctgatccggagagggaagttcgacaagtataaaaggagcgaggaaagtcatccccaagcggatggcaaaggagaaacccagaacgcgagtggctccaaaacacctcgcaatatcctgactataatcggaggaccacacatcgcgggcgactctcgcaaatcacaagaacggtatgccagagaagccaaggagaagccgcttaccaatgtgaataatcttggtgaacggcctgagaagctctttaagaaagaatgcgacgacatcatctttatggagagcgatgcgagatggg

SEQ ID NO: 275259 - DNA, 500 bp, Cannabis indica
aaaataatatacataacacttattaattattactaaataaagttaattataaacattaattttcaaaatattaatctattattttttttttttataaaaaccataagttctattaattaataaattcgtttaaaacaatagaactcacttcagaggaacattcctccaactgaagcacacgacttgtagagaaacaaaagtctcttgccaagcaatgagctaacttatttgcagatcgttttacaaaacacaaattgtgaaagcataaaataccgttctgaatcgcttggacacacaccaagctatctgtttctaacatgactttatcccacgaatgagttgcaatccaactcaatgcttctttaatgccctattatctcaacaatttcaggttgatcacatccaatcttccccttcttgaatgcttctactatagcaccatgatgattatgagctacacaacccatgccaaaagacaagactcgaaccagaaaaaacta

SEQ ID NO: 275260 - DNA, 1115 bp, Cannabis indica
cgctcgccccacggatacttaaagaagaagtcgagatcgttaacaaacttcaacatctcaggccaaacttggacattgccctcctttgatactaatacaccttcaatgaaagcgatcagtccaagcttgtaggcatcatctttatcttcgcacctctcaagttggagcataagggagtccaactgaacagaactcttcccttcaaaataagtccgaactagatggtcgttggacttggcgtgtatttcctcgtctgtaggggcactacccataggtaagccagtaatgagtccaaactctatccgtccgaatctcatgtcatttctccctacatgaaaccaaacctcatcctccttttctgtgtccactttcatttttcgtaagaggaggctgtggaccaacgcgccggagaaagttaactctccagcttcccaaaagtgtccgaaaggactagccttcactgtctcaaccaaatccatctcagtaaacttggccttgatatatctgaacctatctgtaccccgataggtaagacgtcccgtgaaatgagaggtaattggaagtttaagttcaggagccatctgcaaaattgtcaacaaatttgttagaagtatgtcgcgaaacatgtcgctgtatgtcgctatacatcgctaaacataatcctaatcaaatcgccaaatacgtcgctaatatatcgctaatgaatcgctaaacacaaaaaggaggatgcaaaactagtcctatgtataactgttatatatcgctaatatatcgcaaacatgtcgccaaacacacatacaagtcgataaaaatcatgaaacctacgtactaaatgcaatatcgctaattatgtcgctagtatatcgacaacacgtcgtgaaaaccacggttatcagaaaatccccaacttttctagacgatatcgcgttatgtcgtgaacatagtcgcgatacgtcgcaaattttgcacaaaaaccagaaaatataccaaaacaatgaaattcaaacgaaatcaaacaaattgaacctaaactaactacattactttaaaatgaagcacaaacaaagaaaaagtaatgaaacaacaaaaaagtttagaaaaatacctttttttat

SEQ ID NO: 275261 - DNA, 777 bp, Cannabis indica
ttgacgttgaggacatgggtgatgacgtggggacttatgccagtcatgtcctcctggcaccacgcaaaaacgtcaatggcacccttcagtgtctttattattttttccttctcctccgggtctaggctctttcctagccggagtactttggtggagtcgaggtcacacactgatatctcctcgacgtcctccattggttctacgattttttcggaccccacgcggggatccaactcgtcttcttcagccatttctggctcaatagtttcccggaccatcagcacgggtaggtgggtggcaacgttgtagcattgcctcgcctccccttgatttcctctcaccgtccctatcccagcttcctgggttgggaacttcaggcacaagtgccgtattgatgtgactgcgccaaagtctaccaaggccggtcggccgaggattgcgttgtatgctgtcgggcagtccaccaccacgaaagtacagtacttgaacgtgctctggggtgtccgggcacaaggtgactggaagtctcaccttccccattgggataagtgttgttccattaaaccccgtgagttgagaaccactcggtgagaggtctcggtccgtcaggcctattgcagtaaaggcctctttgaaaagcaaattcacggaactcccgttgtcgatcaggactctggccaccactttattggcaatgggggtctctatgaccaacgggtcatggtggggaaaacgcaccgtcttagcgtcttcttccgtgaatgtgatgggttgatc

SEQ ID NO: 275262 - DNA, 683 bp, Cannabis indica
tttccacatgactaataataaaatttatgtttgatttcaggaaatctaatggtggtagagttatacttggaaacaaccaaacatgtgacatacaaggatctggttctattagtttcaagatgtatgatggcatggtcaggacactaagtgaagttagatatgctcctaacctggcaaggaacctaatttcactaagtgttctagatgacctaggaattgtaagcaagatagaatctggtcaaatgaaaataagcagaggagccctaactattatgaaaggacacaaagaaggaggcctatactatctaaagggtacaccagtggtcccatgtaattacagtactgcacacagcaacagtgatgaatcaaatgccatgacttggcacagaaggctagggcatatcagtgagaagggcttgcaactaatgagtgaacagaaactcctaggtaaggacaaggttagtaaacttgatttttgtgagtgttgtgtgcttagaaaacatcatagactgaaattttccactggcacacacaacactaagaaaatcctagagtatgttcactctgatctgtggggaccagagaaaacaagtactcatggaggctgtgtctattttctatctattgttgatgatttttcaagaaaagtctggatttttttttaaacataaaaatgaggcttt

SEQ ID NO: 275263 - DNA, 1027 bp, Cannabis indica
aatggtcattttgccccattgttattttgtcctttagtggactttatatggtggaattatgtgatttattatgttaatggttggctgaaataaagagttatattttgcatttcactctcatttattcacaaatttcaaaagttagaaaaattagaaaagaaaagctctctctctttccctctctattcagccctccttgagcagcaaggaagtgggatttttcttggtgattcaagctcattttagcaagaatttatgatctttaattgttggtaaagtttcttcatcttgctcttttagtttcttggaaattttgggaagaaaatgatgtttgcatgcttgatttggttgtgtagctgctgttagtttttgatgatgtttgcagaggtttaatcttgttattttgagtagattagagctattttgatgcatgttattttctttgattcaagcttggaagtttttagctcaaaactatgatttttaaagagaaattgttgaaatctgttgctgttgttttgttaatgcttgttgtagttttcagaggttatattatgcatgtttaagtaggtttgaactgatttgaatgcatgatagtgttgtttaatcaagtttgagtttggaactcaaagcttggagctttaatggtgatttttgatcctgtgatttctgggtggttttgttgctttagaaatgttctatgagatgtttagaacagatctggaaggtttgggtgaattggatttgatttaagtgagttatgaattttttggttgactcctgcgaggaaccagaatttcggttgtgcatccagaattccggatgagggtttaggatttcccagaaccggaattctggttgtgcaaccggtctgccggttgggaaattttcaggaacactagattttctcgtttttatgttatttggggtattgccatgctttttatcgatgggaaaacttttgtttctagtttaagtcttcgggaagtgattttagcgtatcacttattagtgttgtgatttgtta

SEQ ID NO: 275264 - DNA, 602 bp, Cannabis indica
tccacaaggtggatttcggccttgtctttttggattgacggttgtgagttgaccgccaatctaattgagttacaattatctgactttgacataattctgggaatggattttctgtctaagtatggagtgatgattgactgtaaacggaagatggtagtatttgagcctgatagtgctaacgcagcggtcttcgtgggaaaggttcagggggcacgcatactgagaatatcactattgaaagctaaggacctgatgggtagaggttgtctggggttcatagtcactgtagtggataccagccaacctgtgacatcagggcctgaaaatacgagattggtatgcgagttccttgatgtctttccagatgacttgccgggattgccgcctacccgggaaattgaattggtttcgggagtggatccagtatctaaggcaccgtaccgaatggctccagcagagttgaaggaattgaagatacaattgcaagagttactgaatctgggattcatcaggctgagctactcaccttggggtgctccggttttgtttgtgaaaaagaaagacggaaccctacgaatgtgtattgattaccgcgagttgaa

SEQ ID NO: 275265 - DNA, 631 bp, Cannabis indica
caaggtgtaagcatacctattgctgattatcatgccagtctaaatccaatgaactgacaaataagggaataaacttttgaacatataatcaagattatattccactgtgctgacaacagtataatcattaacaaataaatatgttctaggcataaatagaatttatacattatatataatcatgaaataaatcatgtgaaccatgcaacatataatgttatttctaatctttattaactagtaaatctgattatattgaaatgggttttgtttagggcacaaaacccaacaaggtggcccattgaaaaaagtcactttaggtgaattaccagtttgtgaatcttgcctagaaggcaaaatgacaaaatgttctttctctgcaaagggagagcgtaccaaggaaccactaggtatagtacattcagatctttgtggatgtcaaagctagaggtggttatgagtactttgtcactttcattgacgattactctagatatggtcatatttaccttatgcatacgaaatctgaaacgtttgaaaagtttcaggaatttctagcattggctcataaccaattgggtaaaatcttaaagatcttggaaactgataggggtggagaatatatggatat

SEQ ID NO: 275266 - DNA, 865 bp, Cannabis indica
agtctagtcgcgaccataggcaaaatacgaaaaaaaaaactcgctgtttggctcctagtcgcgaccatggtcgcgaccatgaaaaagggtcgcgaccatggaaagtggtggtcgcgactactggagcaaaatttgacagcttcagcatctttcagtaaaatgtgcataactttcacatacaaactccaaatgagttgattcaagatgcgttggaaagaagaaaaagaaatctaaaacttttatgttttgactttttccaaaatctgataagaacatagtcgaatttaagcttaaagtttcagctttattttcttgcagaattttctctattccatagcttgttattttccgaaatttgatcaattgatatattaatccaagtgtgaaacctgaaatcaaagaaaacaagcgtaattctattccaaaaagaataacaaagaaggaaaacaactataaaaagtgacccaaaatgtagactaaaaatagcctaacaacagtggttcaggaggaagagttgaggcggagccagcatgaccacttaatctcctaccagtggccgcctgagaagtcgtcctcagcaacatcacaaccctccattcaggagtgtgaaccatacattgcacaaggtcagcatgggattcgcggagtgcaaggcttcttccctgatcgagacagtcagactatgtccagaggaacatttatcttccaaggtacacctacatttattctcaaaattttcatgccaagtaaacctatatatttaggcgctgattggcaacgcttaaagcagcacttttttgtgcttttcaatatttggatgtaggagaattttcataaatatggaaaatgagggtatagttttttt

SEQ ID NO: 275267 - DNA, 865 bp, Cannabis indica
cggtcttgatggtggggtctctcctatggaggaacacactgcccctcccaatattgtgctgactccggttcctggagatgaggcgagacaggagctccggatagctaaacacaactacgccatggacgaatactcccgggggtatgctgaggtggaggccctgaagaggatcttacgagttgagatgcaaaatactctcaacaacccagaataccagaatccgtgggatctaaatttggatcccctgtcggactggttcggtcgcttcctcgggcccaccttagctccctttgctgcggagatgactggcgagtttgcgtcccagcttacccggtgtgcacctaggcggttcgctgcttgtgcatccttgaactccatcttccaagtccaggatctcagccactccctcactgtggtaagtattttgtagtttacttttctccttattattattttcttttcggagattcttacttatacttgtatcttttcccagcttgctgctgaggccggccgcctttccaagaacataatcaaccatggcttcgtcctgtccgattttggggacatggatgaagttaggaagatccttcaggatcttactgctgagaggcggctttatcaggaggctgctgagcgccgggaggccattgccaaggccaatgaggaagaggccaagcggagggaagcgcaggcggaggcaatgatccgggaggaggcccttcggagagataggctggaggccaggcaccaagaggagctgaggacggagggcgaagccactgctaaggccaggcgagagcttcgggaggccagggaagccttggaggaaatggttgccgaggtgaggtcgttagaggaaact

SEQ ID NO: 275268 - DNA, 685 bp, Cannabis indica
ccttcctgacgtcgttcatgtccccaaaatcagacagaacgaagccatgattaataatgttcttggagaggcggccagcctcagcagcaagctgaacaacaacacaagtgtaagaaagaatccccaagaagaaaaatgaagggaaaagcaaaactacaaagcacttaccacggtgagggagtggctgaggtcctggacctggaagatagagttcagggaggcgcaagttgcgaaccgcttaggtgcgcaccgggtaagctgagaagcgaactcgccagtcatctccgcggcgaagggagccaaggtgggcccaaggaagcgacggaaccagtccgacagggggtccaagttaaggtcccacggatcctggtactccgggttgttgatggtttcctgcacctcaacccgcaaaaccctcctaagggcttccacctcggcatacccccgggagtattcgtccatggcatagttatgcttggctatccggagctcttgcctcacctcatctccaggaactggagtcagcacaatgttgggaggagcaggatgctcttccatgggggagaccccaccgtcaagaccatgggcaggagtgtcagctctccgaggccgcttgggctcgtcctgggcaatcattttgcccttgcgcttgcgaatcagagcaatttcaggctcttcttcacct

SEQ ID NO: 275269 - DNA, 509 bp, Cannabis indica
actaggactagaacgccgacgaagacccaaacccgaacccaaatttagacctaggacccaaaattggaacctgaataagaatcgccgaactaggacacttgaacaagataaggaccgtgaccaggactggaacccagacctagaaccgaacacagagctagcctcaggcccaaactgagacaagaacacgggcccggacacgatcgtgtacctagaccggcattgagacgcggatatggacctaaatcttggacttgatctcaaacacagacatggacctagatagggatccggataagaacctggactcagaccaagacccagagtgggatcgaaatgctggacctagatttggaccgagatcctgacccagacccaaccttggacttgcacgagggacccgaacttggacctggacccgaacctagacccagattgggttctagacctggacacaaacccagacacagactcggacctgaactcaaacacccacacctagaatcaga

SEQ ID NO: 275270 - DNA, 598 bp, Cannabis indica
ttctccaaacaattgctccacccgagtaaaaaccatcccagatgtagactttctgtcatcaagacaagcctggaaatctgagtcggtatagcctacgggatttaaagcaccacccttgtagactaacacataatgcctagtacttttcaaatattttagaatatgctaactgcagtccaatgttcctctcctgggtttgtctgatacctgctcacaattcctactgcatagcatatgtcaggtctagtgcataacattgcatacattagactcccaactgctgaagcataaggaacccttctcatgtcctctatctcttaaggatcagtgggacactgttccttagatagacggataccaaatctagaaggcatttgtgcccctttggcattggtcattgagaatctctccaaaaccttatcaatgtaagtttgagagaaagcaagggatctgttctttcggtttgatgatctgaataccaagaacataagcaacttcacccaaatctttcatttcgaattgagtgtcaagccattccttatgtcagtcatttttttagcattgttgccaataatcaaaatgtcatcaacataaagga

SEQ ID NO: 275271 - DNA, 579 bp, Cannabis indica
cctcatgcatttttgcctataaaagccaccatctttcttcatttcggttacttcccatttcttgccaactttgctcgaatttcctagagagaaaattctcagacctagaacaaggccttcaaacactttgcgattttcccagttcttctttgctcgttgctaccagtccttctcgtcttcactcgacttgcatcaggacccccagttcaacacttcatcgtaagttttttgcatcctttgctctattactgaatggcatgctattacttattctgtttgttcttttctgggtttgcattcgaaatttctgggcatgcaagtgtttaaatccttcatgtagtctgtttgaatttactgctctagtgataggattgccattgtcacgcctccgttgtttattgtgtattttctttgtagaaggccatacgttcttcgtataatggttgcttagggcatagaacagactcttttctttctgttttctttatcgcgtaaagccgtcttctgtgagtttactgcacccgacacttgtccagggaatccttccagggtttcctgtatgacacgtgtccggagggg

SEQ ID NO: 275272 - DNA, 643 bp, Cannabis indica
aatttaaaaaataaaaattaaaattaaattttaaatttaagttcaccccccaaactaaagtgacacattgtccccaatgtgacattaaaaactaaagggaagggaacttacctgagcgccatgtcagtatggcggtggtggtggtggcgggtagaatccacctctcgcatccatgagggcctttgtgccaaacgaagaaaactgacctccaatgttgcaatttttaaagctttccttagattgagagtcaccttcataattcccacacaatagtcttttcatacgtcgtcgaaaagttcgaaagcgttctttagacttccctttcttcttgttggtagttacttctcgatcatcctttacaacttccactcgacaacaagtaggaatttcagttgcggcaaataccttgaaagtctcttcttctttttgaacacgcaactttaactcccccttctgtacatcaattaatgctcttcccgttgctaggaatggtcttccaaagatgataggaatattctcatcttcctccatgtcaagtattaagaaatcagcagggaagatgaacttaccaacctttaccaaaacatcttcaattataccccgaggatgagtcaaagaacgatctgccatctgtaaagtcact

SEQ ID NO: 275273 - DNA, 516 bp, Cannabis indica
acaccatcagtcccagcatggaaagtatttgtagacggagcctccaacgagaacggatccggagcggggatcgcaatgatatctccgagtggactccgactctaggcagccctacggttcgacttctcagcttcaaacaacgaggctgaacatgaagccttgatagcagggctgagactagcaaaaactataggggccaaaagagtagaggtctacagcgactcccagctggtagtgaaccaggtgtcgggagagtatcagacgcgcggagaaagaatggccgcgtatgtagcgatagtccgggaactgctccacgagttcgcggactataaagtggaaagaatccccagagaaaagaacgctcacgcggactgtctggctaagttagcttcggacagtaaaattgagaaactgggggtagtacccgtggaacgcttggcagagccaagcatcaaagtaaaagaggccataacaacagttgggcaagaacccagctggatggtccccatcatagaa

SEQ ID NO: 275274 - DNA, 106 bp, Cannabis indica
aaacttggtctacagtaccgtaaagacttagttttgaccaagttaaaagaaacaaaatatatataatataataataagtaagaaacagactcccctctctctctct

SEQ ID NO: 275275 - DNA, 860 bp, Cannabis indica
agggtatttttgtagtagtgattatctaatttattagatttggccattttcttaatttttttaaaaagtggacatttactaacttagttaccaaattgagagtcattttacatctcaacccaatacaaaatactgaaaaagtatattccttattttgaattaaagtaattatattaaactatacaatttaaataaattaattttttaatcaaattactaataaatttaagtgtgattttatattttaccacacaaaatttttaattataaaatttgaatttgtggcaaaaatctttatgtttttacaaaattagatttataactatcattaacatttttttaatttaatataaattattttaaaattaaatttgaaacatattttaaaatattacattaatataacaaatattttttataataagaaaatactaaactcttaatcatatatattcttaatattcttaatgggcattacccataaataagtaatattaaaaaattttagagtctttatgattaatttttctatttaattaaaaaatttctctgttttacaatatatgtgctacgattaatccatctgttgaaaaataataataataaaaaaattcagcaaaaaagtgataaaaaaagtagaatttgacttaaatattttttctatataaacatatttttgatatactgtaaaaaggggtattttttatttttatctctaaaaaaaaagagaaaaaaaaaaaaaaaattcaaattttcttttattattcgctatgggacaaaaatgtaatggtttaatatttttaaaattaatatttatagttaaatttatttactacacattaatgagtaatgcccattaa

SEQ ID NO: 275276 - DNA, 865 bp, Cannabis indica
tgtaggtgtggattgtttttccttattaggaattcaactttccgcttcaagttgtagcattcatcagtgtcgtggccgtagtctccgtggaaccgacaaaactttgtcatgtcccttttgttggcatctttcttcatgggcccgggcttcttatacggggccagcgactgagttgccatgtatacactttctatatcttcagtcaaaatagtgaatgcagtgtatttggcatgattctcccggggagcttgttcggatttgccaataaactttcctttcatcccattcccttgcttatggttgttgctggaacgcttaccacttgagcttgaattatttgggtagtggggaagttgggcggatattccagtggaaggagcttttgacttgcctggcttttgctcacctttcgctcgttgaataacttcttcgagcttgatgaagccttcaactcggtcaaggaaatcactcattgagtctatcggcccgttcttccttatatctttccagagttcaccgaggactttaatgccccccagtattgcggacaactttccatcctcagttacacgtgaaactttggtcgcctccgtcatgaatctactgatgtatgcccggagaggctcgcctggtcgttgcttaacttcgaccaagtctcccaaatgcaatgggagttggcgcgaggaggataattgtgcatggaattctgaagagaaggttttccatgaactaaactttctaggagccaacttgaaataccactgctgagcggcttccgacagagtggcagggaagattctgcagcatacatctccttgtacaccttgcaaatccatttgcattttgaagtacttgagatgggaaa

SEQ ID NO: 275277 - DNA, 400 bp, Cannabis indica
atctgaataggaagagtcattacattccgctgcaatcaatgtaaggtttgttaaaatttatatgtgtttatttacatttgtttagtaaattcatattaggatgttaaacaacatacatggtaataaatctagatcctagtaaaataattctaacaactgcccttagcgccatggtaatgatttactttcatgaaatatgaattaaaacgatgtttgtgatgatttggatggttgcatgttggtttatgtgattatttgatgaatgtatgtcatttaagaaattttccatgaaaatatttttattttctttttgaaaatattttatttggattccttgtgaaaatttaagcaattttctttttttacgaaactcgattccgataaaaattgaaaaagttat

SEQ ID NO: 275278 - DNA, 205 bp, Cannabis indica
aaagcctatgttaagaagtgtgacaaatgccagtgattttcaaagataccacgagctccacccaacgagttaacacagatgcaaagtccatggccctttgccatttggggaattgacctgatcggacaattacccaaaggaaaaggaggagagcagtatgtagtggtagcggttgattactttactaagtggacagaagtcgaac

SEQ ID NO: 275279 - DNA, 706 bp, Cannabis indica
gttcagggatctcggatcccgatgattttggccttatcagcaaaaggattgttgtgtgatggatgtctagggtttctggccgtggtagtagataccaatcggccagatactgtttggccagaagacatcaaggtggttagggaatttctagatgttttccctgaagaacttccaggtttaccacctcagcgagaaattgatttcgttattgacgtggcacctggtgcagaaccggtttcccaagatccttacagaatggctccagcagaacttagagaattaaaaattcaacttcaggggctgcttgacatagggtttacccgaccgagtgtgtcaccttggggagctccggtattgtttgttaagaagaaagatggatctttgcggatgtgcattgactaccgggaattgaatacgcaaacaatcaagaataaatatcctttacctaggatcgacgatctttttgatcaacttcaggggaaaactataacaccctaactagcataggcgtgttgacgtgactttaaacgtactgtgcagctcgttgctattcaacgaggttaatgaaaattgtgattaattaaaattttgttatttaattaaaattatttatatttcatacaaaatattttgggatcccgattacaaaacactttacaaaagtttactagttctttacaaaatattcgtcgcccagcgactaact

SEQ ID NO: 275280 - DNA, 783 bp, Cannabis indica
ccatgccagaagttcccaagaggatttcttttggaagcattttccttaccctcagaacacagtttcttgtacttctttttcaagaattttgcatagttcttggtcagcaaatctacagcttcatctgagaaaccagcagacaaatctgggatagacttcttttcttctttgtgaatgaacgcaatattgttgtcccctttttctttgttcacatccttcttctttttttctttcttccaccttgttaatgacatttcataattctgcaaggatccaatcagttcatcaagatccagttcctccacgtttctcatttcttcaatggaggttactttagacataaatctcctaggtagaactccaaggactttacgaaccagctttgcatttgaataagtctttcccaaagcataagattcatttgatatgtcacacaatttagcatggaactcagccaccgtttcttcttcctccattgataaatcttcaaacgcttttgccaaagcacgaagacgggatttctttacagcatccgttccttcatttttaattcgtagtttttcccaagcctctttggccatctcacagtttgcaatgaccttcaattgatttgtggacactgcattgaatagagcatgcatggccttcgaattaaaattggccctctccatctcatctggagtccacaagctcataggttttggtttggtgacaccattatccatcaccgttgggcatgtccaaccatcttctatggccatccaaactctttcattcaccgcc

SEQ ID NO: 275281 - DNA, 583 bp, Cannabis indica
atcccaattttttcactctgacgtggcatcacatgaatggtgacacgtagagtccacttggaatatctgctcgggaagaattgtccgagcaggacatatcactagcacgctcagagcaaagtatttagcaatccgcgcagagtaatcaacgcttagagaattcggctttcgcatcatgagtcatcagcacaatccctataactccgggatcaatttacgtggatatggcatacacacgatcccactattagtgtacccagcctcaatcccacgatccttgtattcagcattgatcccatgatgtttctatttatatgcattgtaacgagaggggaaactcttcctccccaagcttacttgccctataaatagtgatgtatgttcactgggcaagggatcggtcgaaaagcagttgagctaagactatactattatctaagaattatatattcagagatattgttgtaagagctataagaaaaggaatctttctccttgatattaagtcaatacaagtaacgaggattaggctattaccgaactgatcggggctgaacctttataaaatccctgtgtcttatta

SEQ ID NO: 275282 - DNA, 319 bp, Cannabis indica
gacacatattcaacaatatccctcttcatacccggccaccaatataaagctttcacatcatgatacatcttggttgttcccgggtgtaaggagtacagtgtagtatgagattcatcaagaatctcctgtctgatttctttgtccaccggcacagagattcggttcttgtatcgcaacaacccatcaaataaacacgaaaagtctcttgccaatccggcctctaacttctccttatgcccccgtagctcaagatcgccttgttgagctattctaattctttccaatgattagactgtagggttgttggaaattattttac

SEQ ID NO: 275283 - DNA, 489 bp, Cannabis indica
gcacccgcccctgttgcccaggccgagatagtagtagcggcaaactgaatggaacctctgtatgaaaggttccggaagcaggcacctccggtttttctgggaggtctggatgtcatgaaagccgaacagtggctaacggtgatcaccaagatattgaactttatgggtgtcaccggaaataacagagtggtgtgtgccacattccagttccaagaagacgctctagtttggtgggacatggtgtcttagattcatgatgtcaccactatgacctgggaaaggttccaggaactccttaatgcaaaataatacaatgaggtcgttagaagtgccaagaggaaagagttcacccacctgacccaacgggaaaacatgagcgtgactgagtataccacccagttcgatcggttggcgaggttggcctcgagattagtgccaaccgatttcagcaagaaagaaaagtatctggacagattaaatgtgaagatc

SEQ ID NO: 275284 - DNA, 659 bp, Cannabis indica
cgtagacctacgtgttgctctcacacgtctagttacaataaggccctagaatagttcatctcggttctgattaccgagtccaacttgattatgccttgaacgcataacccttaatcttaatatgtataacacataactgatggtgcccactgcaccattggtctatctactgtagacctgcatgttacgctcacatgcctatttatgtctacgtggcgtagacctacgtgttgctctcacacgtctatatacgataaggccttagtagggtttacctcggttttgcttaccgagcctaacctggttatgccttgctcgcataaccctattcttatatatatacgtaatccatacattacgttctttcaatggtttatcctggtgatatataccaggtctaacccagttatgtctcattcacataacttataacatacatgcgtgtattcaacatttactacaacatatataatcttagggtaataaccctaacttacaaacaagtaatcactcatataatacacttctatatactcagataacatttactaagaatgttaaccctaactcatgctttcactggattcttaatattctagggtaataaccctagaccgcattaaaattaactcaaggtaccaacttaccgagtctagctt

SEQ ID NO: 275285 - DNA, 546 bp, Cannabis indica
ggaaaccctgaactagtatgcaagcatctccacctcatgtgccaaaagcatcatcctcttggtgacccagctaagagaacaactaaaattcctagaattttagggttaaaaagcagagaggagagagaagagaggattcactgtttgttatttctagtatccttgtactacaatatagctttgaagtttagagcatttgcttatgattttgcagataaatctgacagatttgatactgatgcaacttcttgtacggttaacaatatatccttcataacaataaatgagagttaccgttaatcttgctttctaacaatcagtgcattaaaaaaattacttaagcatgatgttgatgtttgttttgttaattgtttatttagtcaaaattttaagtcaatttcataacttaccaagttgactcagacattaatctattcacttcattttattttctcttaaattttaattctaaaagcatgtaaacacgtatacataaccatataatcagatacccacagtaattatagtattgaactctggtttata

SEQ ID NO: 275286 - DNA, 558 bp, Cannabis indica
ggttgggatccgggtctggctcccaatttgggtctaggtctgatttggagtccgggtcctggtccggttacggttctggatctaggtacaatttcagttatgattccaagtcaaagtcttagttccaatcccaatcaacttctggttttggttccaattttggatcccagggtacgggttcgggtccacttttttgtttgggactgggttcaagttcgggtgtgggttctggtgcttgttagggttcgagtccagggctgggtcccaaatccagacaccgactatgggtttcgtccaagccctaggtcccgattcggatcccaatctcgggtcccagtctggttcaatttctggtgcagggtaacgagctggttcctaggttcaagttcgggtatgggtcgggtactatgtcccgttcctagttctttttcccaggtccctatcttgattcttggtccaggtccaggttattgtgtgggtttgggtcccggtttaggttttggttcgtgtccttgtctcggttcgggtttaggtctctgtttgggtttttatttgggt

SEQ ID NO: 275287 - DNA, 619 bp, Cannabis indica
tagtatggaagactatggaatttctgcaccaaagaaggagaaaagaagatccaggttcagatcttggtgatgctcttctacagaaaagaatcaagggctagagatctgaacggaatgagtcatattattccgctgcacccactgtaaggttttgtaatatcccaaaaaatatattgatattttaattagacatattttattaaatatgtgattaagtgggtattagagtaggattataatcctacttaaactaattacgagttgattaggaaaatatgagtaaatgaataataaagcgtaatttattaattacggagattgtattgaaatatgtgggtatcgtagataccataattcgaataaaatattttcgggcctggcaattgtggaactcgacagaatggtcagaaatgtcacgatggttgaaattgtgttatatttgaaattataccggactaggttaaaatgttgagaagtaggttaaatcgggaaagttagaaaattatcaaaatgcccctaggttattttaaagtttaatttctttggggggtaaattagtcattttgttaaatgggaattttcacttttaattttatgggctgattgtatattttaaaaa

SEQ ID NO: 275288 - DNA, 970 bp, Cannabis indica
ttacaaaaattgcatatttcacatattaatcaaacaatacccctagagtttaataaaatctccgaaattgagaaattacaactctaatatttatttttaaaatattggggtccaaaataattaaattcataaataataataaaataataaaaattagtgctaattgccttttctaatccaatttattaaggcggtcgttacaattatccccccgttaaaaggatttcgtcctcgaaatctaacttgaatagctctggatatgttgagtcctcacattagactccaatttctaggtggcttcctccaccttactgttcttccagagcactaaatcagaacaatagtcttgtttcgaatttgactaggttgttctttataggataagtctgattgcagttcaagggcttcataactcaagatatgagtcgggtctgacacgtatttccttaacatggaaatatgaaatatgtcatgaacagccaacaatgctggtggtaaggctagccgatacgctacctgcccgaccttctcaagtatctgaattggcccaatgaactgttaggctaaaattagtctaagtttcgggtcatattttcggttagttttcactctttgtttctagttttaggactattttacgcttgattcttttgtttcaggtcctcgggtgtttaaagaaagtatttacaagaattgaggacaagtggtgaaagaattgagaagaaaaataaaaaaaaaataatgttgctgccaaatcccgtcgcgacgggcaatatcccagtcgcgacgggaactggcagaaagattttcaagaattcgctgcttaaccccgtcgcgacggggcctttgccagtcgcgacggggacctcagtgacgggatttttgggcagtttcgtaatttcacgaattttaaagatgagatttggtttaaatagagagagttcgtgaaaattagggattattcagaatt

SEQ ID NO: 275289 - DNA, 680 bp, Cannabis indica
aagaaaagtggcagcaacagaaatccgattcttattacagctttgatcaacattcaagtagtataaattgtcaaattttctacccatcccaatcaccttggtcttggaagtgtcctgaatgatacaatcatcatcagaaaacaagaaggtgcaattagttgtggctgttaatgaattcacagacaacaaattacacttaaaggtaggcacatataggacatttttaagaacaagttcaggactcaaatgaactgttcctatgcaagaaatttcagcatgcaaaccattaggcatcaagacagttttcaatcgggtattgacagaggtatttttgaataaattgatatcataacacacatgatgtgttgcacctgtatcaataatccaataagagctaggagtagagattttcataccagaatgagacacaacaggctgttcttcagagacattttgagtgctgttctcagtggctttttgagcaagaatagccatcagcttctggcattgaacacttgacaagcttgagatgagatctctttccattgtaggctcctcggccttgccttcatcagcaccagaaaaattaacacctgctgattttccaggatttcccttagcatctcgattaggaaattttccatggtatttatgtctaggaggatatccattcagtttgt

SEQ ID NO: 275290 - DNA, 465 bp, Cannabis indica
ttatactaatcttaccttgattcggaattcaggtgtgccggtcaacctgagtggaacgaactgctcggcgatttacaggctcctaaaccataataatcacaacacttgataagtgacatgctaaatcacttcccggggacctaaactagaaactaaaagtttccctatcgataaaaagcatggcaataccctaaacaacacaaaaatggaaagaactagggttcccaaaattgtcccaactggtagaccggttctacaaccggaattccggttctgggaggaacccagaacaccaatcggaattccggttcctacaggctacactgaaccgaaattccgattcagtgcaggaaacttcaaaaattcatttctcactaaaatcaaccccaaacttcatgcaacctctaaatacctcaaaaaacataacccaagcaataaaacaaagcttcaaacacagaaacgcat

SEQ ID NO: 275291 - DNA, 392 bp, Cannabis indica
ttttaattaatcacgatttccataaacctcgttgattagcaacgagctgcacagtttgtttaaaaatcacgtaatgcgcctatgctagttggggtgttacaatgagaccttactcttctttttatactaattctactagggttagggttaatttatttggaataaaaaatgataaaaatagagcaaaaataggcactattggctggccatgaagtgggcccaacactagttagatttttgccatttaatatatttattaattacactttaaaatttccatttaatatatttattaattagactttaaagtctcttaattaacaaacaaactctaaaattctatttctttacattcaagccatatcttagtgaaaattcataaactaaacata

SEQ ID NO: 275292 - DNA, 545 bp, Cannabis indica
atggctttcaggtcttggtacatcttcgttgaccctggatgaaccaaataaggagtcgtgtgagattcatccatgatctctttcttgatgttttcatccataggcacacaaactcgattcccaaatctcaacattcccgtttcatccactgagaaatcactagccttcccagccgaaaccctagctcgggtttttatcaattccgaatcttgcttttgtgcttctttaattctctctagaagagtggattgcagggtaatattagccaattgccccacgaccaactcaatctgagctcgagtcatttcatttgctagctgttgggagatttgcttcatagtattcaattgactctgaccttttctactcaaggcatcagcaaccacgttggctttaccagggtgataaaggatctcacaatcataatccttcaccaactctaaccaacgcctctgtctcatattcaagtctttctgggtaaagaagtatttcagactcttgtgatcagtctatatctcacatttctcgccataaaggtaatgccg

SEQ ID NO: 275293 - DNA, 582 bp, Cannabis indica
tatttattccaaactttagtagaaacttgattagtgtttcatgtttacaaacacaatcttatatattgaatttttcgagttcttattgttcaatttctcgtaatggatttcatatatgtgttgctcacatggaacaagggctttatgttttaagacctaatacacaaatctcactaaatactgaacttttcaatgtagctaaacctagaagccttaagagaaaagagattgataatgatgatcaaacttatctatggcatttacgtttaggtcatataggttttgatagactcaataggctaaccaaagacggtccattgaaaaatgtcgtcttaggtgaattgccagtatgcgagtcttgcctagaaggaaaaatgaccaaacgttctttctctgcaaagggagagcgtgccaaacaaccctagggttagtgcattcagatgtttgcggacccctgaatgtaaaagcccgaggtggttatgagtatttcgtcactttcattgacgattactctagatacagttttctttacctaatgcaaaagaaatctgaaacgtttgaaaagtttcaggaatttcatgc

SEQ ID NO: 275294 - DNA, 796 bp, Cannabis indica
aagatatgacgacatcatctttaaggtaaaaggatttatattatcataagagtaagtactttgtcacccagaagaatttaaacatgaggtggagaagatggctggatttggttaaggactacgatagtgagattttatattaccccgggaaggccatcgatggggccgatgtgttgagtagaaagaattgcaggcaagtttgtactactgttctgttagccttaactagcctttgaaatggttaacgctgagattgaattcgtagttggaaagttacacagtttaacacttcaatttgatcgattaggaagaatcagaaaagcgtaattggaatatcctgaataagttgaggttagaggcgatgtaatggccggttggcctaaagactttttagtttcgaacagtggaatattgttatttaaagtttgagtttgtgcttttaatgttgaaaaggtcaagaagaaggtacttgatgaagtttataccacaccttatgcattgcatccaggaaccaccaaaatgtatcagaacttaaaaccctatttatgatgatatgggatgaaaagagaagtggtggattatggttcaagtatttaacttgccagcaaattaaagctgaacaccagaggccggcgcggttactgcaatcttttgtccttcctaagtgagagtgggaggacattgcaatagattttgtaactagaatacctagaactgcggggatgtatgattcagtatgggtcattgtggatagatttacaaagtcgactcactttctaccagtgaaagttaccta

SEQ ID NO: 275295 - DNA, 593 bp, Cannabis indica
attaataaaacatatcccgtcggttggaaattgggaaattttgagggttttcggggaaccctatgccgtcggtcctagcaagaaccgacgacataggtgaacactttagttgacacgtgtgcacctatgtcgtcggttctttactaggaaccgacgacatagggtttccctaaaaaaccctatacagcgtcttcttcttcccctcttcttcttctccagcataaccagccactctacagcagagagaaacccacgaaaaccctcaccaaccacctctaaaaaccccatatctctctcatttctacaccatttcaccgccatttttgtcttaaaattttctattttcaatatataatcccatacactaaaaacgtttgttttttttacccatttacactgtacccgaaacctattttaaaaaaaggtggtggtttaactccggccaccgattttagcggagaaaacgtttattctcaacgttcattaaggtataaatataatttctattcatattattaatgtacattgatatttttttcatttttgtaaatttgttttgggttttttttcattttattaatattatattgtgt

SEQ ID NO: 275296 - DNA, 582 bp, Cannabis indica
atcctgcgaagatcagggcattggtggaaatgccatcaccaacccagccaaaggaagttcaaagcctcacaggtaaagtcacagccttaaaccgctttatatccagatcttttgataagtgcaatgaggtttttcagattttgaaaggcaacaaaaggttccgttggaccgaaaagtgcgagcaggcctttcaaactttaaaaacacacttggggcaacctccgatcttgtcaaagccaataactggtgaagtcttgtccatctatttagcagtgtctgaacatgcgattagttcgatactagtacgcgaggaccaaggacatcaatacccagtgtattatgtcagtaagcgattactggatgccgagacgcgatatccccaaatggaaaagttggcatttgccttgataacatcgtcaagaagattgcaaccttatttccaggctcacagtattgaagttttgacgaactaccccttgaggcaagttctggcaaaaccagaggcgtcggggagattgttgaagtgggctatggagttgagtcagttcaacatcaagtataaaccaagaactgcgatcaagg

SEQ ID NO: 275297 - DNA, 373 bp, Cannabis indica
aatttctggttatgtcgtttggattgaccaatgctcttgcagcttttatggatttgatgaatagggtattcaaggatttcttagatatttgtgttattgtatttatcaatgacatccttgtgtactctcagtcagaagaggaacatgagcaacatctctggatggttctacaacgacttcgggaacataggttgtatgccaaattcaagaagtgggaattttgactgccataggtgtcttttcttagacacattgttagtaaagaagggatcaaagtggatccaggaaagatagaatccgtcagagattggccaagatcgaaaacagtgacacaagttagaagtttcttaggtctggctggctactatcgtca

SEQ ID NO: 275298 - DNA, 632 bp, Cannabis indica
tgttttattattaattattgtattaatttgtattgtgttattatttattattttttttactaattattagttattaattattaatttttattaattattaattaatattttattattaattattaattattgtattaatttgtatttttttattaattattattattttaataatttattaattattaattattaatttgtattatttattaattattgttttattattaattattaatttttgtattaatttttattgtcttattaattttttattatttattgattattgttttattattaatgattaattattgtattattttttattgttttattaattattaattattgttatattattgtttttttattgttttattaattattgtttttttattaattattgttttattattaattattgtattattttttattgttttaataatttttaattattgttttattttttattatttttttaataattaattattgttttattaattattaattattgttttatcttttattgtttattactaatgaattattgttttagtataaattagtaattattttttttaatttttattgttttatttgattattgtttaattattaattat

SEQ ID NO: 275299 - DNA, 805 bp, Cannabis indica
aaaggcaaaaagtgagaaaatgaaacgcccggggaaccctgccaaaaccggctagccggtttttgtggccctgcaaaccagctagccggtttgcaccaggtttcccaaaaccattcattccttgctcaattctccaccaaatgcaatgaaaccttccagagctcctatacaatgcataaacaatataatccagccagtatttcacagaacaaaccaataaatctcaagttgccattaaagctcaaagcttgagtttcaaaactcaagcttgcttagaactaacaccatacaccaaaatcaactaccagaacctttaatcaaccaatattgagcataaaaactgaaccctaaccatttctaaacctaacagcccctaaaactcaatttcacatattcaacctaaacttatattcaagaactagggctaggagttgctagagcttaccttggtttgatttcttgttggatcccttgctgaaacacaaaaaattagcagcaaaactcccttgcttgcttcagccgaaagaggaaaagagaggaagaggctatgttgatttttctactttttcttattttctctaaatggaataaagattaggaaaaatccatttcctttgctgaatatagcttggctaggtgtcaactaactaggaagccacctatcttgacttaacaaaaagtccaaattgccctttgactcaaacttagggtattgaccaaaactaggagtaaaatggtcaaattccataaccccgctcaatcctgataatttattttctcaaaaatatttcccactaagaaataa

SEQ ID NO: 275300 - DNA, 549 bp, Cannabis indica
ttcttttttccaaaggtagcattgaaattggttgctttggttgagattattgttctggtatatgtggttgtttaacgcccaaatgtgacttccactagcggtggttgtagtatagatcgggcggtcgattccacagggaggtgattatggacaaaagcgttagtagaaaaataaaaacaaaaggttaataataagtgataatagtaacaaatgattttgtggtttttgttttggtaataaatattaaaggaaagcaaataaaggtgtaatcaataataaaagagagaaaggcttcaagaatcatccatatgcttgtttagctattttgtacctttgattcactaagttgacacaatgatgtaacattaaagttcattatattttgagtatacaagttcttaaaaataaaagaaataatttaatcttatgtagaacctagaaatgacattatacatcaagcaataatgcaataaaagattaaatataaaactaaacatcaatattatttttactaaatagtaacacatagaaagagcatgactaatccta

SEQ ID NO: 275301 - DNA, 413 bp, Cannabis indica
tagcagcaagaaagctgaggccttactttcaagctcatcctattcgggtgtataccgaccaaccactacgacaaatactgcaaaagccagatgcctctggaaggttactcaagtgggcggtagaactgggtcagtacgaaatcaacttccaaccccgaacagctatcaaaggccaagccttggccgactttgtgatggaatgcacaggcaaaactgaaagtataccagcaagcgatctcgagccaataccacaaccaagtaatattaaagacaaaccgacctggaagctacatgaagacgggtcggcaacagatcaactatctctggacttaaactagcgaaggaaatgaaggctgaacacattgagatctgcagtgattcacagctggtggtaaatcatgtatcaggcgaat

SEQ ID NO: 275302 - DNA, 484 bp, Cannabis indica
tttgacatataattaggataattattatttatatattattttattcttaaaataataattatctaaccacatttattttaaatttgaaaatgatattgaagattattttttttttcaaatcattgatcttatttgatatttaatttaatttgataaaaataattcaaataaatctagatatttaaaattcatttttcgtttttgaattttaaattttgagatttttaaggttggttttaacaaccctaaattttcaaaatttagttggttagtttaaaataataatttaattatattaatatcttatttcacaactgttacatggacaatgtttgtttatttatttatttatttattttgtgtattcaattttttttttaacaaacctattatttatttgatctaaattactatgattaacttgttgacagatccaatgatgtgattttaatcatagttcaattgtcaatagatcttataaata

SEQ ID NO: 275303 - DNA, 586 bp, Cannabis indica
tattatcaatgacagaaaaaagactagtgcaaacacatttagatctgtaataatcagatggactaaatttgtagtcccagacttgcaacataaccaaaatggcaacaataaattataaattgtgaataatcaagtataacaactataataaaactataacaaaactaaaaacaaactcccaaacagaaacaaccatacaaatataaacagcaaacatctgaaatcgtattgatacctaaaaactaacagcaaacaactatacctaataaaaatcccaaaacacatcaaacataaacatattaaactataaacaaactaagaggaaactacaaccaactgattacacacactaaaacaaaaacataagtttcaaaaatatctaacaataaattacaaacacatacagaacctaaaccacaaacggacactataacgaaagtaaatacaatcaaattaaaaagccaaacccaaaaaagaacaaaataaattgaatcaaacaaattaaagacctcaaaaattaaacaacatcaaacgaaattttaaaaagcgaaaccctaaaatttacacaaagtagaataaaaaaaaa

SEQ ID NO: 275304 - DNA, 587 bp, Cannabis indica
tggacctagatagggatccagatacgaacctggactcggaccaagacccagactaggataaaaatgctggaccaagatctggaccgagatcctgacccagacacaaacttggacccgcactcgggaccccaactaggacctggacccgaacctagacccagatcggggtccagacctggacacaaacacggacacagactccgacccgaactcaaacccacacctagaatcagacccaaagctagacccggacccacacccaaactcgaacccagaccaggatcagaaccaaggacctagacgcagaactgaatccagactaacatcgggattggaacttgagactttgacccaacctagaccaagacccgaacccacactcggagcctgatctggacctagaatgaaatctagacccgaacccaaacagaactaggccggggacctagtacccgacctagacccgagcttgaacctaggacccacctcgtgacccggcaccagaaattgaacaagactaggacccgagattgggatccggatctggacccagggcttggacaaaacccgtagtcggtgtttggatt

SEQ ID NO: 275305 - DNA, 504 bp, Cannabis indica
aaaacgagcaactgcaaacttaagttgatagctcatcaataaaaagtagctcggtatttcaacaaacaagtgaaagctcggaagttcttcgtgggagatatggtcctaagaagggtattcctaaacaccaaagacagcacgtcaggtgtactaggacctaactgggaaggaccataccaagtggtcgaagttctcgactccggagcatacaaattaggtagtatgacgaaaaaatgcaactcattctagtaccacgatactggaatggagaacatttaaggaaatactaccaataaagtactcaggtcggcttgaccattttaaagtactaaatgaacattcgcttctaagtgaatggccttctgggcggactacgcgcaaaggtttcagaaacaaagtactcaggtcggccagaccactttaaagtacagtttcttatgtctgaaatttgttttatttcatgttaagctaaaagatcagattagatcaaatagctctgatgta

SEQ ID NO: 275306 - DNA, 656 bp, Cannabis indica
ccaagcgttccactggtactacccccagcccttcgatttcactgtctgaagctaacttagccagacagtccgcgtgagcgttcttttcccgagggattctttctactctgtagtccgtgaactcgtggagcagctcccgcactattgttacatacgcgtccattcgctcgccatgtgtttggtactctcccgatatctgatttaggaccagctgggagtcgctgtagacttctactcttttggctcctacggccttcgctagtctcagccctgctatcaaggcctcatgttcgacctcgttgtttgaagctgagaaatcgaaccgtagggcttgttgtcgagcaaattttgacaacaccagttttgtgcgagtattcaagggctacttggataccaaaaaatagatatgcgagtactcccttagaatagcgagtactcaaagaatatagtgtataatatatgcgagtattgtaaatagtataaaatagacacagaaaagtatagtggttcagcaggagcttcgggcttggcctgcctaatccactgttgaaaagagtgctctagctctgtttctttattcagatcagccccctttgaatggagggggaaacctctacttataggtagtaggcatcggttacaaataatggccataa

SEQ ID NO: 275307 - DNA, 850 bp, Cannabis indica
tctaatctgggttttatttttttttttctagttttttaatagtttaatatgtttatgtatgatgtgttttgggaatattattaggtatagttgtttgctgttcttttaggtaacaattcgatttagatgtttgtagtttatattcgtagagttgtttctgcttgtcagtttgtttttagtttttttatagttttattatagtttgtatacttgtttatttacaatttatatttattgttgcaaaatagtgtttttttagttgcattccaggacctctttcagcttccgttgtaattcttcatagttacaattgactgaaatgtaatgtccactagcttcataattttcataattcattcgatcatcaaattgtccattgcagaagactaggaatggaatgtctttttttcctgtgattttgaaattgttattagtgcaaggcaacgatattgaaactggtttgattctgttatgaaatagagtagaaacttacttctattttcttccctttgttcaagtcttatatttcctgttctgattcctgcttttgtcatttttatttattttattgctgttaataaactataataaaactaaaatgaaactattaagaaacgtttaaatttatttcagaaactaactatttctcaaagtgttttctccttttcttatttccaaaataaattcttgcaaacaattgaattaaactaatataaaataatgatgcaactgtaaatcaacttgaaaaaccacaacacttaattcaatttaatatagttgtggtcattgtgctttttcatcagttttatttgaatcagatcaattgaattaatagttgtatttttctcgt

SEQ ID NO: 275308 - DNA, 319 bp, Cannabis indica
ctggtaaaataattccaacacgcatgtgactaggcgaaaatgtctaggattgctctcaaaaattttatcaattctgattttacttcgagcaacaaaccctttccaatcttagctttctggtcgggatatctggatagatctcgatctcttctaactcttccacaggtctaacattgctgcttgggtcaccaagtcaaggatccacatcttcatccccgccttgggaaattccctacttgggaatcttttttcccttgtctgtgctctggctggaggatacttccttcttagccttggccactacaaggttataacattc

SEQ ID NO: 275309 - DNA, 490 bp, Cannabis indica
ctccacccctatcagatcaaaagatctttttattaaacaaattcttaataactgttttagaattaacaattattcataaacaaagaaataatttctagtgtttatgtagtaataactcttgtaaagactttaaataactatagaatttgtatcaataataaaaacacatacacatacaaacataataaatataataattggtaattgatttataagataaagtaatgaagctcaactcatagattgcaatttatttgtaaaaaaaaatattataaattaaaaacaattgattgcaatattatgagagcaggaaataaaatcccagacttgaaatccaaattgttttaaaattgaaacaattaattcaaaagtaaataaataaatgagcttcttctttatctttgacgaatccatccctttatccagctttcagatccaactcgctaagacaacacctgagtttaagaagcttgagctataagaagaaaaa

SEQ ID NO: 275310 - DNA, 451 bp, Cannabis indica
attttagttttttcaatccaatccaatccgcacaagtgcggatatctgcattttgcggattggattggattggattggatcgtgcggattggattggatcggataatttgtgaacacccctatgaaatattattgtttagatttaagaattttgttgtgaaaatgggattcggatccgtgatcggactgtgaaaatggtgaaaatgggactgtgtggccattcggatctggggaagatgtttgtccgatggttccaggtggtccgatggtccgatggttcacttggctcgggtccgatggttagatgatagggaccgatgggctggttttgggtgatgggccgatgcttggtgtatggaccgatgggtccgatgggcactctatcgggccaatcggacccatcggtccaaagttttttttggcttttagtattttaaggtgggccgatgca

SEQ ID NO: 275311 - DNA, 912 bp, Cannabis indica
tttggagggtgcgagagaaggtcctaaaaactgttctcctgacataaaaaagtgtattgataatatttgtacttcttatgcagattctcatgcttctttgttgcctagtcccactccagatctaaaggaagcttggtcccctcctcctccggattggattaagctgaattgtgatgtcaaggtgggtctaaatagtttgtgcattgctgttgttgcaagggatcattttggcagagtgattagagttcagacggctcgggaagatttctcggatgctctgtgcggagaagctatggcctgctgcttagctgtgtctgttgctttagatattggatccaagtttgcgattgtggagaatgactcgaggatggttatcaatgctctcaatgggacggaatctcattgggctcttgaaaactatgtctcattttgtactaattcttctcctttatttattagttgtaatttctcttatgttcgtagaacttgtaattttgccgctcataatgtggctagatgggcgtttgctcatcaggtttttgggactatcccggtgtcctccttacctgacaatatattttgtaatgaccgagaggtctaacttatttgaatttatgatataaacgctttttctcaaaaaaaataatacaaatgttttatttgattaattatttaaattaaaattatttattaaatcatatttaattatttttaaataaataatataatcaactttaattattgatattacattaggcacacctacactgtgtctgaacatagtgtaggtggcagcgcctccctctgtttttgttaagacaagagttgtgtgttttgtcctaacaacttttgtctttttctaatttatttaattaattaattttaaaaataaattatttattataaaataaa

SEQ ID NO: 275312 - DNA, 555 bp, Cannabis indica
caggatttcactcactatttcactcttttttttttatatatatatttgtttatttacagctatttttcttttatttaagacaatatctatatagctgttttatttaaaggggagacaatttctaaggcctgtccccgggccatttgtatatatttagacctgccctttaaggctaggatttttatatttatacatgatctcttttgatgcacatatttttcttttggacctgtcctttggatcaggatgtttatacttatgctttttatttttgtgcatactctttttgacctgccctttgggtcaggatattttacttagtgacctgctgtaatacccagaattaagaaaaggattagcaaaaccctaattaaataattatgagttaattgaggaattatattattatatagttcaatatatgtgaaattatatgaaatttaacatgttagagaccccgttggtgagctaggggcattttggtaattgtgacccgagaagggtaaattgttgagattaatttaattacgtgtttaatagaactatattatcata

SEQ ID NO: 275313 - DNA, 1064 bp, Cannabis indica
tatttttgagatgcaaatggatttacagggagggcgaggggacgtatgttgcagaatcttccccaccactctgccggaagccgcacagcaatggtatttcaagttggctcctgcaaagtttagttcatgcaaaaccttctcttcgaaattccatgaacaattctcttcctcacgtcaggtcccattgcatctaggagatttggtcaaagaaaagcagcgaccaggcgagccactctgggcatacatcagcagattcatgacagaagcgaccaaggtgtcgcgggtaaccgaggatggaaagttatccgcgataccggggggcattgaagtccttggtgaactatggaaggatagaaggaaaaatggatcggtcaactcaatgagtgatttccttgaccgagccaaaggcttcatcaagctcgaagaagccattcaatgagcagaaggtgagcaaaaactgagcaaagcgaaggctccttccactggaacatccgcccaacatcccaattattccaacaattcaagtggcaagcgttcaagcaacaaccacaagcaaggaaacgggaagaaagaaaaattcaccgagaaatccggatagactccccgtgatcatgccaaacacactacattcactattctaactgaagatatagagagtgtgtatatggaaactcagtcattaattccgtacaagaagtccaggcccatgaagaaagtaccaacaaaagggacatgacgaaatgttgtcggttccacagagactacgaccacgacaccaacgaatactacaacctgaagcgagaaatagaatatctaatcaagaaaaacaacccgcacttacagaagtatgtcaaggccaaccaaggtcagaacaaccaggatctgttacctccaccaatagatggacacttgcaagtcattattggaggcccacacatcgctggagatacgggcgaagctcgagagagatatgcccgaatagctcagtacgagcaagaagaagtcatcctgcccgtggaagagaggaagcccaaagttcctcgtgcaggagagccaaccataac

SEQ ID NO: 275314 - DNA, 853 bp, Cannabis indica
aaattgaattcaataaggaaaaacaatccgcacccgcaaaagtatgttaagacccaccaaggtcagaggaacgacaacaaccaagatttgctacctccaccagtagatggacatctgcaagtcattgttggaggccctcacattactggagattcgggcaaagcttggaagaggtatgcccaaacagtgcagcacgagcaagaagaagtcatcctggccgtggaagaaaggaagcccaaagttccacgagcaggagagacgaccataacctttaacgatgaagacactgtcaaaattagattttcgcacaatgactcactggtcgtggtagtccagatagccaataaaatggtggccagaaccatgatcgataatggagcctcttccaacattttgttcaagactgcttacaaaaagatgggactccaactcaaggatctaaccccatgcctccagcctgtctatggtttctccggtcaaggagttgcacctctaggacaaaatcgtctacccctcactgttggacaagctctgacgagtatgactatgatgacacagttcctaatattggatgttccttaagcttttaacgtaatgcttggccgggcggccttgtatgacttaagggctgtcacatcaatatttcactcgtgcctgcagtccccaacaaagaatggggtagggtgtctgagaggaaaccagcagtctgcacgggaatgttataaccttgtagtggccaaggctaagaaggaagtatcctccagctagagcacagacaagggaaaaaacattcccaagtagggaacttcccaaggcggggatgaagatgtggattgtaacaccctaactacct

SEQ ID NO: 275315 - DNA, 762 bp, Cannabis indica
ctctctctctctttcggtttgcttggggctgctagggctgggattttgctctgtaattcttgttatttcagctagtatgtagtgatctcaagctaaggaggtatggttcttgaaaccttcttgttgtgttcttgaattttgaaaaaaaaaaattgcatgcttggtgaatttggtattgtagctgctgttagttgttgttgttattttctatagtttaaaaatgtttagttgagtgaaataggataggttttgatgcatgctagttgcttttgttcaagtttaaaattttgactcaaaatcttgattttaatggtgaaatgttgaaatagcttgctgtgcttgtggtatttgtttgctgttgttttcagaggtttggttatgtatatttgagtagattcaagctggttttgatgcatgtttgtggagtttagccaagcttgagttttgaactcaaagcttggagctttaatggcttttttagtatctgtgcttactgggtggttttattgctttggaactgttatttggggtatttagagcaggtctggaaagtttgaattagtttggggttgttttggtcgagttatggaattttgaaaaattcctacactgaacaggaattccggttcagtatagcctgttggaaccggaattccggttggtgttctgggttcctcctagaaccggaatttcggttgtagaactggtctaccggttggggaaaaattgggaaccctagttcttcccatttttgtgttgttt

SEQ ID NO: 275316 - DNA, 708 bp, Cannabis indica
aaaagtccttaagagaaaataatgaggaaaaaagtaaactacgaaatacttaccacggtgagggagtggctgagatcctggacttggaagatggagttcaaggatgcacaagcagcgaaccgcttgggtgcacaccgggtaagctgagacgcaaactcgccggtcatctccgcggcaaagggagctagagtgggcccgaggaaacgaccgaaccaatccgacagggggtccaagtttagatcccacggattctggtagttcggatcgttaagggtattttgcatttcaactcgcaaaaccctcctcaaagcctccacgtcagcatgcccccgggagtactcgtccatggcgtagttgtgtttagctatccggagttcctgtctcgcctcatctccaggaaccggagtcagcactatgttgggaggcgctgtatgttcctccacctcgggagagatcccggaatcaagtgcgggggccggagtatcagctctccgctgccgtttgggtacttcctcggcaaccatcttgcccttgcgcttgcgaatcagagcaacttcttgctcttcttcactttcttcaacttcctcaggaagagcccattgctcttctttaccttcttcaacttcctcagaaaggccccattgcttttcttgaccttctttagcttcctccggaagcgcctcctcctcatccactaagtcaatagtg

SEQ ID NO: 275317 - DNA, 612 bp, Cannabis indica
tttttattttgaggagtacaattttataattgtcaaagtttagggtgctaagttattaatttacaaagacacgtcagcatttaaacagattaatcatacgaaatctaagagaatgattaaatcactcttattgtaaaagttcagaaaaaattgttttattttaatattacgcgcgagtgaaaacgtcttttttgtatttgcttattttgattaaactcttaaaggttacaaaacgtgactcaaatatttgaaagttagttagggtagcttttaccgacttttggaaacaagtagtacaactttactgaaatggattattgcttaggtttcatgcttaacgtaacctcaagctatatgacgacacatatatacagtacagagccacttgtatctactcaacgtgactccaaagcttaatctctctctctctaattattctattaaacacaccaaactgctctcaccttcacctcaatcacacaaatcttttcattatgaataataccatcaataccactcccattcatctcctctcctcacagatcgcatcaaagccccattcacaccactcaatcgccattgatgaatcacttcaaacttccattcaaaatc

SEQ ID NO: 275318 - DNA, 623 bp, Cannabis indica
tttaatttgacacaattttcgagaaagttctttgattagcaaagatagcactgtaattgaaaagtcattatagtgtaccttagcattagggagttacagacaccatgtcccaccatactagagcgtcttcttagaactggaatgtggcacaggcaactctatcattgttggtgacgctcataaagtttagaattctagtaataactattagccactacttggctttcataacatcgggacatcccaggaagattggtggtgcctgcttgcggaacctttcatacagtggttccatcactgcagcgactggtcttgcctgcacagtaggggcatgagctacttgcatttctagagcagggattgcatgagcaccttgctgtctcaggcgtcgaatctcttcatattgttcattaattctggcttgcatttctgcaaacctattttcccattcttggcagcttgggcagcctgtggcgggttaacatctccccaaccgcgtgccctacctctagggcctctgcctcggccacgaatatttgggggaatctaaactccctgaccaccactggatccaaccaagttaccgttgatgatgattgtacatgtcgtgacgatcttcggaa

SEQ ID NO: 275319 - DNA, 538 bp, Cannabis indica
gatattaaattattattttattttattgaatattttgaaattaatttaagaaaaccacacttagtttaatgaaacttattcaagataaactatatgtatttttcttgtatttaattaaatatagaattataactaattagattcttctgaagcttaattatttaatatttcattaaatattcatatttaagttgtaaattagttatttataactaatttttttatcaacttaaattggaatatttttgaaattcaaaattaagttgaggaattctaggaattagttattgagagattcttggattattatattaagttgagagttagttaaattttgaatcaacttgaaatggaatatttttcaaattaggtggtaataacttaatttgttatttaattaaatttttgtttgaaaaaatttaagttgaaaatttagttattttagagcaacttgaattagatatttttcaaattttatttttattatattttaatttatttatttatttttatatttatatataattttcgaaaatta

SEQ ID NO: 275320 - DNA, 589 bp, Cannabis indica
taaaacggctaataagaaaaaggctgctaatccaaatgtaaagcaaaaaggaaagtgcttctattgcaacgaaaagggccactggaaaccccagtgtcctaagtttttggcaaagaaacaaagtatttctatttatgctataaactcttatgttttagagaattattatccctttgggttattaattctagatctactaaccatatttgttttcttcttatttcaactctagctgcttaaacttggattgcgatcctagtgagttgagtcggatggttggatagaagggtggagattgtccaagtgaagatgaaactcgaatcttctttaatttttgaattaattgttttagtttatgaacaatttagtttcaattattggtttgggattttattccctatttcatatttgtgcagacaattaattatgatacttttgagattattaataaagttttctctttaagaaatttcattatgaattgcatttatgaattgagcttcgtgttttctttaacttgtatgccaataccaattatatttatatgtttatcatgtttttttgtatgtgtttatgttttattattgat

SEQ ID NO: 275321 - DNA, 551 bp, Cannabis indica
ttagtctgaaactgtaagttcttttaaaacaagtcatcaacatagcaatctagtatattaaatgaagtagtaaaatacttgctagagattaagtaatcaaattgagataccataaaattttatgaggattaggaattttttgcccaagtcattcgaatagactatgcaagaattctactatcttattctcataattctgataagttatttctatccatatgaatggttagatttactttctcagtagtgttcttaagttcctatcacaagtgtcaaccaaatgaagatgggtaaagaattttaaaattctcccactcaattaaggtagtgtgatacattgtcaaagaactttattggtatcaatttctattacaacagtaaatataaactggaacataaatcaagatcaagaatttattctgataattgctaattcattatattacatccatgtttaaaaatatgtgtgacaaagagtactgtggtatattgaatatagtccagagttcaaaataaactacatatttcaatagtatagtccacccctatgt

SEQ ID NO: 275322 - DNA, 548 bp, Cannabis indica
tgcatcttttggttttgcgctttttgggctgcgatttcagcttcatgatcgacagccttttgccttaagagtaccaattctgagtagctaccttcatcgtaggcgtactcatcgaggtttccctcgtagtcgtcatcaggaattccttcttcttcctcagaaccctcggttgctcttgaggctacgtcctcctcatttggatcttgagcatcttgaagagggtgaggttgacgcgtgcttcgagtctccaccattgttgtaatgtagtgtgtatttacagaagctttcttcagctctcaatgaaagcaccaaaatgttgactgaagttttcggcaaccaataaaataataatgatttagagagctataagaaattaagagggagattttttacgtggttggggcgttaatgagccttagtccacgagtctgtgtatttatgataatatttaatacagagaatgttctcggtgagtttttgttcttctggcacttatgcaacccagaattctcgacccctctttaatgagctttgggggtatttatagt

SEQ ID NO: 275323 - DNA, 607 bp, Cannabis indica
agcatgcttaatagttgctagggcaacttaattgcacttatactattgaaattttcagatatacataaaaatatgaaatacctgggtttttttgctgcatcatgtacaaaattgcaggtatatctgcatatgactcttgtggacagcctctaatatactccttagccttctctcgagccctccaagctttttgatatgaaattgagacactatagtcatcaatcagatcatcaactatttcatttggagggtaatttcgctttggatttatgtatttgctctttataacattcccaactagtttgcttgttgcttgaggatggtctccagaggttatgtctattgagcaagtgtgtgtatattcaatttttcttattctaaacatctctgtttttccatgctttgatgctagcaaactccatttgcaattgtcatccaaacatactagcttgtaatctactgctgatgatcttttaactttgaaaggttggttttttctgatggagtaaaggctgatggcagtctttagaatttccttgtttctgaaaacctgtccaacttgaatttgttgtacttgaggatgggtaattacttgtgttgctaattc

SEQ ID NO: 275324 - DNA, 504 bp, Cannabis indica
tttggcattatcacttctcaaagtacgaacagatacattaaattgatttcgaatctcaacacaagaagcacagaatatagaaataactcaaaacgatttttcattaaatataaccaagttacacgagaataatcatccacaaaagtaacaaaatacctgaatgcaggttgagacaaaataggagaaagaccccaaacatcaaaatgaactaactcaaaaggaatactagcacatttattgactcgactcgaggactcaaactaacacaatgatgtttggctaaccaacatgactcatagtctaatgaagacaacttactatattagagacaaagtttcttgagcaaaggaagggatggatgacccaaacgacaatgagcctcaaaagcggaagcaacactcaaacaagcaatagaggttggtggaagtgggtcaagaacatacaagccaccagattcatgtcctttaccaataatcttcttcgtcataagatcctgaaacaaac

SEQ ID NO: 275325 - DNA, 513 bp, Cannabis indica
ttttatttagggcataaaattcaacaacatttagctttggcgtttcattttgttcgagaagaggttcagcggggctcacttcgagttcaacaaatttctggcaaagaccaacttgcggatgcacttacgaaaccacttgctagaacacgctttcatgatttgtttttcaagatcggtcttgctgaaaggccgtccgtcttacgggggcgtgtagaaggataatactgccagctattatcagtcaaactataacaatttgtaccattatattcgttagagttgttttgtatattcctctattctctctcttttattgttattagtttgttaataacctagtcaatcttttccttgattgtagtatatatcagtattccttcttgtaaatgtacacgcctatataaaggctctttatcaattaataataatcaattgcttccaacattcacaaacattaccctctttaagggtattttttttttattagtggttaaactgggaaccacacccgca

SEQ ID NO: 275326 - DNA, 716 bp, Cannabis indica
aacgtaaaaatacgtaacacataaattaatttcactcgcatgacacaccaaacacaattatttgtcactataattcacaccaacatattgcatgtacccatatgaatatttttaacgtaaaacttgaacccatacaaacactttttacgtgaaattttactaaaatactatttatcaacaaaatatacaattatgtacttatttatcaaaatcagaagctagcatatttcttaaccatttatacagatcataaaacatattcaatctgctaaggaatatgtgtgaaatactatccatgagtatgtataaatttattgttaaaaatgaataaaatcctaaatcattaaccaaaaatagcaaaatatctcaacatagtctcaaattaattccagacactataattatatcttagcattatattaaaggttccccaacagtaaacacaattttttctctatttattctatttaaaatccaattaaatagttaattagtcacaaataattataataaatacctagagcaaccaataaattatgaaaacctttttgtttcgtatcatagatagtaaatagcattacaaaaatatactttactgttttagcatcacttaactatttttcataattattttaagtattaattaaataaattcatgaaaaatacaaaaatgatcgaaaactaaatctatcaattctaacacagtttatagtatg

SEQ ID NO: 275327 - DNA, 549 bp, Cannabis indica
tatgtataaatttattgttaaaaatgaataaaatcctaaatcattaaccaaaaatagcaaaatatctcaacatagtctcaaattaattccagacactataattatatcttagcattatattaaaggttccccaacagtaaacacaattttttctctatttattctatttaaaatccaattaaatagttaattagtcacaaataattataataaatacctagagcaaccaataaattatgaaaacctttttgtttcgtatcatagatagtaaatagcattacaaaaatatactttactgttttagcatcacttaactatttttcataattattttaagtattaattaaataaattcatgaaaaatacaaaaatgatcgaaaactaaatctatcaattctaacacagtttatagtatgtactaagccctaaataattaactttcaattttctgaatagtctaggtatttttcataattaattttagaaataacacaaataattcatgaaaaatacaaaatcgacccaaaatctaatctatcaattttttaa

SEQ ID NO: 275328 - DNA, 716 bp, Cannabis indica
atttaagttgtaacctttcataattccataaacaaacttaagcctgtcaatctgagcatcagaataatgtttgttagggaccaaccttgcactaacgaagtatagccatgccttggctaccaggttgagttcacaccgatacaattgatacggttctctatcaaattcatggaacctaaggcctggataccctagggtttcagcgatgtcctcttgcccgaagttgctgcttcaatggttgctcttctaaagtgaaggttggtagatcataaagagcatgaattgcggctgtggaagcaggccatttaacccccctaactctcactttgacatcctctctttctggccagttggctaggaattctaaagctaaggtttgattgctacgcccagtgacatccacaaacttagtccattgcctattttaagatttgttctctgatggattcaaatacagcaggaatatttgcagtttggctaaggttaacaatatctatccccctgtcttcgatgaatggcctatctttcaatttcaaaaatcgctcttgggcatccatattagcaaacctcactctatcaagattagagcggcccctaggtgtgttggatgatgaagctcccccttgttcactcactctagatcttttaggacccatcttacccaaaaattctaacacttaagattttttaaaaaatttggcagcacttccccttaa

SEQ ID NO: 275329 - DNA, 813 bp, Cannabis indica
gattccccatgcggacgatcagggtgtcaacacttacaataacccgcctaccgcgccgatcgcgaccactgggatcaatgtcccagcaaatctcgccgcagtagttgcgactcccgcagtcgtagcagccccgactcctgcgactggagggattgaccagagcatgcttctgcaggctttgaaaatgctcgagcagcaacggaagcccatatacaagttgcatggtacctcgcccttcactacagaagtgcgacaagctcaacttcccaaggggtttcgtctatccgaatccctaaagtataaaggtacttctaaccctatagattatcttgaaaaattcaatactataatggaggtggatcaggtaccacagcttgcaaaatgccgcattcttgcggcaacactcgaggagaacgcccacgattggtttacccaattgcctgaggcatcaatatcgacatgggaaaccttcgtcgacttattcctcacacatttccaggctacaatgacctataggccgccttatacgactttggccaacatcaaacaagaacctggtgagtctttacaagactattttaaacggtttaatgcagaggtaacaaaagtcgagaaggctcccgagtcttcgcttgtttgcatgctgataacaggtatcttgccgaggaccgacttttggaaggagttacaagctcgaaggcccgaatccttagtcgaattcttcgccatggccgaaccccacaagagaatcgagaattctctggcagagttagagaagggcaaagacaaacgccaatcaccaataccgcgttc

SEQ ID NO: 275330 - DNA, 811 bp, Cannabis indica
ccccacaaaagcgcatgccttttaaccttagtcacaaacagtggcagcaagttctccacactcatttttgccttcattcttaagaacaatcttacttgactatctttcactaaaacttctggcggtatcatattgcctttcatgtacatataacacacctctattttcagttcatacacaatagggtctatatccaactcttcatacaaaatatcattcatcttttctaaagtagtgtcaacctcaaacattaacatcttactttttggattattgaatatccagttgaaaccttcaactgcccaagccccatcatatagtacaactacaaacacatttgaatctgcaaaccaaaatgaccacaaattataaaaaaccaagatgtcgcaagatatcgcgaacctatcgctacttatcgcgaaccaattccaaaaaaagtatgtcgacaaacgtcgcgaacgtgtcgagaaaaataaaaatatccacaatataacacaataattctatgtgtcgcgacttgtgtcgcgacatgtcgatacatgtcgttaaatgtcatccctaacctcttgtcagctcttaatcgctaaatgtcgctaaccatgtcgaaaaatatcgctaaaattgcaaaaaaaccagtaaacacgcagacttgctgcatttcgtgtttcattgacaaagggtgtcaaaagggtacataaaaaccacggatatgtgtagatctattactttcaacataaatacatctaaatcaaacaataattactaaagaaattacatacccattattgtttaaaggaatgactttcttaga

SEQ ID NO: 275331 - DNA, 506 bp, Cannabis indica
ttcttcactaaatctgttgataagtttttccagaggttcgtttaggcgctggtgtattagcattagctccgtatccactttagcagtccgcacacttattacaaagtttgtctggaatcttaggatgagatcctaatacgaattcactgtaccggatggtaagttgtggaactagcgtaaagcgggtccccttaacccttgcgtgaaggttttgcatttgattgcttccaaatcctttagcgggacggagacggttaacattttttctcaaactggcatacgtattctgaggggtctcccgtcccgttatacttcggtaacttaggggctacataacgctgaggggcctccacgcgcaggatgtggttcccaaagggtgaaagggttgatccctccattcgagcccattcgctgtgtactcccatctggctttttgcctccaatgctaataatttgttccacatcatttcctgtaacctctccgtctctttactcgccatcgatgg

SEQ ID NO: 275332 - DNA, 676 bp, Cannabis indica
gcattttatgtcatttagtgattttcataagtttgcattttcggtgcccggtaacatggaactcggtgtttggctcagtaaaatcacaacttagtatattagtagattgggacggtttattagacattggaaatgttgggaatggctgggaatttagaatttcccaaaataccccctttagtgtttgccccattgttattttgtcctttaatggacttaataattggaaaatatgtgttttgctatgttatttgttggctgaagtaaagggttatgtggcatttcttttcatttttccaaacatagaaaaattagaaaattctcaaaaaagtctctctgttttcctctctatttcggccctttgagcagcaagaaaaagtggatttttctcttgtgattcaagtggtttccatcaagtctagagtgattctagtggaggtaattttgtctagcttctctacttttgttttcttgaattttttatgaaaaatggtgtaatgcatgcttagtttaggttgttgttgttgctgtgattttgttgttgtttgcagaggtttaagcatgattaattgagattaattaagctgcttgtgatgcatgatagttaggttgtttagagttgtggaaattttaactcaaaagtttagttttcaaagagaattttcgaatttggtgg

SEQ ID NO: 275333 - DNA, 514 bp, Cannabis indica
tccgagaggaagcctcgaaaaccaagaaagttgacgacggacaacagcttgcgctactccaagcaggcatccgcactgggactcctttctggaatgaactacagcaagaaggagccgctagccttcaggacttccagaagagagtccaaaaatatatcaacctcgaagaagcccaaatcgtggcttacggaggatactatcccaccgggatagcaggatatacgcccggagtatcgccctcgggtattaccccgaccgcaactccacaagcaagtggcatacaattctctgctacccccggatatagtcagggccaggccttggcaccagcatcatcccatttcggcaacccgtccggaataaatggacaaactccttcgcactctgctccggctgctagcctggcaggcccttcccagggctcgaggagtaaaaggtcctccaagggtagcacccggacgggggagaagcgccagaaaagggggtacacccccagtacactcaatacacggag

SEQ ID NO: 275334 - DNA, 485 bp, Cannabis indica
tttttcctcatcattttctcttaaggattcttactcatgcttgtatccttttcctgcttgctgccgaggctgcccgcctttccaagaacttaattaaccatggcttcgtcctgtccgactttgggggcatggacgaagtcatgaagatccttcaagatttaactgctgaaaggcggatttaccaggaggatgccgagcgccgggaggcccttgccaaggccagtgaggaagaggccaggcggagggaggcacaagcgaaggcgatgatccgggaggaggcccttcggagggataggctagaggccaagaaccaggaggagctgagggcggagggtgaggctactgccaaggccaagcgtgagcttcgggaggctagggaagccttggatgaaatggctgccaaggtgaagtccttagaggaggttcaccaggcagacttggagtctagggccaaattggccgtggagctgaaggagctcaggact

SEQ ID NO: 275335 - DNA, 637 bp, Cannabis indica
tttgtagaaaaacaaaaatgatggatatgtgttgggcttctttagctatcacattggcctggtaaaatcctcgtcttctttaggtagctggtgacttacggatttatatggagagcctaactgtaattgtcgttatgagacttggggcctacttcgcaccctggccagcaaatcgacgctaccttggtgtgttattggagatgttaacaatgttgttcgtcaagaatacaaacatattggtcgtccttacccataatggctgctttaggggtttcaagatgtgctatagtagtgcaatttgtttgatttagaattacaaggctatccattcacttgggagagaagtagaggctcgaactcttgggtggagatccatttggatagatctttggtgtcttcctcatggaatgaggttttcccttatgctacccttactaatttagaattttgcacttcggatcactcccttattcttggagctgacggttttcaaccttgttgtcatttttgttttgaaaacacctacttgaaagaaccattatgtttagaaattgtgagggattgttggggcaataatcgggccactaattttgttgataaaattaagaataattagcaatttttctccttaaacttt

SEQ ID NO: 275336 - DNA, 472 bp, Cannabis indica
ttctttattttggacaaatttatatcctcgcggggataactatcctttaacattttcccagtacatgggtactcgcgttttacatatatatatttgcgacttcaattacagcttggtgtaataagtagaaatatttacaaagctgataaaatttttgaaaatttaacaagtaatttcattcatataatcaatagtacattcgggcatatatacccccctatacttaggatttttcccttttgaatgaaaaatatctaagtataagtacaagagtgaacataatcgaataatgcgagtactattgataataaaatttcaagctctcgctattccatgctcgtggaatcgcagttccatcgagtgttgcgagtcgatacgttgcatcaccaattttatctgcgatgaggtatggtccttcccaattatccccaaaaccccatgcgacgggtttttggtgtttggcattactctt

SEQ ID NO: 275337 - DNA, 583 bp, Cannabis indica
aactggaatcacgaactgaagtttgcatgtttgtcagaaattctgaagagactaggggttgactattttatagtcataaggataacaaagtgtttgtctctacaaatgctactttccttaaagatgactatattaaagacttcaaatcaaaaagtaaagttgtgttagaggaaatgctttcaggtataacaccttctgatgttccattctcttctactcaagtagaggataatcccactccctcagtcgaaacaactgagagaactaccactaaaggttatgtttagaagatcaatgttcctaatcgtagtgggagtgtttctactaaaccatcttgttatggcttggatggtgaaatcaatatggtcgttggtgatggtattgaagacaacccactaacctataaacaggcaatggcaagtccagaacagaaacgatggtcagccgacatgaattccgaaatggactccatgaaaaagaacaaagtctaggaatatgtatacgcacctgatgactatcgtccaattggatgtaagtgggtctagaagaagaaaagaggcactggaggcgaagtcgaaacttt

SEQ ID NO: 275338 - DNA, 1113 bp, Cannabis indica
agatgcagagtccatggccctttgccatttgtgaaattgacctgatcggacaattacccaaaggcaaaggaggagtgcagtatgcagtggtagcggttgcttacttcactaagtggacggaagtcgaaccactcgcaaccattacatcaaagaaagttcaagactttattgtgaagaacataatctacctgttcagattcctgtacaaaatagtttcagataatggcaagcagttcgacagccaatccttcattgacttttgtggaaaccatggtatcatcaaaagtttctccgtagtggcacatcctcaagcgaatggtcaatttgaagcagtcaacaagaccttaaaggatacattgaagaaaaaactcgaagatgccaaaggaaattggccagaaaacttcctgaagttctatggtcgtatcggacaactgagaaaacggtaaccggacagactccatttgctatggcgtatggaaatgaggctatgctgcctgtagaactcaagccaccatcccacagaagattgacgtacaaccaaaataccaatcatgtactcctggccgaatgacttgatgaaatcgaagagagacgagccacaacaaacttaaagttgatagtccatcaacaaaaagtagctcgatatttcaacaaacaagtgaaggctcaaaaattcttcgtgggagatatggtcctaagaagggtatttctaaacaccaaagacagtacggcaagtgtactcgaacctaacttgaagggaccatatcaagtggtcgaagttctcgaatcccgagaatacaaattaggtaagtatgatgaaaaaatgcaacttgttctagtaccacggtattggaatggggaacatttaaaaaaatattaccaataaagtaccaggtcagacgaccacactaagtaatgaaagaacatttacttttaagtgaatggcctgctgggcggactacactcaaaggtttcgacaaaagagaaaaagtactcaggtcgaatgaccaccatttaaagtacaatttcttatttctgcaatttgttttatttcatgttaagctaaaagatcaaattagatcaaatagctctcatgtatgttactacggtaac

SEQ ID NO: 275339 - DNA, 790 bp, Cannabis indica
tctgagtaccagatctagacaccgacgattggtctgttctaggccccgttactcgaatcccgagtcaagatctggatcactgtcacgggtctgggtctggttctggttcaggtctcaggtcccatttctgagtttgggttcgagatcgagactggggtgcggttctaggtcccgaccccagttctgtgtccctagtctggttacatgtttgggtctcagttcaagttcgggtttgggtccagagtctaggttttggttgggatctggatccggctcccaattcgggttaaggtctgattgggagtccgggtcctggtccagttatggttctggatctaagtccaatttcagttatgattccaagtccaagtcctagttccagtcccggtcaacttccggttttggttccaattttgggtcacagggtacgggttcaggtccgggtgtgagttcgggtctttgtcaaggttctggtcctgatccaagtttgggtcggagtttgagccctggtctgagtttgggttcgggtccggatttcagtctaggtccagatcaggcttcggttttgggttcacgtccttggtcttggtctaggtttggtccgagtccctagttccaatcccgatctaagtttgtattcagttctgggtttaagtccttggttctgatcctggtctgggttcgagtttgggtccgggtctgggtctagctttgggtttgattctaggtgtgggtgtttgagttcgggtccaagtctgtgtccggatttgtgtccaggtctggaccccga

SEQ ID NO: 275340 - DNA, 675 bp, Cannabis indica
tttttcaattttaaaaacaataaactgattaaaaaaaatttacaaaacaccctcatagtttagaaaaaaaaattacaacagagacaaattataaagacaaaactctataattataatttagataaataaatccattcattctaaaatgaatgtacataaaaatgaaacaagaaagagtgctctgtctacattaactaatttcaccttcatgtccacaagtcattggcattatgtactcagccacgttttgaattttcgcttgtcataaacaaaagatgcccaccatattaaattatattaatagaattaaatcaaattaatatataaactaaaattagaacatattttaaaaatcatatacattacacaacataaaaaatatatatatgatcattttaccgactgactggatattatatctcatatcttataaaaaaattgtgttcattaaatcaacaatctcccacttatattaatttggtttgcaagctattaaattgccggtttctattctgctttgagactgtaaattagtagtggataaaattaaggctaattagtaattttttctcccgaactttgacacataccaaattataccccctgaacttttttggccgttaaaaattctccctgaaatattgagattgttaaatttaagaacttttgtctaat

SEQ ID NO: 275341 - DNA, 500 bp, Cannabis indica
agactacaaatatacttggacagtgaactcaagaacagaaatcgaagaaatccaaacagaagacagccagatatcagcaccaaactatgatttcattccgtttagcgacctgcatacacctaaagaattcagcaaaccaataggtatttacaatttgatttttataaatatatattcctcattgactaactatttaatatttcaatttattagatattttggctattgctctcaaaatgaacccaccaaaagaagtcaacactccctatggaccacatacaattcaagagatatatttaattgatgaaaggtaaactatacatttaatctaccactataaatacacccttgtgttcatttttattgcgatatattaaatactatttaacaaaatttatgctaatacatttttttatttctttacaaagttgtagcttcaaaccagtatgtttgacgatgtggggacataaagtccacgatgaatgcttacaaatagcaga

SEQ ID NO: 275342 - DNA, 540 bp, Cannabis indica
atgagtcgaagatgcgattgcaatctaggtttgggttacgactcaatagatgtgtgcaagtataattgtgctattttctggaaggagaatgagaagaaggagttttgccctgtatgtggcgaatcacgatgggtgaaaagaaagggtaaggggaaaaaagttcctcacaaagttatgcgttacttcccactcacacctagactgaaacgattatattgctcaagacacactgcggaggatatgcggtggcattactcgcagagaccaaaagaagacggtgtgcttaggcatcctgcggatgctgaagaatggaagcagtttgaccgccttcatccgtcttttgctgttgaacctagaaatgtcagactgggattggcgactgacggttttaatccatttggcaacatgagcaactcttacagcctgtggccagttatttgtgtcccatataatttgccaccgtggaagtgtatgagttctgaatcgttgttgttgaccttattaattccaggtccatcatctcctgggaaagacatagat

SEQ ID NO: 275343 - DNA, 594 bp, Cannabis indica
aaattaaaaattgtaccatctgaaagtgagatatatcttcggcactaagcttggcacaccgaacacgcatattttctattttctgccttataaaagcctccttgcgctcctcgttctcaaagtacttagaccctttgctcatttcatacaccactcgttgtactttctccttgtccactccatccatacctaaaatcaaccaaatcaattgcactggaacaatatggttcacaacgtgtaaaaccctagtttctacaattatcaaataatttgtggaggatttcaagtatgcagcgagattggatgaagatgacttaccagctttggcattggtgtatacggtgtggtaagattgccatggccgatcggcgtcgcttgttgaggtctcgcctttctccatagcgtgctctactgctctgcaagaaaaaattcgttatatatatacgcgggagagattgcgccaaattttgaagcgtaataattcacctctgtctgccacgtgtcggaggtaaccatactaaattaaagttggcaccattttgtaaggaaatttgattttctataagtaaaaaatcttaatattttattcttaaa

SEQ ID NO: 275344 - DNA, 915 bp, Cannabis indica
atctgtaaatctagtttgggaatgatatttaacaactatcgatgtgtttggtgattgttttgttgggatttttgttcttgtttttgtggcttgattcttgagatgttggtgtttggggtatgggttgtgttgctattctggtcagagacgtgtaacttggtcggagatgtttagtacaatcttccaggaggagacaatttcgagatgatgacggaatttggagttggcagccgagattcacacatatggtattgatttcgtattaatatttgatatatcaatattaattttaattttatttattgttgatttattgttattaaaaggtgattaggtttttattatttttatttatttaattgttgcttttgactttacatatttatatttttctaattactctattgtagttttttttttttttgtaatggattactctattgtatttggttgtagtaaactatattttattttttagtgttttattttcttttcatacttttattatttattaattacctttattattagaatttcctttataatttgttacctttattatattaagtaattacctatatattaatcaattccatgtgtttagaagtaattatgtaattattaggtagggtaattattatggtagtaattacacagtttagtaattacactatattttaaaatgcaaggtgtgtttggatataaagttacatataaattcctaatatcttgtttggtaaaatagttagtaattacataggaaaataatattttttagtaactctaatgtttaatatggaaagtttttagtaattacattgtgtaattacattcaattctcatgaggggccatgagaattggagagtgtaattggagcccctcaattacttctaattacacagttacagtgtaat

SEQ ID NO: 275345 - DNA, 82 bp, Cannabis indica
aatacttataaaattatacttagatggatatgaaaaataaaatgaattatttccatcttagtaataatttccaataaatatt

SEQ ID NO: 275346 - DNA, 863 bp, Cannabis indica
agaagtcgcccatttgctaaagcagtagaagccgttatggagacctacgctctttatgtcgtagaagtaactaaactcttctactgagggagccctatggacgtactccatgtacatcgcatagaaagccaggacagtgcgataactgttgggagttaactgaaagggcgatacgtcatatcgcctgagaatggctgcgacgaaggggtgaaaggggaccgatacaccacaccgaaggatgggtattgagattaccacatcctctgtgggaatgatcgcagggttagtgaatggaaggtgcgctctctgagatggtttaggacgttgaaacgcgagtcgcagcaaattcaacctcacaaaggtggtgaagtctgatttggcaaccctcgagattaaatcctcgcacgcgaagggctcgttcagttgggagtcgtcgaccgaatctgtcccactcccttccgcctcctcctcttccccacctgactcgcgggctggagtcgtccattcctcgtccatctcctcgacctcgatgtcgggagcatgcctcgtatgtataagatagtcgcgtgccgacactgtggactcgctgtcccggatatcgattgtcccaggttcagcgagttcctgtaccatcctctcgatgtctacagaagacatcggacctaattctatttgcgcagcctccatttcggaaatgtccgtagggagaaaactgtctctctcctggtccgactcaccgtcaaatgcgtggcctcctgagccgagctgctggctatccgataaatcgctcatctgaaagatagaagatcttttcagcgtgatggatgtgtgaaaaataaagtaagtgatctctcccgcagtag

SEQ ID NO: 275347 - DNA, 764 bp, Cannabis indica
tatcttacgaagtcgcgaccagggtcgcgacctggctctctggaggtcgcgactactgatgcttctggaaccgaattttccaattttttccaagtttgtcccagtttttcgccatttgactgaattcgaactttaacaccccgggaacctgaaataatgaaaatcaagcgtaaaactgctccaaaagacaccaatagacgagataatgctaactttaaagacccgaaatataggttaattataacctaacaaaatcccccaaactagattcttactcgcccccgagtaagataaaaaaaactaactacgctatcagataatcactacgctgctgactcatgctctgttttcttccttgcataaactagaattttgatcctactaactctaacaattaactcggatgctcaattaataacactatgtacaactgcaacaatctactcaaatatgaaacattgttataaaagttttactctttccattagttccacaacccgataactcataagcttgcatgcttacctttctccactaatgttgacagtattctttggaatcattaggtcttttcaaggcttaggtaatatggctcagatattcagggataggcaaaagacaattttggctcaagatatcataagcacacaaacagaacccacaagctttttacttttctttttctaaaaccccatactgttcccaaatttaccaagattgagagaagatatatttattattttccaacatcactgaaatcatat

SEQ ID NO: 275348 - DNA, 641 bp, Cannabis indica
tacttgtatttggagaaatactgatatgataatctataaagtttcctaaaagcattgtattggtggcctggtatgaaaaaggatgtagttgaatttgtggccaaatgcttaacatgtcaacaagttaaagcagagcatcaaagaccagcgggattgttacaaccactgaagctccctgaatggaagtgggaagagatttccatggattttgtgactgggttacctaagactacaaagcaacatgacgccatttgggtagtcgtcgataggtatacaaaatctgcccattttctaccagtacgcatgacttactccatggaccattttgctgaactttatgtgaatgagattgtgagattacatggggcaccgtattctattgtttgtgatcgagatgctcggttcacttcgtctttttgggaaagcttacagagagcaatgggaactcgattgaagttcagcactgcatatcatccagagacagatggtcagactgagagaacaaatcagatcttggaagatatgttgagggcatgtgtgatagatttccaaggatcatggagcaaatacctgcctttgattgaattttcttacaacaacagctatcagtctactatcggggtagcaccctatgagatgtt

SEQ ID NO: 275349 - DNA, 501 bp, Cannabis indica
atgtaataatcagcgatgaagtgtacttacactttgtataagtgttatgttctttccagaacattggcataggatactggtctcgaatgtatggggtatacattggactagaccgatattgatcttagtaaagatattataatacttactgttatatctttccaagtcaatatcactagttgatcttagatcaaaatatcttaatcctgatatgcttaggttcaatctcaggagtactattcatgttctttgatttgttagttaagcctactttcgggtcagggtgatacgtacatattaggaacatgatagtatgattgagtgggagcgctaaacataaatatagaatctatagcttctacaggatttagaagtaaagtgatgatttccttcgagcttagctaaatagatgtaaatggaagagctcttatttctgtgattatattttagttcacttaaatatcatttacaggtagctaagtgttttaaggatcaaaatac

SEQ ID NO: 275350 - DNA, 532 bp, Cannabis indica
attgcagattggttattaagttgaattatctaactgtgactcgcccagacattgcgttctcagttagtgttgttaatcagtttatgtcatctccaacaattcatcattaaacagcattacagcaaattttgtgttatttgaaaggagcacaggatgaggtattatttacaaggatcatgggcacccccagattgagtgtttctcaaatgcagattaggaaagttacaaggaaataaaagatccacttcgggttattttctctttgttgggggcaatctgatctcttagaagagtaagaagcaaaatattgtgtctagatccaatgcagaatcagaatatagagctatggcacaatctgtgtgtgagatagtgtggagttatcaacttttgactgaagtcaaatttaagacttcagtaccagcaaaattgtagtgtgataatcaagttgctcttcatattaccttaaatctcgtgttccatgagcgaactaagcacattgagattattgtcattttgttcgtgagaaaattca

SEQ ID NO: 275351 - DNA, 616 bp, Cannabis indica
aatagtgtgctgtgggacataaaatctcaaaagaaggtattgaggttgacagagccaaagtatctacaattgagaacttgcctcctccaatttcagtgaagggagttcgaagctttttgggtcatgccgggttttatagaagatttatcaaagatttctccaaagtggccaaaccgctatccaatcttcttgctagtggagtaccttttgaatttgggaaagattgtcttgaagcattccaaattctcaaggagaagttaatctcagcaccgattgtgactacaccaaactgggaattaccttttgaaatcatgtgcgatgcaagtgattatgctattggagcagtcttgggacaacgggttgacaaggtattcagaaccatttattatgcaagcaaaaccttgaatgatgcccaactaaactacgctactacagaaaaagagatgctggccatagtgtttgcatgtgacaaatttcgaccctacttaattggtaataaagtgatagtgtatacagatcattcagcaatcaaatacttgatgactaagaaggatgccaaaccacgactgattcgatgggttcttcttttgcaagaatttgatctagacataaaaga

SEQ ID NO: 275352 - DNA, 541 bp, Cannabis indica
gtagggtagaaccgaggaggttgcgccaaatagttcgggtcatcaatcccaatgttcattctgttgatgagagagttaagttgctgaacttgtccctcatcatagatactcctctgcaccatgtattgttgcatgtggttgttctgctgaattatataactcagctgtgcatgagtgtattgtgttgtaggatcgataggcccaggcaattgtaggggctgctcctcttcttcttcaacactaggctctcgttgccgcctacgcccttgcggtgcatcaggtggtggttggccatagggatgtggctctttcagcctgttgacaaaggcgatgtccatcttgcgaagtggcaacaccgtgttgtcatactctaattggggaacttcatatgccccgcagagttctgtgataactcccgccaaaccaaaaccacctcccgtggctccttgcacgatctgctcaatgctttgccttatgacttgtccaatgttaatgttgtaccccttcattatggcgtacacatatttcaggcgatccattt

SEQ ID NO: 275353 - DNA, 596 bp, Cannabis indica
gctgactgggcgtcccttcggtcttcggctaattaatgctctgacaattaatattttgaaaattcgaacttctcttccacggctgacggttgcactcgattacttttgatttcccatatttgcttttgaggcgggaagccgaggcgtctaaggttcctttatgtacagttatccttttgcctataaatacttggagtactggcacattactcattttatcaccattcgttgttaagtaaacttcagagcgaaaagagagaattttctggcttcgaagttgccgaagtgcctacagacgatttctggcttgcttgaacccggacattcgaatctttgagtaagtttctgattccctttatgcttttcctttgcatgcttacgctttgaatgtaacttcattgtagaaagaacactttaggaaaccctagggtttgaaacttctgggactcttcttttccatgtccttgtgttagctttcagccgtagggcttattttagaactgcattgcgtctgttttccatcttgctttttccaagcttcatgaacttttttgccctaactcagaaaactttctgacttcttgagtttagacttt

SEQ ID NO: 275354 - DNA, 541 bp, Cannabis indica
gacaaagttttgcagttccacgtagactacggccacgactctaatggatgcaacaatttgaagcgggaaattgaattcctgataaggaataacaatccacacctgcagaagtatgttaagaccgatcagggtcagaggaacgacaataacaaagatttactacctccaccggtagatgggcatctgcaagttattgttggaggcccgcacattgctggagattcgggcaaagctcgaagaggtatgcccgaacagcacaaaacgagcaagaagaagttctcctagccgtggaagaaaggaagcccaaagttccacgagcaggagagccgaccataaccttcaacgatgaagatgctgtcaaaattaaatttcagcacaacgacccgctgatcgtggaagtccagatagccaataaaattgtggccagaaccatgattaataatggagcctcttccaatatcttgttcaaaactgcttatgaaaagatgggactccaactcaaagatctaaccccatgtctccagcctttctatggtttctc

SEQ ID NO: 275355 - DNA, 729 bp, Cannabis indica
cattttatttttttattattttaatgccaaataattctaacctaaccctaggtggcatcctataaataggtagtgatggcttcaggaaaagatgatgcatcttattccttcagagaaaaactgagtgccttctctccctaacctagccgccactctcattccttcttcttcactattgaaaccgaaccccttgagtgatagagtgagtgcccacacacatcaagtggtacctcaatcatagtgtggaagatcgtgaagaatccagattcaacagaaggacattcgggctcagatcttggtgatactctgcgacagaaaggatacaagggttagagatctgagtggaaggagacattatattccgctgcaatcactgtaaggtttctcatactttatatgtgtttatttattatcgttttagaagttcatatttaggatgttaaacaacatacttgttagtaaatctaagatcctggtaaaatatttccaacaataaaccacaagaaatttactaatattttaattcaaatacctccaaatatttcattataaaagcaagtacgggtcgaacccacgttgactatgtttattatattattcaaaaattaatgacaagagttagaaaaagggagttttgaaattgagagaaaatagcagaaataaaaataacaaaaaaaaaacaaattaaaagtagagagattatgatacgaaaaactagttaaaggttat

SEQ ID NO: 275356 - DNA, 536 bp, Cannabis indica
gcatagacctacgtgttacgctcacacgtctatttacaataaggccttagtaaggtttatctcgattataattaccgagtctaacctggttatgccttgctcacataaccctattcatatatatttacgtaatccatacattacgttctttcagtggtttatcctagtaatatactaggtctaaccaagttatgtcttatgcacataactcttgaaatatatgtatgtattcaatagataacaaaacatatagaatcttagggtaataaccctaaattacataccaaatagtctctcatataacatatcattgcatgctcaaaataacacttatagagattaataaccctaattcatgctttcacttgattagcaatattattgtacatcatgactttcttaccttcacataacttctagggtaataaccctagaccgcattactatcaaactcaaggtactaatttaccgagtctaacttaattatgccttgtgcgcataattctttattacaatatatttagcatggcataaca

SEQ ID NO: 275357 - DNA, 634 bp, Cannabis indica
attttggacattagtttgtaaatgacattacacaaattaattggtctaaaatcacctattccacttgagtttttaattttttaaataagaatgataatagacttgtttaccaattccatatcatgtccattattaagtactctcaaaactatttttataacagtagaaccaacaattttccaatagtgttgataaacatagggtgtattcataatattttgagtacaaatataaaaaaatagagatatttgcagcataaatactaaatgtttttaattttatacacttaaataccatatcttttatttcaatgaattaaacacccaaagtttagtttcattcactcccgttactacttttctgctaaatataattgaaaatatttctatgccacatgttacttaggtattggtccactgcataattttttttttctaaaataaaaactaaataatattaaaatctctctctcttcctttttgtcattctttttttttttcgcagactctatattttcctattttcattaccattctacacaaatacaataacaataatgacaaaaaaaaaaaaaaaactataataggacatgaacaaaggactataattcatcataattatcaaacaaactaaa

SEQ ID NO: 275358 - DNA, 575 bp, Cannabis indica
attgtgtttatcgacgacatccttgtgtactctctgtcagaaaaagagcatgagttacatcttcagattgttttgcaacggctttgggaacacaagctttatgccaaattcaaagatgggatcaaggtggatcccgggaagatagagtctgtcagtgattggccaagaccgaagacagtgacagaaattagaagcttcttgggtttagctgggtattatcgtaggttcgtggaagggttttctaaaatttcaacacacttaaccgaacttacaaagaagaatcagcagtttgtctggtcagacaagtgcgaagctagttttcaagagctgaaacagagattgattaccgctccattgctagctttgccttcagacaacgaaaaattcgtagtttattgtgatgcatccagacagggtctggggtgtgtgctgatacaagccgatcgagttatcgcttatgcctcccgtcaattaaaggattacgaacagcgatacccgactcatgatctagagttggccgcgatggtttttgcattgaagatctggcggcattacctttacggagaaaggtgtga

SEQ ID NO: 275359 - DNA, 843 bp, Cannabis indica
cacttctccaagcaggaatccgtactgggactcctttctggaatgagttgcagcaagagggggctgctagcctccaggacttccagaagagagtccaaaaatatatcaacctcgaagaagcccaaatcgtggcttatgggggctactaccccaccggaatagcagggtttatgcccggagtatcgccctcgggtactgccccgactgcgaccccacaaacaagtggtatacagttctctgctacccccgggtatagccagggccaagctttggcaccagcatcttctcattttggcaacccgtccggagtaaatgggcaagctccttcacactctgctccggctgctagcttaacaggcccttcccagggatcaaggagtaaaaggtcctccaaaggcagcacccggacgggagagaagcgccagaaaaaggggtacaccccccaatatactcaatacacggagctatcggactcccaagaacgtgtgtacttcgccactaggcaaaatacacactaccggagaccacagccgttgtacaaagacagctcccggagagatccgagcaaaagatgcgagtaccacaacgacattggtcacagcaccaatgaatgtaagaatctcaaggacgagatcgaaaatctaatccgattgggccacctctatgagtggatcaagaataggttgccccacctcaatccgggtcaggtggctgggggtatgcctccgggaacaccagggggtacagcaggagtattggctccagctgctcccgcaggtgacgcccagcatatccccggactgccgccccggcctaatggacgggtagccatgatctccggag

SEQ ID NO: 275360 - DNA, 500 bp, Cannabis indica
tcttttactttgatgcttggctctgccaagcattccacgggtaccacccccaggccttcgatttcactatctgaagctaacttagctagacagtccgcgtggacgttcttttcttgggggattctttctactttgtagtccgtgaactcgtggagcagctcctggactattgttacatattcgccttgtgtttggtactctcccgatatctgatttacgaccagctgggagtcgctgtagacttctactcttttggcccctacagctttcgctagtctcagccctgctatcaaggcctcatattcggcctcgttgtttgaagctgagaagtcgaaccgtagggctgcctggagtcgaagtccggtcagggatatcattggaaccctcgctccagatccattttcattggaagctccgtccacaaacactctccgtgtggggatcaatggtatcggcacattcgcggttgcctcggcttcattgcattcggtgatgaagtc

SEQ ID NO: 275361 - DNA, 519 bp, Cannabis indica
tctcgaacttggaattttgctagtttaaagcatgattttgtgattagttgtgcaatctgaattttgagagtttgttgttgatgtttaatgcatgaaatggtgttttagactctctgtttaatgattgaaaacctatgtgatggttctaagttttggtttgggtttggatgtgttttgggcataattttcgtagctgaaaactgagttttctgggtttttaaacccagtggtcgcgactatcataggtctggtcgcgaccatgataatggcagtttattaatttttttgagtttttgtttttgccataacttttgactcgggactccgtttgggacgttctttatatcgttggaaagctctttccgagctctatgtgattatctgtgatttgaatgccaattttatatttttgtggaagtggatttagggattaaccctatttgtgtaaatcccagtattgtgactaggattaccggcacctggtcaggagcacccggggatttggaatctctactattg

SEQ ID NO: 275362 - DNA, 345 bp, Cannabis indica
gattttgctgcagatcctcgaaatgttagacttggattagcttctgatggaatgaatccttttaagacattaagtgtaagtcacagcacatggccagttattatgataccatataatctccctccatggatgtgtatgaaacaacctaattttattatgtccttgctcatacctggtccagaagcacctggaaataatattgatatatatttggagccattaatcgaagagttaaagaatctatgggaaatgggagttgaaacttttgatgcatcaacaaaaaaaaacttcaagttacgagcatcactactatggactattagtgattttccagcatatgctaac

SEQ ID NO: 275363 - DNA, 719 bp, Cannabis indica
tcttaatttaccccacagggagttatggggatttaatttaatagtgttatcacaaatttaattaaagatagataataaaccttcattttccaaaactaattgtttaattaaatctatcataaggttcatctaattttattaaatttaaaatttagcccacaggcaattttagatttagtaaaattttaatcttcagtttatactttggtgtctagtgaaccacataattttaaataatttggtgtctacctcggcttgtagcgctcgcagttgatcctgaattgcagcatattgatcggtcgtgagctgcactactccttcggacactaccgccggggtgacggggggaaaatgcatggttgctggtggtgtggacgtgtctccgacttgagggccagttgtttctgggaataggttgagaggtctgatgttgctccttcctactccgccgttgacgacgtctacaggtggcactccagctccaggcaagggtacgctcatcattccaatattgatggatccgttgctagctccgttaacgtgatttccagccatgatgaatggtgttctttgaagtgaataaaatcttacagtcgtttcccacagacggcgccaaatgttgtcgagtgaatttcgcaacaccaaaaagtattatttaattgatgtaaaagagaattttttttgggaaacgacaagtgcgagtattcaacctaaaatgg

SEQ ID NO: 275364 - DNA, 381 bp, Cannabis indica
aaatatgaacttctaaaacgattataagtaaacacatataaagtatgagaaaccttacattggcaagatctgagcccgaatatctttttttgttgaatctagattcttcacgatcttccacactatgattgaggtactacttgctgtgtgtgggcactactctatcgcttagggatttcgaaacaaagaagaagaagaaagagagagaggtggcggctcaggaattttctctgaaaggaatgagatgcaaattgtgttatgcttccagaagccattactttctatttatagaataccacatagggttagggttgaattacttggcattaaaataataaaaaaaattaaatgataaaacatatgcatgtggccagccatggc

SEQ ID NO: 275365 - DNA, 716 bp, Cannabis indica
atgtaatctacatatgcatactgttatactaatcttacctggattccgaattcaggtgtgccggtcaacctgactggaactatctgcgcggtggattacaggctcctaaaccataaaaatcacaacactataagtgatacgctaaatcacttcccggggacttaaactaggaactaaaagtttccctatcgataaaaagcatggcaataccccaaataacataaaaacgaggagaactagggtttctgaaaatcacccaaccagtagacgggttgcccaaccggaattccggttctgggaattttcagagccccatccggaattccggatgcacaaccgaaattccggttcctcgcaggaatttttcaaaaattcacacaaagctcaaaaccaatccaaacaatgccaaaacatccagacctgttctaaatgacccaaataacaattctaaagcatcaacacagcccagaaagcacagaaacgaaaatcaccatgggagctccaagctttgagtttcaaactcaaacttggctaaagctcacttacaagcctcaaaactagcttagaactacataaacaagcataaaaacactgcagaaaactaaccctaattcatgcaaacactacagccaccaaaacctcaattttcacttgaaaaccatagctttttaacaagaaaactaaccaactaaaacaagaacaactagcatgcattt

SEQ ID NO: 275366 - DNA, 609 bp, Cannabis indica
aggtatcttgccgaggaccgacttttggaaggaactacaagctcgaaggcccgagtccttggtagagttcttcgccatggccgaacctcacaaaagaattgagaattctctagcggagttagagaaggggaaggacaagcgccggtcacccataccgcggtcacgatctcgcagtccgcgagggaagaactccaggggccgaagcccgagaagacgcagcccgcgaagacagcgaagtccgaagctggctaagtctcctccaaagaaggagtcctcgccaaaaaggaagggtggacctcgcttcgtcaattatactgaactcgcagtccctcgagaccatatctacgcgattgaagaaaggaacggagtcttcaagaagccgccccccatcagggggaatcgcgaccggagggatcctaaaaaattctgtaagtaccacaaggacattggtcacactactctagaatgttgggtcttgcaggatgaaatagaggagctgatccggagagggaaattcgacaagtataaaaggagcgaggaaagtcatccccaagcggatgacaaaggagaaaaccagaatgcgagtggctccaaaacacctcgcaatat

SEQ ID NO: 275367 - DNA, 623 bp, Cannabis indica
attttcaagaagatcggatctttaacctttttggaagcatttgtattgagatgccaagcacatagacggtgtgtaacatcaggcatgtgttccatgatggcctgtttcatggccacatcttggtcagtaactacaacatttggcttcttatctccatggcattcgagaaatttttgaagtagccaacaataggatggaagcttctcgtggaggaggagagcgaacccgaagatgcatgtgttgaaatggtggtttacgccaatgagaacagtgagaggcttattgtactcatttgtcatgtaggtggtatcaaaccctagtacatccccaaaagccacatagtcgacacgtgagtttccatctgcccaaaataagttagccaatcgattctcctcgtccacctgatatacaacgaagaaatttggatccctctctgcgagacaataaagaaatcccaacgctccttccgagtccgagtccgtctctgccttttcttcttgcttggcaccagcaaccctgttgtagacatctcgaagttgacatggcattctctcgtaacctccactttgcaaagcaacatgagacattatgttggcagttttaattccaacggagttcatcga

SEQ ID NO: 275368 - DNA, 610 bp, Cannabis indica
tggattttaattaatggtataagtgatatcaaataacattattatagaattaatgttaaaaattcgtaggtttagataaattaaaaactgttttactaaaacaatcatatctggagttctagagctcagattgaggtgatttcagtggcgttggaaagataattcaaagatctatcaattatgtagaaatagatttatcgtaattttaactttattggggtcaaaattaagctacaaagtgacgacctgttaagtttagtatagaaaccctaagttttaaaattcaaatttaaaacttatatctaacaaataagatttttatttaattattctatttagagttaaattagcatcagattataggggttattttattattttcttttataggtttaattagattataagacctaaatctatcaaattcttgatacgtaatatgcagagcctctaaccctaagaaaaataaaactcaatctctttctttccgcctagagatcataaaatcttataccctacaagttattcatctcgctatccatcaaagatttataattttccttcttgtttcgttctcttcgccaaacaacactcatgattttcatcaaca

SEQ ID NO: 275369 - DNA, 893 bp, Cannabis indica
aaagccaacgtagttgctgatgctttgagcaggaagggtcacagtcagttgagcattgtgaaacaaatctcccagcagctagcaaatgagatgacccgagctaagattgagttggttgtggggcagttggctaatattaccctgcaatccactcttttagaacgaatcaaagaagtacaaatgcaagattcagaattagtgaaaacccgagctagggtttcggctgggaaggctagtgatttctcagtggatgaaacaggaatgttaagattcggaaatcgtgtttgtgtgcccatggatgagagtatcaagaaagagatcatgaatgagtctcatacgactccttattcagttcatccagggtcaacgaagatgtatcaagacctgaaagccatgttttggtggccaggcatgaagaacgacattgctgagtatgttgcaaagtgccttacgtgtcagcaagttaaggctgagcatcagcgacctgcagggttgctgcagccactgaacataccagagtggaaatgggaggacattgctatggacttcgtggtaggtatgcctagaaccacgggacagtttgactctgtgtgggtcatagtggacaggtttacaaagtcagcgcacttcttacctgttcggacgaatttctccattgaccagtatgctgagttatatgtcagagaaattgttcgtcttcatggtgtcccaaagtccattgtttcagatagatccgaagtttacatcgagattctaagagagtctacatcgagctatgggtactcagttaaagttcagcacaacatttcatcctcaaacggatggacaatccgagaggacgatacagattctagaagacatgctacgggcatgtgtgcttgactttgagggat

SEQ ID NO: 275370 - DNA, 800 bp, Cannabis indica
ttcttcttcttcttcgtcttcattccccaacagaattttcgggtgcgggtttcgaaacggaggtgatttcagcgggctcgagtctggaatcattggactaggagctgggaaactctctctcatttctcaaatgggttcttccattaatggcaaattctcttactgtttggtacctgagtcattatcaacaccatcatcatcatcgagtaaattgtattttggtggttcgagtttggttccaggtcctgaggtatcatctactcctttactaataaatactaatgttcaaaattactattatctagcacttaaagctgtcagtgttgggagtatgaaatttgatttggcaagttcatcaaagaaaggtggtaacatgattatagattcagggaccatgctgacttatttgcctaccaagctatacaaagcattggaaacgattatgataaagtcgataaagaatttggagtttggtaaagacccaaatgggtatatgagtctgtgttacaagaccaaatcggatgatataatgggtgctgctgaggtgatcactcttcatttcgaggagggaggagatctggagttgaagagtgtgaacacgttccttagagttacggaagatgttttgtgctttgcgtttgggccaactgatgaggatgatcttctcatcttcggtaatgtggctcaggccaactttttggtgcagtatgacttaactcaaaaagttttatcgtttaagtccactgattgtaccaaatagtatattaatggagattatatatctatatctatatatattt

SEQ ID NO: 275371 - DNA, 597 bp, Cannabis indica
agttatttttgcatcttaaaaaggaaaaaatctgggctttttcctctgccctagctgaaccccctctccctcttttcttcatatttttattttgctaagtgttggaaaattcatcttgaaagcttggattcttggtgggttttgtgcttagctttgtttggagcttgaggtagttcttaaccccttttatttgttgatttttcttgctgaaatttattgttcaaaatcatgaaaaaagtgtatgatgttcttggtttgcatgtggggagaatcaatattaatcttgagaaatttgggtgtgaattgcttggttttgtaatggattatgttggttgggttctagatgaacttttagggtaattttcatgtttaaattcaagtttttgtttgatgtgttgttgctggaaaaataagtttgatgcttgcttgaaagttgcttgaaggttcaagttcttgattaggaacttatgatgaattttgctctaggtttggagttttgatttcatgttgttgaatctgaatttctatgcatgtggactgaaattttaagcttaataatttgtggtttaacttccttttgtggttgtttaattgtat

SEQ ID NO: 275372 - DNA, 712 bp, Cannabis indica
tacatccaccatttggaagactcggtcaatgctctcacaaccaaattcacagaatacaaaatcctaaagatctaggcgacaatcagaagtgattaagtctcgcaaacatgcgagtattcgaagtgttcgtccgaatactgcgagtattcaaaacataaagcattgcctacttaagcattttctatacagtgtgcggttatgccaattttcaggtcatttttatgaaattaccagttttttacctaaaaaacgtagcctcatatatatcccctacaaacattcattcttaaactctctcatgcatataaaaaaacccagaaaacagtgttcccactcaaacagaaaacaaaatgcagtgaagtttcgaaaactaacctttacttctggtaaatctgttcccacgaatcgcccttgaagaaaaacccacgaagaaaagagaaaatgtgggcaatttatggaagtgttttttggtggtttctctgaaagagaggaaacaaagaagttaaggaagttaaagaaaatgagggaaaatggggatttttggtttgaatcagggggtttaaatacccaaatcccccgttaattgggatcacgacacgtggcaattagaatgcctagagtcacccaatccaacggccaaagacggccacgcctacacagaaaccgaagagttctgtgacgtggcaccataaatgcaataaaagcaatgatt

SEQ ID NO: 275373 - DNA, 753 bp, Cannabis indica
cagtaagatatgcaagaaaaacacgaaagtaacacgttgtcagctttatgatcaagctgccctgagcttaacaacgaagctccccaaatggttaagaacgttcttaagggtagtacgactactgtaccatatgcactaaagtaccaactttgtacttgtgttggtagagtcctaactgtactcccgagaatttactaagtgttgtaccacgatcacgacgtaccctgggtactcgtgatggtaacaccgtaattatattaacatccaaagcaagcataaacattcatatatatattcttacgctatcttacctcgttccgtgctcaagtgtgccggtcagcctgagtggaagtgcagctcgacgtataacagggccctaaaccattatgttcaaaaaccgatgagagactcgctaaaacacttatcgggaatataaaatgcaaactaagcttaaccctatcgatgaaaaggatgccaataccctaaaatacttaaaaacgggaaaaactagggttcgggaaaaagccccaaccggcaggccggttcccaaccggaagtccggttcctgggaccaaccggtcgaccggttgacacaggctcccaggaaccggaattccggttctggtctgggaaccaaaattccaacccccatacctcaattcaaccccaaactttccaatactttccagaacacctgtatacactaaaataaaccaaacccaagcaatagaatccaacaaaacacacaaattt

SEQ ID NO: 275374 - DNA, 649 bp, Cannabis indica
ctcgtgtcttcttcttctcctctcactgtgcctcgttgggtatccccttttggcgagttttctaaggtcaacattgatgcagctttagatgcggcgggagatttttgttgtatgagtatgattattcgtgatactcatggagttgtctttatctcagctatttagcacatgattgaacattttcaggttgaagttgttaaagctcttgtttgtcgtcatgcaacagtccaatgtcattgttttagtctggaaattgttcattttaagactgattgtcttaatatggttaaaaaaattaactataatgttcatttagactcatcgttaggcttaattcttcgatatatttattgtaatttagatctctttaataatgtgagtctgtctcattgttctaagacatttaatattgttgcacataagagcgtctctaatggagatgtaaataagtggtagaaagttaaaatataactcatttaataaaaagtgtgctccaatggtttgctaaaaagtaatgtaaatttagccgatagcaaattttgtgccaaatttgacacaacatttaaaatttacaccacaataaatgcactacttttttatttatatttatgtcatttgtattattttattagtatatttaattataata

SEQ ID NO: 275375 - DNA, 509 bp, Cannabis indica
tttcaggtggaaaatggcaaaactgatctggtttgcctgcttaaaaggtcattgtatgggttgaaacagtcacctagacaatggaatcaaaggtttaaccaatttgttcagagtattggtttttcaaggtcaaaatttgactcttgtctttactacaaggaactaggaacacctaaggttgtgtacctattactatatgttgatgatatgatgatcatcagcaaagacaaggctgaaatacaagtcattaagaacaaactcaactctgaatttgaaatgaaggacttgggagcagtcaagaaaattttggggattgaagtcatgaggaacaagcaagaaggaaagatggtgctaactcaaagaagctacattgagaaggtgatcaagaagtttaacttagattcatctaaggccactgcagttccacttgcagggcacttcaagttgtctaatgagtactgccctaaaactgaaactgaaagggaaaatatgagaggtgtaccatatgc

SEQ ID NO: 275376 - DNA, 619 bp, Cannabis indica
ctttgaaataatcagtatgtttgaatgtagaagctctaacataccatttacagttctcatccacacaagtgacaacatactctcttggttctgatctctttgttctaaattgaaagttgttgatcatggcatagtagcaaagtccagatttgaacattttttttatctttgaaaagttgtccttctactaatgtttgcaacttgtgagtttcaatgattgtcttatcttcttccctttttcttttgtttcttgtagtttcttcaatgatgaagtcagcaacttcattagtataatcagcaagtcttctggaattatggttacttgaggtaccatcttcaaatatctcactttcaattattgttcttgcttgtagtaccaaggaaccaatccccatgttgtgtattgcagcttgattttttttttcttgaatgttggtaatgtgtttggatcaattcatgattagtaacctgtcacaaaaactaaagttattcttttattaacatataacaacaaacacaaccataaaacaacacagcaaacacaaccatattcaaatttaaagttccaggttacattcagaggcaataaaaaaccctaagattgaactagcaggtgact

SEQ ID NO: 275377 - DNA, 961 bp, Cannabis indica
ttataaatttactataattctagaaggtcgaactaaattacttcaatacaaattaaaaaataaaaaaaaaaaaaaaaaaacacttaagacttttcaaaaattcagtgtgataacaaaagaaaagtaactctttgctaattaatattatgtgtgaggtgccatattaatacagaagtggattacggttcaagtcaaaccggatcgggttcgggttacggaacaagttcggaaactccacaccaccatggtgtggggattgaaaagctcatccctaactaactaggttcatagccaaaattggatgggacatggcattcaaaatgaaggaccttgcaaccattaacgcagtactaaccaggcatgattaaaccagaaaaaactttgactagtaaagtagaacggatcgaatttatgctctggcttattttctctaaatatggtcatgtatataattttatatttagtaatttgcgggataaatttaagttgcaaataaataactaagtttaatttttagtggtaataatacttaagttataattttaaaagttgtgtaggtaattggttaagtaaattgccacgaggtaattcctgattggtccaaattattaaatttttattattttaaaaaaattaatttaaatatactaataaaaaatgatatgtggatttaatgacttaacatttaacggttaggtactacagagttatagaaatataacttaagtattattaccgccaaaaattaaacttaggtatttatttacaactagtagttaaatttaagtattaatatcgcaaattactcttatatattattagggtaaatggtggtaaaatccctaatactttcgttttggtttcactaaaccccaaaacccaaatttgtgtgggtaaaccccaaaactcgtattctgttaacaatttactctttccgtccaaatttagctgttaagtgtca

SEQ ID NO: 275378 - DNA, 639 bp, Cannabis indica
gcaagtgggcgtcagagttgtccctgccagctggtcccgcctggagttgctctctctaccagctcgcgccacctgtccccctggtccccacttccgtcagcgcctcagcgaatcagcaagcgccacgcaaccgcctcgtcagcttctcctccaatcacagctcgccagctgccacctgctgagaacaaagaaaaaggctgttaaattaattgctttattcttattttctcatacacataaaagccaaaaatccatatttttctcccataacttacacctaaatacctattcactctttcctacttatttcacctaaataaacattcctattttatttttaccctacctttcactacttttacatccttacaaaacatttattttttccaatactcttacacatactctatttatccattctcttcccaacactaattaaattaatcaatttatttatttattttgattaatttaatccttcaaattttgcctataaatatggtgttggaagaccatttcaaaagacatctcttcacctccctaaacacctcttcaacccaaaacacttctccattccacactcttcatttttaccattttctttctaccatttttacactttgaagagcatgtcaagta

SEQ ID NO: 275379 - DNA, 579 bp, Cannabis indica
caaataacacaatgcaaagaacatagattaagaacataacaagcaactgaaaataatcaatgcaacagtgaacaagtaacaataaaaccagttgcagaagaaaccaataacaagaacttgaatatgacaacaatggacaatcaatttaacagtagaggaattagagaagagagatcaaacacaatagatttacgaggttcgaacaaatgatcagttgatcaattgcctactcctcggccagaacagccccaaaggctttgaatctttattaatgctagattgagagagaaatacaagttgattacaaggtgttttcactaacacatacactcaagaagccatgcttcaatcacaactcatctcacacacaaattctctctatgttacactgaactagctctctctatgtttccaacaacatcctctctccttgttgcagcagatggctatttatagccttgtccttcaaagttcgatcctaactgtcataacagacagttaggtaaaacagttatgtttagttgagaaggattagtaaataggtgatgtgtcattcttctattagtgaccaacacaaca

SEQ ID NO: 275380 - DNA, 579 bp, Cannabis indica
aattttgtattgcataagagacgaaaaagagtaatactcaccaagaacattctctgtatttaatacactcataatacacggactcgtggactaaggctcattaacgcccaaccacgtaaaaatccttctcttaatttcttacagttctctaatcttataatattttattggttgccgaaaacctcagtcagcactttggtgctttcattgagagctgaagaaagcttctgcaaatataccttacatcacaacaatggtggagactagaagcactcgtcaacctcgccctctagaagatgctcaagatccaaatgaggaagacgtagcctcaagagcagctgagggctccgaggaagaagaaggaattcctgatgatgactacgagggaaacctcgatgagtatgcctacgatgaaggtagctactcagagttggtgcttctaaggcaaaaagctatcgatcacgaagctgagatcgaagcccaaaaagcacaaaaccaaaaaatgcaagaggtaatgctagccatgcaaaaagccatggaggcggctggcatccacgtgcatcccaaggcaatgactgc

SEQ ID NO: 275381 - DNA, 396 bp, Cannabis indica
tcagtaactcaaatttctcagcagataaatcttcattatccagaaagtctagaactttttccatgggaaatgaatatggccgatgcataacataatcctctccccttaaaatatgtctagcccattcatgctccaacatcagcagggatctagccatacttacttaaatgaggaagatccataagatcccaaccactatggagatggcgaaaatgctcagctaaccaacctatgacataatgcataggtaagaaggcttgacctcgcccctggccatgtatggctgaatcatacaaagctcgataaatgtatcccaaaacagagggtgcaagtgaaactttgtgtccgtgggccatcattgaagccatataaaaagtatcaggtctaatgttggag

SEQ ID NO: 275382 - DNA, 593 bp, Cannabis indica
tggactgttgaaaagtacaaggcacgtcttgttgccaaagggtttagacaaagagaaaatgtagatttctttgatacattttcacctgttactagaattacatctattcgtgtgctttttgctcttgctgctattcataatcttgttgtgcaccaaatggatgttaaaactgctttcttgaatggtgaattagaagaagagatttacatggaccaacctgaaggttttgttgttcctggtcaagaacataaagtgtgtaaattagataaatctttgtatggtttgaaacaggcacctaagcaatggcatgaaaaatttgataatcttgtcatctcacatggctttaaagtaaatgaaagtgacaaatgcatttactataaatctgaaaataatgtgtgtaccattatttgtttatatgtggatgacttgctaatttttggatcaaatattcatgtcgtgaacaatgtgaaatctttgttatgtgaaaattttgacatgaaagatctaggtgaagcgaatgtaatccttggtatacagatcactaggtctgaaaagggaatttctttggatcaatctcactacattgagaagat

SEQ ID NO: 275383 - DNA, 590 bp, Cannabis indica
aaggttcatggttgtgattgtgggcacatatgggtactgagaaattggagaaaaaattcagatgattacttgtgtatttgtttttgtaagttatctggtgaagtagtgctaatctctatgtaatggcaattttcaattttatgtaatggtattatgtaatgggcatggcacttgtattgccattgttaatggaatgtatttttggtacaatatgtggtactggtactggttttggtacaatatgtaatggtattatgtaatggacatggcacttgtattgccattgttaattgaatgtatttttcagacactatggcaatgcattactgaaattgtagttttggtacaattagaactatgtcatttgaagcaaaacctgtaatttgattttgggtaatgcaatatcacaaaaacagtatataaacctgtaatgaagaacttcatacaacaaaatattgaagtattaagacaataccctttaaaaaagcacaaggcaatgttctaatttactgatcaaagcacaaagcagtaggcaatgtgatcaaaaagatcatacaatattacattctacagataccattaaaaatgca

SEQ ID NO: 275384 - DNA, 561 bp, Cannabis indica
actgaagctttcaaggaagctatatggttacaaggaatactgcaagagctgctactgctcaaagacaaagggacagtctattcggatagtctgtcatctattcacttgtgcaagaatcctgtataccatgagaaaagcaagcacattgacattagattgtattggattcgagagaagattgaggacagggttctggaattggaaaaggtgcacacaagtgacaaccctgctgacatgggaacaaaggttctcacattcagcaaactgatgcattgtctcagtttgctgaacattggttcttgctgaacatttcgagatatcacatcatcaagacttcagtgaaaagactctgataaattgctttagagaatcaaggtggaaatttgtggaaattgatcctctaaaccaacttattatccaactcatttaaaccaactaacttaactaactttcggttatgttagttagttagttggtgctatccttgtttgagttagggccatatatataagtctagtcttttattttaaaaaaacagaacagaaggtagaagagagagaa

SEQ ID NO: 275385 - DNA, 748 bp, Cannabis indica
tcaaacccacatctagtatcagacccaaagctagacccgaacctggacctaaactcgaacccagaccaggatcagaacgaaggaattagacccagaactgaatcaagactcagatcgggattggaacttgggactcggacccaacctagagtaagactcaggacgcgaacccacaaccggagcctgatctggacctagactgaaataaggacccgaacgcaaactcagaccaggactcgaactctgacccgaactcaaagccaaaatcgaactctgaatcgcaaatggaattagatcgaactaggactaggaccaggaccaagaccaggatctaaacccaaactcgagcccagatcaaaacaaagacagagacaaaaacccgaaccgagactaggactggaacccgaacctagatcgggacccaaacccacacaatcactgggacctggacccagaataatgatagggacctgggaaacagaacaaggacatggacctattacccgacaaagacccgaacttgaacctaggacctagctcgtgacccggcaccagaaatggaaccagaatcggactcgagattgggatccggatctggacccagagcttggacaaaacctgtagtcggtgtctggatttcggacccagcccaagagccgaaccctgaagaggaccagaacccacacccggacctgaacccagtcccaaacccaaaagttgacccgaacccgtaccttgtgaccctaaa

SEQ ID NO: 275386 - DNA, 909 bp, Cannabis indica
acttctcgctggtttatcttaagcgaggtttaaaacttcgaggagtccctcagggacatctcagctttctgtggaaaatctgagtatacgtgtccttttagtgggggtctggtctcgagtttctaggtgagagaaatctcactataacacatgcccctagtttcgcgatgtgacaggtgcggtcacaagggaaactacattcgagagacaggtgaaaggttgtcacaaggaggtgacctttggttgtcccttcgagggtttcgaaaaatgacggctataatcattacttttattgcatttatggtgccacgtcacaaaactcttcggtttctgtgtaggcgtggccatctctggccgttggattgggcgactctaggcattccaactgccacgtgtcatgatcccaatgaatgagggatttgggtatttaaaccccctgattcgaaccaaaaatccccattttccctcattttccttcaactcccttaacttctttgttccttcactctcagagaaaccactaaaaaatcttcgtaaattgcccagattttcgcctttattcgtggattcttcttgattctacattgctgtcaagggcgattcgtggaaacagatttatcaaagtaaaaggttagtttttgaatcttcaccatgcttcgttttctgtttgagtggggactatattttctgggtttttagtgtgcatgagggttgtttaaggatgaatgtttatagatgatatgcatgaggctatgttttttaggtaaaaacctgggtaatttcatagaatatgacctgtaagttgacataaccgcatacgatatacttgaataggcactgtttcacgccttgaatactcgcgggtattcagatgaacaactcgaatactcgcgggtattcagatgaaca

SEQ ID NO: 275387 - DNA, 230 bp, Cannabis indica
aaaccaccatgaacaagatacaaatgccatagatttaaaaaatgtggttgtagtcttttataatgagtaattctttcttggaccaccactactaatttaactctaagtgtgatttgcccatacaagtaggagattgaggatttatataatttcgagatagaatttcgggaatataatcatatacgtcatttaatttcttaagagaaaatatagaatgacatgaaatgatt

SEQ ID NO: 275388 - DNA, 678 bp, Cannabis indica
ggaaagaaacaatctcgattagaagtgattgatgttctcgcgttggaagccttggaggagtttcatggggtgggggtgagtgcaggcggtcatgtgttgggtgacccggggccggggggtggtcgggtggggggtggtggtggtggggttgggaggccgagggggttgggggtggtggggtgaggagaggtcggtggtggcctcccgggatgggtgaatttgtgctctctgtagatgcggctgtcactccgggacgaggctttgcggggttcgggggggtgatccgggatggtgaaggggttgtgtgggcggcatgggcagggggtacaattggggactttcaggtggcggtggcggaactcctggctttacgtgagggactgaagcgggtggctcgtttggggttctctttgacgcgtgtggagacggattcttctgtggtgtgttcttggattaattttcctgataatattcttctgtttaaaccaattgttgaggagattatttctcttttagctgctgttggtggtggttcttgttgtgccatttcgcgagatgcgaatggtgtggcccacgcactagctaagtctgttactagttttaatggcggtcatatgtgggcagatgcttgtcctagatttattagtgatcctgtaacagctgatttgatttgagtta

SEQ ID NO: 275389 - DNA, 544 bp, Cannabis indica
ccattgcttcaagacgagtgtacacattctgaagttcagacttgacttccaggagctctgcagcagcagagcctgaacttgcaccagcagaagcagcagcagcaccagcctttggccgtttttggaacacaccatcaaaatattcagaaggttggaatgtagggccagtgatgggaggctcaagtgtttcatgtgcttgggccacattcttctgagaggataaaaccttatagattagatttggaaatacaagtttgaaggttggctttttacctcttcgaaaggagacaatctggttgagaatatgagaggctagatcaatggaagttccagaggtgatgcggtataggagtgtagccacttcttgagacaccacggtcttgttcgaatttggaacccaattgcttagtgcaaaccgcataagggaagcatgagcaaaagtgaggtgagtaattcgaagactctcccctggtttcaattctgaacgagcaccagtgagttcagagtgcatcaagtcacgatccatggacatcacagcattgga

SEQ ID NO: 275390 - DNA, 532 bp, Cannabis indica
ttgccaactttgctcaactttcccagagagaaaaattctcagacccagaaaaacacctttaagcactttgcagttttctccagttcttcttcgtttgttactatcagtccttcttgtctttattcgattcacagcaggacccccagtctcaacacttcattgtaagttctttgcaccctttgcttcattattaaatggcatgttgttacttatctgtttgttcttttctgggtttgcattcgaagtttctgggaatgcaagtgtttaaatccttcatataatcggtttgagtttactgctctagtgataggattactgttgtcacgcatttgttgttattttttgtagaagaccatacgttcttcgtataatggttgcttagggcataggatagactgttttctttctattttctgccttttctttttctttagtgtgcaatgccgtcttctgtgaatttattgcacccgactcttgtccagggaatcctcctagggtttcctgtatgacaggtgtccggagggggcctctt

SEQ ID NO: 275391 - DNA, 427 bp, Cannabis indica
aaagtgcatggttgctggtggtgtggacgtgtctccgacttgagggccagttgtttctgggaataggttgagaggtctgatgttgctcctccctactccgccgttgatgacgtctacaggtggcactccagctccaggcaatggtacgctcatcattccaatattgatggatccgttgttagctccgttaacgtgatttccagccatgatgaatggtgttctttgaagtgaataaaatcttacagtcgaattcccacagacggcgccaaatgttgtcgagtgaatttcgcaacaccaaaaagtattatttaattgataaaaaagagaattatttgagaaatgacaagtgcgagtattcaacctaaaatggcgagtactcgactgggaatgcaagaacaaacaacaaggctggaaaaagtaaacaaga

SEQ ID NO: 275392 - DNA, 512 bp, Cannabis indica
gaatgcaccttcttgtgcttagaaaaatgtttaggaaaccctaggtttaggaacctatgtgattcttctttatcatgtcttcgtgcggttttacagtcataatgcttgtttctgaactgcataacgtccgtctttcatcttgcttattctaagcttcatgaacttttttgccctaactcaagaaaatttttgacttcttgaatcctgacttttctttgaacataatcgttctttaatctgttgagtactcctggtcgacatatttgcttgtttattgtttgatattccgaccaaacactcatctcgtgtgttgtcttttgtagatgaactcaggtgagtcttgggaacttggacatcggatcgaccaggatctgcttcaacttctgcacgaggatcatccttgtctttgttctaacccaccttcctctagcgaagggcatactcaaatccttgtgcccaaccataagatgatggctcgtacaaagaaaaccacgcgtctggctgacgcatct

SEQ ID NO: 275393 - DNA, 486 bp, Cannabis indica
aatatcggatgtatggagtatacattggaagggaccgatattgaacttggattagatatgataaatttaccgtaatatctattcaattcaatatcacctagttaatcttagatcaaatgatcttaatcctgacatggttaggttcgatctcaagagtgttattcgtgttctttgattcgttagttaagcctacattttgatcagggtgatacgtacattttggaaacatgatagtacaattgagtgggaccgctaaacatagatataaaatatatatatagcttctataagtatttagtagtgaaacgataattttcttcgagcttggctaaatagaaataaatgattgagatctcattttagtgtttatattagttcagtaaaatatcatttataggtcgccaagtgttttaaggataaaatacattgaaagggtgtaacggtaattttatttctatgcaatgtagatcatctatagaggatcat

SEQ ID NO: 275394 - DNA, 626 bp, Cannabis indica
cctccgtttcagatttttgttttcatttattaatttactattattagtttaattcaaattaatatttttatggggttagaattataaggagttcattccttaattaatttttatgttgtgatcgtatttatgtgttgaaactaatttagtttttccattagtcttgtcttttgacatggttctttagtcttgtcttttgacatggttttttagtcttttccttttaattttttctggttcgagtcttgtcttttggcatgggttgtgtagctcagaatcattatggtgctatggtagaagcattcaagaagggaaagattggatgtgttcaacccgaaattgatgagataataggcattaaagaagcattgagttggattgcaactcattcgttggatagagtcacgttggaaacagatagcttggtgtgtgtccaagcgattcagagcggtattttatgccttcacaatttgtgttttgttaaacgatctgcaaataagtgctcattgcttggcaagagactcttgtttctctacaggtcgtgtgcttcagttggtggaatgttcctctgaattgcgttctattattttgaacgaatttattaattaatagatcttataattttt

SEQ ID NO: 275395 - DNA, 568 bp, Cannabis indica
agaacctgaacaagaatcgccgaactaggaccctagaacaagacaaggaccaggacccgcccctaaacattgaaacgaatagatacctagccacccaaactaagactcgaactcgggcccggacacggtcgtgaacccagaccagaacagagaccctgacctggacctaaatctgtgacctgatcccaaacacagacttggacctagatagggatccggatatgaacctggactcggacgaagacccaaaatgggatcgaaatgctggacctagatctggaccgagatctttacccagactcaaacttggacccgcactcgagacccgatcctagacccagattggggtccagacctggacacaaacctggacacaaactcagaactgaactcaaacccatacctagtataagacccaaagctagacccggaaccggacacaaactcgaacccagactaggatcagaagcaaggacttagaccaagaacttaatccacactcagatcgggattagaaattgggactcggacccaacctagacaaacacccaagacgcgaacccacacc

SEQ ID NO: 275396 - DNA, 538 bp, Cannabis indica
tgtatcctttctgtagcagagtatcaccaagatctgagcctgaaactccttccttgtgtttggattcttcacagtcttacacactatgattgaggacttacttgatatgtgtgggcatgcactcaatcactaaggcttgaaattatttgtgaagagaggctatagtgtttcgaaaattgaagagaaagaagaaggaagaggtctcatcaaacctagagagaaaactaggtttttagctttggaggcattagttggataatgagaccataaccttccttttatactattttcaatagggttagggttgaattattaggaataaaaaattgataaaaatagagtgaaaaagccacctaatggccggccacatgatgggccctacattagtttgggctttgtcatttttctcaactattttatctatttttcacaaataccatcttttacactttcaaccctataaatgccaaaactatttatttgataattaaaataattatcaaataaaattgtcatttataatatttattaattagac

SEQ ID NO: 275397 - DNA, 757 bp, Cannabis indica
tcttcggaatgtcctcctctcggattctcaactgataatagcccgatcggagatcaatcttggagaaaaccgtcttcccctggagttgatcgaaaagatcatcaaccctaggtaatggatatttattcttaactgttaatttgtttaactcccaatagttgatgcacattctcattgacccatctttcttcttgacgaataataccagagctccccagggtgacacactgtgccgaataaaccctatgtcaagtaacccttgaagctgaattttcaattctttaagctcagctggagccattctataaggagccttggaaacaagttccacttcgggtactaaatctatcacaaagtcaattttccgctgaggtggtaaacccgaaagttctttggaaaaaacatctagaaattcccgaaccactttgatatcctctggcagaatagtgtttggccgagtggtgtccaccaccacggccagaaaccctagacaaccgccacacaataattccctagctgacagggccgaaatcaccgggattcgagatccctgaaccaaaccgacaaaaacaaacggttcctcaccttctggttggaagattaccatcttcctcttacagtcaatactggccgaatacttggataggaaatccattcccagtatgatatcaaaatctactaagctcatctctattaggtcagcacttaactccctatcgtcaattctgatcagcatagacctaatccaccttttgga

SEQ ID NO: 275398 - DNA, 497 bp, Cannabis indica
aactgctccacccccaagagtaaacaccatcccagatgtagactttctgttatcaagacaagcttaaaaatctgaatgggtatagcctacgggattcaaaacaccacacttgtagactaacacgtaattccttgtacttttcaagtacttcagaatatgcttaactgcagtccaatgttcctctcctggatttgtctgataactgctcacaattcctactggatagtaaatgttaggtctagtgcacaacattgcatacattagactcccaactgctgaagcataaggaaccattctcatgtcctctatctcttgaggatcagtaggagactgttccttagatagacggataccaaatctagaaggcatatgtgcccctttggtatttgtcattgagaatctctctaaaacattatcaatgtaagctgtttgagagagagcaagggatctgtttttccgatttctgataatctgaataccaagaacataagcagctt

SEQ ID NO: 275399 - DNA, 509 bp, Cannabis indica
atccagactcagatcgggattggaacttgggactcggacacaacctagaccaagaccaggacgcgaacccacacccggagcctgatctggacctagactgaaatccggacccgaacccaaactcagaccaggactcgaactccgacccgaactcaaactaggactctaacacgaacctagaccgggaccaaaacccacgcaataactgggacctggatccagaatcatgatagggacctgggaaacagaactaggatcgggacatagtacccgactcagacccgaacttgaacttaggacccagctcgtgacccggcaccagaaatggaaccagactgggacccgagattgggatccagatctggacccaaggcttggaaaaaacctgtagtcggtgtcttggtttgggaccaagccctggacccgaaccctgacaaggatcgaacccttactcggacctgaacccagtcccatacccaaaagtggacccgaacccgtaccctgtgacc

SEQ ID NO: 275400 - DNA, 714 bp, Cannabis indica
taaaatcgtagctaatttgcattttatgatttgcaggttcctgaccagggcatctaaactgttcggcaggaagaaaagggaagtgtctgatgttgtggctcggcaagtgaaggagattgaaaaattaaaagccgaagtccaatcccttaagcagaagagaaacgctgccgaacaagaggaagaaggagaggtggctggtgaggcgtatgttccacaaccatacgctcctgaggatgagggacaaccacaaacttatgctgaggagtttatttccctcaacgacgaaggtctcctgtacaatttcgatgaccatgcgacccttaatcagcaagtccatctctgctctgacaacatcgacaacattgtggcccgagcgtatttgtacgagcatgttggtaaaatcactattcactgcacggactacgatgattcacatgcccggattctggtttcggaaatcctgcaagaggacgctgaaatcccaatcccaattgaagggtgcagatatgtgagggacgtatcacatatattcctttcttggcctaaacacttaattctaacaaccgaggtaacttctcttataaattaattattgttaggttatttttagtattaattttagattaattttagtatatttttaatttagttttaatcgtgtttggagcatttttacgcttgttatctttatttttgcagatttaaaatagaaga

SEQ ID NO: 275401 - DNA, 776 bp, Cannabis indica
tcatcagctcaatccctataactcagggatcatttacatggatacggcatacacacgatcccactatcagtgtattcggcctcaatcccatgatccttgcatttgggagatttggtcaaagtaaagcaacgaccaggtgagccacttcgggtatacatcagcagattcatgacggaagtgaccaaagttttgcgggtaaccgaggatggaaagttatccacgatactggggggtattgaagtccttggtgaaatttggaaagatataaggaagaacgggacggtagactcaatgagtgatttccttgaccgagccaaaggttgcatcaagctcgaagaagccattcaacgagcagaaggtgaacaaaagtcaggcaagtcaaagattccttccactgggacatccgccaaacttcccaactattccaacaattcaagctcaagtggcaagcgttcaagcaaggacacgggaagaaaggaaacttcactgataaatccggacagactccttgagagaatcatgccaaatacactacattcactactttgactgaagatatagagagtgtatatatggcaactcagtcgttaatcccgtagaagaagcccgtgcccatgaagaaagataccaacaaaagggacatgacgaagttttgtcggttccatggagactacggccacgacactaacgaatgttacaatctgaagtgggaaattgaatttctaataaaaaaaacatccgcacttgcagaattatgtcaagaccagccaaggtca

SEQ ID NO: 275402 - DNA, 510 bp, Cannabis indica
gggcataaaacccaacagcatgcgagtgaggacaaagcgcgctgaaaacacttgtgttggtctgtagggtcagtcattagtccatgaagtagccagagtggcgtactcgtgtataagagccattattccgtgggtgtaaggacctaatggaggcttgaggtggggatgttacaaaacggggatgttacatggactgcatgttaggggcctaccacagtattttattttaatgttttaaatgttaaacattgtgaatctgttattttgatttaactagttcttatttaagcttacggtactaaaaatatttttgttttaaacagtgagatctcatgcttagatatttttcaataaagaagtattttattgtctttatcttattaaatttttttatacggactatcctgtgtgacatctcgggaaatcggggtattacaatatggtatcagagcaacacggtcctaaagaatgtggttaaccctaacatgtaaagttcaccgccatgagacg

SEQ ID NO: 275403 - DNA, 609 bp, Cannabis indica
ataaattagaggataactaagcatctggagcagcaggagtagtctcatccggagcagtctcatccgcgactttgctgatgacctcgttctcgacttcttcagcttgtgcgccctcgacctcgtcaagaaggttccccccaccttgagtctgagtaggcgacatggcacgaaaagcctcagccatctcagcggcttctgttccgagaagagaaaagtcgaagtctgggactttggaaagagtggtatagatataatcagacactgcctgatcatactgcttcttcccattctctttctcagtctccaaatcgcgggccatctccacgatcgtcgcctgcgatttcttgacttcaagctccgcctgttccttcgccttgctgagttcttcgagctccttctccttggccttgctgagttcctcgagctctttctccatcctcgccacttcttgcttcagcttttttatgttctcctgaaaatgagcgttttgcctcttcagcgagtcggcttccttcgaaggagtagcagcagcttttatgaacagagccatcgactgcgcggccagttcagcagatcgcgtaacaagatcctcataaggaatctcagcca

SEQ ID NO: 275404 - DNA, 512 bp, Cannabis indica
gaagtaaatgaatcctcttatattttattaaattaatatcagccaacattaaacaacttgctaaatgtattcaagtccactataggacaaaaatacatatgtggcaaaatgaccattttgcccctccaccctaaaacacattgatgagtccatatttatcttataaatatgattaatttatttattaatattcttaaattgattctttaaattattgattagtgtgattttaatttgttaggttattttaaatactattcatccatttagagtcttttggagggattttaacatattttggtggaaaataatggaagtcggcgagctcgattgtacaaggcagaacttaattgcaaattcggacgaacttaaaggcagaattggacttggagctcaacatgaaagttttagatctcgttcttagctttccataacatcttgaatcgtccaattccgagcaatattgagagagttatggccaaaatactatcagtcatcgcagtaggaaattt

SEQ ID NO: 275405 - DNA, 583 bp, Cannabis indica
ctttgttaaggtgagcatgaataccttatgttgcgctcgacaactgtcaacacctaaacaatttttatatccaaaaccagtgggtgttaaggatagatttcttccactaggtagtagggccagcgaattcttagaaaaccttccatctccattcagacaatgaaagcccctacagtgcatacttttgcgtattctgaacaatcctccatacttccgtgtccattccaagttgttgcatcaatggttatggtgatctcgtagccgatcaatctagtactctcgcatattgtgatcaatcatccatgctttgttaaggtgagcatgaacaccttatgttgtgctcaacaactatcaacacctaaacgatttatatatccaaaaccagtgggttttaaggataggtttcttccaccagctagtagggctagcgaattcttagagaaccttgcatgtccattcggacaatgaaagccattacagtgcatacttttgcatattctgatcaatcctccatacttccgtgtccattccattgttccatataaccaagttgttgcatcaattgtcatggcgatctcgtagc

SEQ ID NO: 275406 - DNA, 689 bp, Cannabis indica
tttattttttgttttttgttaataaaaactcctacactacatatgatgtgacatatatatatttaaaactcatccaagtacgtgtttataataaaataataatttgtacacttaaagtaaaaaacaaatccttcaaagtataatcaataaaatccattgatttgacctggctggaaaaaaatatttcattacagtattgaattaattattatgatatgacatccacttattatattaggaaattatttaataaaatttgacattgcaatttttgttggtaacttattcgaaatagtgaaactcaatgccacatattcggttaacatagttctattccaaataaaatttaagtttatagttagaaagacatacccaatagaacacaatttgtacataacctttagtcaacttttgctatgtatacccttggaaatgaaaaacacctcaaaataccttgtgtttccaataaactttttaaacaatgcagctgatattgtttgtggttttcaaagaaaaccctaaagaacgattttaaataaatgaccaggaccttttttgtattttaaaataataaaaattttattaatattttcccatcaatccatatacggtcaaatcagtaggttgtactatcttcttaaataacctaaaaaagatacttacgtagaaatatgttattactataaaga

SEQ ID NO: 275407 - DNA, 80 bp, Cannabis indica
tatatcatttcgggatagaatatcgggaatataatcatatgcgccattcaatttcttaagagaaaatagaatgacattgt

SEQ ID NO: 275408 - DNA, 657 bp, Cannabis indica
tttagtttggtacccttagcccgctgtaaactctgccaaaatttagaagaaaacttcggatctctatccaaaaactatagactttggtacaccatgtaatcttactatctccttgacatacaaatcggcatactgatccactgtaaaggctgttttaactggtagaaaatgtgcagacttcgtgaatcgatttaccacaacccaaattgaatcaaataaactcgtggttctaggtaatccaaccacaaattccatggtgatatcttcccacttcaacttaggatgtgtcaaaggctgcaacaaacctgccggtctctagtgttcagccttgatctgttgacaggttagccattgcgatacgaattctaccacattcttcttcatcccactccactagaagtacgatttaagatcttgttacatcttggtggtgccaaaatgcaaggagtatggagtggtatgagcctcttcaagaatttcattcctaagttccacactacttggaacacaaaccctagtcttaaataacagcatcccaccatctgacactgtaaaatatctggcttgaccagttgaaacctcttccctaatcttcacaaattctagatcagttaactaagcaattttaattcgttctaacaaattagattgcagcgt

SEQ ID NO: 275409 - DNA, 598 bp, Cannabis indica
gtgtacctgattgatccatagcaattactccaatttgatagtgcaatactatcaactaagtcttcctccctagatctctaaatcagaagcagtttattttatctgattatcaaaaggtatacaattgtgatgagacaatatgtatttatagagttagggaggggacttagctacaaaaccctagttgggttgggcctgctcatcaaaggtttcagtcaactagaaaagcccacacttctgcttcacctagactttacacacagatgctaagcccattaacaattgatcaccaacaacatgggctaacacagcaaagaactatccaatcaacccaagttttaataaaaccaataaaatttaatgtaagcccaaataaaaagtctaacaagccaatcaaattttagttaataaagttagtaccatattgattggggttactctctcttgtgggagtcttgctatataacatgattcgtgttatatcttgtgtaatgtgtttttttttaaataaggaattccgtttaaagaagaacttttaaagaagttactacaaaaaattgttatttttagtgacaattttttagttacaacataattt

SEQ ID NO: 275410 - DNA, 857 bp, Cannabis indica
atcacaacgcgtttagtcctgtccggccattctaggttcttttctcctggtcggcgtattgatggctcgacaaggctctctttgagatttgcctttttgattagattacatacaatataatctcggaaggtatgttgatcttctctctcctgaccgtcattttggtaattcggccaggtgcttcctgcaaggtaatatacattccattgatatcagcctaatgtgggaacttccccacacgctcctgctctgcatgttagaatatggataactaaagggaatgagcattaattattgacatttttataattatacatgattttattatgatttgggtcccattattagaaatgggtattagagctataatttatcaatttggagattttatgaaactcttaatgtattatataaattaaatatgaattatgaaatattttacgatttttgctcggtcacaacagaaaatgtgattgatggtcgttagagttacatgggtaagtctagaacctattttttagtgagataaatatttgagatattcagaataccaagtttgagtgagcttatgattttgggcattttaccctcaggtttacaattacttcaattaagaggtctagggcattttaaggattttaattattagtataggtggccttgtaggaaactggccattttatttattcagccaatattaacttatggatttaattaagttagaaaaaaccaagaaattaatagaaatttcctctttctctcttctttttcggctgagaactttggggttcaagagctggatttgtggtgattcaagcttgggtttgcaatctttattgatctcttgtgtggtatgt

SEQ ID NO: 275411 - DNA, 518 bp, Cannabis indica
acctgatccgaaacttgaggtaagaaaagtataatgtaccacatggcatgacatgttctgaaattatcgattgtctgattaggcaatgataatgtaatgatactatggacacgatatatgggctcacctgattaggtgatgcaatacatttggcgacgtaccaggcaaaggtacgggcgtcagtggcatatgatgagtaccgagcgtaggtacgagatcgtctgattaggcgatgcgatatattagcgtcaagttgtggcacgggctcacctgattaggtgatgcaatgatattatatatgatattgcattatgacacgggcttgcttgattaggcaatacaaatatatgagcatatctgtttctatgcatgtgattgattatattacctactgttgaatgttatagtttaatcattttgtgataatgaaatgtataattagctatttaatgtatccttctttattacttttcttgctgagtctatgtgactcacgggtgctttgtggcgcaggtaag

SEQ ID NO: 275412 - DNA, 779 bp, Cannabis indica
catcgcgggcactcagggtaagaataatccttgcgtacacccttgccttgatttcctcggaaccgcttgttccgttttaaacccaccactgacgacgtaggtttactcttctgctcaaccatggagcccctaccacctctgccataactagaaatatggcaagcggtatcccgatttcgtggcataacctcttgaggtcctaaaatacattctttagggcttccagtccagagagcattcttcatatctgaatctccctgaaggactgtaggttcatttatccaaattttctcatgcaatgatcccacttggttatcagccatactatgctctgctggtaataccgaattgagaatgcctggcatacgaggtaaaggtagtacaggaaacctttgttgtttcaacctctgaatctcctcatcgtgtcgttgaatcatagcttccatttctgcgaatctttgctccaactcccacggagcctgtgacgaacgaccatcactcccatcagaagccatccaaaggctttcaccttggttgcggggagaactcaaactccattctctccaaccgttactagccctgaccacactatcctgactccccatattgcaccaggtgtccatactataggacaaacctgccaattagtaagtcagtctggtcaggcaacgaccccaatacaaactttctaccgcacttatggactctaaggcaacgcactttaaataattaattaaactctaatatgcttcctaacatgctctcacattcacaattat

SEQ ID NO: 275413 - DNA, 636 bp, Cannabis indica
caagatgagtgtttggtcggaatatggaacaataaacaagcaaatatgccgaccaggagtacccaatagattaaagaacgattatgtttgaagaaaagtgagaactcaagaagtcaaaaattttctcgagttagggcaaaaaagttcgtgaagcttagaataagcaagatgaaagatagacgttacgtagttcagaaacaagtgttgtgactgtaaaatcgcacgaagacatgataaagaagaatcgcagaggtttctaggcctagggtttcctaaacatttttctacaccaaagtagaggatgaatttgacatataaacatgcaaagataagcataaaggaaaccagagacttactcaaggatcagatgtctgggtgcgagcaacgtcaatccaacaagcagtttgtatgaaggcgcttcaacaactttgaagtcaagaatctctgttttcgctctgaagcttagttagcaaagaaaggtgatgaaaatgagtttatgtgccaatgttgttcggtatttataggcatgtcacgaaaagaggtaatcatctcaaaggaacctcagacgcctcagtttccctccttaaaagtgaatatgggaaataaaaaataatcaattgcagccgtcagccgtgg

SEQ ID NO: 275414 - DNA, 440 bp, Cannabis indica
ctacaaccagcacggagtcgttaaaagcttctccgcagtggcaaggccacaaacaaacggacaagcaaaagcggtcaacaaaatcctaaaggtcaccctaaagaaaaagctgctggcctgcaaaaacaattggcccgaagaattgccaagagtgttatgggcctaccggacaaccccaagaaccacgaccggccactcgccattttcaatggcgtacggttgtgaagcaatggtcccggtggaaacattattcccatcccacaggagaacaacttacgatccaacaacaaacaaggctttattacaagaagcgttggatcaaattgaagaaactccgggatgagactcaaatacgaatggcgagcttatcaaaagaaaggtgactaagtactttaactctaaggttaaaagtaagaaaattacactattgtgatatggtc

SEQ ID NO: 275415 - DNA, 715 bp, Cannabis indica
gctttgaaaactaagagggtaagagagggagagggttcgggtgagaggatgaaaaaccagaaattactttcatttttcttcaaaaatcacattttatcaaataaatcatatatggtcaaatgaccattttgcccctagggctataaaacatacatattcattttcaagggcataaatgccatttcacactcaaatattgccaaataaatttcagattatcacatatcaaataaaatgccaaataatcaattcaatttacatttcgggcccgaacccggttcggcccgaaattcccgggtgtgactataccgcgccaacctgtcagaacacacctgaaaagacaacacaggcatactatataataatatagttctattaagcacgtaattaaattaatctcaacaatttacccttctcgggtcataattaccaaaatgcccctggctcaccaacggggtctttaacatgttaaatttcatataatttcacatatattgaactatataataatataattcctcaattaactcataattatctaattaggttttgctaatccttttcttaattccgggtattacatgcagccattgacttaagaccttttcttaagcttatatataccacacactatcagttcgaaggtgattcaccagacgagtttcgagaggtgatttcaaagagaaagattaagaggtagagagagagagagaga

SEQ ID NO: 275416 - DNA, 682 bp, Cannabis indica
cagagcatttattaaccgaaaacagaagggacgcccagtcaacctcacatcaagtctcggatggtcgcacttgacacgtgtccccaatcaaaagcagaagcaactcgaataaagtctacatgcaacttcggaagtcccgtacagacttgggggcaaatgttatctcaatttttgcactctgatgttgcatcacatgaatggtgacacgtggagtctacttggaacatctgctcgggaagcacagtccgagcaggatgcctcactggcatgcccaaagcaaagtattcagtaatccgcacagaatggccaaacacttacagaattcaactttcgcatcgtgagtcatcaccacaatccctataactcagggatcaatttacgtggatatggtatacacacgatcccactatcagtgtattcagcctcaatcccacgatccttgcattcagcattgttcccaccatctttctgtttatacgcattgtaaagagaggggaaactcttcctccccaagcttgctagccctataaatagtgatgcatattcactgggcaaaatatcggtcaaaaagcagttgagctaagactataccctaaatatattatctaagaattatatattcagagatactggtgtaagagctataagaaaaggactcgttctccttgatcttaagacaata

SEQ ID NO: 275417 - DNA, 602 bp, Cannabis indica
ctccagttgttgacccctcgttgtttccccagctcgagcctcgagcgcgtgggggcacattaaatgatgttatttaatgcgacaatatgcttgttcgcaggaatgtttccagccgcctcctcggtcttatgatacgacttggggcgcgtgaaggtgtgtctaataatggcattaaatgcagtgattcacttttgcagaggtcgattcgtttcacgccccatgattgatgcggcgcattgatggtgtcaggcggatactcaaacgtttgcaccgccttaatggtagattgatctagcccgttgatcttttgggaattcgaatcgtgcgtttcccctaccgtacgattggtaggtgaagacgcctgttcctcatgcacttttgcctataaaagccaccacctttccttcatttcggttactttccattccttaccatttttgctcgaatttctcagagagaaaattcctcaaagtagcacaaactgccttaacacttaaacacttcctgtaattttccagtgttcggttttgccagtgcttctcaactctcgctcaaccatacccagtacccccagttcaacaatcaactgtaagttttttgca

SEQ ID NO: 275418 - DNA, 683 bp, Cannabis indica
tatattcatgttcaagctttatggttttttttttacattgtattgctcaagttttgttgtatttgtgatagttaattattggtgatagtctaaactgtagaaaccgcaaaatcgcacctcaccgcaccattttttgcggtgtggttttttagtttcgtggtgcgaatgcggtttggaaaattggaaaaactgcatgtgcgggttggtttgaaaaaatagtcaaaaactgtaccacccgcaccgcgaacacccctaatgttgattgaatttggttggagtatatttccttcctcaattctgttatgtataataattttatatcaatacaacagtttttatctaaaaaaaaaaactaatgaatgattaataatttatttatttgtcaaaaataggaaactcaaaaaatattgagatataattttttttgtattaaattaatataatttataatatatattaaaagtaaaataaaataattaaataaataataaaagtgaactaaaataattgagcatactttgaaaaaaaaaattataaattgatttaaaatatatttttatttgtattatttacttttattattatatgaaataagatggattattttaactatattatcgaaccttttatatatatatatatatatatagagagataaatataataaaaataaaattaatata

SEQ ID NO: 275419 - DNA, 76 bp, Cannabis indica
agtgaaggcttcagaaaattacacttaaatttctattttccttcagagaaaaacctgagcctttctctctccttat

SEQ ID NO: 275420 - DNA, 528 bp, Cannabis indica
acccgtgagctaacacccaatagaagagctatgtaggacataaccctcctaactagatacttgacataattaagttactcttaatattaatcaacaataattcacattccataaatatatccacaacgcatgttgttctcacatgcacaaatcaagtctcataccgcacattatactcacatacgataatcaactatacactcatgttgatcagacatgaggtaacctgccctgccttgtgttattctcacacttggcatccaacagggcaatcaattaccataagttgtactcacccatgataaagttataacctgcaagtgttatgctcacacaagcagcaagaccctaatactattctcatgctaacgatgctaaaaaaatgtaaggagatcatcacaacacataatcaatttaaatagcaaaccaacccaagttgtatgcataaacatacaccctgtgcacagatgccactcttcttacctcagttgctaagaccacccttgctacctcgagcacctcaacgaa

SEQ ID NO: 275421 - DNA, 734 bp, Cannabis indica
tgacgtctagaagttgttacctgagggttataggtgcgaatagcaggaacttgaggagggcatcgggctcggttttatccatctacttcggcctgtagcgcgtgcagttgatcctgaatcgcagcatattgatcagtggtgagctggatcattccctcggataccactgccagagtgacagggggaaaatgcatggttgctggtggcgtggatgtgtccccgacttgagggtcagtcgtttctgggaataggttgagaggtctgatattgcttctccttactccaccgttaatgacgttcacgggtggcactccagtttcagataatggtacgttcatcatggacccgttgttagctcctccgttggtgtgatttccagccatgatgatatttttctttgaaatgaatgaaatcttagtcgattcccacagacggtgccaaatgttgtcaagtgaatttcgcaacaccaaattatattgtattattaataacaagaagaattttatgtgtaaagacaagtgcgagtattcaacatagaatggcaagtactcgactgggaatgggaaacaatcaacgaaagctggaaaataacaataagacagagaattatagtggttcagtcagattatgatctgcttagtccactgtagcaagggattcgtaggtgccatttcatggtggatcacccctttatatacaaagcaggtgtccaatcggttacacaaggatcacat

SEQ ID NO: 275422 - DNA, 901 bp, Cannabis indica
aacaattgcccccaacatgtttgccatggctgaacaagttgcagactttataatagagcaatcaaatgaagcaacaaaaaagagaagggatgaagaaatggagataatcacagattacatggtgcttgagatcgaagaaggacaaatatacagtgacaagaacatactgaaaacgacaatcggattctatgcaatgataaagaactttcaaatcagaacgaagaggtccgaaccgagggaatacatggttacatgtgttgacgaaaattgtaactggtttctgcgcgcttcaaagttgaaacaaacacaaacattcaagattagaaaatatgtcaacaaccacacctgctcattggatgtcataatggaagatcacaggcaagcaacatacaatactattgctcaaatagtaaagaagaaatacgactcaataaacaggaagcatgcaccgaatgacatcatgaaggacttgctacatgagtttggggtttcgatgggatatcaaaaggcttggagaacaagagaaaaggctctagaattgtcaagaggaaagccagaagactcataccagcaactaccaatgtaccttcatatgctaaaaaaagcaaatctagggacagtaactgaattgattacagacaaaaagaaccaattcaagtacatgttcttagcattgtcaaattcaattagaggatggattcattgcagaccagtgattgtggtaaatggcacattcttgaaaatattatatggagggacgttgtttacaacatcaacaatggatgctaataaccacatattcataatggcatttggaataggagactcaaagaatgattcatcatgggagtggtttttcaacaaacaaagagaaacattcggagaaagagaaggtaagaaa

SEQ ID NO: 275423 - DNA, 629 bp, Cannabis indica
aatatgacattgtccccaatgtgacattaaagaaaaaggaaaggaaacttacctgagcgccacatcaacaagcggttgacgcccgtaataagcatcatgctggacaacttgaaagttgtttttaaaaatgccctcaagcttggcatgtaatgagtttgaaccaaaagccacaccaacaacacaagactttcgatgatgagcttggggagaagcctttcgtagctcgtagaggatataatatggtgttgatgaaatatatggatccattggtggtttgtttgtcaatatcattgatgcagttgaatcaatgatgtcatgttcttcctcatcctccaatgtcacagtttcaacactttcatctaacaacccttcttcttgttgctcactcttcacttggctatccataccctcacttatgatttcatattcaatgatttccttttcacaaggatcttgatcttcaactgtaggctcattatcttccttgtattcaaataatgacccttcttcattgtaccaacaactctcataactttcatcattggagttattacattctgaatcatgagtcattgaattatcacataaagatctcaccatgtcagttaagcgattaatctctcctggaa

SEQ ID NO: 275424 - DNA, 747 bp, Cannabis indica
aaaattgtttttcattttccaaatatctaagccatactctcaaaccttcaaaaagccctattgattccgaaaggatgttgtcaacattagtggagagaggtaagcatgcaagcatatgagttatcgggtagtggaatggttggaaagagtaaaaccattataacattgtttcgattgtgaagtcatcttgtgtttgtgcagtatgtgacaaactgagcatctaaattaattgttagagttggtggaattgaaattctagtttgagcaatggaagagaacaacacatgagcagtagtattgtgattatctgatagcgtagttagtagattagtagttagtagtatttatcttactcgagggcgagtaagaatctagtttgggggaatttgttaggctaaaattagtctaagtttcgggtcgtattttcggttagttttcactctttgtttctagttttagggctattttacgcttgattcttttgtttcaggtcctcgggtgtttaaagaaagtatttacaagaattgaggacaagtggtgaaagaattgagaagaaaaaccaaaaaaatatgttgctgccaaatcccgtcgcgacgggaaatatcccagtcgcgacgggaactggcagaaagattttcaagaattcgctgcttaaccccgtcgcgacgggggcattgccagtcgcgacggggaccccagtgacgggatttttgggcagtttcgtaatttcacgaattttaaagatga

SEQ ID NO: 275425 - DNA, 536 bp, Cannabis indica
ttgaattaacatcctaaatatgaattctctaaaataatgaaattaaacacataagggtttaaaaaaaccttacattgattgcagcggaatataatgactccttctgttcaagatctctagcccttgattcctttctgtaataactttagactatacactcaaaagtgacataattcgagatcccaaaaatattttacaaaatagtacaagtcttttcactagccttcctaagcagcaaaattagagttacaaaagtacatcgctggtagaccctaactcgcttggtctagtgtggcccgaacatgtacaagcaccgccaagctcttgcactcatggctgatcagagacagatttacccgttcctgcatagtagagcacctgtgagccaagcctaacaagacagtaaaaatataaataatcagaattaacatatcacatacacaataatgccatttgtctatttagaatagacccgcgtgttacgctcacacgcctatttatgtctatgtggcatatagacttacgtgttacgctca

SEQ ID NO: 275426 - DNA, 620 bp, Cannabis indica
ctgttattataagaaaactcgatcaggggaaggtactttacccatgatccctcaaagtcaagcacacatgcccgtagcatgtcctctaaaatctgaatggtcctctcggattgcccatccgtctgaggatgaaaagctgtgctgaactttaactgagttcccatagctcgatgcagactctcccagaatctcgatgtaaacttcggatctctatccgacacaatggactttgggacaccgtgcagacgaacaatttctctaacatataattcagcatactgatcaatggagaaattcgtccgaacaggtaaaaagtgagcagactttgtaaacctgtccactatgacccacacagagtcaaattgtcccgtggttctaggcatacctaccacgaagtccatagctatatcttcccatttccattctggtattttcagtggttgcagcaaccctgcaggtcgctggtgttcagctttcacttgctgacatgtaaggcactttgcaacatactcagcgatgtcattcttcatgcctggccaccaaaacatggctttcaggtcttggtacatctttgtcgaccctggatgaactgaataaggagtcgtgtgagactcatccat

SEQ ID NO: 275427 - DNA, 414 bp, Cannabis indica
ttgcatggaaaaatttgctatttttatccccctcctgaagccacaattgtttcgatcgttgacgccaaaacacctccttctgagtaagaacttcaaaaagttctgtctcagcttccttatatttagaaatagcatcaggatctctaccttgcttccaccgcctcacctccttcttccaatattttatacgagaagcaaaattacccgaataatctttgccccaaaccgaaagagattccccacaccgttgtattttctcttggatacccgctagattatactcctcccaacactcctttaccacctgataacacagaggttcccgaagcaagcaattttcaaagcgaaatttgcgactcccggtagctatattatgccgtaccaagtcaaggaaaatgggacaatgatcagaag

SEQ ID NO: 275428 - DNA, 628 bp, Cannabis indica
gttgggtcaaagggttgacagggtgtttcacacaatctactatgctagtagaaccctgaatgatgctcaactgaattatgccacaacgtagaaagagatgctggcaattatgtttgcttgtgataagttccgaccctacctgattgggaataaggttattgtctacacagatcattcagcgatcaaataccttatgaccaagaaggatgcaaagccgagactgattcggtgggtacttctacttcaagagtttgacttagagataaaagataagaagggcactgaaaatctggtagcagatcacttgtcaagactagagctggaagaaagtcagaacacgaaagaggtgtagataaatgagcaatttcttgatgaacaactctttagtgtgaaggaaagtctaatggtaccgtggtatgctgattatgttaacttcttggctgctaacataactcctcctgagctctctcgtcaacaattgaagaagttcttttttgaggtgaaacattactactgggaagagctaatcctttacaagcactgtgcagatcagataataagaagatgtgtgcctgaagaggagatgtactctattatcaatcactgtcatgctctaccgtgtggggga

SEQ ID NO: 275429 - DNA, 551 bp, Cannabis indica
gtacgcaataattgtattaggaaaacaatctacgcctttcaaaaatttcaatatatcaatagctctcattttttccctaggcaagatttctcttaataactttaactccacatataattcatttccatcaatatcatattgttcattatgtttcaatgccttttcaaaatgactacaacaagacttcaaacatgtattgtctaatgattggagcttatcagaagtaaacaaaaaaccaaaaatattttcatattcttcatattgttcaaatcgcttagtaagagaaacaatggcttgatcaacaaggtaaaaaaaataattaattctaaaagattcttctcctgataactcaatagatggggtattcaaattctcatcaaattgtctttttcttctaattgtgcgtctttgaggaaaaattggatcaatattcatatcaatagcaatttccttagcactattcaaggcatcataaaaacctgtttctctatatttttcaaaaaataattaacctttattttttccatagcaacatcaataagcatatcttt

SEQ ID NO: 275430 - DNA, 548 bp, Cannabis indica
aaaatatcattggggcaaaatgaccaatttgcccctccatactaaaataacatacaagggtactaaagggtatttttgggaaattctaacttcccgaccactcccgacattcccaatgtctaataaaacgtcccaatatactaacatactaagttgtgattttactgagccaaacaccaagttccatgttaccgggcaccgaaaatgcaaaattatgaaattcactatatgacataaaatgcatttcagaattcaataataacagcataaataattatttaactatctataaataattttccataattaagcataattaactgctaatttccaaattaaactaagcggtctttacatagaagtttccaaacaactttccacaagtcacaattagcatacttaaaccaatttaattacaagaaaattacctaatatgatttcatgttcttttaaagcaaaaattgaaattagtcaagaatgtaatatcaccaagcccacagatttttcgaaaaataaatgaacttttcaaatcatgctatctacctact

SEQ ID NO: 275431 - DNA, 682 bp, Cannabis indica
ttctttaatatcctgcgaggaaataaaaagtttgagtggacagaagaatgtgaaagagcttttcaagatctaaaggcacagcttgcaaaacctcccttactttctaaacctctggacggtgaggagttggggatatacctagctgtcacagaacatgccgttagtgatgtgctgatcagagaagagaacagcttacaacacccagtctattacattagtaagacactctcgaggctgagggtcgatatccattgatagaaaagctcgcctactgccttattctagcaacaaggaagctgaggccttatttccaagctcatcctgttcgggtatacaccaaccaaccactacgacaaatactacaaaagccagatgcttctggacggttactcaagtgggcggtagaattgggtcagtacgaaatcaacttccaaccccgaacaacaatcaagggccaagccttggccgactttgtggtagaatgcacaggcaaaaaagaaagcataccagaaagcaatcccgagccagtacctcagccaagtaacaatgaagaaaaactaacctggaaactacatgtggatgggtcggcaacagatcaactatttggtgcaggaattgccctcgtcacgcttggggggcaacacctacacgctgcagtcaagttcagattcaaggcatctaa

SEQ ID NO: 275432 - DNA, 826 bp, Cannabis indica
actcagtaaaaaaagcatataacatatcataaaatttctgacttgtatttaggcgcccatacacttatttacaaggctcaacagatgagtaagaacgttctatactagggtaaagccactataccacatataaaacgtacctcactgtacgagtgttcgtagggtttgtttcgtaccctgagtaccactgagtgatataccatacaactcagaactttcccgtacttgtgttggtatcactgtactgtactcacacacaatattcactataccgatgcactccgtaccataactgtacaagtgttggtagtgcaattaacaatttaagcatgcatatacacataacatatacatacactcagatattgatatcacacattatatacagttcttaccttctttctcgattcaagtgtgctggccgaccttaacggaaagtctcgtgctagatggatgccctaatcacattatgaaaccgggtaagttacatgatcaaaatcctaatcccgggaaacccaaacccacaaccctaggttctgttatactccctagaggttactcaaactcttgaaatagggaaacacacaaccacgacactgaaatggacgaaaattgagaaaatgaagcatttggggaccctgccagaaccggctggccggttttagaggtactggtaaaactggctagccggtttgcaccagttcaccccaaactttccatttcttgcttagttttccaccaaattccaccaaaccttccagagtacctaaacaatgcatacacaatattttccaactagtatttcacagaaaaactcaatgaatca

SEQ ID NO: 275433 - DNA, 597 bp, Cannabis indica
aatcacaattcaccatttaactcaaaatcaccatcttacttgacaatttgcactaaacatcactttcaacaccaattcaattgaacagcccttaatctcactcaatcttcattcaaacaagtttcaaatcaaccctaagaacctaccttaccctcagtttataccccagctcagaattcattgaaaacctttaccaaaacctaactaaactcaagaaaattaattaagagaagagtagaaggatcatacctccacttagctaacttctagggttaagattagctcaggaaattgaagaaatgaaatgaattttccttggttcccagctgcttcaagggttcggcaagagaagaagaaaaaaggaagcttgaagttatgtaatttttttgttttcttgccttggaagtaacttaaataaggtttgcctttcttttcttttctttttctttttttttttttaaaataacaatcagcccaccaaattcaaaggtcaaaagtcaaaaacataaaatgactaatttacccttcaaagaaacctaaactaaaattataacctagggcatttatggtaattttactaattccccaatccgacat

SEQ ID NO: 275434 - DNA, 226 bp, Cannabis indica
atttttccatcaaaaatttttttctaattttgaaaatattttatttggattccttgtgaaaaattaagcaattttcgtttttacggaacttaattccgataaaaattgaaagagttatgaattttggaaaaatcggggttcaatggtgtcgagggtggtgctcatgcgcaccagaccctcggacaagccccaatccgcgcgcgtgaacctggatcgttcaccctgc

SEQ ID NO: 275435 - DNA, 729 bp, Cannabis indica
ggagaattaattatttcaagaaagtgggttagatcagtgttaattagaattgaagatagagaattgagcgctgatcttgtggagttaccattggccgagttcgacattatacttggcatggactttttgtctaaatactctgctagtattgattgtaaacggaaaatggtaacttttgaaccggagaatgaggaaccatttgtctttgttggttcggtacaaggttctcgtgttccaagaatctcagcattgaaagctagggatttactacgcagtggatgtgttggattcctggcagttgtagtggattccagtaaacctgtgttactcggacctgaagaggttaaagtggttaaggaattcctggatgtatttcctaaggaattacctgggttaccacctcagcgagagatagattttgtcatcgatttaattcctggagcagaacctgtgtcaaaggcaccctaccgaatggcacctgctgaattaaaagaactgaagatacaactccaagggatgttggatctagggttcactcggcctagtgtgtcaccttggggagctccagttctatttgtgaagaagaaagatggaactcttcggatgtgtatcgattatcgggagctgaataagttaaccattaagaataaatatcctctgcctagaattgacgatttgtttgatcaacttcagggcaaaacggtattctctaagattgacttgaggtct

SEQ ID NO: 275436 - DNA, 828 bp, Cannabis indica
aaggtttttctattgatgacaatgtataaatttttacattatttaatttttttttatagttacctcgtccgaatatgatcttaattgaactgcagtacatgagaatatgttttctgcaacatcaccgaacatcacagcatctagcaactctgtaccatcgtcgagttgtacatatgtccttgcactaataatttatacagaatatgtaacggttagtatgaatatgcaagaagttcaaatattaatttagttataatgtgcttaccgtggtgtaggaagacatctttttccgcattttggattttcacaatctgtttcttcgttgtcgttgtagaacataagtttcttattacaaaaatcacacgacatgtaataaaaatcttggttgatattttttaatatgatttcagcttcaatccaataatatgcaaaaaaaaaaaaacaaaaaaaaacaaaaaaaaaaactacatatgtaatagaattcaatattatattaagtacaaaaaaatcaatgatttttaattaattttttgtgtatattaattacaaaaaaatcaatgatttttaattaattcaatattattaagctcttaaaacacctaaaacaaataaataactatactaattatacagtctgaattggttagtaataataaaatgggagcaatgacaatcgaatatataaatttatttttcttgttctaggctgttaaatataataaccacaaacaagtagtgtgaaaatgagttccaatacagccccaagaataaacaacacaagtatgggtaggtgattagtaaacatcaaatagtatgaaaacaaacagc

SEQ ID NO: 275437 - DNA, 1048 bp, Cannabis indica
aaaaagtttaaggtagttgtagaaagttcaaagtttaggtgggatatacttgtataaattgttgattaggtgacttttgggaaatattaatgttatccaatgacaaaaactttaaaggggcagcatataaagttacggcaagcaatttcctattccatttaattccattttttctgagagcatcaatgttcgctaggccaactttaatttctatgaaatctctcatttgtcttgtatgttgagtctttgtgtaaaatttgttgttgtgttttattttgtttattttgtgttgtcattgctcgaggacgagcaagattctaagtttggggtgttgataactctaagatttagagttattttcatatctttaagcttgaatttaatgtgaattgtggagcaattaatgtctatactatgtaattgtgtttagtttgttgtgtctttgtaataaatggaagtgtgtgtgttagtaagtgttaaatagacttatgttattgtttttatgtgttttaagcaaaaaaatacaagaataggtatttggaaatatttgggacaaggagaaaaaggagcagaaaaatgcttattgctgactggcattgctatagcaatcatcgcgtagcaatttgtcagcccagtaagtttattttggcagatagtccagctggctttaatgaagaaaaaaaggagctgaggtggcggaatttggctattgactcaacaaacatgtggaaaatgaaggacaagtgggtgatgacttggatttccaattagggtaaactttggtaccctaattggggggcaaaaagaaaagaggaggacattagagatatggtggctgcactttgaatggagagtacgaaaattacagcagaaaaaaaagaaatcaagtacagagaaagagagtacaaagaaagaagaagaagattgagaagaaggagaagaaggcaacctacaaagaaaggatttgagctcaccactcatttctcttgctctccacttcattttgtatcattttcttctctctaattttctctttaactccatgaac

SEQ ID NO: 275438 - DNA, 621 bp, Cannabis indica
caaaggattcaagagcttgagaggcgcataggggaattagatggcctggacgagagggtcagggatctagcccctaacaatcagaactcagggccaacagtgacacaacaacaagttgcctcgttggctcaagactatgctaacttgttggccagggtagctgcgatcgagagaagagatgctgctaccggaacatcaggtgcacctcagatggaggatcgcatcaaggcattagaacaagcaacagcaggcatgcaggctgctatcactgtactacaaaatggacaggctgcattacaagactccctcaatgatacgatcgaggattgtaatgtgtctgtcacagccatccgggaagaattggcagggatgtcaaccaagctaaatcttaccatgatagcagcagagcgtgcaaataccggggggcacggaggtatggagtatggccgaccgagagcacccgagcccaaatgctatggaggggcgagggatgccaaggagctccaaaactttctgtttgacatggagcagtactttagggtcgtgcggaccgactctgaagaagccaaggtagcaacagctaccatgtatttgtccggagacgccaagttgtggtggagg

SEQ ID NO: 275439 - DNA, 538 bp, Cannabis indica
gatcattaaaaggtaatgtttatttttgagaaaaaaatatatttttcatagatttggatgccaattattgcatgttgttgagattagtggattttttgtagcttttgtgatctttaggttgtagatgttagtgtttcaatggtatctgtgtttattacagggtttatcgatgacatatcgataggatgtcgataggatgtcgatatattgggtgtctgtttgaatttagctgttatttgtatgtcgataggatatcgtttgtatgtcgataggatgtcgattagtggtttaagtgtattttctgccctatattgtcgacgacttgtcgacagtatgtcgatggtttgtcgattagattaacttgtttattgttaggttgtattgtcgactgaatatcgacagtatgtcgatatgtggtcgacatgttgtcaaattgtggtctgtcgacagcatatcgacaggttgtcaatatgttgtcgattatgttaacatgttgaatttaaatttgtattgtcgacagaatgtcgatattttgtcg

SEQ ID NO: 275440 - DNA, 472 bp, Cannabis indica
aaaatatgataaaatattttattatatatttatgatgtatactaattatatagaatattttattttattttattttataatttaattattttattttttatttttaatttttgttgtgaattatttatttttatttgtttattattatatataggggtgttcattggatcacatccaatggatttggacccatccgatccaatccaattatttattggatattgaatttttccatccgatccaatccaattgaattgagtcatccgatccgatccgatccaatggatgtattggattagatcggttccatccattggattaggggtgttcgcggtgcgggttgtgcggtttttaacctatttttctaaaccaacccgcacatgcggttttctaattttccaaaccgcacccgcaccgcgatattaaaaaaccgcaaaaaccgacaccgcaaaaactagatgcggtgcggtgc

SEQ ID NO: 275441 - DNA, 588 bp, Cannabis indica
atttgctaattgttgggagatttgcttcatagtaatcagctgactctgaccttttctactcaaagcgtcagcaaccatattgcccttaccaggatgataaaggatctcacaatcataatccttcaccaattctagccaacgcctctgcctcatattcaagtccttctgggtaaagaagtatttcagacttttaagatcagtgtatatctcacacttctcgccataaaggtaatgccgccaaatcttagcgcaaataccactgctgcgagttttaaatcatgagtagggtacctctgctcgtactcctttaactgccgagaagcataagctattaccctccaagcctgcataagcacacagccgagaccctgtctcgaggcatcacaataaaccagaaacttttccttatctgaaggaagagttaatacaggagcggtaatcaaacactgctttaactccagaaaacttttctcacactgatcagtccaaacaaacttcaggttctttcacgtcagcttcgttaagggtaccgcaatctttgaaaaaccctccacgaatcgacaataatacccagctaagcccagaaag

SEQ ID NO: 275442 - DNA, 599 bp, Cannabis indica
ttttcatattaaaaacaacagtaaaataacactacaaaaccgtaatttgttgttgatttagtaattttttctcttttccaggttttatggttttttcttggtgtttctatgattccggtgttgatttgtccatccccaaccacgaaggagaggtgtcattggtgttttgttactgttcacagtataaaagtaaatatattgggcctgagcagtataaaagaaataaaaatgggcttggacagtaaaaatgtaaagtttgccgtgtcccaatatttttgaaaacatttggtaaaaaagcagtatttttgtaagtttcccatacaacacaatacgctttaatacagcattctaaacgagcccctaaattttacatttctactgtatcttttaattttacatttatactgtaccttcacagttagggttttcatatgagggagggctgggtccaatatgtcgtacccactactaatagcctcttttacacaaagcccaaagtagaggtatttaacctttcattaaataattattagaggaaattacactctataccttttttatattatcctcttttatttttaccctcttttttaaagtct

SEQ ID NO: 275443 - DNA, 978 bp, Cannabis indica
tgcacaatcccttgtgcagcaactaagttcttcttcaacctgaaatcccttcagatctaatgacgaagttgacactgaactctcttcagttagaactcagcaactccaggctctgatctttccgccattgatgaccatcttcaagctatacaatcagacctgtagatacaacaacaagaatagcacgatacgacactaactcccacgataacaactgaattaacaaactattacgatttaatggataaactgtttacagaatgaaaccgactatatatacccaacaaaatagtccacctggcactaactaacacttaacaataacctacttaacagatcgctagtgctgatataacagacaaaaactccaggcacgactagacattgtacataactaaactgtcacaaaataatgacacttacattctcccccttgacaggttatgttcaatgactcaaaaaagaactaaagaccacaaaagaaacagcaatcacagaattaatgcaccaaacataaatgtctttaggaatataaacagagcaaccataaataaaaaagagtacaaatatctcccccttcattgaatatgagctgcttgatcctgttctttgccagactccccctgggaaggtggcccagccgacaccaagggtgttgcagtgattactggagacgagtcagctggaggatgcagatccggttgggctggactggtgacaggggcaaatactgaaggctccccctgcacatgtgcgttacttccagacgtatcagaggatgctccaaacgaatctcgatgaaactcaggcagagaaatgtcaggcagagaatccccaggaaaatggtgcaaaagagtagacttgatagtgcgaaccatttgatacatggaggcctcaaaggcaagctgacgcttttgatccttcctataacgtttggcaaaagattgaaactcagaaacatttgtacctgccagctgg

SEQ ID NO: 275444 - DNA, 105 bp, Cannabis indica
tggcaatgctaatcctcctgctaattggtagcagatgtttcatgaaatgcgaagtgtcatacttcgtcaagaggaagagttgcaatgtttaaggcaacaagctgc

SEQ ID NO: 275445 - DNA, 132 bp, Cannabis indica
gatatttcaccttatgtgaaatgagaactccaccatttattttcgtttggtcaagctcgaaggagatcatcctttacttactattcgccataacaagattaagatcacttgatctaggatcaactaggcgat

SEQ ID NO: 275446 - DNA, 587 bp, Cannabis indica
ataaaaggttgctagaatgcttatcattttagatgaattgacaactctattcaatggatgatgctttgactctcgcctaaacgggacactgtatcagtttgttgaaaaccttggaaaataaaaatatgtaaattttggtatttttataaacatatttgtttacttgttattttctgaattttgtgtatgaatttattgaaccaagtgatttacttctgtttattgatatttgtagtgccaaaatgaataacccacaccccgacccactcctagtcaatgcctttgcaaatgaactctatagtgtgaaaatgcaccctggtagttgcattaactcgcacctattgatgatgaatctgaagttccaaaaagcaaatctacttggaattgaattatcaaaggaacaatgggttcaattcatacttaatagtcttcctccagagtataatggatttgttgtatcttatatgatcaacaattttaactcttccgacatggataagcccgaaggagaattgcgagctcatgaacagaatttgattgcaatgccacctcccggttttgcaaactttaatcagaggaaaaggatt

SEQ ID NO: 275447 - DNA, 606 bp, Cannabis indica
taaactcttatgtgtttatttcatagttttagaattcatattaggatgttaatcaaacatacctgttagtaaatctagatcctgataaaatatttccaacaacatgtatcagagccatggtaattatttactttcatgtaatatgaattaaaacaatgttttatatgttttgtgttgatttggatggtttcatgttggtttatgtgtttatgtgatgaaagtttacgttgtacgaattttttcgatgaaaaatattttttcaatttttaaaaatattttatttggattccttgtgaaaaattaagcaatttttttgtatggaactcgattccgataaaaattggaaaagttatgaatttttgaaatttgggagccatggctgtcgagtgggtgcatcgaatgcaccaggcactcgaacaagccaggcatcgcgcgcacgtgacacgctcgtgtcaccctgcacctcgcccagacgcaccctacagctgacagagttttctcggtcaggcatgctgcaggcaccgaagatcctcggcgtgatcacctcctccgcgcgcgtactaggctgcgtgcagcccttcctgggctgcacgtgcagcctgtcct

SEQ ID NO: 275448 - DNA, 602 bp, Cannabis indica
attacatatcctgattttttttcttaatgaaaacacatggacaaattagatcattattgtatcccttctttaataaatattcacttaaacggttgtaccacatgcgtccagattgttttaagccataaagggatctctgtaactttatcgaacatatctctttaggcttaaaggttagtgcttcaggcatcttaaaaccttcagggattttcatataaatatcattatcaagcgatccatataagtaagttatcactacatccataagatgcatttttaagttttcagaaactgttagactgatcaaatatcgaaatgtgattgcatccattacaggagagtatgtttcttcataatcaattccaggtctttgagaaaaaccttgagcaacaagcctagctttgtatcttacaatttcatttttctcatttcgttttcgaatgaagacccatttgaatcctactggtttcacatcttcaggtgtgagaacaataggtccaaaaacatttctttggttaatgactctaactcaacttgcatagcatctttccatttatcccaatcatgtctattttgacattcaaagacagattttggttctt

SEQ ID NO: 275449 - DNA, 565 bp, Cannabis indica
ctacacgaaaaccgaggagtttcatgacgtggcaccataaatgtaataaagtgaaataattacagtcgtcatttttcgaaaccctcgatgggacaaccaagggtcacctcctcgtgacaacccttcacctgtctcccgcgtatagtttttctcggaccgcatctgtcacatcgcgaaactaggggcatgtgttatagtgagatttctctcacctagaaactcgagactagactcctgtttggaggacacgttgtaacgcccgtacttttataaaaatattaattttatttacaagcgttaaacgcggaaaaacataatgtcgcatttttatttaatacttgaaaatgttcacaactggccagttttcgtacaaaagacataataattaataactaaaataattgcgacataagtttaataacgtaaataaataaatagagcgccctagaccgcccgcagttatatggccctcagcgagttcacacacacaagcatccaaagttccactcgccaccggctttctaaactttcagttaccttggtctgcacatggtaatttgataag

SEQ ID NO: 275450 - DNA, 826 bp, Cannabis indica
tgtcccgagaccgaacactccaggtcgtgctgccacgacatgtacaacctcatcttagccaggctcactcctgttcagcttttgcctttcctttacctacacatgggagcagaactgtgagtcgacagactcagtaagaaaagcatataacatatcatataataccgacttgtatctaggggcccatacacctatttacaaggcttaacaaatgagtacgaacgttctatactagggtacaaccactatacaacatacactacgcaccttgttgtacgagtgttgatagggtttgtttcataccctgagtaccactgagtgatataccacagacaccctatactttcgcgtacttgtgctggtatcactgtaatgtactcttaaacaatattcactataccaatgcacactgtaccataatcgtacaagtgttggtagcgcaactaacatataaatatgcatatacacttaacatatatatacactcaaatatccatatcacatattatatacagttcttaccttctttcttgattcaagtgtgttggccgacctgaacagaatgtctcgtgctagatggataccttaatcacataatgaaactgggtaaatcacatgatcaaaaaccctaatccaggaaacccaaacccacaactctaggttctgttatactctctagggatcacactaaatcaggaaatagagaaacaccgaactaaggcactaaaatggacgagaattaagaaaatggcttgttcggggatcctgccaaaactggctaaccggttttacagtacctgtaggcacgaccatacataacatagaa

SEQ ID NO: 275451 - DNA, 758 bp, Cannabis indica
agtgacatccatttgatcaatttccatgtcaaactgattagctatagatagcattatccttatggtcttgtacttggctactggtgagaatatctcattgtagtcaactccctctttctgtgtaaaacctttggctactaacctagccttaaatcttataggttcaccttcaagtatcccttctttatgcttgtaaacccacttgcaggctattattcttttccctttaggccttagaaccattatccaggtcttgtttttctttaaagagaccatttctgaatccatagctttaaaccatttcttagcattaggccctgtcatagcttcttcataggtttgaggttctgtacttagagatttcatagcagtcatgaaggcataggctatgtcttcattccagatattgaaactgtacttaggattaggtttaggtgtcctcttttctctgtctctggtcaattggtagtcatctagagcttcagtgggttgaacaacttcagtttcatctccctgttgctcttctccttcagttccttctctgttggagctttctgtttgttccacctgatcctgatcaggttcacttccagctggttccacctgatttatatcaggttcttcttggtcatctagcttccatagagtagggtcaaactgtattgtacctgcatggttagtgtctactgtacctgcagggttagttttaagaaaacaaggaaattcattttctttaaaaataacatctctgctaatta

SEQ ID NO: 275452 - DNA, 581 bp, Cannabis indica
cttcaccgcgataggcttgacagatcgtgacctctcgcctagtggatcccagctcacagggtttaacgggacgacacttatcccaatgggaaaagtgaggctcccggtcaccctgtgcccggacactccccagagcacattcaaatactgcaccttcgtggtggtggactgtccgacagcctacaacgcgatcctcggccgaccggccctagtagactttggcgcagtcacttcaatccgacatctgtgcctaaagttccctacccaggaggccggagtcgggactgtgaggggaaatcagggggaagcaaggcaatgttataatgttgcaacccacctgcccgtacttatggtccgggagtccgctgagccagaaatggctgaagaggatgagttggaccctcgtgtagggtccgaaagaatcgtggaaccaatggaggacgtcgaagaaatatcagtgtgcgacgtcgactccaccaaagtactccggttagggaaaaaccttgaccaggaggaaaaggacaaaataataaaaacactgaagggcgccatcgacatctttgcatggcgccaagaagaca

SEQ ID NO: 275453 - DNA, 600 bp, Cannabis indica
atcttgcgaactgatagaggtggagaatatatggtggatatgcagttcaaagatcattagatattttttttaattgtatccaaacttactccccagaaattcgatttgcatattgatgatagtattgttgggaatattttaccaggatgtagatttactaacaagtatgttgattaacatccctaaatatgaattctctaaaacaaagaaataaacacataaaggtttaagaaaaccttacactgattccagcggaatttaatgactccttccgttcaagatctctagccattgattcatttatgtagcagagcattatcaagatctgaacttggatctctttctctccttcgcatttggttaccattgtcttactcactatgattgagtacttgaattgctatgtgtgggcatggcactcactcactataggctgaagtaagaagaacaatgaaggaggtgagaaaacacaaggaaggaactctctcatcaaggtttggttgaatagtacagttaacaaaacaatttatgagtgagagtatcatgttccttttatattgtttcaactagggcatagggttgaattatatggattaaaaa

SEQ ID NO: 275454 - DNA, 467 bp, Cannabis indica
ttggatttttggaaaaaaaaaacaaaaaatgcaattttggtgcatcatcacctgctgcccactacgcgtgcgcaggtgaaggatttgcagggggcttgagcggcgtatcacgccatttgcagggtcaagctcggcgggtatcacccaggcttcagcgcacgtatcaccttgtccaaaggactggtgttcgtgcgattgagccatgtgcacccgattttcaaaccttcatatctttttcaatttttatcggaatcgagttctgtaaaaaaaaaaattgcttaatttttcacaaggaatccaaataaaatattttcaaaaatacaaaaatatttttcatggaaaaaattcgtacaacataaacattcatcacatatgcacataaaccaacatgaaaccatccaaatcaacacttaataatatatattacatgaaagtaaatcattatcatggctctggtgccagttgtt

SEQ ID NO: 275455 - DNA, 193 bp, Cannabis indica
acctgctgcccacaaggaggctgcacgcagcctcctacgcgcgcgcaggtgaaggaattgcaggggcttgagcggcgtatcacgccaattgcagggtcaagctcggcgggtatcacccaggcttcagcgcgagtatcaccttgtccaaaggactggtgtgcgtgcgattgagccatgtgcacccggttttcaa

SEQ ID NO: 275456 - DNA, 877 bp, Cannabis indica
ctgttcaaaggtagaacccccactctctttctcaggacccgacatagggagagtagtaaccccaccaacaccagaagactctcgggtttcttgtaaaaatttaactgccccttcagctcgaagagccttatcaaccatttctgcataggttgtggtatcacttgttgtaataaccaggtcatgtctgattttggcattcagcccagccaaatacttttctttcttgctgaaatctgttggtacaattccggaggccaacttggccaagcgatcaaacttggtggtatactcggtcactgacatactctcaccttgtaccaactcaataaattccttccgctttgcactgcggaccgcctcattgtaatatttggcgttgaacaattcccggaactcttcccaggtcattctggtcacatccctggtgagggataccatttcccaccaaatcagggcatcctcctgaaattggaacgtggcacatgccaccctatcatttccagctactcccataaagttcagtattctctcaataacagtcaaccactgctcagctttaagaacatcagggcctcccagaaatactggaggcgcttgctttctgaacctttcatacaaaggctccatgcggttaccagcaacatgttgctcagctggcaccgtgagttgaactcgacactggccttgattgtacatatcttgacggtcatcagtgaacaacccggtggctctgataccaaactgtaacgcccgtattttataataatagtaatacacgaaatctaactttcttaaaatttatatatttaatgattataaggatcgggatcccgaatatcaaatattagtttaaaatattttactaattcgtacatat

SEQ ID NO: 275457 - DNA, 566 bp, Cannabis indica
taagaacgttcttaagggtagtacgactactataccaaatgcactaaagtaccaactccgtacttgtgttggtagagccctgagtgtactcccgagaattactaagtgttgtaccacgaacacgacgtaccctaggtactcgtgttggtaacaccgtacttataataatatccaaaacaaacataaacattcatatatatatactcttacgctatcttacctcgttccgtgctcaagtgtgccggtcagcctgagtggaagtgcagctcgacgtataacagggccctaaaccaatatattcgaaaaccgatgagagactcgctaaaacacttatcgggaatataaaatgcaaactaagcttaaccctatcgatgaaaaggatgccaataccctaaaatacctaaaaacgggaaaaactggggttcgggaaaatgccccaaccggcagtccggttcctgggaccaaccggtcgactggttgacacaggctcccaggaaccggaattccggttctggtctgggaaccaaaattccaacccccacaacacaaatcaaacccaaatcttc

SEQ ID NO: 275458 - DNA, 668 bp, Cannabis indica
tgagtgacatgaaattcaattttaggtcactcagttttacaaactttggattagaggttgcatatatttgttcggtacaaattaacttaaaaaaaaataaacttttattttttcaactattggtaatacttgcggaggttatcagcattctaggccctaggcaccatggttccgtccattctttttagcttataggtcctagagccgatttcgtcctcaattttgtatggtccatcccaatttggcccaagtacctccacttcgggttcctgagtggctggaaagacccttcttaggactagatcaccaatagtgaattttttattttttcctttcgagttgaagtgtttggccaccttcttttgataatctaccattcgtatttgaaactcatcccggagttcgtcaatttgatccagcgcttcttgtaataaagccttgtttgctgccggatcgtaagtcgtcctcctatgggatgggaataatgtttccaccaggaccattgcgtcacaaccgtataccattgagaacggcgagtggccggttgtggttcttggggtggttcggtaggcccataacactcttagcaattcttcagaccaattttttttgcaggccagcaacttcttctttagggtgaccttgaggattttattgacagcttctgc

SEQ ID NO: 275459 - DNA, 694 bp, Cannabis indica
aaaaattttaagatgcccgaaatggcagcttacaccgagaactcggatccaagcgatcacctgtcacggttcaaccgaatcattacagtcattagggtcagcaatgctgccaaatgtttttgcttcccacttactctaagcggatccgcggaagagtggttcaagaagctggaaccaggatccgtggattgctggaataagttgcaaactagctttcggagacaatttgtcgccgcaaggaaggtcaatctagaggtcagcgccttgcctaacatcaagcagctgcctacggaaacattgaagaatttcataaagaggttcaaggaagaagcctcaaaaaccaagaaagtagatgacggacaacaacttgctcttctccaagcaggcatccgtacagggactccattctggaatgagttacagcaagaatgagcttcaaaccttcaagacttctagaagagagtccagaaatatatcaacttggaagaggcccaaatagtggcctacgggggatactatcctactgggatagcaggatatgcacccggagctcagctcccaggcactttgccaacaaccactccaccaatgagcgacatacaattttccgctactcccggatatagtcaaggccaggccttggcccccgcatcttcccattttggaaatccctcggggataagtggacaagccc

SEQ ID NO: 275460 - DNA, 800 bp, Cannabis indica
aggatgctaaaggaaactagccgaaagaacttcctgaagttctatggttgtatcgaacaactgagaaaatgacaatcggacagaccccatttgctatggcatatggatatgaagctatgctacccgtagaactcaaaccaccatcccacagaagattggcgtacaaccaagatacaaatcacatactcttggccgaatcacttgatgaaatcgaagagaaacgaactacagaaaacttaaagttgatagcccatcaacaaaaagtagctcggtatttcaacaaacaagtgaaggctcacaaattctttgtgggagatatggtcttaagaagagtatttataaacaccaaagacagtacggcaggtgtactcggacctaactgggaaggaccatatcaggtggtccaagttctcgaatcaccagcatacaaattgggtaagtatgatgaaaaaatgtaacttgttctagtaccacggtattggaatagggaacatttaagaaaatactagcaataaagtaccaagtcggatgaccatattaagtactgaaagaacatttgcttttaagtgaatggcctgctgggcggatcacgcccaaaggttcggataaaatgaaaaagtactcaggtcggatgaccaccatttaaagtacagtttctaatttttgcaatttgttttattttatgttaagttaaaagatcagattagatcaaatagccctgatgtaagttactacggtaacaaacacatttttgatcaataaatgaacaaagatgtttacttcaaaattcaaattgagtc

SEQ ID NO: 275461 - DNA, 683 bp, Cannabis indica
ctaaagatgcacctcctagattggatgcatttactattaatggatttcgatcatggaaaaaggtgagaggaaaaaattgtgcatttttagcacatatcgaagaagatataaattcacctcatagaaatgctgagaaagcagttgcagatctcatgaaccaaccaacacatattggaagaaggtttgcgaacttcacatcacaagaaattgctgacaatagacttcgtttgaaaacatcaattgaggggattaggtggctcgcatttcaagcatgcccttttagaggtcacaatgaatctaaaacttcaattaatcggggaaactttttagagttattgagtttcataacgtcctacaatgataaggtagcagaagttttggataaagctccacgaaatgccacatatacatcaccaacaacgcaaaaacaagttttacatgtcttgggaaataaagtgagaaacgcgattcgtgaagaaattggtgatgcaaagttttctgtaatagttgatgaagcacgagatgaatctaagaaagagcaaatgtcaattgttttgagatttgttgataaagatggttatgtgcaagaacgttttttcgggcttattcatgtcaaagacactgctgctttaacattaaaagaaggtattttctctatactctctaattatagtcttgatgtt

SEQ ID NO: 275462 - DNA, 521 bp, Cannabis indica
gttttcagaggaaaaggtctttttacttaaatccaaatgttgttactgatatttcgcaacaccaaaaagtacaatttaactggtaaaagagagaattatttgagagatgacaaatgcgagtattcaacctagaatggcgagtactcgaataggaatgcgagagtaaacaacaaagctggaaaaataaatgagacggtgaattatagtggttcagtcagatttcgttctgcttagtccactgtagcaagggattcgtaggtgcattttcacggtggatcacccctttatatacaaagcaggtgcccaatcggttacatgaggatcacatttattgttaatccattatttacacattgaattgcaatgactaaactcaaacaacgttaacattaataaatgtatgacagttactgaattcatcaacgtatgcgtctttcgcatctgcgagttgaccgttcatgttccgtctgttgagctcgtaggatcgcacatacgtttggaacgtctgcgtccttaagtaa

SEQ ID NO: 275463 - DNA, 1049 bp, Cannabis indica
taaaaatccttctctcactttcttacagctcaatagtataatcatattttactagttgccgaaaatctcggtcaacagacggatactcaagcgtttccaccgcctttattgtaaatcgatctggtccgttgatctttgagcatttgaatcgtgcgcttcccccaccgttcgattggtaggtgatgacgcctgttcctcatgcatttttgcctataaaagccaccaccttttcttcatttcggttacttcccatttcttgccaactttgctcaaatttcctagagagaaaattctcagacctaaaacaaggcctttaaacactttgcgattttcccagttcttcttcgctcgttgctatcagtccttcttgtctctattcgactcacagcaggacccccagtttcaacacttcatcgtaagttctttgcaccctttgctttattattgaatggcatgctattacttatctgtttgttcttttctgggtttgcattcgaagtttctgggcatgcaagtgtttaaatccttcatatagtcggtttgagtttactgctctagtgataggattgctattgtcacgcctctgttgttattattttttttttgtagaaggccatacgttcttcgtataatggttgcttagggcataggacagacttttttctttctgttttctttaacgcgtaaggccgtcttctgtgaatttattgcacccgactcttgtccagggaatccttccagggtttcctgtatgacacgtgtccggagggggcctctttccagcggttaggggacccccattccctttttcttaatttagggtttggtatggggcctaactgctggaatcttactctttttacagaatagaaaaatgtctgcttctggctcaaagtcatcgaagaaaagtggtaagcgcctggctacccttgaggaggtctccctgggacccgttgcccaggaggggtacaagtcccgggcgaccggatgggaagcggccgagcttcactccactctgacctgtccccatcagttggagaacattgtgg

SEQ ID NO: 275464 - DNA, 211 bp, Cannabis indica
agttatgtatgttggcttcgaaccatccaactgtgtcacgtcggtacaggctggagtatgaccagcagccggagtatgaccggttcgaccgattaggctgatacttaggttggtggttccgtactatttgacgtatcatgtcggtacaggctggagtatgaccagcagccggagtatgaccggttcgaccgattaggctgatactgtaaca

SEQ ID NO: 275465 - DNA, 520 bp, Cannabis indica
tactgtgacacacccaccatttggaatggcaattaatactctcaccactcagcccgcgacatgtaaagatcctaaaaggtctagtcaacagttaagcggaaataagtcttggaaatatgcgattattcaagttgttcaaccgaatacccgcgaacattcaaattgttcatccgaatgtccgcgagcattcgagacgtgaatcagtgcctatgaattgtatacggttatgtcagtttacaggtcctacactatgaatattacccagtttcattgacccaaaacacataaatacccactagcatacactcctaaaagttttcaaaaacatccaaacccagaaaacaaagcacattatctccaaaaacagaaagcgaaaatgcagtgatttagaagctaacctttagttttgattcctgcggttattctcgatcacttctgagaatgaaaatgttgtggaaagtggcagaaaatctgggagtggattttgtctgaagtatatgcactggagggaagttaagag

SEQ ID NO: 275466 - DNA, 443 bp, Cannabis indica
aatcaaaaccaaacacagaaccagcaacactcagcaacaaagctctagtagaaattctggtcttcagacagatttattattgcaatttatgatagagactagatcttccattacagatctacaaacttagatggggcaactggcaactcagatagcaactcctcctcaggggaacttgcctagtacaaccgaagttaatcctaaagaaaactgcaaggcaattaccctacgaagtggaaagaactatgatgggcctgatatggtacaaccaatggatgaagaaattaaagatcaaccggcaccaactccaacatcaacagagaagaaggctactgatagtcttgccacacaacaaaagtctccgccattcagtatagatcatcatgtgaagataccctatccgtagagactccgaaagaccaatctattgggttttatgccct

SEQ ID NO: 275467 - DNA, 409 bp, Cannabis indica
cgtacattttgggaacatgatagtataattgagtggtagcgcttaacatagatatggaatctatgctgaaatatcatttatacggaactaagtattttaaggataaaatacattgtagggtataacggtaatttagtacctatacaatgtatatcatctattagaggatcattgatcaaattaggattataacaatggataatttatagcgtatctatatcgtggaacatatatagcaatctatatgactgatagtgcaagttctatgcgtggatgcaacaaggaattaataagttagtggatttacttggtaaattctgggtctgcttattggaagctcggttacataggcccatggtccccatactagttgagatcatactgcttgtaagattcagttaattgattt

SEQ ID NO: 275468 - DNA, 566 bp, Cannabis indica
cctttttcttgatttagggtttggtatggggcctaactgctggaatcttactctttttacagaatcgaaaaatatctgcttctggctcaaaatcatcgaagaaaagcggtaagcgcctggctacccttgaggaggtctccctgggtcctgttgcccaggaggggtaccagtctcgggcgaccgaatgggaggcggccgagcttcactccactctgacctgtccccatcatttggagaacatcgtggaggtagctggaatcaagccttccacatcagggacctaccatcggccacctcgcgacgcggagacgcccaatcacaattacgggggcttcggggtgattagtggttacaaatacacttttatttattttaaatgataaaataaattgagttttaattgatattttcatgaaattattgtaatatattttataaatgaaaatatttgattttgattcaatttatgtctttcttgtaggaattaaagtgtatttttattgaaagaaagaggaaggagcaaagttgaaaagaaatgaagaaaaaaatggcatttttgttgaagt

SEQ ID NO: 275469 - DNA, 751 bp, Cannabis indica
gttctactgctgggaaccaaaaatcatcccccttaattcaattcaatcccaaaccttaccaaactctccagtatacctatacaatgcataaacatccatttccaaccaacaaatcacagaacaaaccaataattcaaattatgccattaaagctcaaagcttgagtttcaaaactcaagcttgcttaaaaccattctcaagcatcaaaaacaatagctagggactcaaatcaactcaacctaaccccagaattcaaaccctaagcaattcaaaacccaacagccactaaacctaaaaattcatagtgaaactaaactaaaatttcaaaaacttaaggggagaagaactagggttaccttgccttgattcctcttgaatcctttgctgaaaacacaagaattcagctcccaaaatcccttgcccttgctgccttcgaagagagaaagagagaagaaagagcttctcttgatttttggtttttctttgttttttttcctcaaatgaaatggtttttccttaattaattcattgctgaaaaacaatgtgctaggtgtcaactagagggacagccacctaatccaccattaaacaaaatgtctaaaatgcccttagacttaaaactagggtatttctaaagctaggggtaaaatggtcaatttccataaccccgctcaatcccgataatttattttctctaaattatttcccactatgaaatagggttctaaacttacccatgtgatcaatctag

SEQ ID NO: 275470 - DNA, 559 bp, Cannabis indica
tggggggcacatagacgacctggacgaatgtttcaaagtcctcagaaaatacaacatgaaactgaatcccctaaaatgctccttcggagtcagctcgggaaagtttctaggcttcatcgtcaacgctcgaggaattgaagccaatccgaaaaaaaatccaagccctcctggatatgaactcgccaacaaaaaccaaagaggtacaaagcctaactggtcgaatcgccgcacttagcagattcgtgtcaaaatcaacggataaatgtgtcccattcttcaacatcctgcgaggaaacaaaaagtttgaatggacagaagaatgtgaaagagcttttcaagatctaaaggcacagctcgcaaaacctcccgtcctctctaaacctctggacggtgaggaactggggatatacctggcagtaacggagcatgccataagcgccgtactaatcagagaagaagatggcgtgcagcatccagtctattacatcagtaaaagactcgtcgaggccgaaggccgatatccgttgatagaaaagctcgcctactgcctcatcttagc

SEQ ID NO: 275471 - DNA, 776 bp, Cannabis indica
aagtttcactaaaactcaatgtttagtttcatctgatgggtgtgttgtcttaacaggaaacagaactgtagaccagtgctatgctgtgtgcaataccatagtgtgcaacaggaccttcttggacaaacctgacttatggcactacaggctgggacacttgaactacagagatctccgaagattggtgaagcttcaagctgtaaagggaattcctgacatgaaagtttccaaggaaagagtatgtggtccatgtcagcttggaaaacagcataaggcatctcatcccacaattaatagacttctcacctctcgtgtgctggaactcatgcatgttgacttaatggggccaatgcagaatgaaagtatcagtgggaaaagatatgtaatggtcttggtggatgactactctcggtttacctgggttgaatttcttagagacaagtctgacacatttggatcattctctgccttgatactgagattgcaaactgagaaagactccaaagttggaaaagtttttcgactaagaagtgaccatggaaaagagttcgaaaattccatattctcagagttctgtaatggcatgggaattcaccacgagttctcagccccaaaaactcctcagcagaatggagttgttgaacgaaaaaacagaacactacaggaaatggctcgggtcatgatgcaggccaaggatatttcaaaacgattttgggctgaagctgtcaatactgcctgttacgtgtgcaatagagttcatcttcgcactggtacct

SEQ ID NO: 275472 - DNA, 636 bp, Cannabis indica
gataactaatcagattgtaaagagttttatttagggcataaaacctaacactgactgtcacatctaattccaaaattctattttgaaacttgagtttggcttttcctctagctctaaccgataccatttcgccattaccaaccttaagtttcaactctccggatttcaaataattccatttttcaagcaattgcaatgaacaactgacatggtttgtagatccagaatcaagaatccagatggatttatcattctctaaaacacatgattcgaaaactaaagcatcactgcttaatcgtttttgaattgttgttattgctggttcaatctgttgtgaagtataatttgaggaagtgaaatcactttctctaatcttctcaactgagcttgaagtagtaggattgttggagctatgaactctttgctcttcagattgaacaattcctagcttagctgctttctggaatttcatgttcatcatgagcaagtgtgaagtattactctgacaggagtcttattcacactttcaagttcattcctaaaggcaatttctagatgagtgttgggatgtgggttgtacattttggcactacaaatatcaataaacagaagtaagttttggttcaataaattcat

SEQ ID NO: 275473 - DNA, 847 bp, Cannabis indica
agaagtggacacaacaaatgattgagctcgcgaaattgaaaaagactcatctcaaagaaatgcaacgctttgttgttataggtgggacactttattaccgatcatcggatggggtgttagcaagatgtttagaccaagaggaaatctctactcagatggaagaaattcataatgctgcctgtggagtcgaaggtcccaaattatcaagaagattacaaagggccggttatttttggctagaaatggaggaagatgctgcaagattgcaaaaagattgtccgcaatgtcaactcttatttaataaccatgaggcaattttgataaccgaagattacgattggaggagaccatataaagaatatttacgggacaaaataacaccatgtgataagaaagaaaaagaaaaactactcagacacattagtaagtatttcttgaaaacagatgatgacctctaccgcaaaggattcaatgggaagttattgcgttgcatttgcaaggaagaagccaatgaagtaatggaggaagtccatcgcggggattgtggtgaacatcaaggaggaagaaaattatatgaagaaattgttcgcataggatattattggccgaccatggaagcggacgccatgaaattcgcaaaagaatgtcaaaaatgccaaatttttggagacaaaatccatgcgccagctatccctctccaatccatcaccaccccttggccttttcacacttgggctatggacctcataggtccaatctcgccaccctctcagggaagaatttggattttagccgcaacagagtgtttcacaaaatggtcagaagcaatcccattgaaaaaggcctc

SEQ ID NO: 275474 - DNA, 518 bp, Cannabis indica
aaggtgtaatacattgttcaagtcctggtgcctggtgatccccactaatctacactcaaagttgtgagtgagtatatatatatttcttcatattatatatatgttatataatattgtgtattctattaatcttcttttctaccttttatatatatatataatatatatagtgtatatatatgtattgtaacatatatttaatcaatctcttattctaatgtttgtattattttacaatagagttataatgtatcttgatttttcttccattgtaataaaatctctaacaggctcttggccctggacccatataggattcggagttggggtcaagtactttatggtaaatataatataattttacataagctattaatacaagcaccaaactatatagtattgtattaaataatattaatacaagggtaaataccattttagaccctgtgtatgtgttttgcaaaagttatttattggaccctctgttctgttaaatgacaaaatagatcctgtatttt

SEQ ID NO: 275475 - DNA, 568 bp, Cannabis indica
tctgagtcttgtatcgggtcttgggtcccggtcctagtttcgttgccgaagtccctatcctgattctgggtccagctcccagttctggtctgggtttgggtcccagtctaggtttcggtttgggtcatcgttccggttcgagtttgggtctctgtctgggttttcatttgggtttgggttcaggtttgggtccttgtcggggtcgttgtcctattcttagtccggttccagttccaattgcgatttccagttcgagtttgggttcgatgttaggtcggggttggagtcttggtccgagtttgggttcggatccgaatctcagtctaggtccggatcgagctctgggtgttgggttaggggttgggtctggctccaggttcgagtccgagtcacaggtttttatctcgatttgagttcgggtttaggttcgggtctaagtcctcattctgatcccagtctgtgttcaagtttgggtcttggtgcaggacttggtttgggtcttattctaggtcctggttatggttcgagtcccggatttagatctgggtctgggttctaggacctaggt

SEQ ID NO: 275476 - DNA, 551 bp, Cannabis indica
ataattattaattgacataataattaataaataaaacctagaatctctttctttacaatttaccccttgcttagtgtaaattcataaactagacacagtctaattttagaattataattgattaattaaaatcaattattttgagtcttacaagcagtatggtctcaactagaatggggaccatggcctatatcactgagcttccaataagctgaaccagaattttccaagtatgttccctaactcattaattccttgttacatccactcttagaacttggaattgcactctcagtcatatagagcgctctatatgttccaccatatagatacgctatcacatttaaccatcgttatattctcaataatcaaagattctctatatagatgatttacaccgagtagggataaatttaccgttacacccctcaatgtattttgatccttaaaacacttagatacctgtaaatgatgttttagtgaactaaaatataatcactgaaacaagagctcttccatttacatctatttagccaagctcgaaggaaatc

SEQ ID NO: 275477 - DNA, 477 bp, Cannabis indica
tttaaaaaaaaaataatctaacctaaaaaaataatatctgaccttaaatttaaaaataagataagatataatcaaagttaaaaataagatagataattaaacaaaaaagatagatatttactattttcaaatttaaattacactaatatcatgaatgaaattaaaaaaatatattaaataatttaattatgataattagaattgaaataggaatcgtaaatgtgtaaatacaaaactacacaaaaaatcggaaattaaatctatgaaaaagcatgaaaaatcgaaaaaaaacgaaaaaaatgcgagctgtacggacggtatactgtgcatactcgtccgcgcacgcatgagtgggtgcctgccgagaaaactacggcgctggggggggggggggaagtggcaggatttccacgcgcgtaggggacttcaggacaagtgctggggtgagctgcttgtctgaatgctctctgtccgcgc

SEQ ID NO: 275478 - DNA, 596 bp, Cannabis indica
gattttgtaataaattggggagggacattaattgtgaattgagaatactttgttttattttattttttatttttgggaagatattgaaataaatggaaagtaaatgctaatgaagtattgagattattgccttattagttgtataggaaaatactaatatgaatagtttttataataatttgaatggtataataattaggaggttatctatttaaataataaataaggaagcattatgtcataataccgaattggattaattaatattaatttaatattattaattaaatgtatgatgaagtggtaataggaaaatggtacttttgaatgtgaaaagtgcaatcttaagttttaaggatattaatacaattttggtttaatttaggttgaataaagattatagatactatgttttacgctataaataaaataataaataatttgacttattaaggattttgacatgttttagtctataaataagtaatatttttaagagataaaatgaaataattagtatataatattttgaatatttaaggaataatgggtattaaaaggaaaattttatttatgtttgattttaaaagggtaaa

SEQ ID NO: 275479 - DNA, 544 bp, Cannabis indica
ggttcgggtccaggtccaagttcgggtccctagtgtgggtccaagtttgggtctgggtcaggatctcggtccaaatctaggtccagcatttcgatcacagtctgggtcttggtccgagtccagtttcgtatccggatcccgatctagatccaagtatgtgtttgggatcgggtcccagatttaggtccaggtccgggtctcagttcaagtctgggtacacgaccgtgtctgggcacgagtgccagtgtcagtttgggtctcaggctagttctgtgttcggttctagttttgggtccgggtcatggtcacagtcctagtcttgttctagtgtcctggttcggcgattcttgttcaggttctaattttgtgtcccaggtctaggtctgggttcgagtttggttcttcgtctaggttctggtcctagtcttagttccagatctagacaccgactactggtctgttctaggcccctttacccgaaactcgagtcaagatctggatcactgtcacgggtctcggtctggttctggttcaggtcccaagt

SEQ ID NO: 275480 - DNA, 569 bp, Cannabis indica
cagaccactaatctccacaattcttagaggagccgtagggtcagaacctaaagcaggagcatgtgacctattcttccagaaaccaagtagatcaaaaaacaaaggcagcaacacagaataagccttcatggcattcctagctgcagcattcattttcgcagtcctcaaagaattatacagaaacagaatcccttcattcaagtcaagacgaccaaacacccaatgactttccctccttagattgatgatgaataacacatgatcggcttcataccaaggcttagaacacggaatgcgcaaacctcgaatgtaatgcgctattgggtgggcagcgtgaatgtgcgacatcttagtcttcattgacttggctttgttaaatttgtggtacaaagcttggatggaatcatcaaagagacaatcagttgtcgcaaaattcaacgtcacagcggaagaatatttaccttttttcctaaggtaatagaatatggtgttcatatgctgaaacaaaaaaagaaacacaaatgaaaaggttgaacaaatgttaaaaaactgtaatacagtatcaaaac

SEQ ID NO: 275481 - DNA, 545 bp, Cannabis indica
aagcccattgtttcacatgttgtcgaaggggtaagtttatatttaactatcattcatttaaatttttctagtaaaataacaatactaatatattttctcttgaaaataggctaaccccgacacaggagaactgccaactgcggtggaaacttttcaaaagtttcaccataaaggcaacgattggcgcaacgagttcgcgcaacaagcttacgtaagtttacgttttaattcaatttttatttatttctttcaatttattttgtgttaaaattaaccatttaacttatttgtttaattgttttaggagcaaatggttgaaatagcggcaactcaaccagcgcccactgaagatgagcccgaagagcctgctgtcgatcctacacagtacccccgagacttacctgttatgacgcaagtactcggggaacgatctcggcatcttagaggctttggccatctccccagactgaagggagttggggccaaaagagcacctgccacgcatccttcagcccaaccgactgttacaatggaacagtacgagg

SEQ ID NO: 275482 - DNA, 997 bp, Cannabis indica
agagagaagtcgaagtctggaactttagaaagagtggtgtaaatgtaatcagacactgcctgatcatattgtttcttcccattctctttctcagcctccaaatcgcgagtcatctcctcgatcgtcgcccgcgagttcttgacctcgagctccgcctgctccttagccttgctaagttcttcaagctccttctccttcctagccgcttcttgcttcagcctttttatgttctcctgaaactgggcattttgcctcttcagcgagtcggcttccttcgaaggagtggcagcagcttttatgaacagggtcatcgactgcgcggccaactcagcagagcgcgtaacaagctcctcagaagggatctcggccaggaacttctcctgcatggctaagaagtcgcgagctcgaacaggtggatcgattacgactttcttccccttgtcctgtgcggtcttggccagcttcttggaagagtctgtggcaagggtagccatcgcatcgctcttcctcttttgggcgacaacgggcgaggtcgtcgttgctccacccttcggcttgatcttcaggacaggtgcggacttcaaaaaagtcatatctgcgaagataaatgaaagataagtataagtcaaactctatctattagtttataacaagagataaattacctgagattggtcgagaagtttgcttggagaggcgtttgtctattcgctcttgttgcctctcggatggttctttgtatactggctccctttgaagacttgcgttctcaggaatcagctggtgttctcgcaacttcgcagttgtacacagtaatcgccagtcgcgatcttgtaccggaaggctcccgaggatttcagctgtctctctgcgagtcgcgtcaagtgccggtcgaactggtctatctgcgagagcaagaaagagcgagtaagcaaaagatctcaaaagtaattcagaaaatgtctaagttaaaaaacacgcgacatactaggtctgc

SEQ ID NO: 275483 - DNA, 482 bp, Cannabis indica
gatctaaaattttatgaagaaactattcaccatttcggtgatattctatgtcgaaaattatcatctttctgatattgttgtaaatcgtttttttcatattcccagaaaaagtactttcacttaaaataccataactctctcaattcttgtccatttttaatgatctatatatggtttcaaagcttattcaattttccataagtttcatgaagaaacatttcgtgaattcggagttatactatgtcgaaaagttagtttccttctgtatcatgtaattcgtttcttgaatcttgttcttccaaaactgttttggtaaaattgtaatatctctttgaatataattccaatttcagagattttggtatcattggaaagggaatttaatttcctaaaactttcatgaagatgttatcttctagttctgaacctttcaatgcaaaaagtttgtatttttgctaagtcgtataattcgttactccata

SEQ ID NO: 275484 - DNA, 476 bp, Cannabis indica
tggatggtttcatgttgtgttgttgttatattgatgattgattgatgttgtgagtttttgtgaaaaataatttaaattctgtttctggaattacttttgttggatagtataggaaaaaatttaagacaaatttacttttttttacagaactcaatttccaattaaattgaaataagtaagaatttttgaagtttcaaaaaatatcagggtcgtggaacccactcacgcgcgcggatgagggtgataccctcgcccacacgcgctcagacaacttgctcgactgagctacctcggtcagacacgcacgttttgtctaaaaacatcccatgcgcgcgcggatgaggctgcatgcagcctcctgcgccgagggacatcggtcacgcctggctgcatgtgcgtggggacagtatgcaatgcatactatccgtacaacttgcaattttttcgtttttctttgttttttcatgctatttcat

SEQ ID NO: 275485 - DNA, 560 bp, Cannabis indica
atgacaaccattaagtatgaaaaataaaaggagtgcgagattttattctgaaattggtgaatgttcagtccaagttgaaagatcataatattcctcttcctgactctttcattattcatcgagctcttcatgcacttcctgcctctttcagtcttatcaagacagcctacaacacttataataaaacatggagttttagtgatctaatttctcagtgtgtagctgaaacaagcaagctaacaaaatgaaaagaatgagtcttctcactttgtttctcaactcaagcccaacaaaggataaagaaaatatgaagagaaacaacaacaaccagaggctaagggatttcaagaagataagtgagaaggagtcaaagcttaaagtggcacttatgttagcgatgatgttatctatgttggcatatttattcttgaattacagtttagtgttcagattgtcttgaacagtactttcttgattcttacttttaaagtaattcagtttcgcttccgcttttagttaaacaatgattttcttttcgttttgccaattatagtgttaac

SEQ ID NO: 275486 - DNA, 509 bp, Cannabis indica
gaattactggacacccatccggaattccggttgcacaaccggaattccggttcctcgcaggaaattttcaaaaattcataactcgatcaaatctaacccaaatcatgcaagaccttccagacctgatctatataccccaaataaccattcaaaggcaacaaattcacccagaactcacagaatcacaaaatgccattaaagaccaagctttgagttccaaaactcaaacttgattaaaatccactaacatgcaaccaaacctatttaattctaccactactagaaaattgggttttagtgacacacattgagtaactctaaaagtgtatagtgacacttcaacgcgcgtcactaatgaggctgactggaaagacagtttttagtgacactccacacgtgtcactgaaaccttttgcactcattttctgcgcgtcactataggcgtttagtgtcaggttttgtcagactaaaaaaataacaaccacacatatagagcgtcactatatcct

SEQ ID NO: 275487 - DNA, 390 bp, Cannabis indica
tggatcagttggcagagttgtatgttaaagaaatagtaaggcttcatggagtaccaatatagtttcggatagagatctgaagttcacctccaagttttggcagactttgcaacgagccatgggtacgaaactaaaatttagtgcagcattccatccttagacagatgggcccgaaaggaaaattcagatattggaggatatgttacgaacctgtattatggattttgaaggctcttggagtaagtatctaccgttgataaaattttcgtacaacaacagttatcagagtacgatcaggatggctccctatgaagtgttatacagaagaaagtgtagatctcccatccattgggatgagacaggggagagaaaatatctaggtccagagtc

SEQ ID NO: 275488 - DNA, 612 bp, Cannabis indica
gataatcgtttcctattattttcttcaatcaacaatcgagtcacatccaatacatatcgttaacctcagttaggattaagtcacaacaacgtatgacaagatttcgatcttaatcaaaactgtaagaatcataacattaaccttatacaatatttaatacttttcttacctcagtccagaagtttagcgtgcatcccgtctaagtggaatcgaagcttgacgatcctaggacctatgtcacgacaacaacactcaattaatacattcattcaaatctttggaataatctttaattcccaaaaccggacaatcattaacttccaatagttcttggttaggctttacaacttctaaacattccacactgaatactgaaaatcaccctgagccctagaaccagcttggaggaaaaaccgaaaaactctcccctgtaggcaaccggtcgaccggttctggtacaccagaaccaaccggtcgaccggttctagcagggcagcaaccaaaagttctttcctcctccaaaaattcgaccctagcatcaccaaaacaacctagaagttccagaacagtttattctcacatacacaatatattcaaggtttcaattcatat

SEQ ID NO: 275489 - DNA, 807 bp, Cannabis indica
ctcatagaagatagaagcgacattgctatagcgaacagagagatgtggacattgtacgtcgatggagcctcaaatagcgaaggctctggtagtgggatcttgttaatcagtcccaataattttaaggtacacgctgctttacgttttgaattttctgcatctaacaatgaagccgagtatgaagcattaatcgcaggattgaaactcgctctcgagatgaaagtcgagtaccttcaggcttttagcgactcccaaatcgtggtatgccaggtgaatggagaatatctggcaagaggcgggagattggttaaatatttagccattgtatgcgaactaatgcagaaattcaaaaaagtaactgtgtctcgagtaccgcgtgctcaaaattcacatgcagacgcactggcccgtttggcctcaactagagaagccgaattgctcgatgtaattccggtagatgtattggctcacccaactataaatcaagaagtgatcatggaaatagataccgttcaggagatcacctggatgactcctatcgtcgcatatctggaaaaggggctcttgcctgatgacaaaatagaagcaagaaagctgcgacagcgagccgcccgttatgtaatatatgaccaaaggttgtatcgcagaagttttagtcaacctctactcaaatgcatcagcggggaagattgtggttatatacttcgcgaggtacacggggggatttgtggcaatcataccggaggtaactcccttgcattaaaaatcatgcgacaagggtattactggccaacattgcgacaagat

SEQ ID NO: 275490 - DNA, 914 bp, Cannabis indica
gaatgcagtgcgttgcactgagctcatttaaatttaagagagatcttctcacatataagtttttttaatacaattacctcaagcacaaattaaaaaaaaacaataacaagaatttgaccatgatagctgcagctcctgccaatttcagaaccaattttaacacataaaaatacctatcacaaatttaagatatatatatataaaatatataaaaaataacataacaattaacaattttatacttcaattagaaaagctttttactggattttctatcgtaaaataaatttagtgattttaagtgagggattgagatgagcttgaaaaaatataagaaaattagagaagaaatgaaaacccctaaattttggttggaaacttttttgagcaagaaataagatgataacaaaaagtaaacacatcacatttcacaaataaataactcaccataaagatgaaaataaacaaattaatttcaaaatcaaaaaggaaaaactaaaaattgatagaaaggcaaaaggagatggatgcttatgcactaatttgtgtaaatccatacacaaataagatattaaaaactaataatactttaatatgagataaataaaaaaattggggctaactttcattcagattagacatctcaaaaaaaacttaaattttgttaaatggacatccataaacacgtggagcttctatatataaaaaaaaaaaaaaaaaaaaaaaaaaaaaaaaaagaacttgtggagctttataatcaatagaaaataaaatagagtttgagtttaaatacatgtcatttttagagagaattagtgttgaagtaggtgaagcaggagggggtgaagctgaatatcatgaactcaaatcaaatatgaggttgtcggaggagaaaacaaaatttaatgtgaaaa

SEQ ID NO: 275491 - DNA, 605 bp, Cannabis indica
tttcggccaatacaatacacacctaaaaatcaagaacatgaacacatacacaaatacaaataccagaaaagtaataagagtgagatgagagaatgcaaacagtgattaagaagatgacaccaaaactttgatctcggagttcgcccaaaacaaccggctacttctccgtcaagccctcagcttgattccactaatcatcaaacaaaggttacacttttgatttacaacagtttgtatttctctctgtttttctctcttttgatactaacaaaaactctcttttcttttacatgaacactctaggaggagttcacatggagatgacaactcacagccaaaaggctctctttttactttgttgttatttctgatgttgttctctgttgttgttctctgttgttgtatctctctggctgtgactctttattttgctctgtatattattccttcttgtatctgagaaaagcaccttatatatactgttctgtgatctgatctagggcagagccctagtgatatttgtaactgtttttgtaactgtctttgtaactgtctttatgttctttagtcttgatatttgttgtatctgatgtaagggtatattt

SEQ ID NO: 275492 - DNA, 991 bp, Cannabis indica
atctatttaacttaggaaaagtattaaattctgtgaagacaagttaatttaagcaacaaatcaatttagcatttaattcatttaacttaggttatatttttcatcacagataatgatactcgtcacaataccattaaaaacaaattaatcacttaaacctaaaatcttagactattaggtgaatagaaattttaagaatgatagtagaataatataaaacctaatttagcggtcgtttaaacaagatcaaaatattaatcataaaattaagcatagaagaatataaacaattcaatgtgaaggaataaaataataatatttatcaaagcattcaaaaagttatgtctcaagttttgaaataacccttatcctaaaagaggactactccataatttcaaacataatcacaagcataatataaatgaaaattagaagagataataagcaaaactagatgtagatgtagatttttctcttctcttgagttttccctggtatttgatgtgtgtcgtgtaccacaacgaatttagtaatttttatttctatattgccaattacttcaatataacagtaaatacaggtcgattccacgaggactgatatcaatttattattcaaaaattagtaacaagaattaaaaagagggattgtaatgatgaacattaaataacataaactaaaaaataaacagaatgtgatactacgatattcaagaaatagttaaaggttaatctccacacttgacaatcatccttaattcctaatagtgaatgttattttagatttctaatcaaactattaatttcacagataacgcatccacgaagcatgtaatttatttaacttagataaagctctaagttcaatagagatagataaatctaggcaataataatgaaatatataattcatttaacttaggttctattcttcgtcacattaaaaatacctttgataatattataaattgtaatttatcacaaacatttag

SEQ ID NO: 275493 - DNA, 698 bp, Cannabis indica
ataaaaaaaaaaatgtgtgtttttaatttttcttttgcttgaggactagcaaaattttaagtttggggttgtgataactctagaaattagagttatttttcacattttttttactaaaaattggtttagttcttaagtttttaattaatttagtaagtttttaattatttttgaatttattagctttattgtaattttatatgtttttgtgtgtttttataattattttattataatatgttatgtagtatttatttttaattttattttagttttctaattaattttatgtatttttaggtgtatttggtggaaaaagtagggattaaattgaagaacatgtgaagaatttggggttaaaatgcaattttacaagaaaaatcagatcagccctgtttcaagacccactctcggtcagaaaagttgactcaatccgagccatccaaagtcagatctgagggctgccatttgtgcgtgtggtgcacacccgaccaaggcaagtgtacctgcagcgtggtccccagcagcatcagctccctcttctccttccttccacgcgggtcccagctggcagttctcctccaacagcgtcctgccacctcagcaactcgtcagctcctctcccattcagcgcacgccaagtggctcctgcagaaaacaaaaaaaaaagaagaagaaaaatgctttatttctcatcc

SEQ ID NO: 275494 - DNA, 512 bp, Cannabis indica
ataaaacaaattgcagacataagaaactgtactttaaagtggtcacccgacctgagtacttttttattttattgaaaccttagggcgtagtccactcagaaggccattcacttaaaagcaaatgttcatttagtacttaaagtggtcattcgacatggtactttattggtagtattttcttaaatgttctccatttcaataccgtggtactataatgagttgtattttttcgtcatacttacctaatttgtatgctctggagtcaagaactttgaccacttgatatggtccttcccagtttggtcctactacacctgccgtactgtctttggtatttaggaatacccttctcaggaccatatctcccacgaagaatttccgagctttcacttgtttgttgaaatatcaagctactttttgttgatgggccatcaactttaagtttgcagttgctcatctttcttcgatttcatcgagtgattctacaaggagtatgtgattggtaccttgat

SEQ ID NO: 275495 - DNA, 327 bp, Cannabis indica
ggtgatgcttgccatgcaaaaggccatggaggcagcaggaatccacgtgcatcctaaagccacaccccctggacatagaaatctagggaaccaggccctataaggtatcccgctgaagggaaccaaaagaaaaaccctacttccactcctgggaaaaagaaaaaggtgcaggatccgcgaaaggttcgctcggatttcccgaaagggaaaggtccgcagaggggcaaactccaaaaaaggagtcttggccctcaggatcgagaggaccgaaaaagcatttccgtgcaccaagagcccggagggaaaggaagaaggggacagaaatgt

SEQ ID NO: 275496 - DNA, 577 bp, Cannabis indica
gagatgaagcggcttagggcagctacctttccggtcaggctctgcacatctttatgctttctgggggatggcatgctcaggagagcctggattttttccggatttgcctcaatccccctttgactgacgatgaagcccagaaactttcctgacttgaccccaaaggtgcatttctttgggttgagcttcatgccgtatctccggaccacttcgaagcattcctctaagtcgcttgcatggctgttgcatgctttggacttgacgagcatgtcatctacataaacctccatatttcgtcccaggaggcctttgaacatccggttgaccattctctggtaggttgctccggcgtttttcagtccgaagggcatgactaggtaacagtatacccccttatcggtcctgaagctagtgcactcctggtctgccgtatgcatctttatttgattgtacccagcataggcgtccatgaaggatagtagtttgaatccagaagtggcgtctaccatctggtcgatcctgggcagcgggaagcagtccttcggacaagcttgtttagatcagtgaaatctataca

SEQ ID NO: 275497 - DNA, 484 bp, Cannabis indica
atgaaaactactaaatgacataagatgcatctctgaattcaataataacagtataataattatttaaatagctataaataatcttcataattaaacgtgattaactgctaatttctaaattaaactaagcggtctttacactgtccatcagtctgaggatggaaagttgtactgaatttcagtttagtacccatagcccgttgcaaactctgccagaattttgaagtaaacttcagatctctttccaaaactatggacttttgaacaccatcaagtcttactatttctttgacgtacaaatcgacatactgatccactgaaaaagttgttttaacaggtagaaaatgtgtagactttgtgaatcgatctaccacaacccaaatagaatcaaacaaacccgttattctaggtaacctaaccacaaagtgcatcgtgatatcttcccacttcgactcaggtagggttaaaggctgcaacaaccctg

SEQ ID NO: 275498 - DNA, 618 bp, Cannabis indica
tccgacatacacccaactgcgccctcagctcgcagtgccttctccaccatctcagcataggtggtcttgtcgtcagtggtgatcatcaagtcatgtttaatcttcgcatttaacccgtccaggtacttctctttcttgctgaagtcggttggcactattcccgaggctaacctcgccaaccggtcgaactgagtagtatactctgtcacgctcatattctcccgctgggtcaggtgggtgaactctttcctcttggcgcttctgaccgcctcgttataatacttggcgttgaagagttcctggaacctttcccaggtcatggtagtgacgtcatggatctgagacaccatgtcccaccagacaagagcgtcttcctggaactggaaggtggcacacaccactctgtcattcccggtgacacccataaaattcagaattttggtgatcaccgttagccactgttcggccttcatcacatctggacctcccagaaagaccggaggtgcttgcttccgaaacctttcatacaaaggttccattctgttagccgccacaactatttcggcctgagcagcaggggcgggtgccactggaactactggcacaggcactgcagga

SEQ ID NO: 275499 - DNA, 737 bp, Cannabis indica
cacaaatacacaaaaaacaacaaaaaatacaaaaaattacaatttttacgaaatttttaaataatttttacgaattttttttgatttttattttacagaaaattacactctttttatgttatactcttgttaatttgttgttgatttttttatatctatatgttattttttgttgttgtttttgatattattttaaatgttatttttatgttacttttatgtagtaatcttgttgtttttgtgttatttcaaaagaaaacccgtaaaaaatgtaaaaaaaaaatcttttaaaacataaaaaattgaaattttttttttacaaaaaaattggtgccttatgtaattacgtagctaagtctctaatatctcatcacaattgtatacttttgataatcaaataaataaaaattgtttatgattttgagacctagacctagagaggaagacttagttaatagaattacactatcgaattgcgataatttatatgaatctattagatacagatttctaattattatctattattattgtgttctatatatataaatttttatatattgagttatttagtttttctaatatgtgcgtgattcgtggccttagtgatctctctggcgtcgccgaccgtcatcctcgtgaaaggagagattgagatagagggagagagttgttgttttttttagctttattgttatgagggggtaaaatagggaaatgaggtgaaataaagtatt

SEQ ID NO: 275500 - DNA, 662 bp, Cannabis indica
tacgggttccaggcccaccctgctaacgaaggggtggtcccgtataacaggcaaattcacgttaaggagtatcgccatcgtttcttcttctcctccgggttccgggcagtggatcatccggagctacttactgagtgggtcaggattcctccctatgaacggactgcacctactcaggtctttcttcggaaagctcaggcctttgcctcttacgaccgggctgatcttgacgtcgggggcctggtcactacggagaactgcaggaaagcaaaactcatccttccgcatcaatccgtggaggactctaacctttcccgggttatctgtcccaacgtgagggcgccggtcgcggagaagaccttccgggacgagatcattgccactgcagagaagaagtaccaggagtatctctaccggaaggctcaggagaaggcgtactctaaggcccaggcggcttccgggaagtcactttgcgtggggagcccggtggagagaaggagtcatgcgattgccgggaagccccttcacattggggactcagcggagagaagggctcccaagccacagccttcggctcaggagccgaactccggggctcctcgtgccagcacttccggcgccggcggtaagtctccttttgtagttcattatgttccttctgt

SEQ ID NO: 275501 - DNA, 537 bp, Cannabis indica
aaaaatttgaaatgagatttgagattttaatttttgagaaatttttttttaactatttgcggtaatattagtgtatatctgcctcctatcaatcattagtactttatataatcatgacatatcaagtttgacttaccttacaaatatagtttgactaaaattatttttgattttgatattaaaaaataatttatataaattatatttcaagatcaagtgcctttaaaaattatacgaaatgcatcgatatgtaatatcataaaaatcattagatttcacttcacttatatattgattaaaaggaaaaaaaaaataatataagcacactaaatatgactaacataaaatatttacatttaaaattttcttatatagaatatctataatattttaagtattttaaatttaaattaaattttcttacataaaatatctgtataatttttatctacataatttttatttttaaatattcataataatattataaaattaataaagaatattaatattctgttaaaattaacgtaagaaact

SEQ ID NO: 275502 - DNA, 507 bp, Cannabis indica
tatttttaaacatggtgaaaaaatgaattatctttcatattattcaataaagtaaaacaagttttatattggtttactattcaacaactttgtcaagaattcttgtaagttgtaaccacaaaattgccaagtcaaaccaacactttcattgcaatattcacagactaactacaaaattatttcatagcatttacagaaccgcacaccctcattcatctttaatatggacgtatcagaagccagatcattaacctaaattggttagttctattatattttggaacaaatcgtctataatataaaaaacccatcatacttgtatcttgaaacattcttcacgaaccaagattttaaaacacaattattacctccttaaggtcaacccactcccaagtctcatttgctgtatttatatcatagaccaaagcatgttatattattttatataatataatatttagattaaataattaagttgtaaataattaagtgtgacaaagtattaat

SEQ ID NO: 275503 - DNA, 594 bp, Cannabis indica
aattttttaaagaaagaaaaaaaaaattaaaagaaataaaaaaaaataatgaaatgaaaaccctatttaaggtaatagcttccaaggcaagaaacaaaacttcattcttcttctccccttcgtgcaaaccaaccagccagcaagagaggctctcctcaccattttcttttgtctttggagcatattattcaacctaagctcaacctagaagtgattgaggtaagtttacaccttatgggttgtgatttttaatggattttggttggtttaaggttagagttttgtgtttctgtggctgtagggattaggttgagtttgagttatgtttaggttatgtttttgtgtatgttgagaatggttttgagaggtttctttggctgcttggattgaagtgtgttggttgaagctaaaagttgaatttcttcacttgaacatgtgattttgagttagagattgaatttttgtgttttgaagcttgggttatgttatatttatgttattatactgttttggaaggtttgagcaggtttggtggaggtttgattagtttttggggtgaaaaaccagaaatcaccatggctgccaggaaaaaaa

SEQ ID NO: 275504 - DNA, 502 bp, Cannabis indica
gaaggaggaggccaaagaccgagaaatcatccataaagatctcaatacaggattcaattaagtctgaaaagatagccatcatacacctttgaaaagtagcaggggtgatgcataatccgaatggcattcttctaaaagcaaaggtaccgtagggacatgtgaaagtagtctttcctgatcttcaggtgctatggttatttggtggtatccagagtagccatcaagaaaacagtaatattcttgccccgccaatctatctagcatttgatcaatgaagggcaagggaaaatggtcttttcgggttgctttgttgagttttctatgatcgatacgaatcctccaaccagtgactgttcttgtgggaatcaactcattcttttcattcttgatcacggtcattacacctttctttggaactacttgcacaagactaacccacttactatctgagatgggataggccactccagcatccaacaacttgactacttcttttctgaca

SEQ ID NO: 275505 - DNA, 686 bp, Cannabis indica
aaaacaaccttttcagtggatatgtacgcagatttgtacgtcaaagaaatagtaaggctgtatggtgtaccaaagttcatagtttcgaatagagatccgaactttacctctaagttttcgcagagtttgcaacatgctatgggtactaaactgaaattcagtacaactttccatccttagactgatggatagtccgaaaggacaattcagatactgaaagatatgttgcgagcttgtgttatggatttcgagggcgccctgagtaagtacctaccgttgatagagttctcgtacaataacagttatcaaagtacgatacggatggctccctatgaatttttatatgtccgaaagtgtagatctcccatcaactgggatgagacagggcaaaagaaatacctaggtccagaatcagtacagcagattaatgaggcaattgagaagattaaagctagaattcttgcctctcagagtaggcaaaagagtaatgcagatccgaaacacaaaaatgttgagttccaagtaggggatcacgtgtttttacgagtatctccaatgaaggggatcaagcgttctgggaaaagaggcaagttatgccatagatttacaagaccttttgagattctcgagaaggttggagaagtggcatatcgattagctttgcctccagctctttcagtagttca

SEQ ID NO: 275506 - DNA, 849 bp, Cannabis indica
ggaggcattcaaaaagttgaaagagcacatggccaagcctccgatcctgtcaaaacccgttctcggagaggacctattcctatatctggccgtctccgaacacgcggtcagcgctgccctagtccgggaagaagagaaaactcagcatcccgtgtactacgtcagcaagcgcatgataggagcggagacgcggtaccccattattgaaaaactagttttttgcctcctaatggcctcaaggaagttaaggccgtatttccaagcacacccgattaaggtactgaccaatcacccgctccggcaagtcctgcaaaagccagaagcatccggaaggctcctcaaatgggcaatggagttaagtcaattcgacttacactacatcccccgcatctccataaaaggccaagccttggcggacttcatcaccgaatgcaatgaagccgaggcaaccgcgagtgcgtcggtaccattggtccccacatggagagtgtttgtggacggagcctccaatgaaaatggatccggagcgggggttgcgatgatatccccgaccagactttgacaccaggcagccttacggttcgacttctcagcttcaaacaacgaggccgaatatgaagccttgatagcagggctgagattagcaaaggccgtaggggccaaaagagtagaggtctacagcgactcccagttggtcgtaaatcagatatcgggagagtaccaaacacgcggcgagcgagtggccgcatatgtaacaatagtccgggagctgctccacgagttcacggactacaaagtagaagaatcccccgagaaaagacgctcacgcggactgtctggctagttagc

SEQ ID NO: 275507 - DNA, 307 bp, Cannabis indica
tttgaagtttcagaaaaaatcaggatcatgcaacagggccacgcgcgcggacagcacgcattcagacaagctgctcgacgagcgcctgtctgaaccgctcatccgcgagcggaaatgctgcaaaccctcccctgcgccgaggtttctcggctgtaacaccctaagtagcatagacgtattacgtgatttttaaacactttatacaaaaatactcgggatcccgattacaaaacactttacaaaagtttactgtctaatataaaatacttgtcgcctagcgactaattacaaaaagcactgctgtccc

SEQ ID NO: 275508 - DNA, 580 bp, Cannabis indica
aaggggtacgaggagatgtatgctgcagaatcttccttgctaccctatcggaagccgctcagcaatggtatttcaagttggctcctggaaagtttagttcatggaaaaacttctcttcggaattccatgcacaattatcctcctcacgccaacttccattgcatttgggagacttggtcgaagctaagcaacaactaggtgggccactctaggcatacatcagcagattcatgatggaggcaaccaaagtttcacgagtaactgaagatggaaagttatccgcgatactggggggcatcaaagtcctcggtgaactttggaaggatataaggaagaacaggccggtagactcaatgagtgattttcttaatcgagtcgaaggcttcatcaagctcgaagaagccattcaactagcggaagacgagcaaaagcctggcaagtgaaggctccttccactggaacatccgcccaacttccccactacccaagtaattcaagctcaagtggtaaatgttccaacaacaaccacaagtaagggaatgggaagaaaggaaagttcactggcaaatccgaaaaagct

SEQ ID NO: 275509 - DNA, 522 bp, Cannabis indica
aatggtgagaaccaagaatctagggcactctaaaaaattggaagaaaccgttgcaactccttccaatgctccccctgctgcttcagttcatcctcctgctgttgcaaagcctggagattcatcgcttccccagcgtgaatctcaaaccgagaagccaaaacgtccacccaagcaagttgctcgcaaatcggtaagacctcttcgcacctggtcttcttcatctgaatcttcgaaggaatctcctcctccgttggcagttccccctcctgctgcatcaatgcctggctccactccaacaggcccttctactcgaactcgagcccagcaagcctctgctgagaaggaacttcgagcctctcaatctcgtgataagacagtccctccagccaagaagaaactaaagactaatccaccctcagcctcatcaagttccagttcagaagaagaggatccaatggaagtttcttcagacaaatcagtgtctcttcactctgagaaggacagtgaggacacagaactcga

SEQ ID NO: 275510 - DNA, 591 bp, Cannabis indica
tacctaattggttttgagccaaaacatgaaattcctgaaacttctcaaacgcttcagatttcttttgcattgggtaaagaaaactatatctagagtaatctttgatgaaagtgaaaaagtactcataacctcctctagcttttacatttagaggtccacaaacatctgaatgtactaaccctagaggttctttggcacgctctccctttgtagagaaagaacgcttagtcattttaccttctaggcaagattcacaaactcgtaattcacccaaaggtgacatttttcaatggaccacctttggttaacctttgaggtctatgatagcctatatgaccaagtcgtaaatgccatagatatgtttcatcattattattattatcaatcttttgctttttataggttccaggtttagcaatattaaagtttgttcgtgagcgcaattagtatatccaatcttaaaacataaagcccttgttccatgtgagcaacacataattgaatgccattacgagaaatagtgcaaatagaactcgaaaaattcaattgaaaatattgtgtttgtaaacatgaaacactaatcaagtttct

SEQ ID NO: 275511 - DNA, 839 bp, Cannabis indica
accaacactcggagtcacccgaggctccaaaagaaatttcactgcaccctcggctctcaaagccttttcaaccatttctgcatatgtagttgcctcgatggtagtaatcaccaaatcgtgcctaatcttcacactcaaaccagccaaatatttctcctttttgctaaagtcagttggcacgattcccgctgcgagcttggccaaacggtaaaacttcgtcgtatactcagtaaccgacattccctcggtttgaactaattcagtgaactctttccgctttgcactgcggactgctttgttgtaatatttagagttaaacaactctttgaactcttcccaggtcatcactgtgacgtcccgagtgagggttatcaactcccaccacacgagagcgtcttcctgaaactggaaagtggcgcatgtcacccggtcattaccaaccactcccatgaaattaaggatacgctcgatcactgtgagccactgctcagccttcattacatccggacctcccagaaacactggaggtgcctgcttccggaacctttcgtacaacggctccatacggttgccaacaacaggttgttctgctggcaccgctggaactgccacggcctgaacaacttgaggaggcacgacaggaggaccctgctgcctcaatctttgaatctcttcatcttgttggcggatccgatcttgcatctccgcaaatctttgctcccaatccggaggagcttgtggtggatttacagggcgaccaccctgagctctgccacggccacggccgcgaccacgagaattttggggattcctctgaccgcctccggtctcaaccatat

SEQ ID NO: 275512 - DNA, 589 bp, Cannabis indica
caagtactttttcactcaaaaggatctgaacatgagacaaagaaggtggttggagttagtgaaagactatgactgcgaaattttgtatcatcctggaaaggaaaatgttgtggcagatgccttaagccgaaagggacctgatcagatacttaatatgaccatgatttctcctcagttagcctcagaaatgtctagggcaaacattgagttggtgactgagagattgtataatctgacacttcggtcagacttgttggaaagaatcaaagtgactcaattagaagatcctgaattggttaagattcgagaagatgtcttagcgggcaaagctaaggacttttcgatttccgacagtggaatgttgttgttcaaagcacgagtatgtgtccctaataacatcgagcttaagagagaaattttagatgaagctcatactaccccttactcattacatccaggaaccaccaaaatgtatcaagatttgaagccatatttctggtggtatgggatgaagagggatgtggtagattatgtcactaaatgcttaacttgtcaacaaattaaagcagaacatcagcgacctgcagga

SEQ ID NO: 275513 - DNA, 618 bp, Cannabis indica
gataggaaatccattcctaaaataatatcaaactctactaaactcatctctatcaaatcagcacttaactctctaccatctatcctgatcggcatagacctaatccacctgttggagataaccaactctccgccaggtaaaagggttccaaaccctgattcataactatcatacggcctacccaatttactaaagattctggcagccacacaaaaagaaccttgacccaagcactcacccggaggatgcctcttactaatgagacactccagtaagaataacgggtctccacactaccttgacgaccaccttgattctggttcccccggaacctcttgttctgccctgagccaccagatgcagtggatgatttcctcctctagtccatggccgaaccactacctcccctgctgaaacctgacgcaggaggggtaggagccccgccacatactggagtcctaactgattccacatacatctaactgcgtcctcagcttgcactgccttctccactatcacagcataggtggtcttgtcgtcggtagtaaccataaggtcatacttgatcttcacattaactccatcaagatatttttctttcttactgaaatcggtcgg

SEQ ID NO: 275514 - DNA, 865 bp, Cannabis indica
ttcccttgcttgtggttgttgcctgaacgcttgccacttgaattgctggaatattggggaagctgggcggacgttccagtagaaggagccttcgttttgttcggcttttgctcaccttctgctcgctgaatggcttcttcgagcttgatgaaaccttcggcccggtcaaggaaatcactcattgagtcgaccggtccgtttttccttatgtccttccatagttcgccaaggacttcaatgccccccagtatcgcggataactttccatcctcggttacccgtgataccttggtcgcttccgtcatgaatctgctgatgtatgcccggagtggctcgcctggtcgctgttttacttcgaccaaatctcccagatgcaatgggagttggcgtgaggaagagaattgtgcatggaattccgaagagaaggttttccatgaactaaactttcctggagccaacttgaaataccattgctgtgcggcctctgacagagttgcggggaagattctgcaacatacgtctcctcgcaccccttgtaaatccatttgcatctcgaaatacttgagatgagagagaggatcttctctcccagtgtacatcttccacgttggcatcttgaacttgtgaggtagtggcaggaggttgatttctggcgagaagggagttccgcgtgcacggtctaactcaagatcattgttacgctgcccggccatgccatgaaacatattcttcagttcgtcaagctgggcctgtacggctgggctgacttcattggcattctggtcgggttgggctacgtcagcgtctttctgagcggggatttgagtatgggctccggactgcacattcgttgtagtattctgct

SEQ ID NO: 275515 - DNA, 647 bp, Cannabis indica
cagtattttttaaaaaattccattccacaataaaaaataaaaaaaattgaaatttaaaatcccaattctatttcatctccctttttcttaaatttcaacatgttttggtgaaaggtcttatgttaggcccagtggggccaacgtgatgctaggattgggcttccgccggcaacctttttgcccttaaactgaaacacatggtgccggcagcatggtacttttgggcccaggaaaggcctttcataatgggccccaccataagtcttttttgtctattctctaaccgaataacaaacatttaaaattagtctttgcctcggatccgaaccaaatgtttgaatattagaactttggagggaaacaacttacttatttgacaagggaaatttgattttttatgcttacatattcttgaaatttttcccttaaactcataatatttgatatttgtgggatatgaaacattttataatattcctaaaatacccccatttacattaccccctctcttttcttctctctttcactacactgtagaccatcgggccccatcgggcccactatcgggcccaccatcgggctcatcgtgcccatcggacccatcgggccatattaaattctatttttttacacatgcaatcgggctc

SEQ ID NO: 275516 - DNA, 607 bp, Cannabis indica
atcgcagttccatcgagtgttgcgagtcgatacgttgcatcaccaattttatctgcgatgaggtatggtccctcccaattatctccgaagaccccgtgcgacgggtttttggtgtttggcattactcttctaaggaccaagtctcctgctcgcaggggttttactttcactttggagttaaagtatcttgcagtccgctgttggtaagccgcattttttagatgcgctttatcacgcttttcctccaaaagatcaaggcagaacagctgattctcgttgttctgcgagacgttgaaaatatccctgcgtagggaacctgccccaacttcaactggcaacatggcctcgcacccgtaagaaagtgagaagggtgtttcgccagttgtagatcgaggggtcgtattataggaccataggacttgcgataactcatctggccaagcccctttgcgatcttctagtttcccttttatggtatgcttgattattttattaacggcttcagtttgtccgttactctgcgggtaagcaactgcggaaaaggctttcttaatccccaaatcgtcgcatagctgtcgcatctctttacagtcaaactgttttccat

SEQ ID NO: 275517 - DNA, 537 bp, Cannabis indica
ctttaaagtattagtacacatggaagacataatgaatgaagtcaattgatttattacggccgtataaaaatgtcacatcaccatcttcaaataataagtacatggtttaaatggtgaaattaaaaatgtgatatgacatccactcatttcagaagtcaataatttattaaaatttgacatcataatcgttgttggtactaccatcataatttattaaatctgacctaattgatttgtccaaattttaataagaaaaatgtcatattagtatattagagcccaacaaatattaaatctccttaagtaatataggtaggtttcgtgttttcatatagtatcttaattaactcaaatcaaggaatcccatgagatctgcatgtcataatgtactgagtttgatttgacgttacactgtgaaatcgctgacgtacgttatttaaagtataggaaatactctatttaacgtcactgagtacactgtgggacgtacatagaaaattaaatattgatacgacaacaattgatttttttagtgag

SEQ ID NO: 275518 - DNA, 437 bp, Cannabis indica
cgagtacggataaatttaccgtttcaccccttaatgtatttcatccttaaaacacttagcttcctgtaaatgatatttcagtgaactaaaatataatcactaaaacaagagctcttccatttatctctattaagccaagctcaaaggaaatcatcgtttcagtcctatgtcctgatagaagttatagattccatatctatgtttagcgctcccactcaatcacactatcatgttcccaaaatgtacgtattaccctgaccaaaaagtaggcttaactaataaatcaaagaacatgaatagcattccttagattgaacctaaacatgtcaggattatgatcttttgatctaagatcaaccagtggtattaactcagaaagataccacggtaagtattataatatctttaccaagatcaatatcagtcccttccaatgt

SEQ ID NO: 275519 - DNA, 532 bp, Cannabis indica
tgggacccgatcccaaacacagacgtggacctagatagagattcagatactaacctagactcagaccaagacccagactaggatcgaaatccttgacctagatctgcactgagatcctcaccgagacccaaacttggacccgcactagggacccaaacttggacctgcacccgaacgtagacccagatcggggtccaaacctggacaaaaacccaaacgcaaactcagacccgaactcaaacacccacacctagaatcagacacaaagctagacccggacctggacccaaactcgaacccagaccacgatcagaaccaagtacttagaccaagaactgaatccacactgagatcgggatcagaactaggtactcggacccgacctacacaaagtcccaggacgcgaacccacaaccggagcctgatcttgacctagactaaaatcccgacccgaacccaaactcagaccatgactcaaactcctacccgaacgcaaacccaaactcgaactcagaatcgcaaatggaactag

SEQ ID NO: 275520 - DNA, 611 bp, Cannabis indica
tagaaggggtttggcggcggtggctggtcataagggttgaagcggggtggcatggcaaaataattaggatcgtccacaccgatattcatcctcgtgacaagtgtgttcaattgtgccacctgctgctcatcaaagatactccgctgggccatgtaattctgcatatgcatgttctgctgaatcagataattcagctgattgtgagtgtactgcatggcggggtcaagaggcccggcaaggcgtggtggttcaatgtcctcatgttcctcttcttctcttgccggaggacctctctgaactggcggttgaccatgaggatgaggaggtttgaagcgaagaacagtggacaagttaatactgcgctgtggcggcgccttggtatcatatgagtactgcggtaccccatgtttctcacaaagatcagtgataattccagccagcccaagtcctccaccagaagatccctcaaccattatgtcaaaggtcactcgaataatatcccccacattcaaattataacctttcataatgccataaacccatttaatcctgtctatttgagcatcagaaaaatgtttgttcgggagcaaccttgcactaacaaagtaaag

SEQ ID NO: 275521 - DNA, 518 bp, Cannabis indica
acccagactggaactgagacctggacctgaacctaaatctgggacacgatcccaaacacagacttggacctagatagggatttagatatgaacctggacttggacctagacctagactgggatcgcaatgcttgacctagatctggaccgagatcatgaccaagaaccgaactttgaccttgacccgaacctagacccagatcggggtccagacctggaattaaacacggacacagactccgacccgaactcaaacccatccctagaatcagacccaaagctagacccaaacctggacaaaaactctatcctagaccaagatcataaccaaggacttagacccagaactgaatccaaactcagatcgagatcggaacttgggcctccgacccaacctagaccaagacccaagacgcgaacccacacccggagcctgatctggacctagactaaaatccagacccgaaacccaaactcagaccaggactcgaactccgacccaaactcgaactaagaat

SEQ ID NO: 275522 - DNA, 48 bp, Cannabis indica
tctatataaccgagcttccaataagcagatcaagaatttattactaaa

SEQ ID NO: 275523 - DNA, 224 bp, Cannabis indica
gtatcacttatcagtgttgtgattgttatggtttaggagcctgtaaatcgtcgtgcagttcgttccactttggttgaccgacacacctgaattcggaatcgaggtaagatttgtataacagtatgcatatgtattacatgtttagcatgcatgttaggaagactgttagattacattagatatgtatgttggcttcgtaccatccgaccatatcacatcggtta

SEQ ID NO: 275524 - DNA, 611 bp, Cannabis indica
agaccctttagcttccctttttataaaatgggttaaaaaaaggaggctaaaaaccccattttgtagtagtgtagatttaagtgacaataatttaccctaaattgttcatatataaaatttataatggaaacgtattcagttacaaattgagaaaagatacaacaatatacatcactaaatttagtatgcaatttataacaaagaaaatttaacaccaaagatggactctcaataagctacagttgcaccggttgtagtgacatgaggcatcactattgtcctcccaacccctccaaaagtcgaggcaccagcaccatagatgacataattaactcttggcttcataaaattattataaatatactatatatgtgaatgtaatgatctgaatcaattacaataattttcggttttacataaaagttattaggtcttttagcttgtaaaataaaagaacagtattacataggcacatcaattcttgatgacaatacattgtgttttaaagggtaaaaaatacataattatagggtcgaataatgaattgtcaactattctttctttttttaacattttggaaactccaagctaatagccacctaattgtcttc

SEQ ID NO: 275525 - DNA, 604 bp, Cannabis indica
tcacaagtgtttaataccatttcctatcattggtttcaaactgtatggaatatgagtttaatattctgtgaccaggatccacttgcattattctatgaactcattgaagtaacctaagtcatcaaaaagacactaccacatttttttaatctatggcatttgtatcttgttcatagtggatttgacaagatcaatctctgcaaagagttaatatgcctatatccactgaaagtagttcatctcattagtagatggatgtacattcaggggtggatatgagtttttttttcgttgttgttgaccctgatttcgcccaatatacgtggaccaaccggatagggacacgtggactaaaagagtttaacattcgagttaattgctaagtcttcatcaagaagggtagcatccgggagctgcctcccggagaaggcatacgaagccccctatgctcccggaggcctaagtaacatcaaagcatctccgcgaggtgccaggcttcccctgagcagtcacctcgcatttaatgccgcatgggagaaaacgtgttgggactgccacacgcaataaagtctgacgacacgacccccaatctgcacctacgaag

SEQ ID NO: 275526 - DNA, 649 bp, Cannabis indica
caagacgaccaagatcgtcgcacccaagaggctgctgacttaatacgtagctacttcaaccaaaacactcaagggatgggtactgatgccaacaatcaacaggtacctcaaacctaccctcgggaggtccctaccccaaggaaccatagggagagggtggtctatggacctgaagagcgcccaaggaaccaagaaaggactagaagtcacccctccaacagggttccccgcaataataatcgaccacccccggttgatgagcaagtcttacccggccatcatatgggacgcgatgactcccacaatgtccgtctaaggcggagtggtggaggaaactctagaaacaataatggtgatcgtagcagaaatagtggaaggactccccagcgtagggaatggcaaccccgtgatcaacgtggccaaccacgagatggcaatgatcgcccaagaaatagtaggtccagagggagaagagaagaccctgaggtcaacagtgactaccatccaaactaccctgatggtcatggagatgatgaagctgaaagtcgggctaacaaccaaccaaatcatgagatggggggttatcaagccagagggccgtatgcccctaataggcaacatcaacctgaaaatccaccccaaaggggta

SEQ ID NO: 275527 - DNA, 634 bp, Cannabis indica
aattcttagataatatctctcaagtaaaacctttcgaccccttgcccagtgaacatgcatcactatttataagactatgagcttggagaggaagtatttcccttctcgttacaatggatataagcagaaagattgcataattaatacagaatacactgatcgtgggatttagatagcttgtcatatctctgcaatctgatccctaagttatagggatttctttgatgacccacgatgcgaaagttaaattcgctaagtgttggtcgctctgtgcggattgctgattgctttaccttgaacatgcatatgaggtatcctgttcggactatatcttgcgggcaaatactcggagttgattccacgtgtcaccatcatgtgatgccatgtcatagtgcaaaaattaggatagcattttccccccaagtctgtacaggacttccaaagttgcgtatagacttcatccgagctacttttgcatttggatgggtgacacgtgtcaagcgtgtctgttcgagactcgatgtgaggctgactgggcgtcccttttgttttcggctaataaatgctctgacaataaatatttcgaaatctaattttctctcaccatgattgacggctacacttgattactttt

SEQ ID NO: 275528 - DNA, 790 bp, Cannabis indica
gtgaaggcataaagtactgctcttaatcgcttggacacacaccaagctatcttatttccaacatgactctatctcacgaatgagttgcaatccaactcaatgcctctttaatgcctattatctctgctaattttgggttcaacacatccaatcttccccttgttcaatgcttctaccatagcaccatgatgattccaagctacacaacccatgaccaaaagacacaagacttagaaccaagaaaaaactaaaaggaaaagactaaaaaaccatgtcaaaagacaaaactaaagaaccatctacaaaagacaagactaataggaaaaacttataaattagtttcaacacataaacacgatcacaacattaaaattaattaaggaatgaactccttataattctaaccccagaaaaacattaattggaattacactaataatagtaaattaataaatagaaaaaaaatttaaaacggaggacgtcgttgagccaaccgaaccactcttagacgactgctcttgaacacctcacggaagagacgttgatgtgggaatgagaaaaacttttgcatcaatcaagaagatcaatctaatagtcttctccttcggtaatatcttgtgctcaagtttattgtgtataccattgcctcaggcttgccgaaaaactctctgcatgaattcttgaatgggatagatggtggacagccgataaaacaagagagagggaggaggcgattcaaatctgttagggctcttcagttgaaagccttttctgttccgttagattatta

SEQ ID NO: 275529 - DNA, 569 bp, Cannabis indica
ctgagatcctggacttggtagatggagtttaaggatgcacaagcagcaaccgcttaggtgcacaccgggtaagctgggacgcaaactcgccagtcatctccgcagcaaagggagctaaggtgggcccaaggaagcgaccgagccagtccgacagggggtccaaatttaggtcccacagattctggtattccgggttgttgatggtgttttgcatctcaacccgcaagaccctcctaagggcttccacctcggcatacccccgggagtattcgtccatgcagagttgtgtttagctatccggagctcctgtctcgcctcatctccaggaaccggagtcagcacaatattgagaggggcagtattttcttccatgggagagaccccaccatcgagaccgtgggccggagtatcagctctccgaggccgcttgggctcctcctgggcaatcattttgcctttacgtttgcaaatcagagcaatttcttgctcttcttcaccttcttcagcttcctcaggaagagcccggagccctcctgcactcctccctttacttcttccccgatggcccc

SEQ ID NO: 275530 - DNA, 844 bp, Cannabis indica
gcttaagatataaccagcgagagatagcgagcatgaccggagtctaatcgcatccgagacaagagagtagatcgcgtatatcgaatatatgcgagcatactcccctcttgtccttgtataaaccaggagaatgattctctgtaaatacgagttgatcttaagaaccctgcagcctttataatgcaatatagactctcatgtctaggttctatcagctcgacatgcgatgtctacaagaagcgactacctaaaggatgcagacatcccaaacgtaatgataaccctgcgagcttaacatcggaacatgaacagacaactcgcagatacgaaagacgcatacgttggtgaacttagtaactgtcattcatttattaatgttaacgttgcttgatttaattcaatgtgtaaataacggattaacaatgaatgcaatccttgtataactgattggacacctgctttgtatataaaggggtgatccaccgtgaaatggcacctacgaatctttggctacagtggactaagcagaccataatctgactgaaccactataattctctgtcttattgttattttccagcttttgttaattatttctcattcccagttgagtactcgccattctaggttgaatactcgcatttgtctttccacgtaaattgcttcttgtcactaataatattatataatttggtgttgcaaaattcactcgacaacaaactctttctttacaatttcgtccttacttagtgaaaatttcacaaatagacatagtctaatatgtgaattataattgattaatcaaaacaaattacatgagtcttacaaacaatattatctcaac

SEQ ID NO: 275531 - DNA, 652 bp, Cannabis indica
tttctcccttggattttgtctgagagcgtagcttttgaactgtgcgagcagatcgtgtattttgctcaaatatgctatcatcttttccccccgagcctcgtattctctagatacgtgatttaccaccagctgtgaatcattgcagattttaatatgttcggccttcatctcccgggctagttttagaccagcgatcaaagcttcatattcggcctcgttattggatgctttaaatcccaacttgactgcagtgtgtaggtgtttccccaaggtgtaataagggcgatctctgcaccatatagttgatctgtagctgacctgtcccatgtagtttccaagtcggcttgtcttcactgttacttggctaaggtatttaacctggctcagggttgctttctgatatgctttcttccttgcctgtgcattctactacaaagtctgctaaggcctggcccttaattgttgttcgaggttggaagataatctcatattggccgaactccactgcccatttgagcaaccatccagaagcatccaatttttgcaataattggcgtaatggttggtcagtgtatacccgaataggatgagcttgaaaatagggccttagctttcttgttactagaatcaggcagtaagtgagcttctctat

SEQ ID NO: 275532 - DNA, 599 bp, Cannabis indica
attttactatatatacatatactattttttttataaacatgcgaacaggcaacttcaaaatacagactcaaaatagtaaaagaccgaaaccctccaggttgcactgccgcgatatgtacaatcactgccgagctccatctcactgttcctccagctttgcttttcctttacctacacaaggtagcaaactgatgagtcaacagactcagtaagatatgcaagatatatatgtaaataatgcgatgccggctttgtgtttaagccgccctgagctcaataattaagctcaccaaatggataagaacgttcttaagggaagtacgaccactgtaccaaatgcactaaagtaccaccctgtactcgtgttggtagagccataattgtactcccgggaattactaagtgttgtaccacatgcacgacgtaccccctggtactcgtgttggtaacactgtaaccatactaatatgccacactatactaacactctttaaatcacattcatattagcgctagtagtgcaaacatccaaaacaagcatacattcatatatacattcttatgctatcttacctcgttccgtgctcaagtgtgccggt

SEQ ID NO: 275533 - DNA, 512 bp, Cannabis indica
cttacttatacttgtatcctttcccagcttgctgctgaggccggccgcctttccaagaacataatcaacaatggcttcgtcatgtccgattttggggatatggatgaagttaggaagatccttcaggatcttactgctgagaggcggctttatcaggacgctgctgagcgccgggagaccattgccaaggccaatgaggaagaggccaagcggagggaagcgcaggcggaggcaatgatccgggaggaggcccttcggagagacaggctagaggccaggcaccaagaggagctgaggacggagggcgaagccactgctaaggccaggcgagagcttcgggaggccagggaagccttggaggaaatggctgccaaggtgaggtccttagaggaaactcaccaggcaaacttggaatccagggccaccctggccgcggagctgaaggagctcagagacttcaaagaccaagcctcaaagaaggcaaaaagagatgagcttctttctcctgtctc

SEQ ID NO: 275534 - DNA, 473 bp, Cannabis indica
aaatctggcttttactcttagttttcttgacttgttcttgtcatgtggaagggttccatcctctaggtaccgcattattggcgtcatccagttgtcttgttcagtcagactttttacatcttcattggctttccatgtcgctggccattgcattatcaccacaggaatgtgactccatctttgatttgaatggatgagccgagattagcaagagcgtcggcgtggttgttctctagtctcggcacttggttaatggtgaattttgtgaatcttgaaatcttgtcttgaacaatctggagataggatgccatttttgaatctttggcctggtatgacccgttgagttggtttacgataagttgagaatctgacatgacttcaatggttttggcattcaactcaatggatagatctagcccagcgatcaacgcctcgtattcagcctcattgttggtaagtttgaagtcacatct

SEQ ID NO: 275535 - DNA, 548 bp, Cannabis indica
gtgcatgtacgagcttggattcttccttcttcaagtcttcttaccctggatcttgaagaactctctcaaccacacagatctggttgttgcatgaggtatatatagatctagggttttaatttttgcttctgaatgtattagttagttagttacagaacgtagttagaagtggagttaaccaaatccactctaactactttctgttagggttattagagaccgaaggtcaacttagggattttgcatgtatttccttttctgtcctttgtgttcaagttgtatttagacttaatatcagtgtaagtggaggtttaatccaacatctacattaaaagatgtaatatgttttatcaagttcaaatagtaattgttaaaattgaattaatatataaatttggctaaagaaaaaacttttaatccaaaaatatttgtattccaccttaattaatataatttgaacataattctatcctaaattaattaataaaagtctaactaattataataaagaatgaatctcatggatataattttcttgtacatatata

SEQ ID NO: 275536 - DNA, 529 bp, Cannabis indica
ggtttgttttgatttcttccaactaaatgttgcctttaattggagtataaaatagaatagaaagtgactttttttagggatgttggcggctaaatcatctgaactttacggtttgtaacagttaaccacaaaaactaaaattttggcggcataactacctaaaccctggttccgttttgctatgtacacctccgttcaaaaatcacagttaagtgccacggtgaactacgtgtatacacttgtacacgtgacaaatttttaatagtccacataatattagtttttaaaaaataattataaaatatttaaaaaaaattaaaaaatcagaaaaaaaatttattttttttctttttactttttataatttaaaaaattaaaaattattttttttaatttttattcttcttcttctccttcttctttcttcttcttgttctacagaacccctccctcccatgctctctttctctctctcttgtctcaccaccggagccgaagcaccaggtcggaggcgaaagaatctctctat

SEQ ID NO: 275537 - DNA, 615 bp, Cannabis indica
aaaaaggctaacaaagaaaaactaaaactaaagctaaaaagttttagaagcaaagttgtaagatcttcagtccatctggagaaataaagtcaaagcgccgagtctcctctggatttcttcttcttgaatcttgagtgttgctttcgctctctcagcttcatggaatttttctacactagcttggtcctttgaccgacttatctcctcagcgagatgttgttgctccttcaaggaatctttgagactagaaaggtctacctcaaacgatgctttatcggcttcgaactcagctcgtcgttgttgtatggctagttccgctgcaataatctctgcttcctttgctttaaaatcttcaaaatcctttgtcttgttagtgacagatatggacaaatgatctatagctgccaaattatccttatcacgacgaagaagatccatgataagagattcatcaagactaagggcattctcaacaacttgagcagaagcaagagacttttcttgggccttgagcaaatcatgacagagtcagtgaaccatgcaacctctgctaaaccacatttataatgcccgcaaagggtactcaacacgtcgagttgcatactcacgtcagca

SEQ ID NO: 275538 - DNA, 413 bp, Cannabis indica
acatacttctattttctggtgaaatctttaggcaccagatcaccagcaaattttgataaccggtcaaactctagagtatactcggccacagacattttttcctgagtcaacttcacaaaatcttcttgatgtgaagtcctcacagccacattatagaacttttcctcgaaaagtttcttaaactcttcccgtgtcatcacactgacatcccgagtttgattcactatgtcccaccaaacgcgggcgtgatcttgaaacataaaagccgcacaattcaccctctctgttcccgtcacccccatattatcgaggatacgggtaacagtgctcatccattgatcggctttagtaatatcaatgcctcccagaaaaaccggaggttgcagcttcacaaaccgctcgaacaccgagtc

SEQ ID NO: 275539 - DNA, 1250 bp, Cannabis indica
aaaataatttccaacaggcttgtacgaagaaaactacgcgtctggctgacgcttctgatccccaggtggctcggattgccaccctgcccgacgccgaacaggatttggcggtcccaatggaggaggactgtgagggggacgctgaagtccaggaggttgaggagctggacgaggcacgtccgggcagccctcccacagttgagggagaggaggagattgaaccccctaactatggggagtacaatgaggctgagcaaccagttgatgctgacggggacgtcctggtttcaggcatcgactacgtcaccgaggagcttgctgaggcggttcctcataggaggcagagtgccttgggcgctagatgaatgagtcctccgtccaagatttcggagggacgcctccgcactctcgactaggacggatacctgggcgagctggactgcttcatttccgcccacgacaatcgcgcttcaaaccctagtgagaggatgtgcgacgggtcgagggctcacggccaacaaggggcgctgatgcccttgcacaagtacttccgggatgtggcggacttcttcggcctctgcccggcccagatcactcccgagggcattaagtatttgtcttccctcttcgtcctttatgcttcccaggaatggggtgttccctctccccatgaggttgcttggttcttcgacttgaagtctactcccaagcaaggcaggtcggggtatttctacttctctcagccaggcttcaagtggttgagcgggatggacaacaaggccatcagcaaaatagggcattttgttgatgagtacttcatggtgaagaatccgaacagcacgcggactcggtttcaggagatttcgacatatcaccgtcctcccctcacacttacccttagggatagggctcagacgcttgcccggttgccggcggaagacagggatattatcaagttgacctccgatgcaaatctggtgcagtacgggctctaccctgaggacttttcttctaagtccgtgacggggaagaagaggaagtctgctgctgctcggcctgaacgagctcattcagaggatgagctgattcaacttaagcgggaggctaagttgaagggtggtgttcaggcaaagcagtacgctcaggagtctatgaatcctgaagatgaagctgaggctgaggctgaggctgagcaggtggctcctttgaggaggaagaagactcccagccacgcccaggcccgtggaaca

SEQ ID NO: 275540 - DNA, 568 bp, Cannabis indica
aacatgccttggctcggcactcacaaggatgatgcttcttacatttagggcactcagggtatgaccggaatgaggacccgcgaccttgacggccacctctgtttccccgaaactttctatttcctcctgaagctctggaagccttagccttccgcttgtgctcagggttgctactgtcgatccccttactgacattaccactagcaggaaggtttgatgccatggcgtcatcctttgcagcctgctctttcatcacttgcttctcggcctcttcagcaattaaggccaagtctaccactctcttatacagagtgtcatgggatgtggtaattttcaattctcgactggttgtagcattgagtcctcgaacatacttttgttttctggtaaaattggtaggcaccaaatcaccagcaaatttagataaccggtcaaactccagagtatattcggccacagacatcttcccttaagtcaacttcacaaaatcttcctggtgtgaagtccttacacccacattatagaacttttcctcaaaaagtttcttaaactcatcccatgtcatcac

SEQ ID NO: 275541 - DNA, 500 bp, Cannabis indica
ctaggtcccgaccctggttctgtgtccctagtcttattctgggtcggggtccaggttattgtgttggtttgggtcccagtctacgttcgggttcgagtcctagtctcggttcaggtttaggtctctgtctaggttcaggtccagggctgggtcccaaatccaaacactgactacgggtattgtccaagcccaggctcgagatccggaacccaatctcgggtccttgtgtggttccattctggtgccgggtcacgagctgggtccaaggttcaagttcgtgtctgggtcaggtactaggtcttggtcctagttctggttcccaggtccctatccagattctgggtccaggtcccagttagtgtgtgggtttgggtccaggtctaggttcgggttcgagtcctagcctcggttcgggtttaggtctccgtctgggttttgatctgggtaagggtttgggtttaggacctggtcctggtcctagtcctagtttggttccagtt

SEQ ID NO: 275542 - DNA, 648 bp, Cannabis indica
aaattgagtgtcttaaaaacaaaattttcatgtcactcagggggggtactaaggcataccgcacggacagatataaaacaggctcaaagtaaaaacaaagtcaaaaagaaatatcctgacccaaagggcaggtccaaaagagaaatatgcataaaaaaaggatcatatatatatataaaaatcctggccctaaggggaggtcaaaagaaatataatatagtaatatatacaatacaaggggcccggggacaggccatagataattgtctccccttggaaaataaagcagctacttaattaaagataatcttggcaaattgggctggattccgcggcctagtcagcgcgaggaggaaggcgaggccccaacttcgcctcaagcatggcatcaagtttcttcttcttctcccgaaatttagcaatagcctcctcaggcttgggatagaagtcgagcttgatgttttggtcgtttgtctgccaggccatatagacgtcgtcgtcgaaacgcttgacacagcggctacaggagacgggagacaggagctcatctcttttagccttctttaaggcttgatctctgaagtcctttagctccttcatctccacggccaagttagtcctggactgcaagtccgcctggtgcaactc

SEQ ID NO: 275543 - DNA, 1425 bp, Cannabis indica
aggactggcgtagagccaagagaacaggaaatcatcttcgatccacacttcttcatgtccttctaaatcatcaaatttcacattcattgattcgactacagagaaagtccttttgttgaatactctgtaagcccgactgttggtggagtaccccagaaatgttccttcatcactcctgggatcaaacttggccaagtgatcccgatcgttcaggacataacacgtacatccgaaaatgtgcatgtggctcacgttaggaggtcttcctttccatagctcataggcagtttgagaggtaccagtgcgaagatgaactctattgcacacgtagcaggcagtattgacagcttcagcccaaaatcgttttgaaatatccttggcctgcatcatgacccgagccatttcttgtagagttctgttttttcgctcaacaactccattctgctgaggagtttttggggctgaaaactcatgatgaattcccatgccattacagaactctgagaatatggaattttcgaactcttttccatggtcacttctcagtctaaagacttttccaactttggagtctttctcagtttgcagtctcagtatcaaggcagagaatgatccaaatgtgtcagacttgtctctaagaaattcaacccaggtaaaccgagagtagtcatccaccaagaccattacatatcttttcccactgatactttcattctgcattggccccattaagtcaacatgcattagttccaacacacgagaggtgagaagtctattaattgtgggatgagatgccttatgctgttttccaagctgacatggaccacatactctctccttggaaactttcatgtcaggaattccccttacagcttgaagcttcaccaatctttggagatctctgtagttcaaatgtcccagcctgtagtgccataagtcaggtttgtccaagaaggtcctgttgcacactatggtattgcatacagcatagcactggtctacagttctgtttcctgttaagacaacacacccatcagatgaaactaaacattgagttttagtgaaacttacagagagattgtcgtcacacaattgaccgatgctgatgagatttgctttgagtcctctcacatataggacattagtcagctgagctgctccattcacatttacatcacctctcccagcaatctgtcctttgttaccatccccaaaagtgacagatccccctttttcatatttgtagttaactagcaatttcttatttccagtaatatgacgcgaacatccactgtcgaagtaccactgaccttcaacaaaggcagacagggatagctttgcaaccaaaccaacatcaggatttggtttggtactttattttccattctcgatgaggtttgcgtccatgtgacttatttggttgag

SEQ ID NO: 275544 - DNA, 498 bp, Cannabis indica
tggggattcccatcgatatcaaaatagtactatgtaataaataatttaaaattatattaatttacaaatgaggacataaaattattacaaccattaataattaaaaatcactcactcttatttgattgagcacttgatccttatattgttggggtacatcagaaaaatttagatgaccacccgggcacaacatgcttacttgttggccaagaaatcgaacataattgcttgcttcagtgccaacaactttgccagtttcaagatctacctccaccggtaagggcttaccagcttctctccttttttttcgtaggttagcgtttgctgcaaccccacgaccctttctgaccggaggtggaactatatttattcgagagaaaattattattattagtaaatcatacattcactatttatattcagaacaatgttagatctgaaaaaatatgaaaacctgattcgcaggacgacggtaccctaaaaggatcaggaggatcc

SEQ ID NO: 275545 - DNA, 333 bp, Cannabis indica
ttaaggatggatcgtcctgcttctcttacggataccagtacctccgagcaaaggaggatttatgagaactgggaccgttcaaaccgcatgagtcttatgatcattaagcgcggcatacctgaggcttttaggggtgcggtgtccgaggaggtcaccgatgccacaactttccttgctgaaattgagaagcgctttgcgaaaagcgataaggcggaaacaagtactcttttaaagaaacttatttccatgaagtttaagggcaaggaaaacataagggagtacattatggaaatgtctcaccttgcttcaaagttaaagacactaaagcttgag

SEQ ID NO: 275546 - DNA, 339 bp, Cannabis indica
tttgaaaaagaaaattctctcaagtcttctctctatttcggctgaggcattagggtgcatgaagctgattttctctttgatttccaagcaaactctcatcctttctaagcattcttcaagctaggttagcttctcttgatttttcttctttgaaattatgaaaaaaatggtgaaattttgagtatatgcatgcttcttgtggctgtggttattgctgtgttttgttgttgatttctgaagtgtaaagcatgtctaattgaagttaattaagtgattttgaaagcatgttagataggttgtgcaaagctttaagtttctaatactctgcgacagaaagga

SEQ ID NO: 275547 - DNA, 529 bp, Cannabis indica
tgaaacttttcaaacgtttcagatttcttatgcataaggtaaatatgtccatatctagagtaatcgtcaatgaaagtgacaaagtactcataaccacctcaggcttttacattcaaaggtccgcaaacatctgaatgtccgcaaacatctgaatgcactaaccctaggggttgtttggcacgctctccctttgcagagaaagaacgtttggtcatctttccttctaggcaagactcgcaaacaggtaattcacctaagacgacatttttcaatggaccgtctttggttagcctatttagtctgtcatagcctatgtgacccaaacgtaaatgccatagatatgtttcattatcatcatcgatcttttgctttttgtggtttctaggtttagctactttttatatagggaaaatggtgtttctagtctaagaacataaagcccttgttccatggatgcatcacaaatatgaatgtcatttcgagaaatggtagaaccagagctcgaaaaatctaatttgtattgttgcaa

SEQ ID NO: 275548 - DNA, 585 bp, Cannabis indica
ttctcccaagtgaactgatgtcccacaatatctaagtcaattaacccgcactcctgaatagtgtcccggaagccatcaactaaccagcttggatagggatgtccccttcttttgtcctcttgagacaaaacgttgttcatatcaccaattacacaccaaggaagagtgtttccatgggccaaagtccgaacctctagtcctccatgtgggccgtaagacgccactccccaacatcactagaccgaacctctacatcaacaaaattggtggcatagttcaacactttgacctcttccttattcctccaaagtaaagcaactcccccgctcctaccacatgcatcaactgcaaacagaccctcaaacttcaacttaactcgaactcgctccaacacatccttacgacacaaagtttcacataaaaagatataatctggtttccgatgggccacagtatcaaataggaattgtatcgctcgtgggttgcccatcccacgacaattccaacttaaagtactcataatgcccggtgggcctggacacctcgaactcgttttttgagagtccattaacatccatatcagca

SEQ ID NO: 275549 - DNA, 609 bp, Cannabis indica
tgtttccttaatatgaggtcttttacccacagtattcacaacattaaaagaggaatctaaaggagccaatgacaacttgtaaagaccatcagaataaaagcaatttccaataattcgagagtcaagcataatgtcaacattatcatttgcaaaatgaaaagaatatccttgtttaaccaaaagcggaagcgaaactaaattccttttaaaagtaggaacataaaaagtattgttcagaataatcttatcacgagactgtaattcaagaataaatgttccaacatagataacgtcaactccaacatcattgcccactttaagcttggactccctctcacttggcttcctgagatcccttagcccctgtaaggaagcagaaacatgaacagtagcaccactgtctaaccaccaagaatcaataggaacatcaactagattagattcaaaacaaacacatgccaatggattacctgattgtgcttgcttcttttctaaccaagtcttaaatttgtgacagtctgttctccgatgccccaatttttcatgagcaatgaaagagtcaggaagaggaatattatgatcttttaacttggactgaacattcaccaa

SEQ ID NO: 275550 - DNA, 546 bp, Cannabis indica
acttttaaatagcaaaataactactgttttttttttattataaaaagaaaaacatagtacaggcaatatataccttgattttaagctcttctcaaacaaatacgagattatcttatccatctcgacattaactagtgaaacattaactttaaaaggtccaacgtccttcttctccttcaaattacaaagttccaaaacatctaacccactactagtatcctgaccaacaggacatatctcagacacaccctgtgcatgaaaagatatatatttaacaatttcaatatttattatctaattgggaaaaagaacaaaaaaatttcactctaaatatattaagaaagaatgattcaataccttaacacatgaactttgtctaactgataatttacaagctgataatgacttttgagatcctcttatttcaacaccatcaatcccctaacaaagagcaaacacaaaattatgaaattcaacaaaaaactgaaattctaaatacacaacataataatgaacaaagtagagcaattagatattatatgttct

SEQ ID NO: 275551 - DNA, 880 bp, Cannabis indica
gtaccaacagagttcagcaagaaaagtatttggctgggctgaatgccaaaatcagacatgacctggttattacaacaagtgataccacaacctatgcagaaatggttgataaggctcttcgagctgaaggagcagttaaatttttacaagaaacccgagagtcttctggtgttggtggggctactactctccctatgtcgggtcctgagaaagagagtgggggttctacctttgaacagaagaaaagaacttttccatcttcgggaagttcagggcaaggtaaaaggtttcgaggaaaccagaatagaggaggacgtcagacttattcttatcctgagtgcccgcgttgcaagaagcatcatcccggggtttgtaaccggagagcctgttttcagtgtggttcggtgggacatctcaggaaagactgtcctcagttgaagaaagaggaaccaaagcctgaggtcaaacctgtacctgcccctgctcgtgtctttgctattactcaggcagatgctgctgccagtccttcagtagttgcaggtcagcttctaatcaatggttttgtttatactgttttatttgattcgggtgctactcggtcttatgtatcatcaagacttttagatcagtttgttagacctagtgagattctcgagacggggtttggaaccctgttgcctaatggggaattgattatttcaagaaagtggattagatcagtaataattagaattgaagatagagaattgaatgctgatctcgtggagttaccattggccgaattcgatattatacttggtatggactttctgtccaaatactctgctagtattgattgtaaacggaaaatggtgacttttgaaccggaaaatgaggaacc

SEQ ID NO: 275552 - DNA, 566 bp, Cannabis indica
agggaagaattccagaggccgaagcccgagaagacgcagcccacggagacaacgaagtccaaagttggccaaatctcctcccaagaaggagtcctctccgaagaggaagggtggaccgcgttttgttaattataccgaactcgcggtgccccgagaccacatttatgcaattgaagagaggaatggagtcttcaagaagccgccccacatcaggggaaaccgcgacagaagagaccccaaaaagttctgtaagtaccataaagatattggtcataccactttagaatgttgggtcttgcaggacgaaatcgaggagctgattcgaagaggaaaattcgataagtataagaagaacgaggaaggtcatccccgagcggatgacaaggaagaaaatcaaaacgcgagtggttcgagaacgcctcgcaatatcttaactatcattggagggccccatatcgcaggagactcccgcaagtcgcaagagcgatatgccaaagaagccagggagaagccgctcaccaatgtaaacaatcttagtgagcagccagagaaattgtttaagaaag

SEQ ID NO: 275553 - DNA, 836 bp, Cannabis indica
gtttattttcatttgttttataattcatattaggatgttaattaacatacttggtagtaaatctagatcctggtaaaaatatttccaacagttcccaaaatgtacgttatcacctaaccaaaaagtaggcttaactatcaaatcaaagaacacgaataacactcttgagatcgaacctaaccatgtcaggattgagattcatttgatctaggatcaactaggtgatattgaattgaatagatattacggtaaatttatcatattcaatccaagttcaatatctgtcccttccaatgtatactccatacatccgatactggcaaactttgccaataccctgaaaaggaaataacacttatccaaggtgtaagtatacctatcgttgattatcatgccagcataaatccagtgaactgacaaatcatgcaattaaactttttagcatataatcatgattatattctactgtgtcgacaacactataatcatgaacaaatacatatgtaacaccctaactagcataggcgtgctgacgtgattttaaacgtactgtgcagctcattgctaatcaacgaggttaatgaaaatcgtgattaattaaaattttgctatttaattaaaacttataatattacatacaaaatatttcgggatcccgtttacaaaatactttacaaaagtttactattcaatacaaaatatttgtcacctagcgactaactacaaaagcactgttgtcccgaggatcgtacgctccaggcctaaccaccccgacatgtacaatcttcatttgctcgtgctcacggttcctcagctttggccttgcccttacctac

SEQ ID NO: 275554 - DNA, 552 bp, Cannabis indica
gtatatagcgactcagtcgctaattccatacaagaaacccgggccaataaagaaagataccagcaaaagggacatgacaaaattttgtcggttccatggagattacggctacgacaccaacgaatgctaaaacttgaagcgggaaatagaacttctgatcaagaagaacaacccgcacctacaggagtatgtcaaggccaaccaaggtcagaacaaccaggatctgatgcctccgccaatagatggacacttgcaagtcatcattggaggcccgcacatcgctggagacacaggcaaagctcgggaacgatatgcccgcacagctcagtacgagcaagaagaagtcatcctggccgtggaagaaaggaatcccaaagttccacgagcaggagagccaaccataacattcggcgacgaagatggtatccagataagatttctgcacaaggacccgctagttgtggaagtccagatagcaaataaaatggtgtccagaaccatgatcgataatggggcttcttcaaatattttgtttaagactgcttacgagaa

SEQ ID NO: 275555 - DNA, 785 bp, Cannabis indica
atttggtgttctacccctaaaaagaggtaagcatcccctaaaatgaggtaggatgtacttatttgtgttttctgacatttataattttaatattataagacattgtacaacataactatttaacacatcgcgtttcaagcttatttttggtgagtgattattttttttttaatttttaaaattttatagaatatcttataactatgttatataaaaatataaaactaatatcaattggatgtcaaaaaccctccttttgatagatgtctcataaaatttttcaacattgtattcccaaattatttatgttttttctttgaaataaaatagtgatgtttacaaaattattattaggggaattactttatataatatttttttagatttttttttaaaatttacagtttgggtttctaaagtagttgcagcactagttgcaataagagtttctatacgattttttgttgcaatttaagttgcaacactagttgcaataggggtttttatgtaaaattccgtaaaaatgcaaaaaaaaaaactagtttgaagtataaaaataaatttttttttaaacttatttaggtattttaattgatttttgttaagttttatgtgactaataaaatcctgaaatgactaatgtcttattgttatataagtgtaatatattcaatttaaaattttaattaatatatattaaccatggtgtgatatatatatatatatatgcaggcatgagattgttggtgtagtgaccgaaataggtgaaaaagtagaaaagttta

SEQ ID NO: 275556 - DNA, 530 bp, Cannabis indica
tacaaactaagtgttacagacggataggctcaagaccaagtaagcgaggtgatcgtctcattaggggaagacctcatataacttcatcccgttagcattagcgaggctcacaaccctggcaagtcaagaagctaacattcaaacgagctttgaagaactctttgtaaataagaaccgcgatcaacataagacatgcatcgtcgacctcggaagaaaaaatggccccagctcgctattgagatcactggaaccaagcttctgtcgagacaactccacaaacaataattaaagacgtgtttaaaacacgatcattttgacccagtaaaagcgggaaatcacagctatatgattttcaaatcataaaccgcatttacactacgtgatatgtaatcaaatcccatgattttagggatgattgttgtaaacatattacagtcaactttgtaattaactgtccactatgtaattataaatagtgacaaagaagatcaaaaaagggacgacaaaaaaactcatacaagagaagccct

SEQ ID NO: 275557 - DNA, 426 bp, Cannabis indica
cctacatctaacatcttaattacatcatctcttactacctctttcatgtttggatttaatcttctttgactttctcgggagggcttagcattttcttctaaatgaattctatgcatgcacacagctgggctaattcccttaatgtctcccatggtccaacctatggcctttttatgttttctaaggatatctaacaactttgcttcttgtttttcatctaaatcagatgcaatgataacaggataggtgttagactctcctagaaatgcatatttcaaagtgtctggcaaaggtttaagatctaactttggtggttcaggagttgactccacatgctctaatggaagacatggttcaattttggctttccatttttcagtttccattagtggggtagactcaagcaaagaattgacatcatgaata

SEQ ID NO: 275558 - DNA, 407 bp, Cannabis indica
agttcaacgatcttttatatctaatgaactctggatagtattcaactccacataaactctatcacacttagagaatcatgatctttacaacctttaggggtggatcataatctctatatacttaggggtggagtttatccacagtaccctatatgtatatacttaggggtggagtctattccacaattccctatgtaacacatattttctttaaacatggaagtaatataatgagttagctattatcaatataaatccttgatcttgattgtatgttccatttcgttttactattgtaagtaaaagtttgatacctataaaagttctttgataaagtttcacactaccttaatagagaattttaaaattctatacccatcttcatcaggttgatacttgtgataggt

SEQ ID NO: 275559 - DNA, 572 bp, Cannabis indica
tctctgatttttcttggtcaattcagttaggggcatagagattttagagaatccctcgatgaaacgtcgataataccctgctaagccgagaaaacttcgaatttccatcacagatattggcctcggccaattcttcactgattcaatctcgcttgggtctaccataatcctgttcttcccgaagatatgccctagaaaagatacctcagacaaccagaactcgcactttttaaattttgcatacaacttgtgatctctaagtcgctgcaataccattcgaagatgatgctcgtgctcctcttctgactgagagtatacaagaatgcatcgataaacactataacgcagttatcgaggaaatccttgaataccctattcatgagatccataaaggccgcaggagcattagtcaatccgaatgacattaccagaaactcatagtgcccatatctggttctaaaagcagtcttcggtatgtcctcctctcgaattctgagttgatgataaccagaccgtaaatcaatcttcgaaaacactgtctttccctgaagctgatcgaacaaatcatcgat

SEQ ID NO: 275560 - DNA, 618 bp, Cannabis indica
ttcgattttaaagtaatcaaatcttttcaagttcttctgaaccttctctaaatacttagccatttttaggcccttgacctggtattccctgagaacctggtttacaatcgatgtgagtcactatggcagatgagatttttgattttcaacgcctcgactatctttaagccagtgatcaaggcttcatattcagcctcgttgtttaatgtgtcaaattgaaatctcaaagcataatgaaacttaaagcctttcgatgaaattaatattacccctgcacccgaaccttgcttgttggatgcaccatctacgtataactttgaagtgtccgcgtctcggtgaacaggaggaatttcttctgaagttattccttctattaagaagtctgtcaaggcttggcccttgatggatgttcgagggtggtatgttatgtcgaactgccccagttcgattgaggattttatcaatcttccaaaagcatctggttttgataaaacttgtctcaagggctaatcgattaacactttatggggtgtgcctggaagtaaggtcgtagcttgcgagacacatggattaggcacaaagcgagttttttaagagggggatatctcgactctgccc

SEQ ID NO: 275561 - DNA, 876 bp, Cannabis indica
acccccattccctttttcttgacttagggtttggtatgggacctaactgctggaattttctctttcttttttgtttttcacagaatagaaaatgtctgcctctggttcgaagtcctcgaagaagagcgggaaacgcatggccactttggaggaggtttccctgggacccgttgcccaggaggggtataagtcccgagcaaccgggtgggaagcggctgagcttcattccaccttaacctgtccccatcaactggagaatattgtggacgttgctgggatcaaaccttccacttcggggacctatcaccggccacctcgcgactcggagacgcctaaccataattacggcggcttcggagcctggagccagacgcacctgatggccggtgccatgctcccacttcaggactattttgttaattttcttgtttttgtcggccttgcgccataccaactcattcctcaagcttatcgcctgctttcaggcttatttattttttatgccgcccgcggatggggatctccccgcccggcggaaattttgtatttttatgaacttgtatccgtccccaagaaaggggacaaacttaaggacggtttctatgggttccggatccatcccgctaacgaaggggtggttccgtataataggcagactcacgtcaaggagtatcgccatcgctttttcttttcctccgggttcagggcagtggatcacccggagctccttactgagtgggtgaggatcccaccctatcagcggacggcccctacacagaccttcctccggagggcccaagcctttgcctcctacgaccgcgccgatctcgatgtcgggggtttggtcaccacggaaaactgcaggaaggccaaact

SEQ ID NO: 275562 - DNA, 564 bp, Cannabis indica
taaatcacttcccagggacttaaactaggaactaaaagttaccctatcgataaaaagcatggcaataccccaaaaacataaaaacgaggaaagctagggtttctgaaaattccccaaccggtagaccggttctgcaaccggaattccggttctgagaattcctggaccctcatccggaattccggatgcacaaccggaattccggttcctcgcaggaatttttcaaaaattcacacaatgctcaaatcaactccaaaccacaccaaaacttccagacctgttctatatatcccctagaacatttctaaagcatcaaactcacccagaatgcacataaacaaaaagtgccattaaagcccaagctttgagttttaaactcaaacttgatcaaacactaccaacatgcaatcaaaccatgattcaaactcataatcaagcatataaaaactgcagaaactaaaacctaactcatgcaacaactacagcaacaattcacccaatttcactttgaaaactcaagctttttaacagaaaaaccataactcaagcaacctaactattatg

SEQ ID NO: 275563 - DNA, 663 bp, Cannabis indica
caattacaggggatgatggatttaaaatttacaagaccaagtacctcaccttggggtgcgccagttttgttcgtgaaaaagaaggatggaactttacaaatgtgcattgattaccgggagttgaataagttaacagtgaagaacaagtatcctttgccaaggatagatgacttatttgatcagcttcaggaaaagatcgtcttctccaagatcgatcttcgatctggttatcaccagttgaggattcgggaagaggatattcccaagatagctttccagacccagtatggacactatgaattcctggtaatgtctttcggattaacaaatgctccggcagcatttatggacttgatgaacagagtgttcaaagacttcctagatgattttgttattatctttattaataatattctactttatttagacacatgaaagacatctttggatggtgttacaacgtcttagggagcataagttgtatgccaagttcaagaaatgcaaattctggttgcctcaggtgagtttcttagggcatgtggtaagtaaagatggtattcttatggatccggtaaagattgaagcggtacgagactgacctcgacctaagttagcaactgaagttagaagttttctggggttggcaaggtattatagaaggtt

SEQ ID NO: 275564 - DNA, 572 bp, Cannabis indica
acagggacgccacgtgtgtgcaatttaataaaatactctgatttatataatatgtaattatactgaaaagtgtgggtaattaaattttgataattaaaattcaacttttaaaactgtttaacaaaagataagtgatatagactacggggtccccctgttttcaaaatatttacaaactggtttcaaagtattttacaacataaactttatatttccaaaatacaatcaaaatagagcatcctgtttactgggccgtgccactgcggctggtatgtacattgctgctgcgaccacaaactcatggttgctcaacttttgccttccctttacctgcaccataaagcacccgtgagtcacagagactcagcaagaaaagtaaccaaaacattgactgaaaatgattatcaatttaatctcataccaatatgtttactcattacacaatatcataaagtattcctttacacattacacattcacattacacaatcttggtactttataaagtacccctttaccactcgttaaccacgagctgaatatgtcactatcgttgcccgataaagcaaacg

SEQ ID NO: 275565 - DNA, 778 bp, Cannabis indica
aaaaaaataataaaagaagagtgttatgggatttgaacccatgaccttggatatcttaacattaacctcaaccaactaagctataaatatttattgcttataatacatctaaattttaattaaataaaagaataataatttttattttatttttttattttgggcccccagaaagtgtgggccctaggcacgggcctagcctgcctatgcctagggccgaccctgtttgcaaaccaatgctcaatatgtgcctatgaatttcagaatggtgagaaagtaagaatcaccaaatgtggtcattattttaacaacaaatgcactcgtgacatgatcaaggaaaagctcacccaatgccatatatgtagaatgtcatgatttacttagacaattttcattttaatgattaataaaaagagtgtgtgtgtgttttttataatcatttatgtatatgtgtgtaatattaattatatcaataaataaatattattatttctctcctaagaatctcataaattattgctattttttaattagtaatacggtggatgtgtgattattgctatctcatcaattaaagatatccatgcgaagggcataccatatttgcaattgcaaaccaatgctcaatatgtgcctgtgaatttcagaatggtgagaaagtaaggatcaccaaatgtggttattgttttcacaacaaatgcactcgtgacatgatcaagggaaagctcactcaataccctatatgtagaatgtcattatttacttagacaattttcat

SEQ ID NO: 275566 - DNA, 913 bp, Cannabis indica
cgaggcatgctcttgacgtcgaggtcgaggagatggacgaggaatggacgactccagctcgcgagtcaggtggggaagaggaggaggcggaagggagtgggacagattcggtcgacgattcccaactgaacgagcccttcgcgtgcgaggatttaatctcgagggttgccaaatcagacttcaccacctttgtgaggttgaatttgctgcgactcgcgtttcaacgtcctaaaccgtctcagagagcgcaccttccatttactaaccctgcgatcattcccacggaggatgtggtagtctcaatacccatccttaggtgtggtgtatcaatcccctttcaccccttcgtcgcagccattctcaggcgatatgatgtatcgccctttcagctaactcccaacagttatcgcactgtcctagccttctatgcgatgtacatggagtatgtccatagggctccttcagtagaagaattcagctatttctacgacataaaaagcgtaggtcttcataacggcttctactattttagcaaatgggcgacttctgaaatcaacggagttgagggaatggtgtcgaacatgggtgattggaaatcgaagtggttctatgtctttaaggttcctgggattaggactgactttaatcgcactgccagaacctccgttatttgaggctccatcgacgtacaatgtccatacttctttgcttgccatgacaatgtcatttctatcctctacaacggccacctcggtgcttgggaattcaagtataaaatctgccaaggcttgccccttgatcgcagttctcggcttatacttgatgtcgaactgactcaactccatcgcccactttaacaatctccccgatgcttctggtttcgctaaaacctgtcttaaggggaagtttgtca

SEQ ID NO: 275567 - DNA, 192 bp, Cannabis indica
ttgatcttagatcaaaggatcttaatcctgttatgattaggctcgatctcgaaaggctattcatgttctatgatctccttcgagcttgaccaaacgaacataaatggtggagtactcatttcacataagctgaaatatcatttatacggggtcaagtgttttaaggaataaatacattgtagggtgtaacgg

SEQ ID NO: 275568 - DNA, 204 bp, Cannabis indica
gctcaggttggatgcatagagtatgcatccaaacgaaaataaatggtggagtactcatttcacataagctgaaatatcatttatacggggtcaagtgttttaaggataaaatacattgtagggtgtaacggtaatctaatccctttacagtgtagatcattcatatagaggatcattgatcacattaggattataacaatggat

SEQ ID NO: 275569 - DNA, 610 bp, Cannabis indica
ctttggtatgtagctccggcgtttttaagaccaaatggcatgactttgtagcagtagagacccatatctgtccggaaacttgtatgttcttggtctggcggatgcatcttgatttgattgtagcccgaataagcatccatgaagcttaatatttcgtgcccggctgttgcatcgacgagctgatcgattcttggaagtgggaaacagtctttagggcacgctttgttgaggtctgtgaagtcaatacagactcgccatttcttgttcggcttaggcacgagtacggggttcgcaacccaagctgggtaaaaggcttcaatgatgaagttgttattgcgcagcttttcaacttcgtctttcagggctactgctcgttctttatccagcaatcttcgtttttgctgaactggctggatattaggatcgatattcaggacgtgtgaaataatagaaggatcgattccgaccatatccgcatgtgaccaggcaaaaatgtctaggtttgctctcagaaatcttatcaattccgattttacttcgagcaacaaaccgtttccaattttcagatttctgcccgggatagctggatcgatctcgatctcttctaatt

SEQ ID NO: 275570 - DNA, 772 bp, Cannabis indica
tatttgtaagtgttttatattagtattgatcaccctaatggtgacaactgtatttgacttacaaaatatgaaacaatggtggaagctcatgaaataggaatgaccttgactctcgcctaaacgggacaacgtcggatcctcttttcgatcgaataaaaggttgctagaatggttattattttagatgagctgacaactctattcaatggatggtagctttgactctcgcctaaacgggacactgatatcagtttgttaaaaccttggaaattatttaggattgtatgttttagtattttctcttgtcattcctactttctatgtgctaataatttctgaattaaattttgtgttaaaccataattgatttctatttattattttgtagtatcctgtagagccatgtcaaatccaatgttatcactcttgactgaaaataagctaaatggatctaacttccctaaatggaatgagaacattaatattgctctcataggtgaaagtgccctgtttgtgttaactgagccgtctcctgaacagctgggtgacaatgcaactaaagctgttaaagagaagttcgagcgttggcagaatgctaacaaaaagctcgatacttcatgctttccagcatggttgacaccttgaaaacaaggtttgcaaaaactgacacggctgcagaaataatgacgaagttaactgagctattcagaatggcatctatccagtctcgctttgacgcgactaagaaattcatcaatgcacggatggaacc

SEQ ID NO: 275571 - DNA, 843 bp, Cannabis indica
aaaaaaaattattttattataataattgttatttatttcattacaactttaagtaagtatcaaccttctatttaaaaaaggccattcttcgcacactttttgaagcgaattgatcaaccatctcttcatattttacagtttctaaaacatcattttcaatcgcgatcaatgctaatccattaagtctttcttgtaacatggtagaccgcaggtaggacttcaacaacttcaatttcgaaaaacttctttctgcagaagcaactgtcacaggaatagtcaataaaattctgtacgcaataattgtattaggaaaacaatctacgcctttcaaaaatttcaatatatcaatagctctcattttttccctaggcaagatttctcttaataactttaactccacatataattcatttccatcaatatcatattgttcattatgtttcaatgccttttcaaaatgactacaacaagacttcaaacatgtattgtctaatgattggagcttatcagaagtaaacaaaaaaccaaaaatattttcatattcttcatattgttcaaatcgcttagtaagagaaacaatggcttgatcaacaaggtaaaaaaaataattaattctaaaaaattcttctcctgataactcaatagatggggtattcaaattctcatcaaattgtctttttcttctaattgtgcgtctttgaggaaaaattggatcaatattcatatcaatagcaatttccttagcactattcaaggcatcataaaaacctgtttctctatatttttcaaaaaaataaattaaccttttattttttccatagcaacatcaataagcatatcttt

SEQ ID NO: 275572 - DNA, 664 bp, Cannabis indica
atagggcgttttactgatgagtacttcatggtgaaggatccgaacatcacccggactcggtttcagcagattccgacatatcacgtcctcccctcactcttacccttagggatagggctcagaagcttgcccggttgacggcgaaagacagggatattatcaagttgacctccgatgcaaatctggtgtagtacgggctctaccctaaggaattttcttctaagtgtgtgacggggaagaagaggaagtctgctgctgctcggcctgaacgagctcatttggaggatgagctgattcaacttaagcgggaggctaagttgaagggtggtgctcgggcaaagcagtatgctcaggagtccatgaatcctgaagatgaggctgaggctgaggctgagcaggtggctcctttgaggaggaagaagaaactcccagccacgcccaagcccgttgaacatgccattcgcataagggagcccatttcacctgttcggccatcccatccttatgctggaaaagggaaggccgttatggctgagatatcaggtgatgatggacttctgactttcttggcggacagtcactctgcgctttacttctttttcagcttcttggcttccatactttgtattttttgttggtttttgctaaccatgctatttttgct

SEQ ID NO: 275573 - DNA, 656 bp, Cannabis indica
acatttttctccataaagataatgccgccaaatttttaaagcaaacactattgcgaccaattctaggtcatgagtcggatatcgctgctcataatcttttaactgtcgagaggcataagagataacccgatcggcttgcatcagcaagcatcccaaaccctggctagatgcagcacaataaactacgaacttttctttgtcagaaggcaaagctagcactggggctgtaatcaacctctgtttcagctcctgaaaactagcctcacatttgtctgaccatacaaaacgctgattatttttggtgagctcagttaagggtgttgagattttagaaaacccttcaacaaaccgacgataataaccggctagacacaagaagcttctgacttctgtcatagttttcggtcttggccaatccctcacggattctatctttcctggatccaccttgatcccatccttgctaacaatgtgccctaaaaaggacacctgagataaccaaaattcacatttcttgaatttgacataaagcttgtgttctcgaagccgttgcaaaaccattcggagatgtagctcatgctcctcttctgattgagaatacacaaggatatcgtcgataaacacaattacacagatatcgaggaaatccttgaata

SEQ ID NO: 275574 - DNA, 574 bp, Cannabis indica
ataacaaaaaataacatacatataacaaaaaatcaacaacaaattaataagataacaacacaaaaaaacaccatattctacaaataaaataaaaaaaaacgtaaaaatatttaaaatttcgtaaaatcgtattttgtaatttttttgttgtttttgtgtatttgtgaaattatccctttttttccaagttgatccgttttgttattcgtgattccatgacacgtggaccttcacagatgcccattacggaaaccaaacccctttactggccatatgaaaataagttatactcagcccatctatggaggacagaatatattcgaacagacaattcagttcccgtatcagtgatgattctagacaatgggtcacgaatacggattctacatttaggtggcgtttggttggaggtaatggaatggaaaggaaacaattttcattccattcctttgtttggttgtattttaaagtattggaatgacattctaatggaatactctttctaccattttagtagaatgactattccattttaaaaagaaatgaaaaaccattccaatgtaacaagagaaaa

SEQ ID NO: 275575 - DNA, 895 bp, Cannabis indica
gtcagttacgtaaaacaacaaatataataactaaatacggaaccagttacaaaaacaacctaaaacaatcaaaagataaatttatttatatgttaagaattgaggttgaacattgaaatctgatacacaaaaatcagttttatttatcaactagtttaaattctaacttaggaaaaccagttagtaaagcaaaaacaagtaatttgaaataatcaaatgaaaaaaatcatgaaacttaaaactcaattatgaaaaataataaaaaaattagttatgaaaactagttacttaaaaaaccagttatgaaaatcaataaaataataagacataccacaaaagaattcttaacaaatctatttaaaaacaaatcataaaaagtagctaatattaaacaacaaagttaaaaatctaacacataaaaaccagtttcaaacctagaaacaaaataatataaagaaacttaaaataaaaaaaaaatatacaataatatcataaaatagatcaataaagaatttacctttctagttacctttctagttatataaaaatacatttttagtaataggacattgaaagaatggggtcaatacatggtgatgctcccacattaatgctcgaagattagaagatttgtaaaactaatagctagattgaaaatttagctatgattgtgaagttgtgattgttatattatttttaatataataatatgtagattaaaatgtggtaatatataatattatgtgaataatatatattaagtgtatggtaaataaatgtgtaacctataatttaacctacacttttgtaacctacatagtaacttggagaggagttacaatttgttgtcatttgtaactcttgtgttgatcacacattattagtgtaaataaaa

SEQ ID NO: 275576 - DNA, 566 bp, Cannabis indica
cccccactcttccttccgccagctgcgtccccagcccgtcagcgcccaacgaaccagctctcgccacgcaagcgtccgcagcctcacctccaacagcagctcgccacgtgtccgcctgctgagaagaaaaaaagtgaagtgttaattgatttactcatccgaaaatcacattcacaaacaccaaatatttcattttctcccacatattacacataaatattctatttactcttcccaatttatttcacctaaataaacattcctaatttatttttaccctatcttttcactatttttccatccaaacaaacatttattttttccaatactcttacacatactctatttatcccttctcttcccaacactaattaaattaatcaatttatttattttattttgattaatttaatctcccaattttgcctataaatatggtgttggaagaccatttcaaaacacatctcttcaccctccctaaacacctcttcaacccaaaacacttctccattccacactcttcatttttaccattttctttctaccatttttacattttgaagagc

SEQ ID NO: 275577 - DNA, 590 bp, Cannabis indica
acctcttcactcactccttggatcttgaaagaatcactcacctccaagaatgaatagagatggaggtgaggatcttcagttggcatcccgctgaattgccccacggtttggagcatttgaaacatcaatgacttgagctcaaactgcggtgcttgtatttcaagcctcacaatgcctggattgagctcattaaacatgggggctgcatactctcgtatagcccttgctcgatcatctgccaatatgatgggattaacaatttgttaagcaatcccatcatcatcaagattctcagccatgatgtctcagcccttagccttttgaactcttcttcttcttcggaatgtgcgttcaatctcggggtcaataggagcaagttcaacgtcctcttgttggtccatacactatagatacctgagattttaaagcacaaaccagcaagattaaaagcacataaattattagaatgtcaattagttgataaaacaaaatttagaacttaaagtccccgacaacggtgccaaaaacttgttgtgaaaatttataatgatttataattgcgcaagtgtacacaatcacaaacaagtaat

SEQ ID NO: 275578 - DNA, 460 bp, Cannabis indica
ttcttcaaaacagcacgaaccgtcttaacacttcgccatttcttccagtttttccgtgtttgttatcatcagttcttctcaactctactcggccacatttaggaccccagttcaacaatttactgtaagtttctcgcatccttgaataatgacatgcttttacttgctttgtttgttttcctgggttcgtactttgagatttctgggcatgcgagtgtttaggttcttcaggtgttctgttttgtgttcactgctttagttgtaggaccgccattatcatgcctctgttataatcgtgcatttttgttgaagagagccatatgttcttcgttcaatagttgcttagggcatagaatggggtcttttcccttctgtttcttttactctgtaaaaccactttctgcgattttactacacctgacacttgttcatggaatctttctagggtttcccatgtgac

SEQ ID NO: 275579 - DNA, 684 bp, Cannabis indica
aatgaacaactgttattaattgaataggcccaaatactaattgggcctaaataaaatctatcataagtgatcattttatttagcaacctagtccattttaattacaaaaattaaatgggctacctatatgcatctaagcccaaagcaaacatataggctcacacaagcacacagatttggatggatcctatcatgttactaggtttatacacagatgaaagaagattgcaaaatttacctgttacaaattatttatttgacctattgacagttgaaccattggatacaacgagatcattggatctgtcaacaagttaaccatggaaatttcgatcaaacaataataggttttataaaaagtttaataattgaacaatatataaaacacacaaacatgtaaatagttggatagttggatataagatttatttaatttaaattagttaattaagtaaataatttcgaaaaaaataaataaaaaaaaatcggaaaaaaaattaattaaataattaattttaaaattaaacctataaatttgaaaaattaggttttcaacaaacataaatatctatttcaaaaaaaatgctaacaacttttcaaatttcatgttattaaaataaattaaatattcaataaaataaaatgataaataaatatcatttttctaattttctaatttaattt

SEQ ID NO: 275580 - DNA, 665 bp, Cannabis indica
ccactctcatgattctccctctcgttttcttgattagtcccctcgtcccggagccaacatcgtccaacaagctaagccctagaatctctctccctctccttcactcacgattccctttctctcactcacagattctcaaatctcgagaaccctagatctcgagaacctcaatcgacagagaactctcacagaccccctcgtcctcgatctcactcaaacctactcacactctcactttctttcacactctctttatcttctattgttttttttctattttttaaatatggatcattatttttttagattggtagttgtgatagtggtgatagttgttgtggtggtgataatggtggtgcggtggtgataatagtggtgtgagtggtggttcgatggtgacgattgtgttggaatgtagatagtggtgtcatagtgtttttgctaagaagaagaagagtgagaagaaagaaaaataataaaagaatggaaaaagaaaaaaaataattgtttaagttattttaatttttatatgattttaataatttaataatattttgtaacgtcctgcttcaagtctctattgggcccttacacccacggaataatgactcttatacacgagtacgtcactttggctgtttcatggactgatgactgaccctaca

SEQ ID NO: 275581 - DNA, 552 bp, Cannabis indica
aacatgcattcaaactagctcaaatcttcctaaatatgcatataataatctcagaaaacaacagcaagcaacaacaacaagtgcaacaacagattcttcattttttctttgaaaacacagttttgagtaaaaattccatatattgataaaaccaactaatcaccaacacaatcatgcttgaatcaacatttttaaatcataattgaactccaaaaatcaaaagcaatcacaaacaaaaaccacagccacaaattcttaagcatgcaactatcaacatttctcaaaacttcatgaaacttaaaagaaagctaaaggaaacataccaacaacttgtgatcactaaatttgattaaaatcagcttgaaatccaggaaaaatggccagcttcttgctgctcaaagaaggccgaaagagggagagagctagagaggaaaatggttttgcttttcttatctaatttttccaattttgtacaaagtgaaaaataatttcttttccttatttcagccaaaactaagaagtcaaagtcaacaataaatcaattaattgatc

SEQ ID NO: 275582 - DNA, 535 bp, Cannabis indica
agtcgtccgcatggctattgcatgctttggacttgacgagcatgtcatctacataaacctccatattttgtcccaggaggcctttgaacatccggttgaccattctttggtaggtcgctccggcgttcttcagtccgaagggcatgactaggtagtagtatacctccttatcggtcctgaagctagtgcactcttgatctgccgtatgcatctttatttgattatacccggcataggcgtccatgaaggatagtaatttgaatccagaagtggcgcctaccgtctggtcgatcctgggcagcgggaagtagtccttcggacaagctttgtttaggtccgtgaaatctatacaaacccgccaagttctgttcagcttggacaccaggaccagattggctagccattgcggatagtatacgtcgcgcatcatgccgttggtcaaaagcttatccacctctttctccagagcctcgactttcaccgagtcgagtgggcgtcgtttttgctggactggcggcatgtccggattgacgtt

SEQ ID NO: 275583 - DNA, 311 bp, Cannabis indica
taatgccaattaattactaacctaaacctagcagttgtctataaatagaaagtgaaggctcacaccaaatcaagcaattaagcaatcaggaaactgaaattagagccttcccttttctctctatagccgagccctttttctcttctcatgcttttccaatttcgaaataccatagtgaaagagtagtgcccacacacaccaagcagtacctcaatcatagtttggaagattgagaaggatccaaatccaagagaaggacattcagactcagatcttgataatactctggaacagaaaggatacaagggtta

SEQ ID NO: 275584 - DNA, 463 bp, Cannabis indica
accctaaacaccaaacacaacacactcagcctctctctgattcgaaaccctagcagagcaagttctctctgagaacttgctcgattccaaaccctagaaacccagagaacccagaaagtccagatctaaacacacacacacatagcttttaggttagatgaaagaaaaatgaaagataaggagagaaaacaccagaatttgtttcagagttcacccaaatctgggctacgtctctgtcaagctcttctcagagatgaaagcttgatatccactatcacaaggtttgtttacaaacagtggagcttcctgtcacagaaatcgatcaggtaagctcgatttctttctttacagtttatgtttttgttgtttcctttgtgtttgttctcgatttaactctcttcttgtcttctttgtgcatgtactgcttcttcgagcttcttaccatgagatctgggttctcatg

SEQ ID NO: 275585 - DNA, 675 bp, Cannabis indica
tattcaagaataagagaagagtacggacatcatgaactaaaagaccaaaagaggatgacaaagtaatttggctttgcacggcttgaacacaaactaagctatcagtttccaaaatcacttgtccccacgaatgatggtcaatccagcttaaagcttctttaatgccaacaattttagctatttcaggttgcacccgccccacctttcccatcgtgtaagcttctaccaaattaccacttgaatctcgagccacacaaccaaaaccaaaccgaccttctcgctcaaacaaagcaccatcaacattaactttgatcttatttatagcaggtgcagtccaacgctcaagcacacagtccccatcaatcaacggaaacaaagaaagaccctttcttttttgagcgaatttgtattgatcaagcaaagttcttgctgaagcaaccacacttgcagcagtacggctcctttgttgccaaacaaagtcattacgggcacgccaaattgaccagctaacaaccgcagcttcctccatctcttcctgcctaccacggctaaacaaaaccagcagccaattgcagattgtgtcgtttaaagtgctgcccacgtccaccatagttctatgctaacacgcacgagcaaaatcacacccctccaaagcatggtagatcgtttcatctg

SEQ ID NO: 275586 - DNA, 835 bp, Cannabis indica
gttgaaagccctcctcatcgagtataatttttttgttgactcccctgttatccttcttcactatccattctttcttaggctgaatcgtcttcttacattcggctgtcacatgtcccatgccatggcattgttgacataaggttggcttccattcatactgtacaataacagtagtggtgcttccatactcattcacaaattcaatcaagcctggaagttcttgctcaatactaacctctatcaacacccttggaaacataagcctttctcgttcccttgtaatcgcatccaccataataggtttccccaattgcccaactattttgaacaaagacttctccccccaatatttgaggtctaagtcctctaattgtatccaaattggcaccattttcacatcttctttcttaatactagcattcgggtcccatggtttcataatgaccggttttcgattgaagaaaatataacccccattcaaaacttcatctctttgtccaaccgaatgaaatctaatcaagaacactccataggctagcaattttactttatccacattgtcattccatttacgttttgcaaagccttctaatacatgtaaaggtggattggctccaagaacataacacaccaatgaaggtttccagtaattaacctcatcttctatatcctctaattcaatcttcaccatcctatcttgctgtgaatttttaaaagagttttctaaattcctcacaacagttgcagatctcagaataggaggagtagagttcatacctttggctaggttactgttgcattgctccgtagctctgagaaagctcacgaagtcgcg

SEQ ID NO: 275587 - DNA, 772 bp, Cannabis indica
atgaatagacgatttataatgatcctcaaaatcgtacaaccgctagaatcgaaagatgcattttttccaagaaaggattttagcgaaaatggcctctgtaattattaaaaagctctttttactaaaaaagaactttttaaggggaaattgttatacccaaaattcggttgccacctcaatgaaggacatatgtcagggtaaagggaatgtgaatcggtgcaattactttttatggaataactcattaattacgtaagtatcaaattacatttataacgtgctgactgtaaggtcataggcgaggaatcaatgtataaattgacacttagtatattagcaagaaatcatatcattgaatgcgaatagtgagacatcaaggacaaaacacattggaaggtgaaagtgacatatatcaattgagaaagcccttagagtaaaaactaagtgcgacagtcgtctcggttcaaaaccaagtaagcgaggtgcccgtctccctatgggaagacttcctatggcttcatccagttagcattaacaaggcctacaatcctggcaagccataaaataacattcaaatgagcctcaaagaactctttaagaaccatgatcgacatcagacatgcatcgtcgaccgtgggagaaaaaatggctccagctcgctatttgagacattgaaaccagattctgtcaagcatgtccagaaacataatgaaagacgtgatctcaaacacgatcattttgacctagtaaaagtgagaaaatcacagctata

SEQ ID NO: 275588 - DNA, 660 bp, Cannabis indica
tatgcatgtttaagtaggtttgggctgaattgaatgcatgttggtgttgtttaatcaagtttgagtttggaactcaaagcttgaagctttaatggtgattttggtttgtttgcatgaagcttggtttttatgctttagaattgttccttagggtctaaatagcaggtctggaaggttttgtttgaattggtttggatttgagcaagttatgaatttttggttgaattctgcgaggaaccggaattccggttgtgcatccggaattccggatggggttctgaaatttcccagaaccggaattccggttgggcaaccggtctgccggttgggtgattttcagaaaccctagattttctcgtttttatgttatttggggtattgccatgctttttatcgatagggaaacttttagttcctagtttaagtccccgggaagtgatttagcgtatcacttatagtgttgtgattgttatggtttaggagcctgtaaaccgccgcgcagttcgttccagtcaggttgaccggcacacctgaattcggaattgaggtaagattagtataacagtatgcatatatattacatgtttagcgtgcatgttaggaagcctgttagattacattagatatctatgttggcttcgtaccatccgaccatatcac

SEQ ID NO: 275589 - DNA, 1068 bp, Cannabis indica
taactgtttggagttagctgaaaaggtgatacatcgtatcgcctgagaatagctgcgatgaaaggatggaaggggaccgataccccacatcggagaatgggtattgagactaccacatcctctgtgggaataatcgcagggttggtaaacggaagatgcgccctctgggacggtttaggtcgctgaaacgcaagtcgcagcaaatttaacctcacaaaggtagtgaaatctgatttggaaaccctcgaaatcagatcttcacacgcgaagggctcattcagctgagtatcgtcaaccgagtctgtcccgctcccttccgcctcctcttcatcctcgcctgactcgcgaactggggtcgtccagtcatcatccatctcctcgacctcgacgtcaggagcatgcctcgagtgtataaggtagtcgcgggccgacaccgtggactcgctgtctcgaatgtcgatggtcccaggttcggcgagttcctgcaccatcctttcgatgtctgcagaagacatcgggcctagctctattggtgcggcctcctcttctgaaatcgaggttgggagaaagctgtcctcctcctggtcaacttcaccatcgaatgcacggcctccagagccgagctgttggctatccgacaagtcgctcatctgaaagatagaagatcttttcagcgtgatggatgtgtgaaaagcaaaataagtgatctcacccgcattaaactataaagtcgcacttgatagaatggtcagcatccttgcgaatactgaccgccccatcaatatgcgagcagagataatactaaaaacgcgagtaagtcacgcatcctgggccaagcgatatacctccagaaacggctgggagaatcccagtgactcaaggggcatgcgttttcaagcatgaccctgaagttactgggatactcccaccgttccgagactacctatcagccaaggagtacgatcatttgagtatcatcgcatattgcaaatggctgggtgtatctcagtatctcaaggggcatataatcgcatatatgaccattagaatactgagacacacccacca

SEQ ID NO: 275590 - DNA, 862 bp, Cannabis indica
ttatgcgattttatgtcacagtggcaatctttatgcgttttaggcgatatttgtgcgatgtttatgcgataaagtctaattaatctttgtaaatgcagatggctccagaacttattctcccattgtcagagcactttccagggcgtataacatacagagggaacggatattttgcatcaatcaaggctaaatttgaagcttttaacttgactcagaaggtgaaggagacgccctttggtgttttttggaatgccagcgatttgaaattcagtggggttattgtgcatcaactgttactaaggaagaagaaagtgagtgaagccaaaaacgatgaagtgtggttttacgtgggtaaaaccgaagctagatttgggcgctctgagttcggtttgatcacaggcttaaagatgagcggtggtccttcgtcagaagaattgactgcacaatgtgattctgatcggatcttgcgagactatctcaacaactcaaaaagggtgacctttaaaaccctttggctagcgtttgaggcatgcgatgtggctgacgatgtatacaagctggggttgtgtgcatttgtcgaaggtgttctgctgtcacgggccgagggtgtgtatatctggacagatatgctaaagttggtagaaaatgaagacaagttcttcgagtatccttggggtcttctttcttatcagaagttgttgtcttccacaactaagaatatgcaacaacttaggcaaaactacatggataagaacgataagaccaagaagaaacacaagaaggagaaaaaggttactcaacctgaagcgaagtacaacgtgtacggatatgctcctgcgctgcaatattgggcatttgaggc

SEQ ID NO: 275591 - DNA, 583 bp, Cannabis indica
acctagtcatccccaaaagccacatagtcgacacgtgagtttccatctgcccaaaataagttagccaatcgattctcctcgtccacctgatatacaacgaagaaatttggatccctctctgcgagacaatcaagaaatcccaacgctccttccgagtccgtctctatcttttcttctcgcttggcaccagcaaccctgttgtagacatctcgaagttgacatggcattctctcgtaacctccactttgcaaagcaacatgagacattatgttggcagttttaattccaactgagttcatcgacctaacttgggcaagcaagccatcggacactactcggtatgatctcaaaaattgtacctcacttgatgaagcgaggtcgtgattgtgtattgtgctgaactctttgcatttccaagtgttagacggttgtgtgagtaaaatacgtaatgctgcctgacatccggttctagtgacatcatgaggtctcttttttctttgtctttccgttattgtgattcttttgtaaccctcggaacaacaaacccacctgcgcattacgatgactccgtgagaacgtcgta

SEQ ID NO: 275592 - DNA, 610 bp, Cannabis indica
tagggaaacttacaaaagtactgcttttttaccaaatgttttcaaaaatactggaacacggcaaactttacatttttactgtccaagcccatttttatttcttttatactgcccaggcccaatatatttacttttatactgtaaatagtaacaaaatacaaacggcacctctccttcgtggttggggacggacaaatcaacaccagaatcatagaaacaccaggaagaaaccataaaatctgacaaagagaaaaaaattactgttttgtagtgttattttactgttgttttaatatgaaaaaatgccacgtaaatgaaatattgtgaaaaatgacaggacatgaaatctataccagttctcataaagagcaattgacaatgggaaaaagaacataattatttcaagagaatgtgacaatgctcgaaaacactactaaaacaacaaaaaaaaaataaagaacataaaaataagcataaaaaactctggaatggtagtattccgatcgggtgtaattggattcccaatcctataaataaaacataagaaaacactactaaaaaaacaaaactaaaacaacacacaaaaaaaaataaaataaagaacataaaa

SEQ ID NO: 275593 - DNA, 521 bp, Cannabis indica
agagagagaagctgaaacaataactggcagctttttatcttgacccaaaaactcatacctcaagtgactaggaagcaccttcaattcaagttctgggggcttttcagtagatggctttagctcttttggaaccgctcccaattcctcaaaatatcttctgttcaaaggcccataggaatcaagccacttcacataccccatgacctcttgtccttcttgctccgtcaattcatcttcagttagacttagttcaagaggatcatctagcagctttttctcactcaccatttcatcaatcaaatcaatgaagaaacagttatcacttgcctttgggtacgtcatagcctttagcacattaaagaccacttcttctccttggactctcagctttaattcacccttctgaacatcgattaaggcttggccagttgccaagaatggtctcccaagaataattgggacattgctatcttcttccatatccaaaacgatgaaatcagctggaaagatgaacttatcaa

SEQ ID NO: 275594 - DNA, 941 bp, Cannabis indica
tgatgggcatcaatgaggacaatttttcgttgtgaaaagtcccattttttcatcagtaatgtctatcaatgaggacagtttacgttggtaaaaagtcgttaggaatagttcatcgacaaaagtattatgaacacgacatttaatgtcattggaaaattttaatatcaataatgacaaagtcgttgttgattaataattttatttatttttttattattttggtaaatcaaagacgacaatgtcacattgattatattatcaatgacgacaatgtcatcattgattatattatctgactgaaccactatattttcttgtgtctttattatttccagatattcttttatttttggtagctcattgttgaatactcgctactctaagttgagtattcacactttcattatctagattatttaatacttgcacgaattttggtattatctaaatttttccgaaaacaggtcgtgtatattagaatcaactatagaatttcaatagtatttttttttaaaaaaaaaatgtgtaatgtttaattgatttaataaatattttattttactaaattattttaaaattgtaaattcttactagtagtcgtgatataattatatcaaaatcagctactttagattattaatgtaaataaataaatgcgagatatttttttaagtagaatatatttatttagttggatatttactgtaaattattaaagttgttgtatcaaaagtaaaaaatttacacaaaaaaaaatgtgacccatgaagatgatcttcgtaattagtaatgtgggaacatttctatcaaaaaaaaaaattggggtgaaatattgatacggggacttggttgcaataaaaaatgtctccaaatatcaaactgataaatcacaccaacggataatagtgtttaggggtgtgtagaaagtcatccgatccaat

SEQ ID NO: 275595 - DNA, 626 bp, Cannabis indica
tccaggtcgtctatgtgccccccagcctttttggatttgacaagcatatcatccacgtacacttccatatttctactgatatggtctttaaacatcttgttgaccaatctttggtatgtagctccggcatttttaagacaaaacggcatgactttgtagcagtagagacccatatctgtccggaaacttgtatgttcttggtctggtggaggcatctttatttgattgtagcccgaataagcctccatgaagcttgatatttcgtgcccggttgttgcatcgacgagctcatcgattcttagaagtggacaacagtctttagggcatgctttgttgaggtctgtgaagtcaatacagactcgccatttcttgttcggcttaggcacgagtacggggttcgcaacccaagccgggtaaaaggcttcaatgatgaagttgttgttgcgcagcttttcaacttcgtctttcagggctactgctcgttctttatccagcaatcttcgtttttgctgaactggccggatgttaggatcgatattcaggacgtgtgaaataatagaaggatcgatcccgaccatatccgcacgtgaccaggcaaaaaacgtctaggtctgctctcagaaatt

SEQ ID NO: 275596 - DNA, 649 bp, Cannabis indica
cattgcattgagccattcctcaaaaatcatggcttccttcacatttttcagtttaaattttgagacaaaacaaagaaagctaattaaatttacataccttctttgggttaccatgctttcttcaagatttccaaaaatgagatctttgggatgattcaatttaactttggtgcttggttccttctagatagaatcagtgatgatgtttggatgagttgagatacgttgttctagttttcctgtatcagttgcagcagcaaattcgtcatttgcgtcattagaattgagttctgctgcaacagaatctacttttactgcttctggtggagtattcataaagctatctatctcggcttctgtagaaaattctgaaaaatctttaaaatcatgaacaaccacattagttgattccaaaacagtttgagttctcatgttgtaaacacgataagctctactgtttaaagaatatccaatgaaaacacccacatcacttttaacatcaaatttaccaatatgctcacgatctctagaaacataacaaacacatccaaatgcatgaaaatgacttacattgggacgcttacctttccaaatttcataggatgtttttgaagtacctggacgaataaacactctgtttattatatag

SEQ ID NO: 275597 - DNA, 394 bp, Cannabis indica
aaaatgacacctaatggccagtcatgaagagggcccatcactagttagatttttggccatttttctcaactatttatctattttttagaaataccactttttgcaatttcaatcatataaataccaaaactatttatttaataattaaattaattatcaaataaaattatcatttataatattgattaattagactcaacaaagtctcttaattaataaataaaccctaaaattctattgctatagattccatatgtataattatcactaccactcaattgaacgaatatgtccttaatctatatgacacgagaagatgttgggttttatgccctaaataaaactccatttcaatgtaatccatattattcaacatcaataaagaaacagaagt

SEQ ID NO: 275598 - DNA, 632 bp, Cannabis indica
gaaattggttcaggcacttacaaggtaaaaaggatggacggaatcatcgtgccaagagcctggaatgccgatcacctcagaaaatattaccaatagctaaaactgtaacttagattttgtttaaagagtttgtaccgtctaaatgtatacagcctccgcatgataaataaaactgagtgccttaaaaacaaagtttctatgccactcaggggggtactaaggtataccacacggacagacaaaaaacaaactaagtaaaatatcctgacccaaagggcaggtcaaaatatcctgacccaaagggcaggtcaaaaaagagtatgcacaaaaaagaaaaatgaaaagcataagtataaacatcctgacccaaaggacaggtccaaaagaaagatatgtgcatcaaaaaagatcatatataaatataaaaatcctagccctaagggcaggtcaaaatatatacaaatggcccggggacaggccttaaatattgtctcccctttaaataaaagaaacagctatgtaaatattgtcttaaatacaagaaaattggctgtaaataaaaaaaaagagagaaaaagagtgaaaacctggtgtaatgggttaaactcgaagcgacctaatcaatgcgagga

SEQ ID NO: 275599 - DNA, 558 bp, Cannabis indica
tgttcatcttctctttcagatcaaaaaatggtgagaactaagaatctagggcacaccaaaaagttggaggaaaccgttgcaacttcttccaatgcacctcctactgcatcagtccctgcctccactccaacaggcccttctactcgaactcgagcccagcaagcctctgctgagaaggaactccgagcttctcaaagtcgtgataaggcagtccctccagccaagaagaaactcaagaccaatcctccctcggtttcttcaagttcaagtttagaagaagaagatccaatggaagtctcttcagacaaatcagtttctcttcattcagagaaagacagtgaggacacagaactcgagccagagcctcctctgtcaaaatctgcttctgcagcaaaggcttctgctgctgccaaaggcaagcagcctatggaagagctttcttctagtaatgttccttcacctctttctcactgccctcgattttattatcgtgataatgaacgtgactggaatttatatgcaacccgtaagtttgaaagtgagaggaactatgatttg

SEQ ID NO: 275600 - DNA, 491 bp, Cannabis indica
aaaatacccctttagtgttaattatgtggttttagtgtggaggggcaaaatggtctttttgccccaatgacttttagtcttttagtgaatttattaattgaaaaataaaggtttatttatgctttatttggctgaaattcattgttatgttaagtggctttagttcattttcacaaaaaattctaagttaaagaaaaaaatagaaattttcaaaagctctcattctctctctcttttcggccaagacttgggctgctagggctgggtgtttctgttcaaatcttgtgattttcatctcctctttgtgtaatccaagtcaaggtttgatcacttgtaacttccctttatgttttcttgagttttaagaaagtttggtgtaatgcatgcatgaatttgtaatattggttctggtgtgattttgtggttgttttctgagatgtaagcatgttgattagagtttaattaagcttcttgtaatgcttgattgttag

SEQ ID NO: 275601 - DNA, 223 bp, Cannabis indica
aggaaaattacacttttcattcagaaaaaactgagcctctctctctctaccttggccgaccactccctctctctcttcttccttaagatttcaaaaaaataatttccaacaatacttagagcacctggtcagataaccatgccgagcaggatgactcgctggcatgtccatgatggaatactcaacgagccgtgcagaatgagcaacacttagcgaattcaac

SEQ ID NO: 275602 - DNA, 745 bp, Cannabis indica
atgtccgggttgacgttgaggacatgggtgatgacgtggggacttatgccagtcatgtcctcctggcaccatgcaaaaacgtcaatggaacccttcagtgtctttattattttttctttctcctccgggtccaggctctttccaactcgtcttcttcagccatttctagctcaatagtttctcggaccattagcacgggtaggtgggtggcaacgttgtagcattgcctcgcctccccttgatttcctctcaccgtccctatcccagcttcttgggttgggaacttcaagcacaagtgtcgtattgatgtgactgcgctaaagtccaccaaggccggtcggccgaggattgcgttgtaggctgtcgagcagtccaccaccacgaacatacagtacttgaaagtgctttggggcgtgtccgggcacaaggtgactggaagcctcactttccccattgggataagtgttgttccattaaaccccgtgagttgagaaccacttggtgagaggtctcggtccgtcaggcctattgcagtaaaggcctctttgaacagcaaattcacggaactcccgttgtcgatcaggactctggccaccactttattggcaatgggggtctctatgaccaacgggtcatggtgaggaaaacgcaccgtcttagcgtcttcttccgtgaatgtgatgggttgatccatcagccggggcctttgagctgggagttgagtaacttcccaaacctcatcgtg

SEQ ID NO: 275603 - DNA, 707 bp, Cannabis indica
aaaggagtacgagcagaggtaccctactcacgacttagaactcgcagcagtagtatttgcgctaaagatttggtggcattacttatatggccagaaatgtgagatatacactgatcataaaagtctgaaatacgtctttacccagagagacctgaacatgagacagagacgctggctagagttagtgaaggattatgattgtgagatcctttatcaccctggtaaggccaacgtggttgtcgatgccttgagtagaaaagggcagagtcagataaatactgtgaaacaaatctcccagcagttagcaaatgaaatgactcgagctaaaattgagttgattatagggcaattagctaatattaccctacaatctactcttttagagcgaatcagagaagcacagttgcaagatccagagttagtgaaatcccgagatagggtttcagctgggaaaactagtgactttacagtggatgaaacgggaatgttacgatttatgaatcgtgtttgtgtgcctatggatgatggtattaaaagagagattatgaatgagtctcatacgactccttactcaattcatccagggtcaacgaagatgtatcaagacctcaaggccatgttctggtggccaagcatgaagaatgacatcgctgagtatgttgctaagtgtcttacctatcagcaagtgaaagctgaacatcagaggc

SEQ ID NO: 275604 - DNA, 225 bp, Cannabis indica
cttttttctttcctttcggcacatctctaaatccatttctcttgttatctctgcttcattacgtttcatttttctttatttgtaactgtaatttacgaggacattagtgtaaatgtgttagttttctcaacatatcctactcaccaccttttcactcggagtcatattattccgctgcacctaatgtaaggtgtcctaaactttatacgtgtttattttatcgtt

SEQ ID NO: 275605 - DNA, 610 bp, Cannabis indica
agaagtacggttctagggatcactccaaacactataaataccccccaaacacatttagacgggggtcgagaattctgggttccataagaatcaaagagagaaaaactaccaagaacattctctgtaataaatattctcattaatacaaaagactcgtagactaaggctcattaatgcccgaaccacgtaaaaatctcatgcattaaacttcctacagctttcttatacatattattaaatcagttgccgaaaatctcagtcaacattttggtgctttcattgagagctgaaggaagcgtctgcaaatagacaacagccttataagctaaaacaacaatggtggagactcgcaacacacgtcagccccgtcctcctcaagacgcccaagatcttaaagatgaggaagtgggctcaagagttaacgtgggctctgaggtaggacaaggaaccaacaacgaagaatacgaaggaaacttcgacgagtacgatgcctatgacgaaggtagttacacagaactagtactcttgagacaaaaggctgttgatcatgaagttgaaatcacagcccaaaaagagcaaaacaaaaggatgcaagaggtgatgctcgcca

SEQ ID NO: 275606 - DNA, 506 bp, Cannabis indica
aaatataattattttatcttatttttttttaaatcaaaggtccgatattaaattccttttataaaatattctattttaagtaatttgaccttatttagatttaaaataagattactataatcatggtattttaaatagaaataagatatttttgctaacttttcaattttattatttttacttaaattaaattataaaatcagaaaagggtattgttgcccccgattttgcctaaaatacgtggaccaaccggatgatgacacgtagatgaaaagggtttagagtgtaaataattcagctaagtcttcttaggcgcagggatcaaccttagacctgcctcccggagaaggcatgtcaatatcacatactcccggagagcaaagctacaataaagcatctccggaaggtgtcagatcctatctgaacagtcatctcgcatttaataccgcatgggaggaggcgtattgaaactgccatacgtcttaaagtccgacgacacaaccccc

SEQ ID NO: 275607 - DNA, 664 bp, Cannabis indica
atgcagttcaacgatcttttatatctattgaactctggattatattcataactccacatgatctctatatcactaagggatggaccatgatctctatatcccttaggggtggatcatgatctctatatacttaggggtggactatactattgaaatatgtagttcattttgaactctagactatactcaatacaccacattactctatggcacacatattttaattaaacatggatgtaatataatgaattagcaaattatcagaatatattcttgatcttaatttatgttccaattaatatttactgttgtaatagaaattgataccaataaagttcgttgacattgtatcacagtaccttatttgagtaagagaatttaaaattcttaacccatcttcatttggttgacacttgtgataggaactttagaacactactgagaaagtaaatctaaccattcatatggatagaaataacttatcaagattatgagaataagatagtagaattcttgcatagtctattcgaatgacttgggcaaaaattcctaatcctcataaagttttatggtatctctaatgattacttaatcttaagcaagtattttacattaatgttaatactagatttctatgttgttgacttagtctagaaaggaactt

SEQ ID NO: 275608 - DNA, 565 bp, Cannabis indica
gttgggtcttgcaggatgaaatcgaggagctaatccggagagggaaattcgacaagtacaagaagagcgaggaaagtcgtccccaagcggatgacaaaggagaaaaccagaatgcgagtggctccagaacacctcgcaatatcctgactataattggaggacctcacatcgcaggggactctcgcaaatcacaagaacgatatgccagagaagccaaggagaagccgcttaccaatgtgaataatcttggtgagcggcccgagaagctctttaagaaagaatgcgacgacatcacctttatggagagtgatgcgagatgggtccatcacccgcattctgatgcactggtgatagtcgccaatattggtggggacaatgtccatcgcatactggttgacaatgggagttcagtgaatctgctgaatttccaagccttcaaacaaatggggttgcaggagaaggatttgcgacctatgacatcgagcatttatggtttttcgggagatgtcatagcaataaaaggaatgatcaaactcccaatcactttgggaactgccccagtgac

SEQ ID NO: 275609 - DNA, 366 bp, Cannabis indica
ccaatttgtttatatatatatatatttaaatcaatatatttattaaaggaaagaactatcaaaatataataatttagaagaataattataaaaaatattcaatccaagaaaatatagattaataatattaagaaggagagaaaattatatttctattttgtccattaaaattgtaaaaaagaaatatagctgtacaaagaaaaaattttaaaaaaaaaccttaagtatatattttttaaaattctactacatttattactaatttatttgtgcattttataatctaaaaataccacaaaatataaaaaaaaattacaatcttattaaatagatatatatcgccccaatttacatagcatcataatt

SEQ ID NO: 275610 - DNA, 792 bp, Cannabis indica
caaatgaacttgtttttgtaggaatcaacaagaaagagccaaagcttatggttcttggatagtggatgttcaaagcatatgaccggtgatccatcaagattttcaagctttaaaagcaaggaaagtggctttgtcacttttggagacaattcaaaaggaaaaatcttggtcattggtgatatcgatgatgatgttgtaggtttgggagatgaggttcaaaatctcaaaattggagagacttccaatgctccttcacaaactcccaaagaggaaccacccgtggaaaaggtaaatgaaagccaaggtatgaactctaaccttccacatgagtggaaattcaaaaagtgctcatcctatagaccaaattctaggtgatccttctcaaggtgtcactactagaaactcccttagaaacttgtgtaatttcattgcttttatttctcaaattgattcaaagaattttaaagaggccgaagtttatgaattttggcttctagctatgcaagaagaaataaatcaatttataagaaataatgtttgggagttagttccaagaccgtcacatcaatcggttattggaacaaaatgggtctatagaaataaggtagatgagcatggggtcattgtgtgtaacaaggctagattagtggcccaaggttacaatcaagaagaaggaattgattatgaggaaacctttgccccggtagcaagacttgagtccattagaatgttgttagcttttgcatgccacagaattttatcttgtaccaaatggatgtaaaaagcgcattc

SEQ ID NO: 275611 - DNA, 535 bp, Cannabis indica
acctagagtgaaaagcaagcacactcaagatgaataaaatcaaattttggctcaaagtgtgtgaaaagtgtttgttggatttcaaacttggaagctcattaatctcacttagataggttagatatttgaaataaatgctcaaccaacttattttttgaaagaaaaatcgagtttatatagtgtttaagagaaaagtagccgtttatagccgttagcacgtttcccgaggtgaggtcagccgtgaaccggaattccggatgggaactggaattccggattgatgacaaccagaatttcggatggctgaccagaggcaaaaagccatttttcgggacttaaacgcgcataatagggctgaacatcgggcgggtttatcgggtttcgggttggcgggtttcggattcacgggtttcgggttcgaaaaattgaaaccgaacccggacccgaatagggcacgggttggcgggttggcgggttggcgggtcacgggttggcgggtttcggttggttgggtttagcgggttggcgggttgac

SEQ ID NO: 275612 - DNA, 522 bp, Cannabis indica
ttggaattttttggaagggattttgacaccacctatggcgtcggttttttggaaataaccgacgccatagggtgtcccccctatggcgtcggttatttctaaaaaaacgacgcctaaagggtttataaccctagcccagcccatcatcttcctcattcgaccagccaacccagaaacccccaaaccagagaaccccaaaccctctccgccaaccaccacgaaaaaccacccccatttcaccattttttcaccattttagctcatttttgtttctaaatcttctatttttcatacctaaaactatatacctgaaaagatcacatttttcctcattttttagggtaaaccgaaggtagaggtagtggtggtggtggttatacctccggccaccgtttttagtggagaaaacattgtatttcaacgtctattaaggtataaatctaatttctactaattttagtaatgtacattgctttattttttattttataaattttttagggtttttctatattattaaat

SEQ ID NO: 275613 - DNA, 581 bp, Cannabis indica
tgagatattttatttttacaaagctaaccatgcaggaattttggctgaattcaaaaaacaattaggggagttaattgataatggttacattagacatagtacttctccatggggagctccagtcttgtttgccaagaaagcttatgggactttgcgactttgtgtcgactatagaaagctgaatcaaatgacaattaaaaacaaatatcctctaccgaggattgatgaattatttgatcaacttggtggttcaaagttcttttcaaagattgatttgaggtcaggctaccatcaattgaggattagggaagaagatatccctaagactgctttctggacatgttatggacactttgagtttttggtaatgccatttgggttaacgaatgcagctctgcatttatggatcttatgaatagagtctttagatctttcttgaataagtttgtggtggtattcattgatgatatcttggtgtattctaagacacgtgaggatcatgttgaacacttgacaatagtattacagacattgagagatcatccattatacgctaagaaagagaagtgtgaattttggat

SEQ ID NO: 275614 - DNA, 781 bp, Cannabis indica
ttgttcattaatggcaacttgagtttcaatggtttgttctgtgattttttggctggaatatattgtgtatacccttattaggtactctggaaggtttcattgcatttggtggagagttgagcaaggaatgagaggctttgggaactctggtgcaaaccggctagccggtttgcagagccacaaaaaccggctagccagttttggcagggttccccgggcctttcattttctcaatttttgtctttgcggtgccttggttgggtgtttccccatttccagagttagaataacctatagaaagtataacagaacctagggttgaggttttgggtttctcgggattagggttttaatcatgtaacttacccgattttaaaatgtgattagggcatccatctagcacgagactttccgttcaggtcggctagcacacttgaattcgaaaataaggtaagaactgaatataatgtgtgatatgattatctgaatgtatgtatatgttatgtgtatatgcatgcttaagttgttaaatgcactaccaacacttgtacggttatggtacagagcgcgttggtatagtaaaaattatttgtgagtatagtacagtgatcctaacataggttcgggaaagtactaaggtgtgtggtatatcactcagtggtactcagggtacgaaacaaatcttacaaacactcgtacagtgaggtacgttgtgtatgttctatagtggttgtaccctagtattgaacgttcatgcacatctgttaagtcttgtaaatag

SEQ ID NO: 275615 - DNA, 768 bp, Cannabis indica
aaaaaatgtagtctaattttttttatatttaagtacgttatagctatttaagatatcctacaaaagtttaagaaattcagaataatttacaatatagaaaataatgttcaaatagtctattttacacgcgagtaaaataaaataatcacgcgcgcaacacactgtttcaacgcaattttcagcatgttaaacttttttcgaattttttcaaaatttgcaggatgtacttaaataagtataatttacatgaccatgaagaaaaaaattgactaaaaaattatttcgggatactaaaacaaatagagatgtatcagtacatcccttttaagggagtgcgttatagaatttctcaaaagtatataatagccgaacaacaattaatattttagggtgattctacaatgtacccacataaaagagatgtactgatgcaccctctacttgtttcggtatctaaaaaaattttagtttaattttttttcattgtacgttatagctatttaagttatcctacaaaattttaagaaattcggaataatttgaaatatagaaaataatgttcaaatagtctattttacatgcgtataaaataaaatagtcacgcatgcaacatactgcttgaacacaatttttggcatgtttaactcttctgaattttttaacattttacagaatgtcttaaataagtataatttacatgactatgagaaaaaaaattgaacttttcggatactaaaatagatagagatgtatcagtatatccctttt

SEQ ID NO: 275616 - DNA, 578 bp, Cannabis indica
ttgtactatcatgttcccaagctatacgtgtgacccgaaccaaatagtaggctttgactaacaactttaagaacacaaataacactcttgaaatcgaacctaaccatgtcaggattatgatcttttgatctgagatcaaccagtgatattgacttacaatgatacaacggtaacattataatatatttaccaagatcaatatcagtcacaatccaatgtataatccatacatctgatactagcatactttgtcaatattctggaaagaacataacacttatccaaggtgtaaataagctttattgctgactatcacatcactgtaaatccagtgcactgatgaatcatgggacattatcttttgaagcatataatcacaattaccttccactgtgttgacatcattgtaattgtgaataactatatcttctggacttaacataaattgtatactttaaaccataaacatgaaaactacatgtaaccataaatgatttctaatctcctattgataacaaatcagattatattgaaatagattttatttagggcataaaatcccaacatgacaatgataa

SEQ ID NO: 275617 - DNA, 706 bp, Cannabis indica
ttcgtatcagcacggtggcttaccgactacgatcttcaatctctgcatggtgagcccttaatgcctccatctccttatctctcaatttagcaaacatacccctttagttcgtcaaacgcgaaatttactgcagcacgcagttcgtcctgatcatgatgcagagtgttgttatgaccatggatgagttcgagcgcgacacagagattttctaatgctctcgggtcgtctgggcgttggttccaagcggaacagtcgtattacgaatgccctcgttgggtgcggaactgttattcccagtctcttggacaccaggcgcaattccagtaataggaactgtttcaccattcaccacgctttccttctatccgagattaacaacaagcggaacccttgaactccctgggttctgtgatgtaggatccagcgtctgtgaattagccaacgacaatgagtctattttataagcaataaacgatatgtagtaacagatatatgataaagcaataataagacacaagaattttatagaggttcagccccgaccagttcggtaatagcctaatcctcgttatttatattgacttaagatcagggaagaagattgttggaaattattttaccaggatcttaaatctactcacaaatatgttgattaacaccctaaatatgaactttctaaaacgatgaaataaaaacatataaagtt

SEQ ID NO: 275618 - DNA, 532 bp, Cannabis indica
tgtaaatatttttttgggatcccaactattttgaaaagtttaaatatattacaagtttatttttcagtctgtttaatataaaagtttaaattctgcgctatttaaattagtaatcccgattagttagggtttcataagcatttttttgggtagcgtgcctaattatttagggcgttacacttgcaaagttataagttgcagatcctgaaataatggcagcatctacattaatcttcaaggtggtttcagctggtttggcccaagttttagcaccatcgacatcagtaaggaatgcagtcgtaggattaaatgttgaatcttgagcccgagtccaatctgcaagtaaagcttgagctaagtgagcaatactcgcaacagtaggggacttatcagaccatactagctcatttcgatattttcaaattgcccaacatgtcattgcgatcaacctcattttctctccatctgcctgctgtagaaccgtagcaaaccagttggcaaaagaccaactgccgtcaaattaacactagca

SEQ ID NO: 275619 - DNA, 523 bp, Cannabis indica
gcatagcagaacctagggttttggttttgggtttcccgggattagggttttaatcatgtgacttacccggtttcaaaatgtgattagggcatccatctagcacgagatttccgttcaggtcggccagcacacttgaattcggaaaacaggtaagaactgaatataatatgtgatgtgattatctgaatgtatgtatatgtgtttgtatatgcatgcttaaattatgatttgcactaccaacacttgtatgaatatgttacagagtgcattggtatagtgagtattgttgttgtgagtacgatacagtgataccaacacgggtacgggaaagtgctaaggtgtgtggtatatcactcagtggtactcagggtacggagtaaaccctaccaacactcgtacagtgaggtacgttgtgtatgtggtatagtggttgtaccctagtattgaacgttcatactcatctgttaagctctgtaaataggtgtatgggcgcctatttacaggtcggaaattatatgatatg

SEQ ID NO: 275620 - DNA, 522 bp, Cannabis indica
aagtacaataggttcctcatactcacaagtataccaattcttagaacaaatcaaagcctccaccatcctcgaaaataaagaattcctaaatgcatctaggattcttccacctgtagaaaaggctgattcagatgttactgtagacatttgaacaaccaagacttcctttgccatacgagcaacaactggatatttgaatccattctgcttccaccattggagaatatcaaatataggatcaagcttctcacgacgatcattcaagtagtattcgagatcatcttcttcaatgtcgtcactaagttgtagctgcccaagaagaaatgattctgtagttgcactaataacaggctcagatggttgagattgagatacctgagattaagattgagatggttgagcttgggattgttgagcttcaaatggctgagttgtttgttgttgtttataaaacacatataactgtgccaatttatcggtgaccaactttatcattttttcagcctcacttggattgtacac

SEQ ID NO: 275621 - DNA, 531 bp, Cannabis indica
tttagatgtttttcctaaagaacttctgggtttaccacctaagcgggaaattaattttataattgatttggcacctggagcagaaccagtttctaagtctccatatagaatggctccagctgagcttaaggaattgaaaattcaactccaggggttactttacatagggtttattcggcctagtgtgtcaccctggggagctccagtattgtttgtcaagaagaaagatgggtctctgagaatgtgcatcgactattggtagttgaataagctaacagtcaagaataaatatcctttacctaggatcgatgatctttttgatcaacttcatgggtagacggtcttttcaaagattgatcttcgatcgggctatcatcatttgagaatctgagaggacgacattccaaagacggctttccgtactaggtatggacattatgaatttctggttatgtcgtttggactaaccaatgctcctgcgacattcatggacgtgatgaatagggtattcaaggatttcctcgatatctg

SEQ ID NO: 275622 - DNA, 694 bp, Cannabis indica
actgggttttgaggagtataagaaacttagggaaatttgttagtttttcaaaaataagtgtgtttagtttagattgtgtgatgtatttaattaatacaatcaaatgctcttttaattgataataagagaaatcattacatcttgattatccattgtgtgtagattcatcttcttggtcttagaacttgtcacaacacaatcaaaagtaaaaaaaaaaaggaaagcaagaggggcctttagaagatttccctcttcgctcgcacataaattgtttcatattataaaccaatgaaccaaattatgtgagtacttaatcataaatcctaccatagtcttcaattaaattttggcacattactttttcactcttaaatttcaatactatactttttagtgtcgagccaattatacttgtttttagattctaaaaagactatttttgagttttttaatttaaatgtcctaatctaaggaacaataatcaataataaattttaattaccttaaaccttgaagaaaaaaaaaagtgagagagtacatttttgaattttagattttgaagttgtccttaacttattataatttgaaaaagaaaaaaaaattgaattttgaatgtactataataaaaatattcaagtccttaaacaaaaattgagtatcttaaatggagaatgacttaaaatcataaaaaatg

SEQ ID NO: 275623 - DNA, 704 bp, Cannabis indica
atctcaaaattggccaaaactagggttctggaaattcccccaacaggcagaccgattcccaactggcaatccggttctgggtcaccaaccggtcgactggttggtactggtctcccaaaaccggaattccggttctgctgctgggaagcaaaaatcatcccccttaattcaaattaagcccaaaccttaccaaactctccagtatacctataaaatgcatacacaatagaatccaagcagtatttcacagaacaaactaataaatccaattatgccattaaagctcaaagcttgagtttcaaaactcaagcttgcttagaaccaatatccatcatcaaaaccagaagctagggacttaaatcaagtcaaaataactctagaattcgaaccctaaacattttaaaacctaacagccacttattctcaaaatcacaagttcaaactaagtaaaaagctcaataatacataaacaagagttctagggcttacctcagatgaaacctccttgaatcctagcttaaattcaaagaaatggaaggaaaagattctggttttggtccttgatttgtctcagccgaaagaaagagagagagtgttcaagaggaaaggtatttcttcaaatttcttttcttttctttgactttctaaattggaaaaagtattgattaatcctttgctgaaaataaaggccacttgtcacctcc

SEQ ID NO: 275624 - DNA, 858 bp, Cannabis indica
gaatgttaaccgaacctcggattgcttgaacaacaccaaagaatccgtctcaacttcaacccgaccccattggtgtctctttatccaactcagagcctccttaaccccacaacttcagctatggccgggtccacgaacccctccaagaggaccgtgaaggcttcaatgaaccgaccatcatggtctcgagccacgccagccgctccaaactttccgtcatttgcaaagattgcgccatcaacatttaccttaatctttcccataaccggtttcacccaatgctccaagtctatgttcgaacccgaaggaacaaataaagaccccaatctcctttgttgagcatttctccattgattaaggactactcttgccaatagaataacctccgccgctgacaatgatttctcccgccaaactagctcatttcgggcatgccaaattgcccaaatcaccattaataattcctcctgtgccatagtagagtgctgaagtatcatctgactaaaccaatcccaaaatgatgtccaagacaccgagaccatatttaaactcgacctctgccaacatgatcttgcaaagggacatagaaccaataaatggatgatcgtctcagtcgcttggtgacacatgggacatatttgatccagagggatgtgcttggtattaagttgaactttagtagccaaacagcctgtcaaagcacgccacataagttggtgaactttcggagggacttgaagcttccaagcgatcttccaaattttcatctcaaagtcactagtgttagtgacatcagcctgatgtagcaagcgataggcctcccttacagtgtaaacaccatgcagatccaaagaccaa

SEQ ID NO: 275625 - DNA, 733 bp, Cannabis indica
cagcaatccagactgcggaataaacagctttgccagcaaaatggaaacccatctgcccagcataaaaccagatgtagatgagcacatgaatattgaataggtattgaaaaccgagactttaatatcctattaatctcactaacaaaatagtaaatttatccttagcaaaattaatatacatatcagatgttgtgggatactaacacaagggtgaaatgtattagcttaagaccatgtttggaaagaaaataaattgcctggataacatgaatgttagtatagaaactgcatggaacttgtatggtactacttgacttgaaacttgtagtttgtacattaaatgcataagtaatgcatcaaatcaatgaatgcaaaaaattataccatgacacaagataacatttttacagcaaagtaaattaatgatattaaacatgagtataggattacacagtagcaccagacatacatttcttgtatcactggactcattagtctccataaagaacttctgtgcttgttgaataacactgcatgaaaagggtaatatttgtcaccacgaataagaactcagaaaatgtcacaactggtttgaagggtggaagtagtatgatttatgaagatagacattagcataacaaaatgcattagacatgactgataggtccaacagaattcctcaaaaaaaaaaagaaaatagaagaaagaaagaaagaaaaaaagaagaagaaga

SEQ ID NO: 275626 - DNA, 1045 bp, Cannabis indica
atgcttaatacgaacagatacagaaaatgtaaacagttttgtcatagtacttttagatcggattataattaaactttattttgacaaaaaatcaattcagggtcctatttgtactattttagaaaatacagggtctattttgtcatttaacaaaacacaaggtccaattgataacttttgtaaaatagagagttcaaaatggtatttaccctaaaaaaaaagaccaaattgtccaccatgcatggatttatatgtttttcaactaaagcggccacttgtcgaagattctcctacaaaattaaggggtaagttgaaaaataccccttttattaatctatgaatcaagtttacctctaattttatatttatttggaacatacctctttttatatatattgtacccaaaatatcctaacataagagagtcacatggagagtatcttgaagtgataggggcaaaattggtacaatatttaaaaaaagaggtaaaaatgatagattttaaaaaaagaaggtaaaaataaaagaggacaatataaaaagggtatagagtataatttcctcctaaattaaagggttaaaataggttattgaatatcttgtttggttgtagttgtcttctaatagcccaattattacacattggtgtttggctttataataactcttgtgtgtgtgcatcgatttcttagaactatttataacctttgaacatagagaaaatagtatggaatgaaattagataaaaaattttaaaatctaacaattgtaatagttcaagaaaaaatttgaaacggtcaaaaaaattcaatgggcataatttagtacaaaaggagcaaaaatcttaattagccttaattatattgagaaaattacactctatactctttttatattgtcctcttttatttttaccctcttttttaaagtctatcatttttacctctttttttaaatattgtaccaattttacccctgtcacttcaagatactctccatgtgactctcttatgttagggtattttgggtacaatacatataaaaa

SEQ ID NO: 275627 - DNA, 631 bp, Cannabis indica
gcaaccaagacttaaaggtaacccccggtcataagataagtgaccaagaggtaaacctacatagtcacttggggggcaaccacacccatatatggactagtaagcaaaaatgcaccctcgcttaagtagatattaaaatttttagagtgtcggtgcaatactcaatgttttgagcaacttgtgtgtggtgaatggttgactataaatatatacccacgctaaacaaaagtcaacatttaaaaccatatataaagataaaggccccgatggccaagtaaaaagattaaagacacaaatgtctcaaaagtaaagttacgggattaaagactgcccggacagtcatgaatctctgaagagtactagtgggcataaaatctgtaaaagtaaaaatacatcaataggaaccatcaagtaagtcattgaggggacagtcatctgttgcctcaaccccaaagttgaggtatgaatcggcctgaatgcaagctgtctgcgccttctccctggtttctgcctcctcacgattgcgacaataagatagcatactttccatgttcttacccagataattaaagtcagctttctgttttagccagaatttgaagaaaacatcggtggagaggtctccgatctg

SEQ ID NO: 275628 - DNA, 605 bp, Cannabis indica
caaaccttcctaaaacttccaggatacctatacaatgcataaacaacaatttccaaccaaaatttcacagaacaaaccatcaacactcaagttgccattaaagttcaaagctttgaactcaaagctcaaagttgcacaaaactcaaaccaatcaacaataccagctgctaggaactaaaattaactcaaataacctttaaaattcgaaccctaagcataagcaaacctaacagcccctgaaactcaatttcacatactcaacctaaacttaaattcaagaactagggcaaggagttgctagagcttaccttggcttgacttcttcttgaatcccttgctgcaaacaccaaaaatccacaacaaaatcccctggttttggctgcttcgaagagcgagagagaggatggaaagagttgttcttcaatttttggtcttttttttttttaatttcactaaatgaagtaaaaggtagggaaaatcaatttcctttgctgagaaatcagcttgctaggtgtcacctactcatggcagccacctattccactaattaaccaaatgtctaaaatgctcttaacccaaaaactaaggtttttctaaagctaggg

SEQ ID NO: 275629 - DNA, 484 bp, Cannabis indica
cggacaagggaaaaaacatttctaagtagggaacttcccaaggcggggatgaagatgcggatcctcgacttgaggacccaaacagcaatgttagacctgtgaaagaactagaagagatcgagatcgatccagatattccgggcaacaagctaaaaattggaaaaggtttgttgctcgaagtaaaatcagcattgattaaatttttgagagcagacctggacatttttgcttggtcacatgaggatatggtcggaattgatccttctgtaatttcgcacgtcctaaatattgatcccaacttctgaccagttcaacaaaagcgaaggctattggacaaagagcgagcgctagcccttaaagaagaggtagagaagctacgaaataacaacttcataattgaagcttttacctggcttgggttgctaatcccctactagtacctaagccgaacaagaaatggcgagtttgtattgatttcacagac

SEQ ID NO: 275630 - DNA, 620 bp, Cannabis indica
aaccattttaactgacattttgcagagccatcaagcgatttctaacctaaaagttagccatatttttcttgcacccactaccaatgaacaaacaaatccataataaatttcatataacatctttccttctagcataaatggttcgacacatccaatcttgtaaatttacacataaaccaacccaaatcatctacaaatagaattacccatttgaaatccatcagaaacaaaaagaagaaagtggagatctatgcataccgttcaacgaggatgttgccctcagaattggcaaacaagactgccagaatcataattttcttcacctctagggaatagggacttgtgtatggaggtcgatcagagtcacagagttgtggcgctcgttgcgattattgatcccaaatccaaatcaaatacttttacatttttaacatgtttgtttcaccatccaattgaataataattattgaatagttctaacttatattggtctagtctaattactaaaaactattagtagaatttgtaattttttttaccctaatgactaaggctaattggacgttttcccattaaagataggaaatttgattttctatacttagaaaatcaaaaaattt

SEQ ID NO: 275631 - DNA, 156 bp, Cannabis indica
aatgaatggtatgctctggggaaaacttactctaactcgaaactggttcgaaaggtgcttggtgtccttcccagaagattcatgtccaaagttacctcaatcgaagaaatgagaaacattgaggaactcgatcttgacgaactcattggatctttg

SEQ ID NO: 275632 - DNA, 614 bp, Cannabis indica
tttaggtcccaggtcccatttctgagtttgggttcgagattatgactagggtgcgtttctatgtcccgaccctggttctatgtccctagtctggttccatgttcgggtctgagttcaggttcaggttcgggtcccgagtacaggtttgggtttggattggggtccgtctcccaatttgggtataggatttggagtccgggtcctggtccagttacagttctggatctatgtccaagtcctagttccagtcccagtcaacttccggttttggttccaattttgggtcacagggtacgggtttgggtctacttttgggttttggacaaggttcaggtccgggtgtgggtttgggtccttgttagtgttcgggtccaggggcgggtcccaaatccagacaccgactaggggttttgtccaagccctgggtctagatccggatccatatctcgggtcggagtctggttctacttctggtgtcgggtcttgaactgggtcctcggttcaagttcgggtatggatcgggtattaggtgtcggtctagttctatttccctggtccatatcctgatgttgggtccaagtcctatttattgtgttcgtttgggtcccggtcta

SEQ ID NO: 275633 - DNA, 687 bp, Cannabis indica
aattcaaaaagggaatgggggtcccctaaccgctggaaagaggccccctccggacacttggcaaaaaagaaagcctcacaaggttttccttgacaagagtcgggtgcaagaatcccacagatagtgacattacaagaaagtaaggagagaaaaggaagaaaagggtaaaatcgagaagacgaagtctactctaaacccttaagtgtcattacgtgggacgaagatgggtcctcgaccaaaatatggtgaaaagaagtattctaaacgcaaaagaggaggaatctaacgcgttgtgcagaaactcaaacaaaaattcccagaaattcaacatccaacccagaaaaaatcaatgaacagtaaaacatgctatatgaacaaacagtctagtgtacaagatacgaggaacttacatgaagtgtggaaactgggtgttggtgttgatcgccggtaaaaggtcgactggcaacggcgaaggaacaaaagcaggaaatctatggtgtttgaggtttcttttctctctggaaaactcgaggaaatttggtgaaatgctgaaagtaaccaaatgaagtaagaaggttggcttttataggccagagcatgtgtgagacagctgtgatcagccaccatcgaacggctgggatagcaatcgattcaaattccatacatccaacggttggattaagtcgt

SEQ ID NO: 275634 - DNA, 589 bp, Cannabis indica
ttggggggtaaatgttgcccctagttttgtccaaaatacgtggaccaaccggacgatgacacgtaggtggaaagggtttagcgtttaaataattcagctaagtcttcttaagcgcagggatcaaccttatacatgcctcccggagaaggcatgtcaatctcacatactcccggagagcaagactgcaacaaagcatctccgggaggtgtcagatcctatgtgaacagtcatctcacatttaatgccgcatgggaggaggcgtattgaaactgcgatatgtcttaaagtctgacggcataacccccactctgtagctactaagctaagattagtgagcctattgacagctactttatgaagactcacatcaattaaaaaagataaaagactacatccataaaacccctacaaagcctagggattagaccgtgcatttcctatgatatatttattgggaatgtgtggctttactgatagataaagaaagacatgtacctcaattctaggtatcaccccacaaaaacactataaataccccccaaactcattaaagcgggggtcgagaattctgggtttcataagaactaga

SEQ ID NO: 275635 - DNA, 551 bp, Cannabis indica
acgaccgtgtccgggcccgagttccattctcagtttgggtttgaggataggtctgtgttcggttctacgtttgggtccgggtcctagtcacggtcctagtcttgttctagggtcctggttcgacgattcttgttcaggctctaattttgggtcccaagtctaggtctcggttcgggtttggttcttcgtctgggttcgggtcctagtctgagtccaagatctagacaccgactactagtctgttccacgcctcgttacccgaatctcgagtcaagatctaaatcactgtcactcgtctcattctggctctggttcaggtcccaggtcccatttctgagtttgggttcgggatggacattcgggtgcggttctaggtcccgacgctggttctgtgtccctagtctggttccatgtttgggtctgagttcaggttcgggttcgggtcccgagtccaaatttgggtttggatccggatccgactcccaattagggtctaggtcttatttggagtccgggtcctggttcggttacggttctggatctaggtccaa

SEQ ID NO: 275636 - DNA, 466 bp, Cannabis indica
ctcgatccactgaactggccgcgcagtcaatggctttgttcataaaagctgcggctactccttcgaaggaaaccgactcgctgaagaggcagaacgctcattttcaggagaatattaaaaagctgaagcaggatgtggcgaggatggagaaagagcttgaggaactcaacaaggccaaggagaaggagctggaggaactcagcagggcgaaagaacaggcggagctcgaggtcaagaattcgcagacaacgcgctgagatggctcgcaatttggaggctgagaaagagaatgggaagtagcagtacgatcaggctgtgtctgattatatctacaccactctttccaaagtccccgacttcgacttctctcttcttggagctgaagctgctgagatggtgaggcctttcgcgccatgtcgcctactcagactcaaggtgggggaggcaaccttctggacgaggtcga

SEQ ID NO: 275637 - DNA, 544 bp, Cannabis indica
aaatctcctaagttggaaaaataataatccttcatatggtctccccaccaggtcgagtgcatcctaaacctatggagacgctcatcgaatcctacaggcctaagacaggcatattcgccaacggaaggaatgtaatgtactgctaaaggagacttaccggagccggaagtactggcatcaggagccccggtgttcggcacctgaactgaaggctttggcctgggagccctcctctcagctgagtctccaatgcgaacgggcttcccagcgatcgcctggcttctcctctcgaccgggctccccacgcgaagtggcctcccagatgctgcctgggccttggaataagccttctcctgggccttccggtagagatattcctggtacttcttctcgacggtggcaataagttcatcccggaaggtcttctccgcggcaggataagcttggccttccggcagttctccgtcgtgactaggcccccgacgtcaagttccgcccggtcgtaagttgcgaagacctaggccctccggagaaagacctgagt

SEQ ID NO: 275638 - DNA, 556 bp, Cannabis indica
atgatctttggagatgtgtaggttgagattttaacagataactaacgagtgtaagagtaaggaaaaaacttgtaaaaatttcccctgaaaagaagaatattttcaattagggggccatttcaacaaattttaacccaaaaccattcttcatattcatttcttagtagtacaaattgattgtgactagtggcaaaaaataattccgagattggtccgggccacatttcacaaaggggtaccactatcagaaatgtgagattttcactatttcgattaaaacgatcgttagtgcaagaaaactaatttttctctcaacgtgtccaagagaaaagtgatgcacaacggtcttgtcgtcgtacccggtccccgaaattaaacttactagtagtacttttcggaaggtacggaggtcgtagggaacggttaacgaacgaacgtttaaaccaaggggggaattaaacggtaacgagtgtaagagtaaggaaaaaacttgtaaaaatttcccctgaaaaagagaatattttcaattagggggccatttcaacaaatttttacc

SEQ ID NO: 275639 - DNA, 719 bp, Cannabis indica
gaagacacctacaccagctaaaaaggctggaagaggaaaaggtgtgaagaatgtccctaagactgcacaggccttaagaggcaaggcagcaaagggctttaaaaagaggcaagcccgggcaatgaaaaggtctgcagcaaaggttgccaagacagaagggaagccaacgaagattggctcccccgtaatgatccaggaatgggagcgtatcttgattggttccgttcctattttcttgcccactgtcgcctcagtgatggttacctctgcggaggaaactgaggcaacaccgacttctcaacctcggagaggtaggaaggcaacaaaagggaggaggaggacaaacacttcaccttcaccaaaccctcttgaaatgagggaactattaggaggcaccccgattaagcctccgatcgtattctctgtcaactgccaaggtcaatagggagcatctgctgagatcaatgaacaccctttattagatgaggggtgtaggatgcctttttccttcccaaagaaggctagaagcgatagtgtaagggttcccaaagcaagccctaactcattccgaagagaacatggtgactggatgtttctccagggctaccgaccaacaagggtcacttcaactgttaagcctacctcctgcacgggccctgtaactcgatcgagagctcgtgccatgcgtacaactcctattcaggaatcagtgaatccct

SEQ ID NO: 275640 - DNA, 644 bp, Cannabis indica
cagaccgaaactgagaccccgacttggacctaaatctgggacccgatccccaacacaaagttggacatagatagggatccagatacgaacttggactcggactctaacccgaactcaaacccacacctagaattagacgcaaagctagacctggacccagacaaaaactcgaacccagaccaggatcagaaccaaggacttagacccagaactgaatccaaactcagatcgggattggaacttggggctcggacccaacctagaccaagacccaagatgcgaacccacacccggagcttgatctggacttagtctgaaatccagacctgaacccaaactcagaccaggactcgcacaccgacccgaactgaaacccaaactcgaagttagaatcgcaaatggaactagaaccgaactaggactaggaccaggaccaggagctaaacccaaaccctaacccagatcaaaacccagactgagatctaaaccaaatcgagactagtactcaaacctgaacctagaccgggaccaaaacccacacaataacttggacctggatcaagaatcaggatagtgacctgggaaacagaactaggaccgggacatagtacccgaccctctcgaacttgaacctaggaccatgt

SEQ ID NO: 275641 - DNA, 611 bp, Cannabis indica
gactaggtagcagtatacccccttatcgatcctgaagctagtgcactcttgatctgctacgtgcatcttaatttggttgtaaccagcgtacgcgtccatgaaggacagtagcttgaatccagaggtggcgtccaccatctggtcgatccttggcaaaggaaaacaatcctttgggcaggctttgtttagatcagtgaagtctatacaaacccgccaggtcccgttgggctttggcaccagtaccggattggctagccattccgggtagtagacatctcgaatcatgccactcgttagcagtttgtccacctctttttctaaggcttcaaccttcattgagtcgaggggacgtcgcttctgctggaccggtggcatgtccgggttgacattaaggacatgggtgatgacgtggggacttatgccggtcatgtcttcttggcaccacgcgaaaatgtctgtggcgctcctcagtgtctttattattttttctttttcctccggttctaggctctttcctagccggaggactttggtggagtcgaggtcgcacaccgacacttcctcgacgtcctccattggttctacaattttttcggatcccacgcggggat

SEQ ID NO: 275642 - DNA, 751 bp, Cannabis indica
ctactagtcagtggggctagtaaggcgggcatatgaggaccacgaggggactcatatgtctccatgagttggagtactcatggacattatcaggccgaccaggtagtgcgtcgaagaaagctgccagaggttcactggtacgtttcccttggcttgccggtatgtcgcttgcatgggacgtggcctagatcctctaagagacgttgtggtgcgccttggccacgagtctcaacacgagatgacacgggtagtcattcgtgggctagttggtatacgcgcatgggacggatgcaccattttggaaagggacagaggtctaatgtatgcaactagcttggtggcttgtcttgagggcctgccaacatgcgtggaggcatggcgccttgaggattagtccatggacgtgtgagagtccttgggcgacgagggagacttttctaacagtattgaatggggcatgatagaagcgttggcacgttagcttggtgttggcatcttgccacacatgctaccttggtcaggagtgacaaggtgagcttcggtgttgggatttgccttatcatagtgagaacctatggacagtgcgagtatcttggctagagagcctcgatgcatggatgcactcatggatgcttgcgagcatgactcggcgagagttgttcgagagacggaagtgtgcacgaggcacacggtcgcgcgaaaaatgcccattgttactcggatggtttaaaggctaaccttggcttagaga

SEQ ID NO: 275643 - DNA, 492 bp, Cannabis indica
atgtcatctaaaagtgcatcccgcaggatgtgactctcaagtcaactatctcatatagcacccctgtcgatttccacatgcatgcaatgtccgctcaaccatctaactaattcacacttgcatcgcgcccttctggatcccacggtacactaagttccaatgatgcagccctcttgccttcatgcaaactcttgcacccttctcaacctttgcaggcccacatgactactaagtctcactggcacgaccctctggcctccacacaaactctagcgccatctcaacgcttgcgctcggtcttctcagccttgctggcttccttgatgcctttattccacaactccgcatctctatcgatgtctttgtgtgacttacgccctctggcgatttaacaagccaacacattccactcaactgcctcggcgcttccatatggatcaaataaaactcacatgcgaacacttccaagtacgatcatcctctgacgattgc

SEQ ID NO: 275644 - DNA, 575 bp, Cannabis indica
aacatatgggtaagtatttttctaagtaaataatgttgttttttgttgtattgtatggatctgaacgtaattagttgtaatttgtggtttttgtgtccttgaaatcgaggtagagtttgttaagagcagtctgtatttttctgggttttttattttttgcgattttatgcgactttgtgcgatattgtttgcgatttcatgagcaatccaaggttagggatgaaacgatttattttggcgactttgtacgatttgaatgcgattatgtgtgcgattgtaatatttggcgattgatgtgtgatctttgtgcattgttatgcgattttgttgactatctgatattatgcgacgttatgcgatggctttccatttctgtgcgattattgtgcgacatcataactggtttatattatgttagcttaaggcgatattgtgcgatttactgtgcgatatagtatgctgattttgaaatgtaagtttgtttgtatttctttgggacagattcatctgtatttgtgcctgtactgtatgatggcgtttggacttttgggagggtttcaactgggtatttgatt

SEQ ID NO: 275645 - DNA, 460 bp, Cannabis indica
gatttcttgattgtctcgcagagaaggatccaaatttcttcgttgtctatcaggttgacgacgagaatcgattggctaacttattctgggcagatggaaactcacgcgtggactatgtggcttttggggatgtactaggatttgacacaacctacatgacaaatgagtacaataagcccctcactgttctcattggcgtcaaccaccatttcaacacatgcatcttcgggtttgctctcctcctccacgagaagcttccatcatattcttggctacttcaaaaatttctagaatgccatggagataagaagccaaatgttgtagttactgaccaagatgcggccatgaaacaggctatcattgaacacatgcccgatgttacgcaccgtctatgcgcttggcatctcaatacaaatgcttcgaaaaaggttaaagatccgatcttcttcaaaacatttaa

SEQ ID NO: 275646 - DNA, 538 bp, Cannabis indica
tttgttcttctatttttttaactcacattaaccgattcacatagccgtttttcctctttttatttttctcttaatccatttataaaatatggctattactcgttctccatccactccttcccatgtaccaaagaaaagttctaaaatggggttgaaaactgtagctaataggaataagggcaaatgtcctgttgttgagaacggtgattccgattttgctcctcagttgtcgaaacgtgagcgagctcctcctaagaagaaatcaaaggttgctgcccatgaaaaactttctcatgatcctgctcaaaaaatgatcaggatggtgctggtcttcgatctcaggtttgttttcggtttctttttggtttccccccatttttgaaaatttttcatattcaacttttgtgggttttgtgtttattgatttcattattttaggttttttattttagcatttcttttgtttttgtttttttttttgtttttaaggtcttctgttttatttatttaatttatgtgttattttattgggtttttc

SEQ ID NO: 275647 - DNA, 580 bp, Cannabis indica
gccccttttcggcgacttttcggtgacatcgtgtatcgttttgacaaacggttggcatgggtgttatctactcgtcgaggtggtcgttttgatatacactactcctattttcggcgacatttccggtacaccaatttttaccgccaccgattgttaatgtgcacagcttaggtgaggtttcggaaccccaaattttaaatatagtcatattatatgtcattggactcggttttgaatgtagaatgcgatgatgataattatttaaccatttgatggtataggtgagagtaatatgtaagattggactaaacaattggagctcgggacttgagagcttaagattgtcttttggataaagtttaacgactcgggagaggtagggactcaacttgattatcggacttgatttacaaaattgtttgaaaaattgaaaacttaatctgcatattctggactgttctggggcactgagtgccaaatatatttttgtatgcaaatatttatgcaggttatgattgttgggtttattcaaaatacaattgttatgctgtcgaatttctagaaataaaaaggaatatgt

SEQ ID NO: 275648 - DNA, 525 bp, Cannabis indica
ctatcctcttatgcatatcctggtgttgttgaccaacccttggtgattgaacagttcatgcgtcgtttgaggcctgcgatacgtggtccaatagcccctttgacctttaacaacctgactgagtgtgtgacagcagccttgcaaactgaggctcatgtagaagggaatgagaagaagaacacaagcagaggaagaggaaatgaccgaaagatgaccaagaagaatcaaggacagtggtcccaaggacaacaatttagtgggggtagcactagtagtggttcatctggaaagactcgtagtggaccatacgggtgtttcagttgtggtcaacaaggtcataagaagaaagattgcccgcaacgacaacaaagatttcaagcatctcatggaggacccatagggagctatgtagagtctactccttttcatggacagcccaggacaaaccagtctcagtcttcatcctatggtttcacaccccaatcgggccagcagtctcagtatcaacatcagttcaggccacaa

SEQ ID NO: 275649 - DNA, 691 bp, Cannabis indica
attcgcagggttccgtctttcttcttcacaaatagaaccggagcaccccaaggtgagtagctcggtctaatgaatcccagattcaataactcttgcaactgtatcttcaattccttcaactcagctggagccattcggtacggtgccttagacactggatccactcccggagccagttcaataacaaattcaatttcccgaacaggtggcaatcccggcaaatcttctggaaagacatcaaggaactcacataccaatttcgtattctcaggccctgatgtcacaggttggctagtgtccactgcagtgactataccctagacaacctctacccatcaggtctttagctttcaacaacgatattctcggtatgcgtgccccctgaactttacccacgaacaccgctgggttagcactctcgggctcaaacaccaccatcttccgtttacaatcaatcattgctccatacttagacagaaaatccattcccaggattatgtcaaaatcagataattgcagttcaattagattggcggtcaattcacaaccgtcaatccaaaaagacaaggaccgaatccaccttgtggatactatcaggtctcccgagggtaacagggttccaaaccccgaagcataaatatcacatggcttatgtaaactttctatcactctactcgatacatatgaatga

SEQ ID NO: 275650 - DNA, 486 bp, Cannabis indica
ataatggatcaaatatgaaaggaaaacatcaaggtgtacaaaagaaatttttagacataaatccaagagccttttatactccttgtggttgtcatagtcttaatttgattttgtgtgacatggctgaatcgtgtagtaaagctagagatttttttggagttattcaacgcatttatacaatttttgccaattctactaagagatggcaaattttgaaagataatgtgaaaggattgactccgaaatcattgtcatccactcgttgggagagtcgtgtagaaagtgttaaagctataagatctcaaatgtcagattttagagaagctttacttgaagtatcggaaaaggatgaacttgattctaaaatcagaagtgaagcaaaatccttagcaataaatgaacttggtgattttgagtttttaatagcaattattatttggtttgaaatcttatctgcaattaatttggttagtaagcttttacaat

SEQ ID NO: 275651 - DNA, 578 bp, Cannabis indica
tcctttatgttgatgacattttgatcattggcaacaatctcaagaaaatgactgacatcaaggaatggctagacactcaattcgaaatgaaagatttgggtgaagctgcctatgttctcggtattcagattatcagaaaccggaagaacagatcccttgctctctctcaaacaacttacatagataaggttttagagagattctcaatgacaaacaccaaaggggcaaccatgccttctagatttggtatccgtctatctaaggaacagtgtcccactgatcctcaagagatagaggacatgagaagggttccttatgcttctgcagttgggagtctaatgtatgttatgttatgcactagacctgacatctgttatgcagtaggaatcgtgagcaggtatcagacaaatccaggacaggaacattggaatgctgttaagcatatcttgaagtacttgaagagtacaaggaaattcgtgttagtctacaaaggtggtgctttaaatcccgtaggttatattgatttagatttccaggcatgtcttgatgacaggaaatctacatctgggatggtgttt

SEQ ID NO: 275652 - DNA, 568 bp, Cannabis indica
caatttcaaggctgttatgctaaggagagttgaggatgtgtttgtaggctggatttagagtttatttaagtttaaatcaattagaattagtggctgtttcatttgaattgatttaggtgaagtttattaagtttaatttcacttaattatgcaattttggttaaatggatgaggtgatgttaattgatgcttggattatgttgagtatatgattttggtttgatttggagcagttgggcaggtgtggttgagtttgtagttgtagtttgagttgagtgagttagagtttaagagctcaaaactcactcaacaatggtgaagttgtgattttaagttaattgttggttttgagtgttgagatatgttgcatacatgttatagaactgttctgtgaagtttgggaacaattggttaggtttggagcaagttttgggactttgaagatctaaaattttcgactttctggtgtgatgaaccggaattccgaatggtacagggctgcaccaaccggaattccggatggtcaattttcaggaatcgccgatttttcgtattttagccataactt

SEQ ID NO: 275653 - DNA, 646 bp, Cannabis indica
atgtatatagaattcgaaataaacaccaaaaaaagaaaaatgaaataaaacaaccaacggaccaaaaactccaattttttttatgtttatatatacacgaatataatttatataccgcatcaaaatatcataaatgtatgaaagagagtatcacatacaattttttttatgcaatagaatcatatattaaacatatatatataaaaaatatatatacgtatatatacaacaatacttacgtatatatataatatatataaacaaaattaaaatatgaaatatatatatgtatatacgtagattgaattaaaatgtatatatatgatcggaattatatgaatatgaatatatatatataaaatatatataaattaagaaccgatcatatacgtatatatattatatatatgaagatgaagatgaatatgaatataaatatatatatatatgtacacatatgaagatgaatatgaatatgaatgtatatacatatatatataaaaaattgagtatgaatatatatataatcgggattatataatatgaaagtatatatataaaatattataaatgaagaactccgtaaatgtatatatatatatatataatgaaactacaaaaataaatcaaaggcagagatatataa

SEQ ID NO: 275654 - DNA, 540 bp, Cannabis indica
catcgcaattttggaaaaaccttccacaaaacgtcgataataacccgctaaaccgagaaaattcgaatttcagtgactgttttaggtctaggccaattcttcaccgcttcaatctttcctggatcaaccataattccatcttttccaacaatatgccccagaaaagacacttgtgacagccagaactcacactttttgaactttgcatagagtttatgatctctaagtcgctgcagaaccattcgaagatgttgctcatgttctgcttctgaccgagagtacacaagaatatcgtcgataaatacaattacaaaattatcgaggaaatccttgaataccctattcatgagatccataaaggctgccggtgcatttgttaacccaaaagacataaccaggaattcataatgaccatacctggttcggaaagctgtcttcgggatatcctcttctcgaattctcaattgatgatatccagacctcaagtcaattttagagaataccgtcttgccctgaagttgatcaaacaaatcgtcaatt

SEQ ID NO: 275655 - DNA, 549 bp, Cannabis indica
tcctctgatcaatggccgaaccactactccccctgctaaagcctgatgcaggaggggtaggagccccgccactcgccggagtactagctgactccgacatacacccaactgcgccctcagctcgcagtgccttctccaccatctcagcataggtggtcttgtcgtccgtggtgatcatcaaatcatgtttgatccttgcattcaacccatccagatacttctctttcttgctgaagtcggttggcacaattcccgaggctaacctcgccaaccgatcgaactgagtagtatactcggtcacgctcatattctcacgctgggtcaggtgagcgaactctttcctcttggcgcttctgaccgcctcataaaaatgcaaaatgcaaactactatatgacataaaaatgcatctctcaattcgataataacagtataaataattatttaaatagctataaataatttcataattaaacgtgattaactgctaatttccaaattaaactaagcggtctttacagtttgtttctacaaatgctactttccttgaa

SEQ ID NO: 275656 - DNA, 926 bp, Cannabis indica
tggcgagaaatgtgagatatacactgatcacaaaagtctgaaatacttctttacccagaaggacttgaatatgagacagagacgttggctagagttggtgaaggattatgactgtgagatcctttatcaccctggtaaagccaacgtagttgctgatgctttgagcaggaagggtcagagtcagttgagcattgtgaaacaaatctcccagcagctagcaaatgagatgacccgagctaagattgagttggttgtggggcagttggctaatattaccctgcaatccactcttttagagcgaatcaaagaagtacaaatgcaagatccagaattagtgaaaacccgagctagggtttcggctgggaaggctagtgatttctcagtggatgaaacgggaatgttaagattcggaaatcgtgtttgtgtgcccatggatgagagtatcaagaaagagatcatgaatgagtctcatacgactccttattcagttcatccagggtcaacgaagatgtatcaagacctgaaagccatgttctggtggccaggcatgaagaacgacattgctgagtatgttgcaaagtgccttacgtgtcagcaagttaaggctgagcatcagcgacctgcagggttgctgcagccactgaacataccagagtggaaatgggaggacattgctatggacttcgtggtaggtatgcctagaaccacgggacagtttgactctgtgtgggtcatagtggacaggtttacaaagtcagctcactttttacctattcggacgaatttctccattgaccagtatgttgagttatatgttagagaaattgttcgtcttcatggtgtcccgaagtccattgtttcggatagagatctgaagtttacatcgagattatgggagagtctgcatcgagctatggctactcagt

SEQ ID NO: 275657 - DNA, 522 bp, Cannabis indica
ataaaattccaacaaactcccacttgcactaacataaaacaagtagtgcatttcaatcaatcaattgtcttgatatccagatcaagtgtagtatatttcactaaacccaaattactggaactgtaagtctgtggtaagctattgcttattccacaattacttccctttgtgtccataaaacattatgcaacatcattttactatatgcattactcttctagggatactgaattctttactgtttgtgaagtgcatctgaataaacagaagacatatctctaatactatccaaaaaatggaatagagataatacagtgtagaactttcttcagttgaataactttccagtgcttttcaatacaacaaagttttttatcttcactgatgaagcttaaattattatagatgggtttttacatccttctagaataattcctccacccctagaataaccaccatctctaataggttatgattggtgtagatataggaatctagcatacacccctatcatcttacata

SEQ ID NO: 275658 - DNA, 712 bp, Cannabis indica
ttctgagcaacattcttcttaggctcttctctcttagcttggggacaatccctgataaagtggcccaccacgccacactggaaacatgccttggctcggcactcaccaggatgatgcttcttacatttaggacactcagggtatgaccggaatgaggacccgcggccttgacggccacctctgtttccccgaaactttctatttcctcctgaagctccggaagcctcagccttccgcttgtgctcagggttgctactgtcgatccccttactgaaattaccaccagcaggagggtttgatgccatggcggcatcctttacagcctgctctttcatcacttgctgctcagcctcttcagcaattaaggccaagtctaccaccctcttatacagggtgtcatgggatgtggtaattttcaagtctcgactgattgtagcattcagtcctcgaacatacttttgttttctggtaaaatcggtaggcaccaaatcaccagcaaatttggataatcggtcaaattccagagtatattcagccaccgacatcttcccttgagtcaacttcacaaagtcttcctggtgtgaagtccgtacagccacattataaaacttttcttcaaaaagtttcttaaactcatcccatgtcatcacactgacatctcgggtttgattcactatgtcccaccagacgcgggcatgatcttgaaacataa

SEQ ID NO: 275659 - DNA, 1392 bp, Cannabis indica
atcagttccctcgttttaattttcagcttctcccatgcttccttagcaatttcacaattggctatgaccttcaactgattagtggagacagcattaaacaaggcatgaagggccttcgagttgaaattcgctctttccatttcaactgtggtccattggctcataggtttgggtataacgatttaattctccatcatcgttggtttccaccacccttcttctatggacatccaaactctttcatctacagctctcaagaaagcacgcatcttggttttccagtatggatagttggctccttctagcatcagaggtctcgaggtggaacctccttctctaaacatttccatcctgcacaaagaagtggaaaacagacctccaaacgttagccacatgcacattttcggatgtacgtgttatgttctgaatgatcgtgatcacttggccaagtttgatcctaggagtgatgaagggacatttctagggtactccaccaacagtcgtgcttacagagtattcaacaaaaggactctatctgtggtcgaatcaatgaacatgaaatttgatgacttagaaggacatgaagaagtgtgggtcgaagatgatgcacctgtcctctctggccttagaccagtcctcactagaccgcctcaagtgtatcctgacactcctacagagtccctaaatacagcaccaggtgtatcaggtgacaatcaagcagttgccagtgatccaggaagaggaaatggatagtgccctaaccaaagaaccccaacaagccaaattatataaaaacggacccccatcctgggttgagaaagctcatcctcaggccactgtcataggaaatccgaatgataccatggtcactagacgaaaactgcagaatttgttagcctttgcttgctatctgtcacaaattgagcccaaaagtgtccgagatgctctgttggatgagttctggttggctgcaatgcaggatgaaatgggaaattttaaaagacttggtgtatggataatggttcctcagccagatggtgcgaatgttataggtacaaaatggctttttaaaaacaagtctgatgaatttgggacagtgactcgaaataaagctcggcttgtggctcaaggatatagtcaggtagaaggcatcgactttgatgaaacctttgcaccagtggcacgattagaatccatacgactgcttctcatcattgcatgctttctgaagatcaaactcttccaaatggacgtcaagagtgcttttctcaatggggtaattcaagaggaagtctatgtcaaacaaccatagggatttgaagatccacatcatccacaccatgtgtacaagctcaataaagccttatatggactgaaacaggctccacgttt

SEQ ID NO: 275660 - DNA, 334 bp, Cannabis indica
gagcatcaccaagatctaaacctggagctctttctctccttcctttgatgccgattctccttcttgttggttgattttccaaagtcttacacactatgattgagatatcacttgatgtgtgtgggcactcactcattcactcaaggatttcgaaatagaagaagaaaagaagagagaaggtggcggctagaagattttctgtgaaggaatgagatgtatcattttttcctgaagtcatcaatacctatttataggtaaccaccaggtttaagttagaattatttggcattgaaaataaggaaaaaaataagtgataaaagcctacaatagtggc

SEQ ID NO: 275661 - DNA, 799 bp, Cannabis indica
aacttgatttgcacttgatatttctggaaaaaactatttgtcatggattcttgatgctgaaatccatttagatgctatgggtcttggagacaccatcaaagatcaaaatactgaaacaaaacaaaataaggccaaggctatgattttccttcgccatcatctccatgaggggttaaaatctgaatatttaaccgtaaaagatcctcttgtgctttggcaaaatttgaaagaaagatatgaccatcaaaaaactgtcatattgccaaaggctaagaatgattggttgcacctgaggttgcaagattttaaatcagtaagtgattataactctgcaatgtttaatatcacttctaaattaatgttgtgtggagaaaaagttactgactatgaaatgttagaaaaaacatatactacttttcatgcctctaatgtgctcctgcagcagcaatatagagagcgaaattttaaaaaatattcagaattgatttcatgtcttctagtagctgagcagaataatgaacttttgatgaaaaatcatgaatctcgcccaactgggtctgctccattccctgaagtgaatgctacaattgctgacaatcataatcatagtcgtagtcgtgatcataatcgaagtaatagacgtggtcgtgaccataatcaaagtcgcggtcgtggtcgcgatcgcggtcgaagcaatgtttggcatcgtaatggtcaaaataaaaattcatatactccaatgaaaagcacaactactgagaacaagggaaaaggtcctcaaaataataatcatagaaat

SEQ ID NO: 275662 - DNA, 1370 bp, Cannabis indica
aaagaaaaaaaaatagtctttctttgacaatgccaatgtgccaatttatttatgaccattagtgacataaagttttgttctttagtaaaagatctctattagctataggcacattttcagtttctaatttttctttcttacgagcaggtttgtgggacaactcctcacattcgtgatacgaaccatctatttcttgaactcccgttgctgaaagataaacttgaggaatatattaataaaatgtctgtggctgggtcttggagccaaaacgccatccaagcaacaaatgcttggcttaaagaagggcttaaacagagatgcattactagggatctgaagtggggggttccagttccccacgaaaacttcaaagagaaggttaacaactaaacttgtgctaaacttggtccgctccatatcatttcaaatggcttattatatatatcaagttcttcaacatgacgttggcaggtcttttatgtctggtttgatgcacctattggatatgtctcaattacttcatgctatacatccgattgggagaaatggtggaagaatcctgaaaatgttgaattatatcagttcatgggcaaggataatgtgccattccacacagtaagtgttaaatattgatacttgtgtaggtactttattctatcttttaaaatcttaagttcttgtttttcgttttggatccttcccatatttttacaatgtgaaaatagatgttcattttaattttaaaatgtttctctcaatgtggaaacatatgttctcctacctttcttctggagattaaatgcaaaagatgtgacttttaccagtcatctctttaacattccaagtatcaaaatatgggtttcatttacatgtttttaaagttcaactcttttgagaataaattaatttattcttattgcaggtgatgtttccttctactcttcttggaactggtgaagaatggactatgatgaaaacaattagtgtaactgaatacttgaattatgaatcaggtcagtatccgtctggcactatagctatcacaatgtatatagttttctcaaactttcctttggaaatttgttgtcggattcttatataatggccgtcttgaagaagtaggttatctgattttgtaattttgcagggaagttttctaagagtaaaggcataggagttttcggtaatgatgcaaaaagatacaaacattcctgtggaagtgtggagatattacttgcttactaataggcctgaggtactcctgttaaatacacatttaatttgattccttatatgatagattaattttcacctcttccttttatgtcataataatcctatttgcttgttaaactaggtttcagactaca

SEQ ID NO: 275663 - DNA, 820 bp, Cannabis indica
gatttgagtaggttatggggcttaaagattgaatttttttgcatgttgttgctgcccagacaaccggaattctggttggttcagtgctgttccaactggaattctggttggactatatcgggaaatgctgaattttgttttggccataacttttgactcgggacttcgttttgggagttctttatatcgttggaaagctcgtttcgagctctatgtgattatctatattttaaatgccatgaatatattttatgaatgtgaaatcaggggttaaccctatttgtgaaaatcccggattgtgtgactaggattaccggcacctggtcaggagcacccggggatttggaatctctgcctttgcgggacaacaggtaagacagtagttagcacgtagagtatgcgcgatggcgcttatattgagattaatatatgtgagtaattgtaaccgggattagggttattaccctaatatgagcggttaatagcctagggttattaccctagtgatataagttgaataaatgctatgccatgctaagtgtatgattatattgagatttaaggattatgcgatcaaggcataatcaggttggactcggtaatcagaaccgagaagaaccattctaaggccttattgtaaatagacgtgtgagagcaacacgtaggtttacgccacgtaaacataaataggcatgtgagcgcaacatgcaggtctgtgtcacacagacagatttgaatggcattgttgtttatattatatgatgagcatattattgatatgttttatactgtcttgctgggcttggctcacgggtgctct

SEQ ID NO: 275664 - DNA, 661 bp, Cannabis indica
catcttatttgaaaatcattttcatactcactcatctttaattttaagtattttagttacttgtcttttattttattttgcaaaactaaaatctcatcaaatatttggaactaggttagaatattcttattttgtttgaaatagtttcttttgatgttagtcaactcccatgggttcgaccttgcacttacatgaacattatattccgaaacgattcgtgcacttgcgagtataaatattaaaacactcacttttgaggacaacaaaattcttaacaagccgtatattttaacgagcaaaattagtattgttgaatattcagggggtaaaattattaattattctaatttttttttttttttttgatttatgtgtaaatattgttcaaaagttatataaatataaatgaaggttcaaaatatacatataatttactaattataaaaaaaaatatataaaaaattaaagtacgaatttaagcctgaatataaagtactaatcagagaagagaataagattcgaggaaattacattgtatgcccattttactttacttgtttgatttttaccttatttttacttttatagatgatgacttcattatactacttgggttaataaaaattatttatttgacttaagtagagagtgaaggtatatt

SEQ ID NO: 275665 - DNA, 225 bp, Cannabis indica
tataccctataactctttctttacagtttcccccttacttagtgataaattcacaaatagacatagtctaatttgagaattataattgattaatcaaaaccaactaaatgagtcttacaagtagtattgtctcaaatagtgtggggaccatgggcctatatatccgagcttccaataagcagatcaagaatatacctcttaaagtcaccaacttattaattcttc

SEQ ID NO: 275666 - DNA, 1119 bp, Cannabis indica
atatttttttattttagaaaacctgaaactttattaattagaaataaagtactaaaaaaagtaaagaactattccatatatactcattatcaaaatttaaacctgcccgagcacaggcatgagtaattttattaaactcatgagaaacataataatctatatttaaactatgagcaattactaaatcaactcaaatcataataataaaaaaattaaaaaaataatataaaaaataattttccaaattaaaaatactcctaatacaaaacagtaagtcttcacttagaataacaaacatccaggaaaattaaaaagaaaagaaaaaaaaacaagtaaaaagacgaggattatagtagtttggcaaaatttatttgctcatgttcactttttatcttttaagaaaattacattaagtaaattttcaaattatttaaaacaattaccatcggcattttaatatcatcaatacaaaatgggtgtcattatatgtttggtatgagtagaaattttcagattttcttggtaggtcaaaatcctctattttttctctttaatttatttgtttttttttttcttttttttttaagtattttttcctacctatatctgggggttttcatatcaaaccggtcaaaccggccgtatcgcaaaaaaaaaaaaagtggtttaaaattttttgtcggtgcagtcgtagtttgaatttttctcaaaccgcgaattgcggtacaatttgtggttttaaattattaatatgtagttcaaactgcgtcgcaccgtatattataaaaatattaatttttatatttatttaggtccaatatgtgaatgttccactcaaagcacactacttattatattgttgaaacttcatttgtttttcccatatttatttttctaagtagtggtatttttgtacaagtattgtccaaattttattgtatttgtgatagtttaattatttggtgatgatccaaaccacaaaaatcgcaccgcacccgcaccacataattttttgttggtacgatttctgtagttttttagttttcgcgatgcaggtgcagtttgaaaaattagaaaaactgcatgtgcaggttggtttgaaaaatagtcaaaaactgt

SEQ ID NO: 275667 - DNA, 560 bp, Cannabis indica
agtagtcgactgctaccaccgcgtactgcactccgcctttacctttaggtaattgtccgattaggtcaattccccaaatggcaaacgaccacgaactttgcatttgtgtcagctcgttgggcagaactcttggtatctctgaaaatctctggcatttgtcacacttcttgacgtaagctttcgaatcttcgatcatcgtcggccagaagtagccttgccttagaattttctttcataagctctgtccgattgcatgatttccgcagaatctgtcgtgaacttcatatagaaaccgtgtagcttcatttggtgtgacgcacctgagtaatggcattgagaatcctcttctgtacatgatcctgtccacgatgatgttttcgtgctgcctttcttctcattttccgagcttcatttcggttatctgggagttccccagagttgagatagactgctattggcgtcatccagtttgtagatgtgttgatcattttgatttcttccgtgccggttatgctaggctcttcaagaattggatcgggaccaagttcgccttgtcactt

SEQ ID NO: 275668 - DNA, 741 bp, Cannabis indica
tcttctcattttccgagcttcatttcggttatctgggagttccccagagttgagataggctgctattggcgtcatccagttcggagatgtgtcgatcatttcgatttcttccgtgccggtgatgctaggctcttcaagaaactggatcgggaccaggttcgccttgtcacttatattgctgctcgccaatcgggctagcgcatctgctgttgtattttcctctcttggaatctgcttgaggctatagcttttgaattgtgcgagcagatcatgtatttttcagatatgctatcattttttctccccgagcctcgtattcgccagatacatgatttaccactagctgtgagtcactgcagatctcgatgtgctcggccttcatctcctttgctagtttgagtccagcgattagggcttcgtattcggcctcattgttggaggctttgaatccgaatttgaccgctgcatgcaggtgttgccccccaggtgtgacaagggcaattcctgcgccggatagctgatctgtggccgatccatccacatgaagcttccaggtcggcttgttttcagtgctgttcggctgtggtgttggctcgagatcgccttctgggatgctttcagtttttcctgtgcattccaccacaaagtcggccaaggcttggcctttgatagttgttcggggttggaagttgatttcgtactgccccaattccaccgcccacttgagtaatcgcccagagg

SEQ ID NO: 275669 - DNA, 534 bp, Cannabis indica
aaaatcaacaggaaaataaaatttatctaccttaatcaaaacatcttctatgacacctctaggaattttcacagaacgatcagctaactgaagtgtcatagatgttggtttcagttcccctagaccaagttgcttataaacagaataaggcaataaattcacactagctcctaaatcaagtaaagctttgttaatcacatgatcaccaataatacaaggaatggtgggacaccccggatctttgtgtttaacaagacttttatattgaattatggagctgacttgttccgttaaaaatgcctttttcggaacatttgtgtttctttttgcagtacacaaatctttcaagaatttagagtaggcaggtatttgcttaatggcatctaagaaagggatatttatacttacttgtttgaatacctctaagatgtcaccatactgactacctcttttgatcgggagcaatctttgtgggaatggagcttttggaatgaacggtaaagtttgactcgattcttcaaccgagtctttgga

SEQ ID NO: 275670 - DNA, 889 bp, Cannabis indica
gtgaaggcttcaggaaatttacactaaatttttacacacttttcttctgactttttcattcagaaaaaactgagccttctctctccctatctttggccgaccactccctctctctcttcctccttgagatttcgaaattcttagtgttagagtagtgcccacacacagcaagtgatacctcaatcatagtgaggaagatcgtgaagaaagactttcagcaagaaggagtttcagcactaaagaatcagagaaagagatccaggttcagatattgataatgctctgctacagaaaggaatcaagggctagatatctgaacggaaggagtcattatattccgctgcacccaatgtaaggtttcctaaactttatatgtgtttatttcatcgttttagaaagttcatatttagggtgttaatcaacatacttgtgagtagatctaagatcctggtaaaataatttccaacaactggcctcagagccatggtaattgatttgcttgcaagaaatttggactttaaaacgattgtttgatgttttggatggtatcatgttgtattgagtgttatttgatgattgattgatgtttgtgaattttcgtgaaaaataattgaatatctgtttctggaattatttttattggatagtatggaaaaaattaagcaagttacttttttacagaactcaatttcgatttaatttgaattagttatgattttttgaagtttcgaaaaaatcggggtgtgtcgctgctaagatgataaaaaatgctttggagagaaggctggtcgaattggacaaattggcagtgttggcgggaatcaagctttaatggaggaaagaagaaagacaaaaaaggaatggcaaaatttagcttttgctgaagaaa

SEQ ID NO: 275671 - DNA, 586 bp, Cannabis indica
agtggcacctgcccctgttgtcctgaccgaaccagtagtagcggcgaatagaatggaaccccagtatgaaaggttccgcaagcaggaaactccggtttttctgggaggttcggatgtcatgaaagtcgagcagtggctaacagtgattacgagaatattgaattttatgggtgtcccagggaacgacagagtggtgtgtgccacatttcagtttcaagaggatgcgttggtctggtgggacatggtgtccatgatacacgacgtcaccacaatgacctgggaaaagttccaggaactttttaacgcaaagtattataatgaggtcgttataagtgccaaaaggaaagagttcactcacctgacccagaaaggaaatatgagtgtgacggaatacacaacgcagtttgatcggttggcaaggttggcctcaagaatcgtgccaaccgacttcagtaaaaaggaaaagtatttggatggactaaatgtgaagatcaagcatgacctaatgatcactacagacgacaagaccacctatgctgagatggtggaaaaagcactgcgagctgagggcgcagttggatgtatg

SEQ ID NO: 275672 - DNA, 770 bp, Cannabis indica
aaagtgagactagattcgggacctagaaccgcaccccagtcttgatctcgaacccaaactcagaaataggacctaggacctgaaacagaaccatagcgagacccgtgaaagttatctaaacttgactcgggattcgggtaacggggttttgaacagaccaatagtcggtatctatatcttggacttagactaggacaagaaccaaacccaaacccaaacctagacctaggacccaaaattagaacctgaacaagaatcgccgaacaaggaccctagaataagacaggaccgtgacaaggacccggacccaaacctagaaccgaacacagacgtagcctcagacccaaactgagactagaactcaggcccggacacggttgtgtacctagaccggaaccgagacccagacctggacctaaatctgggacctgatcccaagcacagacttgcacctagatagggatccggacacgaacctggactcggaccaagacctagaatgggatcgaaatgctggaccgagatcctgacccagacccaaacttggacccgcactcggcaccccaacttggacctagacccgaacctagacccagatcgggtttaaacaagacacaaacccggacaaagactcagactcgaactcaaacccaaacctagaagcagacccaacgctagacccaaactcgaacgttgaccaggatcagaaccaaggacttaaacccagaacttaatccacactcagatcggcattggaacttaggactcag

SEQ ID NO: 275673 - DNA, 501 bp, Cannabis indica
ctttcccatcgtgtaagcttttaattaccaaattaccattagaatatcgagccacacaaccaaaaccaaaccggccttctcgctcaaacaaagcgccatcaacattaactttgatcttatttatagtaggtgcagtccaacgctcaagcatacggtccccatcaatcaacggagataaagaaagatcctttcttttttgagcggatttgtattgatcaagtagagttcttgctgaagcaaccacattcgcagcagtatggctcctttgttgccaaacaaagtcattacgggcacgctaaattgaccagctaacaaccgcggcttcctccatctccccctgcctaccacggctgaacaaaaccagcagccaattgcagaatgtgtcgttcaaagtgctgcccacgtccaccatagttctatgccaacatgcacgagcaaaatcacaccccactaaagcatggtagatcgtttcatctgtatttaactaattttattaaacaa

SEQ ID NO: 275674 - DNA, 519 bp, Cannabis indica
ctgtaattgtaaatgactatatgttctggacttaacagattttgtatatattaaaccataatcatgaaaacaacatgtaaacatgaatgacttctaatcttttattgataacaaatcagattagattgaaatgggatttatttagggcataaaatcccaacaccttcttcattatagttttagttgagcaatgcatctcgcgttatcacaatagagaattgttgatattgatactgctttattgagtgtaattcatatgctttccaaatataatatgtcaatgatctcagtctcacacattctctacttacttcatgttgtcgagtgaatttcgcaacaccaaaatgtattatttaattaatataaaaagagaatattcagggaagtgacaagtgcgagtattcgacctagaatggcgagtactcgactgggaatgcaagaataatcaacaaggctggaaaaatatcaataagacaaagaattatagtggttcagtcagattgtgatctgcttagtcca

SEQ ID NO: 275675 - DNA, 735 bp, Cannabis indica
taagtataactatggaaggttatctatgaaactaaaagctaagtgatgaatgaaagattcatctttaggggcaaaggtgaaacatctacagatgaggctataaggatattcaactatgattaaagactagttattttggatttggaaaagacttatatcatcacctagatgagttttggttttaaattctattttgaataataaggtcattattgttcatttagaatttgaaaaaaattagtctttttccaatatttcaatattggttctactagttctttaatttataaatttattgaaatttgtctcatataaagaaactttataatttctcttctggtacaaaatataaattgaatcatgagaattctattatactttggtataagtattaagattatatctcccaaaaggagaatagaaggacttatttttaatagaattcttgatcccttgatttaataaattttagattttgtaaaggggtaacaaacaaacataaagaaatcaagtgacaaaataaaatttcattatctaagaatttatgctatattttggtggatctttcctcatggtttcatggaatgatcaataatagtatcttgtcttcagactaatgaaacttattttgttcataaggcattaatctttagacgtttcttttaaatttttaaaccatagttgacaaatcaactaggtaagaaaattaaagtcgttgaaactaactatgatggt

SEQ ID NO: 275676 - DNA, 595 bp, Cannabis indica
agaggattagcattaacagcccccgaattatcccccggattctgcggaggtggaggcagtgctggtggatcggttcgggtaaccccaggctgtacttgctcgccttgtggtctggatgattgcagagggtccactactagtacccctgtaatcaacaaccccagcgagttaagcaccaataccacacttacgcacttaatgccttaaacccttactcatctatttacctcatacatatttacataaacaaatagcatttattgcatggcatcacataacacatacatactctagatgcttgcatactgcctaaaatggaaagcggtaaacagatgatcacacatacagtcaagtatttactctcaatacttactgcaccatgagtcgagcttatctctgacgacgaatgtacatgttcggccggtctacaagaagtttaaaaaccttggcgctctgataccaaattgtaacgacctaaataattaggcatgctacccaaaactgttgggttttatgccctaaataaaactcatttcaatataattagatttacttattaatatagatcagtaataacatttaatgttgcatggtt

SEQ ID NO: 275677 - DNA, 161 bp, Cannabis indica
atagtattatataaaaatatgatatataatccaattcaatataatacaatacaatacaatatgacctaatacggcgttccaaacgagccctaaaagcagcagaaaaaaaaagaaccagtttcatcaatatcatcctgaagaaaaaacaatataaaaaatta

SEQ ID NO: 275678 - DNA, 615 bp, Cannabis indica
tctgcatggtgagcccttaacgcctccatctctttgtctctccattcagcgaacatacgcctctattcgtcaaacacgagattcactgcagcacgcagttcatcctgatcatgatgcagagtgttgctatgactctgcatgagtccgcgcgcagcacggagattttgcaattcggttgcgtcttcgatggtcatctaggcgttggttctaagcagaatagtcgtgtttatgaatgccctggctgtgtgcagaactgttattcccagctcttgcacaccaggcgcagtttcagtaacaggagctgtttcaccattcaccacgcttcccgtttgtctaggattgacagcatgtggcacccttgaacttcctaggtcatgcaatgtcggatccagcgtctgtgaatttgctgggtcagacaggcctctacgagttagcaccatcgtgttgaatgtcgaaaagagcgatttgcgatctttctctcaatgaaagcaccaaaatcttgactttgcttttagccaacgataatgagtctttttgataagcgataaacgatatgtcataatgaatatataatatagcaataataagacacaggaattttatagaggttcagcc

SEQ ID NO: 275679 - DNA, 668 bp, Cannabis indica
gacagaacacattcgatactcacactactcactgactcaagcagacagtcgttttttctaagcttttctcttaagcctcaccatcggagttactcttttagtccgtctgtccgcttgtccactcatccgtccggctaccatttatattacatttattttccattattataattttttactataatcgtactgacttgagcgtcggagtccctttggctgacaccccaccggtgctcccaattgaacttttgtctctctctttgttcttgacaggttgctggtgcccaaattccgtattgtagatttcaccctctacaatttggcgccgtctgtgggaacctagcaatcgttcattcgacaaagactccaaaggttcaccttgagcaccatggccgacgtaactgagactccagacctagcttcccagatcgctatcctcactgccgaggcagccaaggagcgagagcaagcagccaaagatcgagagcaagcggctaaagaccgtgagcaactagaaaagctgcaagctgaaaacgcagacctgttggtgaggatggagaccttgtcatcccagaacatgaccgaccctccgccacctccatcccgctttcgagttccaatcagtccgatgcagtccttggggagcctcactcccaactcctctattg

SEQ ID NO: 275680 - DNA, 519 bp, Cannabis indica
taaatcaacattagtgtcataatgtcataggtagggatgcacataggagccgggagtttcaaggaatgcttcacttgctccatccttgacctccgcctaatcccggtaaagggagggcaggaaagtgatgggcacctgtagcagttcaaataataaccagcacacacacagcaaagtaacagtaggcacagtagtgaaattcacagtaggagctattattgaatatcaaaacagaggaaataagcttccacacaaggtagagagctatggcagctctcacctgatgcagaagaggtagttttctcttacaaattgcataactgaaaatcacaatcctttcccatacaaaaggtagctcactactaaagacaattaccaaaataccccctcctaagccaatttaccttgcttaccccttctagcataagtaaacttaataggaggcctcacattcgtatcattaccccccccccctaaaatcccgaaccttgtccccaaggttaaaatctggaaactggg

SEQ ID NO: 275681 - DNA, 751 bp, Cannabis indica
tgtgggttcgggtccttgttagggttcgggtccagggctaggtcccaaatatagacaccaactacgagttttgtccaagccctgggtccagatccgaatcccaatctcgggtcccagtctggttccaattctggtgccgggtcacgagctaggtcctaggttcaagttcgggtcagggtcaggtactaggtcccggtcctagttctgtttccaaggtccctacacttattctaggtctaggtcccggttattgtgtgggtttgggtcccggtctaggttcgcgttcgagtccttgtctcggttcgtgtttaggtctctgtctgggtttttatctcggttcaagtttgggtttaggtcgtagtctcagttcggttctagttccattttcgatactgagttcaagtttgggtttaagttaaggttggagttcgagtcctgttctgagtttgggttcgcgtcccgattttagtgtaggtccagattaggctcctggtgtgggttcgcgtcctgggtctaggtctaggtccaaatcaggatcctggtgtgggttcgcatcctgggtctttgtctaggttgggtccgagtcccaagttccaatcctgatctgagtctgtatttagttctgggtctaactccttggttctgatcctggtttgggttcgagtttgggtctgggtccgggtttacctttaagcctgattctaggtgtgggtttgagttcgggtcagagtcggtgtccgtgtttgtgtcc

SEQ ID NO: 275682 - DNA, 502 bp, Cannabis indica
gatattagatttgaaaattgaaaagtaagaatcaaaatacaaaactacacaaaaaatcggaagttaattccatgaaatagtatgaaaaatcgaagaaaaacgaaaaaattgcaagtggtacggacagtatgcaacacgcacatgcagccaggcgtgaccgacgtccctcggtgcaggaggctgcatgcagcctcttccgcgcgcgcatgggacgttttcagacaaccacccgtgtctgactgaggtagctcggtcgagctagctgtctacgcgtgtgtggtcgagggtatcaccctcatccgcgcgcgtgaatgggttacacgaccctgatatttttcaaatcttcaaaaaatcataactaattcaaataaaatagaaattgagttctgtaaaaaagtaaatgaaatttttacaccaaaaatctgttttgcacattttattactgttttactcctacacgcctacatcaacatttttacttaccatctttattttattacaa

SEQ ID NO: 275683 - DNA, 631 bp, Cannabis indica
ttgggctttttcccgagccctggtttttcccgtttttaagtaatttagggtattggcatcctatttgtcgatagggttaagtttagttcctattttaattcccgataagtgttttagcgagtctctcatcaaagtttgaacattatggtttagggccctgtaaaacgtcgagctgcatttccactcaggctgaccggcacacttgagcacggaacgaggtaagatagcgtaagaatatatataagattatatgtttgtttatttgttgcactactaacactagtttaaatatgatttatggagtgttagtatagtgttgttataattgtggttacggtgttaccaacacgagtaccaagggtacgtcgtgttcgtggtacaacacttagtaattcccgggagtacagttaagactctaccaacacaagtacaagttttggtactttagtgcatttggtatagtagtcgtacttcccttaagaacgttcttaaccatttggtgagcttggttattgagctcagggcggcttaatcataaagccgacattacattacttttatatatttcttgcatatcttactgagtctgttgactcatcagtttgctacctggtgtaggtaaaggaaaagc

SEQ ID NO: 275684 - DNA, 704 bp, Cannabis indica
aattcttaccttctttccgaattcaagtgtgctggccgacctgaacggaaagtctcgtgctagatggatgccctaatcacattaattataacatagatgagtgactcgctaaatcactttctggggacttaaacttgaaactaaaagtttccctatcgataaataacatggcaatactctaaatatctcaaaaatgggaaaaactagggttccaaaaactgccccaaccggcagaccggttcccaaccggaagtccggttctgggacaccaaccggtcgaccggttgctacaggtcccccagaaccggaattccggttctgtgctgggaacccgaaaaatgcccccatgacctcaaaatcaagccaaactctaccaaactttccagtatacctgtacaatgcatatacaacataatccaaccagaaattcccagaaaaagtcactaaatcaaaggatgccattaaagccctaaacttgagcttcaaagctcaagcatactcaattccatctccatacaccaaaactaatatccagaactcaaaatcaactcaaaataaacttagaattcaaaccctaagcatacataacactaacagccccttcctagcaaaaacacaacttgaaactaatgaaaacttgagaaaacacaactagaaaagaactagggttaccttagcttaaagaacacttgaatccttagaag

SEQ ID NO: 275685 - DNA, 1329 bp, Cannabis indica
ttttcttgaccttctcccggaagcacctcctcctcatccactaagtcaatactgtttagaggggcactggaagaagctttcaagggggtggccatttgggaggaagttaagggaaggggagcatcaggagtgtgagccccagcaagctcggccaaaatggcatccatggaagtacctgctacaacgaaagaaaaaaggcaagtgttagaatatccatgggaaacagtaaacactcgaataaagcaatcaagctagtcctaccctgactctctaattcggccctagcaaagttccgaattttaacgttggcagcatcgtctccgagatagctgtccgaaggacggaaccagctggaaggaatgtaagccgaagggtctaagggaacgggctccggagggccagaacccatccgggaccgacctaggaaatctcctaagttgaaaaaataatattccttcatatggtctccccaccgggtcgagggcatcctaaacctatggagacgctcatcgaaccctacaggcctaagactggcatattcgccaacggaaggaacgtaatgtactgctaaaggagacttaccagagccggaagtgctggcgccaggagccccagtgttcggcacctgaatcgaaggctccggcctgggagccctcctctcagctgagtccccaatgcgaaggggcttcccagcgatcgcctggcttctcctctcgaccgggctccccacgcgaagtggcctcccggaagccgcctgggccttggaataagccttctcctgggccttccggtagagatattcctggtacttcttctcggcggtggcaatgagttcatcccggaaggtcttctccgcggcaggcaccctcacattcggacagataaccttagaaaggttagagtcctccactgattggtgcggcaggatgagcttggccttccggcaattctccgtcgtgacaaggcccccgacgtcaaggtccgcccggtcgtaagttgcaaaggcctgggccctccggagaaagacctgagtaggcgcggtccgctcataggggggaatccttacccactctgtgagaagctccgggtgctccactgctcggaacccggaggagaagaaaaaacggtggcgatactccttaacatgagtttgcctattataagggaccaccccatcattggaaggctgggcccggaatccgtaaaagccgtctttaaatttgtccccctttttggggacaaaaacaagttcataaaaatacaaaatctctgccggactgggagagccccatccccgggcggagtaaaaaataaataagcctgagagca

SEQ ID NO: 275686 - DNA, 557 bp, Cannabis indica
caattgaaacaatgatttcaatttgaacttttttttgaattgcatttaatattgttggttgtggattgttattagaaaatgaatcaaaatatcggtgatcattgaccaacaaatttttactaattataaagctattagaggagtttgaatatattagatattcatccgtagtgaagtatgttctgcgatataaatgtactgcggtcggatgggtgacaattattatattgttaaatacttttttgattattttttcttgttatccgatttaattacttgcgtgcattattagatagttattaaatttggaaatgttgtagaaataggggaaactttggcgaattttttttaggattcttaaatgaacatgttttttaatatttaattaccaagaaccgattggcaactatgaacaccaagaacaaccaatggtctatgaggatgtaagtcaatgtgtaaaattatgttcggataacattgacaatgttgtggctgagggtgtcataattgaggcggttggtttcttttcatatcatggtgacataatttcaaatgat

SEQ ID NO: 275687 - DNA, 434 bp, Cannabis indica
attaactgagtcttacaagccgtatggtctcagctagtatggggaccatgggcctatataaccgagcttccaataagcagacccagaactgactaggtaaattcactgacttattaattccttgttgcatccacgcataggacttggaattgcactctcagtcatatagaactctctatatgttccacgatatagatacgctgttaattatccattgttataatcccaataatcaatgatcctctatatatgatctacattgtatagggataaaattaatgttacaccttttcaatgtattttatccttaaaacacttgctacctgtaaatgatattatactgaattaatatagtcactaaaatgaacgttctatcatttatctctacttagcaagctcgaaggaaatcatcatttcacttttaaatacttata

SEQ ID NO: 275688 - DNA, 749 bp, Cannabis indica
aagggtttttctcaaactttctgaaatggtggaaaggtggttccttttccttattttatacccatgataatgatttcaaaaaagatttgatccaatggacgtgattcgaatcggaagtggaaaagatggtcatataattctgatgcacctcgaaaccgcacaactgccaaaatcagagggaatgcatcttttcaaaaacagaggaacgtgactaaaataccctttgtaatcattaaaaagctctttctaattaaaaagaactttttaaggggcaattattatacccgaagttcggtaagcacatcaaaggaggacacgtgtcgagctgggaagaactcaaacatgcaaacgacaagtatgcttagcatggaacaactcgttagaaatataatttgtagggtatgtttataactcggctggctgaatagccttctgtgagacagaaacgtacgaactgctaacttatgtattgatgagaaaccatgtgggtacacacgttaacgacgaggcttcaacctcgttgcgtgaaagagaaagcgacaacactaaaaatacttagcgtatattatacgatatacaaactgagtatagatagtatgacgagccaagataataaagcgaggcatttatctcgctagaagatggtgtgcatgcgaggaagatcctctcgacaccagagagtatagttatcagagttaagacaatattattcccaagaagccaaaaatgacaagcaactactcgctatc

SEQ ID NO: 275689 - DNA, 546 bp, Cannabis indica
tacacaccgctatggatgagaactatcgtgttgacgctacgaaagaaatggtaaagttgcaaagtttcattgtttgatgtgaactcattcttcattgaatctaactaattgtatacgtttgcagctgtcgacgttggaccttttgtttgatgagaataagtcaaagaatgtgacttttgtggatttcagaattgacagtaaagatcgcaggcttcctcaacaagacaatgaccgagattgcggtgtatacgtcatgaagtacatggaggctgtggctaatgaggaagaagtagttgatcaggtataccactgtttagttagttcagaatgtactacccaagtttgattgagattaacgttgtctaatttaaatttaattcggtgttctactgtcaacttgattagagttaattacattttctaagtttttgtttttgtttctgtattgtcccacaatttcacccgattgaggcacgtttggaaatcgctgcgaggatcataactgatgaacaaaatgaaattcgtaccaaagtggttgaagatcta

SEQ ID NO: 275690 - DNA, 644 bp, Cannabis indica
ttagggttctgaaaaaaaaaaattagggtttgagtttagggttgttttttcgaaaaccctatttggagtgaacattgtttctcaccgcccactcagccgtgttgcccagccgccgatctacgaaaccccgaagtccggtcgccggattcctcgcgcgtggggctcacgcgccggcgcgtggaggcgcgtgtgacggcgccttcgacggcgttctgttgccgattcttcactgggttcttctaagcccactcgcatctgttctaggttgtaattcggtatttgtttgtcttcttcgtgtttgggtgttcattctttggtgttcttttgttctttttctctgtctttgtgtttgcttttgagattatggcagagataagatcagattcaaaatcagttgttgtttctgatgttgttcccgtaatgtctaaaatcacggatcataagttgattggttcgaattatttggaatggagtaagacgattcgactgtatttgaggagtattgacaaagatgatcacttgactgacgatcctcctgaagaaacaaacgattcaaggaaaatatggctccgtgaggatgctcgcttgttccttcaaattcgaaattctatcgataatgaggtaattagtttgattaatcattg

SEQ ID NO: 275691 - DNA, 648 bp, Cannabis indica
gaagagcaatggtagaagaccgacgaagcgtcgaccgtctagtggtcaggtggtagtggaacctcgtcattgttcgctatgtcacggtttagggcacaacagagctacatgcaaagctcgagtttgaaccatttctctaatatttaaatgaatatgtgttgtattgctggttgttggatattgtgcttttttctcctagattaatacttttttggtttgtttaccgatttttaggcgacattatgcgattactgtgggatttgtaactgacaggagcttgtttttagtttgttttgtattttttggcgatatcctgcgatttttgtgcgatgttaactgacaggatcttgtttttggttgctcggttctgtattttttggcgatatttttgcgattatggtgcgattttgtgcgatattaactgacaggatcctgtttttgagtttgctttggttctgtattttttggcgacattgtgcgattatagtgcgatttttctgcgatgtgaactaatctagatttgttagtttgtgtattttggcgatattatgcgatgaatgtgcgattttgatgcgattcttagcgaaaaaaattttcaagaagccatcatttcacagtatttatcaaaaatttaaaaaagaaataaat

SEQ ID NO: 275692 - DNA, 520 bp, Cannabis indica
acccatgaagcaagtcacacgcctcccttctttttttttaatttttttatttttttttataaattaaaaccgaaaataaaatacaatgtgtacaataaatatatgtgattcgaatcaagcaaagaaatcaaatatcattgacaattgacaaaataaaatacatgttatgcttttaaggaaaataactaattagtatctcatgaaataatcatacttaattgatgttgaggaaaaagatatgcatgttactgaaaattgtgaaccaggattaattttaatagaggagacttacagatttgaacacacttgtcagacataagtgtgtgcagtgaaaataggatcattgtccttggcaagatttttcattttcgcctttttcaatttgatcccgcaactggatgctttcacaccatactgaaggtagcccttttctatggtagtgcatcctcatcatagttgctaattacaatgttccagcttactcatcagatggctttcacacctcagtatgggtagctct

SEQ ID NO: 275693 - DNA, 549 bp, Cannabis indica
cccgaccctggttctgtgtccctagtctagttccatgtttgggtctgagttcaggttcgggtcccgagtccaggttgggttgggatccgggtctggctcccaattcgggtctaggtcggatttggagtccgggtcctggtccagttacggttctagatctaggtgcaattttagttatgattccaagtcaaagtcctagttcaagtcccggtcaacttccagttttggttcaaattttgggtctcaaggtacgcgttcgggtccacttttgggtttgggactcggtttaggtccgcgtgtgggttcgggtccttgtcaggattcgggtccagggctgggtcccaaatccagacaacgactacgggttttgtcaaagacgtgggtctagatccagatctcgatctcgggtcgcagtctgcttacatttctggtgccgggtcacgagctgggtcctaggttcaagttcgggtctaggtcgggtactagggcccggtcctagttctatgtcccaggtccctatcctgattctgggtccaggtcacggttatt

SEQ ID NO: 275694 - DNA, 541 bp, Cannabis indica
tcactttgatagtttttatttaggtccaattagtattgggcttattcaataaataataattgtttaattaaggttaaattcatctcatttgggccttgtgtgagagttagggggccattagtagtggatacgacatacttaacccaacactccctcacatgaataactccaattgtgaaagcccatttgccttatttgaaaattgtaatatgttaattacactagtttaacctaacaaaatgattagcaacatagataattttcaaaatatatgaaattaatttttcatcagattattttgaaattaatttaagaaaaatacacttagtttaatgaaattaattcaagataaactatatgtatttttctgtatttaattgaataactaattagatttttctagatacttaattatttgaattttcttagaaaatatatttaagttgaaaattaattttccaaattaattttggatcaactcaaattagaattttttttaaaaattaataattataggaaattagttattcagatattcttt

SEQ ID NO: 275695 - DNA, 460 bp, Cannabis indica
taaataaaatattacgatatatatatattcagtatgtgagatcgtatttttttaactgaattatttttatattaataacaataacatatatatatatttattatacataaattttatgcagatggtgtacataaataacatagtaaacaaaaataaataaccttgtaataaaatatatagaaatgtttattttaattaataaaaaatacaataaaatttaatatttactaactaataaataatatttttattttaattttttaaaatagtatataagattcatgtgctcaaccaaacagtgtaatttaattaacatgaatatgattacatattaccatcatacaaagccaaacacagtttccatattttcctacaattatattcttcttcataatattctctataattaaattattttgaacaccttataccaaatgcccatctcaatatacagtatata

SEQ ID NO: 275696 - DNA, 228 bp, Cannabis indica
tatttttggtcttggccaatccctgacggattctatctttcccgcatacactttgatcccatctttgctaaaaatgttcccaagaaaagacacctgagatagcccaaattcgcacttcttgaatttggcatataacttgtgtactcaaagtggttgtagaacaatccggagatgttgctcatgcgcctcttctgattgagagtacacaaggtgttggaaatattttac

SEQ ID NO: 275697 - DNA, 442 bp, Cannabis indica
atttcaatttcctagaatacattggacaatacagtatgactttgacaagttcaatttccattttctgtcaatggaaccaaactgtatgtttatgtatggaaaatgagttttgtattctgtgatcagtatccacttggactattttaagaactctttactgtaactagacccaagtcatcaaaagaccacaaccacattctttatatctatggcatcaaaaaatctgaacatggatctctttctctccttcgagtttgattaccactgtcttactgactatgattgagtacttgacttgctatgtgtgggcatgacactctttcactaagtgttcgaatatggtgaagaacaatgaaggaggctaaaatcactatggaaggaactctctcatttactagttgtcaaagaatgaaaactagatttggtaggttgaatagtcaag

SEQ ID NO: 275698 - DNA, 513 bp, Cannabis indica
caacagcaacatcacagaaacagattacacaattttcatgttgaaaatcaaacttttgcataataaaactctagcatgctcaacctaggaatcatacttcacaagtagcttaattaccaactaaaaatcatgctttaaacctcagaaatcaacaacaaaacacagcagcaacaacctcaatttatcatgcatgcatcaccattttcatcatttttttccaacaaattaaagagagaaagttagagatcacataccacaaacaagagttcacaattataggttgaatctagcttgaaaattgaagaaaaacccagcctttgcaccccaagtaaccagccgaaatagagaggaaaaagagagagagtgtttgaaaattctatttttcttttctaagtgtttttgtaaaaatgaaggaaataaacataaagccacttatcatatttcatttcagccaagtaaacttaaaataaatatttaattttcatttaataaactcacataagacaaaacact

SEQ ID NO: 275699 - DNA, 651 bp, Cannabis indica
aggagagtgatcagaagtagaagtttcaaggttaaaaagtttagcaccttgaaataggagagtccatgcttcggtgaccattgctctgtccagacgaatttcaacccaaagggtagtgcctctgctcttttcccaggtgaaagggtaccccgtgagatcaagatcaagtaaatgacaatcggtgagagctttttgaaaaccttctagaagccatccagggtaaggttgtccacctttcttgtcctcttggttgagaatattgttgacatccccaatcacgcaccaaggaagagttgaagaaccggctatggtgcgaagaagattccatgtcctttctcttcgatttctattaggctcaccatagaaaccagtgagtctccagcttgggtagcccactttgtcaatcctaatatcaatgtgattattagaaaagcccaataagacaccttcttctttttctttccaatacaacactaaacctcctcccacaccttgggcctcaacacaaaaagagccttcaaagcccaattgttgacccacccattcagttctttttttattacacttggtttcacataaaaaaataaaattaggtttcttttgagtaacaagctccttaaggaattgaaaagtctgttggttcccaagccc

SEQ ID NO: 275700 - DNA, 700 bp, Cannabis indica
attatgtactatggtttgtacaaggccagatctcgcctttgccataagtaccttgagaaaatacatggcaaacccaggaaagattcattggcttgcaatgaaatgggttttcaggtacctagtagggacacctaaggttggactcatctacaagcaacaaaagttcagcaccaacatagaaggatacagcgatgccgactatgccggggatagagacagcagaaagtctacttcatcttacatgtttctactaggaggaaactgtgtgagttggaaagcccaactccaacctgtggttgcactttcaacaacagaatcagagtacatatcaaccacagaagctattaaagaagccatatggatgaaaggactcttgacagagatcaagttacttaaagaggttcctagagtgtactcagacagtcaaagttgtgtacacttgtgtaggaaccctgtgttccatgaccgaactaaacatatagagattaagtaccactttataagggacaaggtgactcaaggtgagatacaagtggaaaaagttcctactgaggagaacccagcagatatgggaactaaggtggtgactctcaacaagttcaaacattgtatgaacctgttagcagttgacacaagatggtaaatggaaacttaatcaagcaatgagcctcaaagacagcaacaaataaatacagcaaag

SEQ ID NO: 275701 - DNA, 582 bp, Cannabis indica
caatatcaatggttgatcttaggtctatggatcttaatcctgatatagttaggttcaacttagttgtattatttatgttcttcaatttctccgttaaagtcgaccaattagatcttctcatgacatacagattaatgacatgatagttcaattgagtgggagcactgatcatagatatggaatctatagcttctataggtatttaaaagtgaaacaatgatttccttctaggtttgcaaaatagagaaaaatgattgaggcatcatttcagtaattatattagtttattgaagtatcatttataggtttctaagtgttttaaggattaaatacattgaagggtagaacggtaaatttgtccctatttagtgtagatcgtctatagaggatctttgactattaggattgtaacaatggataatcataacgtatatacatcgtggtacatataaagcgttctatataattgagagtactattcaattccaaatctatagtggtgcaaggtggaattaataagttgagaatttacttggtgaattctagatctacttattgaaagctcggtgatataggcccatg

SEQ ID NO: 275702 - DNA, 824 bp, Cannabis indica
gatcgttttaacttgcaaacaagtgtcttccattctcctcaaagccttcagattgagacataaaaaattgctcactcaattctccattcagaaaaacagttttaacatccatttgatgcaactctaaatcaaaatgcgcaactaaggccataataattctgaatgaatctttagtagaaacaggtgagaaagtttcagtgtaatcaataccttctctttgagtaaagcctttagccactaaacgcgctttaaacctttcaatctgtccctttttatcccttttagcctttaaaatccacttacaacctattggtttaaaaccatcaggtaataaaactagctcccatacaccatttttcttcatggagtcgatctcatcatccgtagctgctaaccattttgaagattgtggactattaagtgcttcactaaaagtgacaggatccacaaaatgatcaatatcatattctccttctccaagataaacaaaattatcatgacactttgttgacttcttttgtctctgagatcttcttagaggaggtacttctggaataacttctctttgttgatcatcacaactggaatttcttcaataacaggattctcattaacaataggagcttcatcattaataggcccttcatcaataataggaccttcatcatcttcgatatcgggagcaatgtattcatcaacaatgggagcattaccaactggagtaggatggagactactattatcatctcttgaaaatgacataggaatacaaattcctttagaggactcccccatttcaagagatgttgaaggaattttttcag

SEQ ID NO: 275703 - DNA, 506 bp, Cannabis indica
aatttcttctttataaatgatatatggttgaagagctagaacaataaaaagcatgtaactaagatatcaaacatcatttctctaaagttagtgtaaaacatggattggagatcactattgttatagagtcccatattgacaattgatttatgtgtcaaaacttaataccatgtataaattgttttggttacttcactcatttttaattaactttcaaatctcatatattctaatattctagacactactacatgaattattagatttactttcattagcaactaaacctctaagaattaaaactttaaaaatttagttgcgtaataaatatcatcgtctgtgatgatgaagtatagagtatgttttcacagtagaatggatattcagttttgctacatatttggtgtgaagaatgagaacatggaagataatgagaagagaaaattagtagtagtagccataggataagagattgaatatctatatataaattaattttataaaat

SEQ ID NO: 275704 - DNA, 775 bp, Cannabis indica
ccagacttgagttgaaggtgctccctagtcatctgcgatatgagttcttgggagaagataagaagattccagttatagtgtcagcttcactttctgatgtggaaactgatagattgcttagagtacttcgggcgcacaacaatgccattgcttggacactgggtgatgttaagggaatcagtccctcaactatgatgcatcgaattctgatgaaagaaaatgctaaaccaacaattgatgcacaacgtagactcaatccacctatgaaggaagttgtcagaaaggaagtggtcaagtggttagatgctggagtggcctaccccatctaagatagtaaatgggttagtccgatgcaagtagttccgaggaaaggggggatgacaataatcaagaatgaaaagaatgagttgattcccacaagagcagttactggttggaggatttgtattgattatagaaaacttaacaaagtaacccagaaagatcattttcccttgcccttcattgatcagatgctagacaaattggcggggcaagaatattactgtttcctcgatggctactctggatatcatcaaatagccatagcacccgaggatcaggaaaagactactttcacatgtccttatggtacttttgcttttagaagaatgccattcggattatgtaacactcctgctacatttcaaaggtgtatgatggctatcttttcggacttaattgaatcttgcattgagatctttatggatgatttctcggtctttggttcttcatt

SEQ ID NO: 275705 - DNA, 1069 bp, Cannabis indica
tcaacttttcttgaattcgatgaatgcacatgatggatgccaaggtaccatgccaatggtggaggaggaggtaatggccaaaaaggatcctcataaacatagtattccattaccatgagctctttgacttgaggaatgcaaaaatgctcttgctgaattttttcaaaaactgggcagttttgctgtgataatgctacagcattatgagcagcaataaatgttgaccaacttggaatgcttgcttccttatcttttatttcactactttggattgaagtgagctcttgtaattgctcaaaattttccccaagtatctccaactcatcaccactcctcaaaatgacattttcattttcttctttctcccttgaattttccatatcaatacccaaagtttcatggggtttagcatacaactcattgaccaaaagctcaaattgattctccaatttcttcaaggatgaagcttggctttgaattaaggcatcatttttcgccatgaactccatcatcaatgcctcaagtgagcttggttgaaccatttgatgaggctcttcttctatgttgaactcttgaaaatccttcaatttctcatcatttggtacttgagtgtaagtgtcaaaatttggctccaaattgttgtagttgtcctcccaaacatggtcattgtttggacaattacaacaccactcattgtactccgccatgtcttccaacatccaataggcttcatcgattgatagttggtagaaattggtggtaccatttcctctttctacccattttcgtgtgcttggattcaacccatttaggaagatttctaattgacactctttggacaacccatgatatggaaacctcactagaaatgccttgtatctccaccatgcttcatacaagggctccaagtcatgttgaacaaaattcataaggacttgtagatgagacatctcaagaccttgcaaaagaaaccaaaacaagacaaacaaagcgtaaaatagaacaaggaaaatagaatgaacaaatgaaaaactaaaaaaaaaaaaaccaaattgatagtaattaagtt

SEQ ID NO: 275706 - DNA, 519 bp, Cannabis indica
cggtaaagttggaattgaatcccctggatttcttgaaagaattcagggcgacatatgtgggcctatttgcccaccatgtggaccattcagaaggtagcctttggtaaacctgagcctatgaagtattcgaggagcaaaagagatcctaacaaatattgtaaattccataaagatattggcatacgaccaacgaatgtcgccaattgaaagatgagatagagactctgatcgctcgaggccattttaaacagtatgtgaaaagacagggccagggatacaactagcccattcagcctaataacccaaacaaccgggggttacaacctattcccgtggaaggagaggacatcctggttattttgggagggccacatatcgcaagggaaagcaataacactcagaaaagatatgtgaaggagataaagaacgagcagtcggtctttgccccaaaaccttccaagaaggtgaaaatcgagaaaccccccattacattcacagaggaagacgagaagaacgtga

SEQ ID NO: 275707 - DNA, 625 bp, Cannabis indica
agtccaatctgcgagtaaagcttatgctaaatgagcaacactcgcaatagtaggggacttatcagaccatactagctcatttcgatgttttcaaattgcccaacatgtcattgcgatcaacctccttttctccccatctgcctgttgtagaaccgtagcaaactagttggcaaaagaagcaactgccgttaaattaacaccagcaggcaactgttgccaacacactttggcaaaagagcaatccaccaagcaatggtagatggtttcatcagttactttgcacacaaggcatatggtatcaataggcacatgtctagaacgaagtctggacttcgtaggcagacagttagtagcagcacgccataacaagtctttcactttcggaggaacacttagcttccaaagagtattccgaaagacagaattatcatcctgtgcacccaactctttgctcaattgtaagaacttataaactgattttactgagaaatggcccgagctctcccaactccaataccaaacatcacataaacgacttgaagacaagaaaatactaagaattaagttagcatccctttcattaaacatatcgtgcaccaagtcaacatcccaagccaacgtatca

SEQ ID NO: 275708 - DNA, 724 bp, Cannabis indica
ttttagatttaattaattataatttcctatattttaagtaattaaataaatatttaagaagatcttaattagcaattaaaatttataaataattatttatttatttatatataaatcccttagcttaatcattttaacaattaaactatttaattttaatatttacaattttttttacaaaaattaaaattagttttatataaattaaaattttatccttataatgaattttttttataagaacacaccctgcttttttttgcaggatgtgtccttataaattaaaaaacatgatattatattgacacttaattaaaacctaattaatctttaaagtcttgatttttatttttttaattataaattctaattaactaaagtcttactcgcaattatcttctttcattcactctccaccacacttacattgaaaatgattgacaacgaaaacatagaacctatagcaaatttgtccgaagatgaagataatttttttcatttcatgagttttgtgaaaaagaaatgtgaagaagatgtctctgacatgagtaacagtggaattgagcatgacactgaagatgttagccatgaatggattgatcctgatgtagctgtttggagtgattttttaaattttttgcagattgataaaaatttagaagactatataagtccatccacacctgtagattaggatgtgctagacaaatttctcttctcttat

SEQ ID NO: 275709 - DNA, 510 bp, Cannabis indica
tcctcctgtcgcaggggctgaagtcgctgcgactgcggggctcgcaaccactgcggcaaggtttgctgggatattaatcccagtagtcgcgatcggcgcgataggcgggttattacctgcgttgacaccctgatcgcccgcatggggatcacggagcgtctcagtgttatgtgggccgcgggagcgtgccctgaaaactgcgttgagatgatcacgtagatcacctcggtgtacttgataacgtcctccctgttgtgtttgtacagagccggaccttgtatacctgctcggagtgcggccatgcgatgacgaagaggctgactctgcgtcattgtctctcgatggacgactgcgaggattacggcgctcaggatcttcgtcaatttgtgcgctctggttaggaaaccttgcggattgatctcttgacatcgggtgattcaagtccagagcttcagggtcagttcttcgttccctgcgtacacggttagtatgacgtctagaaactgttac

SEQ ID NO: 275710 - DNA, 505 bp, Cannabis indica
tggatacatcataagaaatgcatagtctaatccctaggcttttttgaggtttaatggacgtagtcctttatccttccttgattgatgtgatttctcatagagtagccgtcactaggctcattaatcatagtgtagtagctgcagaagggggcactacaaatttttttacttttagtcagaataaaacttgtgactaaaagtaaaagaattgtgactaattataaattatgattcctatgttgtgactaaaaggtccgtggataaaagtattagtcacaaaaattacaatttgttgtgactaaatgtatttttagtcacaatacttgttgtgactaaaactaaattagtgaaaacttgtaactaaatactatgctttagtcacaagtaatattttgttgtgactaaaagtcacatttagtcacaaaaaaattaagttgtgactaaaaagttgtcactaaaaataacagttttttgtagtgggggttacgccgttagactttaatac

SEQ ID NO: 275711 - DNA, 645 bp, Cannabis indica
ttatttattattattatttacacgtagtagattatcagcaataaataaggctccactatcagttgaccaaattttaaataaacactatatacaaaagagaattattgatagtttatgtgccatacacatgcgcctttctatcataatttatattttctttatttttctaattttttaattatttaattatttaattattatatggaatataataactttatttattaataagtttatttttttaaaaaaagaatctcacatggcttagaaacattgtgagtgttgtgttatatgctatatatagtttactatttacatcactttagcttctctcaaaatgagttttacattattttctatctatatctgtatctatatataaaataaaattataaagagttgatttgccatcagttttttcatagtttatatttactctaattttttaaattatctaattctatatattatataataatttgattcattgtaagtttattttaattctatgcatgcataaagaaatagcatttgagttaaaattttagattaataattaatgaattatttttaatatataattttaaaaattaattaaatacgcttcgagaaacgacgagcacgactgaagtggtctataaatac

SEQ ID NO: 275712 - DNA, 692 bp, Cannabis indica
aaatgtcgacataacatcgacatcatgtcgacattctgtcgacattgtcaaacattcaacactggtcgacaaattgtcgacatacaatcgacatgctatcgacattatcataaaagcagtgacaaacgatcaacatcgacaacttatcgacatacagtcgacaaattgtcgacattctaacagtaaactaccaaaagaatcaactgcaacatataatcgacaaactatcgacatacagtcgacaaattgtcgacattctaacagtaaactaccaaaagaatcaactggaatttataatcgacaaactatcgacatacagtcgacaaattgtcgacattctaacagtgaactaccaaaagaatcaactgcaacttattatcgacaaactatcgacatatagtcgacaaattgtcgacattctagggcaaaactacataacatcaaaaaccatcgacaaattgtcgacattatgtcgacaacctgtcgacaacaatgttcaaacacataaacaaatacctatacatatcgacatcctatcgacatttcatcgataactatgtaaaacacacaaaacaccattgaaacatatccaacatatacaacatgcaagtattgacatctagattcgcatatacaatctaaaacacacaaaatctgaagcacatacacaaattcgcattgaaatttctaaa

SEQ ID NO: 275713 - DNA, 717 bp, Cannabis indica
attctctttctcaatgtgaatgacagattataaaaataaacctaactcttttcagatcttttagctcctaaatcacatgttatctaatcatctctaagatagattaacatataatcaacattaagcaataatctaaatttcacaaaggttatgcaaatactttcgtttcacattaaaacctagtgtatccaattttagcattctcaattctcacttttcagattttgaatcgtgatcataaagcatgtaaaaggtgatcaattttaaacatataattaaacccaaatttgaataaactcacaataaataaaggagaaatagcaattatcattaactaaaaataatttcaatcaacattcatcatctctccaaatagaagtttagttcataaaatccataataacatatccataatcaaaactaaaacagaaattaacatataaattaagagtttaagaaagaattagttggtgattgcatttcggatcgccaccattgcttcctctgcctcctgtccttctaaaacacgagcctcttaaatagaaattagggttgctacatctgaaaaagtcaaaaactggccaaaaattccgtgtttcgcccctggtcgcgactacataaagcctagtcgcgaccataggcaaaatataaaaataaactagctgcctggcctcctagtcgcgaccatgaaaaagagtcgcgaccatggaaagtggt

SEQ ID NO: 275714 - DNA, 657 bp, Cannabis indica
ctctctctgtttcagtttttttcaatcttatttataagatggcaatcactcgttcatcatcatccccttctccagttctcaaacaaaaatcaaaaatgggcaagaaatcgttggccaacaaatccaagggtaaacgcccaatcattgaagattatgattctgattttgaagctccaatgcccaagcgtgggagaccccattcttcgaagaaaacgaagctcaacttggaggagcacacggttccagaaatttctgggaaaaaaactattgcacctgctgaagatcggactcaggttggtttttagttttattatcgtttccccctttccttcatttatactttacccagattttggcgtttttatgttcattctggtgtaattttagggtttcatttgcgcattttgtttcatgtttttaaattttttagttatttattgttggttttgaacatttcatttgattcttctctgggtgttgttctttaatttggttttgttttctttattttcagtgtttttttgtgcttacaggttatgtgttttgttttcgtttttagtgttttcaatcagtcgtctgtagtttcttatcagttttttaatagtttgttaatggtatgttttgatgtgttttcgattttcattaggtttagttgtt

SEQ ID NO: 275715 - DNA, 591 bp, Cannabis indica
aaaaatttataaaaaaaaattcggaatttttccttttttttttttgaaaaaaccatactgccaaacgacatgtcgtttttgcaaaaggcaaaaacgacacgtcgttttttacattctgaagtgtgcagaaaacatacaaaaacgacacgtcgtttcattcaccaaaaggctgcctcagaagacaaaaacgacagctgaaatgaagcctttcaaacgacacgtcgtttttgtaaaacgacacgtcgttttttgacaaacgacacgtcgttttttgacaaacgacacgtcgtttttgacaaacgacatgtcgtttgcgtcgtcttctccagccaaaccgggtcgattttgacccgtttttctgcacgcgggtccgtcgaacccaacccaaacccgatcagaaaagacaattccgacgaccaaattgcgtgttttcaaatctaaaatgttctaaataaaataataaagagatccacatagattttatgcacgaaaacatgaaaaaatataaactttaatatcacgaagttaatcggggtccgaaaaagtttttaattgaaaattttttccgaatatttaagtttttacaaggga

SEQ ID NO: 275716 - DNA, 804 bp, Cannabis indica
cttcatgtatttcctcacactcaacagatttagcaacattaaaaacattcaattcaacagtcatgtttccaaaagataatttcaatacaccattacgacagttgataattgcattagatgtagctaaaaatggtctacctaaaatgatgggtatttgagcatgagcattttcaacaggttgagtgtcaagaacaatgaaatcaacaggaaaatagaacttatccactttaattaaaacatcttctataatacctctaggaattttcacagaacgatcagctaattgaagtgttatagaagttggttttaattctcctagaccaagttgcttataaacagaataaggcaataaattcacactagctcctaaatcaagtaaagctttgttaataaaatgatcaccaatgatgcatgaaattgttggacaaccaggatctttatatttcacaaggcttttatattgaattatggagctaacttgttcagttaaaaatgccttttttggaacattagtgtttcttttaacagtgcaaaggtctttcaggaatttggagtaggcaggaatttgtttaatggcatctaagaatgggatgttgatacttacttgtttgaacacttctaagatgtcactatattggttgccttttttgagtggaagtaatctttgtggaaaaggagcttttggaatggaaggaagaatttgatcattatcttttgacaagtcatttgtgttggaactttggctttggtctttttcaacttgaggtgtgtaatcgggtttggcaatttgttttccggacctaa

SEQ ID NO: 275717 - DNA, 556 bp, Cannabis indica
gtgggagcactaatcatagatttgaaatctactgaaatatcatttgtaagaagctaagtgttttaaggataaaatacatgtaggggtgaaacggtaaatttgtccctacttgatgtaagccatctatataggatctttgattattgagattagaacaatggttaaattttcatagcgtatttatatcgtggaacatatagagcattctatataattgagagtgcaattctaaatctatagtggtgcaaagagaaattaataagttagggaatttacttggtaaattctagatctgcttattggaagctcggttatatagccccatggtccccatactagttgagataatactgcttgtaagactcagttaattgattttaattaatcagttataattctaaaattagactatgtcttatgtatgaattttcactaagttagggcttaattatgaagaaaagaggtttagggtttgttaattaagagacttattaagtctaattaataaatatattaaatgtctattttatttaatgaataattttaattattaaat

SEQ ID NO: 275718 - DNA, 683 bp, Cannabis indica
tagtggtttttttttttttttttgtcgaccggtaatttcaggtaatccggttacattatggttctgtctatagtaaattaccgacacgtggtaaatttggagtggacagttcttgcttgtaacctgataaggaaggttgtcgtgtttcaacaattgcggctgcgttaatcctggccgttggattataacaaaaaccattaagagagggaaaaggaaaataatggaaggaatcgttgacgatcgttgactgtgccgatgacggtgacgagttcaacgacgagatggagcgcgtgaggctacgtgttacctcttggtacaatcatccataactcaccaacttctttcactctttcttctccacacggtgccttaaaatgtcagttaccggttaccggtgacttgggctttggacctgaatctattctctgggcccaattcatttgggctttctaatgggcccctgtctatcagaatatattttgtgatagttcctaaagatagtctaggatttttttgttggtgttattattatagtaattaagtatcgagtctcgtataacttaacaaaatagcatttaacaaatatcgctaactaattataaaagggaaatttacaaaaatactagaattcgggttaacttttacaaaaataatgtcacacggaaattttttcaaaaatactg

SEQ ID NO: 275719 - DNA, 683 bp, Cannabis indica
cggatgttccagtagaaggagcttttcacttgccaggtttttgttcaccttctgctcgctggataccctcttcaagtttgataaaaccttctgaacggtcaaggaaatcactcattgagtcgactagtccattcttccttatgtccttccaaagttcaccaaggacttcaatgccccccattatcgcggataactttccgtcctcggttacccgtgaaacctttgtcgccttcgtcatgaatctgctgatataggctcggagaggctctcctggtcttttttttacttcgtccagatctcctaggtgcaacagaagttggcgagagcaggaaaattatgcatggaactccgaggagaaagccttccatgagttaaactttccgggtgccaacttgaaataccattgttgggcggcttcaaagaggttggcagtaaaaatttagcaacatacatctcctcgtactccttgcagatccatttgcatcttgaaatacttgagatgagacaaaggatcttcctttccagtatatattttccaggttggcatcttaaacttgtggggtaactccagaatattgatctcgggggagaaaggggttccacgtgctcggtccaattcgagatcgttgttcctctgaccggccatgccttggaacatactttttagttcgtccaactgtgcc

SEQ ID NO: 275720 - DNA, 773 bp, Cannabis indica
gtgagtagatctaagacctaataaaataaattccaacaggtacatcatcgtagacgggatcatgtacagaagaggattcttaatgccattactcaggtgcgtcacactgaatgaagctgcacggcttctatatgaagttcatgacagattctgtggaatcatgcagccaaacagtgctaatcaaagaaaattctaaggcaaggctacttctggccgacgatgattgaagattcgaaagtttacgtcaagaagtgcgacaaatgccaaatattttcaaagataccaagagcttcgcccaacgagctgacacaaatgcaaagtccgtggccctttgccatctggggaattaacctaatcggacaattacctaaaggtaaaggcggagtacagtacgcagtggtagcagtcgattactttactaaatggaatgaagccgaaccactcgcaactatcacatcaaagaaggttcaagactttatagtgaagaccatcatatgttggttcgcactaccgtacaaaatagtttcggacaacggcaagcagttcgacagtcattctttcactgatttctacacgaaccatggcatcatcaaaagcttctccgtagtggcacatccccaagctaatggtcaagttgaagcagtcaacaagaccttgaaggacacactaaagaaggaacttgaagatgccaaaggaaattggccggaagaactcctcgaagttctatggtcataccgtacaacggatgaaacagcaaccggtcagacaccatt

SEQ ID NO: 275721 - DNA, 507 bp, Cannabis indica
ccctttaaaagttctttttttttttgtaaaaagagctttttaataattacgaagggcatttttgccaaaatcctttcttggaaaggacaactcctttgattctggcggttgtacggttttaagagtcatgatgaatcgcctatttatattttgcacaactcccagccgttagatttctcaatctttggctttcttatcactggacttcgtgtataaaagggcggctcaagcttgtcatttttcataaacctctgacttctttaagttaaatccattttcagaatggattacttccttcctgccaaaatgtctcttctgagttcagaagtttatccttctagactcataatacccaaatgcgccaaccattttccatttgttcctacagacttgaagcctcaaccggagctggaaacgatggattccaggggtgaggagcttccaaccaatccaaaccaggggaaccccgtagcttgccatgaccgatccttacaagtgatcccagag

SEQ ID NO: 275722 - DNA, 469 bp, Cannabis indica
aaaccgaaccccaaaaaaacctctcaccatctctttggccgaaacacctcaaaaccgaaaactcaagaacatgaacacatacacaaatacaaataccagaaaagtaataagagagagatgagagaatgcaaacagtgattaagaagatgacaccaaaactttgatctcggagttcgcccaaaacaaccggctacttctccgtcaagccctcaaagcttgaatccattcatctcaaataataggttacaatctttgatttacaactttatatttctctctgtttttctcacttgtgatactaacaaaactctcttttcttttacatgaacactctaggaggagctcacatggagatgacaactcttagccaaaaggctctcattttctctgttgttgaatctattgttctctctggctgtgactatttacttttgttgtatctcttattttgctctgtatattattcctt

SEQ ID NO: 275723 - DNA, 1722 bp, Cannabis indica
aataagcaattgttatttgtatttatagactgactgatgcataggaagaaagatatggagttgagaatcatttactctaaaatcattaattcccataatatccacacaaaattaaataatttcctagatatacaatataggaaaattattgagtacactctccaatatattggtacaccctgtcgtgttatatataaaatactcaatccaatttaattgacatccaattaaaaattttaaaattcacatttatgcgaattaaatgttagttgatatgtaaaagtaagcgatctaatctaatctaatccaatccatccacatatttatattaattttaaaaaaattatatataatattaatattttaggaaaaaataaataactcaaaaatctaatacatatcatacaaatatatttcaaaacctaataaattaaatgtatattttattctaacttataagaaaaatataacctaaacgaaatttaacatttctttgtacgtacattcttttcgtattcctttgaattttttatttattgttttcattttttttttaaatttatttcttgaagacataaaataacactaatttctttaattttattattaattatgtgaaaaaaaaaattatttcataatgttatcccaattttagcactctgacgtggcatcacaggttggtgacacgtggaatcgactccccataatttgcccgaaaaagatgttccgaacataacaccgaacatatctccacggacaaagtctcttagccgacagtggacaatccgaacagcatgccaacacatagcaacttcagcacttgcattgtgactcacaaaagcaaatctctatgctctgggatcgtatcacagagatatggcaagctgtcaaaaatccctcaatcagtcgtattctatatttaatgtgtaatcttaccattatagacattatagacaaaaatgggaaaacaatctcaagcacagagccctataaatagtgatctattctcaatgggtaaggggtcaagagaatgatctaagagaagtatactcagagattttactgtaagagctttaagagaagaatctttgtattctttgttcttaagttaatataaattaaggggagtaggctattaccgaactgctcggggccgaacttctttaaaaactctgtgttctttatttatcttttcatattatatctatagaatattacttatcgcttacaattaagactcattgtcattagctaaaagtaaggtcaacattttggtgctttcattgagagcaaggatcacaaactcgctctttacttcaaattagtcataaacacgatggtggtacagactcgtagaggtgtggtcaatccagcgaatccaccagcagtggatcctgcattgcacaatccagaaaaggcaggggttccaccagccacgaatcctgaacaaccaccgaccgtagggcagggtgtgatgactcctttgaatggaatcgcacctagtgtgcaagagactgaaaataccagttcggcaggcaatcagggtattcccaacaccggagttctgccagcaacaaatttctgaacaactgttggagacgacaccgagatccaaaacctccgtgatgcttttggactcatgcaaggccatactaatactctgcatcacgatcaggaagagctctgtgttgcaatgaacctcgcattcgaagagcaaaggcg

SEQ ID NO: 275724 - DNA, 731 bp, Cannabis indica
cacatcttcatgtccttctaaatcatcaaatttcacattcattgattcaactacagtgagagtccgtttgttgaatactctgtaagcccgactgttggtggagtaccccaaaaatgttccttcatcactcctgggatcaaacttggtcaagtgatcccgatcgttcaggacataacacgtacatccaaagatatgcatgtggctcacgttaggaggtcttcctttccatagctcataggcagtttgagaggtaccagtgcgaagatgaactctattgcacacgtaacaggcagtattgacagcttcagcccaaaatcgttttgaaatatccttggcctgcatcatgacccgagccatttcctgtagtgttctgttttttcgttcaacaactccattctgctgaggagtttttggggctgagaactcgtggtgaattcccatgccattacagaactctgagaatatggaattttcgaactcttttccatggtcacttcttagtcgaaaaacttttccaactttggagtctttctcagtttgcaatctcagtatcaaggcagagaatgatccaaatgtgtcagacttgtctctaagaaattcaacccaggtaaaccgagagtagtcatccaccaagaccattacatatcttttcccactgatactttcattctgcattggccccattaagtcaacatgcattagttccagcacacgagaggtgagaagtctat

SEQ ID NO: 275725 - DNA, 540 bp, Cannabis indica
tgcactggaacaagccgcaagtgcaagtatgttcctgcaagtccactacgccaccggtcagaactgttcctccagggtgaacctgcaacgtgtaaggtccgcatgagtcaacgttcaaataccgacctttttcaaaatgcaatgtcaagtcctcctccatttctggtgctaggggtttcgtccacttgtcagctttttcttttcgtgaagcaaaccacttttggactttggacctcaggaatgctacagcagcagtgatcgggaagcctcttgcatccttagttgtgttgttgaagctcttagcccagttgctcgtcattacattgtaacgtacccctggaaagtacgaccggacccatttttcaaatccaatttcctcaagatattgtgcaaccgcagcattcattgcccgaatgttctcaaattctctgtgaaactctgatcttgaatacgtgtaggcacacgtgtaaatgtgattcgtgaagacgtcagtcttgaacttgtggttgacgttcataataatgtggtggtagcatgcac

SEQ ID NO: 275726 - DNA, 741 bp, Cannabis indica
aaccattttgtaaaaacactttcaaaaagactaatttagcaagtaatttgaaatataccattagaaattacttctaacattaagaattaataatgaacgaagttagtttatagtactagtactcgaactaataatatgatatactttagagaaagtttatatgtatttaaattcaagccattattaaaacaaggttcattaatatttttaccgcctaaattttaacatgtataaaattatattatgcattcttaattttttaggtcgttaatttttttttttgaactattaaaattgttgaatctaagaatttttatctaatttcattatattttactaatatagagattgtccatatactaaattgtacccctaaactttaatatctaccgaattatgcctctaaactttaacctatactaaattgtgctcccgaaatttttatcagactttttttaataaaactagacaaaattctccctgaactattaagattgttagatttaaggacttttgtttaattttagttaaaaaatttacttaactatggtatgaaattagttctaggagacatgatttagtacatataaagtttagtaagggcgatgatttggtagattatcaaagtctagggagcgatgatttagtactataacaactcactgtaaacagtaaaatgaatgaaattaacaaagtacctaatactaacaattttaatagttcaggtagaatttttaatgg

SEQ ID NO: 275727 - DNA, 672 bp, Cannabis indica
aagaagaaaacccccaaatcagcttatccctttcatcttcctctcctgaaaaccctagccgcacaccaccttcagcctctccctagccgtccaccattgctacaccccagtcaatctccaagctcgaacccagccgcaccattcacccctgcacagaccactcccatccgcacactactcaacctcattcacaacccaccattcgaatcaccaaaatcgcaccagttcaccttcgcaccaccaagctcgcatcctccgcccaaccacatcgactcacagcccgaaccaccactctgcatccttcaccattccgtgagtcaccatcactcgtccatccatccacaggttcgaactcgccttcaccaccgagccctcatttcgcacaccttcagcacaaccacgaaccagccaccatcacaagctctagcaagcacattcgacctcagcagcaagaagttgacgcctgcacatttcagccaactcaaagtgaatccgggtttgagaatttcaattcaaaatttatttggttaaacagtgttatttggtgagtattgtggcctgtgtagctgagtatttttagggtggaggagcattggatttgtgttgttattctgtgattatactgttgctaattgggctgttgagagaaaaaaaaaattgtagctgaattct

SEQ ID NO: 275728 - DNA, 850 bp, Cannabis indica
  modified_base (832)..(832): a, c, t, g, unknown or other
ggaccaaataacgggcatcagtactagcaaccgttgattaaagatttcataactttaatatgttgctgactatgtcactcatggcttagtgatcttaattctccgtactatataagtcacaccctcatgtatgaataaagaattttttgatatttatatataaattacttaatattaaatattaataatttaacattcaagcatatatcaaaatattcaacttatatttttaaatagaaatgtctttacagacttttcagggcataaatcctacataattcattgcatccaaatttagttatgcaagtgccttctattaccaaaaaattagtgattctaagctaactcaagataatgatgttttcttagaatttcccaaatcatgttgttttgttaaggacaagcaaacaagtgcagtcttgctcaaagggaaagttaaagatggtctttattgtctaggagaggataactcgattctttccaccaagtctttggagtgtcatcttgtcacttcttatgaggataactctaatgttccccactctctcaaaagtctcaaaccttgcattgcttgtaaacaaggtaaaggccataaactttctttcccttgtccaccagcggagcctttcaaccccttgaactaatcatccgatcttgggtcttcctcgttgtctctaaagacaattacaaatactatattacatttatagatgattatagtaggttttccgtaaattttccctacttactcttaaggctcaacttctgaaacatttatcaaatttaagggtcttgttgaaaacaatttaatcttcttatcatgtgggggggngggggagggtatatacgt

SEQ ID NO: 275729 - DNA, 500 bp, Cannabis indica
ttaataaaataatttataaaaatgtaacaaacttactctaagtaagcttggatttcaggagaattttgaagaatgtaccactcagctttttcacgactggtatgatcaagagccttgataagtccgctagttaaaggacgagattgagaattaaaaactgagagatagcgacaaacagaaggcgcatcttcatttcgatcaagccgattaaatcttgtttcacaccctttaaagtacattgaacaaaaggttactgcctcatcatcaccggtgagctaaaagctcagtaaggaaatgcttatcaaacaataccatataatatcacacatactaccattaatgtatttataagttttagcaatatcatacatgctcttttataatataaccaaataattgtacatatggaaaccttcatcatataggtctatactatttgttcacaccgtacacatatacagagatcataactccaatatcatactcataacataatcata

SEQ ID NO: 275730 - DNA, 570 bp, Cannabis indica
gaagccaagatagatagtctcatggatactcctccagaagttgtaacagcagatcctgatgcagcagaacccattgctgatgctgcaaatgacgaatctgctgctgcaactgaaactggagaaccagaaccgtctatcttgactcatccaaacatcatcactgactctattcagaaagaaccaagcaccagagtcaaactgaatcatccaaaagatctcatccttggaaatcctgaagaaagcatggtaactcgcagaaggtatattaatttaatcagctttctttgctttgtttctcaatatgaaccgaaaaatgtgaaggaagccatgacctttgaggaatggctcaatgcaatgcaagaggaactcaaccaatttgttcgcaacaaggtatggattttggtccgaagaccaaaaggtataaatgttattggaacaaagtggttatttaaaaataaaagtgatgagttcggtacaattgtgagaaacaaggctcgtttggtggcacaagggtacacacaggtagaaggtattgattttgatgaaacttttgctcctgttgcaagatta

SEQ ID NO: 275731 - DNA, 768 bp, Cannabis indica
gagtgtcggccctccgaggcctcttcggctcgtcctgggcaatcatcttgcccttacgcttgcgaatcagagccacttcaggctcctcctcgtcctcctctgctaccactggaagggcttgaggctctccagtaccctcagcggcttcctccgagaagtcccaccctttcccttggccttctcccggaagcacctcctcgtcatccactaagtcaatggtttcggggggagcgccggaaggaaccttcaaggaaggagccgggggagagggggtgaaagccggaggagccacgggagtatgaaccccggcaagctgttccaggatggcatccatggaggtacctgttccaataaaataagcaagtgttagaagttcgtgaggaaccgcttataaaagatgcagcaaataagctactcctacccgaacttcctaattcggccctagcaaagtcccgaactttaatgctggcagcatcatctccaagataactgtccgagggccgaaaccagctggacgctatgtaagccgacggacctaagggaataggttccggagggccggagcccatccgggaccgacctaggtaatctcctaagttcgtaaaaataaaattaccttcaaattgatcccccaaccgggtcgacggcatcttaaacctacggagacgctcgtcgaaccctatgggcctatgactggtatattcatcaacggaaggaacatagcgaattatcaagggagacttaccaccggcaccggaagtgctagca

SEQ ID NO: 275732 - DNA, 846 bp, Cannabis indica
atatataattacatatatatatataacttttaatttcctacatttactaatgattttgctgtagtgtggtgatctttattgctggtgcaaagcaaggaatgacagaaaaaaggggctgctgcaatatggtgtgagcaaatttgtatgttgaagcagtaggtcccagtacagcattggatcagcatcgcttcagcattttgaagcagagactctagtggggaagagttcaaatcttgagggagttttctttttttccttagttaaattgttattgctggttgtgtttgattgtttacttagtttacttttattgtcgtctttagttgtgtgagtaataaatattatgtggattagatgtgtattaatcatgttgttttgtcatgtttgtgatgttatgttttagcttgcaaatgagaaaaatactgcatgtattttcagcttggtttagggtagcgctcgatgatgaaaaatatccattttcctccatttgtggagtgccttggtttgtgtgttgaaaatgctaattttaagtgttatttttgtctaaatgctagcctatgaggaatgctttcaacaattgtgtgcttgtgttatcccaccataccttgagtttttagaatagctaacactttgagagagtttaagcatctagaattagctagtgtaatccttgaggcgaaatcctagcgagctttataacttagaaatgatttaggccatctttggacgtttgagcctttctaaccttccctataaattcaatttttccctagtcacccaagtttgagccgtttagcctattcttgttgtgcaacccaatcctacatctaacgccaatcctaattt

SEQ ID NO: 275733 - DNA, 650 bp, Cannabis indica
tgtggagtgccttggtttgtgtgttaaaatgctaattttaagtgttatttttgtctaaatgctagcctatgaggaatgctttcaacaattgtgtgcttgtgttatcccaccataccttgagtttttagaatagctaacactttgagagagtttaagcatctagaattagctagtgtaatccttgaggcgaaatcctagcgagctttataacttagaaatgatttaggccatctttggacgtttgagcctttctaaccttccctatgaattcaatttttccctagtcacccaagtttgagccatttagcctattattgttgtgcaacccaatcctacatctaacgccaatcttaatttgcatttccacatatgtcctaacttaattgctcacttgtcaagagccaagtttcacattaagtttggggtgagtgcggtgagtgtaacttgtggcgagctaattcaaggttatactttagccacattggggacaatgttgggttgtaagtttggggtgggggaattagctcacaaagtatatgagtatgaactttcaattaaccttctcttgctatttattatataagtataatatagtaataaatgtctttctaatatatgaaaaaaaaaatcagcaatgaaaaaaaaaaaaa

SEQ ID NO: 275734 - DNA, 566 bp, Cannabis indica
agctatctcaaaacataactactggagacacacacacacacatacatatatatatatgtataagataatacagtacatgtgtattctacctcaaagacaagctattgtgtaaacgcttctaagcaagacagtaggctaaaaaaaaagggaaagcgtctataccatgaaattgtcaagggggagtataaacccaggtgttcgatggagagccttgatccttacaacgttgtttcatacctgctatcttatgatttagctcttcaacttccctaacctttatatcccgttcttcacacatcttttcaagttctcccaccaaatgacgatagcggatagatgagttgacagcctcaaaataggattcaacaatttttcctaacacagaaggtcgttccgggaaaataagacaaagtatcttccaatactccaacaaatgagagtagtgttgctcagagatttcaaatgttaagcgaagcaagggtaaacaaggagaacttagctgaataaatagtgacttcttgattggggaaagattctcaaagaaagaggtaaaatccttgtccaat

SEQ ID NO: 275735 - DNA, 569 bp, Cannabis indica
aaaaatattaagagtgatttttgaaaattattttaagcttaattttttaaaaatattaagatgtatttatcattttatagggttcaaattattacagaaaggaaactttttattaatggaaaaagaattcccattcagaccttatataatataggcatttatgttaattagttatagttaattagagtaatatacttaagtgccgtttggtaacactttatttttttaattttttaatcacaaaatgaaagtaaaatttttatttttaaaaaacaaaaatgcgttctataaccacttttgttttccaattttaaaaacaaaaaacaaaagtatgttatgtaaagttcatttttatttttattttttaattttatttaagtcgggtcaagatccgaggttggattcgggtgcgggtcagaagccgggttcagcgccaaggccgtgaggaggggatttgggtccgggtctggttgtaatccaaaagaatgattaaaaaaactgtttaaaaaaatattgaaagtgattttttttttaaaattttgatttctaattataaaattgaaaagtaa

SEQ ID NO: 275736 - DNA, 254 bp, Cannabis indica
gagtgaatttcgcaacaccaaattatataatattattagtaacaagaagaaatttacgtggaaagacaaatgcgagtattcaacctagaatggcgagtactcgactgggaatgagaaataattaagaaaaactggaaaataacaaacaaggacaagaggggagtatgctcgcatatttcgatatacgcgatctactctcttgtctcggatgcgattagactccggtcatgctcgctatctctcgctggttatat

SEQ ID NO: 275737 - DNA, 582 bp, Cannabis indica
caattcaagagaagttctctccttcaggtatctcggaatccctatttgttcaaaaagaattctcatgctgaatgtcagattttgttagagaagatggtcagtaaaattagaggatggagctctcggaatctatcatatatgggaagagtaacattgataaatgctgtactcatagctatacacacttattgggctcagattatgattttacctaagaaattgctcaaggatattgaggccatttgcagagcatacttatggaagggcactcaatcaatgatgggggctggtttggtggcatgggagcatgtatgcacatccaaaagtgctggtggacttggtcttagagatattcaaaagtggaacatagcagctatggcaaggtatgtatgggatatagaaatatttaaaattggaaaaaatttcgaattgaaaatatttaaaattggaaacatttcaatttcgaaatattttaaaattggaaaaatgcattttgggaagcaatcccatgaaaaaattggatttttcggaaaaaattccaaaaaatcgcacttttggggaaggcagcccaggaggctgcac

SEQ ID NO: 275738 - DNA, 707 bp, Cannabis indica
gcaacacacaatcaatccatttttcttatcaacaaatactagcgtgtttaattcaaaagttaaatatccctattaccttacaaaggtctttatggtaggattgcccaattcaaacttcaatgacttaagtacttcactttccatcttcactaccttcacaaagagctgttatgttaaaagaaaataaaaataataattcaaaatagtgaatttaatgacagagaaaatgaataaatcattacctcttccatagtgtaagtattatccgttatatagcaaaaatcttcaacatgaggagggccaatctcttcatactttcttcttatcagaataaatttgaaacaccaacaaaacaaaaatagaaagtatcatttccaagccagaaaaaaacagtatacattaatacagaaaaatccaaccctttcaaaaaaaataaaataataaatataaaaatacgaaagaacttgggacttacgtacgctatcagcattgtaagaaactacctaataaactagaaaaactctggcgatccaaagtacttcattgacaaaaatactatcaatgaaggaaataagtgaggaataaagtaatcggaaagtaagtctgtatcctctgcaacttctaccaaccaactcaaccaaaatacccctccataccacgctgtaatgttccttttcgtaactttcttcctactgtaatactggtta

SEQ ID NO: 275739 - DNA, 605 bp, Cannabis indica
acgcgctcaaagctcgtgccaggaaaccgaggagtcgaccggaggcacttgagcaagccttgttttatttttcaaataaacaaggcttggggggtaaatgttgcccctgattttgcccaatatacgtggaccaaccagacaaggacacgtggatcaaacaacttagcatccaaactatttgctaagtctttatgtaataaagcagcatccgggacatgcctcccggagaagacataaggagccccatacgctcccggaagcccaagtaaggctaaggcatctccgcgaggtgtcaggtttcccctgagcaatcaagtcgcatttaatgccgcatgggaggaagcgtgttgggactgctacacgcaataaagtctgacggcacaacctccaaccagcagctacaaagtaatgatcatttaagtctatcgacggctacactgtgaagagtcacatcagtcaaaagacaataaggacattccacataaaagccctacagcacctagggatttgaccgtgcattacccatggtatattcattgggaatgcccaactttatggatacttacagatacatttgtacaatagttctggggatcaccccacca

SEQ ID NO: 275740 - DNA, 733 bp, Cannabis indica
gggcataaaacccaacaaccagcccgttttaaaagttgtgaaccatcatccacttcttaataccatgacgagagcactttctgattaaatccttgaacctctcccaagactcatggagagactcattctcttgttgacagaaattgttgatctctcctcgcagcttagcagactttgctgggggaaagaacttagacagaaatttagtagccaagtgattccatgtagctatagaatttggtggcaaggagattaaccaactcttggctctttctctgagtgagaatggaaacagtctcaaatggatggcgtcatcactaactccattgcctttgaaagtctaacataactccatgaagtttgatagatgcagattggggtcttcagaagggagtccaccaaactggactgaagactgcaccatttgaagtatgacatgcttaatttaaaagttgttagcatccagtgttggtggtctgatgcatgactgaacccccgtaagggtcgggagaatataatctctcaagctgcggcaattagcttgatcttcaacggcaccgccattattaccgttgttgcctccattattcgcagcattagcattagcattagcattagcattagcagccatgatttctggtgtttcacaagttgctgaaactctttcttgcctcttgttctttctgtttctcctacaagtcttttcgatttcaggatcaactggtaatatgac

SEQ ID NO: 275741 - DNA, 289 bp, Cannabis indica
agatgcaaaaatgataaaacagcaaaattgcataagtgaggcccattatccaaagcccatggccgaccactcttataggcttttatcatttaattttttattattttaatgccaaataattctaacttaaacctaggtggttacctataaatagatagtgatggctcacattcacacttaacttttgttaactttgtcagatgaaatttgagcctcctattctttctctatagccgccacttcccttctcttttcttcttcaatttcgaaatccttgagtgatagagta

SEQ ID NO: 275742 - DNA, 898 bp, Cannabis indica
gactatatccttgagccacaagtcgtgctttatttcgagtcactgtcccaaattcatcagacttgtttttaaacaaccattttgtccctataacatttgcaccatctggtcgagggaccattatccagacacccagtctcttgaaatttcccatttcatcctgcatggcagccaaccagaactcatctaacaatgcatctcgaacacttttgggctcaatctgtgacagatagcaggcaaaggctaacaaattctgcagtttacgtctagtgaccatggtatcattcggatttcctatgacagtggcctgaggatgagctttctcaacccaggatgggggcccgtttttatgtactttgacttgttggggttcgttggtcagggcactatcaacttcatttcctcttcctggaccactggcactggcttgattgtcacctgatatgcctgatgctgtatttagagactctgtagaagtgtcagggtacacttgaggctgtctagtgaggactggtctagagcctgagagaacaggagagtcatcttcgatccacacttcttcatgtccttctaaatcatcaaatttcacttcattgattcaactacagagagagtccgtttgttgaatactctgtaagcccgactgttggtggagtaccccagaaatgttccttcatcactcctgggatcaaacttggtcaagtgatcccgatcgttcaggacataacacgtacatccgaaaatatgcatgtggctcacgttaggaggtcttcctttccatagctcataggcagtttgagaggtaccagtgcgaagatgaactctattgcacacgtagcaggcagtattgacagcttcagcccaaaatcgttttgaaatatctttggcctgcatcatg

SEQ ID NO: 275743 - DNA, 585 bp, Cannabis indica
gaacgttcatacgacaatactatagaccataatgtcaatctatactcaatatgccagtcatactctagtcatattgatgtcatagcatcgatcagtatttcagccaacatacatttatcggtaatcagtacaactctatgtatactattactgttatcaatgtactctaacatgcataaacaacatgtacactaaacatgtaaatacatatgcataatattatattaatcttaccttgttttcgaattcaggtgtgctggccaacctgagtgaaacagctactcgacgaattacaagcccctaaatcacatcgttcataacatggataattgcacgctaaatcacaaccggggacttaggttttaaaccagaaatctatctactgaaagttaacatggaaataccctaaactaacagggaattaaccatccaaagctttgaaactaacacgaatcgacaacacgaaaaattcgaggaacccagcagttgatccggttaaccggttttacaggacctgtaaaacctgttaaccagtttacaccagaaaaccccaaaaaattcaaaaacctaaccaaattgattcca

SEQ ID NO: 275744 - DNA, 645 bp, Cannabis indica
aggggttttcgtccacttgtcagctttttcttttcgtgaagcaaaccacttctggactttggacctcaggaatgccacagcagcagtgatcgggaagcctcttgcatccttagttgtgttgttgaagctctcagcccagttgctcgtcattacattgtaacgtacccctggaaagtacgaccggacccacttttcaaatccaatttcctcaagatattttgcaaccgcagcattcatggcccgaatgttctcaaattctctgtgaaactctgatcttgaatacgtgtaggcacacgtgtaaatgtgattcgtgaagacgtcagtcttgaacttgtggttgacgttcataataatgtggtggtagcatgcaccgtggtgtgcatcagggaacacgatatccaaagcacgaacaatgctttgatgcctatccgaaacaaaggctaagttctcaacatcaccaatcgtttctttcaattttctcataaaataggtccaggaattgtggttttcactgtcaactatagcaaaagctatcggaaagatatgactccctgcatccaaagccactgcacacaacatttgcccaccatatctagtcttcaagaaagacccatcaacgcatacaacaggtcgacaaaatctaaa

SEQ ID NO: 275745 - DNA, 1081 bp, Cannabis indica
agtaattttatggatgtggcaatgggaacatcatgtaattaagaaaataatgagttgtcacagcaaatgtggtgagtagcactactatcaacaatctataaagagtttgagtattgtgtgatattaacaaaaatatttgaagcaaaaggtagtgaagcttctgagttggaagctgttggctgaagcttctgaggcagatgcctgattggcagatgcttgtgtttctttccttttgtctccatcccctggtggaaatccaatgagaaagaagcatttctctttaaggtggtcaggtttgtgacaattggtgcagtaaggcctcatcctcttattgcatccttaattcgcattagcagctgatgcagaaggagtttgtgcaagagttggattttgagcaggagcaataagggaggggacctgaggagatttgagattatgctgtctttcttcatggacaaccatgaagaatactttggacatggatggaaaaggatcaataagcaaaatttgagccctaataggataggaagattcatttaaacctgttaaaaattgaagaacctgttcttgattcaagaacaccatatatcaatggaagcagcataggtgcaggggatctgtggacgaagttcttggatctcattccacatgcatttaagtttggtaaaaataagaacttacagaatcatcgccttaaatgcagagtaatgagcgattccctgagttcgaaaaagcgaggaccgtttccttgatcataacgtgaattgagttccttccacattttagtagccgtgtctaggggtgaaaatcggtcagttatggtcggttttaaaaaaattaaaaccgaccggtcggttacggtttttattttacgaaaactgtaaccaatcgtttagaaattataaccgtataaaaccgaccgtacggtttttggcagttttcggtttgccggttttaggcggttttgggcggttttaggcggttttgacggttttttggttaaactattttttttatttcaaaaaccgaaatcgaccgccatgtcaaaaaaaccaaaaccgaaaccgaccgccaaattcgg

SEQ ID NO: 275746 - DNA, 566 bp, Cannabis indica
aataattgaaaccagtttcatcaatcaaccaaatagagaaaaaaaaatacaaaaaaattaccaagaaactggtttcttaatcaagaaattggtttcttgatgaagaaaaaaaaccagtttcttggtgatttttccgataatttttccggcgacaatgacaattctgacgaatttcccagagtttactgtcggtactgaaaaagtcaccggagtagctgtcggtgtattagtcgtcagagttgctaccaacgctagaaaattcgtcagaattgccattgtcgtcagaaaaattaccggaaaaattaccaaaaaactggtttcttcatcaagaaaccagaaaccagtttcttggtaatttttctggcgactatgccaattctaatgacttttctgaagtttactgtcggtgccggaaaagtcgccggagtagctgctagcgtcagaaaagtcgtcagaattggcattgtcaacggaaaaatcaccaagaaaccggtttcttaaacttcaagaaactggtttcttggtgatttttcagtgatttttccggcgacaatgccaatttcgac

SEQ ID NO: 275747 - DNA, 673 bp, Cannabis indica
caatataatattcaaatataagccccaccatgcatatctctacgtgcaactactatcttacctattgtcccgcaaaagaagagatttcaaatccccgggtgctcctgaccaggtgccggtaatcctagtcacaataccgagatttacacaaaaaggggttaacccccaattccacattcataaaatataatcatggcatttaaaatacagataatcacatagagctcggaacgagctttccaacgatagaaagaacttacaaaatggagtcccgagtcaaaagttatggccaaaacaaaattcaacactttcctcgatacagccaaccggaattctggttggaacagctctgaaccaaccggaattccggttgtctgagcagcaacaacacaaaaaatttcaatctttaagcccccataaactactcaaatcttccccaaataccaccaaactttccagagcatcaacatatgacatataaaaacatattctatagctcaaacacaataatttcactaaaaatcaaaaagttccattaaagctccaagcttgagtttcatgaactcaagcttgctttacacaaccaaaatcagagtttacaatcaaactttcagatttaaactcaaagccacatcttaaataacacatcaaaaacaaactctcaaaatttcag

SEQ ID NO: 275748 - DNA, 513 bp, Cannabis indica
acatatatcaaagctcaagtggcaaaaaaaaaaataactagacataaaaatggacgccataataatgctcaccaactggacatacgtgttctaaatagaccaccagttatggtcatttaattaactaaaggaagacaatattccagctagccagacagtcattattcaaatcacacttactactatgtaaagacaaacagtaaaaatgtagatttttactacccatgaagatcaaacacaaacacaaatatacaacaagtaaaatatatttactcatctacatcacaaaaataaatatgaacatgtacaagaacatgaagaacataacaagaacattcaagggagaaggtttagaaaacttacctcttgaaagcctccttctaaaactccaagtctcacttcaccaagagctccaacaaatgtgagcaagagtgaaagtaactctctatatttataaccaaagaggagcattggatgagtgacaagtgtctcccatcccatctgatcatcaca

SEQ ID NO: 275749 - DNA, 810 bp, Cannabis indica
tgtacaatcatcatcagcagttagctcgttctacggttcagtaagcttttattgctttagtagtttatttaatttttatgaaataagaaaagcctgataggaagcatgttagtagcctgatagtagaataggcgcatgtttctttttaatttccaaattaagcggcattagtaagctctccttgaatacgacctgatatgccaactcttggtttcgcaggcggttctgactagatggacgccaggcggactaccaggagccagggcaattcagtggggtcgaatcaaggacagggagctcagtttcccccgcaagctaggggccgaggtagaggcagcagggggcccctgcagtgcctgtgctagtagttccagtggtacccgcccctgctgctcaggccaaaatagttgtggcggctaacagaatggaaccgttgtatgaaaggtttcggaagcaagcacctccggtctttctgggaggtccagatgtgatgaaggccgaacagtggctaacggtgatcaccaaaattctgaattttatggttgtcaccgggaatgaaagagtggtgtgtgccaccttccagttccaggaagacgctcttgtctggtgggacatggtgtctcagatccatgacgtcactactatgacctgggaaaggttccaggaactcttcaacgccaaatattataacgaggcggtcagaagcgccaagaggaaagagttcacccacctgacccaacgagagaatatgagcgtgacagaatatactactcagctcgaccggttggcgaggttagcctcgggaatagt

SEQ ID NO: 275750 - DNA, 338 bp, Cannabis indica
atttaaatggttagaattgaaaaattaacatttttgagaaaatgaaaatgaaaattgtcaaaattaaaaaaacaccaagtggggcccattagtctatggccggccacttatgaggctttttccacctaatattttcattattttaatgcctaataattcttaacctaaacctagtggttacctataaatagatagtgatgactcacacttaataagagatgaaatttttgccttcagagaaaattgagccatcttctatccttttatagccgaaccaccaacctctctcttttattcttaaattttcgaaacctaaagtgatagagtgagtgcccaca

SEQ ID NO: 275751 - DNA, 734 bp, Cannabis indica
gcgagccaagtatatgtgaaaaatgaagacgtcaaaaatgatagattgctctccaacatggatggcgcctattataactatttacttgacgggcaacttccaaatgacaaaaacgaggtaaggaaacgtttgtatacaatgcctcgctacagaatgatcgaaggcaaactatatagaagagggtattctatgccactacttcggtgtgttcttcccgcagaagcagacaaaatcatcagagaaattcatgaaggcttttgccgagatcatgcaggttggcaaagtctatctaaaaagatcattagacaaggatattactggctaacgatcaataaggacacacatgagtttgtcaagagatgtgataaatgtcagagatttttacatatacctcgcgtaccgccaactgaacttagaatgatgaccttgccctacccatttgctatatgggggatcgacatgattggggcattacccactgggtgaggagaagctaagtatgcggtaatagcagtcgacttcttcactaaatggacggaggtcgagccccttgtatccataacatgcaagaaagtccttgacttcatcgttaagaacattatctgtaggtttggaattcccataaagatagtatccgataatggaacccaatttgatggtgacttgttcactgaattctacgagaagaataaaattatcaaaaccttcttgtcagtatccaggcctcaggcaaa

SEQ ID NO: 275752 - DNA, 808 bp, Cannabis indica
gagctgcacagtacattaaaaaaaatcatgttaacatgcctaattagttagggtgttacagtattcaatgcccctacttcggtgtgttcttcctgcagaagcaaatgaaatcatcagaaaaattcatgaaggtttctatggggatcatgagggctggaaaagtctgtctaaaaagattattagaaaaggatattactggccaatgatcaataaagacacacacgagtttgtcaagaaatgtgataagtgtcaaaggttttcatatatacctcgcataccgccaacagaacttagaatgatgacctcgccctacccatttgctatatggggatcgacctaaatggggcattacccactgggcgaggaggagctaagtatgcggtagtagcagttgacttcttcactaaatggacaaaggtcgagcccctcatctccataacctgcaagaaagtccttgactttgtcgtcaagaacattatctataggtttggaattcccatgaagatagtatccgataatggaacccaatttgatggcaacttgttcacagaattctgcgagaggaataaaattatcaaaagcttctcgttagtatccaggccttaggaaaatggacaagtggaagccgttaataaaaccctaaataatactatcaagaagaagctagatgctgccaaaggcagatgggttgatgagctacctcaggtgctctaggcccactgaactaccgagaagacaactacgggacacactcctttctcgctaacatttggctcggaagcaatgctgcctgttgaagtgaacatat

SEQ ID NO: 275753 - DNA, 831 bp, Cannabis indica
tgaacatttcaaaagagggtagtcttgcagcctttctgtctttatggctaagtcgttttgtttttcctactgagggctccaacattagacctgaaactttttatatggcttcaatgatggcccacggacacaaagtttcacttgcaccctctgttttgggatacatttatcgagctttgtatgattcagccatacatggccaggggcgaggtcaagccttcttacctatgcattatgtgataggttggttagccgagcattttcgccatctctatagtggttgggatcttatggatcttcctcatttaagtaagtatggcgggatccctgctgaacgtcgaagcatgaatggggctagacatattttaaggggagaagattatgttatgcatcggccatattcatttcccatggaaaaagatctagactttctggataatgaagatttatctgatgagaaatttgagttactgatttctatgcgttcttctttgctacccgtaagagtgggtaacgatgcatatttagaaccttattatcctaacagatttgtctgagtattcctaggaggaggcagtgtggaataagtaaagtcgctaaagcttgggttttaatattaaggagaaatactggcatccactttcacattcctaggactctccgtatgggtcaatgcacgtggtggtactgtcgttggtgggtgaggagttgcattccatacttggggagatctgtgaaggccattcattcaacattgtccaagcaacctgtaaagcccgcttagtttaatttggaaattagcagttaattatgattatttatgaaattatt

SEQ ID NO: 275754 - DNA, 504 bp, Cannabis indica
aaaataaaaaaaaaagaataaaatatggtagagattttaaactttaactacaatatccaaatacaataaaaattattaactataaagtctaagttttaagttaaacactaaaatgtctaagctttaaatacaaaatagtttaactaataaatgtaatttatgtgatatatatacacttctataaaaatatataaatcggtttaattcggtttattcaggttaattgggcggtttagaataatttgtaaaccacccaatatattcattgggcggtttggattatcattgtattatttcgggttgtatttttggttggtttattcggtttggtttgggcggtttattcgggttgggcggtttgtaaattttgtcgaacacccttactctacaccgcacatcaactcgtaccacttgtaaatctatttgcatttcaaaatatttaagatgtgacacgttggaaattattttaccaggatcttagatttactcacaagtatgtttatt

SEQ ID NO: 275755 - DNA, 557 bp, Cannabis indica
caatataaattcatacacattcataaattatcatacattcagcaagtaataaagacatgtgaaaatacaataactatcatatcttaaataatttctaaggtttctaaccaattgatacagtgtcccggtaggcaagagtcaaagatattattcattgaatagagtagtcagctcatctaaaatggacaccattgtagcaaacttttatttgatcaaaataagaacccaacgttgtcccggtaggcgagagtcaaggttattcttattatatgagcttccaccattgtttcatactttgtaaatttatctctaagtagtcaccataagagagaggctaatagagacgaaaacttacaaaatacttatctttcgagatttttacggtgttaaatgttcaatgtaagaccatctataagggggacgaagtttagcgtctcgaagtcccattaaaatatcaaccatataagaccaataatggagatggaatatccttataactaaagctcattatttttgaaaaaccgtgtttttgcaaatgtcagttgtatatacgaaaa

SEQ ID NO: 275756 - DNA, 616 bp, Cannabis indica
atatgtcaagattatgagcataagtattcctttccctaaaaataaaaaacagttgttcatgatgattttataatgtatattatataattatcttcaaaatagctggaatccagctgctggatagtgggataggtaaacctttgttcctctctctaataaataaaaaagaatcatgggaaacatactttacttaaactaattatataatgaataagtttccattcattatttttttattattgaataaaaaattactaatacaacttgcttaatttagtatttcatggcatgcatccactcaaaaaaggaaatgaacgtacttcaaacaaaataaaataatgataataataaaataacaaattgaaaatgttgtaccaaaatttgggacaagttcaagacatatgttagtgttactaaatataaaaataaaaataaaaaataaaagatagaaataaaaaatgaatggaacaaaatttaaaataacataaaaaaaattaataaaaaaatcaataattttttgaagtattttcatttttataattcaaaacagttatttttagatttttacagaaattcacatgcaaactcacatagcaactaacgaaacaacttaaat

SEQ ID NO: 275757 - DNA, 611 bp, Cannabis indica
tatatttttcataaaaaaaaaaatcctaagtatgggggggtatatatgccagaatgtactattgattatataaaggaaatgcctcatgtttgttaaattttcaaatttttgtcaaagacttgtaaatatttctacttattacaccaagctgtaattaaagtcgcatatatatattaaaaacgcgagtacccgtgtactgcgaaaatgttaaaggataattatccccgcgaggatataaatttgtccaaagtaaaaagcaaatttgtctaagtacaaagtgcgagtacccctgtaccgcataaaaactaaacaagtaaaattaaaaagcataacagttttaacatagaagagaaaagtcaagcatctggagcaacaggagcagtctcatccgcgactttgctaacggcctcgttctcgacttcctcagcatccgcgccctcggcctcttcaggaagattccctccaccaccttgagtttgagtgggcgacatggcgcgaaaagcctcggccatctcagcggcctctgctccgaggatagagaagtcgaagtctgggattttagaaagagtagtgtaaatataatcagaaactgcctgatcatactgtttctt

SEQ ID NO: 275758 - DNA, 995 bp, Cannabis indica
gcttttaatctcgggtttacgtgctttagttatctataatgaatttaattctctgcttataatcatcgtgcaattgtttttgttttatctttagcaaatgctttgtacaggtataggcgcccgcaagtgactgagcagacttatgagtcttggtcacttgttactttttgcaagtatgcttttttgtctgttcggggttttgggttcgaccaaaccttttgtacgcattagatggtaaattaacaacatcctattaatttcgactcaatttgaattttgaaataaatatctttattcatttattgatcaaaaatgtgtttgttaccgtagtaacttacattagagctattagatctaatctgatcttttagcttaacatgaaataaaacaaattgcagaaattagaaattgtactttaaatggtggtcattcgacttgagtacttttcaattttgtctgaacctttgggcgtagtctgcccagcaggccattcacttaaaagtgagttttctttcagtacttaatatggtcaactgacctggtacttctattggtagtattttctaaaatgttctctattccaataccgtggtacttgaacaagttgcattttttcatcatacttgcccaatttgtatgctcctttcaagaacttcgactactgaatatggtccttcccagttaggtccgagtacacctgccgtactgtctttggtgtttagaaatactcttcttaggaccatatctcccagaaagaatttcgagccttcacttgtttattgaaataccgggctactttttgttatgggctatcaactttaagtttgctgtggttcgattctcttcaatttcatcaagtgatttggccaagagtacgtgatttgcttcttggttgtacgtcaatcttttgtgggatggtggctcgagctctacgagtagcatagcttcatatccatatgccatggtgaatggagcctgtccggttgccatttttt

SEQ ID NO: 275759 - DNA, 940 bp, Cannabis indica
gtcagggtgatacgtacattttgggaacatgatagtgcaattgagtgggagcgctaaacatagatatggaatctatagcttctatcaggacatagaagtgaaacgatgatttccttcgagcttggcttaatagagataaatggaagagctcttgtttcagtgattatattagctcactgaaacatcatttataggaagctaagtgttttaaggataaaatacattgaggggtgaaacggtaaatttatccctactcggtgtaaatcatctatagaggatctttgattattgagattagaacgatggttaaatatttatagcgtatctatatcgtggaacatatagagcgttctatatgactgagagtgcaattccaagttctatggtggatgcaataaggaattaataagttagggaatttacttggtaaattctagttctgcttaggaagctcggttgtataggcctgtggtccccatactagttgagaccataatgcttgtgtgactcaaatgattgattttaattaaccaattgtaattctaaaattagactatgtctagtttatgaattttcactaagcaatggctcaattgtgaagaaaatagattctaggtcttattgattaattaagagactttattaagtctaattaataaatatattaaatggcaattttatttgataattaattttaattattaaataaatagttttggtcatttaagtggttagaattggaaaaaagtgacatttttgagaaaataaggaaaaattgtcaaaagtggaaaaaattcccaaatggggcccaacttactatggctggccacttgcaagggattttccattaaattttcaatattttaatgcctaataaatcctaacctaaaggtggttgcctataaagagatattgatggctcacacttaaagatgatgaa

SEQ ID NO: 275760 - DNA, 577 bp, Cannabis indica
caacaatggcttcaggttagtgcttccgctcatctttttatcatcttctttttaatttagcaaatgcatttatgatttaggattttctatattaaagcacttttaggaatatgttcagatctgtaatttatatatttcttaagtgttttataaatcataacaagtggtatctgttagaattttggggataagatgaatgaggttccatcccaaaaccaattggcgatgggaggagtagcccttttatcttatatatcacaatttatttccacacattagcaatgtgggactaactcttaatacaccctcctcacgtttgggcctggaaagtgtgggtataacgaacgacctttaagagaccacaggaccgaacgtgacatttaaaagaatcccacaaggccaaatatcaagaaatttgtgggtgtacacgtcgggaaatttgtggattttgaaacaggtcaaagaccccaacactaaaaattggcacacattggccgaaaggtcccaaatggaggttaaaggggagacagcggaagtatctgtttggaccggcgacactttggctcacaacggatca

SEQ ID NO: 275761 - DNA, 500 bp, Cannabis indica
aagtggtatcagagccaaggttgattggtgttgaattcttgtgtgttgaaaaatggatgagtcggatggaatgatgaaattgaacttatcaaattattctgcttggaagcaattgatggaagatttgctctattgtaaagatttgtacaaacctattaaaggtagtgagaagccgtctaagttagatgatgaggaatgggaagttcaacatagaaaagccattgcctatattagacgatggatggatataaatcttcatgagcacatctctaatgaaacaagagctgatgttgtttggaaaaagctagaaaatctctttgcgaagagaacggctggcaataagatttctctacttagaagacttgtaaatttgaagtacaaggatggtggtagtatggttgagcatacaagtcaatttcagagtcttgcaaaccagttagttgccatgaagatgaatatggatgatgagatgcaagcatcattactcctcagttctttac

SEQ ID NO: 275762 - DNA, 1428 bp, Cannabis indica
tgtcagctctcttcgtcctctagcttcccaaggatgggatgcccttcccctcacgaggtcgcttggttcttcgacctgaagtctaccccaagcaaggcaggtcggggtatttttacttctctcagccaggcttcaagtggttgtgcggcacagatgacaaggcatcagcaaaataggacgttttgttgatgagtacttcatggtgaaggattcgaacatcactcgaactcggtttcagtaaattccgacatatcaccgtcctcccctcacccttgctcttagggatagagctcagaatcttgcccggttgccagaggaagacaggaatatcatccagttgacctccgatgataatctggtgaagtatgggctttacccagaggacttttctcctaagtccgtggcggggaagaaggggaagtctgatgctggccggcctgaacgaactcatccggagaatgagttgattcaactgaagcgagaggctaagttgaagggaggtgccagggccaagcagtatgctcaggagcccatgaatcctgaagatgaagccgaggctgaggctgaggctgagcaggtgaccccattgaagaggaagaagaaactcccagccacgcccaggcctgttgaacatgcaattcgcataagggagcccatttcacctgttcggccatcttatccctttgctggaaaagggaaggctgtcatgtctgagataaactcgatgtcaggtgatgatggacttctgattttctgggcgggcagtcatctgcattttacttctttttcagcttcttgactttcatgctttgtattttctgctggctttttctaaccacgctgtttttgttctgtgcagacatgtctcggcagatgcttgatgctctaaggaagaggatgggcggaagctctagcgcctcccctccggccaagaagcttaagggcggagaggggtcttcggagaagagaccttctggagaggttattaacctttccgaggagctgactgctacaaatccttctactcccaaatctgccaagtctaaggagtctgggccaccaacaactgggtctgagctgatcaggagggtccctgagcgggtacaggcaccaactccacctttgcccgtgctgccagaggccaaggagggcaaggagatgctggcccactacatgaaccagctggttcttgaggtcagtgagcaactgggtggtgctgatagtgactcatctctcgatgtgttggtgggcggagtcttgaaggagctcaccagggttagtcttttttgatacttccctttaacttttcacacttagctccatatgttgctttttccttgtgcaggccggtttgaagttggcttacacttactcccgggctaaatctgctacttccaagagtgcggctctgtccgacaccttgagggc

SEQ ID NO: 275763 - DNA, 612 bp, Cannabis indica
gcaatgaaaaaggccactggaaaccccaatgccctaaattgctagcaaagaacaaggtatttattttcctataaactgatgtgttttagtgaattattatccacttggattattaattctgggcctactaaccatgtttatttattttcttcttatttcagccacaactgcttgaacttggatgctatcttagcgagttgaatctgatagttggacagaagggtggagatagtccaagatgaagatgaagctcgtatttttttttttaattttgaattaattgttttagtttaagaacaatttggatttcaatttttagtttgggattttattccctattttttcatattgtcgcagacaattccttttaattttggagatttttttaataaagttttctattttgaaatgaattgcatttatgaattgagcttcgtttatcttatcctgtttataactataccaactatattcatatgttttgatgtttgtgtatgtgttttattattgatacaaattctatagtattttcctctcttcaatgagttaatactacataaacacttagaatttattttctatgtctatgaataattgttaattctaaaacaa

SEQ ID NO: 275764 - DNA, 668 bp, Cannabis indica
ccgttacaaaatatatttataaacgttttctagctcaatacaaaatttttgtcgcctagcgactgtcaacaaaagccttgatgtcccctaagatcgtacactccaggcctaaccgccccgacatgtacaatctttacctgctcgttctcacggctcctcagctttagccttgcccttacctacacatggaaataacattgtgagtcgacagactcagtaagaaaagcataacatatagcatattaatatcctcggttataacctagcccccatacacccgatcataaccctaatccccgtgtcccacacagtattgagtctagaatgttcataaaccaatactatcgaccataatgtcagcctatactcaatatgctagtcatactctagccatattgatgtgacaacatcgatcagtatttcagccaacatacatttatcaataatcagtacaactccatgtatactattactactatcaatgtaatctaacaggaataaacaacatgtacgctaaacatgtaataacatatggatgccattatactaatcttacctcgattccaaattcaggtgtgccggtcaacctgagtggaacaactgctcgacgaattataggctcttaaatcacatcgataacaacatgaataagtgactcgctaaatcac

SEQ ID NO: 275765 - DNA, 485 bp, Cannabis indica
tctaaggactttgaagcatttgtcaggtcgtctatgtgccccccagcctttctagatttgatgagcatgtcatccatgtacacttccatatttcgccaaatctggtctttaaacattttgtgtaccaatctttggtacgtatttccagcgttttttagaccaaacatcatgacttagtagcaatagagacccatatttgttcggaaacttgtatgttcttggtctggtggatgcattttgatttgattgtagcctgagtaagcgtccatgaagcttaatatttcttgccctgctgttgcgtctacgagctgatcgattcttggaagtggaaaacagtctttggggcatgccttgttgtggtctgtgaaatcaatacagactcgccatttcttgtttggcttgggcactagtacgagattctcgacccaagccgggtagaaagcttcaattatgaagttgttgttgcgcagcttttcaacttcatc

SEQ ID NO: 275766 - DNA, 528 bp, Cannabis indica
gggtagttttgagattgtttgaacttataatttgtgggatgtaggggctggtttggagtgaataagctagatgaggctaaagtagagtttttcttcacttgagtatgtgaatttgattaaatgaatgagttgttgtgttttgaagcttgagatatgttgttttatagtaattgcactgttctggaaagtttggctaggtttggtggagttttgggtcgaaatttggagaagagaaccttagttcctggtctgccagaaccggtcgaccggatgggttctggtgtaccagaaccggtcgaccggttgcttgcaggggaatttttccgagtttgtctcaagttcagttttgacccggggaaattgtgtactatctgttttaaattaaatgtgggatgcttgacctaatttggggttgttgggagttaagttatgtttaatttctaaactagggttttaaatcgaaattttgagttaaggtatttattgtgtttcaattgtcgtgacataggaccgggattgcctagcttg

SEQ ID NO: 275767 - DNA, 585 bp, Cannabis indica
actgtaattgtgactgaatatatgttcaggacttaccagattttgtatatattaatctataaacatgaaaactacatgtaaacataaatgatttctaatctttcattgataacaaatcatattagattaaaatgggttttatttagggcataaaatcccaacaaactcccaattgcactaacataaaacaagtagtgcatttcaatcaatctattgtcttgatcttgagatcaagtgtagtatatttgactcaacccaaatttctggaactgtaagtttgtggtaagctactgctttctccaccattacttcctttgtgttcataaaacattatgcaacatcatttactatatccattactcatttaggaatattgaattctttactgcttataaagtgtatctgaataaatagaagacgtatctctaattctatccagaatggaatagagataacacagtatagaattttcttcagttgaataacttttcagtaatttcgaaattacaaagttatgtatcttcactgatggagcttaaattattatagatggacttttacatcctattagataattcctccacc

SEQ ID NO: 275768 - DNA, 798 bp, Cannabis indica
atagtaaatgtctaaatacaaaactacacaaaaaatcagaagttaaatctgttgtcgagtgaatttcgcaacaccaattttatatgatattattaataacagacagaaatctatatgaagaacaagtgcgagtactcaacctagagtggcgagtactcaaactgggaatgagaaatgattaacagaaaactggaaataacaatgagacaaaggattatagtggttcagtcagattacggtctgcttagtccactgtagcaagagtttcgtaggtgccatttcacggtggatcacccctttatatacaaagcaggtgttcgatcagttatacaaggattgcattcattgtcaatccgtttttacacattgaattacaataattaaactaaacaacattaacattaataaatgaacggcagttactatgttcatcaacatatgcgtcttccgaatctgcgaattgactgttcatattccaatgttaaactcgcaggtttaccattatgtttaggatgtctgcgtccttagatagtcgccttttgtggacatcgcataacgagctgacagaacctagacatgcgagtctatattggtttatcaaggctgcagggttcttaggaccaacttgcatttatagaaagtcggtcttctggtttatacacggatatgaggaggatagttcgatatatgcgagctactctcttgtcttgaatgcgatcagactttggtcatgctcgctgcctctcgcttgttctatcttaagcgaggtttaaaacttcgaggagtccctcatggaca

SEQ ID NO: 275769 - DNA, 808 bp, Cannabis indica
caatcccgatctgagtttggattcagttctaggtctatgtccttggttctgatcctggttttggttcgagttttggtctgggtccgggtctagctttgggtgtgattctaggtgtgggtttgagttcgggtccgagtctgcgtccgggtttgtgtctaggtctggaccccgatctgggtctaggttcgggtccaggtccaagttcgggtcccgagcgcgggtccaagtttgggtttgggtcacgatctcggtctagatctaggtcaagcgtttcgatcccagtctgggtcttggtccgagtccaggttcgtatcctgatccctatctaggtccaagtctgtgtttgggatcgggtcccagatttaggtccaggtacgggtctcagttccggtgtgggtacacaaccgtgtcagggcttgagttccagtctcagtttgggtctgaggctaggtctgtgttcggttctaggtctcggtccgggtcctggtcgcggtcctagtcttgttctaaggtcctgattcggcgattcttgttcaggttctcattttgggtccgaggtctaggtctcaggtcgggtttggttcttcgtctgtgctctggtcctagtctgagtcccagatctagacaccgactacttgtctattccaggccccgttacccgaatcttgagtcaagatctggatcactgtcacgggtctcggtctggttctagttcaggtccaggtcccatttctaagtttgggttcgggatcgagctggggtgcaattctaggttcgaccctggttctgtgtccctagtctggttcca

SEQ ID NO: 275770 - DNA, 716 bp, Cannabis indica
aataaaatccgcacttagtgtggatcagatgcattatgggcaacatattgcagattggattagatgaacatccctatctgcaagtagtattatatcaactagtgtgaggaccatgagcctatataaccaagcttccaataagcagatctagaatttaccaagtaaattctctagcttattaattcctccttgcgccactatagattcgaaattacactcttaattatataaaacgctatatatgtaccaagatatagatacgctatgaattatccattgtttcaatccaaatagtcaaagatcctctatagatgatctacatcgaatagggacaaatttattgttctacccttcaatgtattttatccttaaaaaacttaacaatctataaatgatattttagtaaactaatataattactgaaatgatatctcaatcatttatctctattaacccaagctcgaaggaaatcattgtttcacttctaaacaaatatagaagctatgattccatatctatgattagcgctcccactcaattgaactaccatgtcattaatctgtatgtcacgagaagatccaattggtcgactttaacaaacaaattgaagaacataaataatacaattaagatcgaagctaaccatctcaggattaagatctatagacctaagactaaccagtgatattgacttgaaaagatataacgacaagttt

SEQ ID NO: 275771 - DNA, 505 bp, Cannabis indica
ggggttgcaggagaaggatctgcgacctatgacatcgagcatttatggttttttgggagacgtcataacgataaaaggaatgatcaaactcccaatcactttgggaactgcccccgtgacagccaaatcaatggcagatttcacagtaatcgaccagtactcaacgtataacgccgtaattggtcgaccaatcctgaaagaaatgaagatcataacctcgatctatcatctgacaatgaagttccccacttccgctggaataggttctgtgcggggagtccaagcagaatcgcgagaatgttataacgcagcagttaaacccgcagagaaatggacagactgaagctgttaataaaataatcaagcacaccattaaagggaaactagaagatcgcaaaggggcttggccagacgagttaacgcaagtcctatggtcttataatacaactcctcgatctacaactggcgaaacacccttctcactttcttacgggtgcgaggccat

SEQ ID NO: 275772 - DNA, 507 bp, Cannabis indica
gatcgttgatcttcatcttcaacgccatgtcccgaatcttgagatgctcgatattgtgacccctcatattgtgatccctgatattgagatccctgatttggatatccctgatattgagatccctcatattgagatccttctccttgttctccaacttcggatgtttgtgccctttctttgtaaattcgtcttttttcactttgaatgtacttatgaaactctggatcggatatagaattcaaatccgtgaataaaattttttcgtcagcctttcttctgtgacgttcatttctatccttgttactcttttcaataactttaatgagttctttattttgttccattagtttgttgaattgatcattacctaattgtttttcctttgctttttttacaccacatggtctttctgttggataagtattcatttcctcattattcatgtttagatcaaatgaactcataccagtggatgccgatgttggagactcaaaattgtgagatgat

SEQ ID NO: 275773 - DNA, 991 bp, Cannabis indica
actacagctttctacatggagacctagaagaagagatctatatggaacagcctaaaggttttgagattaaagggaaggaaaatatggtctgcaggttggttaagtccttgtatggactcaaacaagctcctagacagtggaacagaaagtttgatgcttttatgttaaagcatgggttcaacagaagctaccatgacacatgtctgtactacaaaggagactctataaaagatgtcatctacttactactttatgtagatgacatgcttattataagtcaagaaaggactagggttgatatggttaaagctctacttaagacagaatttgaaatgaaggatcttggaaatgctaccaagatccttgggatttctatactaagggacagagataaaggaaaactagtgcttagacaggaagattacattgagaaaatcatagataaattctcaatgagggatgctaaggttgttaagcaacctattactagccagtatacactctctaaggaacaatgccctaagacagagaaggaaattgaaactatgaaggatgtaccctattctaatgctgtagggtctgtaatgtacttaatggtaagtactagacctgatttgggatttgctatgagtgtacttagcaaatacatggctaatccaggaaaagttcactggttagccatgaaatgggtgttcaggtatctacttgggacaactaaggttggattaacctacaatagacagaaagctaacactataattgaaggctacagtgactcagactatgcaggggacagggataataggagatctacatctgcctatttctttctaattggaggtaactgtgtaagttggaaagttcagcttcaacctgttgtggcactatcaactacagaagctgagtatgtggccacaactgaagctataaaggaagctatatggctaaaagggctaatgaaagagcttaatctacttaaaggagtacctac

SEQ ID NO: 275774 - DNA, 577 bp, Cannabis indica
aacccttacaaccggagaatttttcaccaaggtttttcccaaacctctcacaataggtttcttccaaggactatcaacctcactgaattgttgaagtgccaatctcactatcggattgttgtagtgacaatctcactcttctcgggttgtttacaaaatcggtgtcaacctcacctacaaccgagttatttttacaccagtgccaacctcacctctcaatacaatggatatttgatttgaaatacaaagcacactctctctaacaagatgaaatacaatgtgaaatcgtagagagaattgcaagtacactagagaagataagaacaagtttggctcaagtgtgtgtggttggtgtgtttatgaaaagataataattctttagcttaaaacacttataatgatgttatatgatgaatagaagctcaaccaaccataatttttgagtgaaaaactagtttatatagtgtaggaacaaaaactagccgtttatagccgttagcacatttttcaaaaagaatcctaggaaaaacagactacctattttaaaatggactacctatctgcgaaaaacggacta

SEQ ID NO: 275775 - DNA, 960 bp, Cannabis indica
ttaatttccaaattaatcacaaccatttaatagtaatccaatggcttaaaaaaatgtaaccatgatggttacaataaaaatgtaaccattgaaacctcttccatatatttacatgtgtaataagagaacacaagagtgatgatgtgctatttcataattttttttaatgtaattttttaattttgtaagagcttcacgtttaagtctaaagtacattgtgttccagtagatttttattttttcttcatttaaaaaaaaataagtaattaccttatatattattttttttaataataactgttttgaaaactgaaaaagctagtctaattttttagtatgatcgtgtatattttttttttgagtgtagtgtaatggtattttacaatcatatattaacttaatagtcttaaaggtcttaaagtcgaaacccactaacctctccctttttttccccatctctccctcaccattaagctagtctcagtggcttacccagtaagaatgtaattaatactttattttagtcaaacaaaagactcaattcataaaacacataaacataattcaaataacataagtagttgttatgtcatatttcaagcagcaatatagccacgacacgtgtaaaaaagattagataataatccattcgcagtttaaagaatgcttacctcagagaatattggttacatatgtgtttaagtctttccttaaacaaactagagagattaaacaactaacagaagatgtaaatctcaggaaacacagagtacagagtaatcaagacgagatgatatgcggtttaaatgagatagtgtgaaggttcccaagctaaagagcacaaacgatacaatctttaaagcttatagcttatacaagaagttcaagcttcatcatggttgaccaaagggagaagaatgatccaacaattgtctcgtataagtcgtcttgttaccataa

SEQ ID NO: 275776 - DNA, 1209 bp, Cannabis indica
acatgttaagatcccgttggtgagataggggtattttagtaattttgacccgagaagggtatttacatgcttatgggactatattattatatagtatgcctgtgatgtcttttcaggtgtgttctgacaagttggcgcggtatagtcacaaccgggtatttcgggccgaaccgggttcggggccgaaatacaattttgggataaattattggcattttatttatgtgtgatgaatctgaaattatttaaatatgtgttatatatgaaatgacttcaatgcccttaattgtttgagtatgtgagaaatggccctaggggcaaaatggtaaatatgtatttttggatttattttcaactaaaggcattctttgtaaaaaaaaatgaaattcattttctgcatttaccttaaccctaaaacagcccccttccctctctctctatccctctttgtattttgttgaaaaattggtgatttgcttggtgttcaagcttgaaattgaagaattgtttgaggagttgtggcttgatcattgcattgaagcttgaggtagtttttctattgctgaaatttaatgaatttgctgctgtgattttatggttgaaaagcatgaaataggttgggatggtcttgagatgcatgttggtgttttcttgttgatatgagcatgtttgtacttggatcttttgaatttatgttgggttaggtttagacagaatttaaaaggaattttattgtgtttttattctgttattgaactttgaaattaattgttgaagttcaagttcttgagcttgaagtttatgttgtttaatctgaattttgggggtttttaccattggatttttaatgcatgaattgtgttttaagctcttgatttaattattggaaaatctatttgatggatttaaattttggttgtgaattgagttgaaatggatgagtttaggggctgaaattcattgttaaatgctgatttttagttgctggtttttggtgttgttggagagtgaattaggtgtaattcctctctaattacttagtttatgctaggtgaaaatttggtatgattgtgggttgatatagcatgaaaattggtatttttggatgcattttcgtggctggaaaatgggtttcctaggtttttaaaccaagtagacgcgaccattttttatggcagcatagtgtgtttttttcgggtttttgttttg

SEQ ID NO: 275777 - DNA, 558 bp, Cannabis indica
aaaatattcttgaaacttctaatgactattactctctatgattctagaaaattctataatattaccaaaatgatagaaagttctagatacttgtagagtaggtgttgatctttaacactccccctcaacaccgactcttcatactgagttggtctctcagcttctgaaatctcgttgtgctaagtcctttagtgaataagtctgctacttgatcttcgctcttcacttggtgcatctctaattcttcctgaagtactttctctctgagaaaatggtaatgcacctccacatgctttgttcgagcatgaaatactggattctctgctagacgaatagcagactgattgtcacaataaagtggcactgcagaatctgtagattggtgtagatccttcattagttgcatcaaccacgtactctcttgagctgccattgctgctgctctatactctgcttctgtggttgacaaagacactgttggttgccttttgctacaccaagacactactccagatccaatcttgaatacatacccagtagttgatcgtcgggtatcat

SEQ ID NO: 275778 - DNA, 570 bp, Cannabis indica
aaaatatatatatatatatatatatataaaactttaaacgtaaaatttaaaatttaccaataagaagcaataaatttctaacaaaaaaaaataactatgggcttttaaaaaattattaggattatttcacaaatacaataaaaataataaaaatttacaaaaatacggttttacggaattttaaataatttaacgatttttttgattttatttacagaaaatacgattctttttatgttgtacttttgttaatttgttgttgattttttgttatttgtatgttattttttgttgttgttttgatgttatttatatgttattttcatgttacttttatgtagcttttttattattttcgtgttatttctatggacaaccgtaaaaatgtaaaaaaaaaaaattctttaaacgtaaaaatataattttttttacaaaaaaaaaaatggtgcattagtaattgtctcaaattattagggaaatttcatggtatactaacttttgctattttcttacaaaaatactgctagacggtatttttacttttttactgtgtttttttataagtttcat

SEQ ID NO: 275779 - DNA, 292 bp, Cannabis indica
ttttttatgttgtttagggtattgccatgctttttatcaatagggaaacttctagtttctaattaagtccccgggaagggatttagtgtatcacatatcagtgttgtgattgttatggtttaggagcctgcaaatcgccgtttagttcgttccactcaggttgactggcacacctgaatttagaatcgaggtaagattagtatactgacactgtatcacatcggtaaggctagagtatgactagcagctggagtatgaccagtgcaccgagtataggctgatactagggttg

SEQ ID NO: 275780 - DNA, 885 bp, Cannabis indica
tttgaagcaggagtcatagtaagcaactaagataaaaattcacacacaaaaatcagttaaattaaatagctcaaataaaaacattcattcaacatatttcaacccactaaataattatactcataccatatctaccttaaaaattcttttttttattatgttatataaccggttctattttaataataactgatttgaattatttcgtgttatttgtttttatttattataacaatgttatagaatcggttctaatataattataattagtttgagttattttatttgtttttattcattatgttacaaaaccggttatattttaattataaccggtttaagttattttgtgttatttatttttattaattatattctagaactagttctatttttgtttatatttgagacatctacttcttgtaattttttcagtgatttttttcggagacggtaatttttttggtcttttccagcgatggtgactttttcggcgacactaacttttccagcacaggtgattttttcggtgactttttcggtaccggtaacttttttggcgactttttcggcaccggtgactttttcgacgacttttttggtaaaacttattatttacaaatatgggatttctatcttttttttacaaaaatatggcataaaaaaatctatacaaaatataaaaaaaaaaaaaaaaaaaacaaaaaaaaaaaaataactatacaataacattatttatttatgcaataaaaaaataaaaagcgtgtttggtattgttttctgttttttattttctaaaattagttttagtaaatgagaacaaaaaatagtttttagaaatttttaaaaaacaagtctatgtttggttagagtgttttttaaaaa

SEQ ID NO: 275781 - DNA, 711 bp, Cannabis indica
ctccacttctatagtattaaatttttcaagataatctattgggttagaagtacctttatatttgagggattcggatagacgaaacccctttggaagctgagcttgtcgcacttctgtagtgaagggcgaggtaccatgcaacttgtatatgggcttccgttgctgctcgagcattttcaaagcctgcagaagcatgctctggtcaatccctccagtcgcaggagtcggggctgctacgactgcgggagtcgcaactactgcggcgagatttgctgggacatcgatcccagtggtcgcgatcggcgcggtaggcgggttattataagtgttgacaccctgatcgtccgcatggggatcacggagtgtctcagtattacgcggggcgcgagagcgtgccctaaaaactgcgttgaggtgatcacgcagatcaccccgatgtacctggtaatgtcctccctgttgtgtctgtacagagccggaccttgtgtatctacttggagtacgaccatgcgatgacgaagaggctgattctgcgtcgttgtctcttgatggtcgactgcgaggattacgccgttcagggtcttcatcaacttgtgtgctttggtttgggtaccttgcggattgatccctcgacgttggatggttcaggtccaaaccttcagggttggttctccgttccctgcgtacacggttagtatgacgtctagaagt

SEQ ID NO: 275782 - DNA, 712 bp, Cannabis indica
attgcttcaatattggacacaacttttttaggcaaaatcagtacttgacaccaataagagtgaatggccatcaagactgagttgatgagaactactctccctgcaaaggagagatttctagaactccacactttgattcttgctatcattttctcagccaggatcgaagttaagtgttttaaggataaaatacattgaggggtaaaacggtaaatttgtccctactcggtgtaaatcatctatagagaatctttgattattgggatttgaacgatgattaaatatttatagtgtatctatatcgtggaacatatagagcgttctatataactgagagttcaattccaagttctatagtggtgcaatgaggaattaataagttagggaatttacttggtaaattctagatctgcttattggaaggtcggttatataagcccatggtcctcatactagttgagacaatatgtaacgccctataaacttataaaaccctaatcctctaattgggattactagtaaaatagcgcaaaaattaaactttattaataaacggaatgaaaataacttgtaataatttaaaccttataatttaaatgttacaaaagttgggatcccaagagtaattccaaaacaccattacaagttcgtttcctctagccgacctaagcggtaaaacatagtctcaaaatacatcactagtagaccccaa

SEQ ID NO: 275783 - DNA, 819 bp, Cannabis indica
ctttgattggttgtcctcatgtttttcaaatttggttctatgagtgttgtaagtacatgaaaggtaagtattgccaaaaggaaaactctcgtattccaaggattattcagtggacatgcaatagtcagcctactttcaaagttttgaagactactatttttgatgtttccaaagataaggtatatctgcttgttgtaatttggttttttagtagttgtttttatgttgtttttcattattaataatcttcataattgaaattttcattttgttgttttttgatcagctgcaactttcaaatatgaggcccacggctggtgagttcaaagctttgaaactgagcagtttcaagtttgacactgactacaactcttacaagagtcttcctgttcccgaagagccaactgttgctcagagtgacatttctgtcaagcttgatgctttttctgagaaatttcatgggttggaggtcaagatcgattcgttgcatacttcccaacagaagatttcatctgatttggttgagttgaaagagtttgtgtctgcacagtttgtttcttttggtgctcagatggcttcaatgcagacacagttttctactgtttttgccgattcctatgccaaggtattttagttttcaatagttgtttttcggttttttttaagttgttttatactaatttaatttgtaatttcaatataggacaaaggcagtgactcttccaatgatgatgatggaagtggtgatgaagcagattttgatttaaatgaatctgaagaaactgatgacaatgaagaagagaatgttatgggtgatga

SEQ ID NO: 275784 - DNA, 873 bp, Cannabis indica
tccactctttggcccctacggctttcgctagtctcagccctgctatcaaggcctcgtattcggcctcgttgttcgaagctgagaagtcgaaccgtagggctgcctggagtcgcagtccggtcggggatatcattgccacccctgctccggatccattttcattggaggctccgtccacaaatactctccatgtggggaccgatggtgttggcgcatttgcggttgcctcggcttcattgcattcggtaatgaagtctgccaaggcttggccttttatggagattcggggaacgtagtgtaagtcgaactgacttaactccattgcccacttgaggagccttccggatgcttcaggtttttggaggacttgccggagcgggtggttggtcagtaccttgatcggatgtgcttggaaatatggccttaattttcttgaggccatcaggaggcagaaaaccagtttctcgatgatggggtacctcgtttccgctcctatcatgcgcttgctaacataatacacgggatgttgagttttctcttcttcccggactagggcagcgctgaccgcgttctcggagacagccaaatatagaaataggtcctctccgagaacaggttttgataggataggaggcttggccatatgttctttcagctttttgaatgcctcctcgcactcgtccgaccactcaaacttttgacacttcttcagtatgttgaagaaggggatgcacttgtctgtagaccgtgagatgaaacggctcagggcagccacctttccggttaggctttgcacatctttatgctttttgggggatggcatgctcaggagagcttggattttctctgggtttgcctcaatccccctctggc

SEQ ID NO: 275785 - DNA, 719 bp, Cannabis indica
tcttttatgcctcagttgcagccatgtactcggcctctgtggatgacagggctacaactttctgcaggtttgacttccagctaatgcatccacctaaagctgtgaagatataacctgtcaatgatctccttgtgtcaatgcatccagcataatcagagtcgacaaatccttcaacctcacattcacttttctctgtagatttgtagatcaaacccatgttcagagatcctttaacatacctcatgacccattttactgcatcccagtgcagatttccagggtcagcaacaaaacgacttactatgctcatggcataggccaagtcaggccttgtgcataccatggcatacatcaagcagcctacacagtttgcataaggtatgccatccatgcttcttctctcttcctcagtttggggtgcctgctccttagtgagcttaaaatgttgagccaatggtgtcatcacaggcttggcttcattcatgttgaactttaatagaactttcttcaagtatccctgctgtgtcagcatgatgaaaccaggtctctttctcttgatttcgattccaagaattttcttggcttctcccatatccttcatctcaaattcacctttgagttggcactttagctctctgattttgtgtttatccttgcctactattagcatgtcatcaacatacaatagaaggtaggtttctttgtcaaaataaacacat

SEQ ID NO: 275786 - DNA, 638 bp, Cannabis indica
tttagtctgtcattgtgatttttaaactttgaatgatgaaaacaattttttttggaccttataaaatacagtactttgataatttaattaggacttttcaatttttctgaataaaatataataaatagtattcaaaaaatggcctttttaaataaataatgataaaagtttaaaaatagtatttttgaaaaataaataagagactttttttttttctaaaaaagtttttgaaacagaaaacattgtcaatcttatcaaaagagattaaattattattaaattttatataagggtccaattaataatttttaagagtcgaaaatgatatttattaaataaaaactaaacaaatttgtattccacactgattaatttaaaatgaataaaaaaaaccaacttcaacaatgaattactcagtagaaaatcataaactattacagggaaattaataatattaattaattaattcaatcaaacaagattgtataaagcattaatcccttgaatatcatcaccatgcaaacctttggtgattccagcaccaatctcaggatacataatggccccttccaccgagctatgctgaagcccaaggatatgcccaatttcatgcaaagcaacagtctcaacgtcataag

SEQ ID NO: 275787 - DNA, 596 bp, Cannabis indica
attttggataacttttctgtgatacttttgttctaaattttaatgtatgtgacaggttcaactttgggagcgtttgtaatatataatggtattttggagcttgaaggtaaagattgggtttataaacgggctaaaaatttgacatttgacattgatccgaacgtaagctactcaggtttagttgatcttttgtatgaaaaactagatgttgacaaaatggagtatgacttgaaattggaagtaaattacaagtacatgaaaggctacacgtatcgccctgaagttattggaaatgataagcgtgcaaggtactttttgtctacacttgcgaagaagccagatgaatttactcccttgtttgtgactttgttaaagaacaatgtttgtgtcgatcctagtcccacaccaagttctgttaaggacaatcgtagagaggttgggagttttgttccagaaacaaatccagaggtgttggttgccgatgtacttgaattaaacactatgatgtcgagtgttgatattgtagcacaaatgcccttcattgatggtttttctgatggtccagaccctgaatgttatgttgagggcaatgataa

SEQ ID NO: 275788 - DNA, 353 bp, Cannabis indica
tatgattttttgaagttttgaaaaaatcgggggtggtgacacacccttgtgcgcgcggctggctgctggcagcaccctttgtgcgcccaagcagccccttgcacccaagaatgtgcaccaggatggtgtgctttgcataccgtccgtacagctcacaattttttcgtttttcttaacttccgattttttgtgtagttttgtattttgatttttacttttcatatttcaaatctaattatcagaaataaattaatttgattttttaaaattaattttagatattagtgtaatttgaatttgaaaataggtaaaaatctttttttgcttcttttcttattttttaaaatttgatt

SEQ ID NO: 275789 - DNA, 501 bp, Cannabis indica
cttgggaagtgaactcaacaggactataacctggtcttcatcatcaattttcaccccaagattattcagatctagaatgattctgttaaaatcatctagattccttgccatacaagatcgtatcaacaaagtgctcatacatcttgggaagtgaactcaacaggattataacctggtcttcatcatcaattttcaccccaagattattcagatctagaatgattctgttaaaatcatctagatgtcttctcaattcctttgactcatccattcgaagtgtgcacaactttttcttaagatacaacttgtttgaaagagatttcttcatgtagattgatgccaacttgttccaaagacccaaggccttgtcttcatctgaaacttctctcaaaacctcatcactaagactgaggaggataacactatgtgctttggcttcaatctcaagtttcttcttgttgtcttcaattaatttcatggcttcatcatcaagttcctcat

SEQ ID NO: 275790 - DNA, 609 bp, Cannabis indica
tacttgcattattttttagcttgctgctgaggccggccgtctctccaagaacataatcaaccatggcttcgtcctgtctgattttggggacatggacgaagtcaggaagattcttcaggatcttactgctgagaggcggctttatcaagaggctgctgagcgccgggaggccgctgccaaagctaatgaggaagaggctaagcggagggaagcccaggcggaggcgatgatccgggaggaggccctgcggagagacaggctggaggccaggcaccaggaggagctgagggcggaaggcgaggccactgcaaaggccaggcgggagcttcgggaggccagggaagccttggatgagatggctgccaaggtgagatccttagaggaaactcaccaggcaaacttagaatccagggccactctggccgcggagctgaaggagctcagggacttcaaggaacaagcctcaaagaaggcaaaaagggctgagcttctttctcccgtttcctgcagccggtgcaccaagcgttttgacgatggcgtcttcatggcttggtctaccaatgaccagaatatcaagcttaccttctaccccaaacctgaggagatgat

SEQ ID NO: 275791 - DNA, 506 bp, Cannabis indica
ctgaagcataaggaacccttctcatgtcggatcagtgggacactgttccttagatagacggatactaaatctagaaggcattgttgccctttggtgttggtcattgaaaatctctctaaaaccttatcaatgtaagttgtttgagagagagcaaggaatctattcttccggtttttgataatttgaataccgagaacatatgcagcttcacccaaatccttcatttcgaattgagtctctagccattccttgatgtaagtcattttcttgatattggtaaacacaaggttcatcttcattttgaagaatgtcgtaggtcttgatgatttcatctaaccttttattccaagagcgagaagcttgcttaagtccataaatggacctattgagttcgcaaactttatttccttccctggaagaatatagccttctggttgctccatatagatggtttcttcaagaattccgttaaggaaagctgtcttgacatccatttgccagatttc

SEQ ID NO: 275792 - DNA, 380 bp, Cannabis indica
atgtccttctcttggatttggatccttcatagtcttccaaactatgattgaggtactgtttgctgtgtgtgggcactactctttcactaggtatttcgaaattgtatatcttagagaagaagaagaagagggtcggctatatatagagaaaaggaaaggcttaattttctaaaagaaagcagtttcctgaattactgaataattgcttaactgacttatttggtgtcagtcatcactttctatttatagacaactgctaggtttaggttagtaattaattggcattaaaataataaaaataataattggaaaatgaatgcacaagtggccggcctagggtgttaatgggcctcacttggattttgcaattttcacaattt

SEQ ID NO: 275793 - DNA, 599 bp, Cannabis indica
gctggctgggcgtcccttcggttttcggctaattaatgctctgacaattaatattttgaaaatccaaatttctctctccacggctgacggttgcactcgattattttgatttcccatattcgctttcaaggcgggaagtcgaggcgtctaaggttcctttacgtacagttacccttttgcctataaatacttggagtactggcacattacctcatttcatcacccttcgttgttaagcaaactttagagcaaaaagagagagctttctggcttcaaagttgctgaagagtttacagacgatttctggcttgcttgaacctggacacttgaatctttgagtaagtttctgattccctttatgtttttcctttgcatgcttgtgctttgaatgtaactttgttgtagaaagaacactgtaggaaaccctagggtttgaaacttctgcgactcttcttttccatgtccttgtgttagctttcagccgtaaggcttattttagaactgcattgcgtctgttttccattctgcttttttcaagcttcatgaacttttttgccctaactcaagaaaaactttctgacttcttgagtttagacttt

SEQ ID NO: 275794 - DNA, 382 bp, Cannabis indica
attagatttgaaaaataaaaataaaaactaaaatacaaaatacacaaaaatcagaagttaattccatgaaatagcatgaaaaatcgaagaaaacgaaaaaaaatgcgagctgtacgggagggtgcacggccgagaaaactcggcgcagagggatacctgcagcatatccgcgcgcggatgagggaattcaaacacccttgggcgtgttgctcgaacaaaatcttgttcgaacacgcgcttgaccgaggatcactcggttccgtgcgcgtgggtgagtgcttcatcccgatatttttcgaaactttcaattatttttcatgaaaattcacaaacatcaaccaatcatcatataacacacaaaacaacatgaaaaccatccaaa

SEQ ID NO: 275795 - DNA, 649 bp, Cannabis indica
gcacacagatgcagatcagatctagtgactagtaacagaaacaatctttgtctcattgacagattttataatatgaagtcatagaatgtataaaatcataaataatactatatatatacaaaattggttacccaaccaaatttataatccaataatataagagacattctatccatctaattcatgaaatatgatgagagcctaaaataactcagtagaaatttattcgcatcaaagaagttggaatttaaaaggtcgaatatgtacttactttcttcattatcattagtccgccgcggaagtttgaccttccatctacaaatggcagaggttatcatggtaatcaaactattatcagtagtcatatatataaatatatatatatatatttacctgtttgagataacaatgtttgggacatgaagaatcttgtgccaatcttttccttctccttttggcaagatttatgtaggatatcacaacaccaaatcttcaaattcttcaatggtgttgactgttgactccaagaagtcaggcaacgattccagatattgagaccatgataattctaaggattcaagacaaaggcattattttcaaagggtccttcattttccaacccacaacccctgtttcattcctttcctgc

SEQ ID NO: 275796 - DNA, 747 bp, Cannabis indica
tatacattaaacataatcatgaaataaattatgtaaaccatgcaacatagaatgatttctaatcttttattaattagtaaatctgattatattgaaatgaattttatttagggcacaaaacccaacaaattcccacttgcactaatataaaacaaaaagtgcatttcaaataatctcaataccttgatatccaaatcaagtgtagtatgtagtattctctctgtaataggatctaacaggttgtatacaatacatcctttctccaccattacatatccttgatcacaaaatccttgatattgtaaaattcctctctgtatgtctactcctctagggatactagattctttactttttggcaactacatttgtgttagtcaggaagtaacactagtagttaataaattcttaatacaattccagaaactgtatagaactttccatagactgaataactatctttcctgcaactttaacattcagtctcattggtagagttagggatttcagattggtttttacacttctccaaaatcactactccaccccagagtaatcaccatctcatcagtagactttctagcatcaagcaagtctagaaacctgattcggtttagtctaagagtattaaaatatcactattatcgactaacatatagttcctcttcttgatcttaagatttacttgattatcttccaatgttcctttcctagattaatctgatacctactcattactcccactca

SEQ ID NO: 275797 - DNA, 687 bp, Cannabis indica
gtggaggactccaatctttctgttctgcccgaacgtgagggttctggccgcggagaaaaccttccaggatgagctcatcgccaccacagagaagaagtacgtggagtatctctatcggaaggcccagtagaaggcttataccaaggcccaggcggcttccgggaggccccttcgcgttgggagcccggtcgagaggagaagccaaacggctgccgggaggtcccttcgcattgggagcccggttgagaagagggctcccaggccaaggcctacggtccaagtgccgaatacaggggctcgtgatgccagtacttctggctccggtaagtcacctttagcaatacattacgtcccttctgttagcgaatatgctagccttaggcctgtagggttcgatgaacgtctccttaggtttaggatgccctcgacccggtggggagatcaggccaaggattattatttttccaacttaggagatttcctaggtcggtcccggatgggttctggacctccggagcccgttcccttggacccttcggcctatctttcttctagctggttccggccctcggacagctacctcggggatgatgcagccagcattaagattcagaattttgctagggccgaattagagagtcagggtaggactagcttgattgctttttttaagtgtttactgctttc

SEQ ID NO: 275798 - DNA, 537 bp, Cannabis indica
accgaagcttgctaagacatgtacaatcttcatcagagaaagcttggttcacggttcagtaagcccgtacttgtttagtattttaaatattgtgaatgtgaaaccctattaggaagcatattagattataattaattatgttaagtgcattgccttaaaatctgtaagtgcggtagtaagtatgtaaataggccgtttcctgaccagactgacttggagcaaaggtttgtaaaaatggaagctgtgattcaacgacatgaagaagagattcagaagttgaaacaacaaaggtctcctgtagtatctttgccacatatgccaatcatttttgattcggtattaccagcaaagtatggaatggctggtaatcaagtggaaccattgcatggaaagatttggatccaagaaccttcagactttcagggaggttcaaatatgaagaatgctttttgggctgaaagccctgaggaaattattatgagacctcaggagattatggtggagggtcagaattttacctgcctgaatccagattat

SEQ ID NO: 275799 - DNA, 709 bp, Cannabis indica
atgaaattaatttttcatttgaatattttgaaattaatttaagaaaaacacacttagtttaatgaaacttattcaagataaactatatgtatttttcttatatttaattaaatatagaattataactaattagattcttctgaagcttaaattattaaatatttcattaaatattcctatttaagttgtaaattacttatttataactaatttttgaatcaacttgaatttaaatatttttgaaattcaaaattaagttgaggaattgtaggaactagttattgagagattcttggaagttaaaagtttgttaattttggatcaattaaaatagaatatttttcaaattaggtggttagtaacttaatttgttatttaattaaattttgtttgaaaataatttaagttgaaagtttagttattttataacaacttgaattagataatttttaaattttattttgttatattttaattaatttatttatttttcgaattttatatatttatatataattttcaaaaattaaattaaaagttggtaaaaataaatttttcaattaaatttcgggaccaactttaaattttcattattaaaataataattaaaataaatagattaaataaaaataacattttaaaaaaatgagctttgatcaagagacattcgatctccgttgttggttctacatagttcttgttttagtga

SEQ ID NO: 275800 - DNA, 593 bp, Cannabis indica
agttgaagagggcttaaatggattgattggtactaccagtagccagagtagcgtactcgtgtataagagtcattcattctgtgggtgtaagggcccaatggaggcttgaagcgggggcgttacaaatggtatatgattaagcgagtaaaagaaaaatgtatatgagaattggattaagtgatttttgttctcgtgttattcttagaaagagtgattttgatagtaaatcttattcctatttcattagttggatggattagtaaatgtttcttttatagtgatatgcatgtagctcattcctgagagtatgttaacttgtgtgcttctaagcctatatattggctagctcgcatgtgtaagaagacctttaacgatctttagcttacatgtagttcatgtaatttatagaagacatatggtctgtttgaatgacatcggtttgttgatgatatattggatcgttatgtgtagggcaacattcttaataattatgctacgaaactataataacggaattgtagctttatggaggaaattaagtaaaaaaacaaaaatacaaatttaacattcaatgaaagaatgggaacaattaa

SEQ ID NO: 275801 - DNA, 554 bp, Cannabis indica
tatcccagttatcccaaaattggcactctgacgtggcatcacaagaatggtgacacgtggcatcaacttagagcacctggtcggatcaacatgcgagcaggatgcctcgctggcatgtccataatggaatactcaacgagccgtgcagaatgagcaacacttagcgaattcagccaagcacttcgtgagtcaccagctcaatccctataactcagggatcaacttgcgtggatatggcatacacacgattccactatcggtgtatacggcctcaatcccacgatcctagcattcagcaatgatcccacgatctttgtgtttatgcgctttgtaacgagagaggaaactcctctcctcaagtttcctgccctataaatagtgaggaatgttcactgggcagggggaggacgaaaaaagagagattgatcgaaactgtataacagtgatcatacgccgaaacgctataagctaaggctatctaagaattatattcagagatattattgtaagagctataagaaaaggaatcttcttccttattcttaagtcaatac

SEQ ID NO: 275802 - DNA, 812 bp, Cannabis indica
gtcaggatgagagcattcatcaaatcacaagatgagaaggcatggagagctatacttacaggctggtcacaacctactgaaagtgatgaggaaggtaatagtaaggtaaaacctgaactcaattggactattgaagatgaaaaattgtctggttataataataaggctttacatgctatttttaatgtgttggtgaaggctttattaaattaatttcatcttgtgaatctgcaaaggaggcgtgggaaatccttcaaattcaatttgaaggtaccgctgatgtgaaaagatcacgttttaccatgttacaaactagatttgatgaattgagaatgtcagaaactgaaactttgtctgatttttatgaaagattatctgatatttctaatgagttttttaccttgggagaaaaattagatgaatctgtcttggttcggaaaattgttcgtgtgcttcctgacaggtttgacacaaaattgctagcaatggaagaggcaaaagactttggcaaaatgaaggttgaggaactcatgggttctttaagaacttttgagttaaatcaacagatcaagaaaaagagtaagcaaagtttctcgaatgagaaaagtaaaggtattgcctttaatgcttctaaaaatattgtttctgatgatgaaatgaccctattggcaaaaaatttccaaagatacatgaaatctgttagaaataaaaaagaacttttcaaagaactcaaaaggtaacatttcaggtaaaaatccctctaaacctttttcatctaacattaaaaagggtattcaatgcagagagtgtga

SEQ ID NO: 275803 - DNA, 649 bp, Cannabis indica
aaaaaaattgcacaaaccaagtaataagagtatattaataccaaaccaattactgtggtacctttgagtctcctttcatttagggataaaagattctttcttgaattttgagtccaaatacaatcttgtattaatctctaatacatggtcagcagcaagattcattatagaattacgtactccaggcatacacggtagaattcagtcattaattttatggttttcgagatctgatcaaacccaacaatcagtccaaacccgaccaatatcgtgacattcaatgaccaagcaagtaaaattacataacttctcttaataaatctatagaattttagtttcttaagttaattagtactgtaattacagactgcataaatataaatttatataaaaattagggagataattccaagatacatgtttccaagaatctccatccccagaggaagtttatgaagttaatgaggtagaaagctaaactaaactaaactgatcaatgaccaaaagacccttaaaggtgtgtgggtcgagaaatacaaaagaaaagggaaatttgaatttctatgcatgtattaggggataatttttttccctaaattaatacttttctacattgaaaatatattactactttttcaaaactccaaaa

SEQ ID NO: 275804 - DNA, 681 bp, Cannabis indica
aattggaaacatttcaatttagaaatatttaaaaatggaaaaatgatttttgggaaacaatcccatgaaaaaattagatttttgggaaaaaatcccaaaaattgcaactttaggggatggctgctcagtaggctgcaactgcagcccaggagggctgctagcagcccatacgcgcgcggatcgtgaggaggggcgctgagaaaactcggcgctagcaggattttcgtgggcatatgtgggcggacagcagggtgcacacgggctggatgctcagctcacgcgcgcggatgaggagcttgtccgaagctcctgggcgtgcgattgagcatccatgcatacccaaaatccaatttttcaaaaattcatatctttttaatttttaatcggaatcaagttccgtaaaaaaaaaaattgcttaatctttcacaaggaatccaaataaaatattttcaaaaatagaaaaaaatatttttcatggaaaaaaactgtacaacataaacattcatcaaacaacacataaaccacatgaaacaatccaaatcaacacaaaaacatataaaacatcgttttaattcatatttcatgaaagtaaatcattaccatggctctgataccagttgttagaaatattttacctaggatctagatttacaaccaagtatgtttcattaacattctaat

SEQ ID NO: 275805 - DNA, 630 bp, Cannabis indica
agtggattagtgttaatcttgttaaaattgagcttgttgttgttgtatgtttctttgatgaatttgggcagagattttatggtattttctagcttgaatcaatgtgttgttaaggttgttgctgctggaattgttgaattgagtgagttgaagctcaagttcatgagcttgaagattgcttagttaaaacatgattttgtgatatatatgcaatctggttttgggggttttatgttggaattgatgcatgaaatatgttattttgaccccttaataattgctagcaaccctatttgttgatttgagagtttggttgtgaattggggtgatttggatgagttttgggcatgaaaatcgttgctggtttttgagttttctgggttttgaacccaggtgccgcggcatggtatttagcatgccgcggcgcgcccatttctttctgggcagaccctttttgcaaacttctaatggccataactttgtgatccggactccgatttgggagttctatataccgttggaaagctctttccgagctctatctgaatatctgaattttaaatgccatgtgaatattttatgaaaatgaaatcaggggttaaccctatttgtgaaatcccggattgtgtg

SEQ ID NO: 275806 - DNA, 1366 bp, Cannabis indica
agtatgcacaaaaaagaaaaatgaaaagcatatgtataaacatcctgacccaaagggcaggtccaaaagaaagatatgtgcatcaaaaaagatcatatataaatatataaaaatcctagccctaagggcaggtcaaaatatatacaaatggcccggggacaggccttaaatattgtctcccctttaaataaaaaagaaacagctatgtaaataaaaattgtcttaagtacaagataattagctgtaaataaaaaaagaagaaaaagagtgaaatcctggttgtaatgggttgaactcaaagcggcctaatcaatgcgaggaggaaggcgaggaccgatgcgcgcctccatcatggcatcaagctttttcttcttctcccggaactttgcaatcatctcctcgggtttggggtagaaggtaagcttgatattctggtcatttgtagaccaggccatgtagacgccatcgtcgaaacgcttgacgcaccggctgcaggagacgggagaaaggagctcatctctctttgccttcttcaaggcttggtctttgaagtccttgagctccttcagctccacggccaggttggccctagactccaagtttgcctggtgagtttcctctaaggacttcaccttggcagccatttcatccaaggcttccctagcctcccgaagctcacgcctggccttagcagcagcttcgccctccgccctcagctcctcttggtgcctggcctccagcctatccctctgaagggcctcctcccggatcattgcctccgcttggcctcttcctcactggccttggcaagggcctcccggcgctcggcatcctcctgataaagccgcctttcagcagtcaggtcctgaaggatcttcttaacttcgtccatgcccccaaagtcggacaggacgaagccatgattaattatgttcttggaaaggcggccggcctcagcagcaagctgggaaaggatacaagtatgagtaagaatctttaaggaaaaaataaagagaaaagtaaactacaaaatacttaccacggtgagggagtggctgagatcctggacttggaagatggaattcaaggatgcacaagcagcgaaccgcctgggtgcacaccgggtaagctgggacgcaaactcgccggtcatctccgcggcaaagggagctagtgtgggcccgaggaaacgaccgaaccaatccgacaagggatccaaatttagatcccacggattctggtagttcgggtcgttgagagtattttgcatctcaactcgcaaaactctcttcagagcctccacgtcagcatacccccgggagtattcatccatggcgtagttgtgtttagctatccggagctcctg

SEQ ID NO: 275807 - DNA, 644 bp, Cannabis indica
aatggacattttctgatccaatgtccgactcagtatcagcatagttggcgccagtaaattcattatgttggggaggacatctctcaaaaacttcttcagggttggagtaaagtaagcgaatgtctttgatcacataatttgactcctcttctttgaatggttgcttggacaatgttgaatgaatggccttcacagatctccccaagtatggaatgcaactcctcacccaccaacgacagtaccaccacgtgcattgacccatacggagagtcctaggaatgtgaaagtggatgccagtatttctccttaatattaaaacccaagctttagcgatttcgcttattccacactgcctcctcctaggaatactcagacaaaacttatctgagggcacaccttgatcgaaaccaaactggcgagcaaatctgttaggataataaggttctaaatatgcatcgttacccactcttacgggtagcaaagaagaacgcatagaaatcagtaactcaaatttctcatcagataaatcttcattatccagaaagtctagatctttctccatgggaaatgaatatggccgatgcataacataatcctctccccttaaaatatgtctagccccattcatgcttcgacgttcagca

SEQ ID NO: 275808 - DNA, 1236 bp, Cannabis indica
gtcaagtaagattgttcttaagaatgaaggcaaaaatgagtgtggagaacttgctgccactgtttgtgactaaggttaaaaggcatgcgcttttggggcctactccgccaactgtcctcccaagaagtgttgttgggagttttgtcccagaaacagatccagccgtagggatgaatgagcaggcccctactaatatagatgaggataatagggttgactatggatttgaccagttcaatgagtttgatggtgcattttacaacaatgatcctatagtagatttgaacgaggatggtgatgcggagttggaagttcatgaacctatagaggtaccttctttaaggttagaactacctccaccatctccaccacgtccaagggagcaaaggaaagaccaagaaagaagaacccctcggagtgaaaatcacgaaacaccaggcaccagtagcagccgcccaggtcctcctcgtagtactgtaccatctgattttgaagtttgtacaaaattcaaacctattgtgtggacaagggaagacatagaggaaaataatgtttatacaacttctcttactggtacacattcaggggaaatatatgttggcaagctgtatacaaataagactgaattgaaaaatgtggttggaaggtttgcattgaaaatgaattttgagttcatggtgaagaagtctgggaccgatgttttttatgcaacttgcaggggttcagattgcaaatggagagtgagggggaggaagagggcacgttgtgacatgtttgaggttactgtattccacaacgaacacacatgtagcctggattctagacatgctgataaccgtcaagcagcaccgtgggttgttggccacctcattaagaacaagttcaaatcagatggaactaagtacaaagctaaagacatacaaagggatatgtttcaggagtatgggatcaagatgagctatgagaaggcttggaggtgccgagagaagggacttatgtattcgaggggtacgccagcagcagcttatagtcagttacctggttacttttacgtgctggaacagaagaatccaggtactattacagacattatcacagaggataacaggttcaagtactgtttctggtcactggctgcttgtaggaggggatttaagttttgtcgtcctgtgattagtatcgacggcacgttcttgaagacaaggtttgggggcacaatgctagttgctgtagcgt

SEQ ID NO: 275809 - DNA, 566 bp, Cannabis indica
aaaaaaaaatataattaagctcatattaaaatcaatctcacatttcaatatagtgaaaggtttttaaattgattcattctcacttaataattgtgacagacctaaagaataataatattatgttacctcaaaataggaatccaccaaacaacattatcaaaatttattccaagtataattatataaatctattactcattgaagtctattagaaactctaaaaagctcacaatacaaaatttcacatcaaaaatctaaaagtgatcaactatatagcagcaatgataatacaataaccaaaattgcctagtcatatacagtcttaaaacttaaaagagtggcattattcattcaagtttcgattaagtgtttctgagtttgagttaaaatattgtgtaatgtgtttatgtccaaatattgtgtgtgtctggctaatctagtgaagaagattgaagttttgattctcaataaatagaatgaatataagtgttagagattttattacaatggaagataaaccaagatatatacaactcaattgtaaaaataatacaaggacaataaaa

SEQ ID NO: 275810 - DNA, 526 bp, Cannabis indica
cagagtattggaggttggggtatgtgaatatctagttcagacagcagagattgtatccatacaacttcagtggtggctaaggcgagagcacgatattcagattcggtactagaccgggcaacaacggtttgcttttttagagcaccaactgataaggtttcctccaagaaagatgcaataacccgacgttgactttctatcatcaaaactccctgcccaatcagcatccgtgaacccttgtatgtcaagtctgggggctggagtgaattgtaaaccagtaccaatagtgccagctaagtatcgcaagagacgtttgcatgctccccaatgttcagatgtaggttgttgctgaaactggcttaatttatttactgaaaaggcaatgtcgggtctggttaaagttaggtactgtagagccccaagaacgcttctatattgagttgggtgaggtaaaggagtaccattgtgctgagaatcatggggttccatctcaaaaccaattggcaatgagtggagtagcccatgt

SEQ ID NO: 275811 - DNA, 697 bp, Cannabis indica
agttacggagcatgccgtgagtttcgtgctgatcagagaagagaacatcgtacaacacccagtctattacatcaggaaaagactcatcgagactgaaggccgatatccgttgatagaaaagctcgcctactgccttattctagcaacaagaaagctgaggccttattttcaagctcatcctgttcgggtgtataccgaccaaccactgcgacaaataatgcaaaagccagatgcctctggacagttactcaagtgggcggtagaattgggtcagtacgaaatcaacttccagccccaaacagctatcaaaggccaagccttggccgactttgtggtagaatgcacaggcaaaaaagaaagcataccagaaagcaatcccaagccagtaccttagccaagtaatattgaagacaaaccgacctggaaactacatgtggatgggtcggcaacatatcaactatctgatgcaggaattgccctcgtcacgcctgggggaaacacctgcacgctgcggtcaaattcagattcaaggcatctaacaatgaagccgaatatgaggctctaatcgctggactcaagctagcccaggaaatgaaggtcgaacacattgaaatctacagtgattcacagctggtggtaaatcatgtatccggaaaatacgaggctcgaggagaaaaaatgatagcatatctgagca

SEQ ID NO: 275812 - DNA, 407 bp, Cannabis indica
tgtccttctttgttgaatctggattcttcacagtcttcctcactatgattgaggtactactttctgtgtgtgggcactactctatcacttaaggatttcgaaacaaagaagaagaaagaaagagagagaggttgcgacttaggaaaatttctgtgaaaggaatgtgatgcaaatgtgttgtgtgtgtttcctgaagccattactttctatttatagaataccacatagggttagggttgaattacttggcattaaaataatgaaaaaattaaatgataaaagcaatgcatgtggcgggccatggcaatatggaaataggtctcacttttgcaactttcctttttaatcatgtctgtttcccatattctcaaaaacggccaattttcacattcaaccatataaatgtc

SEQ ID NO: 275813 - DNA, 444 bp, Cannabis indica
gatgttaatgaaacatacttggtagtaaatctagatcctggtaaaatatttccaacaaaaactacatgtaaacataaatgacttctaatcttatattgataataaatcagattagattaaaatgggttttatttagggcataaaatcccaacaaactcccacttgcactaacataaaacaagtagtgcattgcaatcaatcaattgtcttgatatccagatcaagtatagtatatttgactaaactcaagttactggaactgtaagtttgtggtaagctactgctttcttcaccattacttcctttgtgttcattatgcaacttcattttctatatgtattactcatccagggatactgaattctttattgcttattaagtgcatctgaataaacaggagacatatctctcattctatcaaaaatggaatagagatatcacagt

SEQ ID NO: 275814 - DNA, 1189 bp, Cannabis indica
gattatccctaattttcctaggcccactatgtggaatacatcttatttgcgagcatggtaaaaaatctaaagcctaaatctttgatggtgccatatcctctacgtgatgataattacttattcaaactctttcttatttaataatgataatagcgcagatttttgttaactaaatttgagcctaaccgtgataatctcgtagagaaaaataaaagttataaaataaaaagtatgaacacacacaaggttttttacgtgattttgcagttaaattttttatagtccacgggtcaatcttattcagacttctgattatttttcagggcctcttttgtatgagtttttccgtccattttttgatcttgtttgcccctatttataattacatagtgggcagttaatttcaaagttgactgcaatttgtttacaacgatcatcccctaaaattgcagagtttgattacatataacgtagtgtaaatgtagttatgatttgaaaatcacatagctgtgattttctcgcttttactgggtcaaaatgatcgtgtattaaaaatgtctttaattgttgtatctagagatgtctcgacagaagcttggttccagtgatctcaatagcgagttggggtcatttttccttctgagatcgacgatgcatgtcttgtgacgatcgcgattcttatttacaaagagttcttcaaagctcatttgaatgctagcttctgactcatcagggttgtaagcctcactgacgttaactggatgaagttataggaagccttctcatagcgagacgggcacctcgcttacttggtctcgagtcgatccgactgttacacttagtttgtacattatacactaagggctttcgcagttgatatgtgtcgcttttgtcttcctatgtgtactcactttgatgtctcgctattcgcattcagcgaaatatgattaataactaatatactaagcaccagtttgtatattaattcctcgcctaagattttacagtaaagagattacaaatatactttgatacttacgtaattaatgagttattccataaaaaatgattgcatcgatccacattccctttatcttgacacatgtcctccactgagatggcagtcaaattttgggtataaccattgtcccttaaaaagttttttttagtaaaaagtgctttttaataa

SEQ ID NO: 275815 - DNA, 863 bp, Cannabis indica
tggggtatcagtccccttccatcccttcatcgcagccattctcaaacggtacgatgtatcacctttccaactaactccaaacagttatcgcactgccctagccttttacgcgatgtatatggagtacgttcatagggctccctcagtagaagagttcagctatttctacgatataaaaagcgtaggccttcataacggtttctactgctttagcaaatgggcgacttctgaaatcaatggagtagaaggaatggtgtcgaacatgggggactggaaatcaaagtggttctacgtctttaaagtccctgggattagaactgactttaatcgcagacctagtatgtcgcgtgttttttaacttaggcattttctgatttactttgagatcttatgctaactcgctttttcttgttctcgcagatagaccagctcgaccggcacttgacgcgactcgcagagagacagctgaaatcctcgggagccttccggtacaagatcgcgactggcgattactgtgtacaactgccaagctgcgagaacaccagctgattccagagaacgcaagtcttcaaagggagccagtatacaaagaaccgtctgagagacaacaagagcggatagacaaacgcctctccaagcaaacttctcgaccagtctcaggtaatttatctcttgttataaactgacgccttgagttttatttatacttatcttttatttatcctcgcagagatgacttttttgaagtccgcgcccgtccttaaaatcaagccgaagagtggaacagcgacgacatcgcccgttgtcgcccagaagaggaagagcgatgtggtggctactcttgccgcagattcttcaaagaa

SEQ ID NO: 275816 - DNA, 681 bp, Cannabis indica
tcttacctgttgtcccgcaatagtagagattccaaatccccgggtgctcctgaccaggtgccggtaatcctagtcacacacaatccgggattttcacaaatagggttaacccctgatttcacattcataaaataaattcatggcatttcaaatacagataatcacatagagctcgaaaagagctttccaacggtataaagaacgtcccaaacggagtcccgagtcaaaagttatggccaaaacaaatttcagcatttcccgatgaactccaaccggaattccggatgaaccaaccggaattccggttgtctgggcagagaacacgaaatttctcaatctttaaacccccaaaactcactcaaatcatccccaaacattcccaaactttccagagcatcaatatatgtcataataaacatattccacaacttaaacccaacaattgcactaaaaatcaaaaagtgccattaaagcaccaagcttgagttccatgaactcaagcttgcttttcacaaccaaaatcacaattaatccacttacagcagctagcaaatattatagggtctaaaacacatatttatgcatcaaaatccaacaataaaccccataatttcagattgcacaataattaaaatcatgccttaaactccaaaacttcaagctctaaacttgagcttcaaa

SEQ ID NO: 275817 - DNA, 638 bp, Cannabis indica
aagtgctaccatttttcaatgtattgcgaggcaacaagaaatttgaatggacagaggaatgcgaggaggcctttcaaagcattaaaaggcacttggcgacacctccagttttggcgaaaccactaactagagaaacattactcatctatttagttgtctcaaaagatgcaattagtgcagtaatagtgcgagaagagggaaagcacaaacaacctgtttattatgtctgtaaaaggttacttggggcagaatcgaggtatctccctcttgaaaaacttgccttatgcctaatccaaaaatctcgcaagttacaaccttacttccaggcacacccaattaaagtgttaactgataaacccttgacagaagttttatcgaaaccatacgcttctggaagattgataaaatggtcaattgagctggggcagtttgacataacttatcgccctcgaacatccatcaagggccaagctttggtagatttcttaatagaaggaataactccagaagaaaattttcttgtttagcgagacgcggacacttggaagttattcgtggatggtgcatccaacgagcagggctcgggtgcaggggtgatattaattttgccaaaaggctttaagtttcattatgctttg

SEQ ID NO: 275818 - DNA, 587 bp, Cannabis indica
cagggtggtcgccctgtaaatccaccacaagctcctccggattgggagcaaagatttgcggaaatgcaagatcggatccgccaacaagatgaagagattcagagattgaggcagcagggtcctcctgccgtgcctcctcaagttgctcaggccgttgcagttccagcggtgccagcagaacaacctgttgttggcaaccgtatggagccgttgtatgaaaggttccggaagcaggcacctccagtgtttctgggaggtcctgatgtaatgaaggctgagcagtggctcacagtgatcgagcgtatcctcaattttatgggagtggttggtaatgatcgggtgacatgcgccactttccagtttcaggaagacgctctcgtgtggtgggagttgataaccctcactcgggacgtcacagtgatgacctgggaagaattcaaggagttgtttaactccaaatattacaatgaagctgtccgcagtgcaaagcgaaaagagttcactgaattggttcaaactgagggaatgtcggttactgagtatacgacaaagtttgaccgtctggccaagctcgcagcgggaatcgt

SEQ ID NO: 275819 - DNA, 221 bp, Cannabis indica
tcactcaaggtttgaaattattgaagaagaaaagagaagggaactggcggcttagaattttctctgaaggaatgagatgcatcataattttcctgaagccattaaaataataagtaaccacctaggcttaggttagatttatttgacattaaaataatagaaaaataaaatggtaaattacacactaagtggccggccatgtaatggattgggccccactt

SEQ ID NO: 275820 - DNA, 601 bp, Cannabis indica
ggtcagaacaaccaagatttgctacctccaccagtagatggacacctacaagtcattattggcccgcacattgctggagattcgggcaaagctcgggagaggtatgcccggacagcacagcacgagcaagaagaagtcatcctggccgtggaagaaaggaagcccaaagttccacgagcaggagagccaaccataactttcaacgatgaagacgctgtcaaaattagatttccgcacaacgacccgctggtcgtggaagtccagatagccaataaaatggtggccagaaccatgatcgacaatggagcttcttcaaacattttgttcaagactgcttacgaaaagatgggactccaactcaaggatctaactccatgcctccagcctgtctatggtttctccggtcaaggagttgcacctctaggacaaatccggctacccctcactgttggacaagctccgacgagcataactatcatggcacagttcctaatattggatgttccttcagcttttaacgtaatgcttggccgaccagccctgtatgacttaaaagctgtcacatcaatatttcactcgtgcctgaagttcccaacaaaga

SEQ ID NO: 275821 - DNA, 517 bp, Cannabis indica
aatatgattgtaaattttaaagataggatttcagtttttgtgtacgattatacatttataaaagtttaaagtttattaaaaattttaaatttgatacgattttcgaaaaactctttaattagcaaaggcgtgcacagtaagaaagaaattactatagcgtgcataagccaataggatgttacaattattgaattatttatttcaataataagtttttaatttgattaattcagggaaataattttttattttgttattttgggaactattttttgatttagttaattcaaggaaccaatttttgatttaattattttatttaactggcttttgtgtgtaaatttttatcttggttgttttacggaaccaatttctttgtctcaaatttataactagttgatacatataatgagtttcttttatcttaaattttgagttattgtgtgttatttatttttacttaaatttgtctacgaaaccgattttatttagacttatgtctcaaatatttttggaa

SEQ ID NO: 275822 - DNA, 669 bp, Cannabis indica
tatgtgcattttccaattattattttcattattttaatgccaattaattactaacctaaacctagtagttatctataaatggaaagtgatggctcacaccaaataaggcagttaagcaattactcagtaattaaggaaacagcctctttcaaaaaattgagccttccttttctctctatatatagccgaccatctccttcttcttgaacacacaagagagataaaatttcgaaatcctagtgagagagtagtgcccacacacagcaaacagtacctcaattataatttggaagactgtgaaggatcaaatccaagagaaggacattcagactcagatcttgattatactctgcaacagaaaggattcaaggtttagagatctgagtggaaggagacatattattccgctacacccaatgtaaggtttctcatactttatatgtgtttatttattatcgttttagaagttcatatttaggttgttaatcaacatacttgtgagtagatctaagatcctggtaaaataattccaacatgataagtactaggcgtatgtacgagttcgtctgattaggcgattactcctggcggcgtgtagatacggtgtcagtgatatgaaaattttcaggttatggcatagaatgaaaccgttgtagggtttcctcctag

SEQ ID NO: 275823 - DNA, 564 bp, Cannabis indica
agacagtttgtcgccgcaagaaaagtcaatctggaggtcagcgccttgactaacatcaagcagctgcctacggagacactaaagaattacataaagaggttccgggaggaagcctcaaaaaccaagaaagtagatgacggacaacagcttgccctcctccaagcaggcatccgtacagggactccattctggaacgaactacaacaggaaggagctgcaaaccttcaggacttccagaagagagtccaaaaatacattaaccttgaagaggcccaaatagtggcctatggaggatattatcccaccgggatagcgggatatgtgcccggaacccagccctcgggcactgtgccagcagcagctccaccgatgagcggcatacagttctctgccactcccggatatagccaaggccaggccatggcccctgcatcgtcccattttggaaatccctcagggataaatggacaagccccctcgcactctgctccgacagccagcctagccggtccttcccagggctcgaggagtaaaaggtcctccaaaggcagcactcggacggag

SEQ ID NO: 275824 - DNA, 544 bp, Cannabis indica
agtttatttggattaggtttggatagattttaaggattatacttgtgtgtttattctgttattgagacctaaaaattggttgtgtgaaggatgagttcttggcttaattttataagaattcaagataggattttcatggaagtaagctcaagttggagctttgattttcttgaattggtaatctgatttttgggggtttattgttgaattttgatgcataagtatgtgtttaagaccctataatatttgctagcttctgtaagtggattgattgagaatttggttgtgaaaagcaagcttgagttcatggaactcaagcttggtgctttaatggcactttttgatttttagtgcaattgttgggtttaagttgtggaatatgtttattatgacatatattgatgctctggaaagtttgggaatgtttggggatgatttgagtgagttttgggggtttaaagattgagaaatttcgtgttctctgcccagacaaccggaattccggttggttcatccggaattccggttggagttcatcgggaaa

SEQ ID NO: 275825 - DNA, 532 bp, Cannabis indica
ctatctgcgaaaacaaaaagagcgagttagcatgagatctcaaaataattcaaaaatgtctaagttagaaaacatgcgacgtactaggtctacgattaaaatcagttctaatccctgggactttgaagatgtagaaccactttgatttccaatctcccatattagataccattccttctaccccattaatttcagaagtcgcccatttgctaaagcagtagaaaccattgtgaaggcctacgctttttatatcgtagaagtagctaaactcttctaccgagggagccctatgaacgtactccatatacatcgcgtaaaaggccagggtagtgcgataactattgggagttagctggaaaggtgatacatcatatcgtttaaggatagccgcgataaagggatggaaagggactgataccccacatcggagaatgggtattgagattaccacatcctctgtgggaataatcgcaggattggtaaaaggaaggtgcgccctctgagtcggtttaggtcgcaaaaaagcaagtcg

SEQ ID NO: 275826 - DNA, 715 bp, Cannabis indica
tacagggagaaaaagaacttctcgtgcatgggatcattttactcgacaagaaattgatggtaaaattaaagcggtttgtaatcactgcgggcgtaagttggtgggaggaagtactgcggggactacgcatttaaatactcacgtgaagaggtgtccagttagaaaggcccaacttgctgctaatccaactacaagtccttcaattcctttcaattttgatcctgatttagcaaggatcaaattggctcaaatgatcgttaagcatgagtatccattgtccatggttgagcatagcgggttcatcgaatattcaagtactctatgtcctacatttcaaatggtgtcaaggaatacaattaggtctgacatcatgaaaatgtataaagctgagaaagaaaaatgtaggcaaagtttggaaaaaagtaggagtagaatagccataaccagtgacatgtggactgctaatcatcagaagaggggatatatggctgtaacagctcattttattgatgattcttggaacttgcacaatcagattctgagttttaagtatgttccatgccctcacgatgctccagcactacttgaggcactaagatcttgtcttaatgaatggaaaatagaagacaagatcagtacagtgactctcgataattgtagtgcaaatgattccatgatagatcttttgaaaggacaatttgagcctgacagtttt

SEQ ID NO: 275827 - DNA, 583 bp, Cannabis indica
gtttatttgagttgaattaagctgcttgtgaggcatgatagttaggttgattagagatttctgcagttttagtgagcatgtttaagtaattttgggctgatttgaatgcatgatatgttgcttagtcaagttttgagttttagaactcaatctttgacctttaatggtgaaatgagtttctgtggttgaagctcgattttgttgcattagaaatgtcctatggcatgtttagaacaggtctagaaggttttgtgtgttttggatttgatttgaaagagttatgaatttttgagttctgcccgcgaggagccggaatttcggttgtgcatccagaatttcggatgggttttgaaaatttctagaaccggaattccggttggacaaccggtctgccggttgggtgattttcagaaaccctagatttcctcgtttttatgttatttggggtattgccatgctttttatcgatagggaaaattttagttcctagtttaagtcctcgggaagtgatttagcgtatcacttatagtgttgtgattgttatggtttaggagcctgtaatccgccgcgcagttcgttccag

SEQ ID NO: 275828 - DNA, 525 bp, Cannabis indica
aggcaattgctagtcccaagaataatgctcgagtggttatgaaattccttcataaacatgtctttacaaggtttgggactcctagagctttgactaagtgatgagggaacacacttttgtgaacaaagtgttggctgccctcttggcaaaatatagtgtaaatgggcgtataggacagcatataaaactcctctaggcatgtctccatatcgcctagtttatgggaaagcatgccatcttcccgtagagttagaacacaaggcgttttgggcactaaaaaatctcaatatggatatttcagcagctggagaagcaagaaagttacagctgaacgagttggatgaattacgtttgttttcatatgagaatgctaaattgtataaggagaagacaaagagatggcatgatgatagaatcaaggaaagagtttttgcaaaaggacaagaagtgttactctttaattcaaggctcaaactctttcctggaaaattaaagtcccgttggtctggcccgtttactgtgcaa

SEQ ID NO: 275829 - DNA, 804 bp, Cannabis indica
atggaagaggtgataaatcaagattgtgagaatacaaggataagagattttatgtgaaaaccattcatgggtgagcatggtggtatataatgtgataatatatatgatatatatgagttatatatatgtgacatatatgattatgtgtttgtatcatattaatatatatagtagtatataatatgatatttgaatttatattatgttattatatgtatatatatgagatatataatatataacatgaatatgagttatgtgtattatatatatgataagatataatataatatacatatatattgcgagattaaatatgtagaaatacttattttctatgtatttatatgagacatgcatatataatatatattatgtgtatataatatatatcatgcatgtatattaaagtgtatatatgttatatatatgtgtgagatatgtaacatatatagttgtgtaattaatatatattatgtttatatgatatatattaaagtatatatgttacatgtatatgagatatgtaacatatttatttgtgaatttaatattgacattatgtgtatgttacatataagatgttgattagtaacatacatattatattaatgtatgagttatatagtatgataataatgttgatagtaataatataatattgtttattgctattgatgtggaaattattatcatctattttgtgaataaagaatattttaaattctttttcaatttggtagtgaacatctcactttatgagataataaaagatggcttttgagaagttacatcttttattgg

SEQ ID NO: 275830 - DNA, 707 bp, Cannabis indica
caattgcactgcaattataaataaatagagaatgaaattcattaaggataacaagagcatgatgtaccgggattaaaagctgcccatgcagcccgttgtccaaaaaatgaaaattaattccaaatttaaagaccgcttggccagtcatgatgtcttaaaggccttacggccatatataatatatatataaataggagagataaaaagatcaatgttcaaacagctggagtcccaggctctggatttggttcatctaagccgactggagcaggaggatctgttgttcgagcaggagaagcatcagcagcctagtcagaagcttggccggaagttgaagcagccacctctttcccacaaaaggcaacttgggccgcgcagtactcgaggtacatttccttggcgtcgcccaaatagtcgaagttggcctggggattagccttccaaaaatcaaagaagagctcaaggccggcagcctccaaagcatcaaccttctcccgcaagcggttcgcctcaaccgcttgagcatccttatcatccttcagccgaaggaggacctgccgcagagaagtcctctcaaattgaagacgatcaacctcagcagataaggactcgatggtttcctcaaagagatcagcagcctcgaggtcctttgtcagcacggtgaccttcttctcagcggcaaaaagcttcttgttggcctcacccaa

SEQ ID NO: 275831 - DNA, 406 bp, Cannabis indica
aaaattataaagaataagggtagcaggcatataactggacatatgaaagaaagaatataaaaaacaagaaatatgatagcttccaaataatattataacaaagcaatgctctccaaatttatcttaatatcattcttctcttgaagcctctcatcaatctcatagcactccatgatagattcaacaaaatatatgtgtttatgtatatttggattcaacaaaatatatgtgtttatgtatatttgttttgagcaaatcagtaaacatatattttcaacaaattaacccgataaactcaagatccacatatatatatagctaagtattcaaatacaattgtaaaatctaaacttaaaacaaaatcaaatggacaattcatgctcaactaaagctatatatatactgt

SEQ ID NO: 275832 - DNA, 396 bp, Cannabis indica
attgataacatgaaccaaaacatacaaatgaatgaaaaatacttctgtttctttattgatattgaataaattggattacattgaaatggagttttatttagggcatagaacccaacaagaatttcatcaatgcacggatgagacctcatcagagcgtgcatgatcaccttctccaaatgacgagttacttctaagaagctgagaatcatagagctgttatagattagacaactcaaatcagtttgattttaaacagtttgactctagcctttctgcccttcacttcaaattattgttggaattattttactaggatcttagatctactcagaagtatgttgattaacatcctaaatatgaacttctaaaacgattataagtaaacacatataaagt

SEQ ID NO: 275833 - DNA, 595 bp, Cannabis indica
tgtgtaccgctaatacttcgctgagatgcagcacatgcatgaggacaaggaaacttcatgcactggaacaagccgcaagtgcaagtatgttcctgcaagtccactacgccaccggtcataactgttcctccagggtgaacctgcaacgtgtaaggcccgcatgagtcaacgttcaaataccgacctttttcaaaatgcaatgtcaagtcctcctccatttctggtgctaggggtttcgtccacttgtcagctttttcttttcgtgaagcaaaccacttctggactttggacctcaggaatgctacagcagcagtgatcgggaagcctcttgcatccttagttgtgttgttgaagctctcagcccagttgctcgtcattacattgtaacgtacccctggaaagtacgaccggacccatttttcaaatccgatttcctcaagatattttgcaaccgctggattcatggcccgaatgttctcaaattctctgtgaaactctgatcttgaatacgtgtacgcacacgtgtaaatgtgattcgtgaagacgtcagtcttgaacttgtggttgacgttcataataatgtggtggtagcatg

SEQ ID NO: 275834 - DNA, 422 bp, Cannabis indica
tcttgtttcggctcctatcatgcgcttattgacataatacacgggatgttgagttttctcttcttcccgaactagggcagcgctgaccgcgtgttcggagacagccaaataacgaaataggtctgagaacgggttttgataagataggaggcttggccatgtgctcttttagctttttgaatgcctcctcgcactcgtctgaccattcaaacttttggcacttctttaatacgttgaagaaaggtatgcacttgtccgtggaccgtgagatgaagcggcttaaggcagctacctttctagtcaggctctgcacatctttatgctttttgggggagggcatgctcaggagagcctggatttttttccggatttgcctcaatccctctttgactgacgatgaagcccaggaactttcctgattt

SEQ ID NO: 275835 - DNA, 508 bp, Cannabis indica
ggatcacttagcaagtgtccatttaatacatagagattgatttaattatcaatctgtttctacattgaatttcaacatttaaatcaattaaaacgtaaatataataaatgaagaacagtttcggcccaattaaataactacaacaacgtatgcggcctttgtggtgcgagttgtctgttcatattctcacataagctcccagactcaagatgtgtacaagactaatcgagtctcacatgcataagatatatgcgtcatgttcgagtcgcatatacgaatatcttgtaaaaggttgataacttaggacatgcgagtccttatcaggttacagagtttgttgggtcatctggaccagctcgctgagtaaagaatcgatctttactatctcgcaggaagatctttatagttattgcatatatctcggtatgtaaaatctttttttggcaagttagttgacaaaataatttctccttttatggtaagattgttgtgcattcatacctgaatt

SEQ ID NO: 275836 - DNA, 401 bp, Cannabis indica
gggatattagtatgttttatgttatgcttttcttactgagtctgtcgactcacagtgttatttccatgtgtaggtaagggcaaggctaaagctgaggaaccgtgagagcgagcaggtgaagattatagatgtcggggcggttaggcctagagcgtacgatctttgggacatcagggccttttgttgtatagtcgctaggcgacaaaacttttgtatatgtatagtaaacttttataaatatattttgtaacgggatcccagaattttataaatataatactttaagtttttaattaattaagaaaattttaataaatcacgttttttattattctcgttagttagcaacgagctgcacagtatgttcaaaatcatgctaacacgcctatattagttagggt

SEQ ID NO: 275837 - DNA, 160 bp, Cannabis indica
tgttaccggtacaccttcaatatattttatccttaaaacacttagctccatataaatgatatttcagcaaagtgaaatgagatctacaccatttatctctgtttagccaagctcgaaggatatcatcgttccacttctaaatccctatagaagttataga

SEQ ID NO: 275838 - DNA, 806 bp, Cannabis indica
attaatcataaataactgctaatttccaaattaactaagcgggctttacaccatcattgcctatataccaagagacatgttctgaagaggcgaatgctcttcaaacttatgggaattcgtttgatagcccatttgctcagtcctacaatccaaattggagaaatcatccaaatttttcttggagacagaaccagcctccaatgaaccaaggggaccaatacaactcacccaatcagagtcatgcccaacataatatgccatatcctcaacaacaaagaaaaccatctttagaggataccctacaacagttcatgcaaaccacccaacagtccatgttaaaacttgaaacacaaatgggtcagcttgctactgctgtagctgaaaggaaaaagggaaaacttcccagtcaacccattcccaatccaaagagtcagtacgaggtaagtacatctagacctattgaagaagctaaatcaatttctatccttaggtttggaaaaattattgaaaaacctgattacatatctcaacctgatgctaaaatgaacactgactcgttaaaaaaaatgaaaagagtcagcctgaaagttcacattccaaagactcggttgaaaaaatgagtcaaactttgtcgttcattccaaaagctccattcccacagagattgatcccaatcaaaagaggtagtcagtatggtgacatcttagaggtattcaaggaagtaaatataaatatccctttcttagatgtcattaagcaaatacctgcctactcaaaatttttaaaagatctgtgtactgcaaaaa

SEQ ID NO: 275839 - DNA, 664 bp, Cannabis indica
ttcatacttttgtaagtcttactcatagtagtcaccattagggtgatcaatactaagaataaaatacttacaaataatactaatctttcgagattttacggcgttaaattgctaatgaacgttcatccattagggatgattactcactaaaataagaactatgtagaaccagcaatggagtcgaatgtctctttattaaagctcattattacaaatgtatttttatttaatcacttattttagtctatatattttaataataaaaattacttaatttaagttgatcaaaaattaattaaataattaattttcaactttaatttaattttcaaatttaatttttgaaaatcattatatataaaatatataaaatttagaaaataattaaaatataataaaataaatattcgaaattatctaatttaagttgttctaaaataataaaattttcaacttaaattattttcaaaaatttcattaaataacaaattaagtatcttgaactaatcatcttaatttaaaaaatattccattttaagttgatccaaaattaacaaattttcaacttaaaaacaatatttaaagaatatttgattaactaactttctagaaaatttaacttaattatcaatttaaaaaaaattcaaattcaagttgatccaaa

SEQ ID NO: 275840 - DNA, 584 bp, Cannabis indica
attaattatatatcatagtatgtaatttttatatgtaattgtaaactggaagtgtgacagtcgatattcataaaatgtataactaaacaaagttgaagaacttttcatagtcaaaagccatcttaaacaagctcagtaaacttataattcacccccaaattatatacaaaatcttaatgtattctattaaaatttactctctctctaggaaattattaattttttttcgtaaggtatgaattttgtttttgacaacaaagaaattgttataagtagaagtataccaaaaaaaaaagttggtataaaaaaagaaaagaaaaagtataccgaaaatagaagtccaataaaatatttaatggaaacaggacaggccaccaagtgtaagagcatcaccaaggaggcatcaaatttggtgatgcagtagaataagccctccaacgtagctgcaaatattacactaaattgctgtgtgtgctacagtgcacggcatatatgccgtgcactgttcacacgacatactttttttttttttttttttattaactaaattttatatatgtctatattattaattatatttatta

SEQ ID NO: 275841 - DNA, 437 bp, Cannabis indica
actaattaagtgtgtaaagagtacacaacttaatttttgaaattcaaaaactgtaattcaaatatagttgtatgggattgaattttatcatttataatgtgtataagtgatataaaataaagtgggaatagtttggaataggttggagtgttatttgcaaaagctgaaaaatttggtaactagtaactagttactattttttcagcattaatagtaaaacgttttttactattgggatggcttttaacaactcccataacctctaaatcacccatttaatcccatttacaccccattaagaaatggtaacagccattgggtgtgtgatgtttgaatttcaaagtttgtgatcctaaacactataaataaaggcattgattcaccctttgagacacactcttctcttctatctttcaaacacaaagctagagagttct

SEQ ID NO: 275842 - DNA, 128 bp, Cannabis indica
tcgggatcccgattacaaaacattttataaaagttcactgactatacaaaatacttgtcgcctagcgactaattacaaaaatagccgtgctgtcccgaggatcgtacgctacaggcctaaccgccccg

SEQ ID NO: 275843 - DNA, 929 bp, Cannabis indica
tgttatatttttcagttgacagtgtactccatgttatgtcctcggccgaacgagattgagtttgtgagttacataaccgggggtcagcctccgttatttgttgacttggaggaacttgtgttgggtgaggatgggcaaccaacacaggatgctttgcgaagccaggccgaaaagcttgcctccacattggaagaacgagcggaggcagcccgaatatttaaagactctacaccacctccaccgtctcctccacgtgcaccgcctgcagttccagatgggtctggtgttgacccatctccagcttcagttcctgatgggtctggtgttgacccatctgcagcttcagttccagatcagtgtggtgttgacccacttgcagcatcacagggtcctcctgttcccccgtcagcttctattcccagcacctcggaggctcgcgatccagtataccctgccattttggcaaggttggagactgtgggggcaggccgctctgctaagaggacaaacagcgattatggatcagttgaagaccataatgacgctcctgcaagatcctggaaggccggcagcagattcacagccacagccacagccacagccacagccacaaccggaagaggaggctcggacaccggaagatgacttcattctcccaaatgattaccaaccggatgatgatgacatgttctgtacacctgagaagacgaatatcaccagcatcggggatactcaggattctgaggtgcaggtgttagagacagctccagaagtcatggagaaccggaggaagagaaggcggcctaggtggttcgctgagtacactgaaatgaagaagaaggctagggctacttcgacactcgtgaatgcggacccacttagagtggttgatcggaagctgctcaagacttttcacaattgggtactcg

SEQ ID NO: 275844 - DNA, 512 bp, Cannabis indica
atttttgagaaaataaggaaattttgtcaaaagtggaaaaattcccaagtggggcccatcactatggccgcccacttaagtggtattttccacttaatatttctattattttaatgcctaataaatcttaacctaaatctaggtggttgcctataaatagatagtgatggctcacacttaaagaaagaaatttcttgccttcacgaaaaattaagccatctattccttctatattcgaaccacctctctcttccttcttcttcataattttcataccttgagtgatagagtgagtgcccacacacattaagtggtatctcaatcatagtgtgtaagtctgtgaagaatccagaatcaagagaaggacattcgggctcagatcttggtgatactctactacagacaggatacaagggttagagatctgagtggaaggagccattaatattctgttgcaccacatgtaaggttatgtgtttatttacattgtattaaaaattcatatttaggat

SEQ ID NO: 275845 - DNA, 606 bp, Cannabis indica
ataagtaaaaaaaaaaattaagtttggagtttgttagttgaacttgtaattaataatattcaagattaattataaataaaaaataatattaattttggtgtagttttcaagagttgatttgagccattggattaaatcaagggctataaattactatccctattgataggtaaaaattacaatacctattgtattagctcccttatataaattagagaatatatataataaaacttactagaatggtgattaaactaaaataatttcttagttttatccatggagattgaattgactacaaattaaagttttatatttagggattttaagggattagatgacaaatttaatgagaaaagatagagataagtttatagaaaaaaaaaaattaagaagaaatagtgaggtgaagagaagaaaaaataatagttgagcttattattgaggttggttgagatgaaaaaatgaagaagagaagaagaaatgaagaagagaagaagaaaaatggtcttaaaggtggggattgaggctgggtgtttatgttttatttaggtgggtatatcagtcatttacttaattagttaataaaaaaattaaaaaattaaa

SEQ ID NO: 275846 - DNA, 579 bp, Cannabis indica
ggatttgtcctaggggtgcaactccttcaccgaagaaaccatagacgggctgaaggcatggagttaaatccttaagttggagccccatcctctcgcaagcagtcttgaacaaaatattttaagaagccccatcatcgatcattgttctggacaccattttatttgctatctggacttccacgaccagcgggtcgttgtgcggaaatcttatctggacagcatcttcgtcgttgaatgttatggttggctctcctgctcgtggaactttgggcttcctttcttccacggccaggatgacttcttcttgctcgtactgagctgtgcgggcatatcgttcccgagctttgcccgtgtctccagcgatgtgcgggcctccaatgatgacttgcaagtgtccatctattggcggaggcatcagatcctggttattctgaccttggttggccttgacatacttctgtaggtgcgggttgttcttcttgatcagaagttctatctcccgcttcaggttgtagcattcgttggtgtcgtggcctagtctccatggaaccgacaaaattttgtcatgtccctcttgct

SEQ ID NO: 275847 - DNA, 765 bp, Cannabis indica
tgcgtgtggcagttccaacacgcctcctcccatgcggcaatgaatgcgagatgactgctcagaggaagcctggcaccacccggagatgctttgatgctaccttgctctccgggagaatataaaaccttgcatgccttctccgggagcatatccaagatcatgcctttctttacaaagacttagctattaatttaagtgttaaaccctttgtgtccacgtgtccttgtctggttggtccacgtacattgggcaaaatcaggggcaacattaacccccccaagccttgtttaattgtgaaatgaacaaggcttacttagatgccttcggttggctcctcgatttcctgacacgtgctttgggcgcgtgaaggtgtatttaatgatcaacattactgcagcgattcactttttgccggcgtcgattcgtttcttgtccattaattgatacggtgcattaatgggtgtcagacggacactcaagcgtttccaccgccttgatgacgaacaaattcagccgttggatcctaggaattcgaatcgtgtgccttcccaaccgttcaattggtagatgatcgcgcctcttccacatgcgttttggcctataaaagccaccattctcacttcatttggttactgtaacgccctaaataattaggcacgctacccaaaaaagattatgaaaccctaatcccctaaccgggattactaattaaaaatagcgcagaatttaaacttttatgttaaacagactgaaaataaacttgta

SEQ ID NO: 275848 - DNA, 560 bp, Cannabis indica
actagcataggcgtattacgtgatttttaaacatactgtgcagctcgttgataatcaacgaggtttatggaaatcatgattaattaaatttttgctttttaattaaacttattaaatattttatacaaaaatacttggatcccgattacaaaacactttacaaaagtttactatctaatacaaaatatttgtcgccagcgactaactacaaaagcgctgttgttccgaggatcgtgcattccaggcctaaccgccccgacatgtacaatcttcatcggctcgtcctcacggttcctcagccttggccttgcccttacctacacataaacataccactgtgagtcgacagactcagtaagaaaagcataatcataaaacatacataatcccgggttatgatcagacgcccatacccctgaccataaccctaactgccatgtcccacacgatactgagtcccgaacgttcgtaagacggtactattgacaagtaacaacctatactcgatcactggtcatactccaactgctagtcatactctagcctgtaccgatgtgtta

SEQ ID NO: 275849 - DNA, 600 bp, Cannabis indica
agatcctggtaaaataatatccaacattaatgccatacaattgtaacctaaacctagatggaattctataaatagaaagtgatggcttcaggaatctatgacatgcatattattccttcagagaaaatagcctagccgccactttcccttctcttttcttctttatattgttgagccttgagtgaatgagtgagtgcccacacacatcaagtggtatctcaatcatagtgtggaagattgtgtagaatccaaccaacaagaaggagaatcaacatcaaggaaggagagaaagagatccaggtttagatcttgattatgttctgctatagaaaaggaatcaagggctagagatctgaccggaaggagtcattatattccgctccacccaatgtaaggttttcttgaacccttttgtgtttatttcattgttttagaattcatattaggatgttaaggaaacatacatggtagtaaatctagatcctggtaaaatatttccaacagctaagtccaaggagtctggaccaccaacggttgggtctgaactggtcaggagtgatcctgaacggtgcaggcacaactccacctttgctagtgctt

SEQ ID NO: 275850 - DNA, 580 bp, Cannabis indica
aatatcccaagtaggaaaccgcccaaggcgagcatgaagatgtggatcctcgacttggggacccaagcagcaatgttggacctgtggaagaattagaagagatcgaggtcgatccagatatcccggccagaaagctgaaaatcggaaagggtttgttgctcgaagtaaaatcggaattgataaaatttctgagagcaaacctagacgtttttgcctggtcacatgcggatatggtcggaatcgatccttctattatttcgcacgtcctgaatatcgatcctaatatacggccagttcagcaaaaacgaagactgctggataaagaacgagcagtagccctgaaagacgaagttgaaaagctgcgcaacaacaacttcattattgaagctttctacccggcttgggtcgcgaatcccgtactcgtgcctaagccgaacaagaaatggcgagtctgtattgacttcacagacctcaacaaagcgtgccctaaagactgtttcccacttccaagaatcgatcagctcgtcgatgcaacagccgggcacgaaatattaagcttcatggatgcttattcgggcta

SEQ ID NO: 275851 - DNA, 510 bp, Cannabis indica
agaaggagaagcaaaaagtacaatggtaagactgtgaagagagcaccacctcatgtattgacgggggatgatattttatctcaattagaccgaattccattgactttgcctggaaaacacaaacagttcgggggtgtgaaacggaagcgttctagtgaagagctcaattggtctaaaaaagtattttttttgagcttgagtactggaagtcaaagtccttacgacataatcttgatgtaatgcacattgagaaaaatgtgtgtgacagcttagtaggtactcttctaagtatcgacgggaagtcaaaggataccgacaaggcgagaatggatttgcaagacttgcaaatacgacgagagttgtggttgtatgaagaccggaatgggaagtggaaaaagcctccagctagttacacacttagtgttcaagaacggattgaatttgcagacttcataaagtctgtacgatttcccgacggttttgcagcaaacttagacaaaaatgtaaatt

SEQ ID NO: 275852 - DNA, 613 bp, Cannabis indica
ggtgagggtttgggtcctcgtctcgggttcgggtccagggctgggtcctaaatccagacaccgactatgggttttgccccaaccctatgtccagatccgaatcccaatcatgggtcccagtctggtttcatttctggtgtcgggtcacgagctgggtcttaggttcaagttcgggtctgggtaaggaactaggtgccggtgctagttctgtttccctggtccctatcctgattctagatccaggtccaagttattgtgtgggtttggatccttgtctaggtttggtttcgagtcctagtcgcgattcgggtttaggtctctgtctgggttttgatctgggttcgggtttgggtttaggtcctggtcctggtcctagtcctagtttggttctagttgcatttgcgattttgagttcgagtttgggtttgagttggggtcagtgtttgagtcttggtctgagtttgggttccagtctcgatttcagtctaggtccaaatcaggctccgggagtgggttcgcgtcctgggtcttggtctaggttgggtccgagtcccaagttccaatcccgatctgagtctgcattcagttctgggtctaagtccttggttctgat

SEQ ID NO: 275853 - DNA, 591 bp, Cannabis indica
cataaattagatccaaaacataggctaaaaatagcctaacaattgcacaagctttgcaattgcccgagaatgtctccaatgcagtgatgtccatggatcgtgagttgatggactctgaactcacgggtgctcgttcagaattgaaacgaggggagagtcttcgaatcactcacctcacttttgctcatgcttctctcatgcggtttgccttaagcaattgggttccaaattctaacaaaaccgtggtatcttaagatgtggcttcactcctttaccgaatcaattctggaacttctattgatttggcctcacacattctgaaccaaattgtctccttccgaagaggtaaaaagccaacctttaaacttgtgtttcctaatctaatttataaggttttattttctcaaaagaatgtggctcaatcacatgaaacacttgagcctcccatcagtggccctacattccagccctctgaatactttgatggtgtgttccaaaaacgacccaaggctggtgctgctgctgcttctgctgctgcaagttcaggttctgctgcagcagaactcctggaagtcaagtctgaacttcaga

SEQ ID NO: 275854 - DNA, 445 bp, Cannabis indica
agttgtccaaccggaattccgattctgggaattcctggaccctcatccggaattccggatgcacaaccggaattctggttcctcgcaggcagaatttcaaaatttcataactcaaccaaatcagacccaaacaacctcaaaccttccagacctgttctataggacccaaataacatatctaaagcaataacacaacccagaatgcacagatacaaaaagtgccattaaagcccaagctttgagttccaaaactcaaacttggttaattccaactaacatgcatccaaatcagatcaaacctacttaaacatgcatataaaagcctctgaaaacacaagaaattgacctcaacaaacacagcaacaaaactcacaaatccactttgaaaactcaagcttttgcatagaaaaaaccataactcaagcaacctaactatcatgcatta

SEQ ID NO: 275855 - DNA, 629 bp, Cannabis indica
tccatcacaataacttatatatatctaaatacataaattttgcaataacatgctcgtaattttataaaaaaaattcttctcttatgaacatccttatatgccacttgagaacacatcatacaatacaaaaataacaaccaacaaagagtagggtagaagaacttatgcaaacttctctttaattgttctcattctttcattgaatgttaaatttttatttttatttatttatttatttatttttacttaatttcctccataaagctacaattctgttattatagtgtcgtagcataattattaagaatgttgccctacacataacgatccaatatatcattaacaaatcgatgtcattcaaacagaccacatgtcttctataaattacatgaactacatgtaagctaaagatcgttaaaggtcttcttacacatgcgagctagccaatatataggcttagaagcacacaagttaacatactctcaggaatgagctacatgcatatcactataaaagaaacatttaccaatccatccaacttatgaaataggaataaaatttactatcaaaatcactctttctaagaataactcgagaacaaaatcgcttaatccaattctcatatacat

SEQ ID NO: 275856 - DNA, 701 bp, Cannabis indica
cgctttgttaagaggggaaaacttagccccatgttcattggacttttaaaaaccctggaaaggatatgacaagtagcatacaggttggctatacccccagcgctgacaattgtacatgatgtgtttcatgtttcgatgcttcaaaaatatgtatcagactaatctcatgttctcagttatgaagcattggaacttcaacaagacctctcatacgaggagaaaccagtgcaaatactagataggagagagaaagtcctgagaaataagataattacactgataaaattattatggaagaacagtgttaggctatttttagcctacgttttgggtcactttttatagtcgttttccttctttattattatatttggagtaaaattacgcttgttttctttcgtttcaagtttcacacttggaatatatcaattgatcaaatttcagaaaacaccaatctatagaatagagaaaattttacaagaaaataaagctgaaacttcaagcctaaatttgactatgttctgatcagattttggaaaaagtcaaaacatagaagctttagatttctttttcttctttccaacacatcttaaatcaactcatttggagtttgtatgtgaaagttatgcatattttactgaaaagatgttgacgttgtcaaatttgcttcagtagtcgcgaccaccatttttcatggtcgc

SEQ ID NO: 275857 - DNA, 1390 bp, Cannabis indica
actaactctagccatcgtcgttgtctcatattcaaatctttttgagtgaaaaagtatttcaaacttttgtggtcggtgtaaatctcacacttctcaccatataaatagtgacgccaaaccttcagggcaaaaaccacggctgccagttctagatcatgagtggggtaacgctgttcaaaatccttcaattgcctagaggcataagcaataaccttccctgattgcattaacacacaacccaaaccttgtcttgaggcatcacagtatatcacaaacttttcgtcactgactggcaggcttagaactggtgcggtaatcaatctcttctttaattcttgaaagctattctcgcatttatcagtccacataaacttataactctttcgggtcagctcggtcaaaggagtagcaattttggcaaaaccttctacaaatcttctatagtaccctgccaatcctaagaaacttctaacttcagttgctgtcttaggtcgtggccaatctcgaacagcttcaatcttcactggatctaccagaatcccatccttacttaccacgtgtcctaagaaactcacttgggacaaccagaattcacacttcttgaactttgcataaagcttgtgttctcgaagacgctgcaataccatacggaggtgttgttcatgagcttcttccgattcagaatagactagaatgtcatcaataaacacaatcacaaagttatctagaaagtccttaaatacccgattcattaagtccataaatgctgctggtgcattagtcaagccgaaggacatcactaaaaactcatagtgcccatatcgagtacgaaaagcagttttgggaatatcctcttcccgaatcctcaactggtgataaccagatcgaaggtcaattttggagaagatggtctttccctgtaactgatcaaacaaatcatctatccttggcaaaggatatttgttctttattgtcaacttgttcaattcacgataatcaatgcacatacgtaacgatccatccttcttcttgacaaacaaaactggtgcaccccaaggagaggtactcggcctcgtgaatcgtagatcaagtaggttctgtaattggactttcaattctttcaattctaccggtgccattctatatggagccttagaaactggctcagccccaggtactaattcaatttcgaagtcaatctctctttttggtggtaatcccggtaactcttccgggaatacatctggaaattcacatactactcgaaccttttccgacccctcaggtgtatcttttgtggtatccaacacactagccaggtatcccatacatccttctcgtaataattccctggtcctaagtgccgatatcaaaggaatccgagatccct

SEQ ID NO: 275858 - DNA, 572 bp, Cannabis indica
agatgcattagccatgaacgttgctttttagagtgagcaatcatcctatggctgggcaaaatattcaagggagaatgtctttcactggaagaaggtgggctagaatagagacgaggataaatcgatgttcgctctcccaaaactcacatgggttcatctaacaaagacaatacacaagatgagtgtttggtcggaatatcgaacgttaaaataagcaaatatgtcgatcaggagtactcaacagattaaagaataagaatgttcagtgaaaagtcaaaactcagaaagtttgaaactttctcgagttaaggaaaaaaatttcatgaaacttagaataagcatgatgaaagacaggcattatgttgttcagaaagccagtattatgggctgtaaaattgcataaacccatgacaaaggaaaattgtagagtttctaaaattagggtttcctacatgtcttctacagcaaagtcaaaggtgcattcaaaaattaaacatgcaaagtaaacataaaggaaatcgagaacttactcaagaatcagatgtctgtattcatgtaacgtcgaaccaaac

SEQ ID NO: 275859 - DNA, 160 bp, Cannabis indica
catcatttcacttctatttgctagatagaagctatagattccatatatatgtttagagctcccactcaattggactaccatgttcacaaaatgtacgtatcaccctgaccaaaaaaacatgtataatactcttgagatcgaacttaaccatatcaggatt

SEQ ID NO: 275860 - DNA, 936 bp, Cannabis indica
ttccaatcccgatctgagtctggattcaattctgggtctaagtccttggttcgagtttaggtccagttccgggtctagctttgggtctgattctaggtgtgggtttgagttcgggtacgagtttgtgtttgggtttgtgtcaaggtttggaccccgatttgggtgtaggttcgggttcaggtccaagttcgggtcccgagtacgagtacaagtttgggtgtgggtgaggatctccgtcaagatctaggtccagcatttcaatcccagtctggttcttggtacgtgtcaaggttcgtatccggatccctatgtaggtccaagtatgtgtttgggatcgggtcctgaatttaggtccaggtctgggtctcagttccggtttgggtacacgatcgtgtccgggcctgagttccagtctcagtttgggtttgaggctaggtctgtgttcggttttaggtctgggtccgggtcctggttcggcgattcttgttcatgttctaattttgggtcccaggtctaggttagggttcgggttttgttcttcgtctaggttagggttcgggtttggttctgagtcacagatgtagacaccggctacttgtctgttacaggcaccgttacccgaaactcgagtgaagatctggatctttgtcacgggtctcggtctggttcttgttcaggtccaaggtcccatttcagagtttgggttcgggatcgagactggggtgcggttctaggtcgcgaccctggttctttgtccctagtctggttccatttttgggtctgagttcaggtttgggttcgggtcccgagtccatgtttgggtttgggtttcgggtccggctcccaattcgggtctaggtcttatttggagtccgggacctggtccagttacggttctggatctaggtccaatttcaattatgattccaagtccaa

SEQ ID NO: 275861 - DNA, 717 bp, Cannabis indica
tttagttctatcccgaaggatctgtatcccaagtacatatgaagtctcaccaaggtctttcatatcaaaatggttagataacaattgctttgtctcagacaacagatttttatcattagaagctagcaaaatatcaccaatatacagtaccaggaagatgaagctgctcccattgaccttcatatatatacattgatcaactttgttctccatgaaaccatttgcagtgacaactgcatcaaacttgagataccactgtcttgatgcttgtttaagtccataaatagacttattgagcttgcaaaccatatgctccttgccaagctcctaaaaaccaacaggttgagtcatgtagatatctttatacaaatctccatttagaaaagcagttttcacatccatttgttcaagttccaaatcaaaatgagcaaccatagccatgatgattcccaatgaatctttggtagagacaggtgagaatgtttctttgaaatcaataccttctctggggctatatcctttagcaacaagtctagccttatactttactggctgcccacttgaatcatatttgatcttgtaaacccatttgcacccaatgggtctgcaacctttcggtagaaaactaaattccatactttgtttcgtgacatggaacttgactcatctgtcattgcattcaaccataacttagactgaggactcctcatggcttct

SEQ ID NO: 275862 - DNA, 187 bp, Cannabis indica
acgcatagaacttagaattgcactctcagtataatagaatgctctatatgttatagacacgtcattagttatccattgttatgatcctaatttgatcaatgatcctctaatgtattttatccttaaaatacttgaccccgtataaatgatatttcagcttatgtgaaatgagtactccaccatttat

SEQ ID NO: 275863 - DNA, 649 bp, Cannabis indica
cgagaacatcagctgattcctgagaacgcaagtcttcaaagggaaccagtatacaaagaaccatccgagaagcagcaagaacgaatagacaagcgtctttctaagcaaactcctcgacaaatttcaggtaattcgtctcttgttataaactaacaggtaggattttgacttatacttatctttcatttatgttcgcagatatgacttttctgaagtctgcccctgtcctgaagatcaaaccaaagggtggaacagcgacgacttcgccggttgtcgcccagaagaggaagagcgatgtgatggcttcacttgtcgcagactcttccaagaagctggccaagaccacacaggacaaggggaagaaagtcgtcattgatccacctgttcgagctcgcgacttcctggccatgcaagagaagttcctggctgagattccttacgaggatcttgttacgcgatctgctgaactggccgcgcagtcaatggctttgttcataaaagctgcggctactccttcgaaggaagccgactcgctgaagaggcagaacgctcattttcaggagaatataaaaaagctgaagcaagaagtggcgaggatggagaaagagctcgaggaactcagcaaggccaaggagaaggagctcgaaga

SEQ ID NO: 275864 - DNA, 527 bp, Cannabis indica
atatgaaaaaacataatttaaaatctaataatctaacatagatgataaaataatatataaaatattaaataaaataattaaaaaaaaaaaattataaatattaaatatgattggatgatattggattggattggccagatcggttatccattgaatcagatgtctcatccaacatccgatccgatccaattggatttttaaaatttacatccgatccgatccaattatgattggatattcgattctattggatcagttggaattggatcaatcggttggaattggattagatgactttctacacacccctaccaaaactcccatttctactcgtcgtccatctctctgtttcatccatggagacgtttccccctccttaatatttatgtatataattattgtatgatttctctttttagtaaaaatgtagagtagtatttattttttaaatgtaaaatgtatcactactctttctatattatcgtcttaacttgtacagctagatgatattcttgaatttttcgaaa

SEQ ID NO: 275865 - DNA, 677 bp, Cannabis indica
acgtaacttacttattttttactagttatttttggttttttttttttttgttttttttttttttttagttttttttttttttttttttaaaagtaaaaattattttggtgggtggtggtaatggtgttggattttgtgccctaaataaaatccatttcaatataattaaatttactaattaataacgatcataattcattctatgttgcgtagttcgcatgatttatttcataattatatttaatgtataaattctattaagttcaggacatatatacatatatttgttcatgattatagtatcgtcagcacagtggaattctcatgatttgtcagttcactggatttatactgacatgataatcggcgataaggtatacttacatcttggataagtgttatgtcctttccagggcattggcatagtttaccagtgtcggatgtacggagtacacattggaagagaccgatattgatcttggataagatatcataaacttaccattatatctttctaagtcaatatcaatggttgatcataggtttatggatcttaatcctgatatggttaggttcaacttagttgtattatttatgttcttcaagttgttcgtggatgctaactaatggttctggcggatatttacatcttgggaacatggtagttcaattgagtg

SEQ ID NO: 275866 - DNA, 620 bp, Cannabis indica
ttataaacctctttaaaaatctaagaaatacaacatgcaagtccttcacttttttatcatttaaaaatataatagtaatgtgtacatatatgaaatataagatatgatattttattttttagtttgataattaattatttaaatgttggttgtgcgtaaatgaactatcttctgatttataataacatggtatttctcctaaaaaaaaaatgttggttgtgcaagttagtcattaattatttatttatttttttgcaaatacatgtctcagatattaatgaatgcaaagaaaatcctatggtatgttcggatgatctgactgataccatttgcattaacaattatggttcctacacatgcgggaagaagtcacggaaaaatatcaataagttcattattggtaaataaattattttaagaattttttatgtgaatttaaatttatttacttttaatatttttatattgtcttgtttctttatatatgaatgtttttcaaaaaaaagaaaaaaagaaaaaaaaattgttttaaataaaactaacaaactctaattatataactaagttttaataatagttatatgtcatatcattaggttttttttttttttagataataa

SEQ ID NO: 275867 - DNA, 70 bp, Cannabis indica
cagaataaaatgtctccttccactcagatctctaaccctttttctccgaaggaatgagatgcatcatctt

SEQ ID NO: 275868 - DNA, 870 bp, Cannabis indica
aaaaaaattgaaaaaaaaagagaaaaaaatggcaccaaagaggactaggaatgttgaggaaggttcgtcttcaaacccaccaccaacgggttttgatagaacccgctttggcagtatcgaggcccacaatcgcttcgtaaggttgaagaatagagcttatattgaagatcggggtattgaattcccggaaaatccattgaggcgccaacctcggtttgaaacgatcagagcgcaaattgaaagaatgaagtggggaagctttgtggatactcggggtcgggctaatgttactatggcctgtgaattccttgcgaattggcccgaccgccggaatggggaagtgaaggtgcgtggaaagaaagttcccgccactgctgatgcattcaatgtgatgttctctgtcccagattacactagggaggaacaacgcctccgaattattgaggaggaagagcagtttgatatggtggatgtcgcagagacagtgggatttcctgggttgaggttccatgacaatgatggcaccgaggggtcgcccaatattctataccggtgtgagctgaacccggtggcaaaaacatggctgtactttgtgagtgctcggttagtgcccaacaagcatttttccgatgtccaaatggatcgcctgaaatatgtgtacgccataatgaaggggtacaacattaacattggacaagtcataaggcaaagcattgaccaaatcgtgcaaggagccacgggaggtggttttggtttggcgggagttatcacagaactctgcggggcatatgaagttccccagttagagtatgacaacacggtgttgccacttcgcaagatggacatcgcctttgtcaacaggctgaaaga

SEQ ID NO: 275869 - DNA, 507 bp, Cannabis indica
taatgaatattattggtgaaaaaacttatgcttaattaatgttctccaccccattaggcaactttactaaagataaactttattgctctttaagatattcatttcttcattcatggcatattgtactacaacttcaattctttatcattctataatttaatttgtgtctcaaattaatattgtagttgaactcttattgtacaaaatgtaatcactagaaaacattgatcttactgttctaataagtcatcttaaggatggaccaacaaactcttaaaagagcaaatggttcaatatgcatgttattttagaaattgtaagcaattactaaataacataacttattagaattttaccaatgacttgtatattattaatgattagttatgaattctcaataaccattaatcttaagggttgttgtgaatcataattaatctaacacttgaggtggaagtttgagaaaatatgaatgatctttctcggaaactaggttcctagattgat

SEQ ID NO: 275870 - DNA, 587 bp, Cannabis indica
agaatagggaaatttgattttctatacttacatatacttgatattttatttataaactaatacatatcacaattgaaaatatatgaccactttatctaaaacccaataatacccctctcaaattttctatacttttttttagtgcaaaaacataaaaaaaaaaaaaaaaattggtagtccgatggggtccgatggtggtccgatggtcacctgatgctacttttgtatgtacaaaaacataaaaaaaaaaattggtagcagatttggtccgatgggtggtccgatgggtccgatgggtggcccgatgggtggtccgatggtggcccgatagggtggcccgatgggtggtccgatggtgtaaatggggtgatgtaaatgggggtattttagggatatcataaaagttgtcatatcttacaaatattagttattatttgtttagaaaattttttttaaccaaatgtaagcataaaaaatcaaatttccctaagaatataatgtacctccaagacggtttactgttatacataatcaaagaggtatctatgacgcaatgtaatcaccgctctagtaatttggattagtaa

SEQ ID NO: 275871 - DNA, 912 bp, Cannabis indica
cacaaccgttgtacaagacagctcccggagagatccgagcaaaagatgcgagtaccacaacgacattggtcatagcaccaatgaatgtaagaatctcaaggacgagatcgaaaatctaatccgattgggccacctctatgagtggatcaagaataggttgccccacctcaatccgggtcaggtggctgggggtatgcctccgggaacaccagggggtacagcaggagtattggctccagctgctcccgcaggtgacgcccagcatatccccggactgccgccccggcctaatggacgggtagccatgatctccggaggtccccatatcggagggaatactcgcaaggagcgaaagcgatacgccgaggccgcaaaacacaatgagatatgggaagttactcaactcccagctcaaaggcctcggctgatggaccaacccatcacattcacggaagaagacgccaagacggtgcgcttccctcatcacgacccgttggtcatagagacccccatcgcgaataaagtggtggccagagtcttaattgacaatgggagttccgtgaacttgctcttcaaagaagccttcaccgcgataggcttgacagatcgtgacctctcgcctagtggatcccagctcacagggtttaacgggacgacacttatcccaatgggaaaagtgaggctcccggttaccctgtgcccggacactccccagagcacatttaaatactgcaccttcgtggtggtggactgtccgacagcctacaacgcgatcctcggccgaccggccctagtagactttggcgcagtcacttcaatccgacatctgtgcctaaagttccctacccaggaggccggagtcgggactgtgaggggaaatcaaggggaagcaaggcaatgttataatgtcgc

SEQ ID NO: 275872 - DNA, 526 bp, Cannabis indica
tgggcattcccaatgaatatacccagggccggcccaaccaatttgggggccttgggcgaaaaattaaaattgggccttttattaaaaataaaatcattaatcaatacttcataaatttaaaaaaaccaatacctcataaattcgtttacatttatttagtaaatttaaatattctaaataaaagtacaataaaaatattattcaaatttgttgatcgatctatcccaaaagtatgtcttccttcttcaagtttgtcatatcgaacaatctccaatctataaaacttaataataacattagtttatcaaaattattagaaaaaaataacacagattgattcatctaaaaatttatctttcttgctttttgggatgcaaatttgttaatcaaatcattgtattcaagtttatctagcaaattattttcaattgacaacatagctaatccactcaatctctcttgcaacatagtcgttcttaaataagacttgattaattttaattttgaaaaacttctctctgccgat

SEQ ID NO: 275873 - DNA, 803 bp, Cannabis indica
ttatgattccaagtccaagtcctagttccagtcccggtcaacttctggttttggttccaattttgggtcatagggtacgggttcgggtccacttttgagtttgggacttgggtcaggtctgggtgtggtttgggtccttgtcagggttcgggtccagggcttggtccaaaatccagacactgactacgggctttgtccaagcccagcgtccagatctggatcccaatctcgggtccccgtctggttccatttctggtgccgcgtcatgagctggggcctaggttcaagttcgggtcttggtcgggtactaggtcccagtcctagttctgtttcccagttccatatcttgattctgggtccaggtcccggttattgtgtgggtttgagtcccggtctaggtttgggttcgagtcctagtctcagttcgggtttaggtctctgtctgggttttgatctgggttcgggattgggtttaggtcctggtcctagtcctagtgctagtacggttctagttccatttgcgattctgagttcgattttaggtttcagttcgggtcagagttcgagtcctggtctaagtttggtgtcgggtccaaatttctaactaggtccagatcaggctccgggtgtgggttcgcatcctatgtctagctctaggttgggtctgggtcccaagttccaatcccgatctgagtctggattaagttttgggtctaagaccttggtactgatcctagtctttgttcgagtttgggtgctggtccgggtctagctttgtgtctgattctaggtgtgggtgtttg

SEQ ID NO: 275874 - DNA, 785 bp, Cannabis indica
atcactatagggttcgaaattgaagagagaaagagagagagaaggattcgaaattggtagagaagatggctcaagtttttgactgaaggaaagtgtttgcatcatctttttctttgaggccatcactacctatttataagaatccaactagggttaggttagaattatttggcattaaaatattgaaaaaaaataaatggtaaattagcccttaagtggccggccatggatatgggccccactttgcaattttacattttttttaaaaaaacattcattttattttctcaaaaagggtattttttccaattcaaccacttaaatgccaaagctaattatttactaattaaaaattaattattaaataaaattgccatttaatatatttattaattagacttaataaagtctcttaattaacaaataaaccctagaatctcttttcttcacaattaggccctagcttagtgaaaattcataaactagacatagtctaattttaaaattataattgattaattaaaatcaattgactgagtcttacaagcagtattgtctcaactagtatggggaccatggacctatataaccgaacttccaataagcagatcagaatttaccaagtaaaatccactaacttattaattcctcattgtatccaccatagaacttggaatgcactctcagttacatagaaacgctctatatgttctacgatatagatacactattaattattcattgttataatcccaataatcaataatcctctatagatgatttac

SEQ ID NO: 275875 - DNA, 152 bp, Cannabis indica
tcagtagggttagcgttgaattaaatggattaaaaaagaataaaatattgggaaaaaattcaacttggccgtacaagatagtggaccaatctctagttaaaattttgccactttatttcaaccacttattcttcttttcaataataccatat

SEQ ID NO: 275876 - DNA, 723 bp, Cannabis indica
aattgaacgtttccaaaaaatttaaatctattaataacattttcctaataccattaataaacaaaatttgagaacctttcaaatatgaactttgacattgataatcatggtactaacacgaacatgttatgagtcaaatataaagacctactaagtataataaatgcatagacacatcaattagattatacaagacaagtgcctaaagtaacaaacaaaacaaatgtcacctaatttcacgaacatgttttgagtcaaatataaagacctactaacacgaacatgttttgagtcaaatatgaatgtgttatgtcacctaatttcttacaactagcgagtaataacctttttttttataacctagttatttatgttatgtacttttcctttaacatttatgttttttataataaaatttgatccaaattctaccgaaattttggcagcataacggctgtaattggacgttcccaaaaattttaaaagtgcctaaagtaacaaacaaaacaaatataacaatacagaacaaagaaactaacataaacaatacaaaatttatccacccatccgaccgcagtacatgtattcgcagaacctacttcactacggatgaatatttaagatattcaaactcaactaagcatgcattgataattaattatactaacaaaaggttagcggatggatatacctattgcaaatccgatcaacaccgaaatatgt

SEQ ID NO: 275877 - DNA, 526 bp, Cannabis indica
acaataatattactaataaaatgaaaaaatccaaaaaataatttacaaaaaccaaaagtaaaacaatgtacattataaaaatgaatagaaacaatatttataccttaaatgaggttgagattcaatgctttctcaacaaaaaaatggtggccggattttaaacccaaaattttctatttggattcggatgacactcaaagagggtaaaaaatgaaaacttttaggtgtatgttattaagtatcgaaaatagaagatttaaaaaaaatgggctcaaatggttgagaaatgggggagatatggtggggcggaggtggttgcagcgagggtttttcgtggttccttttctctctggtttgctgggtttgctgactgaagtgggaaggaagaagacgaagctgaatatatatcctggacgaccctatggcgtcggttcctttataggaaacgacgacatagggtacacgtttcaacaaaccgtgtaccctatgccgtcggttcctagataaaggaaccgacgccataggg

SEQ ID NO: 275878 - DNA, 613 bp, Cannabis indica
tgtccgaaggccgaaacaagctggaagaaatgtaagctgaagggtctaagggaacgggctccggaggactagaacccatccgggaccgacctaggaaatctcctaagttggaaaaataatattccttcatatggtctccccaccgggtcgagggcatcctaaacctatggagacgctcatcaaaccctataggcctaagactggcatattcgccaatggaaggaacgcaatgtactgctaaaggagacttacaagagccggaagtgctggcgccaggagccccagtgttcggcacctgaaccgaaggcgccggcctgggagccctcctctcagctgagtccccaatgcgaaggggcttcccaacgatcacctcgcttctcctctcgaccgggctccccacgcgaagtggtctcccgcaagctgcctgggccttagaataagccttctcctgggccttccggaagagatattcctggtacttcttctcggcgatggcaatgagttcatcccggaaggtcttctcagcggcgggcaccctcacatttggacagataaccttagaaaggttagagtcctccactgattggtggggtaggatgagcttggccttccg

SEQ ID NO: 275879 - DNA, 510 bp, Cannabis indica
acgcaaacccacacccagagcctgatctggacctagaccgaaatccggacccgaacccaaactcagaccaggactcgaacttcgacctaaactcaaacccaaactcgaactcagaatcgaaaatggaactagaaccaaactaggactaggaccaggacctaaaccaaaacccgaaccgagattaggacttgaacccgaacccaaacctagaccaggaccaaaacccagacaataaccgagacctggaccagaatcaggataaggaccatggaaacagaactaggacccggacctagtacccaaccaaaacctgaacttgaacattggatccagctcgtgactcggcaccaaaaatagaacaagattgggacccgagattgagatacggatctggaaccaaggcttggacaaaacccatagtcggtgtttggatttgggacccagccctggagccgaaccctgacaaggacccgaacccacacccggacctgaacccagtcccaaacccaa

SEQ ID NO: 275880 - DNA, 517 bp, Cannabis indica
ttttgtgaaatgttgaaacgtctcttcgtaaggaacctgccccaatctcgactggtaccttggcctcgcatccataggaaagcaagaaaggagtctcaccagtcgttgatcgaggagtcgtgttgtatgaccatagaacttgcggaagctcgtctggccatacccccttacgctcttcgagttttcatttgatggtgtgctttattattttattgactgcttcagtttgtccattgctttgcgggtaagcaactgcagagaatgcttttttaattcccaagtcatcgcataattgtcgcatctccttacattcgaactgctttccattatccgagatgagcttgtaagggatgccaaatcgacaaattatggagttgtagacaaactcacgcaacttagttgctgtgatggttgcgagtgccttggtttcagcccattttgtaaaatagtctactgcgactactgcatacttgactccgccttttcctttaggtagttcgcctattaagtcgatccc

SEQ ID NO: 275881 - DNA, 510 bp, Cannabis indica
atgggccaaggaatgggaatggggatgggaatgggaatgggaatgagaatgagaatgggaatgggaatgggaataggaatggtaatgggctggggaatgggaatgagaataggaatgtgaatgcaaatgggaatgggaataggccgaggaatgggaatgagaatggggaaaggaatggaaattggaatgggctgggatttgggttttgaggtttggggtttggggtttaaggtttagatgttacggttaaaaggtaggggtatgggtacaggtttggggtcagggatcaaggtttaatcaagttatccattttcttattttaataatgtaagtaaacaaatgtatggcatgtttactaataagtaatggaaatcaatggtaaggtaatcattcccttacatttgtttacttacattatttaaattgggaaagggagagcttgattaaataagggagaaaagaaagggagaactttccccaccaattttataaggaatgccattaagggta

SEQ ID NO: 275882 - DNA, 585 bp, Cannabis indica
ctataaatagatagtgaaggcttcaaaaaaaataacactttcacatccggtttccttcagagaaaaacctgagccttctctctctatacctagccgccaccttcttctctctcttcaaataatttccaacactctgttcgtcaaacgtgaggtttactgcggcacataactcctcctgatcgtgatgtagtgtattgttgtggccctgcaggagtccaagcgcagcacggagattttgcaattcggttgcatctccgatggttgtctgggcgctgatgcctggaggaacagtcatgttatgaacatcctggctgtgtgcggaaccgttatttccggtctcttgcacaccaggcgcagtttcaataacaggagttgttccatcattcaccacgcttcccgtctgtccaggattgacagcgggtggaactgtcaaactccctaggtcctgcaacatcagatccagcgtctgtgagtttgttgggtctgacaggcctctgcgagtttgcaccatcgtgtcgaaagaccgatctgtgattcttctctcaatgaaagcaccaaaatattgacttcgcttttagccaacga

SEQ ID NO: 275883 - DNA, 254 bp, Cannabis indica
gaggtcgcgactaatgacgcgtctggagccgaattttccaattttttccaagtttgtcccagtttttcgccatttgactgaatttgaactttaacaccccgggaacctgaaataatgaaaatcaagcgtaaaactgctccaaaagacaccaatagacgagataatgctaactttaaagacccgaaacataggctaaatataacctaacaaagtaccgtgttggacacgacagttagggggactcagtatcgtgt

SEQ ID NO: 275884 - DNA, 874 bp, Cannabis indica
aattttaagtaaaaaaatctaatatggataatttagtacatgtcaaaattcaatgggcatgattttgtagatattaaagtctgggagtataatttagtacatgaacaacactgaaatagtaaaattgaatgaaattagacaaaaatctttaaatccaacaatctcaatagttcaggggcatttttagcgactttaaaaattcagaaggcataatttagtacatattaaagttcagggagcaaaaatcttaattaaccatattttacttcacatacctaataaataattcattcaattttaatttaaatcatatataaattaaatttcaatgataatgttgaggtgtttgatgaagtttgaaatcaatcaattatttctcatattaaaataagtttatctgaataataaaatatatattattttggttcttaaagaaataaaacaaaaatctcagtggtggttattacagtccaaaaaaactcacataaatcaattttgggatttaacatcttaacaacaaaaatgtgtttgaagggtaacctaatgagtcaacaaattacatcattgtcttattgtcactagaattaaatactatagttaactttgacatctcttttaacttttaccaattttgtacattatctactaatagtctcaaaaccatatcctcaaaattttaaatattgtggttaaggcaagatgaaaatgacaaactcatgagaatattatattattggggtttaataataagtgaaagtaatatattatgagactactatgagatgacatattttattagtaattttttattttaattattaaattaaaatatataaattttaatataaaattataccaataataatattaatac

SEQ ID NO: 275885 - DNA, 249 bp, Cannabis indica
gtatcaccctgtcccaaaagtaggcttaactaacaaatcaaaaaacatgtataatactcttgagatcgaacctaaccatatcaggattaaggtcatttgatctaggatcaactaggtgatattgaattgaatagatttgacaaaaaatttaacatatctaatcaaagttcaatatctgtcccttccaatgtaaactccatacatccgatactggtaaactttttcaaagccctggaaaggacataacac

SEQ ID NO: 275886 - DNA, 524 bp, Cannabis indica
attttaaacaacaaaagaaaaaacattaaaaaaaacatataagattagagaatgagaaagatgaagaatgtatgctctaaaagactaaagaaacgaaaaaataaaaaaattaaaaagaaaagaaagaaagagcagccaaattgataaaacatatatagctttagggttattaattagtagtgttgcttaattaatagaaaaagaatattttaagaattttgatatgaaaaacacaaatttcgtgatgtactattgatttattatatgtatatagactaattagaaattacgtgccgaggcacgtaaatattagtttcatttaaagtttagttctttatttttatttagatttttataactaaaggtatgattatgcgaatgatttgttgtattaaagtaatatctgtgttattatatttagttagtaaaatataattgtgtatatataagtcataacaaaataatatttattatttacttatagaaaatttagaggaacaaaaaagggtcagttggctaaatat

SEQ ID NO: 275887 - DNA, 355 bp, Cannabis indica
gtaaattactttgtttcaagtttagaatttctagctcaaaaaatgtgatttttgaaggaaatgttgtgaatctgttgctgtgttgttgttaatgtttttaattgttttcagaggttataatatgcttatttaagaagatttatgttggtttgattgcatgttagctaggtttactcaagtttgagtttagaactcaaagcttgagctttaatggcactttttgctatggtgcaatctgggtggttttggtgccttagaaatattctttgggtcatatggaataggtctggaaggtttgaattgatttggagtcgatttgtgcaagttatgaatttttgagtttgctgcctccgag

SEQ ID NO: 275888 - DNA, 541 bp, Cannabis indica
ttttattttttttgtgttttttttgtttcaataggttctcaaatatgcacacatgccccataaatattaggcatgaagaccaaaggcaagcaacatcgaaactgataggggaatgcataaaaccgaagttcttgaacataaagaccaaggcaacagcgatggacataaaaggggagttgaaatacagatatggcatcaaaatgaactatatgaaagcttggagaagtaaggaacatgcagtaaacgacttgagaggtaatgctagtgactcgtacagcctaataccgagtttcttacacatggtggaaaaaacaaaccctggatcatttgtcgatctgaaaacggcagaagacaacagcttgctctttgttttcatggcgttggatgcatccataaaagggtggggagcatgcagaccgatagttgttgtggacggaacgttcctcaaagcagcttatgggggaactttgttgtgcgcatgcacacaagatgcagcaggtcatatttttccactagcgttttgtgttgcagattctgagaa

SEQ ID NO: 275889 - DNA, 538 bp, Cannabis indica
taagcaaaaactgatatgagaaaaagaactaatgttttttgtttttttttaatataaagccttttttttataacactctggctctttctttagtacccagacatggctttcactctcttccagagatgtagccgtcctctttgatcaccaagaactaatacagaaggagcatactacttattagtaaaaggtttaagagagctcttcccattgcatctggaagaggtagcctttttatctggggaagattcaagcttagtatcattcgaagtagcatatagtagatggagatagacagaacaacccattgctcaagggactttgaaacacaagaatactcataggcaaaatatattgatcagatgacactaagaacagtttagatagtacagagactaatacatgttcttaagtgagtaaaagtttgagtatctaaagctttagtgaaaagatctgctaattgattagttgtgggcacatgagatattgacaacatatttgactcaactagatctcggataaagtggtacctgatgtc

SEQ ID NO: 275890 - DNA, 588 bp, Cannabis indica
ttgaatattgtggataagaaatcttatattaagataacatccttattattatggcacgatagatcgggtcatatttctaaagaaagaattgatcgattccttctagctaaaattcttcctcctgttgatgtttctggttggaatacttgtgctgattgtacttgtgaaaaattgactaaaataagaaagcagactgctaactatagtcactctttataagagattatccacaatgacatcagtggaccttattccaccacgttgtgtagaaacaagtattttataacttttatcgatatttttttcttctttcttcttatggtctcacctacctgatcaaagacaatccaacgcttttgataaagtcaaaatctttcgaaatgttcttgagaaataattgggcagagtcataaaatttgttcattttcatcgcggaggagaatattctggttgttattcagaatctaaacaacacatgaggccttttgctgaatattttccagaaaattgtgtagtttctcaatacaatatgtcaggttcactgagcaaaatggcgttgctgaaaggaaaaatcgcactctcatggat

SEQ ID NO: 275891 - DNA, 287 bp, Cannabis indica
ttagaggccattagcgaaggggcgaaactcgttagatcccctagtagaacactaccttaatatgaataaattagcatcatcaacaaaaagaaaattaaagggaaaaaacttaataataggattaatcaaatagggttcatatattaaattattttttattaatgagattaatcaatatatgaacaataatttgaattaatcttataatcttacctttaatcaaataggatttatagaagagatataaataattaaatagggttagaaatagcgtaattaaaaaaaat

SEQ ID NO: 275892 - DNA, 840 bp, Cannabis indica
tccttcggctcgaagagccttatcaaccatttctgcataggttgtggtatcacttgttgtaataaccaagtcatgtctgattttggcattcagcccagccaaatacttttctttcttgctgaaatctgttggtacaattccggaggccaacttggccaagcggtcaaacttggtggtatactcggtcactgacatactctcaccttgtaccaactcaataaattccttccgctttgcactgcggaccgcctcattgtaatatttggcgttgaacaattcccggaactcttcccaggtcattctggtcacatccctggtgagggataccatttcccaccaaatcagggcatcctcctgaaattggaacgtggcacatgccaccctatcatttccagctactcccataaagttcagtattctctcaataacagtcaaccactgctcagctttaagaacatcagggcctcccagaaatactggaggcgcttgctttctgaacctctcatacaaaggctccatgcggttaccagcaacatgttgctcagctggcaccgcaggggctgcaggaactgcaacagccggttgcaggggaggctcaacaggggcatcccgttgcctgagtcgccggatctcttcttcttgttgctcaattctagtttgcatctcagcaaacctttgttcccaatcaacaggggcctgaggtggattctcctgtccacctctcgggactcgaccgcggcctctaccgcgtccacgggggttttggggatttctaccaccccgaccacctccggtctcaaccaattcaccctgccttctaacgtttcgctggtcgtccat

SEQ ID NO: 275893 - DNA, 371 bp, Cannabis indica
tttggcccaagtacccccactctgggttcttgggtggctgggaagactcttcttaagaccatatccccaatagcgaattttctgttattaactttggagttaaagaccatcgcttcacaaccgtatgccattaagaaaggcgagtgtccggtcgtgtatctgggggtcgtccggtaggcgcataacactcttggcaactcttcgggccagttgtttttgcaggctagcagctttttcttaagggtaacctttaggattttattgaatgcttctgcttgtccgtttgtttgcggccttgccaccgtggagaagctttttactattccgtgttggttgcagaagtcagtgcaatcaaattgctttccattgtc

SEQ ID NO: 275894 - DNA, 651 bp, Cannabis indica
ccaaaggctgtggcctgggagcccttctctccgttgaatccccaatgtgaaggggcttcccggcaatcgcctgactccttctctccaccgggctccccacgcgaagtgtcttcccggaagccgcctgggccttagagtacgccttctcctgggccttccggtagagatactcctggtacttcttctctgccgtggcaatgatctcgtcccggaaggtcttctccgcgaccggcgccctcacgttgggacagataacccgggaaaggttagagtcctccacggattgatgcggaaggatgagttttgccttcctgcagttctccgtagtgaccagacccccgacgtcaagatcggcccggtcgtaagaggcaaaggcctgggctctccgaagaaaggcctgagtaggtgcagtccgttcatagggaggaatcctcacccactcagtaaggagctccggatggtccactgcccggaatccggaggagaagaaaaaacgatggcgatactccttaacgtgagtttgcctgttatacgggaccaccccttcgttagcagggtgggcccggaacccataaaaaccgtccttaagtttgtcccccttcttggggacggaaacaagttcataaaaatacaaaatttccgccgggcggg

SEQ ID NO: 275895 - DNA, 804 bp, Cannabis indica
taatggagctattccacctgccaaccaagcgaaccaatcgctaagcagccaggttcttctgtgttcgaaaggttgggaacaccccgtgacctaagggacgacctaaatagaagaaggggaatacaacaaatgtgcagtccggaggtcatactcaaatccccgctcagaaagacgctgacgtaacccaacccgaccagaatgccaatcaagtcagcccacccgtacaggcccagcttgacgaacttaagaatatgtttcatggcatggcatggccaggcagcgtaacaatgatcttgagttagaccgtgcacgcggaactcccttctcggcagaaatcaacctcctgccactacctcacaagttcaagatgccaacatggaagatgtacactggaagagaagatcttctctctcatctcaagtatttcgagatgcaaatagatccacaaagggtgcgaggagacatatgttgcagaatcttccccggaactctgtcagaggccgcacagcaatggtatttcaagttggctccaggaaagtttagttcatggaaaaccttctcttcagaattccatgcacaattctcttcctcacgccaactcccattgcatctgggagatttggtcgaagtaaaacagtgaccaggcgagccactccaggcatacatcagcagattcatgacggaagtgaccaaggtatcacgggtaaccgaggatggaaagttatccgcgatactggggggcattgaagtcctgggcgaactatggaaggacataaggaaaaacgggccggtcgactctatgag

SEQ ID NO: 275896 - DNA, 642 bp, Cannabis indica
tgagcattggattaaaccgtctttgggagagttgaaggttaattgtgatgctgctattttttcaagagagaggagtcatgggttggggtggattgctagagatcatgctggtttgtgctttgctgttgctgccgtcaagcttcgaggtgaaattgaccctgttgttgctgaggcgttgtcaatgaaggaggctttgagttgggttaaatcatgctgggaagaaggaagtgcttctgaagattttcatcctacagcggtgattatggagtcggactgtctcttgttggttaatgctatcaatagcaagagccaaattctttctcctcttggtcttattatttcggattgtattaatcttatacagtcctttactatttttcatatttcagttcagtttgttaaacaatctaggaaccaagcggctaactggctattaaactaactaactattttgttaaagtattttctcttttttctctgtcaaaagaaattccagcaatattgaataaaaccataatgaaatgataatacaactataaattaacttgaaaaaacttggaagttaactccaattaacatggttatagcttgattctattttgaaatcaaaaaaaataactctgcaactgaatataccttatc

SEQ ID NO: 275897 - DNA, 445 bp, Cannabis indica
tattaaattagaattaataattgagtttattttagaattgattatttaattcttatatttaatacatttaattaaattaaaaattaaatatttaagttgatttcattcttgatacttaaatattattattttaagaatatttaattaaatagaaaattattttaagttggaaattttaatttcagaacaacataaatttgaataattttccaaatatattttattattcattttttttaaatttgaaattgcaattttttttaaatgcagaaaattttgaattttttcttgaaaaatagattaaagttatttttttttttaattttagaccaacttaaatcattatatttttcatttaaatggtagaagctcataaaataagaataaccttgactctcgcctaccgggacaacgttggattattattttgatcgaataaaagatt

SEQ ID NO: 275898 - DNA, 574 bp, Cannabis indica
gactttttatgcgatggctttcttgctgctgttttcttttggaacacaacaaattgatgccatggcgcacttattgagaagaagacggaccctgtacccagaagtctacactcaaaaatgtgtagttttggacacatctgctccacagtttttttttccatgtattggaatatgtatgagggtgacaagagcaagatgaaatgggatgagggcgttatgagttacgtgcaggggataccgcacagatacttgccatgttgggagaaccaggattacatatactttgtgttgcaccttcccaaagagcgccactgggtggcagttgaggtggatatcgacaactgggagatcattgtatatgattctgatatcggtgccaccgttgaggcagccatggagtcatatttgaagccttacagcgagctctttgcgaatctaattcgagctagcggttatttccaatacaacaattatgtacatccggtggagttgggcgatctcagtcagctcctacccctgcattatagacgagctacctcggaggttgcaccacaaacgaacagcaggtgaatct

SEQ ID NO: 275899 - DNA, 458 bp, Cannabis indica
gcctacattgctaagtttcattcatagattctaaaaattacaagccaaatttcacaacattagaaaaaatcaaatatgtaaaaatagggttttatgaaaaagtctaaagaatactatgatattcatactttctatattagttttatgtaatattataatttagagaaagaaaatagagaagatatgagaattttttgagtgttttattccaataggtgatctcctatttatacacatacaagagtcaaatattaagaaactaagagaaagggaaactaagaaaaaggaatgttgattaaattaatggtaataaataaaagatttggacatccacataattaataatatttataacactcccccttggatgtccataataagtgcctaattaaacgcctcgccgagaaaatcccaatgggacaaaactcggtcaaggaaaaagagtgcagtatgaaatt

SEQ ID NO: 275900 - DNA, 485 bp, Cannabis indica
tatgttgcaaaatgccttacgtgtcagaaagtgaaagctgagcaccagcgacctgcagggttgctgcaaccactaaatataccagagtggaaatgggaagacattgctatggacttcgtggtaggtatgcctagaaccacgggacaatttgactctgtgtgggtcatagtggagaggtttacaaagtctgctcactttttacctgctcattgtgtctcgaagttcattgtgtcccgaagttgtatatcagagaaattgtccgtcttcatgatgtcccgaagttcattgtgtccgatagagatccgaagtttacatcgagattctgggagagtctgcatcgagctatgggtactcagttaaagttcagcacaacttttcatcctacgggcatgtgtgcttaactttgagggatcatgggtaaagtaccttcccttgatcgagttttcttattataacagctatcaagcaacaatcgggatggctcc

SEQ ID NO: 275901 - DNA, 597 bp, Cannabis indica
tagcttattcatttcgaattagcttaaataatatatcattggatgaatggtttataaatcatctgcttataatgtcattctactttctcttaaatttttttttgaatgacgcatatgattatattcctgaaattctatcctgaaatgatataaattctcaaccttagaatctcctacttatatatgcttactttaggcaaatcagacttagagttagattagtagtggtggtccaagaaagaaggattactcatgtatatttggttaaatttaagtctttgactttaaattttagattctaaatagaaatttttttatttctatttctagaatacaatacagttacactttcacaagtgtttaataaccattttctattagtggattcaaactgtatgttaaagtatggagtatgagtttagtattctgtgaccaggatctacttggtctattctaagaactcttgattgtaactagacctaagtcatcaaaagacacaaccacattttataaatctatgacatttgtatcttgttcatagtggttttgacaatatcattcactgcaaagagtcattatgcctatatccactaaaag

SEQ ID NO: 275902 - DNA, 731 bp, Cannabis indica
aattaaagaagcacaaaagcaagattcggaattgataaaaacacgagctagggtttcggctgggaaggctagtgatttctcagtagatgaaatagaaatgttgagattcgggaatcaagtttgtgtacccatggatgaggacatcaagaaagaaatcatgaatgagtctcgtacgactccttattcagttcatccagggtcatcgaagatgtatcaagacctgaaagccaagttctggtggccaggcatgaagaatgatattgttgaatatgttgcaaagtgccttacgtgtcagcaagtgaaggctgagcatcaacgacctacagggttgctgcagccactgaatataccggagtggaaatgggaggacattgctatggacttcgtggtaggtatgcctagaaccacaggacagtttgactctgtgtgggtcatagtggacaggtttacaaagtcacctcactttttacctgttcggacgaatttatccattgaccaatatgctgagttatatgtcagagaaattgttcgtcttcatggtgtcccaaagtccattgtttcagatagagatccaaagtttacatcgagattctaggagagtctacatcgagctatgggtactcagttaaagttcagcacagcttttcatcctcaaatggatggacaatctgagaggacgatgcagattctagaagacatgctacgggcatgtgtgcttgactttgagggat

SEQ ID NO: 275903 - DNA, 158 bp, Cannabis indica
tatttagggtgttaaacaacatgtgagtagatctaagatcctggtaaaataaactccatcagatgtaccgtatgtgaattggctggatcaaccaggcccctacgagtctgtaccaccatcgtacttgtggttagattttgaatgaagagcgattcttg

SEQ ID NO: 275904 - DNA, 633 bp, Cannabis indica
acctcctcgtcatccactaagtcaatagtgtctgaaggagcactagaagaaatctttagaggggggcgggccatcggggaagaagtaaagggaggaggagcctcaggagtgtgaaccccggcaagttcggccaaaatggcgtccatagaagcacctgctacaacaaaagaaagcaagtgttagaacatccgtgggaaaccaccaacacaagatatgacaagcaagctagtcctaccctgactctctaattcggccctagcaaagttctgaattttgatgctggcagcatcatctccgagatagctgtccgaaggccggaaccagctggatgtaatgtaagctgaagggcctaagggaacgggctccggaggaccagaacccatccgagaccgacctaggaaatctcctaagtttgaaaaataaaattccttcaaatgatctccccaccgggtcgagggcatcctaaacctataaagacgctcgtcgaaccctacgggtctaagagtggcatacctgggaaaggttagagtcctccacagattggtgcggaaggatgagttttgccttcctgcagttctccgtagtgaccaggcccccgatgtcaagatcagcccggtcataagaggcaaaggc

SEQ ID NO: 275905 - DNA, 725 bp, Cannabis indica
aatttttgattatataaaattaattggtttattaatttaatgtattaataaaattattttagtatgaattcagcttctgtaaaaaaaaacttcagttgagataatttttttttatttcagtgttttattttttttttaaaaaaaaaaaagaaaagtaaaaaaaaaaagaaaaaacaacaatttaaagtttttattatggcattcatccttattttttatttactaggtgattgttacgtgccaagccacgtagtgttagttttatttaatattttagttttttattttaattaataattaaaatagtataattatttgaacgatttgttttataaaaataaaatatgtgtcagtatatttagtaagtaaaacatagttgtgttataataatgtatgttattaatagtaaaatgtacattaatcttctaattgaaaaaagttctattatctcatttcatatctaataatagctacacaactatatatttatagactttcacattctttgcaaattactaataagcaccaataatattttcatattctaatatttttcaaccttctcctcttggtggtaaaattaaaaataaaactaaaaataaagcacaaacatataaggtaaatactaattacagcccatttcatcttttttttttaattatttttttaagtcccaagcccaaaaatactctaagccaacacaatcaatcttcttttatattatc

SEQ ID NO: 275906 - DNA, 623 bp, Cannabis indica
tcggacccctatcggacccatggtccgaccatcggacccctgggttctttttttttcgatttgaaagagagagggggctgggtccgattgggagagaggggggctgggctgggttgtgcgtggtcggaggctgctgtcggtggtggtgggtggtcgtcggtggccgggcgtggtagggcggcgtggtcagcgagagggagagagatggtggtgtgtggtcaccgagagggagagagagaattttttatttttgtttgggatttgtttttcaaatgggaggggtattatgggaaaaaatcaaatgtagtcatatatgggcaattttaataggtatagatttagggaaataattttagagatttttatggatagtttttcaaatttccctattaaaataataaataattaaaaaaaaaagatgcagttgttacagtgttactatatgcagtgcactgtaactagtactgcatatgtagtgttaaaatagtgctatgttggcaaaaaatttctacttgaactccaaatttgagattactttgaagatgctctagctttttttttttttaatgaaatatcaacttcattgaaaattagcattcatcatacaagagagcatgaagctc

SEQ ID NO: 275907 - DNA, 457 bp, Cannabis indica
ttgacacaaatattaatgcgaaagaaattaaaaagtcatttaattatatagagttttattaacaaaaaatagtaaaattaaagttacaccgaagaatcactatcatttccatcattcactaagtttacattttcatcctcaacatgttcaactagtaaatcatctacttcttcagcaacataattttcatcaagttcattattttctatctcagaatccactaactgatcggtcgattcaacaattactggaggttcattcgattgcaaaatcaactctccaagatcaaccgtcaacataaaatttgaagagttagaatcatttacaacatcaacatctgtctcatcttcattgtcattaatgtcccaaatttgtcgatggctaatatcttcaacaaccttccaatcgcgacctctgagtggatcttcaagatagaaacttgcttggcctggttagc

SEQ ID NO: 275908 - DNA, 508 bp, Cannabis indica
attttttaaaaaggaaatcatattaagaattaaagaacgtgttattctataatcaactaactaataatacgtatttattatttattaccactttattcaacctcccaatataggcatcaaaatcaccactaactaatcaaactaaaaaattatcatttccttttcaattttattcaatatcatgttaataaaatagtataatttttcttattgaagagaaaaaaaagtagttaattacaaagtgtataataatttttttttttttttttttttttttacgataaatgtgcgcctaatagttatgttaaatttttttttactataatttataaatgtacagtctcatcactagggttgtacatcggtcggttagtcggtttataatacatattttctaacccaacgtaaagatcggtttgtaaaattctgcatacaacctacccaattaaaaaaaaaaaatcttaacccgaccgacggtttgggcagtttggtcgggttaacccgccca

SEQ ID NO: 275909 - DNA, 534 bp, Cannabis indica
gcaagctgtccaaatcccaagatcagtgtgttatgtatttactatggaatctttctacttatatcaattgtaaggagaagggaaatacttcgtctccaagctcatagccctataaatagtgatgcatattcactgggaaagtggtcgcaaatattttagttgagagatattgtccaagaattgatattcagagatacttttgtaaaagctataagaaaagaaaactttctccttgttcttgagttaatacaaataacgaggattaggctattaccgaattgctcagggcttaacctctatgaaattcctatgcctttatattgctttattatatttcaattgttataaattacttatcggttagtaaattagactcactgtcgttggctaaaaacaagctcaacaggcttgtctgaagcggtgtgaaggccaagtgacgcttgtctgcacgcgcacgtgtgcaataactttgagatattttcatacaaacttcaaaaaatcataactaattcaataaaaatccaaattaagttc

SEQ ID NO: 275910 - DNA, 577 bp, Cannabis indica
aatgcaatgcaagaggaactcaaccaatttgttcgcaacaaggtttggattttggtccgaagaccaaaaggtatcaatataattggaacaaagtggatctttaaaaataaaagtgatgagttcggtacaattgtgagaaacaaggccagattggtggcacaaggatacacacaggtagaaggtattgattttgatgaaacttttgctcctgttgcaagattagaatcaattcgtttacttttgtgtattgcttgtattttggatattaaattgtttcaaatggatgtaaaatctgccttcctaaatggtattttgagtgaggaagtttatgttgagcaaccaaaaggattcgaagatcctcaatttccagaccatgtgtacaagcttgaaaaagctttgtatggtctgaaacaagctcctcgagcttggtatgaaaggttaactcaatttttactttctcatgattatcaaagaggtagtgtggataaaactcttttcatcaagcatataaaatctgattttatcattgctcaaatttatgttgatgatatagtttttggttctacatctaaccatg

SEQ ID NO: 275911 - DNA, 517 bp, Cannabis indica
ctcttccttcagataaggaaaagtttgtgttttattgtgatgcctcgagacaaggtctcggctgtgtgcttatgcaagctggaaagataataacctatgcttctcgacagttaaaggagtacgagcaaaggtaccctactcacgatctaggactcgcagcagtggtttttgcactaaagatttggcggcattacctatatggcgagaaatgtgagatatacactgatcacaagagtgtgaaatacttcttctcccacagagatctgaatatgagacagagacgatggctagagtttgtgaaggattatgattgtaaaatcctttatcaccctggtaaagccaatgtggttgttgatgccttcagcagaaagggtcagagtcagataaatactgtgaaacaaatctcctagcagctagcaaatgagatgactcgagctaagattgagttgattgtagggcagttagctaatattaccctgtaatctactcttttggagcgaatcaaagaagcacagtt

SEQ ID NO: 275912 - DNA, 696 bp, Cannabis indica
aattgtcatgattaaactcagacaacgttaacattaataaatatatgacagttactgaactcatcaacgtatgcgtccttcgcatctgcgagttgaccgttcgtgttccgtctgttgagttcgtagggtcgcacgtacgtttggaacgtctgcgtccttaggtgatcgctcgttacagacgtcgcatgctgaagttggtagcatctggacatgcgaacttacattggtccgttagggctattgggtcattgggaccaaaactgcatcatagggcattggcctctatacttgccgcggaggtatagagggaggcactcgcacatgttctgacatatgcgagttgggtctaccctgtatgatgaggattacggttatgcggtgtgaattaagtcgcatccgcgatacctcgctggttttatcctgggcgaggtctaaacttcgagaagcctctcctggacatttcagccttcactggaagtctggatacacgtgtccttcaaagaggggtctggtctcgagtttctaggtgagagaaatctcactataacacatgcccctagtttcgcgatgtgacttgagcggtcactgagggaaactactgctcgagagacaggtgaaaggttgtcacgaggaggtgaccttttggttgtcccatcgagggtttcgaaaaatgacggctgtaatgattaattttca

SEQ ID NO: 275913 - DNA, 514 bp, Cannabis indica
tcacacatacatcgttttaaatccatatttcttgaaagtaaatcattaccatggctctgaggccacttgttggattatattttaccaggacctaaatttactaactagtatgtttattaacatcctacatatgaatttctaaaataatagaatttaaacacatataaagtttgagtaaccttacattgattgcaacagaatataatgactcatctcactcagaactctaacccttgttcctttctgttgcagagtactatcaagatctgagtccgattctccttcagttgtttggattcttcacagccttacacattatgattgtgtactagacttgctatgtgtgggcatgcaatcattcactaaggctaaaaaatttaatgaaaaacactcaaggattttcaaattagaaggaagaagatgttgagttttgtgccctaaataaaacctatttcaatataatcagatttactagttgataaagatcataaataacattttatgttgcatggtt

SEQ ID NO: 275914 - DNA, 621 bp, Cannabis indica
ctgagccaccactttcctctctctttttttttctgtgttcgaaatcccttgagtgaatgagtagtgcccacacacatcaagtggtacctcaatcatagtatttaagactgtggaaaatcaccaacaagaaggagagaaagagatccagattcagatcttgattatgctctgctacagaaaggaatcaagggtgttacaaaaattatgaccaatatgcaagtgcacgtaatcaagtagtaaactcacgcaagtgaggtcgaaccacagggaattgaactgaataccactaaattagacttatgattctatttggtagataaataattttgatagattttgaaataaagaaaaataaagaaaattaaagaaagcaataaaggtgtttaatcaaggatgagaaattagggaaaagaatcctgttgatttaattacccagctgttaatgctaattactattctctttctcaatgtgaatgacagattataaaaataaacctaactcttttcagatcttttaggtcctaaatcacatgttatctaatcatctctgagatagattaacatataatcagcattaagcaataatctaaatgtcacaaaggctatgcaaatactttcgtt

SEQ ID NO: 275915 - DNA, 614 bp, Cannabis indica
tacgttttttagttagctgtactcaactgggatgtactccattgggcacatctgatgtgtcaaaagaggggtggttaaatttctgaattacacagttaaatacacgtgtaggcgtacgtagtatggtcaaatgtcaacattattcatcaatcccgttttcccagaaaacctaatgtactacggtactgttctaacgtacaacgacggtttaattcataagaagatgtaggtgaagggcccattaatatcagcccaacatatataaatgggagaaactacccattctactaaaaaatgtcatcaattcatacaaaaaaaaacatccttacttttcaatctttattgtccagaaatacaaaaatgtactattacttttatcctgacgtacgaagtggtttaattcattaaaaaaggttggtaaaggcccattcatataagcccaacaattttaaatgttaccaccaacccatacaactcaacaaaatatctaaacccaaaaatcatacaataacattattttccaattaatttattcaaaagtaaatgtaattgtactattttactgttcaaaagtacgaagagagtggaatagagtttccaatatttgagaggcc

SEQ ID NO: 275916 - DNA, 939 bp, Cannabis indica
tcgggggggaaaattgctaattagccttatatttatatctctttttttttctaaattgtctaataatattaatgaagcttctttgaaattcttgtctacagaaacgggtgggtttttattaagtaaacctgatttgcattgtatttaattatgaaggaacaacaaaactaattaataagaacaaagtttctctcgaattagatgctgttaattatattatgggtaaataccattttggaccctctgttttacaaaagttaccaattggaccctgtgttttgttaaatgacaaaatggaccctgtattttctaaaatagtacaaataggaccctgaattgattttttgtcaaaataaagtttaattataatccgatctaaaagtgctatgacaaaactgtttacattttttgtatctgttcgtattaagcattgtcttcaagttggttgtattaaaaaaaaagttgtcaaaaattaagctcagggtcctatttttactattttagaaaatacagggtccattttgtcatttaacaaaacacagggtccaatctgtaacttttgcaaaacacagggtccaaaatagtatttacccttatattatattaggtgatttaattttataatgtagtgttggtagtgggctggagtggcatattggacaattccatgctaataaatggactacagttgttttaattaaattaaattaaattattaatattagtatgttttttttagaagatttggatgttattataaatcaaaagttatttataataattcagaaaattgaatagggaatttctcctatttaacaaaagttttcatccaactctagaacgttattttgtcagttttatgtagcgactagattagcatagcatttctcttagcatgagaaacaataaactcaaaaaaaaaaaagataaaaagacaaa

SEQ ID NO: 275917 - DNA, 509 bp, Cannabis indica
ttattgttatttttattattattattcataaaactaaacctaataggaatcagtatagtataggtttcattcaaccctaaaattatatcgttctaagcaagactaaccttaaaagttttcaagtcatctttccattacatccttagccaaatctatagcactcttcactctgatctttgatcaccatcatctcatgtctgttgatccaagtagcttgaagtatttgaggtaagaatctctacatttactcatttattgatcacaataggagaatattcgtaggtctccttttataatttttaagaatgaaatatgtctcaataaaattgtcatatctctttaaatactcattcaattcttgcaatcttggtgcctatagaaagcttattgaattttccataattcttatgtagaaaggttttactgaatctaaatttatgtacgtcaaaaattagtatttgtatgatgtttattgtaaatcattttttcatattttctatataagttgt

SEQ ID NO: 275918 - DNA, 548 bp, Cannabis indica
cgctgccagcgagtgggaaatatctccaccaggaatgagatgcctcttaattgtattttggaggtggagttgtttgacgtttggggtatcgactttatgggacctttcccacaatcctttggacatctctacattctagtggcggtggattatgtgtcaaagtgggtggaggcaattgctagtcccaagaatgatgctagagtgcttatgaaattccttcataaacatgtctttacaaggtttgggactcctagagctttgataagtgatgagggaacacactttgtgaacaaagtgctggctgccctcttggcaaaatatagtgtaaaacacaaaattgctactgcctatcacccacagactaacgggcaagctaaaatatctagtcaggaaattaaaggcatattggagaaggttgtaaatcccaacagaaaagattggtcccaatgcctcgatgatgcactttgggcgtataggacagcatataaaactcctctaggcatgtctccatatcgcctagtttatgggaaagcatgccatcttcccgt

SEQ ID NO: 275919 - DNA, 466 bp, Cannabis indica
atcaacaaaatgccctattttgctgatggccttctcatccgtaccgctcaaccacttgaagcttggctgagagaagtaaaaataccctgacctgccttgcttgggggtagacttcaggtcgaagaaccaagcgacctcgtggggagaaggagcatcccatccctgggaagcgtagaggacaaagagagtggacaaatacttgatgccctttggagtaatctcgactgggcagaggccaaaaaagtctgccacatccctgaagtacttatgcaagggcatcaccgccccttgctggccgtgagcccccgaccaggcgcacatccccttatcagggtttgtggcacgattgtcgtgggtgggaatgtagcaatccagctcgcccaggtatccgtcctggtcgagagtgcggaggcgtgcctccaaaatcttagacagaggacttacccacttggtgttgggttttatg

SEQ ID NO: 275920 - DNA, 648 bp, Cannabis indica
aagtaccaacccaatcaataatccaatcatctttaaaagatgatgcagccacatagacatctccactatcataaccatcacttaggtttgcattttgatagtcatttttagtcttgtttgatttgtttgattcctcttgatgatctgaattttgtttcccattgcttttcttgtaaaagtagcattctctcttgaaatgccctaactttccacaatggtagcacccatttggatctttaggaccctttgaatttgacctccctttgtgatgatgattgctgcccttgtgtgaacccctactagtgcttgaacctctactagtgcttctacccttattatgccatggtttcttttgtccaggccttcccctacttaggttaacatccccattagtatgccccggtctttcaaccttcatttccaaatcttttgatttcaaagctgagattacttcttcaagagtgatctcagttctcccatacttaatggctgtcttaacctccctgtaggattccggtagtgaattgagaattataattgcttgattctcatcacttaaggcctcattttcccccgagtttgctaactcaatgtgtaatctcaaaaactcatccaagttttgtctagagatttagatggactcatttt

SEQ ID NO: 275921 - DNA, 609 bp, Cannabis indica
tatatatgtatgtatgtatttgtttgtgtatgttggtgtatgtatatatgtatatgtatatgtgtatgtgggtgtatgtatatatatgtatatgtgtatgtgtatgtgtatatatgtatatgtgtatatatgtgtatgtgagagtatatataaatatgtgtatatacgtatgtgtttatgtgtgtgtgtatgtatgtgtatgtgtttatgtgtgtgtatgtatgtgtatgtgtatatatgtaagtttaagtgtaagtgtaagtgtatgtatatatatttatgtgtgtatatgtatgttgatattttaattgggttttatttttatgaaattaggtcccgtttaccggtcccactacaacattcaacaccattagcggcggacccctccgccgctaatggtgtcctttctggccgttaaagggcattagcggcggacttcggccgctattggtccgccgctaatgcttggccgctattaatagtattagcggccaaaaaagggggtcccccgctaatactattaatagcggtggagcattagcggcgggaccccgccactactacccagcagaataaaaaaaatatttaataaatatttataaataatta

SEQ ID NO: 275922 - DNA, 605 bp, Cannabis indica
aatttttgtattttgcacttttcattctagccgggtccgcatatatctggattatccattttttctttgataaattgattatggtagtgtcgacaaagcggcggtgttcctgcaaacagtgatgtattttcatttaagatgattagacatgatgtgcataatttatttaattaaaaaaatcaacttatgaaaggcatgtaaaactattttattttttaaaaactacacctctgcagtatatttcattagttgggcagcagtacacgaaaatatttttttcacaatatctgcgaacatgacagcagatagactctttgtattgtcatcaagttcaacatatgctatagcactgtaaaatgctaaaatgcataataagattgttagtatcttttttaattttaacttaatttcaataacatcataagttttttgtaatataccgtggtgtaagaaatccttcttggcagcatgttggcttgtcacatatgattttttcattgcgattgtataaatctattttttatgacatgcgttacatgacatgtaataaaaactttggacggtatcagttatttttattgccgcctcaattcaaaaatattttt

SEQ ID NO: 275923 - DNA, 523 bp, Cannabis indica
aattaaataaattacttaaatttcataatataaaaaaaaagagattcacctgctctccgtttgtggtgcaacctcagaggtagctcgtctataatgtaggggtaggagctgactgagatcaccgcagtcaaccggatgtacataattgttgtatggaaaataaccgctagctcgaattagattcgcaaatagctcgctgtaaggcttcaaatatgacttcatggcttcctcaggggtggcaccgatatcagaatcatatacaatgatctcccagttgtcaatatccacctcaactgccacccagtggcgctctttgggaaggtgcaacacaaagtatatgtaatcctggttctcccaacatggcaagtgtctgtgctctatcccctgcacgtaattcataacggcctcatcccatttcatcttgctcttgtcaccctcatagaaattccaatacatggcaaatatctgtggagcagatgtgtccaaaactacaccttttcgagtgtagacttctgggtacagg

SEQ ID NO: 275924 - DNA, 689 bp, Cannabis indica
agtaggccaaagagggtgatgctaactcgagattttttcatgacatgttgaatgcgagaaaggcaagaaacacaatttcatgaattgaaagggaggatggatcgtttatcgacgaagaagaagatgtggttgaagagatttttttaagagattatacacttctgagaagacaagagggagaagtattgaaggaattgagtggttaaaaattttggatttcttggagggacaactagaaaggccttttgaagaagatgaagttaaaagtacgatctttagttgtgaaggtagtaaggctctaggtcctgatggttttagtattacagtctttcaaactagctgggaagttattaaagaggatttgacggatgtcttcaaatcttttgagaaagatggaacgattcaccataaccattgatgcaacaacttggttatatggaacaatggaatggatacggaagtatggaggattgatcagaatatgcaaaagtatgcactgtaatggctttcattgtccgaatggacatgcaaggttctctaagaattcgctagccctactagctggtggaagaaacctatccttaaaacccactagttttggatatataaatcgtttaggtgttgatagttgttgagcacaaaataaggtgttcatgctcaccttaacaaagcatggatgattgatcaca

SEQ ID NO: 275925 - DNA, 606 bp, Cannabis indica
aatattttaaagttaataagttatgcactatgcagatttatagtacgaataaaagattatttggtaagtatgtttaaagaatattttaatgaaataatgtttaagagtgtttactttaaacgctaattcctattagctatgtcttggtttatatttttttaggaattttcagcataaaaggaaagtgtttagaattttagtattcagattctaatattataattaattaagtaaattgaagaataagaatcttgaggatcttgtaataaaaggaggtggaaacactaatggtctaatgagaatatattggttcatatatatttgggaagtcaaattattataaaaatttagtttgttgtcaatatttcgggaatgtactaaaattattatattatttgtatttttaaagaatttttggatgagtggtattagtttttttgatggaagaaatggaagtacaaatttgatggatgagcttcgccattgtttatggctttggtaccttttaaggttttcacgcataatttatggctggtccctaactatttagggtaattgcttaaaattacaagatatcatgaattgtaaaaatattataaaatttaa

SEQ ID NO: 275926 - DNA, 603 bp, Cannabis indica
agatgagactcacttgagtagtctgatccatttcagcaccatgattctgggcttcctggaaataacttgccatttggagaaggtgatcacgcacattctgatggggttccatccgtgcaatgatgaatttcttagtcgcgtcaaagcgagactgaatagatgccataccaaatagctcagttaacagcgtcattatttctgcagccgtgatagcgttagcaaaccttgttttcaaggtgtcaaccatgttggaaagcatgaagtatcgagctttgttgttagcattctgccaacgctcgaacttctctttaacaactttggttgcattgtcacctggctgtttaggagacggctcagtcaacacaaacagggcactttcacctatgagagcaatattaaagttctctttccatttagggaagttagatccatttagcttattttcagtcaacagtgataacatgggatttgacatggcaattcaggatactacaaaataataaatagaaatcaattatggtttaacacaaaatcttattcagaaattattagctcattacaagtaggaatggcaagaaaaatactaaaatatacaatcctaaa

SEQ ID NO: 275927 - DNA, 834 bp, Cannabis indica
atgtggttttaaggtggaggggcaaaatggtctttttgccccattagtgttttgtcttttgtgaatttattattgaaaaataaatgtttatttgtttaattagtggctgaaataaaatggtataagtggcttttattcattttcttctcattttcaacacttagcaaaaaaatagaaaaaaaatttgaaaaagaaaactctctcaagttctctctctatttcggctgggtatgtgggtgcatgaagctgatctctttctttgattttcaagcaaattctcttccaatctaagcattcttcaagctaggttagcttctcttgttttcttctttaaaattattgaaattttgatgaaaatatgatgatgcatgcatgattgttagttgctgtggctgctgtgagtttgttcttgatttctgaagtttaaagcttattagattagggttatttaagttgttttgaaagcatgttagttaggttgtgtaaagctttgagttttctatgtaaaatatgtgatttttgaagaaaatgtagtgaatctgtttctgtgttgttgttattgtttttaattgttttcagaggcttagttaagcttgattaagtagaattaagctggtttgaatgcatgttagagggatttgctcaagtttgagtttagaactcaaagcttgagctttaatggcaaattttgtatctgtgatttctgggttgttttggtgccttggaaatgttctttggggtatttagagcaggtctggaaggtttggtatgaattgggtttgatttgagtgagttaggaatttttgaaaaattcctgcgaggaccggaattccg

SEQ ID NO: 275928 - DNA, 498 bp, Cannabis indica
agaaaggatacaagggttatagatctgaacagaaggagtcgtaaaataatttccaacatcacgaacatgcgaaaagtgccaaaaaacattctctgtccatcctagcccccccaacggagctgaccaccgtccaaagcccatggccattcatgaaatgggggatggatatagtaggccccttgccaacagcactggctcagaaaaaattcatgttggccctcaccaactatttctcaaaatggatcgaagccgactcattcgctcaaataaaagacagagaagtagaagggtttgtctggaaaaacataatatgtaggttcggactacccaggagattgtagcggataatggttcccagttcgtcagtaacaagttcagaagtttctgtgaacgatggaaaattaaactaatattttccacaccacgctatccgcagagcaatgggcaggcagagtcatcaaataaagtcatcattaataacattaaaaagcgactcga

SEQ ID NO: 275929 - DNA, 530 bp, Cannabis indica
gtgtgggttcgcgtcctgggtctttgtctagatggggtccgactcccaagtttcaatcccgatctgagtatggattcagttctggatctaagtccttggttctgatcctggtctgggttcgagtttgggttcgggttcgggtctgattctaggtgtgcgtttgagttcagttttgagtttgtgtctgggtttgtgtccaggtctggaccccaatctgggtataggtttgggtccaggtccaagtttgggtcttggtcaagatctcggtccagatctaagtccagcattttgatcctagtttgggtcttggtccgagtccaggttcgtatccggatccctatctaggtacaactctgtgtttgggattgggtacaagattcaggtccaggtccgggtctcagttcaagtctaggtacacgaccgtgttcgggcccgagttccagtctaagtttgggtttgaggctaggtgtgtgttcggttctaggtctgggttcgggtccatgtcacggtcctagtcttgttctagggtc

SEQ ID NO: 275930 - DNA, 519 bp, Cannabis indica
ctctttaagaaagaatgcgacgacatcacctttatggagagtgatgggagatgggtccatcacccgcattctgatgcactggtgatagtcgccaatattggtggggacaatgtccatcgcatactggttgacaatgggagttcagtgaatctgctgaatttccaagccttcaaacaaatggagttgcaggagaaggatttgcgacctatgaggtcgagcatttatggcaattaaaggagtgatcaaactcccaatcactttgggaactgccccagtgacagccaagtcaatggcagacttcgtagtaatcgaccaatactcagcgtataacgccgtaattggtcgaccaatcctgaaggagatgaaaatcataacttcgatctatcatctgacaatgaagttccctactcccgctggagtaggttcggtgcggggagtccaatccgaatcacgagaatgttataacgcagccgttaaactcgcagaaaaaaggacggtaaatgtcatctaccttttgga

SEQ ID NO: 275931 - DNA, 195 bp, Cannabis indica
atagtatggaaaacattaagcaagttacttttttacagaactcaattgccgagcaaacttggcccagcacctagcatatgcgcgcaaacgggtatgcactgcatcccgtccgtacagcttgcaatttttttcaagatataagtgtaatttgaatttaaaaatagttagtatctatctttttttgcttaataatct

SEQ ID NO: 275932 - DNA, 1235 bp, Cannabis indica
ttcactaaattcattttagtgccatgtcagctttctgcaaggttgttagtttgtgccagctgtaccttgctggttgtttagttagttaggtttattatcttcagcatataaatactgtgagatctgtcatactaactaactctcttctgttagaatcttctattggattcttgctctgctagggcttctctttctgtgtttgtttcttgaatgtgcagattgatatttcgaagatcttctggtggttgaagatggagatagaatctgcctgatctgaggagagttcagatcaatcagctgaatgagattcagctgtctgaatattcagagttcgtgtttacagagatcttttggtgattagatcttgatacttgagtgtgttcaagtattaggtaacattgtataaaagtcaatttagattacattgtttgatttgtagaatcagaactggtatttgtaattgaattgattttatagtggatgttactttacccggttcaagggaacccaagcactactcggttggaatgcgtttccaatgcggaggaagcttgtaaattctgtgttctttgatttactcttcgtttaattcacagaaataatcaatttaggtaatttgtactcaatcaatagtaattaggactttcaaagagttttgtttccaatggagttgttgcatttgctctaccttatcttaatcactggacggatgcttaacaacatgatactaatgtagaggaatctgcttcttcctctgctgtcggtagtgagcattggaggatacctagctattgttaacatgagtatggtcaatgtggatgcctctatttttagtgggactggtagctttgaggttggttagatagcgcgtgatcatgatgaaaagtttttaaggtcgattggttgagtcgaaatcggtggctagttatatacaatcgtatatggcaaaagcattggctatcaaggaaattcttaattggattcaatattagactctttctcaagtggttgttgaaattgattagcaattggttgttcatacaatttgtcagacatatcaaacggcttccccgtttggtttgattatccatttttgtaaatatatttcatttgtctttgttaagcgctttatgaataaagtggtcaattgtttagcgcgttctatttgttctttgtcaggtcgtcaacttagtgaaagcttataccttctcatctttaaactattttattagatt

SEQ ID NO: 275933 - DNA, 442 bp, Cannabis indica
aaaataatttccaacaaaacctttcatacaagggttccatccagttcattgcaacaataggttcggcctgcacagcagcaggggcagctgccactagaatttctggagcaagcactgcaggagcaccctgctgtctcaaccgccgaatcacttcatcttgttcattaattctagcttgcatttttgcaaacctgttttcccaattttgggcatcctgagcagcttgggcagcctgtggcgagttagcatcaccctgaccacgtgccctgcccctgggacctctacctcggccacggagatttaggggaatctgagctccctgaccttcatttgatccaaccgaattgccctgactcctggtgtttcgcctaaccaagagctagtctggtcagatcgtgatcatagaaaaacttactaatgctgcttattttggaaattaaaa

SEQ ID NO: 275934 - DNA, 556 bp, Cannabis indica
tgttttggaatcagctaatgtggttgttgatgattttaaagatttttcaaaattttccatagaagccgagatagatagctttatggatactccaccagaagcaccaaaagtagattctgatgcaacagaactcgtttctaacaatgcaaatgacgaatctgccgccgcaactgatacaagagaaccagaacaacctatgtcgactcatccaaacatcatcattgattctatccagaaggaaccaagcaccagagttaaactgaatcatccaaaagagctgattcttggaaatcttgaagaaagcatggtaacccgaagaaggtatgttaatttaattagctttctttgttttgtctcacaatttgaaccgaaaaatgtgaaggaagccatgacttttgaagaatggctcaatgcaatgcaagagaaactcaatcaatttgttcgcaacaaggtttggattttagttcgatgaccaaaaggtatcactgtgattgggacaaagtggatttttaaaaatcaaagtgatgaatttggtacatgtaaagaccgcttagtt

SEQ ID NO: 275935 - DNA, 472 bp, Cannabis indica
gtttcgtctacacctccatcatttgtcgttttggcattccgcataaactcatttcggacaatggaaaacaatttgactgtaaagagatgcgacagctatgcgacgatttggggattaaaaaagctttttccgcagttgcttacccgcagagtaatggacagactgaagcagttaacaagataattaagcacaccataaagggaaaattagaaggtcgcaaaggggcttggccagatgaattatcgcaagtcctatggtcctataatacgacccctcgatctacaactggcgaaacacccttctcactttcttacgggtgcgaggccatgttgccagttgaagttggggcaggttccctacgcagggatattttcaatatctcgcagaacaacgagaatcagctattctgccttgatcttttggaggaaaagcgtgataaagcgcacctacaaaatgcggcttatcaacagcg

SEQ ID NO: 275936 - DNA, 573 bp, Cannabis indica
atatccatatattctccacccctatcagttcgcaagatctttaaggttttacccaattggttttgtgccaatgctagaaattcctgaaacttttcaaacgttttagatttcttatgcctaaggtaaatatgaccatatctagagtaattgtcgatgaaagtgataaagtactcataaacacctctagctttgccattcagtggttcacaaagatctgaatgtattatgcctagtggttccttggcacgctctccctttgcagagaaagaatgttttgtcattttgccttctaggcaagattcacaaactgctactttacctaaggtgacattttttaatggaccacctttggttaacctgtgaagtctatcatagcctatatgaccaagacgtaggtgccatagatatgcttcatcttcattatcgatcttttgctttttatggtttctaggtttagctactttaaatagttcgttattaagcacaaatggttcttctggtcttagaacataaagcccctgttccattgatgcaacataaatttgaatgtcattttgagaaatggtagaacca

SEQ ID NO: 275937 - DNA, 565 bp, Cannabis indica
tggtggaagctcataaaatgagaataaccttgactctcgcctaccgggacaacattggattctcattttgatcaaataaaaggttgctaaaatggtatccatttcagatgccctgactactctattcaactaatgttatctttggctctcgcctaccgggacattgtatttcattatgttgaaaaccttggaaaataataaatatgtctagtttttggtatttttgcaaacatatttgattacttgttattttctgaacttgtgtatgaatttattgaacaaaatgatttacttctatttattgatatttgtagtgtcaaaatgtacaacccacatcccaatactcatctagaatatgcctttgggaatgaatttgaaggtgtgaagaagactcctggtcagagtaatacttcacacttgctcatgatgaacatgaaattccaaaaagcagctaagttgggaattgttcaatatgaagagcaaagagttcatagctccaacaatcctgctacttcaagctcagttgagaagaatagagaaagtgattccacttcctcatattatc

SEQ ID NO: 275938 - DNA, 302 bp, Cannabis indica
gtccaattccctgtggttcgacctcacctgtgtgagtatactacttgattgcgtatacttgcgtagtaattaataattttcacaacaactgttcgagtactcgctattctaagtgagtactcgcatatctattttttggtattcaagcagtttttgaatactggcacaaaattggtgttgtcaaaattcctccgacaacagcttctatctagcaaatagaagtgaaatgatgatttccttcgagcttggggaaacagagataaatggttgagtactcatttcagttcactgaaatatcattt

SEQ ID NO: 275939 - DNA, 447 bp, Cannabis indica
ttattcaatttcatcaatgggaaaacactctcactggtttcattggatacattgcaaacattgttaaggatttttatgctaatctcactgatgatttccttgatgagaattctagactttatcgaagagtttatgttaggggtcattggttctctttttctgaaaaggatattgctcaagctttgcaattgcccgagaatgtatccaatgcagtgatgtccatggatcgtgagttgatgcactctgaactcacgggtgctcgttcagagttgaaaccaggggagagtcttcgaatcactcacctcacttttgctcatgcttctcttatgcggtttgccttaagcaattgggttcctaattcaaacaagaccgtagtatctcaagatgtggcttcactcttataccgcatcacttctggaacttcaattgatttggcctccacattct

SEQ ID NO: 275940 - DNA, 502 bp, Cannabis indica
gagtatgttaggaaaaaaaagaatttagttgttatattagtaattctaacgaaagtgtatgtttcaggtttaataaattagacatatataactattggtacgttcttaagtttgattttttttgtaagtgttaatggatatataattttaagctctactcttttattagaaataattaagttgaattttggttaagggtgaaatctaatcattaaggttataatagaagaacagattgtgacagtcagtagtcccgtgatccgtaaggggatataccgggtgtaagttgtgcaatcccacactacttggggaaggtcaagtgtgatgattctgaggatgtgtaggtatgggactacacagttgaagagggtttaaatggattgattggtactaccagtagccagagtagcatactcgtgtataagggtcattcattctgtgggtgtaagggcccaatggaggcttgaagcggggacgttataatcaccaagatctgaacctg

SEQ ID NO: 275941 - DNA, 642 bp, Cannabis indica
tctttaaacttggaattatttttcatttttcggacaacaggctgaccgggcagcttttaatcccggtactacgtgcttttgttatcctttatgaatttcattctctgtttataatcatcgtgcaattgtgattgttttatttttaccaaatgctttgtacaggtataggtgccccccaaatgaccgagcagacgtatgactcttggtcacttgtcttttacaaatatattgtttatctgttcggtattttgggtttgaccaaaccttttgtatacattgtatggtaaattagaaacatgttgatgattttgactccatctaaattttgaaataactatctttattcatttattgatcgaaaagtgtatttgttaccatagtaacttacatcagagctatttgatttagcttaacatgaaataaaacaaattggagaaataagaaactgtactttaaaatggtcacctgacctgagtactttgtttcttttatcgaaatctttgagcgtagtccgcccaacaggccactcacttaaaagtaaatgttcattcagtacttaaagtggtcacccgacctggtactttattggtagtattttcttaaatgttccccattccaataccgtggtactaaaacgagttg

SEQ ID NO: 275942 - DNA, 502 bp, Cannabis indica
tggtatgtacgtcgtaaacgcaactatttatctagagttaaagataatacatcaactctatctggtgcaagatacactttggagttgttatatggctcaaatcgacaatgcatagagttgatgcggatgtctcgtgatgcatttgttcatttgtgcaatcattttagacagagagaatggattaaagatagtaagcatgtatcagttgaagaaaagatagcaatgtttttaactatcatagcacataatgagcgatttgttgtcatgaagcgaagatttcaacactcttcacaaactgttcacaaatattttcatgaggttcttgaagcaatgatgcattttgcaaaagagatgatagtacccacagttgatcttgattccaatattccagctgctcaaaaaaatattagaaaaattttcaaggtattgtatttttaaatcatgattgtataagtaaaatatgtgtcataaaatattttaacttataaatttattgcagggg

SEQ ID NO: 275943 - DNA, 596 bp, Cannabis indica
tgattctgggtccaggtcccgatcttgtgtgggttcgggtcccattctaggttcgggttcgagtcctagtctcggttcgggtttaggtctctgtttgggttttgatctgggttcagctttgggtttaggtcttggtcatggtcctattcctagttcggttctagttctatttgcgattctgagttcgagtttgggtttaagttcgggtcggagttcgagtcctggtctgagtttgggttcgggtccggatttgagtctaggtacagatcaggcttcgggtgtgggtttgcgtcctgggtcttggtctaggttgggtccgagtaccaagttccaatcccaatcttagtctggattcagttcttggtctaagtccttggctctgatcctggtctgggttcgagtttgggtccgggtccggttctaggtttgggtctgagtctaggtatgggtgtttgagttcgagtccgagtctgtgtccgggtttgtgtgtaggtctggaccccgatttgggtctaggttcgggtccaggtacaagtttgggtcccgagtgcgggtccaagtttgggtctgggtcaggatctcggtccagatctagg

SEQ ID NO: 275944 - DNA, 542 bp, Cannabis indica
cccgcgaaggtcagagcgttggtggagattccatcaccaactaagccaaaagaagtccaaagccttacaggtaaagtcgccgctttaaatcgctttatatcgcgatcttttggtaaatgcaaagagttttttcagattttaaaaggcaataagaagttccaatggaccaaaaaatgcgaggagacttttcaagccttaaaaacacatttgtggcaactcccaatcctatcaaagcccatgaccggcgaggtcctatccatttacctagcggtgtccgagtatgcgattagttcgctactaatacgcgaagattaaggacgacaatacccggtgtactatgtcaataaacgcttactagatgctgagacccgctatcctcacatggaaaaattggcattcgccttggtaatatcgtcgggaaagttgcgaccttattttcaagctcacagtattgaagttttaacaaactaccctttgaggcaagtcttagaaaaaccaaagacgtcggggaggttgttgaaatgggtagtggagttaggcca

SEQ ID NO: 275945 - DNA, 300 bp, Cannabis indica
gacttcgccggtcagttgggttttgataggattgggggttgccccaaatgtgtctttaaggcttggaaagccacctcccatttttcggtccattgcatatacttccatggttttcccgataagatctgcgaacatcatatttacaagtctttgataagtggcacctgcgtttatcaaaccaaaaggcattactttataacaatataagcctcgatcagtaatgaacgaggtgtgttcctggtcgggttcatacatcggtatttgattatatcctgagtatgcgtccatgaaggtaagaag

SEQ ID NO: 275946 - DNA, 829 bp, Cannabis indica
gataaatgaaagataagtgtaaataaaactcaagacatcagtttataacaagagataaattacctgagactggtcgagaagtttgcttggagaggcgtttgtctatccgctcttgttgcctctcagacggttctttgtatactggctctctttgaagacttgcgttctctggaatcagctggtgttctcgcagcttcgcagtggtacacagtagtcgccagtcgcgatcttgtaccggaaggctcccaaggatttcagctgtctctctgcgagtcgcgtcaagtgccggtcgagctggtctatctgcgagaacaaggaaaagcgagttagcataaaatctcaaaataaatcagaaaatgcctaagttaagaaacacgcgacatactaggtctgcgattaaagtcagttctaatcccagggactttaaagacatagaaccacttcgatttccagtcccccatgttcgacaccattccttctactccattgatttcagaagtcgcccatttgctaaagcagtagaaaccgttatgaagacctacgctttttatgtcgtagaaatagctgaactcttctactgagggagccctatgaacgtactccatatacatcgcgtagaaggctagggcagtgcgataactgtttggagtaagttgaaatggtgatacatcgtaccgcctaagaatggctgcgatgaaaggatggaaggggaccgataccccacatcggagaatgggtattgagactaccacatcctctgtgggaataatcgcagggttggtaaaagggagatgcgccctttgggtcagtttaggtcgctgaaacgcaa

SEQ ID NO: 275947 - DNA, 351 bp, Cannabis indica
tcactaaggttcgaaatttagaagaagaaaagagagaggggtgatttcggctatagaagagaaaagggaaggctcagtttttctgaaaaattgattttatgaaaaagttgttattttgactgagccatcactttctatttataggcaactactaggtttaggttaggaattatttggcattaaaataatgaaaatatcaatttgaaaaacctatccaagtggccggccatggtgtgtaatgggccttacttggattttgcagttttcacaaattttatttctattttctcaaaaacgccaattttctaattctaaccatttaaatgccaaaactaattatttaataactaa

SEQ ID NO: 275948 - DNA, 669 bp, Cannabis indica
tgtctttgagggtcattgcttgattatgtgtccatttaccatcctgtgtcaactcccaacaggttcatacaatgtttgaacttgttgagagtcaccaccttagttcccatatctgctgggttctcctcagtaggaactttttccacttgtatctcaccttgagtcaccttgtcccttataataaagtggtatttaatctctatatgtttagttcggtcatggaacacagggttcctacataagtgtacacaactttgactgtctgagtacactctaggaacctctttaagtaacttgatctctgtcaaaagtcctttcatccatatggcttctttaatagtttctgtggttgatatgtactctgattgtgttgttgaaagtgcaaccacaggttggagttgggctttccaactcatacaatttcctcctagtagaaacatgtaagatgaagtagactttctgctgtctatgtccccggcatagtcggcatcgctgtatatccttctatgttggtgctgaacttttgttgcttgtagatgagtccaaccttaggtgtccctactaggtacctgaaaaacccatttcattgcaagccaatgaatctttcctgggtttgccatgtattttctcaaggtacttatggcaaaggccagatctggccttgtacaa

SEQ ID NO: 275949 - DNA, 620 bp, Cannabis indica
ataactggatcgttttacttggaaagctcagtttcattagctgattcagtgtctatgttttcctcaatttctgtatctcttctcgaataaattcaattatatttgtgaaacttaatccattttcaaacgttgattgctttagatttagttggagataaataattatataaattaaggggttgaattaaattaatatattgtctctttgccaaaaaaaaaaattaatatattgtcaaaaaatttctcgtcgagggtgtttttgtctttcagcatccagactacccgtttcagtctttcagattaaactttcttaccctactggcaccttattgtcaactgagatggcggaaagactatactgaccttgaatttgtcgtgtattgtgattcagtaattttcagattcttttttctctttttttttttagaaaaaaaaatatttggggggaaggggcacaaattgtttgtttgttttgttttttttttttaacattgaaaaatacttgtgcattcttcaaggaaaatgatgtgctaatagttaaataaaatttagaaaataataatgatgattttttgttggttcataagtaggatgttaaaaaaaaaagatgaaggcttgtg

SEQ ID NO: 275950 - DNA, 668 bp, Cannabis indica
ttatgaagcaagtagagaatgtgtgggagtgagatcattgacatagcatattcgggaaatatatggattgcactctataaagaagtatcaacacaagcagttctctatgaagataatactgcttgcatcgctcaactaaaaggagagtacattgaaggagatagaattagaacacatttcaccaaattcttctttatacgtttcaagaaaatgcatattggtgttcaacaaattcaatcaagtgtcaatcttgcaaacttattcacaaagttattaccaacatcaacatttgagaagacggcagacaagatcgaaattcgtcgattagaagatctccatgaatgcctaaatgaggggaagttagtttacactatactctttttcttttgatcaagttttcagcaaagtttttaatgaggcaattattatggacatccaagggggagtattatgaaatattatttatggatgtccaaatcaccaaattaattatcatcattaatgcttgattgtattttcctttattacatattaatttagtttcccattcctttagtcaatacttttgtataaataggggttcaccccattgaaataaacaactaagaaattctcattcagtttctctttctctcttcatcttcttcttcttttcttcttatttattt

SEQ ID NO: 275951 - DNA, 404 bp, Cannabis indica
cgaaaaacgaaccaacgtacccgttcccgttttcgtttactactacgtaggtttagacttaggttaggtttaactttaacctaaacgtaagtaggaagtaaattaactacgacggacgtagtagaagtaggttacgtctaaccttaaccttacggttagagtaaaagttaaggtttagtttagtttcgtttttccctttaccgaaacgaaacttaggttcggaaacgtaaaagttaacttaacgttttacggtttaacgtaagttagttagtaaggtaaagttaacctttaccggttacggtacgggtaccgggaaacctaaatttagttagtactttcggtttaaaggtaaagtattattaatacttcgtaccgttgtatctttctaagtcaatatcactagt

SEQ ID NO: 275952 - DNA, 653 bp, Cannabis indica
tctcttacttgtttttattgaaaaaaatgatgaaaagtgatgaatgcatgcatgattttagttgattttggctgctgtgttttgaggttaatttgtgtgattcaaagcatgtttatgtgataaataattggattgtttgaagcatgctagatagggtgttcaaagcttctagtttctttgttaaaaagttatgaattttgaaagaaaatgtgatgttttgtttctgtgaattgctggatgttgttgtttgttttcagaggttatattatgctagtttaagaggttttaagctagtttgattgctgtttaggtggttttgctcaagcttgagtttggaactcaaagcttgagctccaatggcatattttgtgtatgtggtttctgggtaggtttgatgccttggaattgttatttggggcatatagaacaggtctggaaagtttgggaccaattgggtttgaattggtcaagttaggagatttttggttggctgcctgcgaggaaccggaattccggttgagcatccggaattccggatgggggttcagaatttcccagaaccggaattccggttgggcaaccggtctgccggttgggggatttttcagaaccctagttttcctcgtttttgggtttttaggggtattgccatg

SEQ ID NO: 275953 - DNA, 600 bp, Cannabis indica
cccgttacccgaatcccgagtcaagatctggatcactgtcacggctcttggtctggttctggttcaggtattaggtcccatttctgagtttgggttcgagatcgagactggggtgcagttctaggtccggaccctagttctgtgtcttattctggttccatgtttgggtctgagttcatgttcaggttcgggtccggatttcagtctaggtccagatcaggctccgtgtgtgggttcgcgtcctggttctgtgtctaggttgggtccgagtcccaagttccaatcccgatctgagtctggattcagttctgggtctaattccttggttctaatcctggtttgggttagagtttgggtccaggtcaaggtctaactttgggtctgattctaggtgcgggtttgagtttgggtcggagtctgtgtccgtgtttgtgtccaggtctgtaccccgatctggctctaggtaagggtcaaggtccaagttcgggtccgagtgcgggtccaagtttggttcttcgtcaagatctctgtcaagatctaggtccagcatttcgatcccagtcttggtcttggtccatctccaggttcatatccgaatcc

SEQ ID NO: 275954 - DNA, 798 bp, Cannabis indica
gccccgcagtcgcagcgaccccagcccctacgacaggaggaatcgaccaaagcatgcttctgcaagctttaaagatgctcgagcagcagcgtaagcctatatataagctgcatggcacctcgccttttaccgcagaggtgcggcaggctcaacttccgaaagggtttcgtctatccgaatccctcaagtataaaggtacttctaacccgatagactatttagaaaaatttaatactataatggaagtagaccaggtaccacaactcgcgaagtgccgcattcttgcggcaacactcgaggaaaatgctcatgattggttcacccaattacctgaggcatcaatatcgacgtgggaaacctttgtcgacctattcctcacgcatttccaggccacaatgacgtatagaccaccctatacgactttggccaacatcaaacaagaacctggtgagtctttacaagactatttcaaacgttttaacgcagaagtaacaaaggtcgagaaggcccccgagtcttcgcttgtttgtatgttgataacaggtatcttgccgaggaccgacttttggaaggaactacaagctcgaaggcccgagtccttggtagagttcttcgccatggccgaacctcacaaaagaattgagaactctctagcggagttagagaaggggaaggacaaacgccggtcacccataccgcggtcacgatctcgcagtccgcgagggaagaactccaggggccgaagccaagagacgcagccgcgagacagcgaagtccgaagctggctaagtctcctcc

SEQ ID NO: 275955 - DNA, 734 bp, Cannabis indica
gggtttgagtttagggtttttcgaaaatcctatttggagtgaaaattttttctcaccgcccacataggaggactgcccagccgccgatctacgaacccccgaagtccggtcgccggattcctcgcgcgtggggctcacgcgccgcctgaagcttctgcgcgtggggctcacgcgccggcgcgtggaggcgcgtgtgacggcgccttcgacggcgttctgttgccgattcttcactgggttcttctaagcccactcgcatctgttctaggttgtaattcggtatttgtttgtcttcttcgtgtttgggtgttcattctttggtgttcttttgttctttttctctgtcctttgtgtttgcttttgagattatggcagagataagatcagattcaaaatcagttgttgtttctgatgttgttcccgtgatgtctaaaatcacggatcataagttgattggttcgaattatttggaatggagtaagacgattcgactgtatttgaggagtattgacaaagatgatcacttgactgacgatcctcctgaagaaacaaacgattcaaggaaaatatggctccgtgaggatgctcgcttgttccttcaaattcgaaattctatcgataatgaggtaattagtttgattaatcattgtgaattggttaaagaactaatgggttacttggagtttttgtattctggcaaagacaacatatctcgcatatatgatgtttgcaaa

SEQ ID NO: 275956 - DNA, 571 bp, Cannabis indica
tatgtcgacattatcaaaagcaaacacaattcaattatgtcgacaaaatatcgacatcctgtcgacattcagtcgacaatacaaacttaaattcataagttgatataatcgacaacatatcgacaacctgtcgatatgttgtcgacaaattcaatcagaccacaatttcacaacaagtcgacaacatatcgacatactgtcgatattcagtcgacaatacaacctaacaatgaacaagttaatctaatcgacaaaccatcgacatcctatcgacatacaaacgatatcctatcgacatacaaataacatctaaattcaaacagacacccaatctatggacatcctatcgatatcctatcgatatgtcatcgataaaccctgtacatacatataattttgccaaaaataatacatagaatcaacggaatccacagaatgtacatgaacaaagataaatcacaagtaatcaagtaatccacaaaaatctaagcaaaattgaacatttaaaatcaattatttttttaaaaaaaaaaataggtacctttttgactgaagtgggtgtcgattgagg

SEQ ID NO: 275957 - DNA, 536 bp, Cannabis indica
tagaaagtgtgtatatggctactaatcgttagcccgtaccgacagaagcccgcacccatgaaaaaagatgtaagcaagagagacatgaccaagttttgccgatttcatggggattagggccatgacaccaatgaatgcaacaatctgaagtgggaaattgaatttctgataagaaaaaataatccacacgtacagaagtatgtcaaggccgatcaaaatcaaaggggcgataacaaccaagatttactaccaccaccagtagatggacatctgcaagtcattattagaggtccgcacatagctggagattcaggcaaaaccagagaaaggtatgcccgaacagtacaacatgagcaagaagaagtagttctggccgtcgaagaaaggaaaccaaagatcccacgggcaggagaggccaccataacattcaatgatgaagatgctatcaatatctgttttccgcacaacgacgcgttggtcgtggaagtccagatagctaacaatatggtggcccaaaccatgatagacaatggagc

SEQ ID NO: 275958 - DNA, 560 bp, Cannabis indica
attttgttaactaaaaaagtgggataaaaggtcccttttcttgtagtgtggatacacaatgtatacattaagcggaaaaattggtggggatataaggtccctattcaaagaaagtattggaggaaggtagttgaaactaaagagagagtcaagcttttgtttgatcttgtgcaaattaatataaaatatcttctagttataaattggttgcgagcaattcaactagagtaaagaaatttgatgcagacttaatagaaaaatctaaagaaatcaggttcaaaaaagtgtttaattatcaggtgttgttgcaattttggtctactagatttggcaatcaaggaatgataggtattggaattcgaataccttattgcaatagattaaacggttaattgaaaataatgtgttatacctaaacatgtaatgatgaattgtatagattgtttacattccttccaattgaaggtgcttatatataggttgtactataaaaaaatattacttttagtgacaactttttagtcacaatataatttttttttttactaaatgtgactttt

SEQ ID NO: 275959 - DNA, 528 bp, Cannabis indica
ggttcaagcaatgtaagaggaagcggattaggacttgttctaacctcaccccaaggcgagaagatcgagcaagcaatcagatgtgggtttaaagctacaaacaatgaggcagagtatgaggctatgattgctggactcggactggccaaagaaatgggagccaaaagaatcaacgtctttagcgattcacaacttgtagtcaaccaaatgcaaggtagctatcaggcccgagatagcaaaatgacagcttatcttgagaaaacaaaagagttgcaatcgaccttcgacgagttcacagtcagtcaggtgcctagggaaaataatagtcacgcagacgccttagccaaccttgggtcttccatccagacaaccagccccaaaacaatcccaatggtgtacctccaatggcctgctgtctggaagaaagaagaagaagaagaagtaaatgacgtcgccaacgaaaagacatggatgacgcccatcatcgagtacttagaaaaagatgtgctaccagaagataagaatgaa

SEQ ID NO: 275960 - DNA, 1396 bp, Cannabis indica
agggtcttagctcgaacccattaagggttttaccaacctgtgtcaatccccaataagcttaagcaaagcttaaacttattgagggacacaacctttgtgcccatgtctgctggattcacttcagtaggcactttgtctatcccgatctgtccttgtgaaactttatccctgataaagtgatattttatctcaatgtgttttgtcctatcatgaaaaactgggtttttgcataaatagatgctgctctgactatcggagtagattataggctcctttttcattaacttcagctcctccataagcccttttaaccatagagcctctttaatagcttctgtagtagctatatattcagattcagtagtggacaacgccactactggctgtaattgtactttccaactagtacaatttccccccgttaagaaaaagtaggccgaagtagatcttctagtgtccctgtcccccgcataatctgcatctgtgaacccttcgatgttctgatgtgtttggtgaccctgatagaccaatcccaacttagatgtaccttttaagtatctcataagccatttcatggctttccaatgctcctttccaggactagacatgaacctgcttagcacactgattgcataagcaaggtcaggtctagtactaaccatcaagtacattatggaccccactgcattagagtagggaacattcgccatctcttcttgttctaacttggtcttagggcacatagatttagacataaggtattggttggtaatcggttgtgaaacaacctttgaatctttcatagaaaacttttctatgatcttgttgatatagtcttcctgatgtagcatgagtttccctttgcctctatcccttagaatgttgatccccaaaatcttagtagccacacctatgtccttcatttcaaattccgacttgagcaaatccttgaccttgttgacatttgacctctccttgctaattattagcatatcatccacataaagtagcaagtaagtgactttagtaatttccgaacctttaaaatacaaacagtggtcatagtagcttctattgaacccttgtttggtcataaaggtgtcaaaccgtttgttccattgtctcggggattgcttcaatccataaagagacttgtcaagcttgcaaacatggtcttccttgcctttaaccacaaacccctttggctgctccatatagatgtcttcttctaggtccccatgtagaaaagccgtggtcacatccatttggtcaatctccatgtcaaactgagtagctagtgcgagcatcaaccttatagtcttatatttcaccactggtgagaatatttctgtgaagtctatcccttctttctgtgtgaacccctttgccaccaatc

SEQ ID NO: 275961 - DNA, 533 bp, Cannabis indica
agagtacacaaggatgtcgtcgataaatacaataacacaaatatcgaggaaatccttgaataccctattcatcaaatccataaaagctgcaggagcattggtcagtccaaaagacataactagaaattcataatgtccatacctagtgcggaaagctgtctttgggatatcctcctctcggattctcaactgatgatagcccgatcggagatcaatctttgaaaagacagtcttcccctgaagttgatcaaaaagatcgtcgatcctaggtaaaggatatttattcttgattgttagcttattcagttcccggtagtcaatgcacatccgcaaagatctatctttcttcttaacaaacagtactggagctccccagggtgacacactgggtcgagaaaaccctatgtcaagcaacccctagagttgaattttcaattctttaagctctattggagccattctgtaaggagccttggaaactggttctgctccaggtgccaagtaaataacgaaatcaatttctctctgaggtg

SEQ ID NO: 275962 - DNA, 511 bp, Cannabis indica
tcactcctgttcagccttcgcctttcattttacctacacatggaagtagaactgtgagtcaacagactcagtaagaaaagcatataacatttcatataatttccgacttgtacttaggcgcccatacacctatttacaaggcttaacagatgagtatgaacgttccatactagggtatagccactataccacatacactacgtacctcaatgtacgagtgtcagtagaatttgttcataccctgagtacccctgagtgatataccacgcattcccggtacctctccgtacttatgctggtatcacggtactcttagataacattcactataccaatacactctatactataacgtataagtgttggtagtgcaaataacattttaagcatgcatatacacgcaacatatacatacactcagatattcatatcacacattatgtacagttcttaccttctttttgaattcaagtgtgctggccgatctgaacggaaattcacgtgctagatg

SEQ ID NO: 275963 - DNA, 817 bp, Cannabis indica
caatttaatcaagtaataattaagcacccaatctactcattttcactttgaagttacatagtattcacttctatattttattatataattgaaagtaaagacaaagtccttatttactttcatagacaatgcatgtgctacaaattattattgtttaataaaaaaatataataaaaacaataaaagttgaaagaaaaaggcaatcttattgcaacctacttaaattggtacaaacaaacctttatatactatattgaaaataaatcacttcccatttataatattattacctttaatttatttcattggatcccttgccagtttgtgcatgaattatgaccttttttcttatttatccctcaagtacttgaataaatttaatttttgttgggagcatgtagggactttgaacatgaaaaccaatagagaagaatttttattttataattaactatagagaaggatcttaaatcttgacctcaaataccaatataactttgaccattctatactttttatataaagtggctaattgttagtgaacatctcatggtgttggtcatgtgggatatattaatttggggagctcaagttttcttatagttttttttcttttgtatctttttattacattaaattggtgaaaataattatttagctcatgttgcatggttttttttttttttagatcatccattcagttgagagtttgtcctaacggatcttttgttagcatatttacaaatttgataatacaacaagtttctcaatcaaaataaaaaatcagtgaaaacaatattttttttaatatattttt

SEQ ID NO: 275964 - DNA, 661 bp, Cannabis indica
tattaattattatgactaaattttttaatataatgtatgttgtattatttaatacataataaatagtctgtattagcttgtattataatatttacaaaggatttggggtcaacaccaatctccgacccggacccgaaccccggactcggacctggacccgaacccggacctggacccggacccgaatcccgaactcggacctggacccagacccggaccctggacccgaacccagacctggactcgggacccagacccgaacccagacccggacctggacctgtagttggtgttgggatcgagtgtattgaaaatatattataactttacacaatcaattaatacaagtcaatacaaacattgtattgtattaaataatactaatacaatacaatacaatacaacacaacacaatccaacacaatacaatacaatacattacaatacggcgtaacaaacgagtccttaatgaacaaatgttgccgtcttctcttcttaaacaattttattttataagatataaccgtataatgcaggaatgttataacattattttttttttgtacgattgtaactcaacagataggaaagaagatcaagttacaatgtttaagtttggacaagtatctttccaaactaattcctcatcaagccctaaagc

SEQ ID NO: 275965 - DNA, 685 bp, Cannabis indica
ggtgcctttgtgggtactctcaattgtgaagagtttgtttatttcttgaattattaaggggttgagatgctctactgcaatgggtttttctgtagttagattttcctttttcgtcaataatatttacatttcgtatttaaaaatatttttttttcccgcattattttgcaggaaactgttgcgaatgacaaaaccagcacttgaggtaatttattcatttaaatgcacatagtttaataatttttttatacattatctgaacctgtggtcattgttttagtttacagctaaacacattgaagaatcatattgattttcacgacagcattttctaaatgaaaatgctcattagtgttgcttttgtctctaagtctctaaaaatggtgatatttactagttactacatcctgggatattaaagaaaatttgtcccccttttgttctttttatgttttgggtattcatggcaacttttatcatcaagtgtacaccatgcattaaatttccttatctgataacccttcaattccattatttactaattaagagatgtaaatgtaatgaagtttacttcctctccgagcttaaattttatcaatctgatttttttttttcaaagttattaatagtaaattctctgcctcatgcttttgggtaattttcctgcatatagaattacatcagt

SEQ ID NO: 275966 - DNA, 681 bp, Cannabis indica
ttagcttaaaaatataaagaaaaatacgtaaaaaactaagtatcaccttttatttaagtttaatacttcataaatatactattcttacaagtgtattgtagctaaaagttttgaatgattaaaacaacaatatttctaaataataaaatagaacaaaacatcattaaaataaatacactaaacaatcaagtgttacaaattcagcatacaaaaaaaatctaataaaaatatatatttttcaatattttttattatataaataattttttaatatatataaatgtaattggattgcattgatttttaattgaattttgagattgacatccaataaccgatccaattcaattagaatccaacttttagcatccaatccaattgtaattgaatatccaactttttgtaattagattgaattggatcagttcggttcaattagattggactggatgatacccatccctactcacaattacaagtgaaacttctttcaaaactacaatattaatccttgaggagtgctagggaaactctcttttgcactctcttttacactctcttcctaattgagtgacatgtgtaattttttaaaatatgttttagtatagttacaattatactctttttacttttcattaataattaaaatgtgttatctcatttacttgtttatttttttgg

SEQ ID NO: 275967 - DNA, 1017 bp, Cannabis indica
catggtgtgtaggaaaattgctattatacactaggggtgagcaacggtcggtttggtcggttttttacacaaaaaaaatccaaaattcggttttcagtttttatggttctaatccgaaaaccgaccgaccattataaaaatataaaaaaaccgaccgttttaatccacggtttggtcggtttaaaccgaccaaaccgaacttcattttttttttttaaaaaaaagttttaaatttttataattatttgaaaactaaaaattaaagtattgtatcaaatatcatataatttaaaaaaaaaaactttcttaagttaaataaataatgtaaaataaattttttaaatttttttaatttatttgttgctactaatatggtaatgagttatattaaaaactagtattattttatgaatgtgtgtatataatacgtaaatgcatcaaattataataaaataaaataatgaataattgagactttaaataaaaaagatataagtaaacttagattaataaaattgtaatattaaatatgtacaaaaataatatatattacatataatatatatatgttcggtcggttctcggtttaatcggacggttttgcgattgacactaaaaccgaccatgttaaggcggttttaaccgaaggcagtttttttggttttcggttttttcggtgttcggacggtcggtttactataataatataaaaaaaaatattttctatttttttcttgatatttggggaagtagaatttcaacttgggacatttttttaacaaagaaaatagtaaaactactaaattatgcttaaaatcacatattattttttttatcaaaatacttttttccatgcaattcttttcttatttaccacaccctctattttaaaaatgcaaattaaaggcaccatcactacaagaaaagacatttttaccggcgcagttcgtcaaatgcgccggtaaaggttgtcgagataaaacaaaatctgaaatctcacttccatttaggttttac

SEQ ID NO: 275968 - DNA, 258 bp, Cannabis indica
aaaaataaataaacgggaatgaaaatactctaaatagtagaaacaatatggttcagaagacttttcatgggtcacaatattttgattctatttatgtttacgtggcgtagacctacgtgtactctcacacgtctatttatgtccatgtggcatagacttacatgttgctctcacacgtctattaacattaaggccttaagaatgattcatctcggttatggttaccgagtccaatctgattatgccttgagcgcataa

SEQ ID NO: 275969 - DNA, 1405 bp, Cannabis indica
cggataacgcgggtggtaaagctaatcgataggccacctgtcctatccgctccagtatctcaaaaggaccaatgtatctagggctcaactttcctttctttccaaatctacgcaccccttttataggtgatattcgaagaaatacagagtctcccacttgaaattcgatatccctacgctttggatcagcgtagcttttttgtctactttgcgaagcaagcatacgagatcgaatcttttcaatggcttcattggtcctttggaccaattcaggtccaagataacgtctctctccagcctcatcccagtggataggcgatcgacatttcctaccatacaacatctcgtaaggtgccataccaatggtactctgataactattattatatgaaaactcaatcaagggtaggaacttgctccaagatccttcaaaatctattacacatgctcgcaacatgtcttccaatatctgaatggttctctcagactgaccatctgtttgagggtgaaaagctgtactgaatctcaacttggttcccatagctttctgtaaactctcccagaacttggaagtaaatttgggatcacgatctgaaacaattgactttggggttccatggagtctcactatttccttaatgtacaattcagcatactgctccacagtataagtcactcgcacaggtaaaaagtgcgctgacttggtgaatctatccactatcacccatatggaatcatataacccagtagtcctaggcaaccccactacgaagtccatagttatatcttcccatttccattcaggtattctcaagggctgaagtaaacctgctggcctttgatgttcagccttaacctgctgacaggttaaacactttgaaacgtattcaacaatatcactcttcattcccggccaccaatatattgccttggtgtcatgatacatctttgttgtccccgggtgtagggaatacggagtagtatggaactcatcaagaatttctcttctgatctgatcatctgtcggaacacaaattctacccttatatcttagtagtccacttggagtcacaatgaaatcttttgtagcaccaatctcaactttttttctgagttcaataaattcaggatcattttgttggccaatctttattctttccagtaaatcagactgcaatgtaatatttgccaacttcccgactacaaactcaatctcagccttggccatatcctcagccaatcttggagagatttccttcaactcataaacctgccctgggcctttccggctaagtgcatctgccactacgtttgctttgccgggatggtagaggatttcacagtcataatccttgactaactctagccatcgtcgttgtctcatattcaaatctttttgagtgaa

SEQ ID NO: 275970 - DNA, 718 bp, Cannabis indica
ttttcaagcccttttcctttcaatctaagtgttcttcaagctttggtaaggtctctaacctttcccttttgtaatttatgaaaaaaatgtttaaaaagatgattgttgcatgtgatttgttgtgatgcttgctgctgtgttttgtagttgttttcagaggattaatcttgttattttaagtagtttagagctagtgaatgcatgatatttgctttgattcaagcttggaagtttttagctcaaaaccatggttttcaaagagaaatggttaaaatctgttgctgtgattttgttgatgtttgtagtagttttcagaagcttttatatgcatgtttaagtaggtttgatctgatttggatgcatgttagttggatttaaccaagtttgagttttggaactcaaagcttgggctttaatggtgatttttgattctgtgagttctgggtggttttgttgctttagaaatgttatttgggtcatatagaacaggtctggaggtttgaggttaattggatttgatttggtagagttatgaatttttgagtttctgcctacgacgaaccggaattccgattgtgcatccggaattccagatgggttttgaaaatttccagaaccggaattccggttggacaaccggtctgccggttgggtgattttcgaaaaccctagttttcctcgtttttatgttatttggggtattgtcatgctttttatc

SEQ ID NO: 275971 - DNA, 575 bp, Cannabis indica
cagctcaagattttcataactcagtacatgagcagggtctaaaacgtacttccgtagcatggaaacatggaatacgttgtgaactgctgaaatagctggaggcaaagctaaacgatatgctacttatccaaccttctcgagaatctttaaaggtccagtaaatctagggcataatttgccttttttcccaaaacgcttgatctccttcattggagacacccgtagaaacacatgatttcctatttgaaactctacatttttgcgtttcgaatctacataactcttttgcctactctgagaggcaagcattttggctttaatcttctctattgctccattagtcagttgcactgattttggacctagatatttcctctctcccatttcatcccagtgaatggaagatctacactttctgccatataacaattcatagggagccatccctattgtactctaataactattattgtatgagaactctatcagtggtagatacttactccaggagccctcgaaatccataacacaggcttgtaacaaatcttctagtctctgaattgtcctttcggact

SEQ ID NO: 275972 - DNA, 872 bp, Cannabis indica
aaggagtacgctcatttgaatatcaacgcatgttgcaaatggctgagtgtatctcagtatctcaaggggcatataatcgcatatatgaccattagaatactgagacacacccaccatttggaatagcgattaatactctcgcaattcaacccacagcatataaaatcctaaaaagttagctaaatagtcaaaggtaaataagttctgtcagtgtgcgagtattcgaactgtgcatccgaatacccgcgagtattcaaagtatgaaacaacgtctatttaaatgtttcttacacagtatgcggttattccaaattacaggtcatttttcataaaattacccagttttttacccaaaaaatataacctcatacatatcccttacaaacatgcattttctaaaagccccaaaataccaaaacccagaaagaacaccctttctcaaatacagaaaacaagaaatacaatggaactcgaaactaacctttagtttggcaagttgttcctgcggttactcttgattgcttctgagattgaaggatgctttagatgaacggtagaaatctgagcaaaaggtgagaatggttttgaagtttctgtaagggagagaggaagttaagaaacaagagggaaaaatagggaatttgattcgtatcaaagggtttaaatacccatatccctcattaattgggatcacgacacgtggcaactggaatgcctaaggtcgcccaatccaacggccaaccatggccacgcctacacgaaaaccgaggagttagtgacgtggcaccataaatgcaataaaaggtaataattacagccgtcatttttcgaaaccctcgatgggacaaccgaaaggtcacctcctcgtgaca

SEQ ID NO: 275973 - DNA, 640 bp, Cannabis indica
tgcacaaccggaattccggttctggaaattcctgaaccccatccggaattccggatgcacaaccggaattccggttcctcgcaggaaacattcaaaatttcaaactttgctcaaatcaaagccaaaacacacaaaaccttccagacctgttctaaatacccctaagaacaaatccaaagcaaaagaaccaagcttcaatcacagaaactcaattcaccattggaggttcaagattgagttcaaaactcaaaacttgactaatccctccaaacagccactaaatcaagcataattcaacatacttcaacatcatataacaccagaaaacactactcaaccattgcagcaaccacaacaacgaaaatcaagaatttgctttgaaaaccatagcttttgcacaaaaattcacaaacttaaacaaggtagcaagcatgcattacaacctatctaatccattcaatttagacataattaagcttctgaaaacataatcaaaacctagcaacactacagccacaaaactcaaagcatgcaataatcacactttcaccaaaatttcaagaaacttaaagaaaagctatagaaatcataccaacaacttgtgaacaccaaatctgaacaaaatgagcttgaatcacaa

SEQ ID NO: 275974 - DNA, 522 bp, Cannabis indica
atgacggaagcgaccaaggtgtcacgggaatcgaggatggaaagttatccgcgatactgggggcattgaagtccttggcgaactatggaaggacataaggaaaaacggaccggtcgactcaatgagtgatttcctcgaccgggccgaaggtttcatcaagctcgaagaagccattcagcgagcagaaggtgagcaaaagccgaacaaaacgaaggctcctcctactggaacgtccacccagcttccccaatattccagcaactcaagtggcaagcgttcaagcaacaaccacaagcaaggaaacgggaagaagggaaagttcgccgaaaaacccggacagactccccgtgatcgcgccaaacacactgcattcactatcctaactgaggatatagaaagtgtgtatatagcgactcagtcgctaattccgtacaagaagcccgggcccatgaagaaagataccagcaaaagggacatgacaaaattttgtcggttccatggagactacggccacaacaccaa

SEQ ID NO: 275975 - DNA, 734 bp, Cannabis indica
tggagtatatattgaacaggactaatattgacattggataagatatcataaacttattgttatatctttttaagtcaatatcacttagttgatcttagatcaatagatcttaatcttgagatggttaggttttggcttaaatgtattattcatgttatttgacttgttcgttaaagtttaccaagtagatcttctcaatactacgtcgtgggaacatagtagtacaattgagtgggagcgttaatcatagatatgaaatctatagcttctataactattagaagtgaaacgataatttcttttgagcttggcttaatgcgataaataattgagaattcatttcagtaattatattagtttactgaaatatcatttacaagtagctaaagtattttaaggataaaatacattgaagggtagaacggtaaattttttcctactcaatgtagatcatctatagaggatctttgattatttgaactgaaataatgggtaattcaaagcacatctatttttggtatatagagcgttctatgtaatcatgagtgcaattttaaatctatagtggagtcagaaggaattaataagttaggaaatttacttggtaaattttggatctaatattgggagggtaaatactattttggaccctgtattttgcaaaaattactgattggacctttattttgttaaatgacaaaatggaccctatattttccaaaatggtaaaaata

SEQ ID NO: 275976 - DNA, 814 bp, Cannabis indica
tgaagaagccagggcggaagtcggagttgttcggttggaactaggtgaagccaacaagaagttgtttgccgctcagaagaaaatcactgtgctgactaaggatctcgaggttgctgaccgttttgaggagaccatcgagaccttatctgctgaggtaaacagtcttcaggacgagaggacttcccttctatcacttcttcattggatgaaggaggaaaaggaagccaaggaggaggagctttcggctgaggtggacaggttgaaggagaaggtcaatgccttggagacagccggtctcgagctcttctttgatttttggaaggctaatccttaggccaatttcgactacttgggcgatgctaaggacatgtaccttgagttctgcgcatcctaagtggcctatggtgaaactgaggccgctgcttcaacctctggtcaggctattgatgcacctcctgttcaagcaacagatcctcctgctccggtttacccagaagaatcgaaccaagagcctgggactccagctgcttaaacacttctctttttatctgtttattttatatatcttattcggcctcagggccttttctaagacatcatgaccggccaagcagtctttaaactttgaattatttttcatttttgaacaacatgctgaccgggcagcttttaatcccggtagtacgtgcttttgttatccttaatgaatttcattctctgtttataattgttctgcaatcgtgattgttttatttttaccaaatgctttgtacatgtataggtgccccccaagtgaccaagtagacgtatgact

SEQ ID NO: 275977 - DNA, 301 bp, Cannabis indica
aattctggttctgagaatcctaggaacaccatccgaaattaccggttgcacaactggaattccatttaaactacataatcaagcatataaaagctgcagaaaacgaactcaagcacaaataatctctacagcaactaattccacatttcactttgaaaaatcatagttttcgagttaaaattcaaaactttgaacaacacaactaacatgcatcacaagcagctatattctactcaattaaacatgcttaaacctctgaaaacaacccataaacacagcagcaacaataaaccaaaactaa

SEQ ID NO: 275978 - DNA, 475 bp, Cannabis indica
atttgaaatacactttttgttttatattagtgtaagtgggagtttgttgggttttgtgccctaataaaacccatttcaatataatgaaatttactaattaataaaagatcagaaatcattctatgttgcatggttcacatgatttatttcattattatgtttaatgtataaattttattaattctagaacatatatatttgttcataattaaagtgtcgtcagcacaattgaatataatcatgattatatgttcaaaagtttaattctcataatttgtcaattcactggatttagactgacatgataatcagcgatatggtatacttacaccttggataagttttatgtcctttccagggtggaaaagtttaccagtatcggatgtatggagtatacattggaagggaccgatattgatcttagacaagatatcataaacttactgttatatctttctaagtcaatatcaatggt

SEQ ID NO: 275979 - DNA, 499 bp, Cannabis indica
catcgagtcttggacggtcgcgctcaacacgtgcccccatccaaaggcagaagaagcttagataaagtctacactcaactttggaagtcccgtacagacttggggagcaaatgttatgccaatttttgcactctaatgtggcatcacatgaatgctgacacgcggagtccacttggaacatctgctcaggaagcatagtccgagaaggatgcctcactggcatgccccgagcaaagtattcagcaatccgcgcagagtgacaaccacttagcgaatgagctttcgcatcgtgagtcatcagcacaatccctataacttagggatcaatatacgtggatacggcatacacatgatcccactatcagtgtattcaacctcaatcccacgatccttgcattcagcattgatcccacgatctttctgtttataggcattgtaacgagaggggaaactcttcctccccaagcttactagccctataaatagtgatgcatattta

SEQ ID NO: 275980 - DNA, 593 bp, Cannabis indica
tattcgaaataattagaggaagaatacattttgagattctgttgtcttttcttgtgaactaactctatccttaaggtagcttttagtgtacttattcagatttaaaacatgtttatatatatatgtgtgtgtgtgtgtatttatttatattagttagtctcagccttcagattttattatctgtgatgctaaagtcagcatattcaattacaaaagagctctatctttcaatgttgattctgcattaactcactgatattggcatcttctgcatatgaaattactaattgtatttaacaatatttaataaaacatgtcttaataagagatacgtttaactcatgtgttttcactttgacatgaccaatgttgattgtcatagtaatggtttaagttttgttcattttatttattttgatttcagtggatttcatgttgaactgatggattccttgtatgtcatttgtttggataattgataaaaggatgacaaacccaaagggcttaatggaggattgatagtgttgattgttgtttttcggactactactgtatgttcctgataggaaatttcatactctacacttacgctc

SEQ ID NO: 275981 - DNA, 800 bp, Cannabis indica
acaaataactcactagtacttcggccaagcttccttcggatccttcttctttatctctgctgcatcctttttgtctgcagcagcccccctcttccgtttaaataccattttataaacctattacacaagacaaaataacttaaattaacaaacattcaaaacactaaaatattggaagacaaagactttgaataattcatgcaatcgtctaacatttcagtgtattcatgacatcccgacacttaatttcctatatgtgtacaataacaggtaagcatctcttcctatataacatactatcattatatgtactatagtctatttgttaaatgtactatatggaaactgttaagtacaatgtaccaatatgcctaaataatggattctgtaacttgttagtctcccttcgcaacaagtaagcatattttccttacatactatactattacaataacatcacagtaaagtcagttatacagtattcacttttaacatacaatgatgccaacatatgtaacataaaatttagaaaaaattattgaccttctcaattaaatcttggaactctagatcttgaggttcttagggcctcaattaagcatgaagtttgccaatggtcaaaaagattacaacaatttctaattttttggaaaagagacaaaaaggttcacatgtccacgggtgacctcctcccaaatatattgagacctctcactcatggtggaggaaatccgtggacacaaaacaccaacaaagtacagtaccaaacttatgcaaaatgcagtaaaggcacaaaaaaa

SEQ ID NO: 275982 - DNA, 458 bp, Cannabis indica
ataaccgagctttcaataagtagatctagaattcaccaagtaaattcacaacttattaattcctcattgaaccactacagaacttggaattgaatacactctcagttatacagaacgttgtatatgtaccatgatatggatatgttatgattatcaattgttacaatcctaatagtcaaggatcctctatagatgaactacactgaatagggacaaatttacaattctacccttcaatgtatttttaaatgatatttcagtaactaatataattaatgaaatgagatctcaataatttatctctattcagccaagcacgaagaaaatcatcatttcacttctaaaaacttatagaagctatagattcctgttggaaatattttaccaggatctagatttactaccatgtatgttttattaacatcctaatatgaattctaaaacaatgacataaacac

SEQ ID NO: 275983 - DNA, 754 bp, Cannabis indica
ggggaaaattgcatgaaaatttataatttttccttacctacatttgtgcttcattttataagtgacgcaataggtaaaaaaaaaagtattttgacaattgatatgacatttttaaaccgacttaataagttttttgtgacagttttaaaatgccatgaaacatttagcgtcattttttaaccgacgcataaaataaaatagaaaagtaagtatttagcgtcggtttataaatgtcgaaaattgttttttgcgtcgttttgaaaatgacgctaataaaaaactatttgcgactacggtatatacgtcggttttataaaccgacgtaaattctttaagtgacacttaaaaaccgacgtgaattatactttttgtagtagtgattgtttgacataatttattgtcaatatttgatcactacaacaagagtaccgcttacaattaatattactgtccaaagacttaatattaatgttgtgtttggtatcttgaaatgggattaaccattatttgaatttattgttttatttggattcttatatgagcatgttatttatgtaattgtattgttcttttcagctgttgctagtgtatctgctaatcttaattcggtaccggtccttaatggtaataactttaaggactggaaggagaacatttttattgttcttggctgcatggatcttgaccttgcattaaggatggatcgtcctgcttctcttacggataccagtacctccgagcaaaggaggattta

SEQ ID NO: 275984 - DNA, 728 bp, Cannabis indica
taaggcattagctgatcagccatgagttcaggagttgggcgaagaatgtacatgtttgagccatatcagaccaagcgggttaagggtctactagtgatgaacttttgaaattccattttgccgcttaggccggctgaaagaaaaagacttgtagtagagttgtaaatatttttgggatcccaactgtttaaaagtttaaattattacaagttttattttcattctgtttattgcaaaagtttaatttccgcgctatattgattagtaatcccgtttaggggattagggtttcgtaaataacttgggtagcgtgcctaattatttagggcgttacattgttcctcccttatcccatatgtttcccttagttttgtgaaaaaccattgccatgagttgttattttctgaatccacagcagaaaaagctagggggaaaatgtgcccatttccatcttgtgtacaagcagagagcaatgtacctccatatgttgattttaaggaaagttccgtcaacaactattaaaggtttgcaattgttccatccttttattgaagcatctagtgcaacaaacaagtacttgaagttgctgtcttcctctgttttgcatgtgtacgatagttctgggtattagtttttctgcaacagtgtgcaaaaacttgacagtagcttgtagtgtattcgtttgtcttttcctcgtatctttctgtcgcgtgctctttgcttctgct

SEQ ID NO: 275985 - DNA, 534 bp, Cannabis indica
agccaagatactcgcactgtccataggttcccactatgttaagacaaatcccaacaccgacgctcacctcgtcactcgggaccacagtagtatgtgtggcaagatgccaacaccaagttgacgtgccaacgcttctatcatgccccattcgatattgtccgaacaatctccctcgttgcccaaggactctcatacgttcatggaccaatcttcaaggcgccatgcctccatgcatgttggcaggccctcgagacaagctgtcaaactagtttcatacattagacctctgtctctttccaacatagtgcatccgtcccatccgcgtatgcaaactatacctatatgggtatagttgatggacgagattgttgtgaatacctttacataatagcaaattttgagctcataaggttatacatttatcaggtaacatatgttgcccaagtgggagattgttggattaaaaatcatttgtgggcacatatgtataatgtatatgctattataaagtgtgatacaaaattaagtgaccaa

SEQ ID NO: 275986 - DNA, 840 bp, Cannabis indica
cctagtacccgacccagacccgaacttgaatctaggacccagctcgtgacccggcaccagaaatgtaactagacggggacccgagattgggactcagatctggacccagggcatggacaaaacccgtagtcggtgtctggatttgggacctagccctggacctgaaccctgacaaagacccaaacccacacccggacctgaacccagtcccaaacccaaaagtggacccgccccataccctgtgacccaaaattggaacaaaaacgggaagttgaccgagacctgaactaggacttggacttggcatcataactgaaattggacctagatatagaaccgtaactggacaaggacccggactccaaatcagacctagacacgaatttggagccagacccggatcccaaccaaaacctggactcgggactcgaacatgaacctgaactccgacccaaacatgaaactagactagggacacagaactagggtcaggacccagaactgcaccccagtctcgctcccgaacccaagctcagaaatggcacttgagacctaaacaggaaccagaccgagacccgtgacagtgatccaaatctgacccagacccaacttggacccccactcgggacccgaacttggacctggacccgaacctagacccaaatcggggtccagacctagacaaaaacccggacacagactcggagccgaactcaaacacccacacccagaatcatacaaaaagctagacccggacccggagccaactcgaacacagaccaggatcagaaccaagcacttagacccagaaccgaatccagactcagatcgggattggaa

SEQ ID NO: 275987 - DNA, 614 bp, Cannabis indica
aaacttaccgtgctgcttcttttctgtaacagcagagtgtttcgctgaagtgacagaatcctgcgaggtagaaacagttcttccagaaacaaaaatatcagatttaacaaaagtggtattgaaatcagattgagtagaaccataacctagaccagtatgattagtttggccagatttttgaatcttttcaaaaatgttggaacctggatttaacattttgacattctttttaatgttttcaagttccttagtcaaagaaataatttcagactcttttaaagacagttcagattcacaacatttaattttttcatccagatcattaatgttgttacacaagtctttattatctttaaccagggaacgattttcagcacatatttcaaccacttaccaaacattaccttgtaagattcagccatagagttctcatcaatttctgactcatctgattcggatccagcttcttccttgttgtcatcgatcaaggtattattcatgcacatgaattttcctttttcctgcaaatttcttgacaaaacacttgttagagcaactttttctttttcatcttcactactttcagaatcatcactccaagtaacattcaatcc

SEQ ID NO: 275988 - DNA, 598 bp, Cannabis indica
aggcccttagcacgatcggttccatccatcctttttagctataagtttcggagccgatttcgccctcaatttcatatggcccttcccaatttggcccaagtacccccatccgggttcttgggtggctgggaagactcttcttaagaccatatccccaatagtgaattttctgtttttaactttggagttaaaatatttggtcaccttcttttgataagctgtcattcgtatttgtgactcgtcccggagttcttcaacttgatccaacgcttcctgtaataaagcttagtttgtagctggatcgtaagtcgttctcttgtgggacgggaataacgtttctaccgggaccattgcttcacaaccgtacgccattgagaaaggcgagtggccggtcgtggttctgggggtcgtccggtaggcccataacactcttggcaactcttcgggccaattgtttttgcaggccagcagctttttctttagggtacgtgacctttaggatcttgttgactgcttctgcttgtccatttgtttgcggccttgccaccgcggagaagctttttacgactccgtggtggttgcagaagttagtgaactc

SEQ ID NO: 275989 - DNA, 824 bp, Cannabis indica
ggggggtagaagtagggtttttcttttggttctcctcagcgggataccttatagggcttggctccctagatttttgcctttgggtacttggcgaggattcctctggttcctttccaagtccagcaggcatggctttaggatgcacgtggattccagttgcctccatggctttttgcatggccagcattacctcttgcatcttttgattttgtgctttttgggctgcgatctcaacttcatgatcgacaactttttgtcttaagagcaccaattccgagtagctacctttatcgtaggcgtattcattgaggtttctctcgtaatcatcatcaggaattccttcttcttcctcggaaccctcagttgctcttgaggccacgtcctcctcatttgagtcttgagcgtcttcaagaggacgaggttgacgagtgcttcgagtctctaccattgttgtaatgtattgtgtgtttacagaagctttcttcagctctcaatgaaagcaccaaaatgttgaccgaggttttcggatcaataaaataataagagtttagagagctgtaagaaattaagagagagatttttatgtggttggggcgttaatgagccttagtcaacgagtttgtatatttatgagtgtatttaatacagagaatattcttggtgagtatttacttttcttgcacttatgcaacacagaattcttgacccccattaatgagctttgagggggtatttatagtgtttttgtggggtgatccccagaattatagtacatgtatttctgtaagtatcagtaaaatgtgcattcccaatgaatataccat

SEQ ID NO: 275990 - DNA, 650 bp, Cannabis indica
aacatgaactcagaccaaaacatggaacaaaactagggacacagaactagggttgggacctagaactgcaccccagtcttgatcccaaacccaaacttagaaatgggacctgggacaagaaccagaaccagaccgagacccaggaaagtgatccagatcttaactcgggattttggtaacgaggcctgtaacagactagtagtcgctgtctagatctggtactcagactaggaccagaacccagacataaacttggaacccaaaatttgaacttgaacaagaatcgccaaaccaggaccctagaacaagactaggaccctgaccaggacccggacccaaaccaagaaccgaacacaaacctagcctcagacccaaactgagactggaactcgggcccagacacggtcgtgtacccagacaggaactaagacccggacctggacctaaatctgggacacgatcccaaacaaagacttggacctagatatggatccggatacgaacctgggctcagaaaaagcaagaccgggatcaaaatgctgcacctagatctggatcgagaacctgacccagacccaaacttggacacgcacttgggaccccaactttgacttagacccaacctagaccaagacccaggacgcgaaccc

SEQ ID NO: 275991 - DNA, 567 bp, Cannabis indica
tcattatcttcaactcgcataaaatcgaaaatggatgttatcatactcatccattgctccgccttgagtggatcagcaccaccctcaaacactggcggattctgcttcctgaaccgctcatacaatggttccaaacgattccctgcatccggtggcactactagaggtgccggaggatcaggattaagatttagagcaggctgagctcgctgctctcttaattctctgatttgctcaccctgctgccgaatagtttcttgcatagcagcatataactcttcccaattaggtggtggtaaagggttctcaccctcaccggcagccccgagcccagctagctcgcgggtacccctaccagtccgccttgggtgcataactatacacctgcgatcacattccaagtaataacaatactgataagtatttccatatattataattcttcccacaacattctgatatcaacataattcaaataatcaggtaatcagaaaattaacaagctatcttttaacttaaagcttactaaaccatgagtcgatcaggtccttgcagccaatgtacata

SEQ ID NO: 275992 - DNA, 620 bp, Cannabis indica
attgatttcacagacctcaataaagcatgccccaaagattgtttttcacttccaaggattgatcagcttgtggacgcaacagccggacacgaaatattaagcttcatggatgcttattcggggtacaatcagatcaaaatgcatccaccagaccaagaacatacaatttttcgaacagatatgggtctatattgctataaagtcatgccaattagtctcaaaaatgctggaaccacgtaccaatgattggtaagcaaaatgtttaaagaccagattggatgaaacatggaagtatatgtggatgacatgctcgtcaaatccaggaaggatggagggcacatagatgatctgaacgaatgcttcaaagtcctcaagaagtatagcatgaaactaaatcccttaaagtgctcttttggagttagatcgggaaagtttctgggcttcattgttaatgcccgaggaattgaagccaatccagagaagattcaagccctcctggatatgaaatcgccaacaagaaccaaggaagttcaaagtttgacaggtcagatcgccgcactcagcagatttgtgtcaaagtcaacagacaagtgtgttccatttttcaacatcctgcgagg

SEQ ID NO: 275993 - DNA, 466 bp, Cannabis indica
catgcaagcgacttagaagaatgcttcgaagttgtccggagatacggcatgaagctcaacccaaagaaatgcacctttggggtcaaatcaggaaagttcctgggcttcatcgtcagtcaaagagggattgaggcaaatccgaaaaaaatccaggctctcctgagcatgccatcccccaaaaaacataaagatgtgcagagcctgactggaaaggtagctgctttaagccgcttcatctcacggtccacggacaagtgcatacccttcttcaacgtattaaagaagtgccaaaagttcgaatggtcggacgagtgcgaggaggcattcaaaaagctaaaagagcacatggccaagcctcctatcttatcaaaacccgttctcggagaagacctatttctttatttggctgtctctgaacacgcggtcagcgctgccctagtccgggaagaagagaaaactcagcatc

SEQ ID NO: 275994 - DNA, 520 bp, Cannabis indica
aaaacatgaaaacttaattataattagtttttaacatattaaaccatgtttgttaataaaatccacacagtaggaacccgtgttagcacctaaaacttgtgtatgtgtctatgttagttagttttagttgaaagttattgaggtaatcaatctgtttgaacttttagttaagcattgtaatcttaattacttatatataaacaaaggctttcactggtagaattcaaaatcctcactacacattgtagttaatctattttaactttcgattaggttctgcctgagtcattacttccatctgagcctaagtctctcatggctggactttagcttcactggttttcctcaatgcaacataaatttgctgcacttcaagctgtaggaatttggactttgatgccttataggctagatatgcatctcattgggaatagataggttcttagagtgaaattaaaagctaatggttctgtaggaatttacttggtgaaattccaagtttaacctacaccactcaaga

SEQ ID NO: 275995 - DNA, 223 bp, Cannabis indica
ctaaggatggaaaataatttatttttattttttccagatcttccttaagtataattttataaatattaaattaaaatttatatttagaattttattctaaattggtaattttaattaaataaatatatattaaaataaattcttattttgatcgaataaaaggttcttagaatagtgtccattttagatgagctgacaactatattcaatgaatgatactttg

SEQ ID NO: 275996 - DNA, 453 bp, Cannabis indica
tgcatgatttctgcagaatccttcgtgaacttcatatagaatccgtgcagcttcatttgctgtgacacatctgagtagtggcattgagaatcctcttctgtacatgatcctgtctacgatgatgtaccgtgctgcctttcttctcattttccgagcttcatttcaattgtctgggagttccccagagttgagataggttgctattggtgtcattcagtttggagatgtgtcgatcatttcgatttcttccgtgccggtgatgctaggctcttcaagaaactggatcgggaccaggttcgccttgtcacttatattgctgcttgccaaacgggctagcgcatctgcagttgtattttcctctctttgaatctgcttgaggctacaactttggaattgtgcgagcagatcatgtatttttctcatatatgctatcattttttctcctcgagcctc

SEQ ID NO: 275997 - DNA, 631 bp, Cannabis indica
gatataattcaaaaatcaatttaatgatctttgaactgcatatctactaactatttctccacccctatcagttcgcaagatctttaaccacttaccttaatggttttaaccattgctagaaattaatgaaattttttaaacatttcaaatttctttgcataaggtataatctagagttatcgttttaagaatacaacgaaaaactcatatccacccctgaatgtacatccatctgcgaatgagatgaacttattttaagtggatataggcatatttactctttgcagagattgatcttttcaaaacaactatgaacaagatacaaatgccatagataaaaaaatggttgtgtctttttgatgacttaggtttagttacatcaaagagttcttaaataattgcaagtggatcctggtcacagaatactaaactcatattccatacagtttgaatccattggttgaagatggatattaaacacttgtgaaagtgtaactgtattgtattctgaaaatagaaatataagaaaatttccgtttggaaactaaaattaaagccaaagacttaaatttacaccaaataaaatgagtaattctatcttggaccaccactactaatataaactctaagt

SEQ ID NO: 275998 - DNA, 594 bp, Cannabis indica
accatcgttctaatcccaataaccaaagatcctctatagatgatttacaccaagtagggacaaatttactgtttcacccctcaatgtattttatccttaaaacacttagcttcctataaatgatatttcagtaaactaatataatcactgaaataagagctcttccatttatctctattaagccaagctcgaaggaaatcatcatttcacttctatgtccaaatagaagctatagattccatatctatgtttagcgctcccactcaattgtactatcatgttccggagctgtaggtgtgatccaaaccaaatgataggctttaacgaacaactcaaagaacacaaataccactcttgagatcgaacctaaccatgtcaggattaagatcttttgatctaagatcaaccagtaacatagacttagaaagatacaacgacaagattataatatttttaccaagatcaatatcggtcccattctaatgtatactccatacatctgacactagcatactttgccaatattctggaaagaacatagcacttatcaaaggtgtaagtaagctttatcgctgacttgttgggttttatgcc

SEQ ID NO: 275999 - DNA, 621 bp, Cannabis indica
taatagcatgaaaaatcgaaaaaaaattgaaaaatttgatgaactgtacggatggcatgccaggcatgcccatccgcgcgcgcctctggggtgcacgccgagatctcacggcgcagggaggctgcttgcagccattccgcgcgcgtgagaaggtgctcatcatcccgatttttccaattttcaaaaattcataactaattcaaattaaatcgaaatcgagttctgtaaaaaagtaaattgcttagaattttccaaactatccaataaaaataattacagagacagaaaagtaactatttttcccagaattcacaaacaacaatcaaacatcaatatgacacacaaagcaacatgataccatccaaaacacaaacaaatcgttttaagtccaaatttcttgcaagcaaatcaattaccatggctctggtgccagttgttggaagttattttaccaggaacttagatctactcacaagtatgttgatttaacaacctaaatatgaacttctaaaacgatggaaaattaaacacataaaagtatcagaaatcttacattgggtgcagcggaatatatgtctcctcccactcagatctctaacccttgattcctttctgtcgcag

SEQ ID NO: 276000 - DNA, 408 bp, Cannabis indica
gattttccacagtcttacatactatgattgaggtaccacttgatgtgtgtgggcactactctatcactcaaggaattttcgaaattttgaagagaagaaaagagagaggaaagtggcggctcaggaattctctctgaaaaagaatgagatgcaattgtgtgttgtttcctgaagccattactttctatttatagaatgccctataggtttaggttagaattgtatggcattaaaataatggaaaaataaaatggtaaagggctttgcatagtgggcggccatttaaggaaattgggcctcactttgcaactttcccattttgttatttctcattcccattttctcaaaaaatgccaattttccaatttaaccatttaaatgcctattgtaattatttaataactaaaa

SEQ ID NO: 276001 - DNA, 536 bp, Cannabis indica
cttccggcaatcgcctggcttcttctcccgaccgggctccccacgtgaagttgcctcccggaagctgcctgggccttagagtatgccttctcctgagccttccggtagagatactcctggtacttcttctcggtggtggcgataatctcatcccgaaaggtcttctccgcgaccggcgccctcatgttgggacagataacccgggaaaggttagagtcctccatggattggtgcggaaggatgagttttgccttcctgcagttctccgtagtgactaggcccccaacgtcaagatcagcccggtcataagaggcaaaggcctgggctctccgaagaaagacctgagtaggtgcagtccgttcgtaagggtggatcctgacccacttagtgagaagctccgaatggtccactgcccggaacccggaggagaagaaaaaatgatggcgatactccttaacgtgagttttcctgttatacgggaccaccccttcattggcagggtgggcccggtgttggaatttattttaccaggatct

SEQ ID NO: 276002 - DNA, 687 bp, Cannabis indica
ggctccggccctccggaacctattcccttaggtccatcagcttacataacgtccagctggttccggcctcggacagttatctcggagatgacgccgccagcattaaagttcaggactttgctagggctgaattaggaagttcgggtaggagtagcttatttgttatgtcttgtataagcggttcctcacggtcttctaacacttgcttattttgtgaatcaggtatctccatggatgccatcctggaccagcttgctggagttcatactcccgtggctcctccggcctttacccctctcccccggccccttcattgaaggtttcttccagcgctccccccgacactattgacttagtggatgacgaggaggtgcttccgggagaaggccaagggaagggatgggacttctcggaggaagccgctgagggtgcgggagagcctcgagcccttccggaggaagcagaggagggcgaggaggagcctgaagtggctctgattcgtaagcgcaagggcaagatgattgcccaggatgagccgaagaggcctcggagagccgacactcctgctcatggtctggacggcggggtctccccgatggaggaaaatcctgctcctcccaacatcgagcttaccccgattccgggggacgaggtgaggcaggagcttcgcatagccaaacacaacta

SEQ ID NO: 276003 - DNA, 693 bp, Cannabis indica
agatttttatttatctaaggaaaagtttcaactattccagaaaagatagaaaccaatgaaagaattccttagaatcatcagtaagaggtctcagatatgcttttgtatgccttgaccagacacctgctgctgagtgtaagtaatgagtaagtccagctgcttcaactcggttgctatcttagtgagttgaatcggatggttggacagatgggtggagataatccaagatgaagatgaagctcaaaatcttctttattttttgaattaattgttttagttcagaacaatttggatttcaattattagtttgggattttattccctgtttttcatattgttgcagacaattcctttaattttggaaaattttataataaagttttctattttggaaataaattacatttatgaattgagcttcatttactttatcttgtgtatgccagtaccaattatatttatatgttttaatgattgtatgtgtatgtgtttttagtattgatacaaattctatagtatcttcaactcttcaatgagttaatagtacataaacacttagaatttcatttctatgtttatgaataattgttaattctaaaaacaattattaagaatttgtttaataaaaaaatcttgtgatctgataggggtggaaaagttaagaataatatgcagttcaacgatcttttatat

SEQ ID NO: 276004 - DNA, 650 bp, Cannabis indica
tttctgaatccacaacagaaaaagctagtggaaaaatgtgcccatttccatcttgtgtacaagcagagagcaatgtacctccatatgttgatttaaggaaagttccgtcaacaactattataggtttgcacttcttccatccttttattgaagcatctagtgcgacaaacaagtacttgaagctgttgtcttcctctgtttgcatgtgcacgatagttccgggattagttttttgcagcatgtgcaaaaaacttggcagcagcttgtatgattcgttggcttttcctcgtaattcttcttgcgcgtgctctttgcttctccatgctttcatgtagttcattctcaccccatacttgtgtttcatttctcctctgatgtcttgtggcgtttgagttgtttttatgttggtaaaccgtggcttgatgtagtttccaatcaacttcgttgtagcttgtcttttgtcggcaaatcttatgtttagatcacaagtgtgtatcacctttctatcatactttcgaattatgaatgacttcgttggtccgtttctggatgccgttagtgcccacttgcattttggatccaagcaacaaattttgtatgttcttgcacatgattttttcactctgaattggaagttgtttctaattgca

SEQ ID NO: 276005 - DNA, 568 bp, Cannabis indica
aaaaaataatcaaaatttaaaaaaaaataagaaaaaaagaggtaagcaaaaatgatttttacctattttcaaattcaaattacactaatatttaaaactaattttgaaaaatcaaattaatttatttctgataattagatttgaaatatgaaaaataaaaatcaaaatacaaaactagacaaaaaatcggaagttaattccatgaaatagcatgaaaatcaaagaaaaagaaaaaaattgcgggcgcacaaggggaggctaggctgtgatccttcggcgctggagactgcaagcagccattccgcgcgcgtgaggaagggtgatcaccaccttgatttttctaattttcaaaaatgcataacacacaaaactatccaataaaaataattccagaaacagagaatcaattatttttcccagaatttcacaaacatcaatcaatcatcaatacaacacacaaaactgtcggaaattattttaccaggatctatttactatcatgtatgttggattaataacctaatatgaattctaaaacaatgaaaataaacacatataaagttagaaa

SEQ ID NO: 276006 - DNA, 533 bp, Cannabis indica
aacaaaaacatatgttctggacctaatagaatttataatcatgaaataaatcatgtgaaccatgcaacataagatgatttccgatttttattaattattacatcttattatattgaaatgggttttatttagggcacaaaaccgaacaggaaattctaaagagactaggggtggactattttatagtcgcaaggatgttaaagagtttgtttccacaaacgccactttccttgaagatgactatattaagaatttcaaaccacaaagcaaagtagtatttgaggaaatgatttcagatataactccttctaatgttccatcctcttccactcaagtagaggataatcccacttccttggttgaacctttgcaagttgatacaaccgagaaatctaccactgatgttactgttcagaagatcaccgctcctcgccgtagtgggagggtttctacgtaaccatctcattatggcttggatggtgaaattaatatggtcgttggtgcggtattgatgacgacccattaacctataa

SEQ ID NO: 276007 - DNA, 561 bp, Cannabis indica
tacgtatataaatagacaaatctgtatattaattgtacgatgaatatggaagaatttcaaaaacaattattaaacttccaattcccatcaacaacatgggataataaggaaaataatgaagttattcctgatgaggatgttggtggtttaattgaagagttatattacgaagatgatttaataagtaataataattccatgcaattaaacttccaattattgccaatatcagaagatgatgatttaataagtaccattatttttaaaggaactattttttatgatgaggaggttgttggtgatactatgcaacacatatttgaagactctaatacttttcctaataataacaatcctcatcaacttggcatctcaaatttcatgcaacaactcaatatgtaagtttattttattagttaatttctctcattatataattttataatatatatattgattttgtgatttgatatatgatactagtgatgatcgtgtgactaatgaaattcaagtaccattcttgatgaataatgtagacccctttgcttcaaattcaatgcc

SEQ ID NO: 276008 - DNA, 591 bp, Cannabis indica
gagtcatgcgtacaatatactatttgaattcatattttcataatgttaattttttttcgaatttcttgaaattttataacatgtcttaaataactacaatatgcaccaccacaaacaaaaaatttaaactaaaaaaaatttcttcgatgctgaaaagataggagtgcatacatgctctattaaggtcatcctattaaatagtttaatatataatttaatttaattaatctcaagtactattaatatctaattatatttacaatttttttaataatgaaactattattaaatcacaatagttattttattgtatttaatctcagtttcatgttagttttgtaaaaaaatttcacatttatataagccaaactctaacccttatgatagggggctcccattcatttcttttaaattagtttaccttttaacttttctaagacttcccaataaataattgttataatgaaggttaattagtaatttttccccctaaactttgacatgtactaaattgtgccccctgaacttttttggccgttaaaaatttcccccgaactattgagattgttaaatttaaggacttttgtctaa

SEQ ID NO: 276009 - DNA, 444 bp, Cannabis indica
aagacccaggacgcgaacccacactcggagcctgatctggacttagactgaaatctcgacccgaacacaaactcagaccaggacttgaactccgactcgaactcaaacccaaactcgaactcagaatcgcaaatggaactagaaccgaactaggactaggaccaggaccaggacctaaacccaaacccgaacccagataaaacccaaacagagacctaaaccaaactgagactaggactcgaactcgaacctagaccgggacccaaacccacacagtaaccaggacccggacgaaagacatagaacaaagtacagacctagcctcagacccaaaatgagactggaactcaggctcggactcggtcgtgtaccaagaccggaattgagacccggacctgcacctaaatcttagacacgatcccaaacatagactttgacctagat

SEQ ID NO: 276010 - DNA, 461 bp, Cannabis indica
acgaaatctgctcactttctaccagttaaaacaaccttttcagtggatcaatatgcagatttgtatgtcaaggaattagtaaggttgcacggtgtgccaaaatccatagtttcagatagagatccgaagttcacttcgaagttttagcaaagtttacaacgggtctatgggtaccaaactgaagttcagtacagctttccatacctcagacagatggacagtccgaaaaggacaatccagataatggaagatatgttacgagcctgtgttatggattttgaaggctcttagagtaaatcctaccgttgatggaattttcatacaataacaattaccggagtacgatagggatggctcctatgaactgttgtatgactgaaagtgtagatctcccattcattgggtatgagacaggggtagaggtaaatacctaggtccggattcagtgcaacagaccaatg

SEQ ID NO: 276011 - DNA, 597 bp, Cannabis indica
agccaaggtatgatttatagcaatcacctcttttagtttcttgagttttaagaaaaagaaattttgcatgctttgagtttatgcttgctgtggtttctgtggttaattgttgttgtgttcagaggttaatgcatgtttgtttgagtggattcaagttggttttgttgctagttagttggatttaaccttatgtaaagctttgaactcaaaatcttgaatttcaatggtgaaatgttgaattagctattgtggttgttgtttgtgtttgggtttgttttctagagttatattatggttatatatggtgaattgagcatgttttaatagctagtttgtgggatgagcaagctttgagtttttaaactcaagcttgactcatcaatggtgatttttgttatggtgcatgaagctgtgttttatcgctttgttttttacctataggatgtttagatcaggtctggaaagtttggagtggattggggttgaattgattgagatatggaatttttagtgtttcctgcactgaactggaattccggttcagagaggcctgtaggaaccaaaattccggttggcttccaagatttcctcctagaa

SEQ ID NO: 276012 - DNA, 708 bp, Cannabis indica
gcacaactggaattccggttcctcgcaggaaattttaaaaaatcacacattgctcaaatcaattccaaactataccaaaacttccagacctgttctaaatacccctaggaacaaatccaaagcataaaaaccgagcttctaccacagaaactcatttcaccattggaggttcaagattgagttcaaaactcaaaacttgactaatccctccaaacagccacaaaatcatgcataactcaacctatttcaacataataaaactccagaacacacatttaaacagcagcaacaactacagcaacaaacttcatcatctttctttgaaaactatagttttgaactaaaaactaccaagcttgaaacaaagctactaacatgcatcaaactagctgtaatctactcaaaataacaagattaaacctctgtaaacaacaacaaaatcacagcaacaatatcaacctaaactaagcatgcaaaccatcaaattcttccaaaataaaaccaagaaactaaaagagaagcttgagcaaggattaccttcactaaaataactctaaacttgagaaaaacacttgaattttgcaaagaatcacagccctagcagccccccaaacttggccgaaaagagagagagagacagagaaagagcttgaaattgttacatacacatataaaatgctattttatctctttacttcagccaaaaga

SEQ ID NO: 276013 - DNA, 505 bp, Cannabis indica
tttttgaagatcaaactctttcaaatggacgtcaagagtgcctttctcaatggggtaattcaagaggaagtctatgtcaaacaaccacaggggtttgaagatccacatcatccacaccatgtgtacaagctcaataaagccttatatggactgaagcaggccccacgtgcgtggtatgatagactcacttcatttctcatctctcatggcttcactcgaggtactgcagatagcactctattcattaaacatattgacaaaggaatctttgttgcccaaatatatgtggatgatatcatttttggctcaacttgtgatactgaagtccaaacatttgtcactttaatgactaatgagtttgaaatgagtttaataggtgaccttactttctttctaggactccaaatcaaacaactagatcatggcacattcatttcacagtctaaatatgtcaagtctatgttagataagtttggcttctctcaggtcaagcatgcacacacac

SEQ ID NO: 276014 - DNA, 539 bp, Cannabis indica
tactagaactagccaaagggattaccctttggctagtaacaactaaattatagcattctacttcataaccttcataggatccctattccttacttttacccttttaaaatcaaacataaataaaattttccttttaataccaattattccttaaatattcaaaatattatatactaattatttcattttatctcttaaaaatattacttatttatagactaaaacatgtcaaaatataagtcaaattatttattattttatttatagcgtaaaacatggtatctataatctttattcaacctaaattaaaccaaaattgtattaatatccttaaaacttaagattgcacttttcacattcaaaagtaccattttcctaataccacttcatcatacatttaattaataatattaaattaatattaattaatccaattcggtattatgacataatgcttccttatttattatttaaatagataacctcctaattattataccattcaaattattataaaactattcatattagtatcttcc

SEQ ID NO: 276015 - DNA, 550 bp, Cannabis indica
aaaagagagagatatgctaaacaaaaagcatttaagatcaataacattagtgtaagtagtaatcccagtcatattgatcttcacacatatattgccgagaatacggcaacgtcaagtcaacaacaaacaaaaagactgcgaaatgactccactcacactaccataaatgaagatgaatcttcttgtggagataatgtttctaccaatgtcgattgtgaaactaatttatttgtaaattcatcatcttcgagcaatgtcaatttcaatcaggtttgcatttgacccatattttttttttcaaaactcagctacttcattcacgtgatgaaactccatatgattattttggatgttgtttttgataaatattaatatatataatcagaacccaaatgaatttgctgggggaccaacctacaataaaagagtaacaagacctcgtagcggtaagggacactttaaatttataattaaaatcaatatgttatgtgagttggaatttgatacctaattattattttacaataaaaaggtctccatcttcattcct

SEQ ID NO: 276016 - DNA, 829 bp, Cannabis indica
aggcttaatgctagtcgcgacttctgggcttcaggtcgtcgaaaaaaaaataatttttttttttttcacgcttttcacgattcaattaaaaagaaataatgtctggtactaaactaaaaattgaaaatactaacaaaacaatcaaaacaaaataatacttgggctgcctcccagaagcgctgtgtttatcgtcatgcagctagacgctgagccttggacttcaaagtggcgccaggatcatggcggacttggcttggtcaaactgacctcccaagtagagctttaacctttgtccattgactttgaaagttgttggactttcaccttttaactccaccgctccataaggaaacaccttgaccaccgtaaatggtcccgaccatcttgatttcagctttccaggaaacagtttcagccttgaattgaagagtagcacttgctgtcctggttgaaactctttccgtattagacctttatcgtgccactttttagttctctctttgtatatcttggcgttttcataggcttcgttccgaaactcatctaactcattcagctgtaacagtcttttctcccctgcagcttttagttccatgttaagagtcttcatggcccaaaaagctctatgctctaactccaccggtaaatgacaagcctttccaaacaccaaccgatatggggacatgccaattggtgttttgaaagctgttctgtacgcccacagtgcgtcatccaacttccttgaccaatctttccttgatctttgcactgttttctccagaatcatcttaatctctcggttagagatttcagcttggccattactttg

SEQ ID NO: 276017 - DNA, 523 bp, Cannabis indica
acttccgataaaatactgacaaccaagtttaagagaaactaaaatcaaatattatcctaattctactaaaatttcggcagcataacggctataattgaacgtttccaaaaaatttaaacctattaataacattttcctaacaccattaataaacaaaatttgagaacctttcaaatatgaaactttgacattgataatcatgctactaacacgaacacgttttgagtcaaatataaagacctactaagtataataaatgcattgtcacatacaattagattatacaagataagtgcctaaagtaacaaacaaaacaaatgtcacctaatttcacgaacatgttttgagtcaaatataaagacctactaacacgaacatgttttgagtcaaatatgaatgtgctatgtcacctaatttcttacaactagcgagtaataacctagttatttatgttatgttacttttcctttaacatttatggttttaataataaatttgatccaaattctaccgaaattttggc

SEQ ID NO: 276018 - DNA, 745 bp, Cannabis indica
gcactacactcctctgttagggccactgtctcaaagtcttccatctttcttttctttgacaaaatctccttcatgaatttgacgtagcttggcatttgttcaagagcttctgcaaaaggaatgttgatgtgcagctttctgaatacttcaaggaacttactaaactgcttgtctgtattagtcttgcgcaacctctgaggatagggaatctttatatgatggtcaatactaatagggggagaagtttctttttgctgaagaccatcagtagtcttctgcttttctggtgtaggtgctggttgttcatcttcatcattctctggcttggcttggctcgggccatcataactctttccacttctcagagtaattgctttacagttctccttaggattaacttcagtggtgctcggcaggtttccctgaggacgagttgctatctgagttgctagttgccccatctgagtttgcaagtctttaatggaagatctcgtctctgtcatgaattgcaatagtaaatctgtttgaagaccagaatttccactatagttttgagtctgtggttgcatctgtgactggttctgatttctctgttgatagaacccattatttctacgattacctccttgattaaacccatagttgttgttgttttgagagtaatttccaatggctttcgcttcatccattggcaaatcatccacatctgcctggcactcagaaaagtgatgaagacctccacata

SEQ ID NO: 276019 - DNA, 745 bp, Cannabis indica
gtccttctctcttcttcctctctgtcaaccgacccaccccccacaccacaccaatatctcaaccgacccacccccacgactaaacccagacgccgacgacgacgacccacccacagacgcgaccccacgacgacgactaaacccaccccacgactaaacccacagatgcgaccgaggacgacgactcacccccacgacgcgaccgaaccacccacgacgacccacacagttccacattgatccacgatgatccacggccacccacgaccagcacgaccacgaccacgaaccaccgagggaacccaaattataaccgtaagttcatttctcattaaaaatttgaattttcatagatttggatgcgaatttgtgtatgttcttcagattagattgttttagattgtgtattcgaatttggatggttttctgcatgttcatcagttgtgtctatttgttaaaataatgttatcgatgagatatcgataggatatcgacaaaatgaccattagaaatttctgtgtgttaaagtgtatcgataggatgtcgatagtgtgttgatagaatgtcgacagatgttgaatgaaatttttttgaactggatttagtgtttaaattcattttgtcgaccatatgtcgattgtatgtcgatatgttgtcgacaaaatgtaaattcattgttttaatttgttgtcgacagcatgtcgattgtatgtcgatatgttatcgacactttatgctgttaatt

SEQ ID NO: 276020 - DNA, 797 bp, Cannabis indica
agactctatcatcattcaggagaaatctccgggctaccacccaggtcgcctagttaagagatggccaacagggctaatgtcttcgatcgccttgggaaacaaaaagatgtgaggaaaaatgtcaactaaaagttgttggtggaagcgggatcttctagctgtgtctctttcatacatgcagctaatactctgactggtacgcataccaccacccacggagtaggtagggttgaatttgaaactccgggccttagtcaaggatatggctaagctaaagccaacagagtatgagttggaaagagagcggtgatcaccactctctacatgattgagaacctttgaaattccctccatgtaaaaaaaaatctagtgtggcacctgtacactggtaaagaagacccactgtctcatatacataactttgtgaacttgtaaaagctgtctacaattagtttgcctcgtcccatcaacaataaatcgagcctaatgatttttttgacatcaaacaatagaacggagaatcccccaaggattacatccagagatttttggatgtcgctaccaaagaaaaaaagtcttaatgaagatggaaaagtcatggccttagcaactgaactcaaggagatgagtcctctgtgatcagaccttaaactaaattagtgtacactttgcatgagtttcttgatatagcagactgttaggaaattattttaccaggatcttagatctactcacaagtatgtttattaacaccctaaataagaactttctaaaacgatagaaataaacacatataa

SEQ ID NO: 276021 - DNA, 537 bp, Cannabis indica
ggatcaaacaactaaaatttttatttgaaacctatcccacgggaaaggaaaatcaaaagttataactcgcgtataaaactaaatactaacgaatctcgcgagctaggaaagtactaaacgaggcatcacgacgccttgataaaagtacttgaacctagaaaatgaaaagataatataactattcatacaagcaaattcaaaatatacaaagtgataaaatcattatagtatatttaagtttgcttaaggcaaattgtactgcaatagcgaggcagaattaacaactgctcgaaaataaaaaaaatttggtagatcactaactacttaaacaggaagattacgagcaatgaaaaaacctaaaagtactgtacatttgatcaaaatattgttgtttacattgtgaataaaaatataagcaaacacagttgtattaagttcaaatgaaaatagtacaaggcatttaagataagaaaaaacctaaattaggttacaaacttgtctttacaaaaattcaacaaggggcaaaccattaagtca

SEQ ID NO: 276022 - DNA, 1008 bp, Cannabis indica
ctttgtgtcgactatagaaagctaatcagatgacaattaaaaacaaatatcctctaccgaggattgatgaattatttgatcaacttggtggttcaaagttcttttcaaagattgatttgaggtcaggctaccatcaattgaggattagggaagaagatatccctaagactgctttcaggacacgttatggacactttgagtttttggtaatgccatttgggttaacgaatgcacctgctgcatttatggatcttatgaatagagtctttagacctttcttggataagtttgtggtggtattcattgatgatatcttggtgtattctaagacacgtgaggatcatgctgaacacttgacaatagtattacagacattgagagatcatcaattatacgctaagaaagagaagtgtgaattttggatgactgaagtcaagttcttgggccatgtaatttctcaagatggtatcaccgttgatcctgcaaagatagactctattctacagtgggaaagaccaaagaatgtcactgaagttcgaagttttcttgggttggcaggctactaccgtcgctttgtagagaatttctctcgaattgctatgcctttgacaaagttaacaagaaaagaagtaaagtttatgtgggatgatagttgtgaagaagcttttagagaattgaaggaaagattaacttcggcgcctgttctcactgttcctaatagtgaggaaccatatgtggtattcactgatgcttcaggtactggattaggaggtgtactcatgcaaaatggcaaggtagttgcctatgcttctcgacaattgaaaccacatgagaagaattaccctacgcatgacctagaacttgctgcggtaatctttgtcttgaaaatttggagatgttatttatatggcgtaaagtttgagttatactcagatcataagagcttgaagtatctttttactcaaagggacttgaacttgaggcaaagaagatgggttgagtatatgg

SEQ ID NO: 276023 - DNA, 633 bp, Cannabis indica
aaatagaatggtagttaatagttataatcaagatttactctttgctcaattgctcttctattaatgttactgtacacaagtataaaaccatatgattgatcattcatattgagacttttatagagtaggataggattttggtactaatcttgttttgcttatacagaatcagaacaactttgatcaatctatttctcatttatggtgtaggtttggccatttatggttgggttgggactttaattaggatttattaataataatctcagcttcctttgtagactacagacaaaataaataaccttaatgcactaaatctttttgtattataaataaatctaaaagaaaaataggtgtaactgtaattgtgggcagaaagagttattgtctaatggagttggttgtgtatatttatgtgtataatcgcacaaggacagtacgtacgtagctctatttattttgacttgaggtagttttcttactaatttagaacattataatataaaaacaccattattggtcctttgaagaggttagactagatcaaatgaaaactggttggtagtagtacacttgagtttatttatatacagtaaaacctctattcaagaatacacttgggaccaagaaaat

SEQ ID NO: 276024 - DNA, 563 bp, Cannabis indica
attgagatttatatatctgagaagactataaattaccttagtaaacctgctattgcatagaaattaaaattacgaaaaataatcataataggccatagtcaatagaaacaattgaaatcgaagtcctagtttttattaactgtcaattttcttaaataattgtttcttactagtttcttatttttaattctttctttatttttatttaaccaaatagaagtaaaagtttaattttaatgtacttaactacactccctgtgggatcgacctcactcctggtgagtttactactgaacgatacgtacactttcgtgtgtaaaatttcgcaatagtaggaatgacaagtgaaaatactaaaacatacaatcctaaacaatttccaaggttttcaacgaactgatatcaatgtcccgtttaggcgagagtcaaagctaccatccattgaatagagttgtcagctcatctataatgttaaacattctagcaaccttttattcaatcaagattggaattcagcgttgtcccgtttaggcgagagtcaaggaaattctatcttatgagct

SEQ ID NO: 276025 - DNA, 358 bp, Cannabis indica
cttttgataagctgccatccgtatttgagactcgtcccggagttcttcaacttgatccagagcttcttgaagtaaagcctgattcgtggctagatcgtaagtcactctcctgtgggacgggaataacgtttctaccaggcccataacactcttggcaactcttcgggccagttgtttttgcaggccagcagctttttctttagggtaacctttaggattttattgactgcttctgcttgtccgtttgtttgcggccttgccaccgcggagaagctttttactactccgtgttggttgcagaagtcagtaaattcttcgcaatcaaattgctttccattgtcagagactattttgtgag

SEQ ID NO: 276026 - DNA, 648 bp, Cannabis indica
ccttctattatttcacacgttctgaatatcgatcctaacatccggccagttcaacaaaaatgaaggttgttggataaagagcgagcagtagccttgaaagatgaagttgaaagctgcgcaacaacaacttcataattgaagctttttgcccggcttgggtcgcaaatcctgtactcgtgcccaagctgaacaagaaatggcaagtctgtaattatttcacagaccttaacaaagcatgccctaaagactgttttccacttccaagaatcaatcaactcgtagacgcaacagcagggcacgaaattttaagcttcatggacgcttattcaggctacaatcaaatcaaaatgcatccacaagaccaagaacatacaagtttccgaacagatatgggtctctattgctacaaagtcatgtcgtttggtctaaaaaacactggagctacattgcaaagattggtaaacaagatgtttaaagaccagattgagtgaaatatgggagtgtacgtggatgacatggttgtcaaatccagaaaggctggggggcacatagatgacctggacgaatgcttcaaagtcctcagaaagtacaacatgaaactaaatcccttaaaatgctcctttgcagtcagttcgggaaagtttctag

SEQ ID NO: 276027 - DNA, 558 bp, Cannabis indica
cccagcggagggacaggatggaggcccaacaccaggaggaactaagggctcaaaccgaggctgctgacaaggccaggcgagatctccgggaggccagggaggctttggatgaaatggtcgccaaggtgagatctttagaggaaactcaccaggcggacattgagtccaaggccgctctagctgcggagttgaaggagcttagggatttcaaagaacaatccatcaggaaggccaagagggccgagctcctctctcccgtttcctgcgcccggtgtccgaagcgcttcgatgatggtgtctacatggcttggtccaccaatgatcaaaatatcaagcttactttttatcccaaacccgaggaaatgattgccaaatttcgggaaaagaagaagaagcttgatgccgcgctagaggcacgtattggacctcgccttcctccgcgggctgactgagctgccgtacaactgaccaagaatgaccaagattccacccgtttcttttataagttttttttttttttttatttgtacatatttgctgctgccttagaacaatata

SEQ ID NO: 276028 - DNA, 732 bp, Cannabis indica
ttgaaagaaagattgacaaaaagaacaacactcaaacagcaagaatatcaagattcaaattcaaatatcagaaatacaaactgagaaattctaaaactcttatctgtttcttttcaattttattaaaatgagtaacataaaagttgacattgataaatttgatggtacaggggattacagaatttggagaaggaaaattaggtctcttctagctcaacagaaactactaagggtgctagatgaacctattgaatggccagaaggaacttctaaaatacaacaagaagaatacctagaaactgctactggaattctaatcttcaatctatcagatgcaataataagattggtagataaagaagagactccatcaaagatttggaaaaagctagaagagcaatttcaacagaaatctttgacaaacaagatttatctcaaggaaaggatttttgggttcaaaatgaaccaatccaagtccttagatcaaaatcttgatgagttcttgaggatgcacattgagcttgcaaactcaggggagaatgaggctcttagtgatgaaaaccaagccatcatcatacttaattcattgccagaaacttacagagaagttaaaacagcaattaagtatggaaggacctcaatcactcttgatgaggtcatctctgccttaaaatctaaggacttagagatgaaatcagaaaggaatggtggctctaatggtgaactaaatct

SEQ ID NO: 276029 - DNA, 692 bp, Cannabis indica
atcagaaagtttgaagaagatcagattattcaaggttgccgtgttgctagaaatgctcctcccataactcatatgttgtttgctgatgatagttatcttttttgtcaagcaaatcccaccacagctatcaacatcaagcaaatgcttcactccttcgaaattgcatctgggcaaaaggtgaatgtgactaagtcttctatttttttcagccccaacaatgcaacaccaaaccgtaatgagatttgtaatgttcttggcatgacagaagctactgatggctctctttacttggggctacctaacattataggtagaaagaagactgtgatacttggcttcctcaaaaacaagattataaatcggctcaatagttggaatggcaagttcctatctcgtgcaggcaaagaagttctccttaaatctgttatccaatctcttccaacttatgctatgagtgtcttccttcttccattggaaacttgtcaagagattgagaagcttatggctaacttttggtggaaaacttcaagtgctaaaggtcaaggaatcatatggatgtcttgggatcgtatggcaattcccaaacattctggtggtatgggcttccgccacttacatgattttaatcttgcgatgctggccaaacaagggtggcggtttcttgtctcacccacatcccttgccagccgtgt

SEQ ID NO: 276030 - DNA, 73 bp, Cannabis indica
ataatgaaaatatcaaagggaaaaccctacaaaagtggccggccctagacatgtggatttgggcctcactttt

SEQ ID NO: 276031 - DNA, 595 bp, Cannabis indica
cggtcctagtcttgttctagggtctacgttcggcgattcttgttcaggttctatatttgggtcccaggtctaagtctaggttggggtttggttcttcgtctgggttctcgtcctagtctgggacccgcaccctgaacttgaacctaggacccagctcgtgacccggcaacaaaaatggaaccagactgggacccgagatcgggatccggatctggacccagggcttggacaaaacccgcagtcggtgtctggatttgggaccaagccctgaacccgaaccctgacagggaccccaacccacacccagacgtgaacccagtcccaaacccaaaagtggacccgaacccgtaccctgtacaaaaaattggaaccaaaaccggaagttgtccgggactggaaccaggacttggactgggaatcataactgaaattggacctagatccagaatcgtaactggacgaggacccggactccaaataagacatggacccgaattgggagccggaaccgaatcccaacccaaacctggactggggagccgaacccgaacctgaactcagacccaaacatggaaccagactagggacacagaac

SEQ ID NO: 276032 - DNA, 421 bp, Cannabis indica
ttgattgattgaaatttaagtttaaaaaaatagaaaaataagtatgggaaaaaataagtatgaatcattatgtcaaaaaatgcaggaggaaatatggactccattttacacaagattaaaataagatcttgttgagcaacctccatgtctttaacatttatagtccttgaacaaatttgtctgaaaaagttacacagttcagagatggtggtcgatatagcgttcgggagaaacttgcgaacaccaacagacagtaatcgttgcattattacatgacagtcgtgtgactttaatccgatgacatttgttaaattttctatttactttttttttccaaattcgaacaaaagccatcgggaaatttcacatccttaataaatttacaaaatcggatcctgtcatcaggtttaagcacgtaagg

SEQ ID NO: 276033 - DNA, 631 bp, Cannabis indica
cctgacgcaggaggggtaggagccctgccacatactggagtcctaactgattccacatacatctaactgcgtcctcagcttgcactgccttctccactatcacagcataggtggtcttgtcgtcggtagtaaccataaggtcatacttgatcttcacattaaatccatccagatatttttctttcttactgaaatcggtcggcacaatttccgaggctaacctcgccaaccgatcaaactgagtagtatattccgtcacgctcacgttctcacactgggtcaggtgagcgaactctttcctcttggcgcttctgaccgcctcattatagtatttggcgttgaagagttcctgagacctttcccaggtcatggtggtgacgtcgtgaatctaagacaccatgtcccaccagaccagagcgtcttcttgaaactggaaagtggcactcaccactctgtcgttcccggtgacacccataaaattcaaaattttggtgatcaccgatagccactgttcggccttcgccacatctggacctcccagaaagaccggaggtacttgcttccggaaccgttcatacaaaggttccaatcacctggccgccaccactaactcggcctgagcaacaggggc

SEQ ID NO: 276034 - DNA, 467 bp, Cannabis indica
gtggtgttcgggcaaagcagtacgctcaggagcctatgaatcctgaagatgaagctgaggctgaggctgaggctgaggctgaggctgaggctgagcaggtggctcctttgaggaggaagaagaaactcccagccacgcccaggcccgtggaacacgacattcgcataagggagcccatttcacttgttcggccatcccatccttatgctggaaaagggaaggccgttatggttgagataaagtagatgtcaggtgatgatggacttctgactttctaggcggacagtcactctgcgctttgcttcttttttcagcttcttggcttccatactttgtattttttgttggtttttgctaaccatgctttttttgctttgtgcagacatgtctcggcagatgatgtgttggtgggcggagtcttgcaggagcttaccagggtttgtcttttcttttcgacacttcccttt

SEQ ID NO: 276035 - DNA, 701 bp, Cannabis indica
atacgcctcctcccatgcggcattaattgcgagatgactgttcagatgaaacctgacacctcccggagatgcttggttgccatcttgctctccgggagcatacgagatttacattccttctccgggaggcatgtctaaggtaatcctgcgctttaggaagacttggctattttattcaaatgctaaaccctttccatccacgtgtcaccattcggttggtccacgtatattggacgaaatcaggggcaacatttacccccaagccttgtttaattgtgaagtgaacaaggcttgcttagatgcctctggttgcctcctcggtttcttggcacgtgctttgggcgcgtgatggtgtatttaatgaccatcattactgcagttattcacttttgcaggcgtcgattcgttccttgtccatttattgatacgacgcattaatgggtgtcagacgggtactcaagcatttccaccaccttgatgatgattcaaatcaaccgttggatccggggaattcgaatcgattgccttcccagccgttcgatggtggctgatcacagctgtctcacgcatgttctggcctataaaagccaaccttcttacttcatttggttactttcagcatttcaccaaattttctcaagttttccaaagagaaaagaaacctttaaacaccatagatttcttactcattttccttcgtc

SEQ ID NO: 276036 - DNA, 534 bp, Cannabis indica
acatacttgtgagtatatctaagatcctggtaaaataatttccaacacctacgacttctatctgaggtgcacgatggattctgtggagatcatgtcgccaggcagagtttatctaagaaaattctaaggcaaggttatttctagccgacaatgattgaagattcaaaggcctatgttaagaaatgtgataaatgctagagatttttaaagatacctcgagcttcgcccaacgagttaacttggatgcaaagtctgtggccttttgccatctcgggaattgacctgatcggacaattacccaaaggcaagggggagtgcagtacgcagtggaagcggttgattacttcactaagtggacggaagccaaacctcacgcaaccatcacatctaagaaagttcaagactttgttgtgaagaacataatctgccagttcagattcccgtacaaaatagtttcggacaatggcaagcagtttgatagccagtccttcactaatttttgtgcgaaccatggtatcatcaaaagtttctctg

SEQ ID NO: 276037 - DNA, 563 bp, Cannabis indica
actggaactaggacttggaccttgaatcataactgaaattggacatagactccacgaaccgtaaccagacaacggacccggactccaaatcagacctagacccgaattgggagacagacccggatccccacccaaacctggactcgggacccgaacccgaacttgaaattagacccaatcatggaaccagactagggaaacagaaccagggtcatgacctagaaccgcaccacattcttgatcccgaacccaaactcagaaatggaacatgggacgtgaaccagaaccagaccgagacccgtgatagtgatccagatattggtattcgggtaaaggggcctggaacagactagtagtcggtgtctagatttgggacttagattaggaccaaaaccaagactaagaaccaaacccgaacccagacgtagacctgagacctaaaattagaacctgaacaagaatcgcccaacaaggacacttagtcagaccagaactcgaactccgatctgaactcaaacttaaactcgaactaagaatcgcaaatggaaccaaacaaggaacaa

SEQ ID NO: 276038 - DNA, 503 bp, Cannabis indica
ggaaagagttcgcccacctgacccagcgagagaatatgagcatgacggaatatattactcagttcaaccggttggcgaggttagcctcgggatttgtgccaaccgatttcagtaagaaagaaaaatatctggatggacttaatgtgaagatcaagtatgaccttatgatcactaccgacgataagaccatctatgctgagatggcggagaaagcatggtgagctgagggcgcagttagatgtatgtggaatcagttaggactccggaatgtggcggggctcctacccctcctgcgtcaggtttcagcaggggaggtagtggttcggccatggactggaggaggaatcatccactgcatccggtggctcgaggcagaacaagaggttccgagggaaccagaatcaagacgatcgtcagggtagtgttaagacccgttattcctactggagtgtcttattagtaagaggcattctccgggtgagtgcttgggtcaaggttttttt

SEQ ID NO: 276039 - DNA, 444 bp, Cannabis indica
agcaagtatacaatatacgaagaacttacatgaagtttgaaggctgggggttggtgttgatcgccggtagaacgaagactggcaacatcgaaggaataaaagcaagaaatctatggtgtttgaagcttcttttctctctgagaaaactctaagaaaatttggtaaaatgctgaaagtaaccaaatgaagtaagaaggctggcttttataggccagaacaggtgtgagacagctgtgatcaaccaccatcgtacggtcaggatggcaatcgattcgaattctacagatccaacggttggattaaacactcatcaaggcggtaggaaacgtttgagtacccgtctgacacccatttaatgcgccgtatcaataaatggacagaaaacgaatcgttgtctgaaaaaggcaaataactgcagtgatgatggtcattaatatgtcacca

SEQ ID NO: 276040 - DNA, 741 bp, Cannabis indica
tttgttctttttcatggaatctatttctgaatccatgccggttgaccatcgtttccgttctggacttgccattgcatgtttataggttaatgggtcgtcatcaataccgtcaccaacgaccatattgatttcaccatccaagccataacgagatggtttagtagaaaccctcccactacgacgaggagcggtgatcttctgaacaagaacttgagtggtagttctctgggttgtgtcaacttgtaaaggttcaaccgaggaagtgggattatcctcaacttgagtagaagagaatgaaacattagaaggcttatatctgcaagcatttcctccaatactactttactttgtggtttgaaattcttaatatagtcatcttcaaggaaagtggcatttgtggaaacaaacactttatcatccttgcgactataaaatagtccacccctagtctctttagaatttccaacaaacatgcaaacctcagttcgcttttcaagtttgccatctttctttcttaagacatgagcagggcacccctagattctataatggcgtaaactaggtgtacgaccattccatagttctaaaggtgtcttagggactgatttagatggaacaacatttaaaatgtcggtcgccatctgaattgcatatccctagaaggacgtaggtagagttgagtagctaagcatggacctaaccatttccaaaagcgtgcgatttcttctttctgcaactcca

SEQ ID NO: 276041 - DNA, 513 bp, Cannabis indica
aattaaaaagttcagtatttagtgagatttgcgtatcaggtcttagaacataaagcccttgttccatgttagcaacacatatatgaaatccattacgagaaattgaacaattagaactcgaaaaattcaatatataaaattgtgtttgtaaacatgaaacactaatcaagtttctactaaagtttggaataaataaaacattgtgtaaaagtaaaaatctttttgtatgaaacttgatacgggtcgttcctctagctttgaccgatactaactcgccatttccaacttttagctttaactcatctgggtgaagattttcccaagtttcaagcagctgcaatgaagaacatacatggttagtagacccagaatcaacaatccatgtggatttgtcattctctaaaacacatgattcaaagacaaaagcatcaccttcgtttgaattgtttagaagcctgggacattgttcttcttgatgtcccttttcattacaattcgcacatagaacatgat

SEQ ID NO: 276042 - DNA, 825 bp, Cannabis indica
tgaaatatcatttataggaagctaagtgttttaaggataaatatgttgaggggtgaaatggtaaatttatccctactcagtgtaaatcatctatagaggatctttggttattgagattaaaatgatggttaaatgtttatagtgtatctatatcgtggaacatatagagcgttctatataactgagagtgtaattccaagttctatggtgaatgcaacaaggaattaataagttagggaatttacttggtaaattctagatgtgcttattggaagctcggttgtataggcccatggtctcatactagttgagacaatactgcttgtaagactgagttaattgattttaattaatcaattataattctaaaatgagattgtgtttaatttatgaattttcactaagctaagggttaattgtgaagaaaagagattctagggtttatttcttaattaagagactttattaagtctaattgataaatatattaaatggcaaatttatttgataattaattttaattattaagtaaattgttttggcatttaagtggttgaattggaaaaatagaatttttgagaaaataagataaatagttaataaaatagaaaagttacaaagtgggggcccacatccatggccggccacttatgacttattttattatttattttataaattttttaatgccaaataattcaaacctaaacctagttggattcctataaatagatagtgatggcctcaaatttaaagatgatgaacacacttgccttcagtaaaaaaaatttgagccttcttttctaccttattcaaacccttctt

SEQ ID NO: 276043 - DNA, 680 bp, Cannabis indica
atttgtgagagaacaagactttttgagtacgagataggggtaacaatcgatgcagcggactggatgactgaaattctagaggaactaaaaaagaaaactggacagcaaagggttgctttcaaaagattcttcagaaacagcagtggaagttattttatggaatgctttactaactctaatggagctttcttgaagatctcaaccttgaagaataacaaagtcagaatggtgattattccagaagaaacagaagctaaagggtggtctgatctatataattgcctctctggtgtacttaaaaggaagccaggaaacgctcatgatggagtaaaacagcaaaaagaagtgaagataggagaatgcaggatgaactctcaatcatgggctaatatcgtcaaaagatcggggcagcatgttactaaaccaatggggggggaatgtggtgaaacaaatggagaaaccggcattgaaaattcagcacaacaaggatgctgcggttcgaaacgaggggaaaagtggaatggagagaattatatccagaaatcaacctcgggtttaaaccaaaaaatctatatcctgagaagagattttatcaacctaaattctatgaatatatgtgttcaaaagctcaacctaaagattggagtttggcaatttccttgctagggacaacactcacg

SEQ ID NO: 276044 - DNA, 830 bp, Cannabis indica
tacccagtagggacacctaaggttggactcatctacaagcaacaaaagttcagcaccaacatagaaggatacagcgatgccgactatgccggggacagagacagcagaaagtctacttcatcttacatgtttctactaggaggaaactgtgtgagttggaaagcccaactccaacctgtggttgcactttcaacaacagaatcggagtacatatcaaccacagaagctattaaagaagccatatggatgaaaggactcttgacagagatcaagttacttaaagaggttcctagagtgtactcagacagtcaaagttgtgtacacttatgtaggaaccctgtgttccatgaccgaactaaacatatagagattaaataccactttataagggacaaggtgactcaaggtgagatacaagtggaaaaagttcctactgaggagaacccagcagatatgggaactaaggtggtgactctcaacaagttcaaacattgtatgaacctgttgggagttgacacaggatggtaaatggacacatactcaagcaatgaccctcaaagacaacaaaaagtaaataaagcaaaggcagaaacttttttggactgctagtatggaaatttaggtggaaattgttggataaattcccatactactatcacataaataaagttacaaggaaaataaattagacctttttacaaagcctcaacagaccattataactcatagagttgtcggttctgttttcataggcctaggtctttcttttctttacaataaaaggaagaaaataaaatatctcaagagtctaacaaactttcagctttaca

SEQ ID NO: 276045 - DNA, 643 bp, Cannabis indica
tcattatattataaaaccagttcaatttttaaattataatcggtttttgagttattgtgtgttatttgtttttagtcattttgttatagaaccgagtctattttaatttatgtcatatggtttttttatttaaaattcaaaaattaattcttgaattatttattttagaaactagtttttaatttagttattttgagaactgattttttatttagttaatttaaggaaccagatttttattgatttgttttatttaactggtttttgtgtgtgagtttttatcttagttgctttacgaaactagttttttttttctcaaatttttaacttgttgataaatataaccagtttttttatattatatttttagttattgtgtgttatttattttgttatggagctggttcttttcatgtttatgcctcagtatttttttaaattgatcctcacatttaaaaaaaaaaaataatcggttttaatgaggtattatgtgttaagatgtagaactagttttgtttttaatttatgtttcagtgttttaggaactgatttcccctttattttttaattgtaatcggtttaaattattgtgttacttgtttgtattcattatgttatataaccagttctatttttagttata

SEQ ID NO: 276046 - DNA, 526 bp, Cannabis indica
cattcttttgttttgctctttttgggctgtgatttcagcttcgtgatcaacaaccttttgtctcgagaacactagttttgtgtaactaccttcgtcataggcgtcgtacttgtcgaagtttcctttgtattcgtcgttgttggttcctcttcctacctcagagtccacgttaactcttgaggccacttcctcatcttccggatcttgggcgtcttgaggaggacggggctggcgtgtgttgcgagtctccaccattgttgttttagcttataaggttgttgtctatctgtagacgcttccttcagctctcaatgaaagcaccaaaatattgaccgaggttttcggcaaccgatttaataatatataagaaagttgtaggaagtttaatgcatgagatttttacgtggttggggcattatgagccttagtccacaagtcttttgtatttatgagagtatttattacagataatattcttggtagtttttctctctttggttcttatgaaacccaaaattctcgaccc

SEQ ID NO: 276047 - DNA, 961 bp, Cannabis indica
agccttagtccacgagtctgtatatttatgattgtatttaatacagagaatgttcttggtgagtatttactcttcttgcacttatgcaacccagaattctcgacccccattaatgagctttgagggggtatttatagtgttttcgtggggtgatccccagaattatagtacatgtatttctgtaactatcaataaagttgtgtattcccaatgaatataccatgggtaatgcatggtcaaatccctaggtgccgtagggattttatgagggctgtccttattcccttttgactgatgtgattcttcacagagtagccgtcattagactttattggtcatagccttgtaggtgcagatcgggggttgtgtcgtcagactttattgcgtgtggcagttccaacacgcctcctcccatgcaacattaaatgcgagatgactgctcagaggaagcctgacaccacccggagatgctttgatgctatcttgctctccgggagcatataaaaccttgcatgccttctccgggaggcatatccaagataatgcctttcttcacaaagacttagctattaatttaagtgctaaaccctttgtgtccacgtgtccttgtctggttggtccacgtacattgggcaaaatcaggggcaacatttaccccccaagccttgtttaattgtgaaatgaacaaggcttgcttagatgcatccggttggctcctcggtttcctggcacgtgctttgggcgcgtggaggtgtatttaatgatcaccattactgaaacgattcactttttgcaggcgtcgattcgattcttgtccattaattgatacggcgcattaatgggtgtcagacggacactcaagcgtttccaccgccttgatgacgaaccaattcagccgttggatcctgggaattcgaatcgtgtgccttcccaaccgttcgattggtagatgatcgcgcct

SEQ ID NO: 276048 - DNA, 582 bp, Cannabis indica
atttaatgatcaccattactgaattcactttttgcaggcgtcgattcgattcttgtccattaattgatacggcgcattaatgggtgtcagacggacactcaagcgtttccaccgccttgatgacgaaccaattcagccgttggatcctgggaattcgaatcgtgtgccttcccaaccgttcgattggtagatgatcgcgcctgttccacatgcgttttggcctataaaagccaccattctcacttcatttggttactttcagactttcaccaaattttttcaagattttgagagaaagaaaccttcgaatcagaaaaccctcaaacaccatagatttcttactgatcttccttcgccgttgtcaatcaactttttaccgccgatcaacaacaacgcccagttctcaagctttatgtaagttcttcgcatctcgtactttagtttattgttcgtgcacatcgcatgctttactgttcatctgctttttctgggtttgatgtttgaattttctgggaatttctgtcttgagtttctgtgtaatacgttagattcctcttttctggtgttcgagttacttctatt

SEQ ID NO: 276049 - DNA, 765 bp, Cannabis indica
tttacttggtaaattctagaactgcttattggaagcttgattatataggctcatggttcccacactagttgagataatactggttgtagagtcagttaattagttttaattaatcaattataattctaaaattagattatgtcttatttataaattttcactaagcaatggcttaattgtgaagaaaagaggttgtggggtttgtttgttaattgagaaactttgtaaggtctaattaataaataagttaaatagtaattttatttgataattaattataattattaaataaatagttttgacatttaaaagattaaaattaaaaaaatatatagtattagtgaaagaaaagataaattgttgaataaaatggcaaaattgtaactagtgtggcctattgtatggccggccacttaagtgtatttttagccctttttttttgtcttttttaattccacataatttaaatctaacccaagagaaatcctatataaggaataagatggctcttgttgacctcaaaaagtgatcaaccgacagcgggatcgtatagatctgatgcttgccacgtgtttgcacaaatgaataaaaatcaataaacaaaaagatttgttatagaggttcgacccccttgtgatagcgggtaatgacccactccccttttagttgtatttataccgagagaaatacgatccaaatcactataggtgggatctactatagcacccttaggattacaaggtatgaatcaatactggcaaaact

SEQ ID NO: 276050 - DNA, 693 bp, Cannabis indica
ataatacacataaattgtaacaaatgaggagttacaaatctgaaatagattgtaacctaaggatcaaaaactgataaatatgtaattatgtgagttgttacatatgggagttatggaattaatgagataagcttctggctgttagaaattattacaatactcaattatatcatttaaatgggtattgggacgttgggaaatgattcaactcggagaggagttacattttgagttctcaggaaacacctgtttaatagttgtttgtatgttgttttatggttgtgtttcgaacatctagaaccaaattttttaaaacgttcataaacgtatacaaattaattgagcatgtttccagctctcttgtaacaccctaactagcataggcgtgttacgtgatttttaaacgtactgtgcagctcgttgctaatcaacgaggtttatggaaatcgtgattaattaaattttttgcttatttaattaaatacttataacatttcatacaaaatactttgggatcccatttacaaactttacaaaaagtttactgttcattacaaaatacttgtcgcccagcgactaactacaaaagccctgatgtcctgaggatcgtacactccaggcctaaccgccccgacatgtacaaccttcatctgctcgtcctcacggttcctcagctttggccttgcccttacc

SEQ ID NO: 276051 - DNA, 589 bp, Cannabis indica
agagtacattacagcactgtttttgatcacgtgctcataaattagaagcacaattaaatatattagcgaaatagtgactaacatccaaatttcagagttgacgaaaaatctgcaactgaatgaggtaaagactactacaatatttactttataaaacttttgtttcaatatcttactattattaacaccatttgatttggatgtagaaaaaatatttttggattgaggcggcaataaaaataactgatactgtccagagtttttattacatgtcatgtgacgcatgtcataaaaaaatagatttatacaatcgcaatgaaaaaattatatgtgacaagccaacatgcggccaggaaggatttcctacaccacggtatattacaaaaaacatatgatgttattgaaattaagttaaaataataataataaaaaaagatactaacaatcttattatgcattttacagtgctatagcatatgttgaacttgatgacaatacaaagagcctatctgctgtcatgttcgcagatattgtggaaaaaatattttcgtgtactgctgcccaactaatgaaatatactgcagatgtg

SEQ ID NO: 276052 - DNA, 1497 bp, Cannabis indica
atccctagaccgcattaaaattatctcaaggtactagcttaccgagtcttgttaaattatgccttaagcgcataattcataatcccaatatatacatatatccgacatggcatagtattacacaacatatatcactagggtaataaccctaggctattaaaccgctcatgttagggtaataaccctaatcccggttgcaattactcacatatatcatattcaacataagcgccaccgcgcatactctacgtgcaaactactgtcttacatgttgtcctgcaataacagagattccaaacccctgggtgctcctgatcaggtgccggtaatcctagtcacacaacctgggatttcacaactagggttaatccctaattccactttcataaaatataatcatggcattcaaaatacagataatcatatagatctcagaacgagctttccaacgatataaagaacgtccaaaacggagtcctgagtcaaaagttatggccaaaacaaaatcgggaaaaagatggctctctgctaggttttatggccgcggcgaccataaatctggccgcggccactgggttcgaaaaacccagaaaaccagattttatggtctaaacatgcccactttaccatatattcgaaccttaatcaaaccatacctaaaattaacttcttacagataaaaatcatcacaatagagagctaacaacatcaattccaacattaatcaacaacatccaaccaaagctccaaagcttaagctacatctcaagcaaatttccattaacaagaacttgaactccaacttcaaacaataaatttcagagctcaacaacaaaaaattacactaatcaaatcctctaatttctgtccaaacctaacccatacaaacttatgaatttaaagcttaaagcatgctcaagacaaccccaacaaccaagaacatgcatcacaaattcaataccacaaccacaacatattttcatgctcttcaacaattaatttcagcagtaaatctcagattaaaaccagagaaagttacctcaaactcaatcagagaacaagcgcaaaaatctacaaactcaaagcttcaattcaaggccaattccaagcaatttcttcaaaaatcaaaattgaaaaagaaaagggtttgagagagagagaggggtcggccaagagagaaacacaaccagaattttcttttcatttatccaaaaattcaatcttttatcatatgtaatttaaaggtcaaaagaccaaattgccccctagggccaaataaagcctaagcataaaccaagggcaaaaatgtcctctcacacccattaaaactcaaataattttcagatttctcattatcaaataaaatgccaaatatttcaatccaatttgcatttcgggcctgaacccggttcggcccgaaatacccggttgtgactatagcgcgccaacctgtcagaacacacctgaaaagacaacacaggcatactatataataat

SEQ ID NO: 276053 - DNA, 547 bp, Cannabis indica
ttagtgaaatggtgcactattagagatgctttcacgagaattgttaaaagcaaaatatatcgatcgagtctctacatattttaatttagaatactgtattggacactagtggcacctaaaatcttctagacatgccatcttgtaactagccggttagtggtactccttaaaaattattatattaaattatatgagacttgatacttaattgcactaataacaatattaacatgttggagtatgcttagacaccactagtgtctttttcgtatttctctttaatttaataatttatatacaaaattactagaataacactctaatcaaggtcgaccttaagattgagtaggccttaagaaaataaaaattattaaacccttctatttgaaaaatatatgatatttttgaaaaatatgtatatttttaaagagaaaatatttttttgagcccttaggccgagtgagtcttagttaggcgcgagcttagtcttgtgatagtcagtagtcccgtgatccgtaaggggaaatatcgggtaagctgtacaatc

SEQ ID NO: 276054 - DNA, 92 bp, Cannabis indica
tctctctctcttcctcattgagatttcaaaatacttagtgtatgagtaggtgaagaaagactttcagcaagtaaggagtttcagcaccaaag

SEQ ID NO: 276055 - DNA, 1070 bp, Cannabis indica
tgcttatggtataatatagcctaaataacttttcatctacctattacctaagccaatacattacaaccttgaaagtccttttgattccgaacaaggatttgttgacattagtggagaaaggtaagtcatgcaagcatattgatcattagattgtggaaagttagaaagagtagaattgatatgatgtttttcaaatattgaagttaatttgcatctatacattatttttcaaagtaagcatccgaattaattttagagttttgagattgaaattctggtttaaataattgattgaagtttcacaggttgcagcaacagtttgattgtctaaaggcttagttaattatgtgttagtttgtattttttttctttgtcttagtttttagtcttactcgagggcgagtaaggatttagtttgggggaatttgttaggctatttttagcctaagtttcgggtcacattttatagttgtttttcttctttattattatttttggaatagaattacgcttgttttctttgatttcaggtttctacacttggaatgtataaattggacaaatttcggaaaacagtgatctataaaatagaggaaattttgaaagagaaaaaaagctaaaacttcaagcctaaattcgactatattctaatcaaattttggataaagtcaaaacataaaagttttagatctctttttttcctttccaacgcatcttgaatcagctcatttggagttcgtatgagaaagttatgctaattttactgaaagaggtcaaagcagaaaaaattgggtccagtggccgcggcgagaccacttttggccgcggcgggggactacagaaagcccgttttttcacttttctacagccgccgcggcgaggatattgcccgccgcggcgccgacttcgtacaggtcaaggataacttcgtcttttctcgtttttgggctgaaaaactctatttaaaggaaagagggtcgcaaattaaagaggggagaccatatggaaccctaaaaacacaagaagaaggctcttggagcgagcatgggcgatctgcaacaatcctccat

SEQ ID NO: 276056 - DNA, 557 bp, Cannabis indica
ttctgtttctttattgatgttaaataaaatggattacattgaaatggagttttatttatggcataaaaccaaacacttaccatgttataaatcaaataaattctcatataatgaactatataataatataattcctcaattattcataattaactcattagggttttgctaatccatttcttaaatccagggtattacaattaccccctccttatagaaattttgtcctgaaatttacctaaacaactacagatatttctgctgcatatccgtctcgagttcccaggttgcctcttctactttactatttctccacaatactttgaccagtgcaactgtcttgcttctcaagactttttcctaatctatcaagtctctgcaccggttgttcctcatatgagaagtctggctgaagttccaatgcttcataactcagagtgtgggacgagtctgagatatacctccgaagcattgaaacatgaaacacatcatgtacagctgccagcgctgggggcatagccagcctgtatgccacttgccctatcctctcaaggatt

SEQ ID NO: 276057 - DNA, 637 bp, Cannabis indica
ttagtattttggggacgggttttagacattgggaatgtcgggaatggccgggaatttagaatgtcccaaaaatacccctttagtatgatttttgtgattttatggtggaggggcaaaatggtctttttgccccattagtgttttgtcttatatgagtttattaaatggaaaaaataaatgtttatttttattatgttggctgaaataaatgatttatatggcttatattcctcttttctcaagctttttacacttagtcaaaaattagaaagtttaaaaaatagaaagctctctctcttttcctcttgcatttcggctgagacttggggttcaaagctgggatttttggtagagattcaagccctaatttgctactctagagatctcttgttgtggtatgtgttccctagttccttctctttaaatttcttgagaaaaatgtgaaaaaaaatgagatgcatgcatgatttctagttgagtttgctgctgtgtttttatggttaaattgtgtgattcaaagtatgtttatgtgatgttaattgagtggtttgaagcatgctagatagggtgttcaaagctttgttgtttttatgtaaaatatgtgatttttggatgaaatgctatgatatgtttctgt

SEQ ID NO: 276058 - DNA, 803 bp, Cannabis indica
cattgttctaaaagaccactagatatgttcatgttgatttatggggttctcacaaggttggaactcactcaagtactaacagggatgaccttgctgagttggagatcaacactgacaagattgaagtctccattgatttaccccacacaccagaagcaaggacatctcttgaggtggaaacacagggtgcagacacaactgaggctggtacagatacagctgaggtggaaaccagtcaagatgatcaaccagatttgaccaactatcaattggctagagacaggtcaaggagagaaattagacctcccagtaggtatgctgaagctgatttgatagcctatgccctggctgtgatacaatctgagagtgaacctgaaccaactacctatgaagaagcaattgcatgcaaatcaaagaagaaatggcttgctgcaatgggagaagagatgcattccttgaagaagaatagaacttggattctggtgccaagaccaaaagacaagaaagttgtctcctgcagatggttgttcaaagaaaaagagggaatgtcagagggtgaaccacctagatataaagctagattggtagctaagggattcacacaggttgagggagttgattacacagatatcttctcacctgttgtgaagtacaagaccattagaatgatgttagccattgctgcacacaatgacttggaagttgagcagttggatgtcaaaactgccttcttaaatggttttctggatgaagagatattcatggaacaaccacctggttttcaggtggaaaatggcaaaact

SEQ ID NO: 276059 - DNA, 671 bp, Cannabis indica
aggggcatgtgttatagtgagatttctctcacttagaaactcaagaccagacccctgtttagaggacacgtatactcagatttccaaagaaaactgagatgtccacgagggactcctcgaagttttaaacctcacttaggatagaatcagcgagagacagcgagcatgaccaaagtctaatcgcattcgagacgagagagtagctcgcatatatcgaattatatgcgattattctccccgtgtccatgtataaaccaggagaccgactttgtataaatacgagttggacctaaggaccctgcagccttgacaaaccaatatagactcacatgtctaggttctattagctcatcatgcgatgtccacaaaaggcaactatctaaggacgcagacatcctaaacataatgataaacctgcgagtttaacatcagaacgtgaacaagtcaactcgcagatttggaagacgcatacgttgatgaacttagtaactgtcgttcatttattaatgttaacgttgtttagtttaattattgtaattcaatgtgtaaaaacaaattgacaatgaatgcaatccttctataaccgatcggacacctgctttgtatataaaggggtgatccaccgtgaaatggcacctaagaaactcttgctacagtggactaagaagacc

SEQ ID NO: 276060 - DNA, 651 bp, Cannabis indica
attagaacaacaaaaggttatcagcagttactttatattatccacatgttgtaaatatgaaacttggggattctccacgtttcataaacggttacttagaaaagatcaaaggagaataattcttattccttgaatccctataaatagggacaaaacctaagggaaaagggatcaatcatattgggaagaaaagaccctgtaagattgagtgaatattcacactatttcctctgtaatctaagtacattaccaagaaatactcaaaaataataatgactcgtggagtatgtagattttaactacaaaaccacgtaaaaactcttaatgtttcatatatatttatgaattataaatagttaatttttatttacaaggcttcatttattgttaacaaaaattttagtcaaatagtttggtgctttcattgagagcctttaataaaaaaaaaaaaaaaaaaaaaaaaaaaaaaaacttagaaacacatcaccccttgtttcatttcatcatggaaagtactcaacatgacgaaccagtcatggaagaagaggcaacacatcgaccaggaaaagagcctcggggagcacaaactcagactaaccgaggaaggggtccgtactgagaggaactctgagagaagtgaccctgaggaag

SEQ ID NO: 276061 - DNA, 695 bp, Cannabis indica
agacctaaacccgaaccgagactaggactcgaatccgaacctagactgggatccaaacccacaaaataatcagcacctggacccaaaatcaggatagggacctgggaaacagaactaggaccgagacctagtacccgacccaaagccgaacttgaacctaggacccagctcgtgacgcggcaccagaaatggaacaagactaggaccccagatagggattcggatctagacccagggcttggacaaaacccgtatttggtgtctgggacccatcctggacccgaaccctgacaaggacccgaacccatacccgaaccataactgaaattggacctacatccagaaccgtaacaggaccaggacctagactccaaatcagacctagacccgaattgggagccggaaacggatcccaacccaaacctagactcgggaccgaaactcgaacatgaactcagacaaaaacatggaaccagactagggacacgataaaagggtcgggacatagaactgcaccccaatctcgatcccgaaccaaaactcagaaaagggatctgggaccttaaccagaaccagaccgagacccgtgacagtgatccagatcttgactcgggattcgggtaatggcgcctggaacagacaagtagtcggtgtctagatctgggactcaaactaggaccagaacccagacgaag

SEQ ID NO: 276062 - DNA, 485 bp, Cannabis indica
tcttttgattaaagctcattaattaaaataatgtatttttaattaatcatttattttaattcatatattttaataatgaaaattaattaatttaaagttggtccaaaattaattaaaaattaattttcaactttaatttaattttcgaaaattattatataataatatataaaatttcaaaaaatttaaaatataataaaataaatacttgaaaaatatctaatttaagttgttctaaaataacaaaatattcaacttaaattatttttcaaaatttaattaaataacaaattaagttactaaccacttaatttgaaaaatattccattttaagttgatccaaagttaacaaactttcaacttaaagcaatattccaagaatctctcaataactaattcctagaattcctcaacttaattttgaatttcaaaaatattcaaattcaagttgattcaaaaattagttataagtaactaatttacaa

SEQ ID NO: 276063 - DNA, 691 bp, Cannabis indica
taagccatggccggccacctttgcaggttttaccatttaatattttcattattttaatgccaaataattcaaacctaaccctatgtggcatgctataaatagatagtgatggctttaggaaaaagtgacttttgcatcttgtttccttcagagaaaaacctgagtcatcacactaaacctagccgccactctcctttcttcttcttcattgaatgtttcaaacccacttagtgatagagtagtgcccacagacagcaagtagtacctcaatcatagtgaggaagatcgtgaagaaagaaattcaacaagaaggacattcgggctcagatcaatataatactctgctacagaaaggatacaagtgttagagatctgagtggaaggagacatattcttccactgcacccaatgtaaggtttctcatactttatatgtgtttatttataatcgttttagaagttcatatttagggtgttaatcaacatacttgtgagtagatctaagatcctggtaaaataatttccaacaatggacacggggcgaggcgcaggtacatgcgcgtgaggcaaggcagggcgaggcgaggcacgcggtgcaggcgcggggcgaggcgaggcacggggacagaggcacgggcgcgggaggaggtgtgggcgcgttaatgactccaaatattacacttagtaatctt

SEQ ID NO: 276064 - DNA, 425 bp, Cannabis indica
cctgacgatcgtcttgattctggttccctcggaacctcttgttctgcctcgagccaccggatgcagtggatgatttcctcctccagtccatggccgaaccactacctcccctgctgaaacctgacgcaggaggggtaggagccccgccacattccggagtcctaactgattccacatacatctaacagcgccctcagctcaccatgctttctccgccatctcagcatagatggtcttatcgtcggtagtgatcacaaggtcatacttgatcttcacatcaagtccatcaagatatttttctttcttaccgaaatcggttggcacgaaactcgaggctaacctcgccaaccggttgaactgagtaatatcttccgtcatgctcatattctctcgctgggtcaggtgggcgaactctttcctcttgg

SEQ ID NO: 276065 - DNA, 448 bp, Cannabis indica
ctgagtccgaatgtccttctgttgaatctggattcttcacgatcttccacactatgattgaggtaccacttgatgtgtttgggcactactctatcactcaaggggttcgaatcagtaatgaagaagagggaaagagaggtggcagctaggttaggtagaaggcacttaggtttttctctgaaaggaataagatgcatcatctttttctaaagccatcactacctatttataatatgccaccttgggttaggtttgaattatttggcattaaaataatgaaaatattaaatgataaatcctacataagtggccagccaagggttatggatatgggccccacttttgtaatttgctcttttatcatttctacatctcattttctcaaaaacaccaattttcaaattcaaccatttaaatgcaaatttcaactatttaataactaaaatta

SEQ ID NO: 276066 - DNA, 550 bp, Cannabis indica
gttttgtcaaacctaacttcggacggggtaagccaagcaggccaaggcattatagaatatacccacacacaaaccagggccgacaagaaagtacgttcagcgcatcgttcctattagcaaacgtgaattggatgatacctccttatatttccttccatttccagcctctaatggcatcccaggaaagcttaagagacccttgtattgctgccttccctagtttgtagcgacttaggattttccccaacagtatttggtttgcttcttcaggttcatctacctcccccgggtttagagtgagggtgatatccttatgagagatttgaactgagtctttgaataaatcactaacagtttatggatccatagcagtgagcttgcaagctagtgcaatagagaaattgcgtacaattctctgattacttccgagaagtgagctccttcagagcacagtcattagtaatttttaattttactgaacacagtcttttttgaaactttaacacaatatttttaaaaacttgataaactaaaaatgtaaaaaaaaaaa

SEQ ID NO: 276067 - DNA, 556 bp, Cannabis indica
tgcatgacatccaaaaatgtctaacaagtaaatctttccagtatggaagacggaagaaaatcgattttctttgaaaacatccattggggtttctctttttcttgccctttccatacttgaaatctattttctcaacttcttcaagaatttgtcgccctgaaagtggcaaaggtgcaacttctcgttctacagtaccgtcaaatgcttgttttttatttctgtcagggtgacttaggggcaaatatcgtctatggcccatgtaacacattttgcgtccatttgacaaccgacgagctcgtgtattggtacaacaaataggacaaccttcatagccttttgtgctcaaccctgatagattactatacgcagggaaatcactaacagtccacaacagcacagccttcaacttaaaaacttctttcttaaaaccatcgtatgcatcaacaccatcttcgtacaactctttcaagtcatcaactaatggtgccaaataaacatcgatatcatgtcccggctgtttaggccctgaaatcattagcgataacatcgtaaattt

SEQ ID NO: 276068 - DNA, 882 bp, Cannabis indica
gggttcgcgtcctgggtcttggtctatgttgggtgcgagtcccaagttcaaatcccgatttggtctgggttcaagtttgggtccgggtctgggtctggctttgggtctgattctaggtgtgggtttgagttcgggtccgagtcagtgtccgggtttgtgtccaggtttggaacccgatttgggtctaagtttgggtacaagtccaagttggggtctcgagtgcgggtccaagtttgggtctgggtcaggatctcggtccagatttaggtccagcatttccatcccagtctgggtcttggtctgagtagaggttcgtatctgaatccctatccaggtccaagtctgtgtttgggatcgtgtcccagatttaggtccaggttcgggtctcagtttcggtttgggtacacgaccgtgtaagggcccgagttcctgtctcagtttgggtttgaggctaggtctgtgttcggttctcggtctgggtccggtttctagtcacggtcgtagtcttgttctagggtccttgttcagcgattcttgttcaggttctaattttgggtcctaggtctaggtctgggttcgcgtttggttcttcgtctcggttctgttcctagtctaattccatgatctagacaccgactactagtctgttccaggccccgttaccagaatcccgagtcaagatctggatcactgtcctcggtctcggtctagttctggtttaggtcctaggtcccatttctgagtttgggttcgggatcgagattggggtgcggttgttgtcccgacccttattttatgtccctagtttcgttccatgtttgggttttagttcaggttcaggttcgagtaccgagtccaggtttgcgttgggaatcgagtccg

SEQ ID NO: 276069 - DNA, 866 bp, Cannabis indica
taatctttgaacttcagatgaattcaaaatcaaccataaacaacgctgtgaaactctaccaagacaatagaaaacgaaaaagaatgtttgttggttttttctttggggaaattctagttttatgggtgatgataataaatgaaagttttgatttgatagaatattttctttgttgggacttagatatgtttatatagtattattgtatattttgattaggaatagaaaagggaataccgaatgagaattaatttttttttaaaaaaagaaacttattttacttattccaattaatatcgattttgttgttaaaaaaaaatatcgcttttgctttgattttttaaaataatcgttatcttttttgtttttgaaatttaatttaatcattatcttttacattacaacaaacctaagtttcccatatttattttcacatcaataaaatataatttctttaaatattttttatcaattgaaattaagagagagaaaagataaagtgaattaaaatagacgaagaaaaataaaaataagtaataacaatgatttatctcaaaaaaaaaaaagtaataacaatgataataaacttcactttattatttgctaatcaatttattatttatcttttttctgtcagtcttttttttaaaaggtagtctttctattatttatttgttttgtagttatttaaaaattaattatttataagggaagattctctactttttctctaatctattttttttctttttctcttaatgaagttttaattttattaattgttaatatttttgttcattttaaactattttgtcagttgattttgttaattaatctgctaattagattctcgttcatatttgatt

SEQ ID NO: 276070 - DNA, 710 bp, Cannabis indica
gcgatgttttgcgatatcgtcaaaaactagaacaaaaattcagaaaataagcgagttgatagattttggggctttgggtttcacgatttctctttgtactttcgcgaattccccctcaattttttcatacgtttcgtcttcagagtgtgtttcgccgggagtagtgcggtggtcgtaggtttggtctaggtctgattcggtctgattctgtggtcgtggtgtcggttgggtttggtgagagttagagagtgagggagagagggctaagagaaagagagaagatatgaggatggtactttggtagtttaattaattttagagtattaaattcctgtgtattttaatgtggaatactaaaagattgtggacaatatttaagcatgatttatcaaattttcctgtggaaccaaaataaaagactttttcctatatttatatatatatatatatattttttaaagtagatattggcaataaaatcacttaaattttatatttttaacaattaaactacacaagttgattttttttatgacaatatctactaaactcatattttattttactctttatgcttcagtctaaaaatttcaattaagtgctacgataaattatttacatgtatacaagtgtatacatagtatgtttttagtagtcaatataattttaaaatataaaaaataattaaaaattataatatttacataatt

SEQ ID NO: 276071 - DNA, 596 bp, Cannabis indica
agaaatggaaccagactgggacccgagattgggatccggatctggacacaggacatggacaaaacacgtagtcggtgtctggatttgggacctagccctggacccgaaccctgacaaggacccaaacccacacccggacttgaacacaatcccaaacccaaaagtggaactgaaaccgtaccctatgtcccaaaattagaaccaaaactggaagttgaccgagactggaacttggactgggacttggaatcataactgaaattggacctagatccacaaccgtaaccggaccaggaaccggactccaaaatcagacccgtattgggagccggacccggatcccaacccaaacctggactcgggacctcaacccaattctgaactctgaccagaacatggaaccaaactagggacacacaaccagggtcgcgacctagaaccgcaccccagtctgaatcccgaaccataactcaaaaatgggacctgggacctgaaccagaacaagaccgagacccgtgacagtgatcaagatcttaactctggattcaggtaaaggggcctagaacagaccagtagtcggtgtctagatctgtgac

SEQ ID NO: 276072 - DNA, 772 bp, Cannabis indica
tatatttgactgaggtatattgattttatgttcattggtatttcatgaaggaaagaacaagaaaaaaaaaacttgtggaatattaaattaagttttttgtataatttttttttttcactatgctggtggtatattaatttttgactatggtatatctgcttatgattgtggtatatagtttttgtatgctactgtatattgtggaaaacaattcatttaatagtatattagtttaagtttgtgatatatgtatattggtttaaggtatattgtttgtatatcatacgatatattaataaaaaattaattatatggttaaataacatattagacaacaacaacaacagcagcaaaatctaaaagaataaaatatataataccttttatataatgaaaaaatagttgacaaaaattcagtagagaggttttgatttattgtttttcataatttctattaaaggaataaaacatataatacattttatataatgaagggtattttaggtattaaaaagtaaaaaaggacatttgctttattattttaaaaaaagggacattaactatctatagagttagaaatagggtcatttacttacatttctctataaaatatgtaatttcttaactcaggcccgtaaaaaacatgtcatttaaaaactacacaaattttttggtaattttgaaaaatataatatcatagtgtaaggccgaataataatttttttcaatgaaaacttataaaaatactgaaatttgagttaacttttacaaa

SEQ ID NO: 276073 - DNA, 974 bp, Cannabis indica
gagaaaataaggaaaaattattaaaagtggcaaaattccaagtgggggcccacatatccatggccggccacttgtagggtatttttcattattttaatgcctaataaatcctaacctaaacctaggtggttgcctataaatagatagtgatggctcacacttaaagatgatgaaaatttaccttcagtcaaattttctgagccttcacttctattaatttcgaaccaccccttctctttctctcttcatattttcataccttgagtgatagagtgagtgcccacacacatcaagttggtcctcaatcatagtatgtaatactgtgaagaatccaaacacaaggaaggagtttcgggctcagatcttggtgatactctgctacagaaaggatagaagggttagagatctgagtggaaggagtcatttaatttcaccgcatccactataaggtttctcataacttttatgtgtttaaattacattgttttaaaaattcatattaggatgttaaaaacatacatggtagtaaatctagatcctggtaaaataattccaacactaacttcttcttgatagtatccttcagggttttattaacggcttccacttgtccattttcccgaggcctggatactgacgagaagcttttgacaattttattcctctcacagaattcagtgaacaagtcgccatcaaattaggttccattattggatactatctttatgggaattccaaacctacagataatgttcttgacgacgaagtcaagggctttcttgcaggttatggatacgaggggctcgacctccgtccatttagtgaagaagtcaactgctaccaccgcatacttagctcctcctcgcccagtgggtaatgccccaattaggtcgatcccccatatagcaaatggatagggcgaggtcatcattctaagtttggttggcggtacgcgatgtatatgtgaaaatctc

SEQ ID NO: 276074 - DNA, 645 bp, Cannabis indica
tatcactttattacttgttacgattgcgtacacttgcgtatacaatttttcacaacaagtttttggcgccgttgccggggattgatttagtgaaattttgtttgtggaacttaattactatcaattttggtttttttagtttttcatttgtttcagttttattttccttgttctattttacgctttgtttgtttgtcttggttcctttttcaaggtacttgggatgtctcatcgacaagtccttatgaattttgttcaacatgacttggagtccttgtatgaagtatggtggagatacaaggcactcctaatgaggtttccatatcatgggttgtccaaagagtgtcaattagaaatcttcctaaatgggttgaatccaagcacacgaaaatgggtagaaagaggaaatggtaccaccaatttctaccaactatcaattgatgaagcctattggatgttggaagacatggcggagtacaatgagtggtgttgtaattgtccaaacaatgaccatgtttgggaggacaactacaataatttggagccaaattttgacacttacactcaaggaccaaatgatgagattttagaagatttacaagagttcaacataaaagaagagcctcatcaaatggttcaaccaag

SEQ ID NO: 276075 - DNA, 799 bp, Cannabis indica
tgaaaggtagtttaggtattaaaaagtaaaaaaggacatttgcttaattattttaaaaaaagagacattaactatctatagagttagaaataggatcatttacttacatttctctataaaatatgtaatttcttaactcaggcccgtaaaaaacatgtcatttaaaaactacacaaattttttggtaattttgaaaaatataatatcatagtgtaaggccgaataataatttttttcaatgaaaacttataaaaatactgaaatttgagttaacttttacaaaaataatgttacacggaattttttttcaaaaatactgtatttttataaaacaccagtaaaacataaaacgaaacaactcaaaataacagtagaacaactaaaaaaacatatgtagaacaacatcgaaaacttaatacagtatactacagtatgaaacttaataaaaaaaataacagtaaaaaagtaaaaaataccgtctgacagtatttttataaaaaaatggcaaaaattactataccaaaatgtaaattttcctttctcaaaacccaatcactatgaggcccgaccagacaatatttagtaataatatcgatttaaatagtacaattttcatcttcaacaatatattttttattctctattattatatttagaataatttgtggcataaatacttaattttaactctgagttgcaaataaatacttaagtttaatttttagcgataatcttaagctatattttttgaactctgtaggtacctaaccgttaaatattaagttattatccacgtgtc

SEQ ID NO: 276076 - DNA, 577 bp, Cannabis indica
aagaagtagatgatttactagttgaacatgtggaggatgaaaagtcagtgtaacttttattttgtaaacatttgttactaaaaatttttacaattaaaggactttttaatttctttcgcattaacatttgtgtgatctttcaattatgtgtttcacattttgtgaattcttacatttttttccgtcttcaaagtaaagtaaaatgtcagctacgttagcgacataccatggtggggatggtgatggcagggatccccctgatccttctagggtaccgtcgtcttgcgaatcaggttgtaataatttttaattattaaaggttgtaataattttatgtcctcatttataaattaacataattttaaattattttattacatagtactattttgatatcgatgggaatccccatcgagacctacttatggggactttatattcggtgatggcggagcagtatagtgagcgaaagacactcagacacaagcattttaaacaacattataaaataccagaagattgggagacagttctcaaattcccccctgaccacttgaataccgagacttggaaaccg

SEQ ID NO: 276077 - DNA, 120 bp, Cannabis indica
atccaaacatatcacatcggttaggctagagtatgactagcagctggagtatgaccagtgaaccgagtataggctgatactagggttggtggtactgtgctatttgaccgtatcacatcg

SEQ ID NO: 276078 - DNA, 444 bp, Cannabis indica
ggtccaatgaatctcggcaagctttcccttcttcccaaagcgttttatgcctttcatcggagatattcggagaaataccatgtccccgacctggaaatcaatatctcgacgctttggatcggcataactcttttgcctactctgagccgcgagcattcgcgctctaatcgtatcaactgcctcacttgttttctgaacagtttcgggacccaagaactttctttcacccacttcatcccagtgaataggtgatctacattttcttccatataaaagttcataaggagccatcccgattgttgcctaatagctgttattataagaaaactcgataaggggaaggtactttacccatgatccttcaaagtcaagcacacatgcccatagcatgtcctctaaaatctgaatgatcctctcggattgtccatccgtctgaggatgaaa

SEQ ID NO: 276079 - DNA, 611 bp, Cannabis indica
gttcgagtcctagtctcggttcgggtttaggtctttctctctgggttttgatcagggttcgggtttgggttcaggtcctggtccatgtcctagtcctagttcagttctagttccatttacgattctgagttcgagtcggagttcgagtccttgtcttagtttgggttcgggtccagatttccgtctaggtccaaattaagctccgggtgtgggttcgcatcctagttcttggtctaggtttggtccgagtcccaagttccaatcccgatctgagtcaggatttagttctaggtctaattccttggttcttatccttttctgggttcgagtttgggtccggggacgggtccgggtctagctttgggtctgattctaggtgtggatgtttgagttcgggagcgagtttgtgtccgggtttgtgtccaggtctggaccccaatctgggtctaggttggggtccaggtccaagttcgggtcccgagtgcgggtccaagtttgggtctggctcacgatctcggtccagatctaggtccaacatttcgatcccagtatgggtcttggtccgagtccaggttcgtatccggatccctatctaggtctaagtctgtgtt

SEQ ID NO: 276080 - DNA, 653 bp, Cannabis indica
cattttagtaattatattattttgttgaagtatcatttataggtggctaagtgtttaaggataaatacattaaaggtagaacggtaaatttgtccctattcagtgtagataatctatagaggatctttgtctatcaggtgttaacgcagattttcgttaactaaatttgagcctcacagtaacaattcacaagaaaaaataaaagctgtaaaaggaaaaatatgaacacacaggattttttacgtggttttgcagttaaaattctacatagtccacgagtcaatcttattcagatttctgattgttttctcagggcctcttttgtatgattttttttatcccctttttgatcttacttgtcactatttataatcatgtagtgagcagttaattacaaagttgactgtaatctttttacaacgatcatcccctggaatcatgggatttgattacatatcacgttaagtaaatgtgatttttatttaaatttcacacagttgtgaatatcccgcttttattggaccaaaatgaacgcgtattagagatatacggtgggccttatctcattgggatacctcgctgggaatggagctgagttaactttgatggcaagtcggagctcatcatatatcttcccgaggttgatattgctt

SEQ ID NO: 276081 - DNA, 611 bp, Cannabis indica
gtaagcgtttgcagcagcagaaagtaattctgctacagcaaaactgaacaggcagaatataaaatatttgcagaaaaataaataacttgacacaagagatttatacgtggtatcagtgttctcacgaacactcctagtccacggggccacgcccagagaatgaaatcaattaataaagtatcaaaattacaaagacaattgacttaaacaagtttagactccctctaaagtattgccgcaatcctttgtaatccactttatgaatctgacttcttgaaacaccttcaagcccgaactcccttcgtctttgaagtgtgagtgcttacttcctcccgaagtaaggcttcaacaagtcttctcccgaagaccaagtgcttacttcctcccgaagtaaggctttatcaagtcttctcccgaagaccaatctcttgttcagtcaagtagttcttcacaacctctaggatagagtaagaacagaaatagaacaactagaacctagatgaacaactaggctctcacaaaacaaagaaacactctcttctcccaaaagataaatgcaaaaaaatgaataatggaagaggtaattcgaatggttgctctctaggctctat

SEQ ID NO: 276082 - DNA, 560 bp, Cannabis indica
ataggtatgcttaaaccttggataagtgttatgtcctctccagggcattggcaaagtttaccagtatcggatgtacggagtatacattggaagggaccgatattgatcctggtaaagatattataatacttaccgttgtatctttcggagtcaatatcactggttgatcttagataaaaaaaagtcataagagaatagacatataaacaagtaaacccggcccaagaagaatggctccataccctgatatggattgtgagggggctcaacaccccttaacaatccccaggggaggtgaatcagaggagagaggaagctattcatgttctttgatttgttacttaagcctactttctggtcagggtgatacgtacattttgggaacatgatagtatgattgagtgggagagctaaacatagttatggaatctatagcttctatcaggacatagaagtgaaacgatgatttcctttgagctcggcttaatagaggtaaatggaagagctcttgtttcagtgattatatattagttcactgaaatatcatttataggaagcta

SEQ ID NO: 276083 - DNA, 598 bp, Cannabis indica
catactgattagctttgcctccagctcgttcagcagttcacaacgtattccatatctcgatgttgagaaaatacgtttcagacccgactcatgtacttagctatgagaatcttgagctgcaaccagatatgtcttatgaagaacaactagtttagatccttgacagaagggataaggttcttcggaacaagaccatagctctggttaaagtactctggagaaatagcagggtggaggaagccacctgggagttaaaatcaaacatgagagcttaatatccagagttgttcaggttagaattcgaggacgaaatcctttaaaggggggataattgtaaagaccgcttagtttaatgggacaatattttagacattgggaatgtcgggaatagtcaggattttagagtttcctaaattaacccaaagtgcccttttatgttgtttttgtgggaaatgggtaaaatggtcattttggccattagtctttttgtctttagtgaattaatttattgttaatgatctgatttttattagttgatttagctgaaattgtttttagaaaaactaagttttatttcatttttccaaaataagaaaaa

SEQ ID NO: 276084 - DNA, 702 bp, Cannabis indica
atatatatatttataatttaaattgagtcatgatatcaaatacttatataaaaatttataatagtgaaaggaagagacaaacttgagacttctccaattaattaaagggattatttcacaaaaacataaaaacaacaaaaaaaattacaaaaatacggtttcacggaattttaaatatttttacgatttttttgattttatttacagaaaatacggtctttttatgttgtaatcttgttaatttgttgttgattttttgttatctgtatgttattttttgttgttattttcatgttacttttatgtagttttcttgttaattttatgttgttttcgtgttattttttggaaaaccgtaaaaatgtaaaaaaaacattttttgaatgtaaaaatgtaattattttacaaaaaatggtgcctaatgtaattattccttaattaaacgcttataaaaaagaaagaaatgggttagaagaacataattatgaatcctacaagtacgtaaataaaaaattgcaaacgtaaatcataattaaaaattattatatttcatactatgttaagatctttatatttttttaaaaaaaatctaaaatgaaaaaagaaagaatagattattccctacagttgtatagatattttaaagggtgttttcacttttgtatttttaatgaaatttattttcaaaaatacgttaatatt

SEQ ID NO: 276085 - DNA, 498 bp, Cannabis indica
gcgtgcgtgggttcggtcgagatgggcgtgggttgggttcgtggatggtgcattgggtctccatcggcgtctcggtcagagtggtgcggctgtgggtctttgtcggactggtgtcgatcggaggtggggctcgactcgtggtgggtggtggggggttcggttcgtccgaagtgggcagagagagagttgccagagagatagaggaagagagagagttgggtgttgttatgtgagggttatttttgggtttttgataaaagtgtcatatatttttttattttgaaatgtattggtttaagcataaaatattagggtttttaatgtatagtttttcaaatttccccttttctttctggtttcctattaatataatattttatgaaagtaattttgtaaataaagtgtcaatttatatttttcatgtaataattctaaaataataatagaaatattttttcaaatatataaaaaataaggggaattaccccatttactaaa

SEQ ID NO: 276086 - DNA, 476 bp, Cannabis indica
acttttagaacttggaattgcactctcagttatatagaacgctctatatgttccaccatatagatacgctatcacatttaaccatcgttataatctcaattgatcaaagatcctctatatagatgatttacacagagtagggataaatttactgtttcacccctcaatgtattttgctccttaaaacacttacctaccttgtaaatgatgttttagtgaactaaaatataatcactgaaacaagagctcttccatttacttctatttaactaaatatcaggatttagatcttttgatataagatcaactagtgacttggaaagatacaacggtaagtattataatatcttaaccaagatcaatatcgatccagtccaatgtatactccatatattcgaaactagtatactttgccaatgtcctggaaagaacataacacttatgcaaagtgtaagtatacttcatcgctgattatc

SEQ ID NO: 276087 - DNA, 526 bp, Cannabis indica
taaaaaaaattaaaaaaaaaaaaaaaaaaaaagtttaaaaagaatataatttgggataatcgaagaaaaacgcaaattctagcacaaacccattattcagagagcaattgaaaaaagaagtagaaagtggaagaagatgcaactgttttaacgaagcggttacagacaccatttccgaaaccttctgcgtaaacttgattttggtctgcaatcaatctcaaaccaaataaataagtatatagaaattacacattacatagcataaatatagtagatatatacctttgaaggagtcgtaccagagagctttggctctaaggtgttgaagaccttgaagatggcgtttcctagcgaaaggactgtcctgaaattccttgtcgcaatagtcgcagtgatacttacccaacggcatctttccctcttcctcctcctttaagggttttcaatttataggtttgcacaagtttgaacttttaattttatttattattatattttttttgaataaattttatttattattatt

SEQ ID NO: 276088 - DNA, 317 bp, Cannabis indica
ttaaaacttaatatatatatatatattttaaaagaaaacgaaactgatgtttcgtttttatatatatatataataataatataaataaaaattttattattaatagttatcttattatttcttagccactaagaaatctttatttttaaagtatttaaccaacttcgagtaccctaaaataccccgatatttctaaaatcaacttatcctaataatcccatcaataattctaactaaaaccattatcacatttttagcctccaatcgggtctccagggtcgccgaacatgaaaatatttttatttcacaaataactc

SEQ ID NO: 276089 - DNA, 635 bp, Cannabis indica
cggggcctggaacagaccagtagtaggtgtctatatcttggactcagactaggaccataacccagacgaagaaccaaactcgaacccagaccaagacctaggacccaaaattagaaactgaaaaagaatcgctgaaccaggaccgtagaacaagacaaggaccatgaccaagccccggaccgagacctagaaccgagcacagacctagcctcataccaaaactgagactagaactcgggcccagacacggtcgtgtacccaggccggaactgagacgtggacctggacctaaatctgggaaccgatcccaaacacagacttggaccttgatagggatccggatacgaacctggactccggccaagacccaaactgggatcgaaatgctggacctagatctggacggagatcctaacccagacccaaacttggaccagcactcgtgacccgaacttggacccgcacccgaacctttacctcgatcagggtgtagacctgtacacaaacccatacacagactcggacctgaactcaaacatacacctagaatcatcataccgaaagctagacccagacctagacgcaaactcgaacccaaacaaggatcagaaacaaggactaagacccagaactgc

SEQ ID NO: 276090 - DNA, 600 bp, Cannabis indica
tatatattttttattttaaataagtttaatgaatttatatatatatatatttttattttagagaagttatgtgctcttaggaaggtttaactcctgaaaactttgtgtgcactttctctacaattttgtctttaattattgaacttcttatggatttttcaggctgtgttttctctctcaattcaaagtgtaatatatagcatcctttagcaatgtccctccccgtagagagtgtttgtccctccccgtagagtgttttgtgtttggttcgtattgattgtttttgctgtgtttttttcctgatctgtaatggcatcttccagtcgagaagactattccctatctaaaaaatgggcagatatatgccttgaggatgaagaagaacatgtagtctcattggcagatgattgtgaagaagaggaagatttgaattttgattgataggtggtgtttagtgggaagattgttatctgggaaagtttctgatttccaaatatttcagaacattattgctgatctgtggaaacccgggaaaggcatctttatcaagatcttggaccagaataggttcctttttcagttttaccacgagatagatat

SEQ ID NO: 276091 - DNA, 605 bp, Cannabis indica
atcttagcaacaaccaaacatgccatattgaaggctcaggtaatgtgagctttaaaatgtatgatggtattgtaagaactcttacaggtgtaagatttgtgcctaacttagctagaaatttaatttctataagtatgctagatgaccttggtgttgtgagtaagattgagacaggtacaatgaaactaagcaaaggttcaatgaccataatgaaaggctacaaggaagaaggattatactacctaaagggagaaccaatttcacattgtcacaacacaacagaaactcttgaagattctaaggcaatcttatggcatagaagacttgggcacatgagtgagaaaggtttgcaaattatgagtgaacaaaatcttttatgcaaggataaagtaagtaaagttgatttttgtgagcattgcacattgggtaagcatcataggcttaaatttaaaattgggacacataattctaaagaaattttagaatatatacatgctgatttatgggtccagaaaatacagctactcatggggggagtagttattttctatccattgtggatgactactctaggaaagtatggatttttcttttgaaaaataaaa

SEQ ID NO: 276092 - DNA, 840 bp, Cannabis indica
atagatgatcattgattattgggattataacaatggataattgatagtgtatctatatggtggaacatatagagcgttctatatagctcagactgcaattctatgttctatgcgtggatgcaacaaggaattaataagttagtgaatttattctgtaagttcttggtctgcttattggaagctcgtatatataggcccatggtccccatactatttgagacaatactacttgtaagactcagttaatttattttgattaatcaattataattttaaaattagactatgtctagtgtatgaattttcactacgcaagggaaaaattgtgaacaaagagtttctagggcttatttgttaattaagagactttggttagtctaattaataaatatattaaaagacattattatttaacaattagtttatagatattaaataaatggaattggcaattaagtggttaaattggaatattggtgtttttgagaaaatgagatgtagaaatgataaaacagcaaaattgcaaaagtgcggcccattatcctataccttggccgaccacttatgtaggtatttatcatttttttttcatcattttaatgccaaataaatctaacctaaccctaggtggttaactataaataggtagtgatggcttcaggaaaagatgatgcatcttattccttcaaagaaaaacttagtgccttcttccttaacctagtcgccaccctctctctccctcttcttcacttctgaaaactgaacccttgagtgatagagtgagttcccacagacatcaagttgttcctcaatcatagtgtggaagattgtgaagaatcc

SEQ ID NO: 276093 - DNA, 597 bp, Cannabis indica
catagaactactgagaagacaacaacgggacatactccattctcacttacatttggctcggaagtaatgttacctgtggaagtaaacatcttgactcatggacgagagttttataatcaagaagaaaaccaagaactcttaagattgtcctaggatctgcttgatgaaaaacgtactgagtcgcagattactaatgtagcataccaacaccgagtaacaagatacttcaacaaaagggtcaaaaagaggctattcaatgttagagacttggtgctaaggcaagtatttgcaaatacgagagacacatctgcagaagtattcaacccaaactgggagggtccttatgtgattgaagcgatagtaggaactggagtttacaaattggctcggttgaatggctccttgataaaaactattgaaacgtggaacatttgcgaccctaataccaataaactgatgattgtaactcacatttctgatgtaatatttggaacttcagttatgaataaagttaatcatttcttttttcaagtaaatacaaagtgttactctttaaaattacttgaggggcatatgtgtatgattaaccagaattta

SEQ ID NO: 276094 - DNA, 515 bp, Cannabis indica
tattttgtcatatcttgtgttggtggtttcccacggatgttctaacacttgctttcttttgttgtagcaggtatctccatggacgccatcttggatcagcttgctggggttcacactcctgaggctcctcctgcctttacttcttccccaatggcccctgctctaaagatttcttccagcgctccccccgacactattgatttagtggatgacgaggaggtgctgccgggagaaggtcaagaaaagcaatggggcttttctgaggaagttgaagaaggtgcaggagggctccgggctcttcctgaggaagttgaaaaaggtgaagaagagcaagaaattgctctgattcgcaagcgtaagggcaaaatgattgcccaggaagagcccaagcggcctcggagagctgatactccggcccacggtcttgatggtggggtctctcccatggaagagcatactgcccctcccaacattgtgctgctccggttcctggagacgaggcgaggcaggagctc

SEQ ID NO: 276095 - DNA, 431 bp, Cannabis indica
tggtaaaataattccaacacacgccactattgaacattggccgcgtggagtaaagttaatagccgcagaaccttcaccaccactgccgccgctaatgctatataatgttatactaaaaagttaagttcaagcaaaataagaaatttaaggatttaaccgttaaaaattctaaagtttattaacactacttctcttatatgaatatataaagagtgaggatacatgcttttgctaccattttcaaaaatttgttcagtgtatcttagttttcttatgggttggttagttctcattctcagtaattgtaaaaattagtttttcctctagaaaaggaatcttttataagaatattctatttaaataaatatatgtttatttaaggaaataaaataaataattgattttgtaataaatgaatattttatattcat

SEQ ID NO: 276096 - DNA, 612 bp, Cannabis indica
gatctgatgcctccgccaatagatggacacttgcaagtcatcattggaggcccgcacatcgctggagacacgggcaaagctcgggaacgatatgcccgcacagctcagtacgagcaagaagaagtcatcctggccgtggaagaaaggaagcccaaagttccacgagcaggagagccaaccataacattcaacgacgaagatgctgtccagataaggtttccgcacaacgacccgctggtcgtggaagtccagatagcaaacaaatggtgtccagaaccatgattgataatggggcttcttcaaatattttgttcaagactgcctacgagaagaggggctccagctcaaggatttaactccatgccttcagcccgtctatggtttctccggtcaaggagttgcgcccctaggacaaatccgcctacccctcacagttggacaagctccaacgagcataactgtcatggcacagttcctggtattggatgttccttcagcctttaacgtaatgctaggccgaccagccttgtatgacttaaaagctgtcacatcaatattccactcgtgcctgaagtttccaaccaaaaatggggtagggtgtcttagaggaaa

SEQ ID NO: 276097 - DNA, 459 bp, Cannabis indica
agatacttgcaggaatgtggcattgatgcaagatatacaatgccacgtacaccccagcagaatggaattactgaaagaaggaatcccacacttcttgatacggtacgttgtatgttaatacattctagcttaccagagtttttatggggtgaggcattaaggactgctgcttatatcttgaatcaagtgcctagcaagtcggttccaaagacgccatacgagctgtggtcaggcaaaaaaccgagtttacgtcatttttcacgcttggggatgcaaagcttgaggtaaggccttataaccctaaatctaagaagctggatccgaatactatcagtgggagttttgtaggctacactattagttcaagaggttctaggttctattgtccacctcacaccaccagggtgatggaatcagaccgagctgtctatttcgaggatgaatttggttcaagtcagc

SEQ ID NO: 276098 - DNA, 556 bp, Cannabis indica
ttttggagagttaagattttcattttaaggtgtgggaaatgaaaaagaaattggtgagaagaaataggtgggcatgtgggaaatagaaaagacgtaggtgggcatgtgggaaatgtggcgagaagtaaataacgattttttattgggctcttatactataggcgacggttttaaactgtcgggtataagggcccaacaaatttacgaattccaattaaaaccgtcacctattcctgtaattactgttataaaccgtcaggaatactaattttttccgacggttttaaacagttacttaatttttttagcgacggtcccaaaaaaaaaaaaaatttaggaccttcgcgaattctgacttttgtagtagtgcatccagaataattttttagtctaattttttttcatattcatatacgttatattatttaagatatcttgcaaaattttgagaaattcggaataatttataatataaaaaataatgtgcaaacagtctattttatacgcgtataaaataaaataagtgcaacatactgtttaaacgaaattttcggcg

SEQ ID NO: 276099 - DNA, 445 bp, Cannabis indica
gtcaaataatatcattatagttgaatggggtgggtttgttaaatgtcatgtatcaaacgcaggagatggaaaaaacataggttagtgcacgaaatgtgtgccgtgttgaaagtcattatttatttatattccatatacaaaaactttaaaagagagaaaaaaaaaaaaaaccaaataaacaaacacttagtgtcattttggcacaattgtgttatagaaaaaaacaaactgtagctgtactgtgagaaaaaacagttgtaactgtactaagaaaaaaaaaaagtaactacagtaaaactgtagaaaaaagttgagctgagtatttggtaaattataaatttcaaagtactgtgagttgttaagatttattataataataatgttataatctaatttattataattgaaaaaccgtgtttttgcaaatgtcagttgtatataagaa

SEQ ID NO: 276100 - DNA, 290 bp, Cannabis indica
ttcagggggtaataatcctaattagcctaaatagatatataaaagaccaccacttgaaatataactttagtttttacctatggaattgttggcaaatacatcaaaattgaagttaaaatgtttagagtaatttgtggtataaatatttgagtttaattttcagtttttcaaaaatataacttaagtattattaccgccaaaattaaaattatatatttatttacaactgagagttaaagttaagtatcaatatatatatatatatataaggaaagcattaaggagttgag

SEQ ID NO: 276101 - DNA, 671 bp, Cannabis indica
ctggcttagatttattattcatgattgacttgttcgttaaagttgacaaagtgaatcttcccaatacttacatcttgggaacatggtagtataagtgagtgggagtgctaatcacatatatagaatttatagcttctataacttttagaagtgaaacgatgatttcctttgagcttggcttaacgtgataaatgattgagcgctcatttcagtaattatattagtttactgaaatatcatttacaagtagctaaagtattttaatgataaaaatacattaaagggtagagcactcgatgtagatcatctatagaagatatttgattatttggattgaaacaatgggtaattcaaagcgtgtttatttttgttatataaaacgttctatgtaattaggagtgcaattctaaatctatagtggaatcaggaggaatcaataagttaagaaatttacttggtaaattttggatctacttattgggagcttgattacttagggccatggtccccacactaactaggataatattattttgtagtctcagttaattggttttaattaatcaattagaattctaaataagattatgtcttatttgtgaatttttcactaagcaagggcttatttgagaagagaagaagatttagggtttttttattaattaagagac

SEQ ID NO: 276102 - DNA, 378 bp, Cannabis indica
atagatgatctacattgcatagggataaattaccgttacaccctttcaatgtattttatccttaaaacacttggtcacctataaatgatattatagtgaaataatataatcactaaaatgagcgctctatcatttatctctatttagcaagctcgaaggaaatcatcgtttcacttctatgtcggatagaagctatagattccatatctatgattagcgccaccactcaattgtactaccatgttcccaaaatgtacgtatcatcctgaccgaaaagtaggcttaatttacaaattagagaacattaataacactcttgagatcaaacctaatcatgtcaggattaagatcattttatctaagatcaactaggtgata

SEQ ID NO: 276103 - DNA, 290 bp, Cannabis indica
tcgttgtttgaagctgagaagtcgaaccgtagggctgcctggagtcgcagtccggtcggagatttcatcgccactcctgctccggatccattttcattaatgaagtccgccaaggcttggccttttatggagattcgaggaatgtagtgtaagtcgaactgacttaactccattgcccacttgaggagccttccggatgcttccggttttaggaggacttgccggagcgggtggttggtcagtaccttgatcggatgtgcttggaaatagggcgttaattttcttgaggc

SEQ ID NO: 276104 - DNA, 532 bp, Cannabis indica
tatgatgatttatcacatattttaagtttcttttttaaaaaatatcatatttggtacaattaagtttgttatttatcacatatattaaaaaaaaattccatatttttgtaaatatccaaattataaatagataagtgttaataatttataggagtctacataaatataataatatatctattgtgataaatccaacacgcaactatacgtatcgttttaacaagtaatactcaggtaagtgagatcgttcccacgaggattgtagctaagtaccaatcaattgaattcttttttctatttggtagaatcaataataaggttgaataattaaataactaaaaattgaaaagcaggataataataataaaaagtgtaatttattatggatgaatatttagaaaaacgaatcttgttgatttaattacccaattgttaatgctaattactattctctttctcaatgtaaatgacaaattataaaaattaacctaactcttttcagatcttttaggtcctaaatcacatgttatct

SEQ ID NO: 276105 - DNA, 598 bp, Cannabis indica
agtaagtgggttagcccggtgcaaggggctccaaagaaaggtggaatgatcgtgatcaagaatgaaaagaatgagttaattcccacaaggacagtcactggttggaggatttgcatcgactataggaaactcaacaaagcaacccgaaaagatcatttccccttgccctttattgatcaaatgctagatagattggcggggcaagagtattattgttttcttgatggctactctggataccaccaaatagctatagcacctgaagatcagggaaagactactttcacatgtccctacggtacctttgctttcagaagaatgccattcagattgtgtaacgaccctgctacttttcaaaggtgtatgatggctattttttcagacttgattgaatcttgtattaagatctttatggatgatttctcggactttggctcctccttcgatcattgtttagaaaatttagaaaaggtgctaactaggtgcgagaagtctaacttggttctaaactgggagaagtgccactttatggtaacagaagcaattgttctttgtaaagcccgcttagttaatttggaaattagcagttatttatgtt

SEQ ID NO: 276106 - DNA, 619 bp, Cannabis indica
ctgagatgttagaaaaagctctcgaagctgagttgctcgaaaatgatataaagaaggagaatgctgctaagtgggaagcccgaagaaacaatggaggaaatcaagagaataagagaaaacacgagggaaatcacggtaatgatcgtgataaaaaggggaaagcagtggtccaaaataacaacaatggggtgaaaaggtcctatgtagaattcccaatttgccccacatgcaataggaaacatcttggggagtgtaagatgaagtcaggggtgtgctacaattgcgggcagccaggccatctgaagaaaaattgcccaaagggacaaaagaaggagaaccaagccgctcctgctcgagtgtttgctctcaccagaggagaagcggccacaagcaacactgttgtctcaggtcaggtttctatttacggattgccttgtaatgttctctttgattctggagctactcattcttatatagctactagggtaattgatagtatagacaagccatgtgacctacttagatgtggtattgtgacggaattaccctcgggagaaaccatgctatcaacaagaagaatgcgagatgtacctatcataatcgaaagcaaagaactcat

SEQ ID NO: 276107 - DNA, 700 bp, Cannabis indica
gccatagttggccgttagattgggcgaccttaagcattctggctgccacgtgtcacaatcccaataaataagggatatgggtatttaaacgctttgatacgaatcaaatttcccatttttccctcttactcttaacttccctccattgcatacactttgaaaaatccattcccagattttctaccatttttccacaacatttccaatctcagaagtgatcgagagcaatcgcagaaatcagaactaaaggttagtttccaaatcactgcattttcgttttctgttttggagaaaatatgctttattttctgggtttgggtgttttaaaggttttttaggaatgtatgctagtgggtgttgatgaggttatgtgttttaggtaagaaaacctgggtaaaattcatagaatatgacctgtaaactgacataaccgcacacaattcgtaggcactgtttcacgtcttgaatactcgcggatattcagatgaacaatttgaatgttcgcgagtgttcagatgaaaagcttgaatactcgcatatttccaagacttatttccatttgactattagctagatcttttaggatttttatatgtcgtgggccgagttgtgagagtattaattgccattccaaatggtgggtgtgtcacagtattctaatggccatatatgcgattatatgccccttgagatactgtga

SEQ ID NO: 276108 - DNA, 633 bp, Cannabis indica
tatgctccggattcgaggacttcgaccacctgatatggtccttcacagttaggtccaagtacacctgtcgtactatctttggtgtttagaaatacccttcttaggaccatatctcccacaaagaatttccgagacttcacttgtttattgaaataccgagctactttttgtttatgggctatcaactttaagtttgttgtggttcgcttctcttcgatttcatcaagcgattcggctaggagtacgtgattggtatctcggttgtacgttaatctcctatgagatggtggctcgagttctacgggcagcatagcttcatatccatatgccatggcaaatggagtctgtccggttgcctttttctcagttgttcgatatgaccatagaacttcaggaagttcttcccgccagtttcctttggcatcttcgagtcttttctttagtgtatccttcaaggtcttattgattgcttcaacttaaccattccattgaggatatgccactgcggagaagcttttgatgatgacatggttcgcacaaaaatcagtgaaagattggatgtcaaactgcttgccattatccgaaactattttctacggcaatctaaatcggcagactatgttcttcacaata

SEQ ID NO: 276109 - DNA, 808 bp, Cannabis indica
gaatagtccaaaatagaataaggcagtcccttatatggggttattaattaagaccagtcaacttaaagcattaaattcctacttgacttaagagagccttaaaaccaaaatgtggggattttgttggacactagaggaggagggtgggcatggatgagccggcgtggacggcggggcacatcaaactaggaacttgaaattggaatggaacaacattatttttttcttttggggtataataagatttacctaccaaagtaaagagagagagagagagagagattaaaggtaccctttgaaaggggagaagctcatcaatttcccaagtccaaaattcacattaatgtctctataggaagatagatgaggaatagtaatagtattgtatatagcatagagcaacccccacctttaaagttggtagcttctaagaactatagccgtcaaaagaagagggaccccaacacttaaaagtgggataagtgaccttgttttgaaggacatgtgccctaagtttaagcttcaaagggaaacttcatttcatacaaattacaattgcttagtaataaagattaagagaacaaaccttaccaaaagaaaattttaagaatgatgaaaaacaaatactattcttgtataaaacgatattatcactatttatgtgtaacatttaaatctttattgtaataaatattttaattgtgaatgttaatgacgtaaataactaaatttattatttttttactatataaaataataaaaaaaaagtaaaagttagtaacaaaaattaaaaatagaaatatttata

SEQ ID NO: 276110 - DNA, 500 bp, Cannabis indica
atgattagatttcacccttaaccaaaattcaacttaattatttctaataaaagagtagagcttaaaattatctatccattaacacttaaaaaaaaacaaacttaagaacgtaccaatagttatatatgtctaatttattaaacctgaaacatacactctcgttagaaatactaatataacaactaaattcttttttttttcctaacatactctattccaatctgcttataacacaattccttttgaaaaacactcttcttatgctccttatttatgaaaataagtacaacttatcaaaaatcaaacttaaattacgtaatatagcaataccttgattttttttttttccaaaaatatctcatagatcgaatcctacccataaaattttaagacatattcttctaaacacaaagaaaacttctagttacactaaagatgtaacgcaacataaaatatgtaagactaacatgaacagattaactaaaacttacagtacagtg

SEQ ID NO: 276111 - DNA, 848 bp, Cannabis indica
atcctatttgttgacttcgctttcagctaacgacaatgagtctattttataagtgataaatgatttataataatgaatgtatgataaacaataaaaagacacaggaattttatagaggttcaggcccgagcagttcggtaatagcctaatcctcgttacttgtattgacttaagatcaaggagaaagatcccttttcttatagctcttacaacactatctctgaatatataattcttagatagtatatttagagtatagtcttagctcaactgcttttcgaccgatcctttgcctagtgaacatacatcactatttatagggctaataaggttggggaggaagagtttcccctctcgttacaatgtgtataaatagaaagatcatgggatcaatgctgaatgcaaggatcgtgggattgaggctgaatacactgatagcgggatcgtgtgtatgccatatccacgtaaactgatccctgagttatagggattgtgctgatgactcatgatgcgaaagttgaattcgctaagtgtttggccattttgtgcggattactgaatactttgctctgggcatgcaagcgaggcatcctgctcggattgtgcttcccgagcagttgttccaagtagacttcacgtgtcaccattcatctgatgctacgtcagagtgcaaaaattgggataacatttgccccccaagtctgtacgggacttccgaagttgcgtgtagactttatctgacccgcttctgcttttggatgggcacacgtgtcgagcgtgaccgtccgagactcgatgtgaggctgactgggcgtcctttctctctccacggctgatggctgcacttg

SEQ ID NO: 276112 - DNA, 852 bp, Cannabis indica
ttaattcaaatactgttggaactggttcacttatggtttatgacaacttatatttgcttgacactgttgcttcttataatgaaaccttgaatgtggaatcacgtggtactaagcgtaaaatggataatgaaaaatcaagttccttatggcacaaacggttaggtcacatctctagaaatagagttgagcgacttgtgtctgatggaattttagattcaattgatttttcagactttgatgtttgcattgaatgcatcaaaggcaaacagaccaaaacaaagaaattgggtgcgaaaagagctatagatgtcttagagttgatacatacagatatttgtgggccatttcctacaccttcttggaatggtcaacgatattttgtatcattcatagatgattactcaagatatgcgtacctatttctacttcatgaaaagtctcaagtgttggacgtgttcaaatcttttaaggctgaagttgagaatcaacttagcaaaagaataaagcaagtcaggtctgaccgtggtggtgagtactatggcagatatgacggatcaggtgaacaacgtccaggaccttttgccagatatctagaggagtgtggaattgtcccacagtacactatgccaggatctcctagcatgaatggtgttgctgaaagacgaaaccgtactcttaaagatatggtaaggagtatgatcagtcattcaaccttaccagaatcactctggggagaggcacttaagacagcagcctacattttgaatagggtaccaactaaagcagctgcaaaaacaccttatgagctttggacagggcgaaagcctagtcttaagcactttcatgtttggg

SEQ ID NO: 276113 - DNA, 621 bp, Cannabis indica
acccacacttgcagaagtatgtcgagaccgatcagggtcagaggaacgacaataaccaggatttactacctccaccagtagatgggcatctgcaagttattattggaggccggcacattgctggagatttgggcaaagctcaggagaggtatgcccgaacagcacagcaggagcaagaagaagttatcctggccgtggaagaaagcaggcccaaaatttcacgagcaggagaaccgacataaacttcaacgatgaagaccctatcaaaattaaatttctacacaatgacccgctggtcgtggaagtccaaatagccaacaaaatggtggccagaaccatgatcgataatggagcctcttccaacatcttgttcaaaactgcttatgaaaagatgggactccaactcaaggatctaaccccatgcctccagcctgtctatggtttctccggtcaaggagttgcacctctaggacaaattcgtctacttctcactgttggacaagctccgacgagcatgactatcatggcacagttctcgatattagatgttccttcagcttttaacgtaatgctaggctggccgccttgtatgacttaaaggctgtcacatcaatatttcac

SEQ ID NO: 276114 - DNA, 836 bp, Cannabis indica
ttcaatgtccgaatggacatggaaggttctctaagaattcgctggccctactagctagtgaagaaacctatccttaacacccactggttttggatataaaaatcgtttaggtgttgatagttgttgagcgcaacataaggtgttcatgctcaccttaacaaagcatggatgttgaattcgagaaaggcaagaaaacatcaagtcgtggagtaagtcgactttcggtaacaatcagatgataaaaagttctttggaaagaaggctggtcgaattggataaattggaaggaagtgttggcgggaatcaaactttaatggaggaaagaagaaagacaaaaaaggaatggcaaaatttagcttttgctgaagaaagaagtgcatggttgaaagctaaatgctagtaggccaaagagggtgatgctaactcgagattttttcatgacatgttgaatgcgagaaaggcaagaaacacaatttcatgaattgaaagggaggatggatcgtttatcgatgaagaagaagatgtggttgaaagctaaatgctagtaggccaaagagggtgatgctaactcgagattttttcatgacatgttgaatgcgagaaaggcaagaaacacaatttcatgaattgaaagggaggatggatcgtttatcgacgaagaagaagatgtggttgaagagatttttttaagagattatacacttctgagaagacaagagggagaagtattgaaggaattgagtggttaaaaattttggatttcttggagggacaactagaaaggccttttgaagaagatgaagttaaaagtacgatctttagttgtgaaggtagta

SEQ ID NO: 276115 - DNA, 581 bp, Cannabis indica
ttaccgagttaacttacatcagagctagtgatccaatggatctttttagcttaacatgatataaacaaataagaaagtggtctaccccacctgagtacttttgtttctgaagcctttgcgcgtagtccgcccaagaggcaattcacttataagcgaatgttcaatagtactttaatgtggtctacccgacctgagtactttgaaatggtctatttgacctgagtactttgaagtggtctacccgacctgagtactcattggtagtatttccttaaatgttctccattccagtatcgtggtactaaaatgagttgcattttttcgtcatacttaccaagtttgtatgctccggagtcgagaacttcgaccacctgatagggtccttcccagttgggtcctagtacacctgacgtgctgtctttggtgtttaggaatacccttcttaggaccatatctcccacaaagaatttccgagctttcacttgtttgttgaaataccgagctactttttgttgatgagctaccaactttaagtttgcagttgctcatttttcttcgatttcatcaagtgattctgcaag

SEQ ID NO: 276116 - DNA, 436 bp, Cannabis indica
acaattatccccccgttaaaaaggatttcgcccccgaaatctacctgaacaactcaggatgctgagtcctcatatcagattcaagttcccaagtggcttcttccactttactattcctccagagtaccttgactaatgatatggttttggttcgaagaaccttttcttttttatccagaatttgcactggttgttcgtcataagatagatcaggttgcagatctatcatttcataactcagaacgtgcattggatcagacacgtacttcctcagcatggaaatatgaaatacactatgcactgctgacaaggaaggaggaagggctaaccgataagcaacttgtccaaccttttccaaaatttcaaaaggtccaataaacctagggctcaatttacctttctttccaaagcgtctgattcccttcatcggggatac

SEQ ID NO: 276117 - DNA, 888 bp, Cannabis indica
gattatactctgctacagaaaggaatcaagggttagagatctgagtggaaggagacattaattccgctgcatcaatgtaaggttttcttaactttatatgtgtttattttatcgttttagaaagttcatatttaggatgttaataaacatacttgtgagtagatctaagatcctggtaaaataattcccaacatatagatccctcattgggaaattgatatacctcaccattactcgtcctgacattagctatgctgtcaacaaactaagtcaatatctccaagcacctagacaacctcatcttcaagctgcatatcgggtcataagctatctgaaaaactccccaggtcaaggcctcttttatcactctactacaccatctcctctacaattacatgcttttgccgatgcggactgggcagcatgtcctgactcaagacgatccatctctggatactgtgtcttcttgggacactcacttctctcatggaaatcaaagaagcaacaaacaatatctcgctcctctgcagaagccgagtacagatccatggcgcatgctacttgtgaattaacatggcttacatccatactcaaagatttccaagttcagatcaagcttccatccatcctttattgtgacaatagtgttgccatccacattgctgaaaacccggtgtatcatgagcgaaccaaacacgttgagatagactgccacaccgttcgagagaagatcaacaatgggacacttcaaatgagtcatgtttcttctcaaaacaatttggccgacattcttaccaaaccactctttccagctgcattcaaaactattgtctccaagatgggagtaaaggatttttatactccatcgttgagggggtcctattagat

SEQ ID NO: 276118 - DNA, 731 bp, Cannabis indica
ataagaaaaatcagaaattgaattttaagcacgctggaaaaaaaaacgtcgaaaaaggacctcggacgtggccccacgcgccacctgcgcgagtgggcttcgctggctggaagtccttcttcttcctcgggcgggtctgcaaacgggtcacgcgacccggttcggtccagtcgggtctgctggtgttttccggccaaaaatcgacgaaaaaatggggattttggatgggtttcgatcgggaatcgatttctagttgatttacactattaatttcgtgtattaaagactaaatgggtagatctatggctaaaatcaatccgaaaattgaagaacacaaaagaaaaaaaattgtaatgctaatcttagttaaatccgaaattaattatgtaggaacattcttaaacaattgataatgagttatctataatcaattttagatcaaaaaacaataaaatcaaaacacacaaattataatttcatattataattatataaaccctaaaactttaaagttaaaattctcttaatatacacaatgatttcatgcatataatatatcaatagaacgagaatttaatgataaacaaaacccctaaagttttaagatttaaaaacaaaaaattcaacataaaataataacgaaattaatatgaaattatggataattaacatatacaaattaattatactaattataggttctaaatcatatacaataggcaatctgatac

SEQ ID NO: 276119 - DNA, 596 bp, Cannabis indica
gtcctgtaaatctagggcataacttgcctcttttcccgaaacgtgtgatccccttcattggagatactcgtaaacacacgtgatcccctacttggaactcaacatttctgcgttttggatcttcataactcttttgcctactttgagaggcaagcattctagctttaatcttctcaattgcctcagtggtctgttgcacagattctggacctaggtatttcttctcccctgtctcatcccagtggatgggacatctaaactttcttctatacaacagttcatagggagccatccctattgtactttgataactgttattatataaaaactctatcaacggtaggtacttactctaggagccctcgaaatctataacacaggctcgtaacatatcttccagtatctgaatcatcctttcggactgtccatctgtctgaggatggaaagttgtattgaatttcagtttagtacccatagcctgttgcaaactctgccaaaacttgaggtgaacttcagatctctatctgaaactatggattttggtacaccatgaaatcttactatttctttgacgtacaaatatgcatactgatcca

SEQ ID NO: 276120 - DNA, 790 bp, Cannabis indica
ttttttgggtttatcttgccaaaagagtaaatagatcaaagtggatctaaacttgtaaaatgagtcataattggaagagcaattttagactcaaatcaaagtgaatcatggtggattcaaaaattgtgaaaagataacaaaattggagaagcaattttgaatcttaaataatcaaagtagtgaacaaaattgatgagaattttgtcaactttggtataattttgggctaatctcaatgaggagataaccttaaaattatgggaaaaaataatcacattattttttaaatggtgatgtgagtttgatattttagttttgttgagaaaactaaaaatgtcaaatgatattttttaaagtggccttaaaaagtcatttcaagaggaaaatacataaaggtgatattttacatacagtttataagtagaaagtgtgggggtgatatccaatatttatcaagcaatttggtaaaagaatggatgatatgtgaaatttaggcatgcttggtgcctaagacttgagtataacttagacatgtttggtgtctaaagttagtgtataaattttgatatgcttggtatcaaaatttgtgagaaattcagtaagtgtgaaaattaatcttatgtgatttaattttcaaagcttaagtatacttaaggagaaaagtgaccatgtaataatggacactaattttggctagcaagattcgcttggaatcgaaaagtgtgtggttataacaaatcgcttaatctccgtacaagattaaagtatgaaatttcgagggatgagacct

SEQ ID NO: 276121 - DNA, 550 bp, Cannabis indica
agaatttagattgaagtaaatatgtatgtgattgaatcataatataatataatatggttgaattgaattttgttataacactgagaattttaaatgtattatatacagcggagatcaagattcagttcttccactaacaggatcgagaactctagtaactgggctagcaaaggaattgggactaaacacaactgtggcttatagagcctggtttgaaacaaatcaggttagcttagcttacaatatacaattttgtttcaaaatctcaaccaccaccaccaaccaattccataaaatttagcattgagcattatcattgtccttcattcatgctagttttgtccaattaatatatgccaatatcataaaactataattccaaatctaaatgatggtagtttataaaataaattagaataattcgcggcataaatacttaagggtgcgtttagaaagccacatgtaattggatttgtgtgtaattggaggtaattacacaatttggcatgtttgtaattacactgtaactgtgtaattggaagtaattgag

SEQ ID NO: 276122 - DNA, 555 bp, Cannabis indica
cctggacagaggctaattagatgcaaatggatctttagggtcaaagatggcatccctggttttgaacaggttaggttcaaggccagattagtagctaagggattcactcaaaaagagggaattgactacactgacatattctcacctgtggtaaagcaagcatccattagaatcataatggccaaagctgcaaaatttgatcttgaggtggaccaaatggatgttaaaactgcatttctccatggcagcttagatgaagacatttacatgactattcctgaaggctttgaaagcaatgatcctgatgaggtatgcttgttgcagaaatccttgtatggattgaaacaagccccaaggcaatggaacttgaggttcaatgaaacaatggagaaactgggatacacaaggagcagctatgactactgtgtctacactaatggacacctgtacctgctactgtatgttgatgacatactcattgtgggcaaagacagaacagaaattgacaatttgaaagcaaaactcaatgatgaattcgacatgaaagatctgggg

SEQ ID NO: 276123 - DNA, 653 bp, Cannabis indica
caaaaggaatgttgatgtgtaatcttttaaagacctctaaaaattttgagaattgcttgtctagattggtctttcggagtctctgggataaggtatcttcacatgatgatctatactgattggtggagactgttgttgtcgcgcaggactatcggtagtcttcttatctgatgatgttggagttggtgttgtttgatctttaatctcttcatccactggttgtaccatttcaggcccatcatatttcttaccgctcctcagggtaattgccttgcaattttctttaggattaacttcagttgtactagccaaatttccttgaggacgggttgctacctgagttgttagttgccccatttgagtctgcaaatctttaatggaagatctagtttcagtcataaattgtagcaataaatctgtctgcaaaccaaaatttccactagaactttgttgctgagtatactgttggttctgagtttggttctgatttctctgttgatagaacccactgttccttcggttacctccttggttgaacccataattattgttgttctgcgaataatttccaatgccttttgcttcatccattggcaagtcatccacatctgcctgacactcagaaaagtgatggttgcctccacatatctcac

SEQ ID NO: 276124 - DNA, 877 bp, Cannabis indica
aaaagttaaaaaagtttaaaaaaccgtatattgataaaaatgtaaaaaagatgtcaattttgacatgaggtgtaaaaatctctacaatttttggaagttttacaagttgtcttttggaaattaaaataggaataattatgtcataatagctaaattggattattttaagtaatttcaattcaatatagattgatttgattataataaagttttaccataaataaatatgtataaaaattgcttttttgggataagtacaataaaggaatttgtaatattttagaaatggggacattaataatgaattaatatggttgattttgtctattttgggaaggattatggaattaatgggtcattaatgcttaataatcaaggttattttgtttcattgtattgaattacactaatcattgataatcaaggttattgaagtacattattcgttgcttactttattattgcgataattttcaaagtaaacttttgatatcctatggatgggagcattgcaggatttttgttattactagattacatatcaaaatttttaggttttagggtcttagtaagggatagtaatcctaagatgatgatgaagtaaaatacaagagttaagttgctactagccaaagggtctccctttggctagttatagtattttatatggggatctagtttttcaatttttgagttttgagtgttttgatcggattgattattttctaataaaattttttggttttttgatttgttttcagtttattcatattcgttagctttggtgacgactatcaacaatggggagatgtatttcaacaagttaggagcgttgtttgaagatgttatagctttattgtctaaatttccgggggca

SEQ ID NO: 276125 - DNA, 501 bp, Cannabis indica
aggtctggaccccgatctgggtctaggttcgggtccaggtccaagttcgggtcccgagtgcgggtccaagtttgggtttgggtcacgatctcggtctagatctaggtcaagcgtttcgatcccagtctgggtcttggtccgagtccaggttcgtatcctgatccctatctaggtccaagtctgtgtttgggatcgggtcccagatttaggtccaggtacgggtctcagttccggtgtgggtacacaaccgtgtcagggcttgagttccagtctcagtttgggtctgaggctaggtctgtgttcggttctaggtctcggtccgggtcctggtcgcggtcctagtcttgttctaaggtcctgattcggcgattcttgttcaggttctcattttgggtccgagctctaggtctcaggtcgggtttggttcttcgtctgtgctctggtcctagtctgagtcctagatctagacaccgactacttgtctattccaggccccgttac

SEQ ID NO: 276126 - DNA, 521 bp, Cannabis indica
atgacgaagcgaccaaagttttgcgggtaactgaggatggaaagttatccgtgatactggggggcattgaagtccttggtgaactttggaaggatataaggaagaacgggtcggtagactcaatgagtgatttccttgaccgagtcgaaggcttcatcaagctcgaagaagccattcaacgagcagaaggtaagcaaaagcctggcaaagcgaagactacttccactagaacatccgcccaacttcccaactattccaacaattcaagtggcaagcgttcaagcaacaaccacaagcaaggaagcgggaagaaaggaaagttcaccaataaatccggatagactccccgtgatcatgccaagcacactgcattcactattctaactgaagatatagagagtgtatatatggcaacccagtcgttaattctgtacaagaagcccgggcccatgaagaaagataccaacaaaaaggacatgacgaaattttgtcggttccacggagactacgaccacgacacc

SEQ ID NO: 276127 - DNA, 961 bp, Cannabis indica
aattctaggctaaacttgctgtacagtaagagtaataaatatattgagtttatcggtggactaagggtttcgttaaatgttatagggcctagaaggtatcgtaggagttaattacagcggagttgaggtaaggaaaaataattatactttatacttgctttttatatggtttgagtacctagtatgactgcttgaataaattgtattgaaactgtggaatgtgatagtttcggtgaaatagtgttttgtcgatggattgtatatggctgtttaatcatgttccaggtacttggaagtggttggaaaccacacatgtatggtgatgtggtaagtgaggcagtgtacgtaagggtgcactggttattggtactgcgttctggttaagaacgtaagacactccagatttgtatggaagctggagtgtgagtgtgtggtatttcagtatttgtgtggctgcctctatttatacttatgattagtttgttgtatgtttgatgtatatgtttgtgctatgatgtgtgaatgctggtacatagtattttgtttttcctactgggctttccagctcacccccttatttaccccccactactacaaaattgggttttcccaacggttaataagggggtcaattatgaaaaccgttggaaaaagtaagtggagatttttcccaacggtttaaaactgaagcaaaaaaactgttgggaaaaaccaatggcaacggtggacaaccgtgggcaatactaaatgaatttttttaaaagaaaacagtgaatgccaacaatttataactgttgggaatacttagtattcccaacggttgtaaactgttgggaatatttagtaatatttagtattcccgacagtttacaaccgttgggtgtacttagtattcccaacagttataaactattggaaaatgttctttttagtataaaaaaattcaaattcacaaaaaaaa

SEQ ID NO: 276128 - DNA, 1012 bp, Cannabis indica
ggtagtaaatctaaatcctggtaaaatatttccaacacataggtgttgagatgggcttgcactcgagcattccaaatctttgcagcaaatctttagcatacttttgctgacagagaaataagccttcctcagttcgatcaacttctaatccaaggaagtgtttcaattctccaagctccttcatttgaaagcgtactgataggttctcttttgtttgataaatttctgcatcatcatctccagtgataatgagatcatcgacatataccagaacaattgcgatctttgcttcctttactttgacgaataagcttgaatctgcatgtgccatggaatatccgctttctactaaaaactcagcaatctttccataccatgctcgtggagcttgctttaatccatagagcgcctttttcagtttgcaaacatagtcaggatgtgctttatcctcaaatcctcttggttgcaccatgtatatctctcgatccagttctccatgtagaaaggcattcttcacatccatctgccatagcctccagtctttactagctgcaagtgctaacagaactcgcactgttgtaattttagcgactgggctaaatgtctcgtcataatctagcccatattgttgagagaatcctcgagcaactaaccgagccttgtatctctcaattgaaccatcaggacgagtttttaccttgtagacccatttgcacgaaatgggtttcacttccttcggctttggtaccaactcccaagtctgattctttgctagcgcacgtatttcttctttcatagctcctagccacttggagttttggtatgcctcttcatgactctggttctttgaacttttcttcttcagctacagcagcattagcatattttggatttggctttcgcgctcttgttgatctccgaagttctggttgactatcatcatgtccttctctttgatgcacccctgtttgccatggattctgaggtgcctcatcctcgctgttttcttctt

SEQ ID NO: 276129 - DNA, 751 bp, Cannabis indica
caaccacttgtacttcttttttgacaacttctttcatgggtggattgagtcttcgttgagcgtcgattgtcggtttggcattgtcttccatgagaattcgatgcatcactgttgaaggactgattcctttgacatcacctagtgtccaagcgatggccttattatgagctcggagtaccctcagaagtctatcagtttccacatcagaaagagaagctgaaacaataactggcagctttttatcttgacccaaaaactcatacctcaagtgactaggaagcaccttcaattcaagttctggaggcttttcagtagatggcattagctcttttggaactgctcccaattcctcaaaataccttctgttcaagggcccataggaatcaagccacttcacataacccatgacctcttgtccctcttgctccgtcaattcatcttcagttaaacttagttcaagaggatcatctagcagctttttctcacccacaatttcatcaatcaagtcaatgaagaaacagttatcacttgcctttgggtacgtcatagcctttagcacattaaagaccacttcttctccttggactctcagctttaattcacccttctgaacatcgatcaaggcttggccagttgccaagaatggtctcccaagaatgattgggacattgctatcttcttccatatccaaaacgatgaagtcagctggaaagatgaacttgtcaactttaactaacacatcttcaatgac

SEQ ID NO: 276130 - DNA, 541 bp, Cannabis indica
gcgtgctgctactaactgtctacctacgaaatccagacttcgttctaaacatgtgcctattgataccatctgccctgtgtgcaaagtaactgatgaaatcatctaccattgcttggtggattgttctttttccaaagcgtgttggcaacagttggctgctagtgttaatttgacggcagttggttcttttgccaactggtttgctacggttctacaacaggcggataaggagaaaaggaggttgatcgcaatgacatgttaggcaattcggaaacatcgaaatgagctagtatggtctgataagtcccctactgttgtgagtgttgctcacttagctcaagctttactcgcatattggactcagactctagattcaaaatttaatcctacggatgcattccttactgttgtcgatggtgctgaaacttgggccaaaccagctgaaaacaccttgaagattaatgttgatgctgccatttttttttttggaagtgcaacttatagctttgcaggggtgtttagggatgaaactggcgcattg

SEQ ID NO: 276131 - DNA, 711 bp, Cannabis indica
gtgagattctctatcaccctgggaaggccaatgtagtggctgattccctaagcaggaagggtcccgggcaggtagctagcatggttcagatctcacctcagttagcagaagacatggttagatccaacattaagtttgtggtaggtcagcttcacaacttaacgctgcaatctgatctgttggaaagaattaaaaccgctcagatgactgatccagagttagtgaaaatcagagatgaggttttggctggtcaagccagggatttctcagtgtcagataacgggatgcttctgtataaagccagggtttgtgttccgaatagtgtggaattcaggatcgaaatctttcaggaggctcattctaccccttattctctgcaacccggcacaactaagatgtaccaggatctttaaccgtacttctagtggagcggtatgaagaagaatttggtagaattcgtatcgagatgcctcactcgtcagcagattaagggtgaacatcagagaccagcatggttgttacagctcttaaccctacctgagtggaagtgggaagatatcacgatggatttcgtggttgggttacctagaaccacgggtttgttcgattccatctgggttgtggtggatcgattcacgaaatctgctcattttctgcctgttagaacaacctttacagtggatcagttggcagaattgtatgttagagaga

SEQ ID NO: 276132 - DNA, 976 bp, Cannabis indica
aaagttagtagtaatggtaatgctgataatgggcctcatttttatttctagtaagactcaagtgggtgggcctgttttggaggagacttatgctgagtctaactttaaccaaggattggtggggccgtgtatcttgggtaatggctctaattctaatgggccgacttctctagccaaagacaaagttgggcttgtggatgctaatttgtctactaatatccacggagcccaggagcaattaaatgaagaaaaagctttggctcaatttttaaatgctcaagagagcttattgcatgacctcaagcactttgggaaacttgatttgtatgagtttcaaagcataggaggtgacatcggggtcccggcttcctctgaagttaatgagcgaacgacacctttcaagaaacgaaaatttgaagcgtctgcttctctctgcgctaggccccataaagttccacgcaagtaccctgatgttgttcgtgtttttccttgggacaccaggaataatgtgtctaaccctgagttggagattgaagatccttcggaagacagctctagctccccgagctgctcgggtatcttgaagaacccgattgtgggttcctttgtgattgatgaatctatttcaagtgggtctgcttactccccacaacccctgtggaggagaatgtcgaaatctcctccacaggagacatgagagggtatcgcttggaactgtagagggttaaggggcagacctctacagttcgggaattgaagtccctcatccggtctcgatctcctgatcttctctttttgaccgagctcaaagtggatgctaatcctctggtacgtattcttaagtccctctatttttattataatatttgtgttcctgctaagggtagcgcgggtggtattatcttggcttggaaagttgggtttatttttgaatgtatttcgtgcacttgtaatcatatctcggggatagtgtatt

SEQ ID NO: 276133 - DNA, 668 bp, Cannabis indica
agatcgtgtgatcaatgctgaatgcaaggatcatgggattaaggctgagtacactgatagtgggatcgtatgtatgccatatccacgtaagttgatccctgagttattgggattgagctgatgactcatgatgcgaagactgaattcgctaagtgttgagtgctctgcatggatcgctgaatatcttattctggatgtgccagcgaggcaccctgctcggtttatcttcccgagctgatgctccaagtggactccacgtgtcaccattcttgtgatgccacgtcagagtccaaaatttgggataacatttgcccccaagtctgtacgggacctctgaggttgcgtgtagacttcttccgagccagctctgcctttgcatgacatgtcgagcatgaccattcgagactcgatgtgaagccgactgggcgtcccttcggtttttggctaataaaagctctgacaattaatattttgaaatacgattttctctctccacggctgacggttgcactcgattacttttgatttcccatattcgtttctgaggcgggaagctgaggcgtctgaggttccttttgatgcagttacctctttccctataaatacccatagcatttgcacataactcattttaccacccttcgttgttaagtaaactccagagcgaa

SEQ ID NO: 276134 - DNA, 601 bp, Cannabis indica
tatttgcgttgataccgatggctattagtagttgtcttggatgcactcctttaatgtgacaaccgtccatacatatgactggtctacatccctcgttaaaacccagtttaacccttcataacatatgtacattctcttgaaccgcggcttcccaccctcaccttgttcagtcataatttccacagttgaacccttgttagtatgcttgatctcctctgcataatcccaaagagaattatactgttcttcgtaactcccctctatgttttttgttgctataagtcgagctcggtaagccttgcctcttgttatcttaagtacttgctccttgccaactttttgttaaaatgctgagatacccattttcacatgtattttaacctcttccaagtacttttgaccaagccattttgaagttgcaaatcgattggtattctttcatgcacacttgtgtacatcttcataagtctttatcacaaagataggagtttcatctatttttgaagcaaacaatacccaaggacagttcaaaccattgcatttagctcgaatcctattggagtcatttttcttaaaataaatgtgctggaaattattttac

SEQ ID NO: 276135 - DNA, 585 bp, Cannabis indica
attcaatcaatgtttccatgggtttgggtactccaatccagcgactaaaaccagatgggagtgggagtgggtaccttcattcgtcgactaaaatcgcaaaccccgatatgataccatgcaatatttataaacccaattgataccactattcatgcgactgaggcaatcaaaattgactgtgtaattacctagacctcaatccactctagaagaaagaagcagaagaagaagttgtagaaatctttggtaaatcacaaatttgaaacctctgcactcagcgactgaagcgactgaaatcgcaattttcgattggaaagtagcgattgagaattcaaatcgttctttatgccttcaatcgtcgactccaacccagcgaaaaaaatcgattgacctccgagacttcttcatcacagagctcaccttatagtcgttcagattgggattgggagactaaaatggaagagtcgattggtttttcagatgagtgaagtgtcgcacggtcggtgtaaatgagttagggttttgagggtttagttttatttatatattttttaaagttaatgggaggattaaacctacgttaaa

SEQ ID NO: 276136 - DNA, 662 bp, Cannabis indica
tatatccttccacagttcgccaaggacttcaatgccctccagtcgcggataactttccatcctcagttacccgcgacaccttggtcgcttccgtcatgaatctgctgatgtatgcccggagtggctcgcctggtcgctgttttacttcgaccaaatctcccagatgcaatgggagctggcgtgaggaagagaattgtgcatggaattccgaagagaaggttttccatgaactaaactttccaggagccaacttgaaataccattgttgtgcggcttccgacagagtggcggggaagattctgcaacatacgtcccctcgcactccttgtaaatccatttgcatctcaaaatacttgagatgggagagaggatcttctctcccagtgtacatcttccacgttggcatcttgaacttgtggggtagtggcaggagattgatctctggtgagaagggagttccgcgtgcacggtctaactcaagatcattgttacactgtccggccatgccatgaaacatattcttcagttcgtcgagttgggctgacttgattggcgttttggtcgggttggattacgtcagcgtctttctgagcggggatttgagtatggactccgggctgcacgatcgttgtagtattctgctcgtcagttccccttcttct

SEQ ID NO: 276137 - DNA, 478 bp, Cannabis indica
tgagcaaaagccgaacaaaacgaaggctccttctactagaacgtctgcccagcttccccaatattccagcaattcaagtgtcaagcgttcaggcaacaaccacaagcaaggaaacaggaagaagggaaagttcgccgaaaaacccggacagactccccgtgatcgcgccaaacacactgcattcactatcttaactgaagatatagaaagtgtgtacatagcaactcaatcgctaattccgtacaagaagcccgggcccatgaagaaagataccagcaaaagggacatgacaaagttttgtcggttccatggagactacggccacgacaccaacgaatgctacaacttgaagtgagaaatagaacttctgatcaagaaaaacaacccgcacttacagaagcatgtcaaggccaaacaaggtcagaataaccaggatctgatgcctccgccaatagatggacacttgcaagtcatcatt

SEQ ID NO: 276138 - DNA, 849 bp, Cannabis indica
acaatacatatttaataatatagaaaaaccctaaaaaatttataaataaaaaataaagcaatgtacagtactaaaattagtagaaattagatttataccttaatagacgttgaaatacaatgttttctccactaaaaacggtggccggaggtataaccaccaccaccactacctctaccttcggtttaccctaaaaaatgaggaaaaatgtgatcttttcaggtatatagttttaggtatgaaaaatagaagatttagaaacaaaaatgagctaaaatggtgaaaaaatggtgaaatgggggtggtttttcgtggtggttggcggagagggtttggggttctctggtttgggggtttctgggttggctggtcgaatgaggaagatgatgggctgggctagggttataaaccctttaggcgtcggtttttttagaaataaccgacgccataggggggacaccctatggcgtcggttatttccaaaaaaccgacgccataggtggtgtcaaaatcccttccaaaaaattccaaccctatgacgtcggttctttaatatttgctgaaaaaaagtgcctctaaaagcttggtttgtagtagtgctccttcttgttgattaactccttcttgctgtgtgtgggcactactctaatcactaagtgtttcgaaatcttaaggaagaacagagagagagggagtggtcggccaaggtagagaagagagagaggttctaggtttttctgaatgaaaagtgtaattttcctgaagccttcactatctatttatagcattcaacgtagggttaggttgtaaattatttggcattaaaataatgaaaatatcagaggataa

SEQ ID NO: 276139 - DNA, 519 bp, Cannabis indica
ttctattaagcacgtaattaaattaatttcatccatttacccttcttgggtcataattaccaaaatgcccctagctcaccatcggagtcttaacatattaaaattcatattaattcacatatattgaactatataataatataattcttctattattcataattatttaattacggttttgctaatccatttctaaattccatggtgttaccattaccccctccttatagaaattttgtcccgaaatttacctgaacaactccggatatttctgctgcatatccatctcgagttcccaggtttcctcttctactttactgttcttccacagtactttggatcagcataactcttctgcctactttgagccgcgagcattcgcgctctaatcttgtcaactgcctcacttgttttctgaacagctttgggacctaagaactttctttcaccaacttcatcccagtgaatgggcaatctacaatttcttccatataaaagttcataaggagccatcccgat

SEQ ID NO: 276140 - DNA, 532 bp, Cannabis indica
taattccattcaattcaagcatagaaaaccacagaaaacaacctaaaactacagcagcaacaacatcaaaattaaacatgcaaccattttctttttccttgaaaactaagaaaactaaagagcaagattcaaggcttaccaagagcttagaatcacacaaaatctgcttgaaaatcaaaggaaatccagccctagcacacacaaccagccgagagagagagagaggaaaagagagctttgatttttctttcaagttttctaactttgtaatttttttttttgaataaagaaaagaattaatattaatcccttatatttcagccaacatttaatgaaataaaacacataaatcaattaaataaagtccactaaaggacaaaatatcattggggcaaaaagaccaatttgcccctccacacaaaataacataacaataacactaaaggggtattttttgggaaattctaaattcccggccattcccgacattcccaatgtctaataaaccctcccaaactactaacatactaag

SEQ ID NO: 276141 - DNA, 624 bp, Cannabis indica
aaaatctctacctatgtttaatgtactcataagaactatatatcctttttgactaacattttttattcgccttgactatattattataatccttatgtatatatatttatgatcaatatgatgcatgcatattcttctacactcaacacatgcatacccacaaattaagctagaatttgaaaagtttgaccagatgatctgttttaaggagaaataaagggaatacatatgttacctttggcagtcggcatgcacctttaattattattattattataatttttttgaaatatatcggcataaatttgttttttttgtcctttacatcccaaacattcacaggcttaaatcaaaaaaaaaaaaaaaaaaaaaagacttacactggcttcgactaagtcggcggttcgatataagatgtttgaaattagggttatttgcggcaaaactccttaaagtagggagatttttgcaactaacccccaattttaaaatttttgcggtaaaactccctaaactcaagttctgttagcacttagccctttccgtccatttttagctgttaagtgcccggttggaatgtccacgcgtacacagtgtacacgtggcacaattttattggtccac

SEQ ID NO: 276142 - DNA, 562 bp, Cannabis indica
ctgttttttgttgatgtttgttgtagttttcagaggttattttatgcatgtttaagtaggtttgaaaaggtttgatgcatgatagtgttatttaaccaagtttgagttttgaactcaaagcttggagctttaatggcatttttggtatctgtgtgttctgggctgttttgatgctttggtattgttctttggggtatttagaacaggtctggaaggtttgctttaatttgggtttgaattgattgaattatgattttttgaaggtttcctgcgaggaaccagaattccggttgtgcatctgaaattccggatggggttctgaaattcccagaaccggaattccggttgggcaaccagtctgccggttgggtgattttcaggaaccctatattttctcgtttttatgttatttggggtattgccatgctttttatcgatagggaaacttttagtttctagtttaagtccccgggaagtgatttagcgtatcacttattagtgttgtgattgttatggtttaggagcctgtaaaccgtcgggcagttcgttccagtcaggttga

SEQ ID NO: 276143 - DNA, 542 bp, Cannabis indica
ccttccacagttcgccaaggacttcaatgccccccagtatcgcagataactttccatcctcggttacccgtgacaccttggtcgcttccgtcatgaatctgctgatgtatgcccggagtggctcgcctggtcgctgttgtacttcgaccaaatctcctagatgcaatgggagttggcgtgaggaagagaactgtgcatggaattccgaagagaaggttttccatgaactaaactttccaggagccaacttgaaataccattgctgtgcggcctcagatagagtggtggggaatattctgcaacatacgtctcctcgcaccccttgtaaatccatttgcatctcaaaatacttgagatgggagagaggatcttctctcccagtgtacatcttccacgttggcatcttgaacttgtgaggtagtggtaggagattgatctctggcgagaagggagttccgcgtgcacggtctaactcaagatcattgttacgctgcccggccatgacatgaaacatattcctcagttcatcgagctgggcctgt

SEQ ID NO: 276144 - DNA, 584 bp, Cannabis indica
aaagaaaaccaaacgaaatattttaaaatgaaaaacctaaaatatcacaaaccagaaaaaaccaaaacgatgaaatggaaatacaagaaaatgtttaaaatggggggaaacgaaaatgaaaccgaaaacaaacctcagttcgaacagcagcaccaacattattgtttttcccataaacatcttcagccattttttcttgcacacggacctttgttttcttcttaggaggagctctcccacgcttcgttaatggaggagcaaaatcagagtcttcctcctcaataaaaggacgttttcccttagctttattagctagtgatttcaaacccattttgaattttttttttgaacaggggaaggagatgaagaagaacgggtcacatccattttatataaagattgggaaacaaaaagaaagagagaaaaaggttatgggatggtttagtgggagttgaaaaaattttgaagaacaaaaatgagagggaaaatggttgaggaatcgtggggagttaaggttcaacaatggaggttatttgttatttcaaaaaaaaaaactgaaatgaaataaaaaaatcaaaggaaaa

SEQ ID NO: 276145 - DNA, 895 bp, Cannabis indica
tgggtctaagtccttggttctgatcctggtctgagttcgagtttgggtccgggtctgggtctagctttgggtctgattctaggtgtcggtgtttcagttcgggtctgagtttgtgtttggttttgtgtttaggtctggaccacaatctgggtctaggttcgggtcgaggtccaagttcaggtccctaatgcgggtccaagtttacgtctgggtcaggatcttcgtccagatcaaggtccaccatttatatcccagtcagggtcttggtccgggtccaggttcatatccggatccctatcaaggtccaggtccgggtctcagttccagtctgggtacacgaccatgtccggtcccgagttccagacttagtttgggtctgaggctcagtctgtgttcggttctaggtctgggttagggtcttggtcatggtcctagtcttgttctagggtcctggttcggcaattcttgttcacgttctaattttgggtcctaggtctaggtctttgttcgggttggttcttcgtctgggttcttgtcctagtctgagtcccgaatctagacaccgaccactggtctattcgaggccccgttgcccgaagcccgagtcaagatctggatcactatcacgggtctcggtctttctggttcaggtcccaggtcccatttctgagttgggttcaggttcgagactggggtgtggttcttgatctgaccctggttctgtttccctagtctggttccatgtttgggtttgagtttaggttcgggttcgggtctcgagtccaggtttgggttgggatccgggttccgctcccaattcgggtctaggtttgatttggagtctgggtcctggtcttgatctaggtccaattttagttatgattccaagtccaag

SEQ ID NO: 276146 - DNA, 516 bp, Cannabis indica
ggcctggagcgtacgatcctcaggacagcagtgcttttgtaattagtcgctaggcgacaagttattttgttttagacagtaaactttgtaaagtattttgtaatcgggatcccgagtattttgtataaaatattatataagttaaattaaaaagcaaaaattttaattaatcacgattttccataaacctcgttgcttagcaacgagctacatagtacgtttaaaaatcacgtaatacgcctatactagttagggtgttacacatagactcctgagcatactgctttgcctgagaatctcccttcaacttagcctctcgctttagttgaatgagctcatcctccttatgagctcgttcaggccgggcagcagcagatttccccttcttccccgtcacggacttagaagaaaagtcctctgggtaaagcccgtactgcaccagatattcgtcggaggtcaactggatgatatccctatcttccgccggcaaccgggcaagctttttagccccatccc

SEQ ID NO: 276147 - DNA, 551 bp, Cannabis indica
tcaaccacttgaaacctggctgagagaagtaaagataccctgacctgccttgcttggtggtagacttcaggtcgaagaaccaagcgacctcgtggggagaaggagcaccccattcctgggaagcgtagaggacgaagagagcggacaaatacttaatgcccttgggagtaatctgaaccaggcagaggctgaagaagtccgccacatcccagaagtacttgtgcaagggcatcagcgccccttactggccatgagcccccgaccaggcacacatccccttatcagggtctgtagcgcgattgtcgtgggcgggaatgtagtagtccagctcgcccaggtatccttcctggtcgagagtgcggaggcgtgcctccgaaattttggacggaggactcacccatctagcgcccaaggcaccctgcctcctatgaggaaccgcctcagcaagcccctcagtgatgtaatcaacgcccgcaaccacgacgtccccgtcaagttggaacggtgccacaaactctctctggtagaccaagagacttcagatagttttt

SEQ ID NO: 276148 - DNA, 77 bp, Cannabis indica
aggatcaagtatgtgaaagggtttcagatgaatttatacattaagtacatataatcatgaaataaatcatgtgaacc

SEQ ID NO: 276149 - DNA, 555 bp, Cannabis indica
ttttgtgattttattaaatggattaaatgtttatttaattatttgttggctgaaataaaatgtgatttgtggcttatattccttttttcacaaaaattcaacacttagtcaaaattaaaagaaattttcaaaacactcaaagctctctctctctctcttttcggccaaagcttggctgtgcaagggctgggttttgcttggttaattcaagtggtttagcaagatcaaagtgattttcattgaggtatttcttggctttagtttcttactttgtttttcttgaaatttatgatgaaaatggttgttgcatgcttgaatctttgatgttgttgctgctggaatattgttgttgtttctgagatttaagtatgttgatttgtgattaattaggttgttagtaatgagtgttaaattgctttgctcaaaattggaagttttagctcaaaatatggttttcaaagagtattgattgaatctgttgctgggttattgttgaggtttttgtttgatttcagaagctatttcaagcatatttgagtagaattaagttgcttg

SEQ ID NO: 276150 - DNA, 717 bp, Cannabis indica
tgctctcaggcttatttattttttactccgcccggggatggggctctcccagcccggcggagatattgtatttttatgaacttgtttctgtcccaagaagggggacaaacttaaggacagtttttatgggttccgggcccaccctgccaatgatggggtggtcccgtataataggcaaactcatgtcaaggagtatcgccatcattttttcttctcttccgggttccgggcggtggaacatccggaactcctcacggagtgggttaggattcccccttacgagcagaccgcgcctactcaggtctttcttcggagagcccaggccttcgcctcttatgaccgggcggacctcgacgtcgggggcctggttacgacggagaattgccggaaggcaaaactcatcctgccgcaccaatccgtggaggactctaacctttcccgggttatctgtcccaatgtgagggtgcctgccgcggagaagaccttccgggacgagatcatcgccactgccgagaagaagtaccaggactatctctaccggaaggctcaggagaaagcctactctaaggctcaagcagcttccgggaggccacttcgcgtggggagcccggtcgagaggagaagccaggcgatcgctgggaagccccttcatatcggggactcggcggagagaagggctcccaggccaaagccttcggctcaggagccgaacactgg

SEQ ID NO: 276151 - DNA, 727 bp, Cannabis indica
attaatattattacgtacatttggtttgcgaatttcgctcgacaacatatatattattacatatgatataattgggaattatatgcatgtaataatcacaatattatgagattgggagttacatatagttgtaacatataagaggtggagttaatattttgtaacttccacatgatcactaattaagtgtgtaaagaatggttacacaacttaatttttgaaattcaaaaactataattcaaatatagttgttggggattgaattttatcatttaaaatgtgtataagtgatataaaataaagtgggaattgtttgaaataggttggagtgttatttgcaaaagctgaaaaatttagtaactagtaactagttactatttttttcggcattaatagtaaaacgttttttgctattgggatggcttttaacaactcctataacctccaaatcacccatttaatctcatttacacccccattaagaaatggtaacagtcattgggtgtgtgatgtttgatttttaaagtttgtgatcctaaacactataaatcacccatttaatcccatttacaccccattaagaaatggtaacagccattggccttggttcaccctttgagacacactcttctcttctatctttcaaacacaaagctagagagttctaaggcttgataattcctagaagtatttccacaaagctgtaagtgtttcatagagggggcaa

SEQ ID NO: 276152 - DNA, 432 bp, Cannabis indica
gaatgtctcctctcggattctcaactgatgatagcccgatcggagatcaatctttgaaaagactgccttcccctgaagttgatcgaaaagatcatcgattctaggtaaggaatatttattcttgattgttagcttattcaactcccaatagtcgatgcacattcgcagagacccatctttcttcttgacaaacagtaccggagctccccagggtgacacactaggccgagtaaaccctatgtcaagcaacccctggagttgaattttcaattctttaagctcagctggagccattctataaggggctttagaaaccggttctgctccaggtgccaaatcaattacaaaatcaatttctcgctgaggtggtaaacccagaagttcatcaggaaaaacatctaaaaactcacgaaccacctccatgtcttctgg

SEQ ID NO: 276153 - DNA, 718 bp, Cannabis indica
ctctctctctctctctcactttcgattgtttctcttcagttggctttttgcatgttagccccaaatattactgtatttggatgagccaatcatgtttagtttaggcagcaaatactatacacagcaacagcaagtttattaatattattaggttgggcagaaaatactatatatactcaacacaccacaacacaacagaaagcaagtacattgctgttagacactatatagtgcccaacatcataccaatattaacattttttatattatcaattaaattaaattatgtgtaacccattattaattaacaccaataataatatatcactatttgttgttgtacttagcaccataaatttctctttaattaacatttctcgattaatttgtaagtcacatatttatctataccgaaaaatagttgaaaactatttaattttttttagtcattgtgtcatcactcacaaacaaacatgtagatgtgtacatttgtcttttcctttgttaatttcagagttctatggtcacactgtactgtacgtgtttgttagcttaagatagattataatggatgcaattaataaggattattaattaagtttaaatgcaacataattatggtttcggtctggacccctaaattaacattaattgaccatggtattattttttttttttgacaaagtgattagaatcactcatgaatttacgacgccca

SEQ ID NO: 276154 - DNA, 762 bp, Cannabis indica
acttctacaacgggttggttggtaatactagaactctaatagatgcagcagcgggcggagcttttatgagaaagagtgctaatgaggcgtatgatctattggaggagatggctctaaacaatcagcagtggccaactgaaaggagtcaatctaagaaggtagctggtgtgttagaagttgatgccatcacaaagttaacagctcaggttgaggcattgacaaaaataattgcagggcaagctaaacaagcccaaattgtttgtgagttatgtggaggaagtcatcacttttcggagtgtcaagcagatgtggatgatttgccaatggatgaagctaaagccattgggaatttttcacagaacaacaacaacaattatgggttcaaccagggtaacaaccgaagaaacagtgggttctatcagcaacgaaatcagaaccaacagtttaatcagcaacaagcctctggtggaaattctagtttgcaaacagatttactgctccaatttatgactgaaactagatcttcaattaaagacctgcagactcagatgggccagctagcaactcaggtagcaacccgccctcaaggaaatttgcctagcacaactaagttaatcccaaagaaaactgcaaggcaattaccctgaggagcggtaagaagtatgatgggcctgagttaccacaaccagttgaggtagatgaagaaataaatgctcaaccagtgcaaacaccaacaccaacagcagagaaggctactgatag

SEQ ID NO: 276155 - DNA, 506 bp, Cannabis indica
tgtgaattgagaatttgttttattttattttttatttttgggaagatattgaaataaatgggaagtaaatgctaatgaagtattgagattattgccttattagttgtataggaagatactaatatgaatagtttttataataatttgaatggtataataattaggaggttatctatttaaataataaataaggaagcattatgtcataataccgaattggattaattaatattaatttaatattattaattaaatgtatgatgaagtggtattaggaaaatggtacttttgaatgtgaaaagtgcaatcttaagttttaaggatattaatacaattttggtttaatttaggttgaataaagattatagataccatgttttacgctataaataaaataataaataatttgacttattaagaattttgacatgttttattctataaataagtaatatttttaagagataaaatgaaataattagtatataatattttgaatatttaag

SEQ ID NO: 276156 - DNA, 1142 bp, Cannabis indica
tgctttttgacttgagtcccaattagttgtcccaattaggtaccttagtaaccatttcatagcaagccagtgtgtcttaccaggatttgtcatgaatctgctaagtacactaatagcataagcaaggtcaggtctagtgcttaccattaggtacataacagatccaatagcattagcataaggaattttactcatttcctccttctcagctttgctctcagggcattgcttcttagatagtgtgaactgtgtagttataggttggctagcaattttagatcccttcattgagaatttctcaattatcttgtgtatgtagtcttcctgatttaggataagtgtcccttctgctctgtttctcttaatagagattcccaaaatcttagtagcttcccctaggtctttcatttcaaactcagtcttgagtaggcccttcattgtgtttactcttgccctttctttactgattataagcatatcatctacatacagaagtagatatatgactttattaatatcagtacctttgtagtacaaacagtgatcatagtaactcctagaaaaccccagttttagcataaatccatcaaaccttttattccattgcctaggagactgttttaacccatacagtgacttaactagcttgcatacatagttttccttccctttttcaatatatcctttaggttgtctcatgtagatctcctcttctagttcaccatgtaggaaagcagtagtaacatccatttggtcaatttctaggttgaattgagtagctagacttagcattatccttatagtcttgtattttgcaactggtgcaaatacttcattaaaatctataccctctttctgtgtaaaccctttggccactaacctggccttgtatcttataggttcatccttagttctgccttctttctccttgaatagccatttacagtccactatgctcttgtctttaggtttaggcactacaatccaggttctgttcttcttaagagattccatctcttcatccattgcacctttccatttcctggaatttggtcctttaatggcctcttcatatgattgaggttcattattggccatttccaattcactcataaaggcatatgcaatgtcttcatcccaaa

SEQ ID NO: 276157 - DNA, 782 bp, Cannabis indica
cttaggaagaccttagtaacaacataaggtccttcccattttgcctcaaatttgcctttcatccttctagttatgacaattggtcgtttcacagtaagcactagatctccaaccgaaaaagatcgaaatttaactttcttgttgaatgccccagctacctgggcttggtaaatttcgagcttttgttgaatagcaagccgcttttcatctaatgcttcaagctcggctagacggacttgcacattttcatctgggtttgttagttgagtagcaattcttaatgaaggtatttgtacctccaaaggtaacactgcctcagacccaaacaccaagttataaggtgtacaaccagtcgcagtcctcacagtggttctataagcccacaaagcttctaggaggcgttcatgccaatccctcttattctttgttgcggttttcttcatgattttgcataacactttgttaaatgcttctgcttgaccatttgaagacgggttgtaactagctgagaaactgtgcttgaatttgtacttgttcatcaacttgaccattgccttacatttgaaataaagggcattgtcggagataatttttgaaggaaccccgtatcgataaattacgtgggtccttataaaatcagcgacatcttccgcccgtacttcttttagtggcacggcttcggcccatttagagaagtaatctgtgatggccaaaatatacttatgggctttggaagagggtggcgtaaaaggaccaatgacgtccattccccaagtttcgaa

SEQ ID NO: 276158 - DNA, 575 bp, Cannabis indica
gaaacaagaggcggctagaaaggacaaagagctcgaagaccttcgcaagtctaaggagcaggctgagctcgaggctaagaactctcaggcgaagatcgaggagatggctcgcgacttggaggtcgagaaggagaatgggaagaaacagtatgatcaggcagtttctgactatatttacaccactctttccaaaatcccagacttcgacttctctatcctcagagcagaagccgctgagatggctgaggcttttcgcgccatgtcgcccactcaaactcaaggtggtggaggggatcttcctgaggaggccgaggttggggatgctgaggaagttgagaacgaggccgttagcaaagtcgcgaatgaaactgctcctgctgctccagatgcttgacttttctcttctatgtttaaactgtttttgaatttactagtttagtgtttatgcggtacaggggtactcgcactctgtactaagacaaatttgcaatttactttgaacaaatttatatcctcgcggggataattatcctttaacattttcgcagtacacgggtactcgcgtttttaatata

SEQ ID NO: 276159 - DNA, 509 bp, Cannabis indica
atagaaaaaatctcgagttagcatcacctctcttttggcctactagcatttagctttcaaccatgcacttctttcttcagcaaaagctatattttgccattccttttttgtctttcttctttcctccattaaagtttgattcccgccaacacttccttccaatttatccaattcgaccagccttctttccaaaaaatttttatcatctgattgttaccgaaagtcgacttactccacgacttgatgttttcttgcctttctcgaattcaacatacatgctttgttaaggtgagcatgaacaccttatgtttcgctcgacaactatcaacccctaaacgatttatatatccaaaaccagtgggttttaaggataccactacctagtacggctagcgaattcttagagaaccttgcatgtccattcggacaatgaaagccattacagtgcatacttttgaatattctgatcaatcctccatacttctgtatccattccattgttccatata

SEQ ID NO: 276160 - DNA, 1063 bp, Cannabis indica
tcgagcaattcggcttctctagttgaggccaaacgggccagtgcgtctgcatgtgaattttgagcacgcggtactcgagacacagttacttttttgaatttctgcattagttcgcagacaatggctaaatatttaaccaatctcccgcctcttgccagatattctccattcacctggcataccacgatttgggagtcgctaaaagcctgaaggtactcgactttcatctcgagagcgagtttcaatcctgcgattaatgcttcatactcggcttcattgttagatgcagaaaattcaaaacgtaaagcagcgtgtaccttaaaattattgggactgattaacaagatcccactaccagagccttcgctatttgaggctccatcgacgtacaatgtccacatctctctgttcgctatagcaatgtcgcttctatcttctatgagtgctacctcggtgctggggaattcaagtataaaatctgccaaggcttgccccttgatcgcagttcttggtttatacttgatgtcgaactgactcaactccatcgcccacttcaacaatctccccgatgcttctggttttgccagaacttgccttaaggggtagttcgtcaaaacttcaatactgtgagcctggaaataaggtcgcaattttcttgacgatgttatcaaggcaaatgccaacttctccatttggggataacgcgtctcggcatccagtaatcgcttactgacataatacaccgggtattgacgtccttggtcctcgcgtactagtaccgaactaatcgcatattccgacactgctaaatagatggacaggacttcaccggtcattggctttgacaagatcggaggttgccccaagtgtgtttttaaagtttgaaaggcctgctcgcacttttcggtccaatggaaccttttgttgcctttcaaaatctgaaaaaactccttgcacttatcagaagatctggatataaagcggtttaaggctgcgactttacctgtgaggctttgaacttcctttggcttggttggtgatggcatttccaccaatgccctga

SEQ ID NO: 276161 - DNA, 499 bp, Cannabis indica
tatttataagatctattgacaattagactacaattaaaatcagatcattagatctgtcaacaagttaatcataacaacttagatcagataaataataggtttgttaaaagaagttttttttttgaataaataataaataaaacaagcacaatatctatgtaacaaatgtgaaataagatatttatacttatataattaaattattatttaactaaccaaatattttgaaaatttagggttgttataaacaacctaaaatatcttttcaaaatttgaaattcaaaaatgaaactaatttaaaatatctaggtttatttgaattattttatcaaattaagttaaatatctaataagataaatggtttgaaaataaccaaatagatattttcaatattattttctaatcttataatttaataaaattaaaataataaaataaactaattttaaaatagatatggttaggtcattattattttaagaatagaataataaacaa

SEQ ID NO: 276162 - DNA, 593 bp, Cannabis indica
gtttatatatatatatatatatattggactttagtttatacagtattcgggtctcagattcacacccgaatcctatatagcagtattctcaaaacccgaacccgatacccgatttatacattttcgagttacacccgacccgacaatctaggttttcgttttttttttttcggttttttcgacagcgcgtcggggcgggcggtcgaattttcgggtttccaagtccaaatgttcagccctagtagcgtatctttatcgtggaacatatagagcgttctatgtaactgagagtccaattccaagttctatgcgtggacacaacaaggaattaataagttagtggatttacttcataaattcttgatctgcttattggaagcttggttataaagacccatggtccccatactagttgagaccatactgcttgtaaggctcagataattgattttgattcatcaattataattctaaagttagactatgtatagtttatgaattttccctaagcaaaggcaaaattgtgaagaaaagagattctaagttttatttattaattaagagactttatatgtgtaattaataaatatatt

SEQ ID NO: 276163 - DNA, 568 bp, Cannabis indica
acactattgccagcatttctttctctgtagtggcgtaatttaattgagcatcattcagagttctactagcatagtagattgtgtggaatactctgtcaactatttgtcccaagaccgctccaatggcatagtcacttgcgtcgcacatcatctcaaacggcaactcccaatttggtgaagttactatcggtgctgaaatcaatctctcctttagaaccttgaaagcttttaaacaatcttctccaaactcaaatggaacaccattgacaagtaaactggacaaaggttttgagatcttggagaaatccttgataaatctgcggtagaagccagcatgtcctaggaaaatcctcactccttttacacaaactggaggtggcaaattctctattgttgaaactttagccttatccacctcaattcctccctttgaaattttgtgcccaagaacaatttcttctgttaccatagagtggcacttctcccagtttagcaccaagttagacttctcgcacctagttagcactttttccaaattttccaaacaatgatcgaaagaggaaccaaa

SEQ ID NO: 276164 - DNA, 504 bp, Cannabis indica
agactatgtctactttatgaattttcactaagcaagggcgaaattgtaaagaaaagagattctaggtttatttattaattaagagactttatatgtctaaattaataaatatattaaatgacaatattatttaataattatttttagttattaaataattagaattggcatttaaatggttaaattggaaaattggcatttttgagaaaatgggaatgaaaaataacaaaatggtaaaattgcaaagtgaggcccaatatcccttgtttggccgcccactatgcatagcaattaccatttatagttttcattattttaatgtcatacaattctaacctaaacctagaaggcattctataaagattgtttccttcagacaaaagccaagctaccccttctctctcttttcttctctaaaatttcgaaattcgcttgagtgatagagtagtgccctacacacatcaagtggtacctcaatcatagtatgtaagactgtggaaaatc

SEQ ID NO: 276165 - DNA, 400 bp, Cannabis indica
gaatctatagcttctatcaagacatagaagtgaaacgatgatttccttcgagctttgctaaatagaggtaaatggaagagctcttatttcagtgattatattttagttcactgaaatatcatttacaggaagctaagtattttaaggataaaatacatcgacgagtgaaacggtaaatttatccctactcggtgtaaatcatatataaaggatatttgagtattgagattagaacaatggttaaatgttatagcgtatctatatcgtggaacatatagagcgttctatatgactgagagtgcaattacaagttctatgagtggatgcaataaggaattaataagttagggaatttacttggtttattctagttctgcttattggaagctcagttgtatag

SEQ ID NO: 276166 - DNA, 897 bp, Cannabis indica
atgtattcagctttctgtagtagacaaagcaacacacttctgtaacctcgattgccatgaaacagctccccctgcaaatgtcatcaagaatcatgaagtggatttcctggaatcacaatcaccagccatgtctgcatctgtgtacccattaagcataggtcaccactaccaaagcataagcacaacctagaagtacctcgtagatatctcaatatccatttcactacttcccaatgatccttaccaggattagagaggaatcggctaacaactccaactgcatgagcaatatatggcctcgtacaaaccatagcatacatcaaactgccaactgcagatgagtaaggtattgaagccatttcttgtttatccttcgcacttgtaggacattgtttggaacttagcttgaaatggcctgcaaatggagaactagctgctttagctttgctcatgttaaatctttcaagaactttttcaacataagcttctttagataaccaaagtttctcattcttcctgtcacgggaaatcctcattccaagtatctgtttcgccgatcctaagtctttcatagcaaaagacttgctcaactcttcctttagcttctcaatctttctgacatcatggccaacaatcaacatatcatcaacatacaacaggagaataatgaaatcatcatcagaaaacttctttgtaaacacacaatgatcaaaagtagttatggtatatccatggctcgacatgaaggaatcaaacttcttgtaccactgtctaggtgcctgtttgagtccatataagctttttctaagcttgcacacaagattttcttttcccttgactttgaaaccctctggctgctcaatgtaaatttcttcttccaagtcaccatgaagaaat

SEQ ID NO: 276167 - DNA, 678 bp, Cannabis indica
ataatttttattttatataaaatctatatctttaattgtactaaatttttttaactttattttccaattcatattcttaaaaaatatacctatcaaacaaaaataaattacattttaaatattatgagaaaaaaattaaataaaaaattatatgaaattttcttagaaaaaattaaaaaaaatatacatgagttagaaaaaattatgaaaataaaatcaaaataagtattgaaattaacataaaataatgtgagaaaaaatattaagagtaatttttaaaaattatttaagtttatattttttttaataatggggtgtacttatcattttgtggggtgtaaacagaactccccttcaaattaatatgatggaaggtaataattcaatcctaccattttttaaggtatgaacattaccctcctcaaaggtagttatattactaggggaataacattccaaggctaaaccctctaaacaaacaaggtaatgtttcacattaccattcccttacgaagattaacttattccaaacaaccccttaatgtataatctattctatataaagtatgcctatataactgaaattcttggtttatgagaaattcatgggtaattttttatttttatttaataaaatattatttatatataataaaataataataaaacaaatcacat

SEQ ID NO: 276168 - DNA, 470 bp, Cannabis indica
atacatgtgtgtgtgtgttaggctcgaacaggagtggtggtcaccaggcagtttgagtagctctttttaattaagccggacctggatttggttttaaattgaacgacagattaattagatgatatctatttatttgtctataacattaatttaaatcaagaaattagtaaataaataaataaataaaataggtgatgacgtaattaagtagatggaggagtagcatacaaggttactacatatgcgggagttttgttaggaaatccagcagcggcgtccgtgattttgtcaaaaaaagaaaactatttagcttctgcttcacggtacttataatatcccactccccttgcctaccattttctcaccatatactcaaaaccaagcaaaacaatatggcaactacatatatatatatatatttattatatatacatatatatgactactcaacttgcatatatagagtcatt

SEQ ID NO: 276169 - DNA, 557 bp, Cannabis indica
ctttggtaataaatatcaaaagaaagcaaatagatgtgtaatcaatagtaaaagagagaaaggcttcaagaatcatccatatgcttgtttagctattttgtacctttgattcactaagttgacacaaatgatgtaacattaaagttcattatattttgagtatacaagttcttaaaaataaaagaaataatttaatcttatgtagaacctagaaatgacattatacatcaagcaataatgcaataaaagattaaatataaaactaaacatcaatattatttttactaaatagtaacacatagaaagagcatgactaatcctatatatttttagtaaaaataatgacaaagagatagagatggagatggaggtgatagtgaaggaaatgaacattaatattacttttattaatttttagacacatagggagagcatgactaaacctatatatcatttaacaaaaagtaaataaaaatgaacataaaagatagaaatgagcaatactaccattactcattactataatcactaataaaatatatagaaagagcatgact

SEQ ID NO: 276170 - DNA, 528 bp, Cannabis indica
ccccaatacgaagggcccttccggcggccgcctgggccttagtgtaagcctgctcctgttccctcttgaagaggtacttctggtacttatcctccgctgtggcgatgatatcatcccggaataccttctctgcggctggagccctcacattcgggcagacgactttggaaaggttggagtcatccaccaacagatgccccagaatcagcttggccttccgacagtgctccgtcgtgaccaactccccaacatcgaaggccttcttgtcatacgtggcgaaggtcttggcccgttggaggaaaagttgagtaggttcggtccgcatataaggagggatcctagcccactccgtgagaagctccggatgatccacggcctggaaaccagaggagaagaagaagcggtgacggtattccttcacatgcttcgcttctgataattaaaggggactaggccctcattcaaagggtgggcccggagaccgtaaaaaccttccttaagtttgtctccctttttagggatggaaac

SEQ ID NO: 276171 - DNA, 590 bp, Cannabis indica
aaaaaaatataaaaatgaaataattttattaataaatattataaataattatttaattaaaaaacatttatatttaattaaatattataaataatattagaaatattttttctatatttatttaattaacttttttcaaatttatattattaataaatatcaaaattaaaattaataaacccacaaattatcatccatacattatttaaaatttaaaaattaaaagattattatccatacattaatttaaacttaaagaaatccaaacataataaaaattaagatacactaattaatattgtcttgattaaacaaatcatcttcaaaatttgagccagtagcatttaagttaatatcaggatttggtgcattgtcctgagcttgcgatactggcggtgatgggtaatatggttgctgagcagataaaatctccggaaattgtcgagtctgtcgttgttgtgctaaattcggagattgttgttgttgcgaaacatttggagattgttgtggcgagaagttcgggggttgttgctgaaactgaccaggaaaaaaatatggattttgtgaaccgaaaaattgacccggagaag

SEQ ID NO: 276172 - DNA, 735 bp, Cannabis indica
ctgagtggaagtgggaagaaatcacaatggactttgtggttaggttacctagaaccacgggtttatttgattcaatttgggttgtggtagatcgattcacgaagtctgctaattttctaccagttaaaacaaccttctcagtggatcaatatgcagacttgtatgttaaagagatagtaagattacatggtgtaccaaagtccatagtttcggattgggatccgaagtttacctctaaattctggcagagtttgcaacgggctatgggtaccaaactaaagttcagtacagcttttcatcctcagacggatggacagtccgaaaggacgatttagatactggaagatatgttacgaggctgtgttatggatttcgagggctccttgagtaagtacctaccgttgatagagttttcttacaataatagatcaaagtacgataaggatggatccctatgaactgttatatggcagaaaatgtagatctcccattcactaggatgagacaggggataagaaatacctaggtccggagtcagtacaacggactaatgaagtgatcgagaagattaaagctagaatgcttgcctctcaaagtaggcaaaagagatatgcagatccgaaatgcaggaatgtagagttcaagtaggggatcttgtattcctacgagtctctccaatgaaagggatcaagcgtttcgggaaaagaggcaagttatgccctagatttacaggac

SEQ ID NO: 276173 - DNA, 584 bp, Cannabis indica
cagctggcaggtacaaatgtttactgagtttcaatcttttgccaaacgctataagaaggatcaaaagcgtcagcttgcctttgaggcctcaatgtatcaaatggtttgctctatcaagtccactcttttgcaccattttcctggggattctctgcctgacatctctctgcctgagtttcatcgtgattcgtttggcgcctcatcagacacatctgggaataatgcacatatgcagggggagccttcagccttggatccagtcactagttcagcacaacctgatctagatcctccagctgacactgcaacaccctttgtgtcgacaggaccaccttcccagggggagtctggcacagcacaggaacctacagatcatattcaatgaagggggagatatatgtcatttgttttgcttgtgtagtggatttgtttatattcctaaaaacttttatatctggtttattaatattttctggtctttagttttgtgtgttagtcattgaacataacctgtcaagggggagaatgttagtgttattattttgtgacagtgtatgttctgttcaatgtctagtcgtgtctgg

SEQ ID NO: 276174 - DNA, 189 bp, Cannabis indica
atactgagtcccacaactgctgtgtccaacacggtactgagttctgaacgttcggtcatactccagcctgtaccgacgtgatacagtgtcagcctaatcggtcgaaccggtcatactccggctgctggtcatactccagcctgtaccgacgtgacacagttggatggttcgaagccaacatacatatct

SEQ ID NO: 276175 - DNA, 723 bp, Cannabis indica
catgctggaacagaagaatccaggcactattactgacattgtcagcgaggataaccggttcaagtactgtttctggtcactcgatgcttgtaggaagggatttaagttttgtcgtcctgtgattagtatcgacggaacattcttgaagacgaagtatggaggaacactgttagttgctgttgcgtacgatgcaaacaaccaattgtttccggtagcctttgcaattgttgacagtgagaatcatgactcttggaagtatttcttgcggaagttgaaggaagccattggtgaggttgaaaatcttatgttcatatcggataggcatcaaagcattgaacatgctgttgatgttgttttcccagaagcatgccactgtgcatgcttcaagcatattactatgaatgtcaatcacaagtttaagactgatgtatgcaacaagcaaatatggcttgcagcttacgcatggaacaagacggaatgtgataggcattttgaggtgctgaaacagatggaccctgccattgctacatacgtcgagcaaatagggtttgaaaagtgggctcgtccttattgtccaggcgatcggtacaacataatgacaagcaacgctgccgaaagcttcaacaaggtgacagaagaattcagaaaatatccagtaactattttggttgacttcatcaggttcacacttcaaaattggtttgcttctcgtctcgaaaaggc

SEQ ID NO: 276176 - DNA, 652 bp, Cannabis indica
aaattctaacaacagttctcaaccaagaatctataactataaaaaaaatttgtaacattaactattttagccttaaaaaaaaattaataattaagtgcttaaaatttaagtatttttgtagcaaatagatataattgtgtgtatatatgtatagagaaaaataggatcataatccccaatattttcattttgttagcaattaatctttaaaactcaaattttgatgcatggcaaaaccccaaaattaactttctgttagcatttagctatttttatctatttttgaccgttagttgtcatattggactatccacgaggacacagtttacacatgatacaatttaattagccaatataaaaatatttaaaaataaagtaaaatttaaactaaaaaatataataagcaaaaaaacaatttaatttttccttttttttttttttcagttctcctctctttgtctctctctctctctaatattctgatctcaccaggagacttctctctttttcttctcttctcatgcaagcaacctctctctcccgtctcttctcaagtcggattctgtttctctcaaacactaaggaggcgtttggttgggaggaatgaaaatataggaatagaatgggaatgagaataggaataggaatggaa

SEQ ID NO: 276177 - DNA, 867 bp, Cannabis indica
attttcattatcaatggctcttagccatttcttctcgtcttgttgggaactgcttctgcatagtagtacggctctccatttttcaattttcctcagctgcagcaagcgcaaaaacagtcgtagtcaacaaatcccagcgtgtcagggggtttatatctcttttgactatatctctaaccagttggtaatcctatgctcctgatgatgttgatcctccctcttcttcttcagaactatgatcacttaatgttgcaaaaatatccacttgatcagtagtctctactttatctttgtcagtttgtatctcaacactttgtttctcttgactgtagtctatgttggatgttttcattgccatttcatgttctttgaacacaacatccctactaatgatgcattttttgtatccatcttctaggcaccatactttgtaccccttaaccctatctggatatcctagaaacaagcatttgatggctcttggttctagtttatcttgtctaatgtgagcatatgctgtgcagcgaaaaactttcaaatgatcatacattggcatttctcctgtccaaaattcttgtggtgttttgcattttagagctgttgaggggcatctattaatgaggtaacttgcagtctgtgtgtatatatatatatacatatatacagttgtatacccttgtaagttgtaaaggagggaaaccaaataaggaaaaagtgatgatgaattcaaatatacaagtcaactgaaaagaagcgttgtattttttttaccgttgtaagttgtctgtgtgtatatcacaataattaatttacagttgtattttattattttattattattttatttattacagaatagggaaacaa

SEQ ID NO: 276178 - DNA, 459 bp, Cannabis indica
cattttaaagcttaaaaattccaaactttgaacaacacaactagcatgcattaaaacctatataatccattcaattaaaacctaatcaagcttctgtaaacaacaattaaacacagcaacaacatactcaaataatcatgcatttactcaactttttcatcaaaatctcaagaaattaaagagaagttacaagagctaacctagcttgaaatgaaccttaaagagggatgaattcacaagcaaataacaatggagaaatcagctccttgctgcccaaagcttggctgaaaatgagagagaaaaacgagagtgttttctttgagaaattgtaatttttttctaagtttgggaaaaaatgaaataaaggccacataatcccattttattcagccaaataatactaaaaataaacatttacttttcaaataaaaagtcattaaaagacaaaacactaatggg

SEQ ID NO: 276179 - DNA, 690 bp, Cannabis indica
gttttctgggttttttcatttttgtgcgattttatgcgactttatacgattctttgtgcgatttcatgagaaatctgaggttagggatgacatgattaattttggcgacattgtacgatggttatgcgattatgtgcgattttgatgttaggcgatttgtgtgcgacttgttgtgcagcattatgcgattttgtcatgtatgtgttcttgtgcgactttatgcgatattgtcccttgtctgtgcgattattgtgcgacttcatacttcaacatattattgttgtattaggcgacgttgtgcgacctctgtagtaccttgtgcgatgtatgtgcgatattgtatgctgattttttctgtgtttttctttgtatttttctgtgggacagattcatctgtatttgtgcctgtgctgtatgatggcgtttggactgtggagggtttcaactgggtatttgattcctcaaaaagtaagacattgatattggacgttgagtgtacactgaaaaagttgcgtgaagttttgcatgaagagttggaggtggaccccttggtgtatgaattgaagttagaagttctttacatgtacatgaaaggcactaagtttccacctgaggttttagtgaaagatagtcaactacgagtgttcttgagcatgaaggcaaaaatgagtgtggacaacttgttgccac

SEQ ID NO: 276180 - DNA, 597 bp, Cannabis indica
gccatgaagtttattttgcccaaaattttattctttttcaattcatataattcagccgtaagcccttgttgaaacagtataaaaggaacatgatactctcactcatccaactaatgtcaacctgactattcaaccaacctagaagagagagttccttccttagtgatttcacctacttcattgtgcttcctacttttacccatagtgaaagagtgatatgcctacacataggaagttaagtacttaatcatagtgagtaagacggtggtaaccaaagccgaaggagagaaagagatccaggctcaaatcttgataatgctctgctacagaaaggaatcaagagctagagatcttgaacgaaaagagtcattatacttcggtgcaatcaatgtaaggttttcttaaacccttatgtatttaatttcattgttttagagaattcatatttatgatgttaatttaacatacttgttagtaaatctagatcctagtaaaatattcccaacaaaaggtatcagagccatggtaatgatatactttcacgaaatatggatttaaaatgatgaatattatttgcgtgttgatttggatgtattc

SEQ ID NO: 276181 - DNA, 540 bp, Cannabis indica
ggggagcttacggccgaggtggacaggttgaaggagaaggtcaatgccttggagacagtcggcctcgagctcttcttcgatttctggaaggctaatccccgggccaactttgactacttgggcgaggctaaggacatgtaccttgagtactgcgcggcccaagttgcttatggtgggaacgaggcggctgcttcaacctccggccaagctgcttcgacctctggtcaggcagctgatgcttctcctgttcaaacaacatatcctcctgctccagttggcccagaagaaccgaaccaagagcctgggactccagctgtttaaacacttctctttttatctcctttatatatatatatcttattcggcctcagggccttttttaagacatcatgaacgaccaagcagtctttaaacttggaattatttttcattttttggacaacgggctgaccaggcatcttttaatctcggtactatgtgcttttgccatccttaatgaatttcattctctatttagaattgctgtgcaattgtgattgt

SEQ ID NO: 276182 - DNA, 629 bp, Cannabis indica
ccctaaatcaagaaaaagggaatgggggtcccctaacccctggaaagaggccccctccggacacgtgtcactcaggaaaccctagaaggattccatggacaagtgtcgggtgcagtaaattcacagaagacggctttacgcgataaagaaaacagaaagaaaagattctgttctatgccctaagcagcattaaacgaagaacgtatggccttctacaaagaaaatacacaacaacaacagaggcatgacaatggcgatcctaccactagagcagtaaattcaaacagactatatgaagaacttaaacacttgcatgcccagaaatctcgaatgcaaaccgagaaaagaacaaacagaacaagtaataatatgccattcaataacagagcaaaggatgcaaaaaacttacgatgaagtgttaaactgggggtcctgatgcaagtcgggtgaagacgagaaggactggtagcaacgagcaaagaagaactgggaaaatcgcaaagtgtttgaaggcttcgttctaggtctgagaattttctctctaggaaattcgagcaaagttggcaagaaatgggaagtaaccgaaatgaagaaaagatggtggcttttataggcaaaaatgcatgagg

SEQ ID NO: 276183 - DNA, 495 bp, Cannabis indica
aagtaaagctagggttgggtgcatggagtatgcatcggaagggaccgatattgaactttgaatacaccgatattgcttgggagcttgggttgggtgcatgggttattatttgagaatcatatagatgtgatcctcccgcatttattggatcaaaatgatcgtgtatttgaatacatctttaattattgtgtctgaggatgtccctacaggagcttggttccagtgaccgtgatagcgagctggagcctttttccttatccttccgaggtcgacaatgtacgccttgttgcttctttgtttaaaagtttatcactttatttgggacaatcttaattcttgttattagagtttctcgaagcttgccatatctctatgatctgatcccaaagttatagggatttcttcggtgactcacgatgcgaaagctgaatttgctaagtgttggcgtgctgcgcggattgctcactgcccggctaagaggacttcgtccgagcg

SEQ ID NO: 276184 - DNA, 505 bp, Cannabis indica
actgtaattgtgaataaacatatgatttggacttaacagattttgtgtataaacataataaacatattaaaccataagcatgtaaaattcatgtaaacagaaatcacttcaaattacttatactgataactaatcagattgtaaatggttttatttagggcacaaaactcaacacccgtacctcacaaatttatcctcggaggtcaaccggatgatattccggtcttcccccagcagtcgagcaagattttgagctctatctctaaaagcaagagtgaggggaggacggtgatatgttggaatctactgaaaccgagtacgggtgatgcctgcgccatccaccaagaagtactcatcaacaaaacgccctattttgctgatggccgagtcatcggtgcccgtcaaccacttgaagtctggttgagagaaatagaagtaccccgacctcccttgcttgggggtggacttcaaatcaaagaaccagctgacctcgtggggagaaggc

SEQ ID NO: 276185 - DNA, 855 bp, Cannabis indica
aaaaaaaaaaacaataaataaaaaaagttcataaaaaaaacaaacattaaataaaactcaccacaagccataaaataacaaattattaaaattgtttggcttgtgggtgagacttgcaatacttgcataaagttccaggcttcaccggtttaccgttaaagatgtctaatttgcaacgacggcatccttcggggaaccctggtggtggagccggccatacaccagttttgctaaattgagcttcaagttgtatcaaccttaactcgttccaatttcgttctttttcgaaagctctatcggcgtctagaactttctgcatttgaggagtaattatgccaacatcaggctcctgcttgagctcttcaggagttaggattgggaatttgcccttgttctttctaggcgccatatttggaacttaagaataagagaattttgcctttaatttttaagtgtaagagagaagtagaagacaagagcacttatgaataagaaagggatttgcttttatagagcagtatacatgttgggaatgtaggaaaatttaatggccattaaatgtgtaactgtacaggtgaaacgcatgaaatggtgtatttgtcgacagaatatcgatactatgtcgatattatgtcgacaacatgccaatttaatgacacggcatacttatttgtcgatgctatgtcgacgttatgtcgatagcttatcgacaagacacgtgttttgttggaaattattttaccaggatcttagatctactcacaagtatgttgattaacaccctaaatatgaactttctaaaacgattatgaaataaacacatataaagtattagaaacctttacattgggtgca

SEQ ID NO: 276186 - DNA, 298 bp, Cannabis indica
cagcacaataaacaggatacaagtatgtgaaaagggttttgtgtgtgggcactactctaacactaagtatttcgaaatttcaaggaagaagaaagaggagaaggtggcggctaggaatagagagagaaggctcaggtttttctctgaaggaaatgaaaatatcagtttaaaaaaccatcacaagtgcccggccatagagtgtaatgggccttacttggattttgtagttttcacaaattttatttctaattaatcgaaccatacaaagtatcaaaattaacaaatatgcccctaaaac

SEQ ID NO: 276187 - DNA, 875 bp, Cannabis indica
atcgtttcacttctatgtccggttagaagctataaaatttcatatctatgattagcactcccactcaattgaactaccatgttcttaacctatacgtcacgggaagaactatttggtcgactttaactaatagataattaaaagaacacaaataatgcaactgaactagaacctaaccatcttaggattgagatcatttgatctaggatcaactaggtgatattgaattgaatagatactacggtaagtttatcatatctaatccaagttcaatatcggtcccttctgatgcattctccatacatcccacacaagcttactttaaccaatgctctggaaaggacataacacttatctaaggtgtaagtaaactacattgtagattatcatatcagttaaatcctgtgtactaataaatctaggaatacatttaatcacacaatcttgattactttccactatgttgacgacacaataaacaagaatatcagtgtgataaggatttggatgaatttataaatcaaataagtaaataaatgatcacacgaaccaaataacacattaaacaagtaatgaatttaaatctgtttctttattgataattaaatagaaaagattacattgaaatagagttttatttagggcataaaatccaacaaactcccacttgcactaatataaaacagtcaatacattttaattaatcataaattcaatctgtgcttttcaaatgtagttgcagtcaaaactttggtgaatggatcaactaagttatcttcagtgtccactttctccactagtacgtcccctcttgccacatattctctgacgatgtggtatttcctctctatgtgtttgcttctctgtgcttcgag

SEQ ID NO: 276188 - DNA, 956 bp, Cannabis indica
actcaaaccggttataattgaaaggtaacaggttctataatgtaataaataaaaataaataacataaaataactcaaaccagttataattaaaatagaatcggttctataacagtgttataatgaataaaaaccaataacacgaaataactcaaaaccaattataattaaaatagaactagttatataacataatgaatgcaaacaagtaacacacaataaatcaaaccgattacaattaaaaaaataaaggagaaatcagttaaacactgaaacataaattaaaaacaaaactagttcttcaataaaaaaatctcataacatataatacctcataaaaccgattataatattttttttaaaaaaaaataggaagatcaatttcaaaaaatattgaggcataaatatgaaaagaatcagttccataacaaaataaataaacacaaataataacacacaataactcaaatataatatcaaaaaactggttaatgtttatcaactagttaaaatttaagacaaaaaaacttgtccgtaaagcaactaagttaaaaactcacacacacaaaaaaccagttaaataaaatagttcaaacaaaaacatccattcaacatgctccaacccaccaaataattacacccatatcatatctacgtcaaaaatactcattcattatgtctatatagccggttctattttagttataaccagtttgagttattttgtgttatttatttttattcattataatattgttctagaaccgattctaatttaattataattagtttgagttattttgttttatttgtttttattcattatgttacagaaccggttatatttcagttataacttgtttgagttatttattttcattcatcatgttatagaaccaattctatttttgtttatatttgagacatctacttatggtgacttttactggcgacgat

SEQ ID NO: 276189 - DNA, 592 bp, Cannabis indica
gcttcgcggcggatatataaaatatttaattatataaaaaaaaataattatgtattttaattaataataattacttagtaaaattatattgaaattttaagtttattattaaaaaaattgtgacataaatacttaaaatattaaatttgttgttaataaataccgaaattcgaaaaatagtagcataaatcttcatttatggtttaatttttattctaatgtgtgtgttaagttctgagttcgaattttactgtgtgtgtttttaatgtttgagttttagtgttttactggagttttcatgtttgagtttgtgtttatgagatctgttttcttaatttatttatttttatatattttgagaacttaaaatttgatgttgtttctattgattattgggattgagagtttaatttttcatacgagaattaaagtttgcattttttgtttcatggattgaaaaatattagaaagtttatggaatgagaattttgaatatatgaaaatagaattgaaaaatagcatttgaatcgagaatcaaagtttattgttaatctacttacaaaaaaaattattgttaatttgtaaagataat

SEQ ID NO: 276190 - DNA, 498 bp, Cannabis indica
ttttcagagttttgcacaagagtaagttcaccttcagaactaccacacatcaatcttttccaacgacgccgaatcgttcgaagtcgctctttaggctttgctttcttcttatcagctttaacaaaagaacccttcaccatctcaatcttgcaacaggtaggaatgtcggttggggcaaaaacattaaaattgacctcttcatcttgcactctcaactttaactctcccttttgaacatctattaatgctcggcccgtggctaagaatggtcttcccaaaataatgggaatagttgaatcttcctccatatcaagaattaggaaatcagcagggaagataaacttaccaaccttcaccagtacatcttcaattatcccacgaggatgagtcaaagaacgatccgctagttgtaaagtcactgttgtgggctttgcttttcccaatctagccttttgaagacagacaagggcattagattaatgcttgctcccagatcac

SEQ ID NO: 276191 - DNA, 601 bp, Cannabis indica
ttcctccagctttgcttttcctttacctacacagggtagcaaactgatgagtcaacagactcagtaagatatgcaagatatatataaaaataatgcgatgccggctttatgattaagccgccctgagctcaataattaagctcaccaaatggataagaacgttcttaagggaagtacgaccactgtaccaaatgcactaaagtaccgaccctgtactcgtgttggtagagccttaattgtactctcggaaactactaagtgttgtaccacatgcacgacgtatcccttggtactcgtgttggtaacactgtagccatactaatatgtcacactatactaacactcttaaatcacattcatattagtgctagtagtgcgaatatccaaaataagcatacattcatatattcttatgctatcttacctcgttccgtgctcaagtgtgccggtcagcttgagtgaaaatgcagctcgacgctttacaggaccctaaaccataatgttcaaaattcgatgagagacacgctaaaacacttatcggggatctaaaattgaatctaagattaaccctatcgataattaggatgccaataccctaaat

SEQ ID NO: 276192 - DNA, 262 bp, Cannabis indica
tccgggagactcgggcaatgtcttttcgaagtatggcgagttccgccataattccttcattcaacgtacccgtggagaccgcgggtccgtatcttttttggtcaaggtgatctcggagatcaccttggttcccattgatttgatttctcagatcaacgggaggacacctctgtcctcttctccctctacccccgggttcttggtgcacggaaacgctttttcggtcctctcgatcctgagggccaaagctccctttttgggg

SEQ ID NO: 276193 - DNA, 529 bp, Cannabis indica
cccctaaagctgggaaacttgtctcatcaaaatgacaatcagcaaaacgtgctgtaaatacatctccagttgtgggttcgagatatttaatgatagatggagattcatacccaacatatattcccagcctcctttgaggacccatctttgttcgttgtggtggagcaatcggaacatatactgtacaaccaaagattcttagatgggaaatatttggctcctgaccaaaagccaattgtagtggggagaatttgtgatatgatgttggcctaatgcgtacaagtgccgcagcatgtaaaatagcatgtccccaagctataattgggagttttgttctcataagtaatggtcttgcgattaattggaggcgcttaataaatgattctgctagacattttgtgtatgtacatgagcaacaggatgttcaacatttatccctattgacatacaataatcattaaaagcctgtgatgtaaattcaccagcattatcaaggcggattgtcttgattgcatagtctgggaattgt

SEQ ID NO: 276194 - DNA, 452 bp, Cannabis indica
agaatacaaaatgtctgcctctggttcgaagtcttcgaagaagagcgggaaacgcatggccactctggaggaggtttccctggaacctgttgcccaggaggggtataaatcccgagcgaccgggtgggacctcatcagctggagaatattatagacgttgctgggatcaaaccttccacatcggggacctatcaccaaccacctcgcgactcggagacgcctaaccacaattacggcggcttcggagcctggagccagacacacctgatggccggtgccatgctcccgcttcaagactattttgttaatttccttgtatttgtcggccttgcgccataccaactcattcctcaagcttatcgcctgctttcaggcttatttattttttataccgcccgcggatggggatctcccagcccggcggaaattttatatttttatgaacttgtatc

SEQ ID NO: 276195 - DNA, 822 bp, Cannabis indica
tgttaggaagcatgttagtagcctgggtagaataggcgcatgtttttaatttccaaataagcagcattagtaagttcacgttgatcatgatctgaccatgctagctcttggttacgcaggctgttcacactagatggacgctaggcgaaataccaggagtcagggcaacttggtcggatcaaatgaaggtcagggagctcagtttcccccaaatgctcggggccgaggtagaggtcccaggggcagggcacgtggtcaaggtgatgttaacccaccacaggctacccaaggcactcaggaagctcaaaatagggaaaacaggtttgcagaaatgcaaactaaaatcaacgaacaagaataagtgattagacagttaagacaacagggtgctcctgcagtgcctgctctagaaattccagtggcacctgcccctgctgtccaagccgaaccagtggttgcaatgaattggatggaacctctgtatgaaaggttccgtaagcaggcacctccagtttttctgggaggtccgaatgttatgaaagccgagcaatggctaacagtgatcactagaattttgaatttcatgggcatcacggggaacgataaagtggtttgtgccacttttcaattccaagaagatgccttagtttggtgggacatggtgtccacgatacatgacgttactacaatgacctgggaaaagttccaggaacttttcaatgcgaagtattataatgaggcagtcagaagtgccaagagaaaggagttcactcacttgacccagaaggaaaacatgagcgttacagagtatacaacccagtt

SEQ ID NO: 276196 - DNA, 404 bp, Cannabis indica
ggactagtgattttggagaagtgtaaaaacctatttgaattctctatgtctaccagagagactgaatgttaaagttgtaggaaagatacttatttagtctacggaaagttctatacatttttggcatttgttccaacatttattaactactagtgttacatcctaattaacgcaaaagtagttgccaaaaagtaaagaatcaagtatccctaaaggagtagacatatagagaggaattacacaatatcaagaattttgtgactaaggaaatgtaatggtggaggaaaggttgaattcgaaacaacctgtctgatcctattatggggagtatactacatactacacttgatttgtatatcaaggtgttgagattatgtgaaatgcactttttgctttatattagt

SEQ ID NO: 276197 - DNA, 389 bp, Cannabis indica
gccgaaacgaggtaccccatcatcgaaaagctaggcttttgcctcctgatggcctcaaggaaattgaggccatacttccaagcacatccgatcaagatactaaccaaccacccactccggcaagtcctccaaaaacctgaagcatccggaaggctcctcaagtgggcaatggagctaagtcaatttgacttgcactacattccccgaatctctataaaaggccaagccttggcggacttcattaccgaatgcaacgaagccgaagccaccgcgaatgtgtcggtaccgccaatccccacatggagagtatttgtggacggagcctccaatgaaaatgggtccggagccggagtggcaatgatatcaccaaccgggctgcgactccaggc

SEQ ID NO: 276198 - DNA, 527 bp, Cannabis indica
aggggagcggacgagcagaataccacaacgaatgtgcactccggagcccatactcaaatccccgctcagaaagacgctgacgtagcccaacccgactagaatgccaacgaagtcagcccagccgtacaggcccagcttgacgaactgaagaatatgtttcatggcatggctgggcagcgtaacaatgatcttgagttggaccgcgcacgcggaactcctttctcgccagaaatcaacctcctgccactacctcacaagttcaagacttcctacgagaagatggggctctagctcaaggatttaactccatgccttcagcccttctatggtttctccggtgaaggagttgcgccccaaggacaaatccgcctaaccctcataggtggacaagctccaacgagcataactgtcatggcacagttcctggtattatgttcctccagcctttaacgtaatgctaggccgaccaggcttgtatgacttaaaagctgtcatatcaatattccactcgtgcatgaagtttccaa

SEQ ID NO: 276199 - DNA, 776 bp, Cannabis indica
aggcattgtgaggcctgaaatacaagcaccgcagtttgagctcaagccagtgatgtttcaaatgctccaaaccgtggggcaattcagcgggatgccaactgaagatcctcacctccatctccgttcatttttggaggtgagtgattctttcaagatccaaggagtgagtgaagaggtgttaaggttgaagctattcccattctcactacgagaccgagctagatcatggctcaacactttgccgcctgattctgtgaccaattggaatgaccttgctgagaagtttctgaggaaatactttcctcctactagaaatgcaaaattcagaagtgagatcatgtcttttcagcaacttgaagatgagtccacaagtgatgcgtgggagaggtttaaggaacttttgcgaaagtgtccacatcatggcattccacattgtattcagatggagactttttataatggcttgaatgcagcttctcgaatggtgttagatgcatcggccaatggtgctattttgtcgaagtcttacaatgaagcatttgagattttggagaccattgcaagtaacaactaccaatggtccaacacaagagctccaacaagtagaaaagtggcgggagtccttgaggtagatgcaataacagctttgacagctcaaatggcttccatgacgaatgttttgaagaatttgagtattgggaacgctaaaaatattcaaccagctgctgccattcaaagtgatgatgtctcatgtgtgttttgtggagaagggcatg

SEQ ID NO: 276200 - DNA, 580 bp, Cannabis indica
tgtggtaagtgttttgtaatttgcttttccccttattgttttctttttttttttttggagattctttcttatacttgtattgttttttagcttgctgctgaagccggccgtctctccaagaacataatcaaccatggcttcgtcctgtctgattttggggacatggacgaagtcaggaagattcttcaggatcttactgctgagaggcggctttaccaagaggctgctgagcgccgggaggccgctgccaaagctaatgaggaagaggctaagcggagggaagcccaggcggaggcgatgatccgggaggaggccctgcggagagacaggctggaggccaggcaccaagaggagctgagggcggaaggcgaggccactgcaaaggccaggcgggagcttcgggaggccagggaagccttggacgagatggctgccaaggtgagatccttagaggaaactcaccaggaaaacttagaatccagggccactctggccgcggagctgaaggagctcagggacttcaaggaacaagcctcaaagaaggcaaaaagggctgagcttcttctccgttctgcagccg

SEQ ID NO: 276201 - DNA, 592 bp, Cannabis indica
gcccaatatacaaatcgttaaaaatagaaaattaccataaaaacgtcaactacatatacgaaaacttacataacaaaataacgtcatttttgaaaatattagccaaaataaggtggcccatgaaaatttcccaagatattatgggtattaaaaactaaaaatctaattctaaacttatcaccaattaatagtgtaattttgcaaatatttaaaaaaaaatatattattattaattgatgaaatcttagaaagtatagatttttttagtaaagctatataaatggtgtataaatatcaatttaataggaataaaggtggcaggttgttggacttggcccacattgtggctttcatgtataagaaagcccacgtggttttcactttcatatctaaacaatcgaaatgcatttgaccatttatttaggggcccattcattgtttaattttaatccattgaatcaggtcatagtaatgtagttttataataggaatattacataagaaactattttttaaaaaatatttacattttttaacgttaaaagaattgtttttttacattttgtagagttttctaaaaaataatacaaaa

SEQ ID NO: 276202 - DNA, 751 bp, Cannabis indica
ggtaaaccttactctatcaagattagagcgaccccacggtggattggatgatgaagctcctcctcttcactcactcttgaccttttaagacccatcgtcacccaaattttccaacttttcaagattttttaaaatttcggcagcacttccccttaaatatccacttcccgggaattaattccctcacaatcaagcccaattctactcacacaaacaatgttgaacaatgtatatagcaaaaatcccaaattttcaacaaactatccaaattttccaacaattcacaaattcttcaataaaagttggatggggagtcttagaattaatacctcaatgagaatcctcctttaatcatcctccattgtagaaagcttgaagttcttgagaaagaagaagatgaataagggtttttgaaattttgggtgaggttttagggatttggggttgattttgagtgggaatgagtgattgatgagaagaataatggtttttaaggatttgggataaagatttatggtgaaatttgaagaaaaagggttttgaatgggatttgaagaagaaaaatggtgtgggagaatgaggttcggcgtggtgattaggtttaagaaataagagaagtgtttttgaattgatatgtaaattggtctttttaaagttgtctgaccatattcgtcgcggcgagatatagcctcgccgcggccaaaataccgtaaaaaaaaaaacctctctgtaagccttaaatggccgcggc

SEQ ID NO: 276203 - DNA, 570 bp, Cannabis indica
aagtcaactcacacacacaaacataaggtcaatcttgacctttcacacttcagcaagtggacacaatctgtccacgtatcacactcaaatttttgacacaaagcattcaattaaacatttagctttaccaaaaacaaaacaatgaaaaattgatcaggtttttcttgcttagtttctagggttttcttttatcaaatatgcatgcaatgttcaaagatgagagtgaatgaatatgcagatgagagttatggtagagaagatgcaaacacagtattttatagaggttcccccttagttgatggggtagtcctcttgagctcgcctcagaacaagctaagcccttgcactatcaaattcaagatccaatacacgattggtggagcttccagctacagatcaactggtaagtctcgatttcctaatgctattattttctttctggtttctacttctttctctctcaagaacaatctctctcttctcacagattctcactctttctctctttttctcaactctgagttcttatctttgaactcagagcaattacaggttctctctttctctcta

SEQ ID NO: 276204 - DNA, 858 bp, Cannabis indica
aacttaattactattaatttgatttgatttttttttttagtttttcatttgtttcgttttattttccttgttctattttacgctttgtttgtttgtcttggttcctttttcaaggtacttgggatgtctcatcgacaagtccttatgaattttgttcaacatgacttggagttcttgtatgatgcatggtggagatacaagacacttctaatgaggtttccatatcatgggttgtccaaagagtgtcaattagaggtcttcctcaatgggttgaatccaagcacacgaaaatgggtagaaagaggaaatggtaccaccaatttctaccaactatcaatcgatgaagcctattggatggcggagtacaatgagtggtgttgtaattttccaaacaaagaccatgtttgggaggacaactacaataatttggagccaaattttgacacttacactcaaggaccaaatgatgagattttagaagattttcaagagttcagcatagaagaagagcctcatcaaatggttcaaccaagctcacttgaggcattgatgatggagttcatggcgaaaaatgatgccttaattcaaagccaagcttcatccttgaaaaattggagaatcaatttgagcttttggtcaatgagttgtatgctaaaccccatgaaactttgggtattgatatggaaaattcaagggagaaagaagaaagtgaaaatgtcattttgaggagtggtaatgagttggagatacttggggaaaattttgagcaattacaagagctcacttcaatccaaagtagtgaaaaaaaagataaggaagcaagcatttcaagttggtcaacatttattgctgctcata

SEQ ID NO: 276205 - DNA, 620 bp, Cannabis indica
atgcagataaacacatacaaaactatctaatttccttacctcaaatcccgctgtttaagagttgttatctcgtcactactacctataataagacatgggtcaaggccctaatattaaaattcgtactcttacagtacagcagaaagattactatttttgaccaacaactacactaattcagtaaaagttttcttcataaaaattatagaaaattcacgcaatgaaaggaaaaagattactattttggaagaacaagattcaagaaacgaattacatgatacagaaggaaactaacttttcgacatagtataactccgaattcacgaaatgtttcttcatgaaacttatggaaaattgaataagctttgaaaccatatatagatcattaaaaatggacaagaattgagagagttatggtattttaagtgaaagtactttttctgggaatatgaaaaaaacgatttacaacaacatcagaaagatgataattttcgacatagaatatcaccgaaatggtgaatagtttcttcataaaaattttagatcatcgaataagctttctaacgatacaaaaatcgctggaaacggatcaatattgagagagatatgactattttact

SEQ ID NO: 276206 - DNA, 746 bp, Cannabis indica
aacaaagaggacttgctttgggtgaaatgggttaatggtatttatctcaagggggctgatttttggaattatgatctaaaagacacaagttggtattggaagaagttgtgccatttgaggagatgtttttcggttacatatattacttctgctggagctaagggaaaatttagagcttctaagctctataattctctaatcttgcagcaaccagatcctgcagctcgggccatttggtgtgggttgaatgttccaaaacagagctttatcttgtggcagacagctcattctaacctgctcacaagagataagcttgctttattccacataacagcagctgattatgtgctgtttgtggttctgacattgaaaaccatcagcatcttttcttcacttgcaggttctcaaagatggttcttgaagcagtctttgcttgggtgggatttagttgttgggctgctgattttgggagctggaacaattggcttcggctgggccattctagcttgattgggagattgttgattgttatattggcagccaccatttatcatatttagagaaataggaactgttagaactattattttctgtagtgacaaattatgtccagtagcattccagttgcgtctgggacttgtagtgttttgtctggggttcgtactgttagtgttagtccacgtcagcaaagatattttaggttttaattgttcagatggtaacagctgtctatttcgggtttcttg

SEQ ID NO: 276207 - DNA, 572 bp, Cannabis indica
tcttacacaaggacatcgaattcttccatcacaatccttatgttctgatgccattgctaaaaaggcttgaagaccattccaaaattcatggcaaccacgatttctgattttggtccaagacttatcgattgtcgccatctacaatttaggcgacaaataaagtattacaaatttgaatgatttgttaagtgttatgaaattttatgaataaaaattatgccatgtatatacatcactcttgtatatccatcgctcttttcaactacttattaattataattataaaattttatgaatattttatgaattaaaatatatttaaataaaaaatttattcattaaattactactttttaatttttaattttttaatttttgagttatttattatttatacaaaaacaaatttattttttaaatttaaataaatataaaatataaaattttatgaatattttatgaattaaaatatatttaaataaaaaatttattcattaaattactacttttttaatttttaattttttaatttttgagttatttataatttatatgaaaacaaatttattttt

SEQ ID NO: 276208 - DNA, 797 bp, Cannabis indica
aagttatgaagcattggaacttcagccagacttgtcatatgaggaacaatcggtgcagatacttgatagaagagagaaagtcttgggaagcaagacagtggcactggtaaaagtactgtggagcaacactaaagtggaagaggcaacttgggaactcgagacggatatgctgcagaaatattcagagttgttcaggtaaatttcaggatgaaatttctataaggagggggtaatggtaatgccctagaattaagaaatggattagcaaaaccctaaatagataattgtgaataattgatgaattatattattatatagttcaatatatgagaatttatttgattaattatatgttaagaccccgttggtgagctagtggcattctcgtaattatgaccggggaagggaaaaatgatgaaattaatttaattatgtgcttaatggaactatattattatatagtatacctgtgttgtctttttaggtgtatttgacaggttggcgcggtatagtcacaaccgggtatttcgggccgaactgggttcgggcccgaaatgcaaattggattgtttatttggcattttatttgatatgggataatctgaattttatttgaaaatatttgggtatgaaatgacatgtttacccttgtatgtgtgattatgtgggaattagccctaggggcattttggtcttttgaccttaattaattacatttgataaaattgatttttgaggggaatggaaagaaaattctgggttttcactctctcttggccaactctctctttctctct

SEQ ID NO: 276209 - DNA, 519 bp, Cannabis indica
aattatttatttaggtggtatttaatttaacatgatataattataacgataatagaaatagtaatagtaatgaaaatatgaaaatattattttgtaatgaaagtaataaaaattgtattaacaaaaatactcttactttatttatcatttaattatatttctaaaatgttattaaaatgtggtggtaaagtaaatttggtaaaataaacttagtaaagaaaaactaagaaggagaaaaatggtaacattgtctttttattatgtagtaatcattttaatcttttttttttttttaaatcttcattcatgagaaattagaatgtaatattgagatcatagaattgcttaatgcctattacaattaatgaaattctattacaaaagttaaaaatacaaaccaagtatcgtaacaaatattgtaatggcaacttttattcctttaagggttctaaacttacccatgtgatcaatctagccatccatcgcattttccgctgtcgccgagcaaaaattacaaaa

SEQ ID NO: 276210 - DNA, 657 bp, Cannabis indica
cagtaaacactcaaaaaaagcaatcaagctagtcctaccctgactctctaattcggccctagcaaagttctgaatcttaatgctggctgcatcatccccgagatagctgtccgagggccggaaccagctggaagaaatataggccgaagggtccaagggaacgggttccggaggtccagaacccatccgggaccgacctaggaaatctcctaagttggaaaaataataatccttcatatggtctccccaccgggtcgagggcatcctaaacctaaggagacgttcatcgaaccctacaggcctaaggctggcatattcgctaacagaaggaacgtaatgtactgctaaaggagacttaccggagccggaagtactggcatcaggagcccctgtgttcggcacctgaaccgaaggctttggcctgggagccctcctctcagccgggctcccaatgcgaagggacctcccagcaatcgcctggcttctcctctcgaccgggctcccaacgcgaaggggcctcccggaagccgcctgggccttggaataagccttctcctgggccttccggtagagatactcctggtacttcttctccgcggtggcaataagctcatcccggaaggtcttctccgcggcaggcaccctcacattcggaca

SEQ ID NO: 276211 - DNA, 578 bp, Cannabis indica
ctagggttcctgaaaatcccccaaccggcagaccggttctgcaaccggaattccggttctgggaattcctgaaccccatccggaattccggatgcacaaccggaattccggttcctcgcaggaaactttcaaaaattcataacttgctcaaatcaaatccaaaccacaccaaaacttccagacctgttctaaataccccatagaacatttccaaagcaccaaaacaacccagaacacacagatactaaaaatgccatgtgagctccaagctttgagtttcaaactcaaacttggctaaagctcacctacaagcatcaaaacctgaataaaactacatattcatgcatataaaaactgcagaaactgaactcaagcacaaccaaactttacagcaactattttcacattttctctttgaaaaccaaagcttttgaataaaaattccataactttaaacaacaccaccaacatgcatcacaagtagctctaatctacacaaatactcatgaataaacttcagaaatcaacaacaacatacagcagcaagaacactctaaaattaagcatgcaaccacttt

SEQ ID NO: 276212 - DNA, 739 bp, Cannabis indica
atgggattaaccattatttgaatttattgttttatttggattcttatatgaggatgttatttatgtaattgtattattttttaagttgttgctagtgtatctgctaaccttaattaggtaccggtccttaatggtaataacgtttaaggactggcaggagaacattttttattgttcttggctacatggatcttgaccttgcagttaaggatggatcgtcctgctcctcttacggataccagtacctctgagcaaaggaggatttatgagaagtgggaccatttaaaccgcatgagtcttatgatcattaagcgcggcatacctgaggcttttaggggtgcggtgtccgaggaggtcaccgatgccacaactttccttactgaaattgagaaacgctttgcaaaaaatgataaggcggaaacaagtactcttttgaagaaacttatttccatgaagtttaagggcaagaaaaacataagggagtacattatggaaatgtctcaccttgcttcaaagttgaaggcactaaagcttgagctttctaatggcttgcttgtgcatttagtgcttatctctcttcctccacaattcagtcaattcaaggtcagttacaactgccaaagggagaagtggacacttaatgagctcatttcattttgtgttcaagaggaagaaagattaaagcaagagaagactgaaagtgcttatttggcaagcacctctaaagataagggcaaga

SEQ ID NO: 276213 - DNA, 707 bp, Cannabis indica
attcaccttcagtaaaaaaatttcttgagccttttattctattgaattcgaactagcccctctcttcttctcttcataatttcctaacttgagtgataaggtgagtgcccacacacataaagtggtatctcaatcatagtgtgtaaggctgtgaagaatccaatcaacaagaaggagaatcaggctcagatcttggtgatactctgctacagacaggatacaagggttagagatgtgagcggaaggagccattaatattctgctgcacccaatgtaaggttttctgaaactttatatgtgtttatttacattgttttagatattcatatttaggatgttaaataacatacatggtactaaatctagatcctggtaaaataattcaaacaactggcctcagagccatggtaatgatttactttcatgaaatatgaattaaaacaatgtttgtgttgatttggatgatttcatgatggtttatgtgattatatgatgaatgtatgtgttttaagaaatttttccatgaaactaattttattttctttctgaaaatattttatttggattccttgtgataaattaagcaactttcgtttttacggaactcaattccgattaaaaatgagagagttatggtgttttgaaaaatcgaatgcatatggtgtcgagtaggtacatcgggttcaccaggcgctcagacaaggcac

SEQ ID NO: 276214 - DNA, 665 bp, Cannabis indica
ttgtcttttcaggtgtgttctgacaggttggcgcggtatagtcacacccgggaatttcgggccgaaccgggttcgggcccgaaatgtaaattgaattgattatttggcattttatttgatatgtgataatctgaaatttatttggcaatatttgagtgagaaatgacaattatgcccttgaaaatgcttatgtttgttttatagccctaagggcaaaatggtcatttgaccataaggggtttactttgaattaaatgatttttggaaggaaaaggatttatttttctggtttaatctctctctcacccgaaccctctctttccctaaagcccttttggttttcaaagtatatttgtggagaattgcttgaagttgggtgtgaattggagctttggattgtggtttcttgagcttgaagtctaggtaacttcttgctgagtttttattgaattttagttagtggaatcttgctgaaattgttatggaaaaacatgatttaagttgtatcttgccttgtgattgcatgttcttaagtgtgaattatcccagatttgtgtgactaggattaccggcacctaatcaggagcacccggggattcggaatctccttctatagctgaacaacaggtaagacagtagtttggacgtagagtatgcgcagtggc

SEQ ID NO: 276215 - DNA, 507 bp, Cannabis indica
tctaataacgtatttctaatgtctttccaaccctaaaaaaattttcaacagccacagaaataaattatatgaaaatatgtttggaacgtatttcaatgtacgtcagaagctggatctcccatatctcaataagttcaagtttgaaaataacgtacatcaatatatgtgcacagtacttcacatcgtaaatacagtatggtgcaattatgtttactcaatatttgaatttaatgagataataagaattttttgtcaaatgtaaactataatttcggacatatttattcgtacaatacttattttaatacagtttaaaccatttcctatttaggagttgtactaaatttggactactacccttcttaatagtccacgttcttaagttgttgggaattatttaaaaattgtccaaatattgtaatcttcttaaccaagtatggactatttcctctaattttaatttgtacatactcactaaaaaaaccaattgttgtcttatcaatattt

SEQ ID NO: 276216 - DNA, 618 bp, Cannabis indica
gattctttctattttgtagtccgtgaactcgtggagcagctcccggactattgttacatacgcggccattcgctcgccgcgtgtttggtattctcccgatatctggtttacgaccagctgggaatcactgtagacttccactcttttggctcctacggcttttgctaatttcagccctgctattagggcttcatattcggcctcattgttcgaagctgcgaagtcgaaccgtagggccgcctggagtcgcagtccggttggtgatatcatcgccactccggctccggacccattttcattggaggctccgtccacaaatactctccatgtggggattggcggtaccggcatattcgcggttgcctcggcttcgttgcattcagtaatgaagtccgccaaggcttggccttttatagaaattcggggaatgtagtgcaagtcaaattgacttagctccattgcccacttgaggagccttccggatgcttcaggtttttggaggacttgccggagcgggtggttggttagtatcttgatcggatgtgcttggaagtatggcctcaatttcctcgaggccatcaggaggcaaaaaaccaacttttcaatgatggggtacct

SEQ ID NO: 276217 - DNA, 722 bp, Cannabis indica
attcaggtgaagagaaaattgacttcttttgtttggaaacatttcaagaaggtaaaaattgaaggagttgataaggcaatttgcaactactagtcaaaagaaattgggaggatcaagcagaaatggaacgagacatttacatgatcacttcaagatttgtcctcttagaaagaatcgtgatataaaacaatcaatcttgaatccaagtaggaagaaggatggaagtacttctcttgctgcccacaactttgaccaagagttttcaagagaaaaacttgctaagatgattgttttgcatgagtatccactcaatatggttgagcatgatggatttagaagctttgtcaactctctccagccattattcagacatgtatctcgaactactattaggagggatatattgaagatatatgagaatgaaaagaccaagacaatgaactcaatgaatgacaatcgtagtagagttgcgattacaactgacttgtggacatcaaataatcaaaagagagggtatatggtggtgactgcacattatattgatgattcttggattttgcgtaatcgaattatcaggtaatatagaatttttttattaggtcaatatttgatatcaatatatgctaaattttttttttgtggtatccattccggtttatatttgtctgtccctcactttgctaaacttttaacaaagtgttgatggagtgtttgattgaatg

SEQ ID NO: 276218 - DNA, 587 bp, Cannabis indica
tcagttgattatcatcccggaatcaattacggttacttcgaatatatatactgtaagtgtcatgttttgtgtggcaaattagatattacttttgttcagtatttgttgtctctaacatctgttctggagttagttgcatctgtttttcactaataacattttagtgccatgtcagctttctgctagtttgttagagtgtgccagctgtactttgctggttggttagttagtctggtttattatctttagtatataaattcgatcaaaaccgttgtactaactaactctcttctgttagaatcttctattggattcttgctctgctagggcttctttttctgtgtttgtttcttgaatgtgcagattaatatttcgaagatcttcttgtggtcgaagatggagattgaatctgcctgatctgaagagagttcagatcaatcagctgaatgagattcagctgtctgaatattcagagttcgtgtttacagagatcttttggtgattagatcttgatacttgagtgtgttcaagtattaggtaacattgtataaaagtcaatttagattacattgtttgatttgaagaat

SEQ ID NO: 276219 - DNA, 781 bp, Cannabis indica
acttttcttctgacacttctgattcagaaaaaactgagccttctctctccctatctttggccgaacccactctctctttcttcttccttcaatttcgaaaattcttagtgtatgagtagtgcccacacacagcaagtgatacctcaatcatagtgaggaagatcgtgaagaaagactttcagcaagaaggaggtttcagcatcaaagattcagagaaagagatccaggttcagatattgataatgctctgctacagaaaggaatcaagggctagatatctgaacggaaggagtctccgctgcacccaatgtaaggtttcctaaactttatatgtgtttatttcatcgttttagaaagttcatatttagggtgttaataaacatacttgtgagtagatctaagatcctggtaaaataatttccaacaaatacaaccattgattccggcaaaatcaactgaaaaagaagacctgcaatgatctaaacagaaatttacaaaaaaaaaaaccaaaaaactgggaagaaactgaaattacacaattatttcggttttattcgatcaaaacaactccccctaatatcgaaaatctagattcatgaaatgtagatctgtaacaaacagaactggagctccaccgaatccaaacaggtatgatttgaaaaaaaaattttaaaaaaaaactacatgataatagatctacgttatatacagctgcatttttgttgattacaggtttctaatgtggaatatatttttttaaaaacacaataagaagagcaaa

SEQ ID NO: 276220 - DNA, 369 bp, Cannabis indica
ttatatctataatatgcgtccatacatgacataagctcgtgccaagaagttgcatccactagttggtcaatccggggaaatggaaaacagtcttttgggcacgccttattcagatcagagaagtcaatacaagttctccaagttctgttaggtttcgggatgagaacaggattggctatccacgacggataaaacacctcgcgtataaaattgttgactaataacttgtcaacttcctgttttagtgccccttgcctcatagaatcctggggcctccttttttttctcttccctgggtagtttggatcaacatttaaatgatggcagataaccttagggtcgatcccttgggttttgtgccctaaataa

SEQ ID NO: 276221 - DNA, 568 bp, Cannabis indica
atctgagatgtaatcaaataaggaacattagaagatattcaagaaagatttatgaaagtgatctatatgttagatattaaggaactgtatatcagttatccttgtatcttcaccaactcattcgaaattcttgagatggtggttactttgggggtggaggagttattctataataattcaagctctaccagaggagttattctcggcctcaatctctgtatctcctgatctcgctcctctattctggcttgcatttcagcaaacctagtttcccaattttgggcttcctgataggcttgagcagcctgggcagcctgtggtgggttatcgtcaccccgaccacgagccctgcccctgggagctctaccacggcccctagcatgctggggaagctgagctccttgaccctgatttgaccctactgagttgccctgactcctggtgttctgcctggcgtccatctagtcagaacagcctgcgaaaccaagagttggcacatcaggtcatgatcaaaaacagcttactaatatcgcttaattggaaattaaaaacatgcgcctattctact

SEQ ID NO: 276222 - DNA, 504 bp, Cannabis indica
ataatatctttaccaagatcaatatcggttccagtctaatgtatactccatacatctgatactagcatactaattgccaatatctggaaagaacataacacttatccaaggtgtaagtaagctttatcgctgactatcacatcagtgtaaatccagtgcattaatgaatcatgagacattatcttttgaagtatataatcacaattacgtttcactgtgttgacatcactgtaattgtgaataattatatatctggatttaacagaaattgtatacataaaccataaacatgaaaactacatgtaaacataaatgacttctaaacttcgattgataacaaatcagattatattgaaataggttttatttagggcataaaatcccaacaaattcccatttgcactgacataaaacaaacaatgcatttcaatcaatccattttcttgatatccagatcaagtgtagtgtacttgactaaacccaaattacaggaactgtaagttt

SEQ ID NO: 276223 - DNA, 688 bp, Cannabis indica
aaatgcccctagggtttttttaaaaaaaaaattaaggaagaggggtagattagtaaattcatggtgctttgacttttctttttagctgcctattatttaaaaaaataataataataaaaatacaaacccttatttaaggaagtttccttccaaggcaagaaaaccatttcataacatcaagctcttcttttctccttctgccgaaccctagaagcagctgggaaccaagtgaaattcatcttatttcaaccattcttgagctaatcttagccctagaagctagctaagtggaggtatgatctttctacacttctcttgatttgttttcttgagtttagtttaggttttggtgaaagtttcaatgaattctgagctggggtataaactgagggtaaggtgggttcttagggttgaaatggaacttgtttgaatgaaatttgagtgaagttaggggctgtttaattgaattggtattgaaagtgatgtttagtgcaaattttcatgtgagatggtgattttgagttaaatggtgaattgtgattaaatgatgtgttggatatgttgtacttggtatattgaactgttctggaaatgcaatttaggtctgtaatggttttggttcgagctggggaagaaaacccagaatttttctggtctgacagcaaccggtcgaccggttggttctggt

SEQ ID NO: 276224 - DNA, 804 bp, Cannabis indica
caaactggatgacaccaatagccacctacctcaactctgggaatctcccagataatcggaatgaagctcgaaaaaatgagaaggaaggctgcactgtatatcatagtagagggaattatgtgtagaagaggattgtcaatgccattgctcagatgtgttactcaagaagaagctgcacgactcctatctgagctgcacgacagattctgtggaaatcatgccgccgggcaaagtctatctaagaaaattctaaggcaaggttatttctggcctacgatgattgaagattcaaaggactatgttaagaaatgtgacaaatgcaagagattttcaaagatacctcaagctccacctaacgagttaactcagatgcagagtccgtggccctttgccatttggggaattgacctgatcagacaattacccaagggcaaaggaggagtgcagtatgtagtggtagcggttgattacttcactaagtggacagaagccgaaccacttccaaccattacatcaaagaaagttcaagacttcattttgaagaacataatctgccggttcggattgccgtggaaaatagtttcagataatggaaagcagttcgacaaccaatccttcactaacttttgtgggaaccatggtatcatcaaaagtttctccgcagtggcacatcctcaagcaaatggtcaagttgaagcagtcaacaagaccttgaaggatacactgaagaaaaaactcgaagatgccaaaggaattggccagaagaacttcctgaagttctatggtcatatcggacaactgaga

SEQ ID NO: 276225 - DNA, 499 bp, Cannabis indica
cttgacatggtacgttgattgttattcattctagcttgccagaatttttatggggtgaggcattaaggactgctgcttatatcttgaatcaagtgcctagcaagtccgtcccaaagacaccatacgaattgtggtcaggcaagaaaccaagcttgcgtcattttcatgtttggggatgtaaagctgaagtaaggccctataacccacaatctaagaagcttgatccgaagactatcagtggctattttgtaggctacactattggttcgagaggttctagattctattgtccttctcacaccaccagggtgattgaatcagatagagctgtcttttttgaagaagaatttagttcaagtcaagggtcaagagaaattgtgttcagggaagaacgtatttatgtccctgtacctgttgcttccgcttccgctcctactattgatcccgtgattgaacaaattccaatagaagctcatgatgaacctcagaatcatatgca

SEQ ID NO: 276226 - DNA, 647 bp, Cannabis indica
tttgtggtcttcaatgacacattgtacaagcgttcattcgacgggatattattgagatgcctctcgatagaagaagcttaaagcggttgggttactattggcctactatggttcaagaggcaattaattttgctaaatgttgtaagtctgccaattacatggagatttcatccacaaaccccctcaaccactccatccttctatactgtcatggcctttcgaaacatggggaatggacgtcattggtccttttacgccaccctcttccaaagcccataaatatattttggccatcacagattacttctctaaatgggctgaagccgtaccactaaaagaagtacgggcagaagatgtcgctgattttataaggacccacataattaaccgatacggggttctttcaaaaattatctccgacaatgccctttatttcaaatgtaaggcaatggtcaaattgatgaacaagtataaattcaagcacagtttctcggctagttacaacccgtcttcaaatggtcaagcagaagcatttaacaaagtgttatgcaaaatcatgaagaagacagcgacaaagaataagagggattggcatgaacgcctcctagaagctttgtgggcttatagaaccactgtgaggactgcga

SEQ ID NO: 276227 - DNA, 565 bp, Cannabis indica
ccctctcctagtaaatgcctttgcaaataaactctatagtgtgaaaatgcttcctggtaagagcattaattcacacttgttgatgatgaatctgaagttccagaaagcaaatttgctgggaattgatttatctagagaacaatgggttcaattcattcttaatagtcttcctcctgagtaaagtggatttattgtatcttatatgatcaacaattttaactcatccgacatggacaagctagaagcagaattgcgtgcttatgaacggagcttacctgcaaggaggacaccctccaattttgcagacctaagtaagaggaaaaggattaagtatgaagcttctaacaattctgcttcttcaagtacaaatcatgaaacacttgataatagtactcttcaatgttcaaattgtaatgagaagggacatcaggaagaacgatgtcccatacttctaaataatttgaatgaaggtaatgcttttgtttttgaatcatgtgttttagagaatgacaaatccttttggattgttgattctggatctactaaccatgtttgttcttcattg

SEQ ID NO: 276228 - DNA, 591 bp, Cannabis indica
cttggccagacggtcaaacttagtaatatactccgtaaccgacataccctcagtttgtaccaactcagtgaactcttttcgcttagcactgcagacgaatttattgtaatatttagagttaaacaactccttgaattcctcccaggtcatcactgtgacgtcccgagcgagggttatcaactcccaccacacgagagcgacctcctgaaactagaaagtggcgcatgtcactcgatcattaccaaccactcccataaagttgaggatatgctcaatcactgtgagccattgctcagtcttcattacatcaggacctcccagaaacactggaggtgcttgttttcggaacctttcgtacaatggctccatacggttgccaacaacaggttgttctgctggcaccgctggaactacgaaggcctgagcaacttgttgaggaggcacgataggaggatcctgctgcctcaacctctgaatttcttcatcctattggcggattcgatcttgcatttccgcaaatctctgctcccaatccggaggagcttatggtggatttacagggtgaccaccctgagctctgccacggccacg

SEQ ID NO: 276229 - DNA, 586 bp, Cannabis indica
ctggatgtcgacaaagtggagtatgacttgaaattggaagtaaattacaagtacaggaaaggctatgagtatcgccctgaagttattggaaatgataagcgtgcaaggttctttttatatacacttgcgaagaagccagatgaatttactcctttgtttgtgactttattaaagaagaatgtttgcgtcgatcctagtcccacaccaagttttgttatggataatcgtaccgaggttgggagttttgttccagaaacaaatccagaggtgttggttgcggatgtattacctgaattaagcactatgatgccgagtgctgatattgtagcacaaatgccgttcattgatggtttttttgatggtccagaccctgaatgttatgttgagggcaatgatggcgtaagagacgaccaaggtacagaggcccctgctgctgtacctttgaacttgactccactatcgtaccaaataccaccgaggccaccgacacggaaaagaatgccccgtagagaaaattgccaaacacctggtactagtagtagtcgtccaggcgaaaccagtcatgctagaggaactactgacagta

SEQ ID NO: 276230 - DNA, 473 bp, Cannabis indica
gatgccctgagcaggaagggtcccgggcaggtacctagtatgattctaatttcacctcagttagcagaggatatggtcagatctagcattgagtttgttgtaggaaaacttcatagcttgacgctccaatctgatctattagaacgaatcaaagtcgcttagatgactgatccagagttaattaagatcagagatgaggtttcagatggtcaagccagagacttttcagtgacagatagtgggatgttattgttcaaaaccaaggtttgtgttcctaatagtgtggaactcaggaatgaaattcttgaggaggctcataccactccatactctctgcatcccggcaccaccaagatgtatcaagatcttaaaccttacttctggtggagcggaatgaagaagaatgtggtagaattcgtatcaagatgcctaacctgtcagcaaatcaagcctttaaccctacctgagtggaa

SEQ ID NO: 276231 - DNA, 637 bp, Cannabis indica
tgaccctagtcagttttgacatacttctgcaggtgtgggttgttttcctcatcaagaattcaatttcccgcttcaagttgttacattcattagtgtcgtggccgtagtctccgtggaaccgacaaaactttgtcatgtccctcttgctgacatctttcttcatgggcctgggcttcttatatggggcaagcgactgagttgccatgtacacactttctatatcttcagtcaaaatagtaaatgcggtgtacttggcatgattctctcggggagcttgttcggatttgccagtgaactttcctttcttcccattcccttgcttgtggttgttgttggaacgtttaccacttgagcttgaattatttgggtaatggggaagttgggtggatgttccagtagaaggagcctttgacttgccaggcttttgctcaccttccgctctttgaatggcttcttcgagcttgatgaagctttcggcatggtcaagaaaatctctcattgagtctaccggcccgttcttccttatatccttccaaagttcgccaaggacttcaatgccccccagtatcacggataacattccatcttcagttacccgtaaaactttggtcgcctccatcatgaatctgctgatata

SEQ ID NO: 276232 - DNA, 598 bp, Cannabis indica
ccctggctcaccaacggggtctaaatatattaaaattcatataaatcacatatattgaactatataataatataattcctccattatacataattatctagttagggttttgctaatccatttcttaattctgggtattacaccatctgtctgtggatgatggccagtactcaagtgaagttcagtccctaaggcctgttgcaaggccttccaaaaccttgatgtaaatcgaggatctctatcagaaacaatgcttgaaggtactccatgtagtcgaactatattgtctacataaagtcgagctagcttggtaagcttgtaatccttcctgattggaataaaatgagcagacttagtcaaacgatcaacaataacccaaacagcgtcatgcttcaaaggtgtcaatggcaacccagtaacaaagtccatggtaatcttgtcccacttccattctggtataggcaaaggttgaagtaaacctgagggtctctgatgctcagccttcacttgctgacatactatacacttagctacaaagctggccacatctcttttcattccttcccaccaatattgtctctttaaatcttggtacatc

SEQ ID NO: 276233 - DNA, 500 bp, Cannabis indica
aaagctactagataaagaaagtcatggaaaataatagcaaattatagtaccacagattatacataccaagggatcattctctttcaacgtacatatacaattcaacgtctatacgagcaaacttgttacaaaattaagagtaattatagttatacataatcaataacctcagtgtttcataaaacaccctaatcatatagtattgtaaacacttactttcaatgcttcataaagcactccagttcacacattaacatatccactcaatttcagtacttcataaagcactctaatcatgcatcattacaagagaattgattaatttcacaagcaatataaattcgttcagtcacactataacataatatattcgattacaactcatcatataacaacacacttaatccatctcacaacctcgtaatcacacaatcccggcacttcataaagtacccttaccactcgttacccacgagctatatatgtcactatcgttgccc

SEQ ID NO: 276234 - DNA, 514 bp, Cannabis indica
ggtctgtgccacctttcaatttcaagaagatgcactggcctggtgggacatggtgtccatgattcatgatgtcacaacaatgacctgggaaaagttccaggaacttttcaatgctaagtattacaatgaagcagttagaagtgctaagagaaaagaattcactcatttgactcagaatgaaaatatgagtgttactgagtacacaatgcaatttgaccgtttggcgaggttggcctcgagaattgtgccaactgacttcagtaagaaagaaaaatatctggatgggttaaatgcgaggattagtcatgacttgatgatcagtactgacgacaaaacaacctttgctgaaatggtggacaaggcactacgagctgagggcgcagtaggatgcatgacagagtctggtgggactccagttgttcgcggggctcctacccctcctgcatcaggttttagtaggggaggtagtggttcggccatggacaagaaaagaaaggcatccactgcaaccagt

SEQ ID NO: 276235 - DNA, 252 bp, Cannabis indica
gggagttagagtgcctgcttccacagctgaaattcatgctctttatgagctcccaaccttcactgtagaacagcaacctttgaagcagcaaattcgagcaaaaagtttggattatgtggatatagccaaaactctagggtatccgggacttagatttcatacctatgatggagaaccgtatcaattgtttcggtgtgaactcaatcatatagccaaggcgtggctatactttgtcagtgcaaggttgctccc

SEQ ID NO: 276236 - DNA, 743 bp, Cannabis indica
tcccatgacacaagggagaccaagataagtactatgttcatctgcaagtctcattctaaggatcccacacaatcggtctcgagtagcattaggcacattattactgaagaatacagaggacttactgaaattaacctgttgaccagaagcgatctcaaatagctgaagcatatataatatattcgaagcctctctatcagttgcgcgacaatagacataactatcatcggcaaaaagcatatgagatataacgggagcaccagtagccaccttgcaacctttaagcctaccatcccgctcaaactttcgtatcataaatgagaagccctcagcacaaataagaaataaataaggtgaaagaggatcaccttgtctaatacccctcccaggaacaatcggacccagctcatgcctgccatgaattattttataccacacagagctaactgtagcaataacaagatcaacgaaatgcaagtcaaatcccattttactcatcatagctcaaagaaagtcccaccccacacgatcataagctttactaagatccagcttgagcgccatatagccttctttgcctttacgctttcttttgagatagtgcataacctcaaacgctatcataatattatcagtaataaggcgtcccaggatgaaagcagattggtttggggatatgacctgaggcaacacttcttttaaacggttcgttgttgcaatattttgcacacgcaagtgtacgt

SEQ ID NO: 276237 - DNA, 619 bp, Cannabis indica
aaataccgggcaccggaattacaaaacatatgaaaactactgaataacataaccatgcatttctgaattccataaataacagtataacaaattatttaaatagctataaataatttcataattaatcataattaactgataatttccaaattaactaagcgggctttacagtcgccgcagcctaaaacccagcagagagccatcccttttcatgattttgttttggccataacttttgactcgggactccatttttgacgttctttatatcgttggaaagctcgttccgagctatttatgattatctatattttgaatgccaactttataatttgtgaaagtggaattagggattaaccctatttgtgaaatcccagagtgtgtgactaggattatcggcacctgttagacagtagttttcacgtagagtatgcgcggtggcgcttatgttgaatatgatatatgtgagtaattgtaaccgggattagagttattaccctaacatgagtagttaatagcctagggttattaccctagtgatataagcagagtaaatgctatgccatgctaattatatgattatattgaaatttaaaggtgatgcgttcaaggcataatc

SEQ ID NO: 276238 - DNA, 571 bp, Cannabis indica
acagaagaatccaggtactattacagacattatcacagaggacaacaggttcaagtattatttctggtcactggctgcttgtaggaggggatttaagttttgtcgtcctgtgattagtatcgacggcacgttcttgaatacaaggtttgggggcacaatgctagttgctgtagcgtacaatgcaaataaccaattgtttccgattgcctttgcaattcttgacagcgagaatcatgactcttggaagtatttcttgcagaagttaaaggaagcgattggggaggttgaaaacttagtgtttgtatcggataggcatcaaagcattgaacatgctgtcaaggtaattttccccgaagcatgccactgtgcatgctacaaaacgtatttactttctagtagtaagttcgtaccccaaccccaaacgttaacgttaactaaacttacgtagtagttagttagttaacgtaaaccgaccgaaactaaaattaggtcggtcggtccgggcccgttaccgttaccgactaggttccggtaaccgtaaggggtaagggtaagttggtagtaagtaacg

SEQ ID NO: 276239 - DNA, 498 bp, Cannabis indica
ataattgcttgattctcatcacttagggctttactttctcctaaatttgcatgctctatgtgcattcttagaacttcatctagattctgatctagactctttgaaggacccatctagaattcaaagattctctctttcagaaaaatttggtttgtcaaagtttttagttgaaattgttcttctaacttcttccaaatcttaaggtttcttccttatccactagcctgatgatagcatctgacagaatgaatatgattatacttattattgctgtctctaagagttcctctcgttgaatcttggatgtgccttctggccattgttgtgataaatccaacacgcaagtatacgtatcgttttaacagtaatactcaggtaagtgagatcgttcccacgaggaccgtagctaagtaccaatcaattgaattctgtttctatttggcagaatctataataaggttgaataattaaataactaaaaattaaaaagcaagataa

SEQ ID NO: 276240 - DNA, 747 bp, Cannabis indica
gaggtttatatatctgagaagactataaattaccttagtaaacctgctattgcataggaattaatattaggaaaataatcatattaggccatattcaataaaaacaattgaaatcgacaccctagtttattaactatcaattttctcgaatcgttgcttccaactatttttcttatacttcattgtttttttttcctatcttttatttaatcaaatagaagtaaaagtttaatttcaacgtacttaactacactccctgtgggatcgacctcactcctagtgagtctactacttgaaacgatacgtacacttgcgtgtgctaaatatcgcaacaagtttttggcgccgttgccggggagtgatagttaatattattaaaaattaaattttgttctaatttgatttttctttctaatttaagtactaactctgttgtctcaagatcttattctgctttcaggttcaatagtttatgagaagtcaaggaccaattgccagattacctgttgaccctgagatagaaaagacctgtagaagaaacagaaggaggagaaaattggaaagagcggcactagagattgaacaagaagaagtcatggctgacaacgccaataatggtaacaatggacacaacggaggaggtgtagaagaccaggctaatggacataacaacaatgaccgtagcctgagggactacttacttcctaacttgacaggggcccgatcctgcataaggccacctgctgt

SEQ ID NO: 276241 - DNA, 500 bp, Cannabis indica
ttgaagtccttgggaactatggaaggatataaggaagaacggaccggttgactcaatgagtgatttcctggaccgagccgaaggtttcatcaagctcgaacaagccattcaacgagcagaaggtgagcaaaagccgggcaaaacagaaagcataccagaaagcgatctcgagccaataccacaaccaagtaacattgaagacaaactgacctggaagctacatgtggatgggttggcaacagatcaactatctagtgcaggaattgcccttgtcacacctgggggcaacacctgcatgctgcgttaaaattcagattcaaagcctctaacaacgaagccgaatacgaagctggacttaaactagcgaaggaaatgaaggtcgaaaacaatgagatctgtagtgattcataactggtggtaaattatgtatccggcgaatacgaggctcggggagaaaaaatgatagcatatatgagcaaaatacatgatctgctcgcaca

SEQ ID NO: 276242 - DNA, 647 bp, Cannabis indica
tgatctgcgtgatcacctcaatgcagttttcagggcacgctctcgcgtcccacataatactgagacactccgtgatccccatgcggacgatcagggtgccaatacttataataacccgcctaccgcgccgatcgcgaccactgggatcaatgtcccagcaaatctcgccgcagtagttgcgagtcccgcagtcgtagcagccccggctcctgcggctggagggattgaccaaagcatgcttctgcaggctttgaaaatgctcgagcagcaacgaaagcctatatacaagttgcatggtacctcgcccttcactacagaagtgcgacaggctcaacttccaaaggggtttcgtctatccgaatccctcaaatataaaggtacttctaacccgatagattatcttgaaaaatttaatactataatggaagtggatcaggtaccacagctcgcaaagtgccgcattcttgcggcaacactcgaggaaaatgcccatgattggtttacccaattacctgaggcgtcgatatcgacgtgggaaaccttcgtcgacttattcctcacacatttccaggccacaatgacgtataggccaccttatacgactttggccaacatcaaacaagaacctggtgagtctttacaagact

SEQ ID NO: 276243 - DNA, 676 bp, Cannabis indica
tggcaccgatatcagaatcatatacaatgatctcccagttctcgatatccacctcaactgccacccagtggcgctctttgggaaggtgcaacacaaagtatatgtactcctgcttctcccaacatggcaagtatctgtgcggtatcccctgcacgtaactcatgacgccctcatcccatttcatcttgctcctgtcaccctcatacatattccaaaacatggaaaagaactgtggagcagatgtgtccaaaactacaccttttcgggtgtagacttctgggtacagggtccgtcttcttctcaataagtgcgccatggcatcaatttgctgtgttccaaaagaaaacagttagaaagaaatcgcataaaagtcgcacaacaaatcgcaggaaatcgcacaaagaaattaccaaaattgtttcaaataatcgcacaaacatcgcacagtaatcgcacgtaagtcgcaaacaatcataaatcagtttataatcgcacgcacatcgcatataaatcgcataaaagtcgcataaccagattacacatagagtgagtataaatcgcatataaatcgcatgtaagtcgcatataagtcgcacaaacaataaaaaacacaataaattaattctgttaagaaataacttacatcatcgtcgagccattcgttcagcaccatcaa

SEQ ID NO: 276244 - DNA, 590 bp, Cannabis indica
gacaaacaattaacagcttttttcttctttttttttcttctgcagggacacttggcaggcgctggttcgttgtggggctggcgagctggggacgtggcgcacgctggtaggctgggtgctgacgggctggggaccacgcaggctgagagagagagaaggatttccaggcgccacttgctttctggtcgggtgtccctcacgcgtgctccatgacccttggatcgaatcacagacggctcagattggtcaaggagctgaccgagagtgggatttgcttgaggccagatcagattttcttttgaaaattccacttttaactccatttctccaatatttcttcaatttaatcccaatctttttctaccaaatatacctaaaaatacataaaattaattagaaaactaaaataaaattaaaaataaatactacataacatattataataaaataattataaaaacacacaaaaacatataaaattacaataaagctaataaattcaaaaataattaaaaacttactaaattaattaaaaacttaagaactaaaccaatttttagtaaaaaaaaatgtgaaaaataactctaatt

SEQ ID NO: 276245 - DNA, 883 bp, Cannabis indica
ctgttgatccaaaggaattctttcattggcctttatcttttttggaatagttaaaacttttccttagataaataaaatctacatctagaagtcgagaaacttttatagattaccattagaaaaatgctccagcatcttactaaagtaagttgctcgcactagagtaattaaataaccaggtataccacaagccacaagtttaaataaactcaaacctttaacactaggaacattaagttttattaagtccattgaatagacttaattttcaaaattccctttcttgtccttgtaatagaaaacttttggttattctatatgaatggttttaatcatagttctcttggctttgcttcttagttccttattctgactatccatttcttgtttaaacaaacaatggattttgtcacgactatcttccaaatcataacagggtgagttccttgaagctttcccactacgacaaggtaccatgactttttgtctaagaacattaaatggtattgtcctcatcagttgtgtcaatacaacagagacagtgagaccatcttatatcgaataagatcatagaacacttttggaatcaagaaaaaaatatcttctctacttttctactttgtttttcagacttagtcattttcttagaaaaaatagtatttgttgaaacaaacactttcttatcttaatgaccataggatggttcacccctaatcacttagaatcgctatcaaacatgccaaccttagttaacagttctagcttttcttaaggttgcgatcaggacatccatgaatctagtaatggtttacactaagtacacaaccattccatcattctgaaattttcctatcactaaagtatatccctagaaggacttagg

SEQ ID NO: 276246 - DNA, 624 bp, Cannabis indica
ttttttaaaaaaaattaaaaatgaaaatttgcttttgcaggacccttttgtattcccaccatatcacaaagcactaagagagccttttgactactacctgtttggtcaaaattatattcgaccattaattgacttcaggttagttgaaacttccctgcgttctcatctctagttgcaatttatgtccctacatgtatttgtttgctttttgttctgaaaatcatgccttctctgacatgaacttccaaattttaggtgtgacttattggcctaaatttagaatgctgttgggttattatgtcagacattgggctaattgctgttgaatgtaaaatatgacaaataaataggcagaaaataatcaatgtggataagacattaccgttaatctaatgttttttatttggtaattttgaaccgcatgaatgtggttatctagtggttatttattgttaaaaaaaatatttgcgtagtggttcactaatagtgtcttaaactgaagagtttttttcgtctttccaaataccttatccttcatggctcatttattttttttttgaaaaaaagaggagagatcagagttaaagactgatcaccctcaaacatagattaatgccctcactt

SEQ ID NO: 276247 - DNA, 596 bp, Cannabis indica
ataaaatagattacattgaaatggagttttatttagggcataaaacctaacacaactcccataaagttgaggatacgctcaatcaccgaaagccactgctcggccttcatcacatcaggacctcccagaaacactggaggtgcctgtttccggaatctttcgtacaacggctccatacggttgccaacaacaggttgttctgctggcaccgcaggaactgcaacggcctgaaccacttgaggaggcacggcaggaggaccctgctgcctcaatctttggatctcttcatcttgttggcggattctatcttgcatctccgcaaatctttgctcccaatcaggaggagcttgaggtggatttacagggcgaccaccctgagctctgccacggccacggccgcgaccacgaggattttggggattcctctgaccgcctccggtctcaaccatgccaccctgacttcttgtatttcgcggggcgtccatttaataggacttagcctgcgaatccataagccaggcaggttagacagcgatcaaaacttaacaccgctcttaataacttaaaggcaacacactttttttttaaataattaa

SEQ ID NO: 276248 - DNA, 578 bp, Cannabis indica
aaatgaaatattcctatcccacttacaaagaaaagcctaaatctaggttttcacttgcttcattcaagttgaactactagatctagcccttccggtacaagatctagcttagcaaattgttattcatggccaaaaaacaacaatcaattaaaatgaaactcacttgaatgaacaaaggcaaacaaatactaaagtaagcttaaaatttaatcatacccaacttagaagttcatagtcattcaagcctcaaaagcttagctcatattcaaataaaaagataaaatccaagctaaaaatactacatccatggctgctgcccaaacttacaatctaaaaaagttttgaatactaagtacaaacaacaacaacaaagagaaaaataaagaagactatcaagaaagggtaaaagaaaattcaaacactaggcttggtcccctcttctttcttcttcgtgtacttcctgctgccaaaaaaaactccttctgaaaaatgcagctgctcaagtactccaaattgatgaagatgataatggtgtacttcctcctttttcttttctttttgatgttgggtttttaggg

SEQ ID NO: 276249 - DNA, 641 bp, Cannabis indica
tatcttaagaatcttcaataaccgattcctagaattcctcaacttaattttgaaattcaaaagatattcaaatttaatttgataaataaaattagttagaaataactaatttacaacttaaataggaatatttagtgaaataattaaaataaacttcagaaagaatctagttagttataattctatatttaattaaatacaagaaaaatacatatagtttatctagaaataatttcattaaaaatacctaaaatgccctatttcttccactttcaccgacttgccgtctcccacataaatgcttctttcaacatcacttggcttcggtaactcaggcaaccctgcattgaaacactgatgttagtagtagcatcagaatctaaccaccaagcgtttcttagtactaaagctaaatttacctcagaacagaccaaagtaagaaatgtacctttctttggtcgccatgcaatgtacttagcacattccttcttcatgtgtcctttcatgttacaaaagaaacaaacatcatcattgttagcttgagtttgttaattatgtgcaggacctttatccttagcagcctcattcttccttttcttgcccttatctttagatgtgcttgccaaatgagcactttcagt

SEQ ID NO: 276250 - DNA, 547 bp, Cannabis indica
attaagagactttattaagtctaattaatgaatatattaaatgacaatattatttaataattaattttagttattaaataattggaattggcatttaagtggttaaattggaaaattgacgtttttgagaaaatgacatgggaaaaagacaaaattgcaaagtggggcccaataacaatccatggccggccacactagtgtaatttaacatttatttttctattattttaatgctaattaaatctaacataaacctaggtggttacgtataaatagatagtgatggctcacacttaaagattgattaaatttaactttcagaaattttcctgagccttctttctctttaggccgaaaccaccttctcttcctattctcttcataatttcatacccttgagtgatagagtgagtgcccacacacatcaagtggtatcgcaatcatagtgtgtaatgttggattttgtgccctaaataaaacccattgcaatataatcagatttactagtcaataaagatcagaaatagcattttatgttgcatggttc

SEQ ID NO: 276251 - DNA, 545 bp, Cannabis indica
ctcattttatcaattccaattaccctgtatgaacatgatgatgattggttatggcattttactagccatggccactattcagttaagagtggatataatctggcaataggaggagaaaatttgcaaccttcatcatcaaatgaagttatggcagcttggtggagttcatactgggcaataaaaattccaaagaaaattctacattttggatggaagggttttcatgaaattttaccctcctttagtggtctatttcgaagacaaagctcatctcatagtaattgtcctatatgtggtttcgggaatgataccaatgcacatgcaattttttggtgctccttctcacaagttatatggaaggaaatgagtttcccttttcttgcaagcccaaaagaggacctgaccttcaaaggagtactactgtatgcatcagaaatacttgaaaaagaagattttgagaaagtgttaatttcagcatggacaatatggtttgaaagaaataagaaaagtcatggaagaactataagaactccacaccaaatcaa

SEQ ID NO: 276252 - DNA, 727 bp, Cannabis indica
cgtgcattgtaatcaccaaaatcacatcaaatcaacttaaccattcggcattggaaaaattcagatttcaaacacacatttcatgcttcttccatgttacacattaaagtacattaaaatgatgtgaaactcttttcaactaaatgatttccacaaccaaaacaatgaacaaaacaaaccttaactactaactcccataactaaaaagtggtacaaacgagttggtacaatccgtgagaaccaagaacataaagcacacacatgaatagacaaaattcccccaaacttaaccaatctgggtaccttgtacctcttaattcataatgaacagagtacaaaaccagttggaaaacatttaatatcagaattaacaaaacaatgcttcactactaactgtcgtaaccaatttcaataacttctccaataattcatatacacaaaaaatccaaactgccatagtttttatcaatactgtatctcattaactcatgaatcttgtgtctaaaccatccaatttttcaaaacaaattcataacaatagtcaaatctaaactacaacttctaattaaagtacaacaatcactcacaacagataacaaaaaacatcacatttggtaagtaacaatctgaactaaaaaatttaataccatagtttctttacctaactaaccattccattgttttccttactttcaaaaattttttttcggtcaatatagggcagccc

SEQ ID NO: 276253 - DNA, 696 bp, Cannabis indica
caaccggaattccggttcctcgcagaaaacacacaaaaatccataactcattcaaatcaaacccaattcataccaaaccttccagacctgttctaaataccccaaagaacacttccaaagcattaaaacaacccagaaatcacagatacgaaaattgccattaaagctccaagctttgagttcaaaactcaagcttggctaaacccctctaacatgcattcaaacctgtttaaatctacttaaatatgcatgactaagcttctgaaaacaactaaaaatatcaacaatattacagcaacagaatctaaccaactctctttgaaaaccatagttttaacatagaaactcataactttaccccacctaactatcatgcttcaaaacaacttaaataaccctaatctaacaagctttaaacctctgaaattaagaacaaattcacagcaacaacaacaactaacaaacatgcatgcatcaaccattttcatcatttttttccaagaaagtaaaggaataaaattaggaacacataccacacaagagatcacccaaaacttgctgaaaactacaagattcacaaggaaaaatctccttttccttgctgcacaatgaagccgaaatggagagggaaagagagatagagagagctttgaaaattctattttttttttctaagtgtaattttgttgtaaaatg

SEQ ID NO: 276254 - DNA, 675 bp, Cannabis indica
atactcccggagagcaaagctaccacaaagcatatccgggaggtgtcagatcctatctgaacagtcatctcgcatttaatgccgcatgggagaaggcgtattgaaactgccatatgtcttaaagtctgacggcgtaaccccctctctgcagctactatgctatgattaatgagtctagtgacggctactctgtgaggaatcacatcagtcaaaaaggataaaggaccacgtccataaaatccctacaaagcctagggattagaccatgcatttcctatgatatattcattgggaatgtgtgcctttactgagaattacagaaagacatgtacctcaattctagggatcaccccacaaaaacactataaatatcccccaaactcattaaggcaggggtcgagaattctgggtttcataagaactagaagaggaaaaatccaccaagaacattctctgtaataaatactatcataaatacacagactcgtggactaaggctcattaatgccccaaccacgtaaaaatctctctcttaattccttatagctttcttaattattattattattatattggttgtccaaaaacctcggtcaacattttggtactttcattgagagttgaaggaagcgtctgaaagtagacaataccttacaacaaaacaaaaaatggtgg

SEQ ID NO: 276255 - DNA, 541 bp, Cannabis indica
ttaaaactttggaatagcagtaaagtctccaatatctgatttatccaatgatgcactattacataggacaacattgtccaacaaataactaccatcactagatctcttccctgttaagactgagcacccatcaaatgaaactaaacaatgagttttagaaaaacttacagtgtaatttgcatcacaaagttgaccgatgcttatcagatttgccttgagtcctttcacatacagtacttcagtaagaggtgcagctctactcatcaccaagtctccttttccaataatatggcccttatttccatcaccaaaagtgacaactccctcctttgcttctttgtaattgactaacaatttcttgttgcccgtcatgtgtcgagagcaaccactatccaagtaccactgtccttccagaaatgcagacagtgaaacttgagctaccaacccaacattcgattcacgatcagccctcaatctccactcacattgagatccttcctttcgagttttattgggtttttgaaaactcataggtcgattg

SEQ ID NO: 276256 - DNA, 786 bp, Cannabis indica
gtcactgagtttctcccagccgtttctggaggtatatcgcttggcccaggatgcgtgacttattcgcatttttagtattatctctactcgcatattgatggggtggtcagcattcgcaaggatgctgaccattctatcaagtgcgactttatagttttaatgcgggtgagatcccttattttgctttcacacattcaccacgctgaaaagatcttctatctttcagatgagcgacctgtcggatagtcaactgctcggctcgggaggccacgcattcaatggtgacgaggaccagggggaagatagttttctcccagcttcgatttcagaagaggagatcgcacctactgtaggtatagagctaggtctgatgtcttttgcggacattgagagaatggtgtaggagctcgctgaacctgggatcatcgatattggagacagcgagtctacggtgtcagcccgcgactaccttattcatttgaggcatgctcctgaattcaaggtcgaggagacagatgacgactggacggccccagctcgcgaatcaggcgaggataaagaagacgcagaagggagcaggactgactcggtcgatgacgcccagctgaacgagcctttcttgtgcgaggatttaattttgagagttaccaaatcagacctcactacctttacgaggctaaacctgctgcgacttgcttctttgcgacctaaaccgactctgagggcgcaccttccttttaccaatcctgcgattattcccacagaggatgtggtaatctcaatacc

SEQ ID NO: 276257 - DNA, 919 bp, Cannabis indica
gcatgtattatcccaatctaggaaagagttgaagaagaaaatacagtcaacttgataactttcctggatagtgcaaatgaaaatgactggcgtcagccaatcaaagactacatccaaaaaggagtcttgccagaagacttgaagaaaagagtggatgtaagaagaagagcgcctcgatttgtggtctttaatgacacattgtacaagcgttcattcgatggaatattattgagatgtctctcgatagaagaagcggcacatgcacttcaagagactcatgccggtacatgtggcgcccatcaagctggcccaaaattgtcagctcaattaaagcggttgggttactattggcctactatggttcaagatgcaattaattttgctaaatgttgtaagtcatgccaattacatggagatttcatccatcaaccccctcaaccactccatccttctatactgtcatggcctttcgaaacttggggaatggacgtcattggtccttttacgccaccctcttccaaagcccataagtatattttggccatcacagattacttctctaaatgggccgaagccgtgccactaaaagaagtacgggcggaagatgtcgctgattttataaggacccacgtaatttatcgatacggggttccttcaaaaattatctccgacaatgccctttatttcaaatgtaaggcaatggtcaagttgatgaacaagtacaaattcaagcacagtttctcagctagttacaacccgtcttcaaatggtcaagcagaagcatttaacaaagtgttatgcaaaatcatgaagaaaaccgcaacaaagaataagagggattggcatgaacgcctcctagaagctttgtgggcttatagaaccactgtgaggactgcgactggttgtacaccttataact

SEQ ID NO: 276258 - DNA, 691 bp, Cannabis indica
tggtccctcactttacctgagacgttagcatacaacttgcagcatacaacacacaatatatgaatgcaacatacaacatatacaagtcaaaacaaccctaatcaatatatcaattcataaactcatattgtgtccataccacacattctcagtaccacatacatattcataataacaaagcataaaccatattccaatacataaagagtttaaatttatgcaaataaacacaaacaaaactatctaatttccttacgaatcacggggctactgactgtcacaatctattcttctattataaccttaatgattagatttcacccttaaccaaaattcaacttaattatttctaataaaagagtagagcttaaaattatctatccattaacacttaaaaaaaaacaaacttaagaacgtaccaatagttatatatgtctaatttattaaacctgaaacatacactctcgttagaaatactaatataacaactaaattctttttttttcctaacatactctattccaatctgcttataacacaattccttttgaaaaacactcttcttatgctccttatttatgaaaataagtacaacttatcaaaaatcaaacttaaattacgtaatatagcaataccttgaatttttttttttccaaaaatatctcatagatcgaatcctacccataaaatt

SEQ ID NO: 276259 - DNA, 512 bp, Cannabis indica
agctagccccaagtggttatttagtatattgtatcttactttatatttgggggcttttttattaacatgaaaaaatgtagtagagtttaattttttacggtataaataaatcaggaaaaaaatatgggattaaaaaaaactaaagtttaaattatgaggaaaaaaataataaataaatttgataaaacttgtaataataaggttcgccgagaaaatcatcggcgccgaaaaagtcactgaaaagtcgtcggtatcggaaaagtcacaagaaaagttagtctccccgaaaaagttgtcggattagtcacagttactggaaaaagtcattggaaaagtcaccaaaagtaaatatcgcagatataaacaaaaaatataacgagttctataaacataatgaataaaacaaataaattcaaaactggttataattgaaatataaccggttttgtaacataaatgaaaaaaatacaaataaaataaaaataaactcaaaatcagttataaataaaaat

SEQ ID NO: 276260 - DNA, 495 bp, Cannabis indica
tatatatgttttgaattttaaaaatatttcatttttgttataaatgatgttgacgtgagttgtatgataacaacaaatattattgtttataattagaatcttattatgttttttaattattaatatacaaattttattaattagtaggcttatttattaacaccatatcaattagtcaataaaaaatagttatacaaatctaaatatagaaagttgaatcattaatatatctattataatttaattaaaaatatgtatgaatttttgtaaatatgttttcaaatgtgtacatttttaaaattgtatttttttgtcacattttttgtaattaattttaaaaaatatatacatttatgtaaaatacccataaagattcctagatttatcagaacacggggttttactgatatgataatctacaacagagtttacttgcatttggttaaatgctatgttctttccagagcatcagttaaagtaaagcttgggttgggt

SEQ ID NO: 276261 - DNA, 736 bp, Cannabis indica
aagtgatacgctaaatcacttcccggggacttaaactaggaactaaaagtttccctatcgataaaaagcatggcaataccccaaataacataaaaacgaggaaatctagggttcctgaaatttccccaaccggtagaccggttgcccaaccggaattccggttctgggaattttcaaaacccatccggaattccggatgcacaaccggaattccggttcctcgcaggcagatttcaaaatttcataactcattcaaatccaacccaaaacacacaagatcttccagacctgttctatatgacccaaataacaattctaaagcaacaaactcacccagattgcacagaaacaaaaagtgccatgaaagctccaagctttgagtttcaaactcaaacttggctaaagctcacttacaaccctcaaaactagataaaaaccacataatcatgcatactaaagctgcagaaaaccaaaacaaactcatgcaatacacacagccacatatttcgaaaattccctttgaaaaccaaccttgaactaaaaactttcaatcttgaaatcaaagcaattaacatgcattacactagctctaatttacttaaaacaacaagattaatcctctgtaaatcaccataaaccacagcagcagaacacaaaaacaagcatgcaacacacttcattttcatcaaatttcaagaaacttaaaaggagaacggctacgagagaaacataccaa

SEQ ID NO: 276262 - DNA, 652 bp, Cannabis indica
gtggtgcttgtttggcataattgtgcttatggtataatttagcttaaatgactttttatctacccgtttaccaaagccttgctattataaccgaaaaagacctattgattccgagcaaaaattgtcaaaattagtggagagaggtatgtcatccaaacttattgaacatgggttagaggaatgtcggaaagtgtagaatggttgtgatatgaatgtcaaaagcgatgttttgtgtctgtatgaatggcttgcttctgaattgtgcatccaagttagttcttagagttatcgagttgaaattctggttattgattgcttgaagttgtgcaggtggtggtagcagttcaatcatttgaaagtttagttatctaatgcattgttctttttagtttgagtcttagctttactcgggggcgagtaaagattcagtttgggggaatttgttaggctatttttagcctatattttggatcaactttatgttcgcttttcactgttttaggacagaattacgcttgatttctatgttttcaggttcttaggaataacagaggtctcgggatgcaaaagtacaataaaagacgagcggagccaagaaaaacaccaatttgaggcgtgacgcacttctagccgcgactagatcagtgtggcc

SEQ ID NO: 276263 - DNA, 653 bp, Cannabis indica
aggagaaatcttagatatggagtaaaaaacagagcaatatcaaaattaatgtgtacaagtattcctaagaagctaccactgtcagcctaccagaagtcatgaattttaacaatgctaactgaaatctcatcagctcattataaagcaatcgccactcaaaaatagcacaacaaaagtaacaaagaagtattaaaatttcatctgctcattataaagccaccgtcactcaaaatagcacaacaaaagtaacaaagaagtattaaaggtgtaaattttaccaaaagcaatgagaattaacaactgatgattgcattctgttcctcgaacacccctattgtcagagcagattgtcctatataaggagcgatctttgcctgaaatgaaaagaaaaagtaattatattctgacatttagcttggacactcttgtaaaataacagaactgcaatcgatgagaaagaaatatgaaatctgtttcagtaggtgaaattgagagagaggcttttgttgtgtttgcctgtatgggtgataaatgggttaatcgtaaagattgtttaattttttgggtttaattattgggtttattttttgaaatttgaatgaagcagtgtaaaaaaatttcaaaaattgtagtttgttagagagatatgtaag

SEQ ID NO: 276264 - DNA, 479 bp, Cannabis indica
tgtaccgtgctacctttcttctcattttccgagcctcattttagttatctgggagttccctagagttgaggtaggctgctattggcatcatccattttggggatgtgtcgatcattttgatttcttccatgccagtgatgctaggctcttcaacgaactggatagggaccaagtttgccttgtcacttatattgctgcttgccaatctagccaacgcgtttgcagttgtattttcttctcttagaatttgtctgagaccgtagcttttaaattgtgccagcaggtcatgtattttgctcagatatgctatcattttttctcctcgagcctcgtattcaccggatatgtgatttaccaccagttgtgaatcactacagatctcaatgtgttcgcccttcatttccttgggtaacttaagtccagcgattagggcctcgtattcggcttcgttgttagaggccttgaatccgaacttgact

SEQ ID NO: 276265 - DNA, 659 bp, Cannabis indica
catatctcatcgcggaaaaaattggtgatgccacataccgactcgcaacactcgatggaactgcgattccacgagcttggaatggcgagagtttaaaattatattatcaatagtactcgcattattcaactatgttcactcttgtacttatacttagatatttttcatacaaaaaaaaaaatcctaagtatagggggatatatatgccagaatgtactattgattatataaaggaaattgattcatgattgttaaattttcaaaattttatcaaacttgaaaatatttctacttgttacaccgagctgtaattaaagtcgcagatatatatattgaaaacgctagtacccgtgtactgcgaaaatattaaaggataattatccccgcgaggatataaatttgttcaaaataaaagcaaatttgtctaagtacaaagcgcgagtacccctgtaccgcataaaaagtaaagttaaaaagcataacagttttaacatggaggaaaatcagacatctggaacaacaagagcagtctcatccgcgactttgctgatgacctcgttctcggcttcctcagcatccgcaccctcgacctcttcaggaaggttccctccgccaccttgggtctgagtaggcgacatggcacgaaaagcctcggccat

SEQ ID NO: 276266 - DNA, 602 bp, Cannabis indica
ctgtgaatgaggtcgaatggggttcgaatggggttcggtggtcgggttctggctgtggggtgtggtcggacggtggctgggttctgggtttttctgggttggggtttgaaggtttaaggtgaaggtgaaggggctggggaaaggtcgggtagggtaggaaaaagtttgaaattaatttttttttttttttattaatgtaataatatataatataataaatataatattaataaaaaaattactgtttgttttttttttttttaaattttagcaaaataaaatatatattaatatataattttttttttttatttaaaggatagattaaagaaaataatattaaataaaataataataataataataataataataatttctaggagtaatatggaatagatggacctttcatctcgtaatgtgagtgatattacgcctgctgtagcaaaatttccacaaaagttcagcaaaaatcttgctgagtgctctttgaacatgtatgacttttgctaaatttttgctagaaaaatgctgcagcaggcggaagttctccacatgaacgaaaatttccttttgtgcttcacagaaatgctgcagcaaaa

SEQ ID NO: 276267 - DNA, 563 bp, Cannabis indica
ctatttaacgacaattcttagttaacaataaataaacatatttaataaacaaaattacccatcagatcccatcttcctttgaaacccctaaaatctctcctagaaaaactctaaccaccagtccatccaaaactatcttcatggaaacgaaccccatcattaaccccatcaatcgaatgctttatcattggaatcgtcgatggtaaaattattttccattgcctcttattatactagaaaattggaccgatcggatcaaggtagctcttttgactcggtagatggcaaagatctccatcagctagcatggaagttgttgcgttcctttctacatggagttgatgcagacatcccagtcatggtagtttaaaatggacattgaaatgaactgttctgcattgattatcagtacattgttttaatcagccacatgaaatctcacttttttaaaaaaaacaattttccaggatcttgaatacatcatgtctcctgggatgagaagctatgaaacttgtggattgatgagacaaatgaatccaagggaagttttagcgtctgatcaa

SEQ ID NO: 276268 - DNA, 523 bp, Cannabis indica
cctttagtgttatttatgttattttagtgtggaggggcaaaatggtctttttgccccaatgataatttgtcctttagtgggcttagtaattgagtaatatgtgtttattattattaagtgttggctgaaatagattattgcttaagtattccttttatttcattttcattcaaaacttagaaaatagaaaaaaatttcaaaaaggctctctcttttcctctctttctctctcggctggtaggtgtttctagggctgggatttctgattttcaagctatttttccttcattctaagtgttcttcaagccttggtaaagtttctaacccttttccttttgtaatttttagaaaatgtttgaaaagatgatgatgcatgcttgatttttaatatgttcttgctgctgtgaattgttgttattttcagtggattaatcttgttattttaagtagtttagagctagtgaatgcatgttatttgctttgatttcaagcttggtagtttttagctcaaaactatggtttt

SEQ ID NO: 276269 - DNA, 463 bp, Cannabis indica
ttataagaaaatgactaagtctgaaaacaaagttacaaaatataggagatatttttttcttgattccaaaagtgttctatcatcttattctgtataagatggtcccactgcctctgttgtcttgacacaactgaagaggataattccacttatgttcttagatagaaagtcacgataccttgtcgtagtgggagggtttcaaggaactcaccctgttatgacttggaagacacttgtgatgaaaatccattgttagtttaaacaagtaatgtattgtcagaataagaaactaagaagccaagccaagagaactatggttaaaaccattcatatggaacaaccaaaagctttctattacaaggacaagaaataaaattttattagtaagtctattatatggaattaacaaaatttcctgttcctagtattagaggtttgcgtttatctaaacctatggcttgtg

SEQ ID NO: 276270 - DNA, 445 bp, Cannabis indica
aattattcataattatctaattaggattttgctaatccattcttaattccagggtattacagtaatccaagagtcaatgttcttttgaggtatctcatgaccctctctatagcattccaatgctctgcactaggtctactagtaaacctgcagaataatctcacgacataggcaatgtcgggtctagtacaatcagtggcataccgaagactgccaatgatgcttgcttattcagattgtcttacaccatcaccagtgttcttaagtaattttacactgggatcatatggtgtacaagtaggtttacagttgaagtaattacatttctttaagatcttctaaatgtagtgagattgatccaaagaaattcccttttcagacctagtgatctgtataccaaggattacattctcttcacctagatctttcatgtcaaaattttcac

SEQ ID NO: 276271 - DNA, 276 bp, Cannabis indica
tggagtctaattaataaatattataaatgacaattttatttgatagttattttaattattaaataaatagtttggcatttataaggttgaattgaaaaatatggtattattgaaaagaagaataagtggttgaaataaagtggcaaaattgtaactagagattggtccacttattgtgtacggccaagaggtatttttgcccaatattttattcttttttaatccatttaattcaaccctaaccctattgaagaatagtataaaaggaaggttatg

SEQ ID NO: 276272 - DNA, 672 bp, Cannabis indica
ctgacagctcaggtagccctaacaaagctgatcgcagggcaagccaaacaagctcaagtggtttgtgagatatgtggaggtccccatcacttctctaagtgtcaagccgatgtggatgattttccaatggatgaagcaaaagccattgggaattattctcagaacaacaatatctatgggttcaaccaaggaggtaaccgaagaaacagtgggttctatcagcaacgaaatcagaaccagacacagaaccaacaatatactcagcaacaagcctctagtggaaattctagtttgcaaacagatttattgctacaattcatgactgaaactagatcttccattaaagacttgcagactcaaatgggccaactagcactcaggtagcaacccgtcctcaaggaaatttacccagcacaactgaagtcaatcccaaagaaaactgcaaggcaattaccctaaggagcggtaagaaatatgatgggcctgaattgacacaaccaggagaagaggagattaaagttcaaccagagcaaatcccaacatcaacagtagagaaagctactaatagcccagcaccaccacaacaatctccaccaatcagtattgatcatcatgtgaaggtaccttatcctcagagactccgaagaccaatctagacaagcagttcacaaa

SEQ ID NO: 276273 - DNA, 546 bp, Cannabis indica
ggaggcattcaaaaaaactaaagaacacatggcccaacctccaatcctgtcaaagcccgttctcggagaggacttgtttctgtacttggccgtctccgtgcatgtggtcagcgcagccttagtccgggaagaggagaaaactcagcatcccgtgtactatgtcagcaaacgcatgataggggcggagacgcgatacccagtcatcgaaaaactagttttttgcctcctaatggcctcgagaaagttgagaccctacttccaagctcacccaatcaaggtattgactaaccacccactccggcaagtcctgcaaaagccagaggcgtctggaaggctcctcaaatgggcaatggagctaagccaatttgacttgcactacattccccgcatttccataaagggataggcgttagcagactttatcacggagtgcaatgaagccgaagctaccacaaacatacccacaccatcagtcctagcatggaaagtatttgtagatggagcctccaacgagaacggattcggagcggggatcgcaatgatatc

SEQ ID NO: 276274 - DNA, 551 bp, Cannabis indica
ttcatgtacaaggaacaaatctccaactttaaatcatacgccaaaggatcaacctccaactcttcatataaaatttggcgcatttgttgtagggttgtgtcagttctaactgtcaacgtcaagctgccttctgctttgtaaacccaattataaccctcaacacaccaaacaccatcgtacaatacaacaagaaacactgtcgatcctgcaatttcaaacaaaaaaaggtgagtacaggaaaaaataacaaatatcgacatcccatcgatacccatcgacattatgtcgataaaaacatccacagtaagggtgacagtcctcatcgataaaccatcgacacaccatcgacatactatcaatatagactccacaatgcactttgcatggcaaacacgtatacaatggtaattaatccattcaactatcgacaagctatcgacattgtatcgatattcactcgacaaatacacattgcatgtgtttcacttgtacggttacacatttaatgtacatgttaataaatttttcctacattcccaacaactattccc

SEQ ID NO: 276275 - DNA, 1508 bp, Cannabis indica
agaaaggacacgtatactcagttcttccacagaaagctgagatgtccttgagggactcctcgtagtttcaaacctcgcttaaggtataatcagcgagaggtggcgagcatgaccgaagtctaatcgcatccaagacaagagagtagatcgcatatatcgaatatatgcgatcatcctccccttgtcctcgtatcaaccaggagaacgattctctgtaaagtacgagttgatcttaggaaccctacagccttttataaagcgatgtagactcgcatgtctaggttctatcagctcaacacacgatgtctagaagaagcgactacttaaagacgcagacatagtgataaccctgcgagttgtacatcggaatatgaacagtcaactcgccggtatggaagacgcatgcgttgatgaacttagtaactgtcattcatttattaatgttaacgttgcttagttttattattgcaattcaatgtgtaaataatggattaacaatgaatgtgatccttgtgtaaccgattggacacctgctttgtatataaaggggtgatccaccatgaaatggcacctacgaatcctttgctacagtggactaagcagatcacaatctgactgaaccactataattctctgtcttactgatattttccagttttgttgattgttctcccattcccagtcgagtactcgccgttctaggttgaatactcgcacttgtcgtttctctgaaaattctctttcgtattaataaaataatataatttggtgttgcgaaattcactcgacaacatttggcgccgtctgtgggaatcgactaaaagatttcattcatttcaaagaacaataatcatcatggctggaaatcacgctaacggagctaacaacgggtccatcaacattggaatgatgaatgtaccgctatctggagctggagtgccacctgtggacgtcattaacggcggagtagggagaagcaatatcagacctctcaacctattcccagaaacgactgaccctcaagttggggacacatccacgccaccagcaaccatgcattttccccccgtcactccggcggtggtatccgagggaatgatccagctcaccactgatcaatatgctgcgattcaggatcaactgcgggcactacaggccgaagtagatggacaaagccgagctcgacgccctcctcgagttcccgctattcgcaccgataaccctcaggtaacaacttctagacgtcatactaaccgtgtacgcagggaacgaagaactaaccctgaaggtctggacctgaaccatccaatgtcaagggatcaatccgcaaggtttccaaaccagagcgcacaaatcgatgaagatcctgagcgccgtaatcctcgcagccgaccatcaagagacaacgacgcagaatcagcctcttcgtcgtcgcatggtcgcactgttggaaattattttaccaggactcacaagtatgtttattaacatcctaaataagaactttc

SEQ ID NO: 276276 - DNA, 133 bp, Cannabis indica
gagagaaattttctgtcagaaagctaatgttcaaagatgtgtattttgactgagccatcacgaaaatattaatttgaaaaacctcaattagtggccggccatggtgttgtagtgggccccacttgtttttgca

SEQ ID NO: 276277 - DNA, 534 bp, Cannabis indica
atggcttgattgtgaagaaaaaagatttggggatttatttgttaattaagacactttgtggagtctaattaataaataatataaataaaaattttatttgataattaagtataattattaaataaatagttttggcatttataggattgaaattagaaaatatggcatttgtgaaataatagataaatggttaaaatagtggcaaaaatataattagtggggcccactctcatggtcggccactatagggattatttggctattttttttatcatttttcattctatataattcaatcctaaccctaagtgaattggtataaaaagaaaagaatagtctcataatccaactaatgactctaaacctagtttacaacttgtcagacaactagagttttgagatttcttcttcttcttctttctaattttgaatcctagagtgttcttcacaaaataattttgagccacagtgattgagtgcatgcctacccatagcaagttagtcctcaatcatagtgtgtaagactatgaagaa

SEQ ID NO: 276278 - DNA, 751 bp, Cannabis indica
agacacagatgggccaactagcaactcaagtagcaacccgtcctcaagggaatttgcctagcacaactgaagtaaaccccaaggaaaactgcaaggcaattaccctgagaagcggtaaaaattatgatggtcctgaaatgccacaactagtgaatggagaaaaggagaatgaagagcaaccgatgtcgaccccaacacccactccaacgaaggctactgatagtcaaacacagccacagcagtctccaccaactaatattgatcaccatgtaaaaataccataccctcaaaggcttagaaagtcaagcttagacaagcagttcaccaaattcctggaagtgttcaaaagacttcacattaacattccctttgctgaagctttagagcagatgccaagttatgtgaagtttatgaaggaaatcctgtcaaagaagagaaagatggaggactatgagacagtggctctaactgaagagtgcagcgccatcctacagaagaaactccctcctaaactcagagatccagggagtttcactattccttgtactataggaaaaattgagggaataaatgcactttgtgacttgggagctagcattaacttgatgcctctatcggtgtttaaaagactgcagttgggtgaagcaaagccaacaacagtaactctccaattggcggaccgatcactagcccatcctagaggagtcattgaggatgtgttagttaaggttgataagttcatctttccagc

SEQ ID NO: 276279 - DNA, 602 bp, Cannabis indica
atttgaactgatatttgatgctaattattcgagagtcacaaccctctatcataaataggtacgtgccgaggcattaatatagccattaatattgcccaataggtactaaccacacaaaaaatcggttttgggtttgtaatttgtttctgatttaatttttatatatatatgcaaaaataacataaatagactatatatatttaataaacacacataatattcacgtacttaattaatatattaattacttgatataaattaatatcatttatttaattaatttattcttttgggagctatatatcaaataattaaattaaatcggacaaatatattatcatttatggaaaaattaattgttcaatatgacaatgagcatagttttttctttaaattgtctatagctagctacgtctttttaatcttttttctttttttaaaaaaaaatatatgatcaaaccatggactctctaaattaatataggtaagttttgattatatagctattaatatttgaactgatattatttatctttttattaaaatttctttaaactagaattctaaattgcattactgagaacaaaaaaaaaataatttta

SEQ ID NO: 276280 - DNA, 640 bp, Cannabis indica
cgttctcgctgtgtaccttggttactcggtacacactctaacctcaacgaaggtcccgctacggcttcatcgactgccaaatcatgttcatcgtccatattcaaatctacaataggatcgttattgtagaaggttgtatcgaactcttcaaactgatgaaatcctgtcgcttcttgttcttgctctacattggtcggaacctctaaattggtcggaacctcctcattcacaccaatcccaacatctgtttcgggaacgcaagaccctaccacactccgagggagaggattagtaggcggcgtaggctccgaattcccaacttttctcaccttggtcacgaataatggcataaactctgtatttgacattgttgccctcatctctaagaacgttctcagttggcgttctctcttaataacctctggcgcaaccatttgtcccttcatgtacaaggaacaaatctccaactttaaatcatacgctaccggatcaacttccaactcttcatataaaatttgtcgcagttcttgtagggttgtctcagttgtaactgtcaacgtcaagctgctatttgctttgtaaatccaattataattctcacataaccaaacaccatcgtacgatacaacaaggaacactt

SEQ ID NO: 276281 - DNA, 658 bp, Cannabis indica
aataattggattggattggattggattttaagatctaattggattggatcggatgatgattttctaaatccaattactaattggattggatcagatgtgaaaaaaaaaaagttggattggatcggatgcccacccctaacaaccaccaccatctaccattgagcaaaagcaaccatttagcctatgtttggtagagggaaaagagtgaagaaattgtgtcaaatttagcaaaaacacaatcaattttatatttagtataaatctaagttgtattttattttatgttaaatttgacatataattttaagcatgtgtcaaatttgatacacatttagcattaaatttgtgatgcaatgatatattttagtatttttagaaaacatatataatattgtattaaatataatattttagtatatagtataaaatataatattgtgttaaaatataatattttacaaaacatattttagtatttagtataatatataatattgtgttaaatatatttttttttatttactaatattatcatagagcattaataagtaagtttaaatggataattatgttgtaaaatacaatttttgtaaattttttaatttttatggtattttataaaaatacaaaaaaattatataaaaataatattaaaata

SEQ ID NO: 276282 - DNA, 978 bp, Cannabis indica
aatctacgtttcgtttctttcgagattcgatcttatcttcgttttctctttcaaactctttctctctctcttccaatctctcaccttcaactccacgaacctgtgagaaaaaaaaaaacaaacactcgactcttagatctgaaacaaaaaccgaaactcctgactcagatctcgaactgtaacgaagatatttacacgatcgaaacgtcgcgtcgccgaacctcgcggcggagctcctcgaggcgaatcttcttgagttggtcaacaataagaaggaaactcgttgattcatcgtcgtttcgtgaagtgaaacgtcgtttgagttcatcaaacctgtgtttacaggtatctggagtccatggggattcagttcggttggagagttccatggcgatggagtcccagttcttggtgccgtgccggttaacggcgcacgctagcaagagttcctctaacgtgcaccatggttggacgctcgtttcgtgttccttagccatactctaatcatgtcctcataattttcaaaattagggtttttccttttgttttatttaatttttttttttttttaataaatattgtttttcaatgttatataaatatatctataggtttttataaagagatgtaattttgtgatctttgattttgagatctttttgtggtgtgttgttgcatatatatatatgttctccaaattggattcaagtgagtatagtcttcttttgggttttaggcctttctcgagtactttttagggttgttgggccagcccaattgatattttatttattttgggaaaattacatacaccactcactttttcattttttttacttttatactgttaggcggtataatttacatttatactgtgtagtttataatttttatactttgggcttcaagatgtattttcttgtcactttaaaatgtatttttttaattataaaaattaatgggaaaattagttgtcac

SEQ ID NO: 276283 - DNA, 824 bp, Cannabis indica
tttagtttttcttaagtacatatatttttgagttgatgtacaagtaatttgtagttgcttttaagttgtttaatatttttaagattatttgtgtgttatttttctaagttgctgcaatgtgttgatgcctaattgatttttatattagagtgtggttgttatcgagttgtttattcattgttattaagttgtttaacaaatttatatatttatatatatatattattaagttggtgtaaaattattttgtagttgcttttaaatttattttatgaattattggtgtttttttttcttcttggattgcaattagtggggttattttataatgcctatttaatttgcatattacaatagagttgtcatacagtttgtttatttgttgttgtttagttgtttaactaagaaaaatgagtacataagtatatatttttagtttttcatgtgaaatacatattaagattattgttgtatttatttttttgcgcctttcagattgtcaaaaaaaaatgtattgatgatgttcgtacgtattatagtagtgttgttgtccaatattatttttggtgttgtttcttcgttgttatttagttgtttaattaagagaaaatgaatatatgtatatatatttagttttttatgggtaatacattaagattgttgttgtattattttttatttattttacatttaagattgtcaacaaaaaaaaaaatgtgttgttgtctagtagctgttttgctgttatttaattgctaagaaagaataatctaaaaagtcttttactaataaaatgaattattatatttaaagtacactttttt

SEQ ID NO: 276284 - DNA, 625 bp, Cannabis indica
gctttgttaagcttgaagaagctatccgacaagcataaagtgggagacaggcagttgctagacaggccctaggtggaagacagccttcagttctgcccagcacacctgccagcatatgtagccagcgctccaaaggccaaacacaatggaggcaaacataacaacaacaactttggccaagaaaaaggaaaaaatgggaaatttaataagtctcccttgccacaagactcaaaggaaaggggagaggtttacatgcttcactctcataacaacaactccaaaaatagaataggcgggtacagattcaatagtattgtacaagaagcctcatcccatgaggaaagacatgagcaaaagggacacctctgaatcctaccgattttataatgattttggtccatgataccaattagcgcaagcacttatagtcgaaagatcagattcttgatcagaaagaacaatctccatctgcgtcgttatttaagatagccagatagaggcacaaggtgcccaaaagagagacccaatgccacctcagtggctagtcacctaggggtaatcattgggagaccccatattgtaggcgagataagcaaagctatgaaatgctatgctcggaccctcc

SEQ ID NO: 276285 - DNA, 513 bp, Cannabis indica
taatgtttatttttagtagcataggtatccaatttttctaaaatgttaattttcttctagtttcgtcagtacaaattctgttttgaatttattaaaaaaatattagaattcaggtcttatatgtgccatatttaatataataacagagttagtactaacacaattagagaaaaattatagttttacaaacattaggtacttataccgctaaaaataaatatagagtttatgctgcttacaaactcaaagtttttagtacttatgcccctatttaccctatatattataaaaatatttgtgagataaatatcttatattttcttatacgtacacttatattatactaggcgaaagttacgtgcattgcacgtatgcttagtcatatatattaaattttatttagcaagtgataaaatatgcatatttcttcaatttttattttacattcaaatggtcattctaatatgcttagaaatatttcaacagtaaaaaaaatcaattaatttagtatgt

SEQ ID NO: 276286 - DNA, 733 bp, Cannabis indica
ttttgttttgatattatttttataataattttttaagatcatcaaaaaaaattttaaaaaatatcagtgtatatttttgtaaaggataattttatgatttttttgactcatgtggacctaacgcgcatggataattctagttttttttttgtttatttcatattagagagagtgaaaaaaagctatatattatttaaaaaaaaaagctatatattatatttattaactatcctttcgaagatagaaaagaaaaaggactgtatatgaatatacaaatggcatagtttagtctccgtataacacaacaacgatgtgagctcattaattttgatagaaacaatgcagatttgaaaagattcaataaggagacaaaaatcccaaaatgttagaaaatgaaaaattaatcttaaaaattgggggatgatttacgaataaaagaagacccaattggatcagaacctgaaattgggggacgatttttttgaatttctcacagcgaatttgcgtcagatcctccatttttcgcagattcactcatccatctagacggcaataagaatttgcttgctctgttcattgaatagtgggagtggactgcgattgaaaaaaaatatataaatgaagataaatacctagaggaaacctaaacgatttggtaaaaaaaaattccatatataattcgttcttttcctgatctctctcaacaaactaattgtatatgcggtttaaggtt

SEQ ID NO: 276287 - DNA, 922 bp, Cannabis indica
taaaataatttccaacaccagtctggttccatttctggtgccaggtcacgagctgggtccttggttcaagtttgggtttgggtcgggtactaggtctcggtcctagttctgtttcccaggtccctatcttgattctgggtccaggtcccggttattgtgtgggttcgggtcccggtctaggttcgggttcgagtcctagtctcggttcgggtttaggtctctgtttgggttttgatctgggttcagctttgggtttaggtcttggtcatggtcctattcctagttcgattctagttctatttgcgatcctgagttcgagtttgggtttaagttcgggtcggagttcgagtcctggtctgagtttgggttcgggttcggatttgagtctaggtacagatcaggcttcgggtgtgggtttgcgtcctgggtcttggtctaggttgggtccgagtaccaagttccaatcccaatcttagtctggattcagttcttggtctaagtccttggctctgatcctggtccggcttcgagtttgggtccgagtccggttctaggtttgggtctgattctaggtatgggtgtttgagttcgagtccgagtctgtgtccgggtttgtgtgtaggtctggaccccgattcgggtctaggttcggttccaggtccaagtttgggtcccgagtgcgggtccaagtttgggtctgggtcaagatcttggtccagatctaggaccagcattttcatcccagtctcggtcttggtccgagtccaggttcgtatcttgatccctatctaggtccaagtctgtgttcgggatcgggttctagatttacgtcaaggtccgtgtctcagttccagtctgggtacacgaccgtgtctgggctcgagttccagtctcagtttgggtttgaggctaggtctctgtt

SEQ ID NO: 276288 - DNA, 759 bp, Cannabis indica
gatgggtagaatgactacgttatgaagccacataccaaaaggcgatcaacttcttctataagcgcttggtacctcgagtggtccattttacgctgcttctgtcggacgcctcacacttctgggtaaatgttcaatcgatgacacatgacctgcggtgatattccgaccatatttgaatgacttaggaaaaatccctagtccttataaaatatttatggtatctctaatgattacttaatcttaagcaagtattttacattaatgttaatactagattgctatgttgaggagttagtctagaaggaacttatagtttcagactaagataatatgtcacaacaagaggtccctaagaacaagtagtaagaggctaagtgtacacttatgtacgaacttaaccagactcctactattgagtggggtcctctaagatgtaaccaaacaaggaacattaggagacaatcaaggaagaaatctctgaaaaagacctatatgttagatgataggggtgtacattagaatccttatatctacaccaacttagaatattcgagatagtggttactcttggggtggaggaattattcaagaaagatgtaaacacccatctataataatttagttccactagtgaggctaaatacttagttgtttatgaaaagtaataaaaaaaattcaaactgaagaaagttcttgactgtttatctctattatattttttattagaattagagatatgtcttctatatattcagatgc

SEQ ID NO: 276289 - DNA, 534 bp, Cannabis indica
tctggaaaattcagaacccccatccggaattccggatgcacaaccggaattccggttcctcgcaggcagcaaactcaaaaattcataacttgcacaaatcgactccaaatcaattcaaaccttccagacctattccatatgacccaaagaacatttcgaaggcaccaaaaccacccagattgcaccataggaaaaagtaccattaaagctcaagctttgagttctaaactcaaacttgagtaaacctagctaacatgcaatcaaaccaacataaatcttcttaaataagcatattataacctctgaaaaccattaaaaacattaacaacaacacagcaacagattcacaacatttccttcaaaaatcacatttttgagctagaaattccaaacttgaaacaaagtaatttacatgcatttctaacaacttaattaacttcaaattaacatgcttacatctcagaaattatcaataaaacacagcagtaacaacaactaagaattcatgcatgcatcatcatcttttcatcaaaa

SEQ ID NO: 276290 - DNA, 742 bp, Cannabis indica
tggtgctatgcccaatgtcgttgtggtactcgcatcttttgcttgggtccctccgggagctatccttgtataagggaggcggtctccggtagtgcgtattttgcctagtagcaaagtacacacgctcttgggagtccgtcagctccgtgtactgggtgtattgtggagtgtaccccctcttttggcgtttctcctccatccgggtgctgcctttggaggatcttttactcctcgagccctgggaagggcctgccaggctagcggttggagcggagtgcgagggagcttgtccatttatccttgagggatttccaaaatgggatgatgcgggtgccaaggcctggccctgactatatccgggggtagcagagaactgtatgccgctcatcggtggagccgcggtcgggacagtacccaagggcggtgctccgggcatgtaccctgctatcccggtgggatagtatcctccataggccactatttgggcctcttcaaggttgatatacttttggactctcttctggaagtcctgaaggctagcggccccctcttgttgtagttcgttccagaagggagtccctgtacggatgcctgcctggagaagagcaagttgttgtccgtcatcaactttcttggtcttcgaggcttcctctcggaacctctttatgtagtttttcaaggtctcggtgggcagttgcttgatgttagtcaaggcactgacctccaggttgacctttcttgc

SEQ ID NO: 276291 - DNA, 595 bp, Cannabis indica
agaggttcagcctagcagttctgtaatagcctaaacctcgttatttgtattgacttaagataaaggagaaagattcattttcttatagctcttacaacagtatctctgaatgtataattcttagataatatatttagggcatagtcttagctcaactaatgtataattcttagataaatgctctgacaattaatatttcgaaatttgattttctctctccacggtgactgctgcacttgattatttttgatttcccatattcgcttttaaggagggaaacttaggcgtctgaggttcctttgagatgattacctcttttcgtgacttgcctataaatatcaaaaagcattggtacataaactcattttcatcacccttctttgctaagtaagctttagagcgaaaagagagatgcttggcttcaaagttgtcgaagtgccttcatacaaacttcttgttggattgacattgctcgaacccagacatctgatgctcaagtaagtttctgatttcctttatgcttatctttgcatgtttatatgtcaaatgcaccttctactttgctgtagaaaatgtttaggaaaccctaggtcca

SEQ ID NO: 276292 - DNA, 625 bp, Cannabis indica
cgacttggggacccaagcagcaatgttagacctgtggaagagttagaagagatcgagatcgatccagctatcccggccagaaagctaaaaattggaaagggtttgttgctcgaagtaaaatcagagttgataaaatttataagagaaaacctagatgtttttgcctggtcacatacgaatatggtcgaaatcgacccttctattatttcacacgtcctgaatatcgatcctaacatccaaccatttcagtaaaaatgaagattgttggataaagaatgagcagtagccctgaaagatgaagttgaaaagttgtgcaacaacaacttcataattgaagctttttagttggcttggctcgtgaaccccgtactcatgcccaagccgaataagaaatggcgagtctgtattgatttcacaaatctgaacaaagcgtgccctaaagactgttttccacttccaaggatcgatcagctcgtcgatgcaacagttgggcacgaaatattaagcttcatggatgcttattcaggctacaatcagatcaaaatgcatccgccagaccaagaacatgttggaattattttaccaggatctagatttactaccaagtatgttttattaacatcct

SEQ ID NO: 276293 - DNA, 639 bp, Cannabis indica
ctccgtggaaccgaaaaaactttttcatgtccttcttgctggcatctttcttcaagagcctgagcttcttatatggggccagcaactgagttgccatgtacacaatttctatatcttcagtcagaatagtgaatgcagtgtatttggcatggttttcccggggagcttgttcgaatttgctagtgaactttcctttcttcccattcccttgcttgtggttgttgttggaatgcttaccacttgagctcgaattacttgggtagtggggaagttgggcggatgtttcagtaggaggagcctttgacttgccactcttttgctcacctttcgctcattgaatagcttcttcgagcttgatgaagccttcgacacagtcaagaaaatcactcattgagtctaccggcccgttcttccttatatccttccaaagttcaccgaggacttcgatgccccccagtatcgcagataactttctatcttcagttacccgtgaaactttggtcacctccgtcatgaatctactgatgtatgcccggagaggctcgcctggtcgttgcttaacttcaccaaatctcccaaatgtaatggaagttggcgtgaggaggagaattgtgcatggaattccgaagagaaggtttt

SEQ ID NO: 276294 - DNA, 695 bp, Cannabis indica
tttctaacggtcaaaaaaattcaaggagcacgatttagtacatgtcaaagttcggagggagaaattactaattagccatgtgaaatatactgttggaggtgttagctataataagaatgaggctgtacttccttgtcatgcttctctcattcgcccttaattcttgcctaaactgtttacttgaattaaaaatttggccagattagaataatgtaatattattttcaacctttttaggatagtctatcaatattattattggcctatgaaaatttgtttcccattcatctgctatacatgctgttagagaagcgagatggaattcttctaaactctctattgatgcaacatatctcatgctctgcaatgttgctgattgaagctactgtctaatttgtagcagattattccttgcaatttcaatactgaaacttttaatagctgtgtgcagatttaccaaaactcctacactgctgacctggaagaaccctcaaccgacaactaatatagtaaacataattgtaatatttcttttcagtattgtgtgtaatttattagcgtgatgtgttagagagtcccacattgccaatgtgtggaaagataatagaatatataagaagaatgagctactcctcccatagccaattggttttgggatggaaccccattcattttatctccaaattctaacatgg

SEQ ID NO: 276295 - DNA, 531 bp, Cannabis indica
agatgattatactttcagtggatataggcctattgactctttgcagaggttgatcttgtgaaaaccactatgaacaagatacaaaaaccatagatttataaaatatgtggttgtggtcttttgatgacttaggtctagttacaataaagagttcttagactagtccaagtggattcggtcacagaatattaaactcacattccatacattaacatacagtttgaatccattgacagaaaatggatattaaacacttgtgaaagttgaactgtattgtattctagaaatagaaatataaaatttctatttggaatctaaaatttaaagtcagagacttaaatttagaccaaatatacaatgactaatgattatagcttggacgaccactactaatctaactctaagtctaattgcctaaagtaagcatatataagtaggagattctaagatcgaggattatatcattttgggatagaatattaggaatataatcatatgcgccattcaatttcttaagagaaaatagaatga

SEQ ID NO: 276296 - DNA, 844 bp, Cannabis indica
tgacatagatacgctatgagattatccatttgttattatcctattaatcaatgatcctctatagatgatgtacactgagtaaggactaatttaccattacacccttcaatgtattttatccttaaaatacttaggtccttataaatgatatttcagtgaactaatataatcattgaaatgagtactcaaccatttaagccaatctcgaaggaaatcaccatttgacttttatattcggatagaagctatagattccgtatctatgattagcgctcccactcaattgaactaccatgtccttaacctatatgtcatgagaagaactatttggtcgactttaacgaataaatttaagaacacaaataatgcaactgaactagaacttaaccatctgaggattgagatcatttgatctaaggtcaagtagatgatattgaattgaatatacattacagtaaaattatccagtctgattcaagttcaatatcgatccctttcgatgcatactccatacatccaacccaagcttactttaaccaataccttggaattgacataacacttatccaaggtgcaagtaaactacattgtagattattgtatcagttaaatttcgtgtactgataaaatcataggaatacatttaatcacacaatcttgattactttctactatgttgacaacacaataaataagaatgtcaatgtgataaagatttggatgaatttataaattaaataaataaacaaatgatcatatgaaccaaataatacactaaataagtaatgaaaataaatctattttttttattgataattgaatagaaaagattacattgaaatag

SEQ ID NO: 276297 - DNA, 1184 bp, Cannabis indica
tttgcctggacgtcgagaggtcccttcaccagcgggctcagcgggttggtactcttcatggtgttccatggtgtttccttcgttcatggggtcatcatgatcctcctcctcatagttcgtccgtcttgtactcaccatgatggtaaagggtgattaacacttgtgctcaaagctctcaatgaaagcaccaaactgttgacgcggtttttcgtcaacggatctaagaagatcgtaaaacgagcaagatgaacacaagcaatagttaatcaaagtaaaccggtttgcaaaaagaaattcaccataaacgaacacaagaattttatagtggttcaccccctttcagcggtaataggctagtccacttggagtgttattgatctcaatgcttgaggtgagttctccagagttatgttctccaagagttcactcctcaagtgagtttttagaatttgagagagggagctcaagagtatgatctcgtgagtatcaatttcagggtccctttacaagtgatttcaccccccttatatagatattcatctaggatttaaaatcccttaaacataggtatgccctcccgtaactatagttcggttaggttcaaaacaaaaaataataaaataattatttaaaaaataaatatctcttcacttatcactttttgactatattttcggagcagctctaacagcacgcgtccctcgtatttggacccggatggtcatgggtacctgaggggagcaattgggtcggttcgtgtccatcaggtccttgagataatttgacagctgaggagccctttacaccttagcacctgacggttgcaccttggcacctgacggatttgggagcttagtgcgcccaaaatgctcctctttggcctataagctcctctttggcaaatgagctcctctttggcccttgagctcctccttggtccatgagctcctccatggcccatgagctccactttggcccttgagctcctccttggtccatgagctcctccttggtccacgagctcctccatggcccatgagctcctccttggtccatgagctccaccttgttggacctccatatctagagtaaaaattcatcaccattattttggattttttaagaaataacatttgcccccaagtttatcataactttataatgttatgatggacttgtagaaa

SEQ ID NO: 276298 - DNA, 627 bp, Cannabis indica
tgccatagttgggtgattccctacttcctgagttagaataatccgtagagagtataacagaacctagggttgtgggttcgggtttccaggattagggtttcgaccatgtgatttacccgattttattatgtgcttagggcatccatctagcgcgagacttttcgttcgggtcggccatcacacttgaatctggaaagaaggtaagaactgtatataatgtgtgatatagatctctgaatgtatgtatatgttatgtgtatatgcatgcttatatgttgtgattcatacactaccaacacttgtacgattgcggtacagaatgcattggtaaggtgtatgatgtctgaaagtacttcgtggtgttaccagcacttgtacggaaaggtacaagatgtctgtggtacaacaactaacagtgctcaaggtgcggtccataccctacctacactagtacgaaggtatactgagtgcatgtggtacatggtacatggtcgtatccttagtagaacgttcttactcatctgttaagccttgtaaataggtgtatgggtgcctagatacaagtcggtattatgtgatatgttatatgcttttcttactgagcatgtcgactcacagttctgcttc

SEQ ID NO: 276299 - DNA, 528 bp, Cannabis indica
attcttattactttcttttttaactatgaaaaagaaaaaaatgaaaatgaaagggtcgtcttattcaaaaccccaattatgaaatcccttctctcccacttcacacctcggaacgcaccgttcttatatagagagaggcgctttcacatcttcttaaaccgaaacggctggggagaggaaaggttcccttttttagggtactcccgggaacagatccagtggagacggggtggggcctgtagctcagaggattagagcacgtggctacgaaccacggtgtcgggggttcgaatccctcctcgcccacaactggccaaaaagggaaggacccttccctttgggggtaggaaaatcatgatcgggattgcggacccaaagctatggaatttgggcgtgggtcttttgtcgaaatggaatggccttactctttctttttctttctttaatctttaaaggttgaaaatgaaaatagagtatgcccgacccgaatcagcatatttttttgttttacgccccgtaattcttcct

SEQ ID NO: 276300 - DNA, 597 bp, Cannabis indica
catacctggaaaagggcattttacctgatgataaggtagaagcaagaaagctgcgacagcgagccgcccgatatgtcatgtacgataaaaggttatatcgcagaagttttagtcaaccgctactcaaatgcatcgacggtgaagattgcgactacatactacgtgaggtacatgggggaatttgtggcaatcatacagggggtaactcccttgcattaaaaatcatgcgacaagggtattactggccaaccttgcgacaggatgctttcgcttttgcgaagaaatgcgacaagtgtcagcgaatagccacatatacccaccaacctccgagtaacctacattctatcacaagtccatggcctttcgcagtatgggggatcgacttaataggcgagctacccaaaggaaaaggtggagtcaaatatgcagtagtcgcagtagactattttacaaaatgggccgaagccaaagcactcgcaaccattacagcgacaaagttgcgtgagtttgtctacaacgccataatttgttgatttggtatcccttacaaactcatctcagacaatggaatgcagttcgattgtaaagagatgcgac

SEQ ID NO: 276301 - DNA, 556 bp, Cannabis indica
attgtgcaaacagaaactcgaaaaaattcaatttataaaaattgtgtttgtaaacatgaaacactaatcaactttctactgaaattaggaataaacaaaacattgtctaaaactaaaaatttcttctgaaacttgaggcgggctcttcctttagcttggaccgatactaactcgccatttccaactttgagcttcaactcctctggattcagataatcccaagtttcaagcagctgcaatgaagaacaaacatggttagtagatccagaatcaacaatccagaaggatttgtcattctctaaaacacatgattcaaaaacaaaagcattaccttcattcgaattatttagaagtctgggacatcgttcttcctgatgtcccttctcattacaattttgaacaatgaagagtattaccatcaattgtacttgaagaagcagcattgttagaagcttcatccttaattcttttcctcttacacaagtctgcgactccggggggcggcattgcaatcaagtttcgttcataagctcgcaattctgcttctagcttatcc

SEQ ID NO: 276302 - DNA, 602 bp, Cannabis indica
tcaagatcatgttacgctgccctgccatgccatgaaacatatcttcagttcgtcaagctgggcctgtacggctgggctgactttgttggcattctggtcgggttgggttacgtcagcgtctttctgagcggggatttgagtatgggctctggactgcacattcgtcgtagtattctgctcgtctgctccctttcttctgtttaggtcgtcccttaggtcgcagggtgttcccaacctttcgaacacaaaagaactggctgccttagcgattggttcgcttggttggcaggtggaatggctccattgttttgagtggatccatcgagcatgactcctcctgatgaattctcggacaaggtctgtctgcctacctcttggcccacgagtggaactcgtgactggggattggacggctggccgttgtttgtctgggaggcattcaccgtggggtcgtcctcggcttcagcaaggggaatgacgctcggcgcctgctggcctatagttcgataggctctttgtatcagcacagtagcttgccgactacgatctttgatttctgcatgatgagcccttaatgcttccatctctttatctctccactc

SEQ ID NO: 276303 - DNA, 869 bp, Cannabis indica
tttttttaagagttcatacaaattttacgcctttctttcatgcaacaaattataataattatgtaaacataaaatatcacaaattctaatgtttaaaatagtccaacattaattcaataacaatacataatagtccaacacatcacgatacaaataaactaaaataacatttttaacctcggtagttgcaagtgcttctgttgtgccccttggcaccgcacttgctacaatttcgtgatttgataatcctttcaccgttacaagcagttcggttgttcttaattcttccaaccttttgcttcttgggtcgccctactggttgcttctcaacaggcactccaactgtcatgttcttgatgtcatcaggcaattcccaatcatcctcgtcaccaactggcataattgttccttcatatgtcctcctccaatattcagtcgtgtaatatggcgagcatagtgtgtacgcgctaatacttcgctcctgagatgcagcacatgcatgaggacaaggaaacttcatgcactggaacaagccgcaagtgcaagtatgttcctgcaagtccactacgccaccggtcataactgttcctccagggtgaacctgcaacgtgtaaggcccgcatgagtcaacgttcaaataccgacctttttcaaaatgcaatgtcaagtcctcctccatttctggtgctaggggtttcgtccacttgtcagctttttcttttcgtgaagcaaaccacttctggactttggacctcaggaatgctacagcagcagtgatcgggaagcctcttgcatccttagttgtgttgttgaagctctcagcccagttgctcgtcattacattgtaacgtacccctggaaagtacgac

SEQ ID NO: 276304 - DNA, 583 bp, Cannabis indica
aaataccctaaagaacaaatccaaagcactaaaacagcccagaacacacagatactaaaaatgccatgtgagctccaagctttgagtttcaaactcaaacttggctaaagctcacctacaagcatcaaaccttgattaaaattacatattcatgcataacaaagctgcagaaaacaatctctaactcatgcaacaactacagccaccaatttcgaaaatttctctttgaaacttaagcttttgaatagaaaatccataactttaaacaacaccactaatcatgcactaccagcagctcaattcaactcaaataatcatgctttaaacttcagaaacaacatcaaaaacacagcagcaatatcaactcaactaagcatgcaaaacatcatctttttcatcaaaaattcaagaaaacttaaaataaagctagaggaacataccaacaacaagagatcacaaattcttgctaaaagagcttgaaatccaagaagaattccccccaaacccagctgctcaaaaccgaaagagagagaaggaaagagagaaagagaggttttgtttttcttttaaattttctaacttt

SEQ ID NO: 276305 - DNA, 615 bp, Cannabis indica
tctttacaactatcccccccttaaaaggatttcgtcctcgaaatctaacctgaacaactctggatattgagctttcatgtctgattctaactcccaggtggcttcctccaccttgctatttctccagagtactttgaccaaagctatggtcttattccgaagaactttatcctttctgtcaaggatctgaactggttgttcctcataggacatatctggttgcagctcaagattctcataactaagtacatgagctgggtctgaaacgtattttctcaacatcgagacatgaaatacgttgtgaactgctgaaagagctggaggcaaagctaaacgatatgccacttgtccaaccttctcgagaatctcaaaaggtccggtaaacctagggcataacttgcctcttttcccgaaacgcttgattcctttcataggagacacccgtaggaacacatgatcccctacttgaaattctacatctctacgtttcggatctgcataactcttctgcctgctttgagaagcaaacattctggctttaatattttcaattgcttcattggtccgttgcactgaatccggacctaggtttttcctctcccctgactcatccca

SEQ ID NO: 276306 - DNA, 495 bp, Cannabis indica
tctgttaaacataacaaatttaacaaatttaatttttcaaacccaaaataattaatatcaactgaaatcactttaccacattgtaaccaaaattcgatgtaccttgtcgctgttgggacccccattgtctttcacaaatttgtaagcggacttacattgtttactaccccaaaaatcaacggggagcactgttcggtcgacatatccaaagttccactccacgtgagtcaagtacaccaactgtcacaaacaaacaatgtattggtaatacattcgactaataaatgacaatattatattataaactgaataaacacatttacataattgaaagataacaaaatcaatgtacctggaggaataaggtgcagccagatacattcttcgtcgccttatttcggaatctgaaaattgagttcatcagatacctgaaccccgcagtcgcccagttcttgtggcgaatgtccctggtaaccctaagggagtgcaagtacc

SEQ ID NO: 276307 - DNA, 515 bp, Cannabis indica
atctattatttcatccttcttaataagtaggtttcataaactatactgtcccagtctagtataacgtctactattcaagtcctatatgttgggcttccattcatagctaggtgcagagacagcttcttcaaccatcatagataggtgaaaatatatgcgtcggtacttagttggctattggtacatttcattatgtgcttcaagttccactactagtgttggtgatctattgtgctgagcctgtggaaactcttcaacaaatcgtcttagtcatgctcacattccttccaatgcctctattagatcgttagccttaactactattgggttctctggaacatcaaccatttgtgggtcagcggaacacatatccttagcccccacctctactggttgttcctttcacatagattctaactgatcttctagttgcatgtgtgagctcttacaagaaaggttgatttaaaagaaacaaaagagttcaattatagggagaaaagattccatgaacatat

SEQ ID NO: 276308 - DNA, 735 bp, Cannabis indica
aatcttcaagtatctggatggttcgttcagattgcccatctgtttgaggatgaaaggctgtgctgaatttcaaattagttcccatagccttttgcaaactcacccaaaactttgaggtaaatttaggatccctatctgaaacgattgacttcggtactccatgaagacggacaatttctttcacatacaaatcagcatactgatccactgaataggttaccttaacaggtaagaaatgtgctgactttgtaaaacgatccaccacaacccaaactgagtcgtacattcctgtggttctaggcaagccaaccacaaagtccattgcaatgtcttcccacttccattctggaagtgttaatggctgaagtaaccccgccggtcgttgatgctcagctttgatttgctgacaggttaagcatttagtgacatagtccactacatccctcttcatcccataccaccagaaatagggcttcaaatcttgatacattttggtggttcctggatgtaatgagtaaggggtagtatgagcttcttctaaaatttcctttttaagctcactgaaatcagggacacacacccgtgctttaaacaacagcatcccattgtcagaaatggagaagtccttagctttgcctgctaagacatcttctcgaattttaaccaattcagaatcttctaactgggccattctgattctttccaacaaatctgactgaagtgtcagattaaata

SEQ ID NO: 276309 - DNA, 171 bp, Cannabis indica
tgaagaagagcaaggggtttttcctgaggaaattgaagaaggtgaagtagagcaagaggttgctcttgtgcgcaagcgtaaaggcaagatggtagctgaggagtcttctaaacgcccgcggagggtggacactccgtccccgagtcatgacttcgggatcccccccgaggc

SEQ ID NO: 276310 - DNA, 705 bp, Cannabis indica
tggaactgaaagccctgattcgggcgtgcaatcctgatttcattttcatatccgaattaaaagtagatgccaattctctggtacgttctcttaaaagattacacttttatcataatattgttgttcctgctgtggggagtgcgggggggcttatcttggcctggaaagaaggttttagttttgagaatatttacatttctaagaatcagattacggggatagtgtattctgaccctgatcataacccctggttgttatcttgtgtctatgggcctccttattttcatgagaaaagaaattctggttgaacttgatggattatggtaagaggtttggtgggccgtggttgattctgggtgatgttaactttattttgaggggctctgagcgggtgggatctaaaggaaaggatcagttcctcccctttatttctgacctgattaattgccatgctctgtttgatttgcctatgaaaggggataacctgacttgggataaccatagagacggggagtaccacatcaaatcggccctggatagggctctggtcaatgaagggtggttaagcttattccctaaggctgtggttcagtcgcttcactcttgtaactctgatcaccgacctatttgtgtgagtacggcaaatcttgatcctagatccaagaggcagtttcgctttgaggcttggtggccagggatcctcgt

SEQ ID NO: 276311 - DNA, 772 bp, Cannabis indica
agatctatttattgtgagagaaatttacctttgattattgtcaaattaatccttgagtttgtagcctctcgtctaaaataatttcttttgtgaagaagaagaaaattgaagagctcttttgaagagaagaagagctttaatcctttttctttttccttaaaaaataaaataataataatggcatttaatattccctttaagaaaataaataaataaataaataaatatcacatacggttgccagtttcttctatttttactcttactacacagtacataattcctcactcttagattccaaacatttaatttgttttatcatccaatgatcacaatatgttgaggtgttgaaaattagtatattgataattgctgcaagaagctacattatcagagaattaaaattagtatattgattaggaatgtcaatggggcagatccagattatgtacggatctgccccgccccgctccgctggatcagatactcggatcggatctgatccgacccgtcttatacggatcggatctgatccgaccctatttttttttttttttaaaaaaaaattattttatatctaaatttataatttttttcccaaaatttatttgtttaagaactaataatacatcatttttttcttatatatttttattttattaaaatataatttactattgaaaaatttaaaaaattaacctaaatttaagtaaattacctactaatataatcatcaatataatgtagtatgatgattacatgaaataaatct

SEQ ID NO: 276312 - DNA, 648 bp, Cannabis indica
tctccacatttgcgggacatcaactaagactaattagcatgtagagttatgcgtggtagcacttatgttgaatattatatttgggattcattagaaaccgggattacagttattaccctaagtgagcggttttgtggtctaggattattaccctagtaattgttaaggtttaaatgctatgccatgctatttatattgaaattaagaattatgcgtttaaggcataatttagttagactcggtaattagaactgagatgaaccattctaaggacttattgtaattaaacgtgttagcgtaacacgtaagtctatgccacatagacatatataggcgtgtgagtgtaacacgcaggtctatgctaaatagacaattagtgcaatggcatgattataatgtatgtgaaatataaaattgtgattaatgatatttatactgtcttgctggacttggctcacggattctctactttgcaggaaagggtaaatatgttactgatcagccatgagcgcgagggcttggcaatgcttgtacatgttcgaaccacactagaccaagcgagttggggtctacctgtgatgtattttgtaatcctgattttgtcgcttaggtcgacacgtaaaagagacttgtaatattttgtaaaaa

SEQ ID NO: 276313 - DNA, 508 bp, Cannabis indica
gttctagttccatttgcaattcttagttcgcgtttgggtttgagttcggatcggagtttgagtcctggtctgagttttggttcgggtctggatttcagtctaggtccagatcaggctccgggtgtgggttcgcgtccagggtcttggtctaggtcgggtccgagtcccaagttccaatccagatctaagtctggattcagttctgggtctaagtctttggttctgatcctggtctgggttcgagtttgcgtccgggtccgggtctagctctgggtctgattcaaggtgtgggtttgaattcgggtccaagtttgtgtccgggtttgtgtccaggtctggaccccgatctaggtcaaggttcgggtccaggtccaacttggtgtcccgagtgcgggtccaagtttgggtctaggccaagatctcgatcctgatccaagtccaacatttcgatcccagtctaggtcttggtacgagtccaggttcttatccggatccctatctaggtcca

SEQ ID NO: 276314 - DNA, 652 bp, Cannabis indica
ttgggctagtacgaaatcactttccaaccccaaacagcaatcaaaggccaagccttagcagactttgtggtagaatggacaggaaaaaagaaagcataccagaaagcaacctcgagccggtaaaaacacctaagccaagtcacaatgaggacaaactgacctggaaactacatgtagatgggtcggctacagatcaactatctggtggaggaattgcccttttaacgctttgggggcaacacctacacgctgcagtcaagttcggattcaaagcatctaacaatgaagccgagtacgaagctctaatcgctaggctaagactagcccaggagatgaaggccgaacacatcaaaatctgcagtgattcacagttggtggtaaatcatgtattcggagaatacgaggctccaggagaaaagatgatagcatatctgagcaaaatacatgatctgctcacacaattcaaaagctacggtctcagacaaattctaagagaagaaaatacaactgcagatgcgttagctcgattggcaagcagcaatgtaagtgacaattcaaacttggttcctatccagttcctcgaagagcctagcatcactggcatggaagaaatcgaaatgattgatacatccccaaactggatgacaccaat

SEQ ID NO: 276315 - DNA, 654 bp, Cannabis indica
gttgtcaatcattttttttttttttttattctctcaattttcacacttttttccacacacatacaacaaacttcccatccaaattcccccaaactaaagatctacttatggtataattaggattaaatctttggatattcatgggtttatcttttcaggctcaatatgtgtagaaacaaagaataagttaaggctcaaaagggtaactaggataaaattacagggatgacttgaaaggtacaatcgatccaaaaaaaatgcctaaatcactttcctagtcatgcataatttattatttcgcctcaaatagcaagcaagcaagttctagaattttccaaacaacttttcacatatcaaattagcatacataaaccaattcaattactagaaaattacctaatatgattctatgttcttttaagtataaaattaaaattagtcaagaatgtaatatcaccaagcacacggattttcgaaaaaaataaataaacttttcaaatcatgctgcctacctactttcaaattgactcacattaagcaaattgactcacaacaataaaaaactaaaaattaaaaattaaaagacataaaacttaaaaactcaaaataaaattaagtcactcctcccccaaactaaagtgacacattgtcccc

SEQ ID NO: 276316 - DNA, 611 bp, Cannabis indica
tttatttacgtgacaaagtctagcatgccaagtattaaaagaacacaacatataagcagaagcattaactttattgacttgaacattcaatttaaacattccctcagttgcataccccttccctacaaatatcccattcttagttaaagtaaacaaatcagctcctatagtctgagtgaaccccgccttgttgagaaggtagcccgagaccaaattcttcctcatctctggagtgtgcatcacatcttttagaatcacagttcttccagaggtgaagttcaattccacatttccagtaccagcaactatagtggtgtgggagtcacccaacaacactttctgatcctcagtagcagcaacatatgttttaaacatatttctatcatagcagacatggcgagaagcgccagtatctacccaccacccttcagatccaccaataaggttgatctctgaaatcatagctgtaaaaggcagctcttctgtcaggttagcctgcggagcagaactaggcatgttcttacactttcgtgccatatgacctggcttgttacagttgtaacacatgaacaaaccagagtcatttctattagggggtacttgctgcctgt

SEQ ID NO: 276317 - DNA, 509 bp, Cannabis indica
tagaagcaagaaagttgcgacaacgagctgcccgatatgtcatgtacgataaaaggttgtatcgcagaagttttagtcaaccgctactcaaatgcattgacggcgaagagtgcgactacatactacgtgaggtacatgggggaatttgcgggaatcataccgggggtaactcccttgcgactacatactacgtgaggtacatgggggaatttgcgggaatcataccgggggtaactcccttgcattaaaaatcatgcgacaagggtattactggccgaccttgcgataggatgctttctctttcgcgaagaaatgcgacaagtgtcagcgaatagccacatatacccaccaacctctgagtaacttacattctatcacaagtccatggcctttcgcagtatggggaatcgacttaataggcgagctacccaaaggaaaaggcggagtcaagtatgcagtagtcgcggtagactattttacaaaatgggccgaagccaaagcactagcaa

SEQ ID NO: 276318 - DNA, 545 bp, Cannabis indica
attcttcttttcaataataccatattttccaattcaatccaataaattccaaaactatttatttaataattataattaattactaaataaaattgccatttatgtaatttattaattagaccatacaaagtctcctaagtaacaaattgactccaaaacctcatttcttcacaattaagcccttgcttagtgaaaattcttaactaagatataatataattttagaactataattgattagttaaatcaattaactgagtctaaaagtagtattatctaaactagtgaggggaccatgggcctatataaccaagctttcaataagtagatctagaataagtaaattctcaacttgttaattccgtcttgctccactatagattttgaattaaatacactcttagttatatagaacgctctatatgtaccacgatatagataggttatgattatcctttgttacaatcctaatagtcaaggatcctcttgttgggttttatgccctaaataaaactctatttcaatgtaatccattttattcaaca

SEQ ID NO: 276319 - DNA, 528 bp, Cannabis indica
gcgaacatacgcctctgttcgtcaaacgcgaggtttactgcggcacgtaattcctcctgatcgtgatgcagggtattgttgtgaccctgcatgactccgagcgcagcgcagaggttttgcaattcggttgcatctccgatggtcgtctgggcgttgatgcctggtggaacagtcatgttatgaacgtcctggctgtgtacagaaccgttgtttccggtctcttgcacaccacgcgcagtttcagtaacaagagttgtcccaccattcaccacgcttcccgtctgtccaggattgacagcaggtggaaccctcgaactccctgggtcctgcaacgtcggatccagcgtctatgaagttggctgggtcggacaagcctctacgagtttgcaccatcgtgtcgagtattgaaaaagagcaattgtgattctgctctcaataaaagcaccaaaatgtgacttcgcttttagccaacgacatgagtcttttgataagcgataaatgatatgtcgtaataagaattcgtagtaa

SEQ ID NO: 276320 - DNA, 627 bp, Cannabis indica
aaggccgcacaatttaccctctcagttcccgtcacccccatattatcgaggatacgggtcacagtgctcatccactggtcagccttaataatatcaatacctcccaggaaagtcggaggttgcagcttcacaaactgctcaaatacagaatccttatgcggcattacaaacccctggttacccatcactagcacaagtgctggtggtaacacttgatcaacaggggcagccggtgccggttgccttaaacgacgcaacttttcttcttcttgacgaagtatgatacctcgcattccttaaaacatctgctgccagtcagcaggaggattagtattgccaaaccccgcattatccctctggattctgcggaggtggaagcggtgccggtggattggtttggtctacaccatgctctacaagctcgccctatggtctggatgattaaagagggtccattctacaaataacccaataatcaacaaccccagcgagtcaggcaccaatcccactcttacgcacttattgccttaaactctaactcatccatttacctcacacatattcacataaacaaataacatttatagcatgtcatcacataacacatacatactctagatgcttgca

SEQ ID NO: 276321 - DNA, 528 bp, Cannabis indica
gctactgttatgaaattttcacagtaaaaatggagtggtttggtacacgttgaaaagaattaattaaaagactgaaaaaattggtaactagtaattagttattattttcagcatattaatctgtgtgtttttgaacatttaggatgtttctctcagctcaaaaacctccaagttaccatgtcaaaatctatgaatgctccattcatgatttgtaacaaccaataattttatggtgaccattcatgctcaaataatataaatagtgactctttgttcacttatagttgaaactactagttttgtggtagaattttatgaggatatgcttatccttaaaaaatagactaaacatatgaggcataaagaactcattgtgagaaatgaaatgacttttaagagtagttttagactttatttaagcctattgtgttcttttttacttctcttattttctgatcttacattattttagagttttaatgttttttttttttttttgtaatgcaatcttaatgtaatacttttatt

SEQ ID NO: 276322 - DNA, 514 bp, Cannabis indica
aatggttagaattggaaaaaggagtttttgagaaaataaggaatatgtcaaaagtggaaaaattctctagtgaggcccattactatggccggccacttggatgagaatttacacttaatatttctattattttaatgcctaataaatcctaacctaaacctaggtggttacctataaatagatagtgatggctaacactaaagattgatgaaaaattcgcattcagtcaaattatcccgagccttctattatattgaattcgaaccagcccctctcttttcttcttcataatttcataccttgagtgataggtgagtgcccacacacatcaagtggtatctcaatcatagtgtgtaaggctgtgaagaatccagaatcaagagaaggacattcaagctcagatcttggttatactctgctacagaaaggatacaagggttagagatctgagcggaagagtcatttaattccgctgcacccaatctaaggttttcttaaaatttatatgtgttta

SEQ ID NO: 276323 - DNA, 786 bp, Cannabis indica
ttgtttagttttttgttttgtcctgatttattttgtttcaattgatacaggaatgggattatatttatgaccagaagaatctcttcattgcgaaagccttttcgactgctactttccaggtgatagagaacattaagtcttgtctttcagatgtacagcttgaaatgttttccaaaacctgttttggacatttccttaaccttcctgattttaaagttcaaccccaagtgtttcatgggttgttgctccgggaggttcagcaacctaatgatgctgagttgtgggtaatgatacgcggtgttaggcttaggtttagcattgaggagtttgctttgattactgggttagactgtgaaggtgactgtagtgttttagattttaagcaagacgttaatagtctttgtgaaaaatattggccaacttcgtcctctatcactaaggaatctgttagggaatgttttaccaccaagaggtggggtgattctgatgaggatgctgtgaagttggcagttttgtattttgtggagtggttcttgcttagtggcactaagcataaaaatgtacccaagtctattttagatgttgtagatagtgggaggtacaatgaatttgcttggggccggagttcttttgaattgactatttcctcattgaagggtaagcttgatagttgggttgagggtgttaggaaggcaaggagttcgggaaagaggccgagtgttttttacactttgattggttgtcctcatgttcttcaaatttggttctacgagtgttgtaagtaca

SEQ ID NO: 276324 - DNA, 561 bp, Cannabis indica
ggagtgccaaagtaaacaaggaataaaaatagatataagttcaatcaaaaaacaaaggagaaataacttagtctcggtagagtttaatccaagaagacaattgcttggacatctcatgttggacttcttccattactccaaggcgagtatgcacattctgaagttcagacttgacttccaggagttctgctgcagcagaacctgaacttgcagtagcagcaccagccttgggtcgtttttggaacacagcatcgaagtattcagggggctggaatgtaggtccactgatgggaggctcaagtgtttcatgtgattgggccacattcttctgagaagataaaaccttataaattagattgggaaacacaagtttaaaggttggcttattacctcttcggaaggagacaatttggttcagaatgtgtgaggccaaatcaatggaagttccagaagtgatgcggtataagaggaaagccacatcttgagataccacggtcttgtttgaatttggaacccaatttcttaaggaaaaccgcataagagaagcatgagcaaaagtga

SEQ ID NO: 276325 - DNA, 685 bp, Cannabis indica
ccccttggggcccaaacccaaatgccaaagttgcactctttatacccttgtcaatgagggttcatatcccatgtgggactctttccaactcacacacactaagacacttatatattttgttaaaatattcacaatatttccaacaatcccccacttgaatttttaaaaaatatttccatctactagtatcattcaacaataagattgagcataaacaaaggtatctttcgatttgaacctctgcgtagtgaatacgatttagattttactagagtgacccgtagtcttgaactctatctctaacattgtaccacgcaacaaccttttcaagggtgtaatcaaaagcccgtgcgttaatggccatgcacgtctatcccagtatagtgaacgctctagaaattttgcccaaaatttcataggaagcggccccactcccacattcacataggtgagtctatcaagagtactcccgtagctcggtactccactccacttggagtatagatctcattaagagtttctattaactcaaccttaaatcgcttcaggaattcatgcttctcttttcgtataattatagcatgatctcacttttatcacttcataacttgttattacccattgaacctatttcttgggatctccagtctataggtcgggttgccattatgagtgattcatcaat

SEQ ID NO: 276326 - DNA, 505 bp, Cannabis indica
ctccggccaccgcccgacctcacgcgccggactactccgacctcctagtgccggcgacctcacaccccaagcggcgccgctcctctcgccgccgttagcttaggatcgcaagtcaaagtttggggtttcaaactttgaacgggttttccggtcacctccggcgtccgtttgacgagaggttttcaccactacactcagctcgtcgaggagaacaacctacactaaaccatttttcccggttcgcaactttttccggtgacatttttgtagctccgcccctttccggcgactttccggtgacctcgtgtaccgttttgacaaacggttggcatgagtgtgatctactcgtcgaggtggtcgttttgatatatactactcctattttcggtgacatttccggtacaccaatttttaccgccaccgattgttaatgtgcaccgcttaggtgaggcttcggaactccaaattttaaatatagtcatattatatgtcgttggactcggtt

SEQ ID NO: 276327 - DNA, 568 bp, Cannabis indica
tggctctatgttcatgtccttgtaatggtcttgttcttgggtcctgatctgcttctagtttcgattccagttttaagtcaaggggtacgggttttggtcgagtttggatctgagtctgggttcgggtcgtgatttgggtatgaggcaaggtttaggttaaggtttcggtctcaggtagggttcgaggctgggtctgggcctaggtcacggtcccgttcaaagatcttggtccctttctaattcatgtttcaatttttgttcctgagtgtgtgtcagggtcttcctatgtgtccaggtcttagtttgagtttgagtttgggttcgagttctggtctatatccttgatccagacactgagtactggtcgggtccaagcatcgagtaccggatcccaggttccgaggtgggtcctatgtccaggtttgggtctggggtcgagtccttgatcccgatccaagttttgagaccaatttctggtcctagttcgggggcccgattcccaggtctgggtcaaccatctatgttcaggtcctaggtttcggtctgaatccaagttcgtgttcaggtt

SEQ ID NO: 276328 - DNA, 614 bp, Cannabis indica
ctgttcagggaaaccagggatggctgtgggtacatgggtgctttacctttggaagtggtgggaagggtggtggtagtcatgatagggtgagttgggagagagcagtggagggtggggtggacggtttgaggctgactggaataggtaatgttggaagtaggagcagtggtgtgttggataaaattaggggatggagaggaggcaacagtaacagggagggtggtaggcgtggtagtcgcaaggaatcgatttgtttggtcttggaggctatggtgatcaaggttggtaagggatggttgttcctcaaagggaatggagttggacagttcaaatatactcttcttataaatagatttggcaggggcccgtggggcatccttgtagcttaaactggggggaaaaggatggtggtcacagtgatggagaaacttatcacacttgttgaaagtgtggtcaagtttaccacaatgatagcagtagttttgaataccctcataaaggaatttgagccacttagtgagggagagtttcctaaaacggacgttcattccacggtggaggggctttgtagtgtccagaagaacacgaatgtaacaccctaactatcttaggcg

SEQ ID NO: 276329 - DNA, 526 bp, Cannabis indica
gcttagttgttttatttatgttcttcaagttgttcgtggatgctaacctatggttctagcgaatattaacatattgaaaacatgctagttaaattgagtgtgagcgttaatcatagatatggaatctatagcttctataagtatttaaaagtgaaatgatgatttcctttgatcttggcttgatagagataaatgattgaaatctcatttcagtgattatattagtttactgaaatatcatttataggtagctaagtgttttacatggtaaatttatccctatttagtggagatcatctataaaggatctttgactattaggattgtaacaacagataatcataacgtatctatatcgtgttacatatagaacgttttatataattgagagtgtattcaattctaaatctatagtggcacaaggcagaattaataagttagggaattcacttggtaaattctagatctacttattggaagcttagttatataggctcatggtcccctcactagttgagataatact

SEQ ID NO: 276330 - DNA, 614 bp, Cannabis indica
tggatgtgcacgccgtcttcttttctgatcagtacggcactcacggcatgctccgttactgctaggtatattgccagttcctcaccgtcaagaggtttagaaaggatgggaggttttgcgagctgtgcttttagaccttgaaaagctctttcacattcttccgtccattcgaaatttttgtttcctcgcaagatgttgaagaatggaacacatttatccgatgattttgacacgaatgtgctaagtgcggcgattagaccagttaggctttgcacctctttggtttttgttggcgagttcatatccaggagggcttggattttttcaggattggcttcaaatcctcgagcattgacgatgaagcctagaaaatttcctgagctgaatccaaaggagcattttaagggatttagtttcatgttgtatttccagaggactttgaaacattcatcaaggttgtctatgtgcccccagcctttttggatttgacgagcatatcatccacgtacacttccatatttctgtcgatctggtctttaaacatcttgttgaccaatctttggtatgtagctccgacgtttttaagcaaaacggcatgactttgtagcagtaga

SEQ ID NO: 276331 - DNA, 541 bp, Cannabis indica
tcctttatgttgatgacattttgatcattggtaacaatgtcaagaaaatgattgacatcaaggaatggcttgacactcaattcgaaatgaaagattcagatcatcagaaaccagaagaacagatcccttgctctctctcaaacaacttacatggataaggtgttagagagattctcaatgacaaatactaaaggggcacatatgccttctagatttggtatccgtctatctaaggaacagtctcctactgatccctaagagatagaggacatgggaagggttccccatgcttcaatagttgggagtctaatgtatgcaatgttatgcactagacctgacatttgctatgtagtaggaattgtgagcaggtatcagacaaatccaggagaggaacattggactacagttaagcatatttagaagtacttgaaaagtacaaggcattgtgtattagtctccaagggtggtgctttaaatcccgaaggctataccgactcagattttcaagcttgtacatctgggatggtgtttactcttgggg

SEQ ID NO: 276332 - DNA, 468 bp, Cannabis indica
aaataaaatttgttaaaactgcaaaatcaagtggggcccattctattcaccttggccggccacttattgtggaatttcaaattgatattttcattattttaatgccaaataattcctaatctaaacctagtagttgcctataaatagaaagtgatggctcagtcaaataataactttaaaaaaccttttctgtcagaaatttctctcttcagaaaaaccgagccttcccttttctataccttggccgaacccctctcttctcttttcttcttctatattttgaacctagtgaaagagtgagtgcccacacacagcaagtagtaactcaataatagattggaagactgtgaaggatcaaactcaaagagaaggacattcgggctcagctcttgataatactctgcgacagaaaggatgcaagggttagagatcttagtggaatgagacattaattccgctgcatcaatg

SEQ ID NO: 276333 - DNA, 720 bp, Cannabis indica
tccactcgtggcccaagaggtaggcggacagaccttgtccgggaattcatcaggaggagtcatgctcgatggatccactcagaacaatggagccattccacctgccaaccaagcgaaccaatcgctaaggcagccagggtcttctgtgttcgaaaggttgggaacaccccgcgacctaagggacgacctaaacagaagaaggggagcagacgagcagaatactacgacgaatgtgcagtccggagcccatactcaaatccccgctcagaaagacgctgacgtagcccaacccgaccagaatgccaacgaagtcagcccagccgtgcaggcccagcttgacgaactgaagaatatgtttcatggcatggccgggcagcgtaacaatgatcttgagttggaccgcgcacgcggaactcctttctcgccagaaatcaacctcctgccactacctcacaagttcaagatgccaacgtggaagatgtacactaggagagaagatcctctctctcatctcaagtatttcgagatgcagatggatttacaaggagtgcgaggagacgtatgttgcagaatcttccccacaactctatcagaggccgcacagcaatggtatttcaagttggctccaggaaagtttagtcatggaaaactttctcttcggaattccatgcacaattctcttcctcacgccaactcccattgcatctgggagatttggtc

SEQ ID NO: 276334 - DNA, 830 bp, Cannabis indica
tcgaatggtcggacgagtgcgaggaggcattcaaaaagttgaaagaacacatggccaagcctcctatcctgtcaaaacctgttctcggagaggacctatttctatacttggctgtctccgagcacgcggtcagcgctgccctagtccgggaagaagagaaaactcaacatcccgtgtactatgttagcaagcgcatgataggagcagaaacgaggtaccccatcatcgaaaagttggtcttttgcctcctaatggcctcgagaaaattgaggccatacttccaagcacatccgatcaaggtgctaaccaaccacccgctccggcaagtcctccaaaaacctgaagcatccggaaggctcctcaagtgggcaatggagttaagtcaattcgacttgcactacattccccgaatctccataaaaggccaagccttggcagacttcattaccgaatgcaacgaagccgaggcaaccgcaaatatgccagtaccatcggtccccacatggagagtgtttgtggacggagcctccaatgaaaatgggtccggagcaggagtggcaatgatatccccgaccggactacgactccaggcggccctacggttcgacttcccagcttcgaacaatgaggccgaatatgaagccctaatagcagggctgaaattagcaaaagtcgtaggagccaaaagagtggaagtctacagtgattcccagctggtcgtaaatcagatatcgggagagtaccaaacacggggcgagcgaatggccgcgtatgtaacaatagtccgggagctgctccacgagttcacggactacaaaatagaaagaatc

SEQ ID NO: 276335 - DNA, 535 bp, Cannabis indica
tacataattcagaccccaaatcatcccagaaatgcttgaaaaaaccagcactaaacccatctgcaccaggagcttttgtgtcaggtatgctgaaaaaggcatgcttaatttctttattagtgaagggttgaataaggtcaatctgctgcttaagatctagccggggcccctgatcaatgcaagctaagttcagcttagaatcggctaagcttctactccccatgtagcttcgaaaatgagaaacaaaatgatcaaccactttgggaaagtagtcaataataacaccctgctcagtagtataagaaaggattctattctccattttcctttttttcaaacaagcatgaaagaaggaagtattctcatcacctttatggagccaagaaatcttactcctttgccgcaaaaaactgtggtacatcttctcttggttcaaaaacataactgttgcttgcttttctttttcaagaaaggttgggtccttcgggtgggcctgagcaagaagcttggcctcaagaaattcatctttagctgc

SEQ ID NO: 276336 - DNA, 535 bp, Cannabis indica
agatcaatcttagaaaacacctttttcccttgaagctggtcaaacaagtcgtcaatcctcggtagtgggtaccgattctttatagtcaccttgttcaattctcggtaatctatgcacattctcatagtaccgtctttctttttaacaaatagaactggtgcgccccacggagagtagctaggtctgataaaccctaacttaagcaattcttccaactgtattttgagttctttcaattcagatggtgccattctatatggtgcgcgggaaactggtgctgttccgggcactaattctatcacaaattcgatttctctgtgtggtggtaacccgggtaactcctctggaaatacatcaagaaactcagcaactacccgtgtttcctccggctttctttcaattttcttggtgtcatcaaccacattaactagataccctaagcacccacgctgcaatagttgcccagccttcattgccgaaataataggagtgcggggtttctttcctacccccctgaactcgaaagtctctccat

SEQ ID NO: 276337 - DNA, 692 bp, Cannabis indica
aggttagctagctttcctgttactaactctatcccagatctctcgatttcctgttgcaacggcacttttaatgcccttaacattgataagcttgcatagttgcgtctgctaagtgcatccgccactacattagcctttccaggatggtatagtatctcacaatcgtaatcttttaccagttccaaccaccgcctctgtctcatgttgagctctttctgcgtaaagaagtattttaggcttttgtgatctgtgtatatttcacacttctctccatagaggtagtgcctccagattttcaatgcaaagaccactgctgccaactctaagtcatgagttgggtaccttgtctcatactcctttagctgcctagaggcataggctaccaccttctcattctgcatcaacacacagccgagcccttgctttgatgcgtcgcaatatactacaaatttgtctttgttagttggaacacacaggacgggtgctgttatgagtttatctttcaatgtctgaaagctttcctcacatttatctgtccatgcaaatttttgttgctttcgagtcaaattcgtcaacggtgtggctatttttgagaacccctcaacgaatctcctataatatccagctagtccgaggaaactccgaacctcacttgcggtttttggttttggccagctcttcactgcttcaat

SEQ ID NO: 276338 - DNA, 125 bp, Cannabis indica
atctatagaggtttctttgactattaggattgtaacaatggataatcataatgtatttataattgtgaagaaaagaggttttcgggacaattcgttaattaagagactttgtatggtctaattaa

SEQ ID NO: 276339 - DNA, 578 bp, Cannabis indica
aagaaaactatgtttctctttctcccccactctctctccatctagttctcttccacgcgcggtgctgaagctccattcagatcgtctgtttttggccaacatcaacccaaagaaccttgcaatgagactccctacccctcaaagaaaaaaaaaagaaaaagaaaaataataaaattatttttttaaaaaaaaaaaaattaagtttttaagtatagaaaatcaaatttcccttttaaggcacaggtgagatgtcagccaaagggactccgatgctgaagtcagtacgattttaataaaaaataacaataacaaaaaataaataaaatgtaaatggtagtcagacagatgagtggacaagcagatagacggaccaaaggaacaactatggtggtgaggcttaagagaaaagtttagaaatgacgattgtctgcttgagcgagtagtgtgagtgtcaaatcttcgatgccctgcatctactgtatggtttcttttatcgtgttccctcagtactgttgctctccatccacgtcacccattggactcgttcaagttggtcgcttctctcattttatgggagt

SEQ ID NO: 276340 - DNA, 962 bp, Cannabis indica
gccatgcatgagtactctcgggggcatgctgacgtggaggctttgaggacggttttgcgagttgaaatgcaaaatacccttaacgatccgaactaccagaatccgtgggatctaaacttggaccccctgtcggattggttcggcgtttcctcgggcccaccttagctccctttgccgcagagatgactggcgagtttgcgtctcagcttacccggtgcgcacccaagcggtgcgctgcttgtgcatccttgaactccatcttccaagtccatgatctcagccactccctcaccgtggtaagtatttcgtagtttactttttccctcatcattttctcttaaggacttttactcatacttgtatccttttccagcttgctgctgaggctgtccgcctttccaagaacttaattaatcatggcttcatcctatccgactttgggggcatggacgaagttatgaagatccttcaggacttgactgctgaaaggcggctttaacaggaggatgccgagcgccgggaggcccttgccaaggccagtgaggaagaggccaggcggagggaggcacaggcggaggcgatgatctaggaggaggccctttggagggataggctggaggccaggcaccaggaggagttgagggcggagggcgaggctgctaccaaggccaagcgtgagcttcgggaggctagggaagccttggatgaaatggctgccaaggtgaagtccttagaggaagttcactaggcagacttggagtctagggccaacctggctgtggagctgaaggagctcaaagacttcaaagaccaagccttgaagaaggcaaagaaagatgagctcctttctcccgtctcctgcagcgtgtgcgtcaagcgtttcagggatggcatctacatggcctggtctacaaatgaccagaatatcaagcttaacttctaccccaaacccgcggagatga

SEQ ID NO: 276341 - DNA, 558 bp, Cannabis indica
ataactcatatggagacatgtcatttttcttcataggtattctattaagaatatgacatgcggttaaaagtgcctccccccataagttgttgttcaacttagagtacactatcatagaattgaccatttcaagaaatgttctattcttcctttcggctacaccattttgttgtggtgtatgtggtgccgaactctcatgaattataccattttcctcacaaaaatgagtaaattcattagagaagtattcacctcctctatcacttctcaacacttttattttcatgttaagttgattttcaacctccgctttgaaaatcttaaaagcaccaaaggcctcatccttttgctttaacaaatatacataagtatatctactataatcatcaataaaagtaataaaataccttttaccacctctagttagaataccatttaattcacataaatcactatgaattaaatctaacaattttgaatttctcacaacatttggaaaaggttttttaatcatctttgcttttacacaagtttcacatttaccataattccttatat

SEQ ID NO: 276342 - DNA, 532 bp, Cannabis indica
gaggcataagcgataacccgatcggcttgcatcaacacacaccccagaccctgtctggatgcatcacaataaactacaaattttcattctctgaaggcaaagctagcacacctctgtttcagctcctgaaagttagcttcgcatttatctaaccacacaaaccgctgattcttcttcgtaagtttggttaagggtgttgagatcttagaaaacccttccttgaaccgacgataataatcgactaaacccaagaggcttctaatttctgtcaatgtcttcggtcttggccaatccttgacggattctattttcttgggatccaccttgatcccatctttgctaacaatatgccctaacaaagacacctgagatagccaaaattcacatttcttgaatttggcataaagcttgtgttcccgaagccgttgcagaaccatctgaaaatgtaactcgtgctcctcttctgattgagagtacacaaggatatcgtcgataaacacgataacacagatatcgaggaaatccttgaata

SEQ ID NO: 276343 - DNA, 487 bp, Cannabis indica
ggggctcctacccctcctgcatcaagctttagcaagggaattagttgttcggccatgcaccagaagaggagaacatccactgcatccaatggctcaagtcagaacaagaggttctgggggaaccagagtagaggtagccgtcagggtggtgcagagacccggttttcttatcctgagtgccccatttgcaagaggcaccatcagggtgagtgtaagggtcagggatgctttcagtgtggcatgcccggacactacaagaggattgtccccagctccgatcagaggcaccgggggctccggcgagacccactccagctagggtgttcgccatcactcaggctgatgcagatgccagcccttcagttgtaacaggtcagctttcagttaataactcgtattactctgtgctgtttgattctggggccacacattcttatgtggcagccagaatctttagtaagttgggtagaccgtatgatagttatga

SEQ ID NO: 276344 - DNA, 708 bp, Cannabis indica
aataaaatggtcaggaactataagaaacagttgctaatacgttttactgatgcacgtcactcggtgcgagaaattttgattcagattgttgatgtagtttggatcttggtaaaagtattgtatataagaaagattatatataacaggaccaacatgcaattagcctgtctttactataaggaccagcttaaattagccaaaattctcagaaatcatgaactcttgttcatgttattagattttttgattcacttgttaaaatccttcagagacaagattcataacttttattttgggagtctaataatgtagatggctaggaacttgatttgttccctttaagtgttaattttgggactgaaaagctatgcacaaatttagatcgtaaagtagattttactagtcagttaatggtactaaatgataaagaggtaattagaagggtgaaatagtaatttgacaaattccaattatgaaccaatacaaggagggtgaactactggtattgattatatcaatggacactgtaagtaactcactaaatataagtaaccaatatatgtaaagagctgactattgggttccttaaaaggtattgtgctcgtgcattaaagcagttggacaatagaggaccatcattcgtacagggcacgtgttgccaaaaggtttaaccttgaaaaataaattcctgaaataagcgtctaaaaa

SEQ ID NO: 276345 - DNA, 510 bp, Cannabis indica
cgaagagtggattttttggttgacaatggtgttgctccaatttcaaaatccttggaatcgaagatgaaactctttttacagaaagagttgaccatagcaggaaaacattcataaaactaaacagtaaaaacccaaagaaatcccaaagcccctataccaaccatcatactggcctcccttctctgccttcttattttttcattataataccatgctgaattctacctttgaatgaatcaatagtcaattcaaaggattccctaccccaacaatactcgtcccaccgaccgctatcaacaacatctagatcaaacctagatacttctttatttggagtattactaagacgaaaacactgaataaaataaaaaacaaccattttcaatccaagggactcatctaaaccccacctactacccaaaaaagcatcctcaatagctttgtggtcaatggtttttacaccacaaaaacagatttctaccaactgatttgattcctgtgaaaacaaca

SEQ ID NO: 276346 - DNA, 621 bp, Cannabis indica
agatcctggtaaaataaattccaacaggaaagttatccgtaatactggggggcatcgaagtcctcggtgaactctggaaggatagaagaaagaacgggccagtagactcaatgagtgatttccttaaccgagtcgaaggcttcatcaagctcgaagaagctattcaacaagcggaaggtgaacaaaagcctggaaagtcaaaggctccttccactggaacatccgtccaacttccccaatacccaaacaattcaaacttaggttgtatgcgctctagtaacaaccacaatcaaggaaatgggaagaaaggaaagtttactggcgaatccgaacaagctccccaggagaatcatgccaaatacactgcattcactattctgactacagatatagaaagtgtatacatggcaactcagtcgctggccccgtataagaagctcgggcccatgaagaaagatgccaacaaaagggacatgacaaagttttgtcggttccacggagactacggccacgacactaatgaatgctacaacttgaagagggaaattgaattcctaataaggaaaaacaatccgcacttgcaaaagtatgttaagaccgaccaaggtcagaggaacaaca

SEQ ID NO: 276347 - DNA, 1174 bp, Cannabis indica
atattggtacacatttgtacttaacagtttccatgtagtacatttaagaaatagactatagtacatataatgatagtatgttatataggaagagatgcttacctgttattgtacacatataggaaattaagtgtcgggatgtcatgaatacactgaaatgttagacgattgcatgaattattcaaagtctttgtcttccaatattttagtgttttgaatgtttgttaatttaagttattttgtcttgtgtaataggtttataaaatggtatttaaacggaagaggggggctgctgcagacaaaaaggatgcagcagagataaagaagaaggatccgaaggaagcttggccgaagtactagtgagttatttgtggcagttattttagtggtaatattttttggttttgaaaataatatttataattccattcctttatttaattgatgcagccaagccaatttctatgcttatgctgatgcacacaaagagaaacctaaagcagatgtgagtgacttggactgtgttatggatcttttattttttatctttgatttagcgtacttttgttaataatcgagtcttaatattgcaggtgcttcgtagttttaaggagcaattcaagcttcttagcgatgaagagattgagaattgggctgcatacgaagtcgaggcttccccctccaaggttggtggtagagggaaagggaagaaggtgaaggagacattatctgctgagccagggattgacaacaacgaaggtgtgggggacgttcaagtttctggtcgttgctcattcgagcgtttggggagaatagtcccactgctcaacgaggctcaaaaagaaatggtgagaaatgccggtttctcaacatttttaagggaggatgccccgtacatagacgctaagatagttagttggctgatcgatcacgtggatccaaccacttctcggctggagatatttggaagaacaatccaactatccgccaagctgtttgaggatgtcatgggaatccgggatggcggagaacccgtggcaaccgaaagtgagcgtgacctggttgagtttgacgtcctcttcaaggccaaggactataggtattccctgactttgctggagaatgagctcagggaaaccagcgacagtgactacctgtttctcattaagtttct

SEQ ID NO: 276348 - DNA, 565 bp, Cannabis indica
aagcaacgtcagtggcaagatgaaaaataagacttatttggaaccgaatccaggatggtgagcaactagatgggtggacagttaatggtgaagggtatctataccatatgggaagactagttgttgcagatatccctgaacttagggagaccattttgattgaggcccatagatccaaattcgctgtacatcctggaagtacaaagatgtaccaagatttaaagagacaatattggtgggaaggaatgaaaagagatgtggccagctttgtagctaagtgtatagtatgtcagcaagtgaaggctgagcatcagagaccctcaggtttacttcaacctttgcctataccagaatggaagtgggacaagattaccatggactttgttactgggttgccattgacacctttgaagcatgacgctgtttgggttattgttgatcgtttgactaagtctgctcattttattccaatcaggaaggattacaagcttaccaagctagctcgactttatgtagacaatatagttcgactacatggagtgccttcaagcattgtttctgatag

SEQ ID NO: 276349 - DNA, 635 bp, Cannabis indica
tagtaggaggaaagtatttcctcagaaacttctcagcaaggtcattccaattggtcacagaatcaggcggcaaagtgttgagccatgatctagctcggtctcgcagtgagaatgggaatagcttcaaccttaacacctcttcactcactccttggatcttgaaagaatcactcacctccaagaatgaacgaagatggaggtgaggatcttcagttggcatcccagcatttgaaacatcactggcttgagctcaaactgcggtgcttgtatttcaggcctcacaatgcctggattgagctcattaaacatgggggctgcatactcccttatagcccttgctcgatcatctgccaatatgatgggattaacaatttgttgagcaaccccatcatcatcaaaattctcagccatgatgtctcggcccttagccttttgaacccttcttcttcttcggaatgtgcgttcaatctcgggatcaataggagcaagttcaaagtcctcttgttggttcatacactatagatacctgagatttcaaagacaaaccagcaagattaaaagcacaaaaattcttagaatgtcaattagttgataaaacaaaatttagaacttaaagtccccggcaacggcgccaa

SEQ ID NO: 276350 - DNA, 980 bp, Cannabis indica
agtcgcaaatccttctcctgcaaccccatttgtttgaatgcttggaaattcagcagattcactgaactcccattgtcgacaagtatgcgatggacattatccccaccaatattggcgactatcactagtgcatcagaatgcgggtgatggacccatctcgcatcactctccataaaggtgatgtcgtcgcattctttcttaaacagcttctcgggccgctcactaagattattcacattggtaagcggcttctccttggcttctctggcatatcgttcttgtgatttgcgagagtcccctgcgatatgaggtcctccaattatagtcaggatgttgcgaggtgttctggagccactcgcattctggttttctcctttgtcatccgcttggggacgactttcctcgctcttcttatacttgtcgaatttccctctccggattagctcctcgatttcatcctgcaagacccaacattctaaagtagtgtgaccaatgtccttgtggtacttacagaattttttagggtctctcctgtcgcgatttcccctgatggggggcggcttcttgaagactccgtttctttcttcgattgcgtagatatggtctcgagggactgcgagttcagtataattgacgaagcgaggtccacctttcctttttggcgaggattccttctttggaggagacttggccaacttcggacttcgctgtcttcgcgggctgcgtcttcttgggcttcggcccctggagttcttccctcgtggactgcgagatcgtgaccgcggtatgggtgaccggcgcttgtccttccctttctctaactccgctagagaattctcgattcttttgtgaggttcggccatggcgaagaactcaactaaggattcgggccttcgagcctgtagctccttccaaaagtcggtcctcggcaagatacctgttatcagcatgcaaacaagcgaagactcgggggccttctc

SEQ ID NO: 276351 - DNA, 885 bp, Cannabis indica
ttttatttttattttttttagagaattctagtcatttcatacatttataactcaaagttgttcataaaaggtgttttgcctttacaatacactcaagtagtgctagagataagaagagaaaatctataataaaaaatataacgccaataacttttattaataggtatattaatttaatatttgcttgtacttataatatataaagactggtcgtttgagttttacttagcttatcaagctatctaatctagctcatcacaagattttatcagttctaattattagtagcaatttaatcttgagatgtaagagttgacctttctggataaaggttcatatatatatgtgatctttatcctaggttcatacttcatttttgttcaatatatagtttatgtgtagaccaaaataatgacaaacccactaattaaactacatacacacatgtacaaaatgcatactattttactcctataacttttatttatacgagtatacaatacgtaaaatactaatttcatgaaatcttggcatttttacagatatataattaaatacaaggagatacttcaataatatataaagaacatatatacaatacaatactagatctgatcattatatttgttctttgataatctatctagtgataagtgtacacgacacaatataataaagtgtttcattgggaagttcaaaaatcctaaaaataatgcaacatgatgtgaaatcgatctatgattgaaaaaacttgcacaagtagcctaaataaaatataacatattgtattctaatatacaatataatatgatgatgcgtttatatatatatctttatatattaaaagtgtctatctttaacagaatatacttaagaatattctgt

SEQ ID NO: 276352 - DNA, 643 bp, Cannabis indica
cgagtattcgagttgttcatctgaatacccgtgagtattcaaggcgtgaaacagtgcctattcaagtatatcatatgcggttatgtcaacttacaggtcatattctatgaaattacccaggtttttacctaaaaaacatagcctcatgcatatcatctataaacattcatccttaaacaaccctcatgcacactaaaaacccacaaaatataatccccattcaaacagaaaacgaagcatggtgaagatttgaaaactaacattttactttgataaatttgtttccacgaattgcccttgacagtaatgtagaatcaagaagaatccacgaataaaggcgaaaacctgggcaattacaaagatttttcttagtgttttctctgagagtgaaggaacaaagaagttaagggagttgaaggaaaatgagggaaaatggggatttttggttcgaatcagggggtttaaatacctaaatccctcattcattgggatcatgacacatggcagttggaatgcctagagtcgcccaatccaacggccagagatggccacgcctacacagaaaccgaagagttttgtgacgtggcaccataaatgcaataaaagtaatgattatagccgccatttttcgaaaccctcgaag

SEQ ID NO: 276353 - DNA, 318 bp, Cannabis indica
cctcagcatatggactgctgcatctatatgttgcatataaaggttagagaaagaagttagacaacgaaatttattaattatagattagttgacttataaagtatagtaaaattataaattagtttacttatctcatctataagccattcctgtagtgtcaacagcttctaaaagaacgatggaccgtaatcaccacttttcaaatcttgaagccggtggttgggaatgagtccagaacaccactttcggaaagtatccaacaatcgttcatccggtggcgccaggagatcaaacgtcaaagaaggtctctgtttcttc

SEQ ID NO: 276354 - DNA, 549 bp, Cannabis indica
ttacccagttttttacctaaaaaatgtagcctcatacatatctcctacaaacattcattcttaaactctctcatgcatattaaaaacccagaaaacattgttccctctcaaacagaaaatgaaatgcagtgaagtttcgaaaactaacctttacttctggtaaatctgttcccacgaattgccgcactgtagaatcgagaaaaaacccacgaagaaaagcaaaaatctgggaaatttatggaagtgttttttggtggtttctctgaaagagaggaaacaaagaagttaaggaagttaaagaaaatgagggaaaatggggatttttggttcgaattagagggtttaaatacccaaatccctcattaattgggatcacgacaagtggcaattagaatgcgtagagtcgcccaatccaacggccaaagatggccacgcctacacagaaaccgaagagttctgtgatgtggcaccataaatgcaataaaagcaatgattatagccgtcacttttcgaaactcttgaaaggacaaccaaaggtcacctcctcgt

SEQ ID NO: 276355 - DNA, 484 bp, Cannabis indica
atcatgagttgggtaccttgtctcatactcctttagctgcctagaggcataggctaccaccttctcattctgcatcaacacacagccgagcccttgctttgatgcgtcgcaatatactacaaatttgtctttgttagttggaacacacaggacgggtgttgttatgagtttatctttcaatgtctgaaagctttcctcacatttatctgtccatgcaaattttttgttgctttcgagtcagattcgtcaacggtatggctatttttgagaatctctcaacgaatctcctataatatccagctagtccgaggaaactccgaacctcacttgcagtttttggttttggccagctcttcactgcttcaattttcgaagggtccacctgtaccccatctttggacactatatggcctagaaacgccactttctccaaccagaactcacactttttgaatttggcatacaattggtgctctttgagtct

SEQ ID NO: 276356 - DNA, 96 bp, Cannabis indica
aaacaaattatatgagtcttacaagcaatattatctaaactagtgggggttactttccaatatgttgacgacacaataaacaggatcaagtatgtg

SEQ ID NO: 276357 - DNA, 606 bp, Cannabis indica
aacctcaccctgaggggtgcaccatacttagtccttgtcaaaaggagaatgcattggacaattggtgggtgagctactatcagaggatgtgttagcttcagggtcagtgttgcaaggggtacttggttgactggagggacattgtgatggactcagaggagttcatgttgggggaagtattctagtgcggaggcactactccatgggagattctgaatagcgacagtggcacaggttctttgatcaagtccaagagtgggcgagggcgatcgtcaccaagagggtggttctacggaggtagagggacaagtgtagacataggattcaggagaagcttggagtaagcttaggatttgagatcaggaagatttgcatgcggtccgtcgatgagggcatcgacatgttgaagtcggggagaatgtaacgtgcgtgctaagatggcacattacaagctaggtgatgcccacaagttggccaagtggtggtcaagtggtggcgcatgttgaggtgcatgctctgttgggttttgtgccctaaataaaactcatttcatataatcagatatacttattaatagagatcagaaataatattttatgttgcatg

SEQ ID NO: 276358 - DNA, 759 bp, Cannabis indica
cgggtgctgcctttggaggatctcttactcctcgagccctgggaagggcctgccaagctagcggtcggagcggagtgcgagggagcttgtccattcatccctgagggatttctaaaatgggatgctgcttatcggtggagccgcggtcggggcagtacccgagggcggtactccgggcatgtaccctgctatcccggtgggatagtatcctccataggccactatttgggcttcttcaaggttgatatatttttggactctcttctggaagtcctgaaggctagcagccccctcttgttgtagttcattccagaagggagtccctgtacggatgcctgcctggagaagcgcaagctgttgtccgtcatcaactttcttagtttttgaggcctcctctcggaacctctttatatagtttttcaaggtctcggtgggcagttgcttgatgttagtcaaggcactgacctccaggttgacctttcttgcggcgacaaactgtctccggaaattggtctgtaacttgttccaacagcccacggatcctggttccagtttcttgaaccattcctccgcggacccacttaaagtaagtgggaagcacagacattttgcgtcattgctgactctcatgaccgtcatgacacggttgaaccgtgacaagtggtcgcttggatcggagttcccggtataagctgccatttcgggcatcttaaagttcttggggagctccgcctccaggatgtgcttagcacatggctc

SEQ ID NO: 276359 - DNA, 568 bp, Cannabis indica
aaaataataaaataatatgtgtgtcagaaactgattatttaaaataaaataaaaattgttgtttaaatatcatacaataataaaactggttttatacaaactaaaaaaaatacaataatatcataaaaatggagcaaccccattatagaacagttaaaacatgtgaaaccatttttgacgctataaaaaataataaaaaaatataaatattaattataaagttaactgaaactagtttcatcagacaatcaaataaaaaaaaatacacacacacacaaaaatacaaaaaaaaaaaatactaatcacaaatataatcaaaacaacacaccatgcataccaatattaaaaacaaaatataagtgtaagtttcgaacctagaaacaaaataataaaaaagtaactaaaataaaaaatttgtaataacataatgaaactatttttttattcttttaatgaaattattagtttctttcaatgttgatgaaactaatttttaaagtttgtattatttttagattatatttttttatattattttttttcaagatgatgttgatgaaactgattt

SEQ ID NO: 276360 - DNA, 542 bp, Cannabis indica
ggtaaagtcgctgctttaaaccgctttatatccagatcttctgataagtgcaaggagttttttcagattttgaaaggcaacaaaaagttcaattggaacgaaaagtgcgagcaggcctttcaagctttaaaaacacacttggggcaacctccgatcttgtcaaagccattgtccggagaagtcctatccatctatttagccatttcagaatatgcgattagttcggtactaatacgcgaggaccaaggacgccaatacccagtgtattatgtcagtaagcgattactggatgccgagacgcgttatccccaaatggagaaattggctttcgccttgataatatcctcaagaaaattgcgaccttatttccaggctcacagcattgaagttttgacgaactaccccttgagacaagttctagcgaaaccagaagcatcagggagattgttaaaatgggcgatggagttgagtcagtttgacatcaagtataaaccaagaactgcgatcaaggggcaagccttggcagattttatacttgaatt

SEQ ID NO: 276361 - DNA, 559 bp, Cannabis indica
ctcatggcattgtgttgactccaatcccggggacgaggagaggcagaatcttcggatagccaaacacaactatgcccttgacaagtacacccgggggcatgctgaggtggaggccttgaagaggatcttacgagaggaagaggaaaacgtcctcaacgtggaggactttcggaatccgtgggacctgaacatggaccccctgacgaactggttcaaccgtttccttaggcccaccctagccccttttgcctcggagatgaccaacgagtatgtctcccatctaactcaattcttgcccaaacggtacgctgcttgtgcatccttgaactccgtctactaggttcaagtcatcagcaatgccatggctgcggtaagtacttgtgatttatttcttccctcggtattttgtctaaggcttttattctcacttttatctccttttccagattactgcggagaccagccgcctttccaagaccatagtcaatcatggtttcgtcatgtccgaatttgagggcatcgacgaggctgtgaggatcctgcgggacttgtctgctga

SEQ ID NO: 276362 - DNA, 1185 bp, Cannabis indica
tgcttgcttctaatgataaaaatctgttgtctgagacaaagcaattgttatctgaccattttgatatgaaagaccttggtgaggcttcatatgtacttgggatacagatccttcgggatagatctaaaggtattcttcggttgtctcaaagaacttatattgatcggattttgaaaagattcaatatgcatacttgttcacctggaaaggcaccaatagtgaaaggtgacaaattctcaaagggccaatgtccacaaaatgataaagagagagatgaaatgaaagtggttccttatgcgtcagttgtgggtagcctgatgtacgctcaagtatgcacacgccctgatattgcttttgttgttggcgtgttgggtagatacttgagtgatcctggacttagccattggaaagcggctaagaaggtcatgcggtatcttcagggtaccaaggatcatatgttgacttatcggcgagctgacactcttgatatagttgggtttagtgacgccgattatgcaggatgcgtggatgataagaaatccacatcaggctacattttcatgatggctggaggagctgtttcgtggaaaagtgtcaaacagacactcacagcatcctcaacaatggaggcagagtatatggcgtgttatgaggctacttgtcaggcaatatggctgcggaacttcatttcagcattgggtgttatggactctatctcgaggccgctgaaattgtattgtgataattccgcagcagtagctttctctagaaatgttagaagtacttctcgttctaaacacattgacataaagtactattttgttaaagagaaagttacagagtctcttatttccattgaatacacgcccagtactggcatgttagcagacccactaacgaaaggcttacccatatgtgtatttttagagcatgttgctcgaatgggattgttaggagcctagcttgttgagctcagtgggagttttattattatgtatcggacatgctagtatcttgtatggaatgcttatgatttatgttttgaacatgcataatgatattgtagtcacttctagttattgttgacatatgtgtgcatatatgtgttattcatcgaagtgacaggtacaaaaggagatgaatgcgcatagtctcaattttgttgtacctcatgcatgtttggtt

SEQ ID NO: 276363 - DNA, 641 bp, Cannabis indica
actaaagaatgacccgacgcacttaaaattgttcaaagaatctccgttcagtcattttctcgatatttctaactactgcagacattttagccaagtgatgtggctattactcgttcgagaagcagattgttacagatattcatatgtgtggttttgttgtgaatgggataccaattcgattctcattgatggactatgcattaatatctggactgaaatactcaaagtaccctaaaggttgggaatctcaagttgagtcaaaaccattcaaagatagacactttcgtgaaagaccttcatgcatcacaattgacgacttaaagaacaaattcaaacaattacctatttcaggaggtagcacaatgccttcacaatccatggacatataaacgattacttgatgttccataaaattcaacgcaagtatatttataagtttattcatacatgctttcttagtcggtatttattgcaaacatatatgtattgttaatttcaaaaatttcttataacaggggagattgtgcggtgtgtgcaattaagttcattaagctcaacatggctggtcttgctttgaaagcttatcagatgatagaatgacattctacaaaaaggaagatggtagtagatattttttgtca

SEQ ID NO: 276364 - DNA, 609 bp, Cannabis indica
ataaaaaattaattggaattaaaataataatagtaaattaataaatgaaaataaaaatctgaaacagaggacgtcgttgagccgaaccgaaccactctcaaacgactgctcctaataaattattttttaagattattatttatgtatgatttactagtgagaatattttatgtatgaaaataatattgagaaattttaaagaatattataaaactaaaaaagatattaatttgcaaaatattatacatgatttttcaaaatcatttgtaaaaactaaaataagaaatcaaatatttatatacatgtatttttagaaaatgtaaataattaatacatatatctatatctatctgtatatttgtaagcctactctgaggtattatcctattattttaggattctattttctctattttttttatttttttttcttctaaatggagttagatatacttacagaaaaaaatattatgtgcaattaataataacatattaataatgataaagtgtatttcaaatgtaatttaactatagaatagctaaccaattgacctatagtaattgataataatatctaataataatttaaaaaaaaaaaaaagcaaataa

SEQ ID NO: 276365 - DNA, 716 bp, Cannabis indica
ggcataaaacccaacaacaagttggatagccaaccttggggataattgtccacaactggttgggtatttaccctaggtggaggggcggtttcttgggggtccaagaaacaaacttgcatttctcattccataatggaagcgaagtttatagctctagctgccattgggaaagaggctgaatggttaagagatctcttaattgagattccaattattaaagaggatgtatctacaatatcgatacattgtgatagccaagcaacattaactagagcatataatggagtatacaatgggaagtctagacatattagtctaagacatggatatgtaagtgagttgattcaaagaggagtcatctcaatatcttatgtgagatcaagtgaaaacttggcggatccaattacgaagccattaactagagattcagtagaaaaaatttctaaagagataggactaaaactccttaaatctgttcacaattgaggttaacctatcttaatactagtaattttactagagttaggttcaataggtaagaacaaatcaatgtgtgaacaaatgtgataagtattatatgtcccatcctacaaagctgcgaagtacttagtgagttaccaatttgagggttagacttttaaaagtatttaatagaattcagtttggaaaacaagtattttgataacaaatactgtaagaaatctacctatattgac

SEQ ID NO: 276366 - DNA, 721 bp, Cannabis indica
aatatttagaaataaatattagagttataatttctcaattccggagattttattaaactctaggggtattatttagcttatatgtgaaatatgttaattttgtaatttttgctcggcgacaacggaaaatgcgatggatggctagattgatcacatgggtaagtttagaaccctatttcatagtgggaaataatttagagaaaataaattatcgggattgagcggggttatggaaattgaccattttacccctagctttagaaataccctagttttaagtctaagggcattttagtcttttggttaagggtgagtgaggtggctgcccaagtagttgacacctagcatttaagttagaaggagttaagtaattaactcattttcatttgaaaaataaaggaaaaacaaagaaaatcaaaatcaagagaagctctctcttctctctttctctcttcgaaggcagcaagggcaaggggttttgggagctgaaattttgtgttttcagcaaaggattcaagaggaatcaaggcaaggtaaccctagttcttctcccctttaagtttttgaagttttagtttagtttcactatgaatttttaggtttagtggctgttgggttttgaaatgtttggggttcaatttctggagttaattgagttaatctaagtccctagctactggttttgatgcttgtgaatggttttaagcaagcttgagttttg

SEQ ID NO: 276367 - DNA, 521 bp, Cannabis indica
aaatctgattatattgaaatgagttttatttagggcataaaacccaacagatccgtcagtagcacttagtgttggaattggttttaccaggatcttagatctactcacaagtatgttgatttaacaacctaaatatgaacttctaaaacgataaataaaaacacataaaagttaagaaaccttacagtgatggcagcggaattaagtgtctccttccactcagatctctaacccttgattcctgtctgtagcagagtataatcaagatctgagcccgaatgtccttcagttggatgtgatccttcacagtcttccaaactatgattgaggtactgtatgctgtgtgtgggcacttctctctcacaaggaattcgaaattcactctctttttctctcttgatttcgtgtgatacaatagcttgaataccaatggcatacaaaggcataccaagagaagagagggggcgacattatataggaaaaagggagagcttaacttttcaaataaacagtttcctctt

SEQ ID NO: 276368 - DNA, 561 bp, Cannabis indica
aatactcccgggggtatgctgaggtggaagcccttaggagggttctgcgggttgaggtgcaagacaccatcaacaacccggagtaccaggatccgtgggacctaaatttggaccccctatcggactggttccgtcgcttccttgggcccaccttagctccctttgctgcggagatgactggcgagtttgcgtctcagcttacccggtgcgcgcctaagcggttcgctacctgtgcatccctgaactccatcttccaagtccaggatctcagccactccctcactgtggtaagtgttttgtaattttgtttttccccttattcttttttggagattctttcttatacttgtattgttgtttagcttgctgctgaagctggccgcctctccaagaacataatcaaccatggcttcgtcctgtctgattttggggacatgaacgaagtcaggaaggttcttcaggatcttactgcggagaggcagctttaccaagaggctgctgagcgccgggaggccgctgccaaagccaatgaggaggaggctaagcggagggaagcccagg

SEQ ID NO: 276369 - DNA, 639 bp, Cannabis indica
aaaaaaaaaaagtggaaattaaacaacaacataaattggaagataatcaagcatctggagcagcaggagtagtctcatcaggagcagcctcgtccgcgaccttgctgacgacctcattctcgacttcttcagcctgtacgccctcaacctcgtccagaaggttgcctcccccaccttgagtctgggtaggcgacatggcgcgaaaggcttcagccatctcagcagcttcagctccaagaagcgagaagtcgaagtcggggactttggaaagagtggtataaatataatcagacacagcctgatcgtactgtttcttcccattctctttctcagcctccaagtcgcgagccatctcaacgatcgttgtccgcgacttcttgacctcgagctccgcctgttctttcgccctgctgagttcctcgagctccttctccttggccttgttaagttcctcaatcctcgccacatcctgcttcagcttctttatattttcttgaaaatgggcgttctgcctcttcagcgagtcggcttccttcgaaggagtagccgcggcttttatgaacaaagccatggattgcgcggccagttcagtagatcgagcaacgagatcctcgtaagggatctcagtcaggaattttt

SEQ ID NO: 276370 - DNA, 591 bp, Cannabis indica
gcttcttcttggccaagtctgcctccgcctccaaggtgtcggacagagccgcgttcttggaagcagcagactttgcccgggagtaagtgtaggccaacttcagactggcctggacaaaggaaaaactttagcatattgaactaagtgtgaaaaattaaagggaagtatcaaaaaagacttaccctggtgaactccttcaagactccgcccaccagcccatccaaagaagagtcattgtctacatgagccagtttctcagtgacctcaggaactagccagttcatgtaatgggccagcatctccttgccctttttggcctctggaagcactgtcaaaggtggagttggtgcctgcacccgttctggatcactcctgaccagttcagactcagccgttggtggtcgagactccttggacttggcagctttaggggtagaggggtttgcagcagtcagctcctcggaaagatcaataacctcccaggaaggtctcttttgctttgaagaggacccctcaccacccttagacttcttggccggaggagaggcgctgagcttccgcccattctcttcctcagagcgtcgatcatct

SEQ ID NO: 276371 - DNA, 697 bp, Cannabis indica
cccaatctcacttgtcaaattcatgagagtagactttcaaagtcaatggagtcagtgatgatgcaatccgcttgagacttttcccattctcgctgagagagcgagctaagagttggctgatctccttgccaccgaactctattgcaacatggactgatttggcgacaaagttcttgtccaagttttttcctccagcaaaagctgccaagctgcgaggtgaaattaataatttttgtcaactggacaatgaatctctctatgaggcttgggagaggttcaaggatctcatcagaaaatgtccacatcatgggatcgaaaagtggatgttggttcataatttctacaatgggctgattggtaataccagaacaattatagacgccgcagctggtggggcatttatgagaaaaagtgtaaacgaggcctatgatctgctcgaagaaatggccatgaataaccaacaatggccaactgaaagaagccaaacaaagaaagttgctggtatgcacgaggtagacgccatcaccaagttgacagcccaagtggaggccctaacgaagttgatgactgctcaggtgaaacaggctcaagttacttgtgagctatgtgggggccctcacacatatgacacatgcccggtggatgtgaatagtttaccaatggatcaagcaaaagccattgggaactattctcaaaa

SEQ ID NO: 276372 - DNA, 531 bp, Cannabis indica
tctttccaccattccactacccgataactcatatgcttgcatgcttacctctctccactaatgttgacaacatcctttcggaatcaatagggctttttgaggtttagagagtatggcttagatatttggagaataaaaaaacaattttggctaaagatatcataagcacaaaaataacccacaagcttcttctaatttcaaatttcccaaagtgttcccacaactaaccaagattgagaatttttttcttttcccaacatcactgaattttattatttttcttgaatcatatttttttttcttcaatattttttttttcagtgatattgatcttacaacttatatttttttttctcaatcttgcacgtttttttttctatcttctctcacaccatgcattttgctcccccaaactaattatatagcttatgatatcattgataaaatagtgaggacaaaattaacagtgtggatacatatttcggttccaacaggtgaagaataaaacaagtttaggctcaagagggtcaa

SEQ ID NO: 276373 - DNA, 526 bp, Cannabis indica
tatctgatcagctgcattgaaatatctctttcgaaaaaagatgctaaatctcgtttaattcgttggatcttgcttttacaagaatttgatttagagatacgtgataaaaaaggttctgaaaatgttgtagctgatcatttgtctagaattgttgttgaaactaatcatgattccaccactatcattgaaacttttcctgatgaacaactcatgcatgtatcttcttttccttggtatgctgatattgtcaattatttggtcactggtgaaattccttctcattggtctaaacaagataaatctaaattttatgctgaagtgaaaaatttcatgtgggatgatccttatttgtttaaatattgccccgatcaaataataagaagatgcattccaaactgtgatcaatctaaaatcatatctttttgtcatgatcatgcatgtggtggacattttagtggtaagaaaactgctttgaaaattttacaatgtggattttattggcctactatttttcatgacacttata

SEQ ID NO: 276374 - DNA, 585 bp, Cannabis indica
ttacgtactcctactctcttcttctctctctctctctctctctctctctctctctctctctcatcactttaactcagtgtaatttgtaagcataatcttaataactgtcaacaacaaaaagaaaagaagtatattcaagaattagctttaatacatttgaagtgtttctcacttctgcttcatattaaaaacactctctacaattttaaatatactttcctttactactttctacaatttttgatcttaaaagtagcaactttctgcaataggcaatatgcactagcaattttaaataacatccttttaagtgcttgtatatcagtactcttctcctttgcagtttttgttggacatttatttgtatagactaaaacatacatgattatgaataaagtgcggaattaataaatcatatatgcactatagattaaggatcgaaatacctccagccattgattcttgagcttcaaacccacataagctttgatctgcaagggaaactggttgatgtgggtaatcgggcttcctcgctctctcaactctctttagatggattttgctgttatgaacagaatgagtgag

SEQ ID NO: 276375 - DNA, 417 bp, Cannabis indica
agaatcttggtaatcaccgttagccactgttcagctttcatgacatctagacctcccaaaaaaaccggaggtgcttgcttccggaacctttcatacaagggttccattctatttaccgctactactatttcggcctgagcctcaatctctgtatctcaagatcttgttcctctatcctggcttacatttcagcaaacctagtctcccgattctgggctttttgctcggcttgggcaacctgggcagcctgtggcgggttatcgttaccccgaccacgagccctgcccctgggacctctaccacggcccctagcatgcgggggaaactgggctccctgaccctaattcgaccctactgagttgctctggctcctggtattccgcctgacgtccatctagtcggaaccgcctgcgaaac

SEQ ID NO: 276376 - DNA, 699 bp, Cannabis indica
gaaaaagagaaatttatttcatgtttcatagtaagtttgtattcttaatttattcatggttcacactttaattttatagagttaagtaaacaaaactcatatacataaaatgtttcacatttatctatcttttattattattattattattattattattattattattatgaactttatgagatttttatacaagacattctcatattcatatataccaattaaacataattttttgaactatcattttttaaataaattatagaattttattaatataacaattagttacaataatagtctacaatcaagatataaaaaaatgagccaaataattattcacataatttctaaatcacttgacaaaagattaaaataaatcatatataaaaaaaaaattacaacattataattaactttaagaacacctatattttgtttaatctaccgctaagaagacacgacagtaaaaattagttgcagcaagttcattcaatctcgtagcttgagcattcaactatgtgtaaaatacgcaattcatactacaatctttcagtcgcagagaatttattattcccaactctaaattacgatttgatggcgagttatcgaagaacaaagaaaaactaataacgaaacaaaaccaatgtcacacaaacaaattaaaacaactcaaaatcatgtcacagagacaagact

SEQ ID NO: 276377 - DNA, 726 bp, Cannabis indica
  modified_base (638)..(638): a, c, t, g, unknown or other
gttagaatatctataaaaatatctaggttaatttcaaatttattaattatttaatttgcatataagataattttaatataatatttcaaataaagaagataaagttatcttttaatttaaaatatgttaaatatcaaaatatctaatcttataattaaataatatataaatattaaagaaattaacaaatttttaaatatgaccataatttgaaatatttaaaattggaaaaaaaaatcgaattttaggaaaaatcccaaaaattggattttgggttgggcaaaatcgtggctgcccaggaggttgcacgtgcagccaaagaaggctgcacgcagcctcggacgtgcgcggacaggggcacccagccgaggtttctcggcgtctgcagggttcatgtgtggcaaatctcggcgctagcagggtttgtctcggcggatgttcaaggtgcacgtgcggcaaagctcggcgctggtgtgccttgtccgaagctcctggtgcatgcttgcaccaagcttcggcagccatgaaacccaattttccaaaattcataactttctcaatttttatcggaatcgagttcagtaaaaacaaaattgctaatttttcacaaggaatccaataaaatattttcaaaaacngaaaaaaatatttttacatgaaaaaggttctagtacaacacatacattcatcaactagctcatacaccacatgaaaccatccaaatca

SEQ ID NO: 276378 - DNA, 583 bp, Cannabis indica
gtagaaatccccaaaacccccgtggacgcggtcgaggccgcggtcgagtcccgagaggtggacaggagaatccacctcaggcccctgttgattgggaacaaaggtttgctgagatgcaaactagaattgagcaacaagaagaagagatccgacgactcaggcaacgggatgctcctgttgagcctcccccgcaaccgcctgctgcggctcctatagctcctgcagcccctgtggtgccagctgagcaaaatattgctggtaaccgcatggagcctttatatgaaaggttcagaaagcaagcgcctccagtatttctgggaggccctgatgttttaaaggctgagcagtggttgaccgttattgagaaaatactgaattttatgggagtagctggaaatgatagggtggcatgtgccacatttcaatttcaagaggatgccctgatctggtgggaaatggtatccctcaccagagatgtgaccagaatgacctgggaagagttccgggaattgttcaatgccaagtattacaacgaggcggtccgcagtgcaaagcggaaggaatttgttgaattggtacaagg

SEQ ID NO: 276379 - DNA, 637 bp, Cannabis indica
ttttttttttaaaattatttatttatttatttttattttttaaattaaaataataacacccaccaataatattttgacacgtggcatttaaaatgggtttaacggatctgttaacttggagaccaacggacaaataaaaaacatgaccttgaggactattgccgctatttttggaggttggggacttatctgtattaaactgaactttttggggacttttgccgcaaatttcccttttatttaattcctttattttaatgtgcaccaaatcctatacttttaatggtgttgaattttcaatctacaacaattcggtatacaatttttttttttgttgcattaacccttattttatttaaaatataatcttacattttagttctcaaattaaaatttatgacaaaaataatagttgatttaaaatactaacatatttgaaaatataaactaacaataaaaaaatactaagactaataaaaataaaaataacacgacactaagttataaattaaaaaaaaaaaaactacattaagtaacttaagtaaaataataatttaatagtcaaattgatcacttgtgaatcttagccttgaagaattaatatcaaaatattggctatatggactttaagtatttt

SEQ ID NO: 276380 - DNA, 869 bp, Cannabis indica
gctgagttgaaggaattgaagatacaattgcaagatttactgaatctgggattcatcagaccgagctactcaccttgaggtgctccagttctatttgtgaagaagaaagacggaaccctgcgaatgtgtattgactaccgggagttgaacaagcttaccattaagaacaagtatcctttacctcgaattgatgatctgtttgatcaactgaaggggaagacggtcttttccaagatcgatcttcgctcaggctatcatcagctgagaattcgagaggaagatatcccgaaaactgcgtttcgtactcggtatggacactatgaatttcttgtgatgtcttttggactcactaatgccccggcggcattcatggatttgatgaaccgggtgtttaaggattacctggataggttcgtgattgtgtttatcgatgacattttggtgtactctgagacagaagaagagcatgagttgcatctcagagcggttttgcaaagattacgggatcacaagctttatgctaagttcaaaaagtgtgaattctggttatctcgtgtctcatttttggggcacatagtggataaagatgggatcatggtggatccggccaaaattgaagctgttcgggattggccagtaccgaagtcagctacagaggtcagaagttttctgggtttggctggttattatcgtcggttcgttgagggtttttcaaagattgctgtacccttaacggagctgacccgaaagaaccagaagtttgtttggactgatcggtgtgagaaaagtttcctggagttaaagcaacgcttgattaccgctcctgtactaactcttccttcagataaggaaaagtttgtggtatattg

SEQ ID NO: 276381 - DNA, 709 bp, Cannabis indica
agaatcaaataaaacagtacatagttttccagagatagaaatctgacctgcaaccacagtgttactagtctcagcctcccctctggttagtgcaaatactcgagctgggacaagtttgtcatccttgagttgatcacccttttgtggacagtccttcttatagtggcctggttgcccacacttgtaacaagtcttgcctttcagtcgacattctcccggatgcttacgaccacatgttgggcatagggggtactccacatatggcttcttccctttgtagttattggaccctatcttgtttctcttgtcggcttcgttgtgttggttacttggcagttttcttttgttatcaccacctccattactggcctttctggcctcccaccttgctgtattgtctttctgtatacgactttcacacaactcagcttctagggctttttccagtacctcagcatacgtggttgcccttactcctgacatcgctatgtcccgacttattcgggagtcgagcccttcagtaaaacgatgaatcctcagaaactcagtaggaaccagatctgtggcaaactttgctaatctgtcaaattggcgagcatactctgtaactgtagacttaccctgcctcaggttcgtgaactcattaactctagctgagcgtattgcttcactgtagtattttttgttaaaaacttgtacaaagtcagcc

SEQ ID NO: 276382 - DNA, 649 bp, Cannabis indica
aatgaccttcaaacttatgaaaatttgattggaggacccaagaagaaagggagtaaacctcacaatcctggtaatggtaatgggacgatgaaacctgaagcaaatgttgcctctgcttcaaagcccaaatcgaagaagaagtggaagaacaccaagaagcgaacaaaagccattaaaaaggctgctccttctggtgatgctacacttaaaggaaagtgtttctactgcaatgagaaaggtcattggaaaccccagtgtcctaaacttcttgcaaagaaacaaggtatttccatttataaactttaagagttttagtgaattattatccaattggatttatgattctggactaactttgtttatttgttttcttcttcttataggccaagctacttgaactcaattgagttggatcagaaagctggaccaagggtgaaatcgtccagatgaagatgaagctcttcaatttttgaattaattgttttagtttaaagacaatttggatttcaaattttagttagggatatttatccctgtttctctcatattgttgcaatacatttttttttattaataaagttttttttttcgaaattcactattgcaatttatgagattgagcttcatttattttatcttcatcaattat

SEQ ID NO: 276383 - DNA, 716 bp, Cannabis indica
cacttgagctttgcggatgatgtgcttctattttgtagaggggactttaagagcatttatctcttgatgcaagggctgaaattattttctaagtcttcgggtttaacaccaattaatgcaaaatctgcaatatatttcagtggaatggatgaaaaagagattaaacgagttctggatatgactggtttttctaggcaggaggagcctttcaactatcttggggtgcccatctgtgcaaggaaaattgcagcaggggattgtatcagccttgctcagaaaatgacaaagagaattagagtttggtcaaccagaaacttgtcttttgcaggcagactagtattggttaactcggttctccttacaatacatatgtattggagtcaaatcatgattctccctaagaaagtgattaaagagatagaaggagtgtgcaggagtttcatatggacaggaaagagtgtaatgataggggatggttcagttgcatgggaaagtttatgtaaatcgaaaaaagaaggaggcttaggcttgctgaatgttgctcaatggaatactgcaacaatgtttaggcatgtttgggcagtggcaaacaagaaggacaatctctgggtgaaatgggtgcattgcgtatacatcaaacatcataactggtgggaatataaagtcccacaaaccagtagctggtactggaaaaaaatggtggatataagggacat

SEQ ID NO: 276384 - DNA, 851 bp, Cannabis indica
aaagctttagatggggacaaccgagccgaaaatggggctcgcgtgcgtcaggtgacagctgtaatatccgccttcttgggtaattaattttttttattttgtttgctaatggggataatttattgttttgaatatttatgaaatttttttagtgacaataaaatttcttttattttgtttttattagtttgaggttgtgtatagataaataattaaattattagagctaatttaatatttaattatttataaatactattataggtatgttaataataataatatgggtatatattatttagtttattattaatattaatattattattactattattatttagtttttatttattatttctattatttagttttttttattttttttattttgttaacagtttttacgttaatatatatatatatatatattatagcaattaccatatgtatgtgcatgtgtaaacataagaacatttttactatttttaatattcttttctttgtcattggtcttctaatagaactatctgaactaagcttcggtttctgggtaaatagtctgttttgtccatgcatttatgatttcacaagttgctatagctatttttgttttctttttattttaaagccctcctcttctgtcatttttcttattggttagtcttttgagattttgaaccataactatggaagtagatattcaatattggttatagccataccacatgtttattatttttaaagataattcttttgctttctgtactcaatgtgcctgcataaatgtctagtcaaaaagatatactgtaactcctcctcacctaattcacttcaatattacatttttt

SEQ ID NO: 276385 - DNA, 664 bp, Cannabis indica
cttgcaaaccgaaaacacaacaactttttaaacggaaaagtgcaaaaccacaaacaagacaactccccctaaaacaaggatccagagttgtaacacataatccaaaaaaaataatactactccccctttttgtctatcaaggagccaaagataacaaaaaccatgaacaaggtcataatagtttaagcattcacaaataaaaagcaagagatagagaattgaaccacttattcatcatcattgggtcggaagtatttcatgatgttgtccatcttcctgagaagtaaggcttgacttgtctccattctccccaaacacaagttgaattcagccatttctgtagaagcagaagcagcagcaggttcaacagtaacaccaagggaagcaaggttgtaagtcgactttcaagctttggtcttcgactttctggcagttttcatcggaacagatgacgaaccagaagctccggttgctggtgcaggcggcgcaggaggggtgatcggagaagcagaggcagagccacgagagggcttcttggatggttgggcattcttagttttggccatttttctttgaaaccctagaacacaaacactcttacactttgaaaaatgttagacctttgagagaaaaaaatagaaggagaagagagagtggtgatcgt

SEQ ID NO: 276386 - DNA, 876 bp, Cannabis indica
tgtatgatggctattttctcggatatggctgagagtattttggagatattcatggatgatttctctatctacggggaatcatttggggtttgtttggagaatttggagagagtgttagcaagatgtgaagaaaccaacttggtgcttaactgggagaaatgccacttcatggttcaagagggtattgtgttgggtcacaaagtgtctagaaaggggatagaagttgacaaggcaaagctagaagtgattgagaagttaccagcccctaccacggtgaaaggcataagaagcttccttggacacgcgggtttctataggcgcttcattaaagacttttctaaggtgtccaaacccttgtgtagcttgctggaacaaaataggccatttgagtttaccgctgaatgtaatgaagcattttcgaagttgaagacagctcttgttacggcccccgtgattgtagcacccgattggtcattgccctttgaactcatgtgtgatgcaagtgattttgccattggggctgttcttggacagcggaagaataagacctttcactccatttattacgcaagcaaaactcttgttgatgcccagattaactacaccactactgaaaaagagttgctagcggtggtttttgcctttgagaaattcagatcttatcttgtgggaaccaaggttgttgtgtatactgaccattcggcaatcaagtatttgatagccaagaaagattctaaaccgaggctcattcgttgggttttgttgctacaagagtttgatttggaaattcgagacagaaaagggacagaaaacaaagtggcggatcatctctctaggttggaaactaataatcacagcagccacttagagggagaa

SEQ ID NO: 276387 - DNA, 601 bp, Cannabis indica
tttctgggaggccctgatgtgatgaaggccgagcagtggctttcagtgattgaacgcatccttaattttatgggagtggttggaaatgaccgggtgacctgcgccactttccaatttcaggaagatgctctcgtgtggtgggagttgataaccctcactcgagacgtcacgctgatgacctgggaagaatttaaggagttatttaactccaagtattacaatgaagcagtccgcagtgcaaagcggaaagagttcactgatttagttcaaactgagggaatgtcagtcactgaatatacgacaaagtttgatcggttggctaagttggcggcgggaattgtgccgactgattttagcaagaaagaaaaatatttagcgggtttgagtgcaaagattcggcatgatctggttattactactactgaagcaaccacatatgcggagatggttgagaaggctttgagagccgagggtgcagtgaaatttcttcaggagccccgggtgactccgagtgttggtggaacccccactgttcctactcctgtttatggtagggatggtggtgactccaccactgagcagaaaagaaaagttgttccag

SEQ ID NO: 276388 - DNA, 529 bp, Cannabis indica
ttaactgctagtcgtcctgatatctgttacagtgtgggagtgtgtgctagatatcaaagtaatcctatggaatctcatgtatcagctgtaaaaaggattattagatatgttaatagcactcctgattatggaatttggtactcgaaagataccaattcaaatcttgcttgttttagtgatgcagattgggcaggaaatgctgatgatcgaaagagcacaagtggagggtgtttctttcttgggaataatctagtatcttggcatagcaagaaacagaattccatctccttatccactgccgaagctgagtacatagctgctggcagttgttgtactcaactattgtggttgaaacaaatgttgattgattatgggtttgaattgggtgttttgactattttttgtgacaatactagtgccataaatatttccaaaaatcctgttcaacattctagaacaaagcacattgatataagacaccactttatcagggaacttgttgaaaataaatcattgcaattagaatatg

SEQ ID NO: 276389 - DNA, 633 bp, Cannabis indica
ttattaatctatttgtatttgtacttaatcttccaaacttaaattttggtggtaaaataaaaccctcaaaatgactgaactgttagtaaatttaaattagtaaatttaaggtgtcatctatttttttacagttacctgccaacatagactacttatcagtgacagacccagaattttcactttgtgggggcttatttattattcaaaaatatttatacctatattataatcattcttactagatttatttaattttatgggggctttttctacgattttgatttataattatcaaatttaagaaattacatttaattttttaaaagacaatatttttgttagtgggggctataacccccacattaatacaactaagtccgtccctgctacttatgtgtacactcttgtacatgtagcacatttatattgcggtacaccgaagaagaaaaaccctacttcgatgggtgaccttcggcccatatccttgtgcaatgtcttgtataagatagtgtctaaggtgattgcgaatcgcttaaaggaagtgttgcctcagatcatatcctcaaatcaatcggcgttcatctcaggacgccttattactgataatattatgatagtgtttgaggttatgca

SEQ ID NO: 276390 - DNA, 822 bp, Cannabis indica
aacccagatagagacctaaacccgaaccgagactaggacatgaacccgaacctagaccgggacccaagcccactcaataaccaggacctggacccagaataaggatattgagctgggaaacagaactaggaccaggacctagtacccgacccagacgcgaacttgaacctatgaccaagctcgtgacccgacgccagaaatgggaccacactgggacccgagattgagatccggatctggacccagggcttggaaaaaacccgttatagtgtctggatttgggacccacgcctggacccgaaccccaacaaggacccgaaccctaacaaggacccgaacccacacccggacgtaaacccagtcccaaacccaaaagtggactcgaacccgtaccctgtgacccaaaattggaaccaaaactggaagttgaccaggattggaacgaggacttggacttgaaatcataactaaaattggaccttgatccagaaccgtaaccggaccaggaccagcactccaaatcagacttagacccgaattgggagccggacacggatccaacccccaaacctagagtcgggacccgaacctgaacctgaactcacacccaaacatggaactagactatggaaaaagaaccagggtcgggacctagagccgcaacccagtctcgatcccgaacccaaactccaaaatgggacgtgggacctgaaccagattcagaccgagacctgtgatagtgatccagatcttaactcgggattcagataacggggcttggaacagaccaatagttggtgtctagatctgggactcagacta

SEQ ID NO: 276391 - DNA, 818 bp, Cannabis indica
cgaggattgagaagtcaaaatctagaattttggaaaaagtggtgtaaatatagtcagaaactgcctggtcatactgtttcttcccattctccttctcgacctctaagtcgcgagccatctcctcgatcttcctctgagagttcttggcctcgagctcaacctgctccttagacttgcgaaggtcttcaagctccctgtccttatcagccgcgtcttgtttcagtttctttatgctctcctggagctgggcattttgcctcttcagcagttcagcttccttagaaccagcggcaacggctttcatgaacagagtcatcgactgcgaagccaactccacagagcgcggaacaagctcctcagaagggatcctctccgccttggatatgaactcctcgcccacgaacttctcctgcatagccagaaaatcgcgggctcggatagttggctcgatcatgactttcttccctttgtcttgcgcggtcttagccagcttcttggaagaatccgcggcaagagtagttataacatcgctcttcctcttctgggcaatgacgggcgatgtcgtcgctgttccactttttggcttgcggttgaggatgggcgcggacttcaaaaaagtcatctctgcgaggacaaataaaagataagtatgaataaatttcaaggcactagtttataacgtgggatatgttacctgaggctggtcgagaagtttgcttggagaggcgtttgtctatccgctcttgttgtttctcagatggttccttgtatactggctctctttgaagacttgcgttctctggaatcagcttgtgttc

SEQ ID NO: 276392 - DNA, 519 bp, Cannabis indica
gatctattaaaaagaaacagaaaagcgcaattggaatatcctgagctagttgaggttcgagacgatgtaatggccggtcggcctagagactttttagtctcgaacagtggaatgttgttatttaaagctcgagtttgtgcttcgaatgttgaagagatcaagaaggaggtacttgatgaagctcataccacaccttattcattgaatccgagaaccaccaaaatgtaccaggatttaaaaccctatttttggtggtatgggatgaaaagagatgtggtgcattatgtgtccaagtgtttaacttgccagcaagtcaaggctgaacatcagaggccggcagggttactgcaacctttagtcctttctgagtggaagtgggaggacattgcaatggattttgtaactggattgcataaactacgagaatgtatgattcagtatgggttatagtggacaaattcacaaaatcagctcactttctattagtgaaagttacatattcagtggatcagtacgctg

SEQ ID NO: 276393 - DNA, 688 bp, Cannabis indica
tattgtgctagttgtgtgttgtttttgtgcttggaacttttattctatgttgtttatgtggttgttagtttggcattgagagtttttttgagtttttctgtggcctagtgttctgctcgatgatgatactttccgcccattccattattgttgctgcctaattttacttgttgccttatcatgctgcattgttggatattatggatgtttcccttagtctctcctcactagtttatacttgtatttattccaccatgctttgcctttctcatacgattatttcacatgtaattttagcatctagaattggttagtgcatctccttgaagcgaaatcctagttagacttgtcccttagaaatgatttaggccttccttggacgtttgagcctttctaaccttccctataaaatgaatttttccctagtcacccaagtttgagccgtttagcctattcttgttgtgcaacccgatcatacatatcacgtcaatcctaatttgcatttccacatatgtcctaacttaattgctcacttgtcaagagccaagtttcacattaagtttggggtgagtgcggtgagtgtaatttgtggcgagctaattcaagattatacttttagccacattggggacaatgttgggttgtaagtttggggtgggggaattagctcacaaggtatattagtatg

SEQ ID NO: 276394 - DNA, 536 bp, Cannabis indica
ctctctctctctctctctctctctctctcttctctctctctctctctctctttgcatttagctcacgacccaacaccgaaaggtattgtctctagtcactgtggctgaacagtggcgcacgatgctagggcccccaaaatcccaaaccctaaccgtccttcttgtgcctgctgcctcttcatttgttaacgggctaaatgaaaccgtactcgacttcctccaaaatcaagttcttttctattgtaaaatgaatttctattcctcattggttatttatttggaatctaactattatggtggttgtgctaataattttgaatttctaattttgtaattaggtttcgaaaataggaaagaattttctaattattggtatttttcagtattgtttgagaattattggtgtgtggagatggtggtgatgtggtagttgtggggataatggggataatggtgataatgtttgtgatgtggcagtgactttggtggtactttgtggtggtggtgataatggtgaagaagaatgagaagaaaga

SEQ ID NO: 276395 - DNA, 548 bp, Cannabis indica
aaattttgaaaaatatgacttgtttcagatttttttttcatgaggaatgtccaacttaggcagctgtgatcatcaactattgatattttgaattttttatggtccccatatattcccgtgagaatggatgagagggttgatgatgaggtcttggaatgaaagagtggcgagaatgcttagataattgacaaatattacacttgagagactgaggatttatattgacaaatagggatgggaataagtgtttaagatatacaaaatttggatgacctagacggtaatgccataacatgatagtactaattttattaaactgatttatgaggaaagagattgaccttgggagaaacaacaacgatttccatagttaaacatggggttgtcaatttttagcagatacaagcccttaccgaactcagcatagccaatcatcttccacgattccacatcttgaaaaacacaaaacttagcagcaaacttaacttcacaattaagatcactactcaatttgcttacagaaagtaaattgcaatcaagctttggaa

SEQ ID NO: 276396 - DNA, 566 bp, Cannabis indica
ttagttcaatacacaacttgtttcgtttgatacaaattgtttggtttgataatatctcctatttctattaatctcctacttctattacgatatttaaattgtatgacattatgctcgttatcaataaagttatcattgcaatgagtatagtgcctctaaaatcggtaccatacttaccaatatttgatgatttcatattttatcccaaaaacaacaaataaagccaaatcatttccacaatcataagatcactaaaagaccatccagcctaatattatagaactcatgcattatttttttgtcatattgctcaaaaaatctccatttatccaatccccaaatattcaaaatccaaccaaatcaactaacacattccaaaaatacatacatcaaaatacccaaatcaaaacccctaaattatagtacaatgcaactaattcaatttaaacaatgcaactctttattgcaacaaactcaatcaaaataccaaatcacatattcataaaaaactaaaacaaaaaactcataacacacagtacattccacactaagaaccacaacacatg

SEQ ID NO: 276397 - DNA, 527 bp, Cannabis indica
tgagttgaaggttaattgcgatgaagctattttttcaagagaaaaagattcatggtttggggtggattgctcgtgacccggctggtgtgcttcttactgctgctgccgagaagaggattggtggtgtcgaccctggtggtggctgaagcaatgtcaatgaaggaagctttaagttggcttaaacaaacttggggtgatggtggttcgtttgaaggttggatccctactggggtgtgtttggagacggattgtctagtgttggtgaatgttattaacaataataggcaaattttttctcctcttggtttaattgtttcagattgtattagtcttatacgatctctttcgatgtttgttatttcagttcagtttgttaaacggtctgggaaccaagcggctaattggttagctcgttcttctggttcatgtctcgaccgtgtttcctgtagggggtctgtccctattggtttggaagctattttattagctgatttgtattaataaagttgcaatctttgtttcaaaaa

SEQ ID NO: 276398 - DNA, 810 bp, Cannabis indica
atagtctgttaaaagatgtgggatcacttgagctaccagaagagccaaaacccgcgtctaacaaattggaagaaattaatttatcagaaaatcccgaagagaaaaaacctgtgttcatttctaccgacttacctgtagctatacgagctgagttgatggagctattatacaaatatcgaaatgtgtttgcttggacatacgaagatatgcctgggctagatcctaaactagtcactcacaaattgagcacgctacaggaagcaaaaccagtaaagcaaacctcaaggaattacaggccagaggtacaacttcaaatcaaggcagaaattgaaaaattactaaaagcaagatttattcgtacatgcaagcatccgatatggttggctaacatagttccagtaaagaaaaagaatgggaaaataagaatctgtgttgattatcgagatcttaataaagcttgtccaaaggacgactttccattgccaaatcttgatactttaattgatgcaacagcaaattgtgagatgttttctttcatggatgggtttagcggatataatcaaattcagatgtctccagaagatgcagagaaaacggcgtttcgaaccccgttcggaaacttctactacactgtcatgccatttggtttgaaaaacgctggggccacctatcaaagagcaatgacggcaatattccatgatatgatacatgagaacgtagaagtgtatgttgatgatatcgtcgtcaaatcccaaaataaatttaatcacattcgcgatctcgagagagcattccaaaggtgtgaaagat

SEQ ID NO: 276399 - DNA, 530 bp, Cannabis indica
agaaatatatgagtagtaaaatcattacattcacttcggggaatgacgttgaacaagtagaacattattataaatttcttaaaaatttattacttgttcatccataaaaatataagaaattattcaacaatttcttttacgatatttcaaagaatatatgaatgcaatttttgcatagtctccaagatgtatgcaaaatttaatctttaatatatgtcagattcaataatttccaacattgcaagtaataacaatgtataataacatgactaatacgaggaatctttaaaagtaattgacttcaattcgtatcattctctgcagggaatgatgaacaataaatacatgcctcatgtatttaaataacattagtcatgctcattgttattcttatactttgatgtttcaatgcaattttttttaggtatttcaaaacccactataaaattgcatcaataataatcatttttaatgattctttagttgtattcacataaatacaatcatttttttttttactaaatataact

SEQ ID NO: 276400 - DNA, 550 bp, Cannabis indica
gacctttgagagaaaaaaaatagaaggagaagagagagtggtgatcgtgggtttatgggtagttgagaatatataactttcaattttaaatacccaattaaagaaaaaaaaactgaaaaggaaggtaacttccttacctttgacccacgtgtggagaggaaaaaggaaaccaaaaaaggtttttcaaaattttggtcaatgtttccttaaatggaaaaaggaaaccaacaatccccacaaaatctaagaatttaaaaacccttaccaaaaccgaaattgccaccaaaaaggaaacaaaaaataattaattatttaattacaagtttcctatacacaccaaaaagaccaaatctccacaaataaaggaaacattctaaaataaatacaattaaaacatgtttccataaaatgaaaaaataaaagaaaaaatatttacaaggattcgaaaatgaattcgaaaaagaaaaaaatatgcccccctttttcttttattttttcaaaaaatgccccccaaagaaaaattgcaaataaagaacaagagaacacacca

SEQ ID NO: 276401 - DNA, 692 bp, Cannabis indica
ggtgtgggtgacatagcgcgaaaagcctcgaccattctgcgcttccactccaagaatcgagaagtcaaagtttggaatcttggaaagagtagtatagatgtagtccgaaaccgcctggtcatactgtttcttgccgttctccttctcagtttccaggtcacgagacatctcttcaatctttgccttggcttcaagctcgacctgttccttggccttacgaagttcctctagttccttggctttggaagacgcatcctgcttcagtttcttaacatcttcttgaagctgagcaatatgcttcttcgcgatttcaacttctttgggccctacaacaaaagcctttaccaatgtagccatgaactgcgaagctaactccgcagcacgaggaagcaactcttctgaagatgatttgtcaatcctcgacaaaaactcatcactgacaaacctctcctgaaggtacagcacatgacaagctcgagccgctggatcgatcacgaccttcttccctttgtcttgaacacccttagcaggcctcttggaggaatctgcggcacgagtgacaaccacatcgcttttcctcttctgggatgtaatcggagaggtcgatgctgtcccaggtttcaatttgcggttgagcataggagcagactgtaggaaagtcatttctgcgattacaaaaaacaacaagggtt

SEQ ID NO: 276402 - DNA, 470 bp, Cannabis indica
taagtgttgattgctttgcacggatcgttgaatatcttactctggacatgccagcgagaaatcctgctcggcctatcttcccgagcagatgttccaagtggactccacgtgtcaacattctcgtgatgccacatcagagtgcaaaatttgggataacatttgcaccccaagtctgtacgggacctctgaggttacgtgtagacttcatccgagctggttctgcctttggatggggacatgtgttgagcgtcactgttcgagactcgatgtgaagctgactgggcgtcccttcggttttcggctaataaatgctttgacaatttatatttcgaaatccaattttctccctccacggctgacggttgcactcgattacttttgatttcccatattcgtttttgaggcaggaagctgaggcgtctgaggtttctttgagacaattacctcttcttgtgactcgcctataaata

SEQ ID NO: 276403 - DNA, 518 bp, Cannabis indica
tggtgcatcttctctttctccaaactccttacttggtttcgcaaaccgagagtagtgtctgcaggttttttaggatgagcttgatcgatccaacaaaagtaatcacatcctcgactttcgttgttctcctgaatttaaaataagtacatcaccatatttacaaagcctagtttaaaatattattaaggcgttcgaagtcttacatagtgcggacatccaaagaagcgacgacccggatttgctctactgctagaagtccaaacataagctagatcaccacagtagcaatgggggtgtcccccaagtgaatttttccatgaagggaaatccctctcgaacccgtaggggtcctctccagaaccagccaccatgttttttttaacaaaccaaattagggtgttagtgaggcttgaaaaggagtgtttccctcgaccttatggtggaaataggcttgtgaaaataaatttagggggaaaccgaatttctttgaaaacgttagaaagtatattaaaattggg

SEQ ID NO: 276404 - DNA, 762 bp, Cannabis indica
cggctaaccggttttacactgcttgtaaaatcggttaccaagattttgcagcaggggaaaacctatttttcagcttgtcgtttcgtgtcaatttcaggtttctacttggttgactccttgctagtttagggtattaccatgttaagttgttgtacatagatttttggttcaaaacctaagtcacgattatcatattagcaagtcacttatgtgtgatgttatcgatgtgatttaggagcctataattcaccgagcagttgttccactcaggttgaccggcacacctgaattcaaaattgaggtaagattagtataatatcatgcatatgttattacatgtttagcgtacatgttgttatgcctgttagtttacattgataacagtaatagtatacatagagttgtgctgattactgataaatatatgttggctaaaatactgatcgatgttgtcacatcaatatggctagagtatgactagcatgttgagtataggctgacattatggttgatagtattgtcgtatgaacgttctagactcagtaccgtgtgagacacgcggattagggttatgatcgggtgtatgggcgccaggttataacccgggttatttgtatgtttatgttatgcttttcttactgagtctgtcgactcacagtgctatgtttatatgtaggtaagggcaaggctaaagttgaagagccgtgggtacgagcagatgaaaattgtacatgtcggggagattagtgttgggttttatgc

SEQ ID NO: 276405 - DNA, 545 bp, Cannabis indica
atcaccgaatgcaatgaagccgaggcaaccgcgaatgcgctgataccatctgtccccacatggagagtgtttgtagacggagcctccaatgaaaatggatccggagcgggggttgcgatgatatccccgaccggacttcgactccaggcagccctacggttcgacttctcagcttcaaacaacgaggccgaatatgaggcgttgatagcagggctgagattagcgaaggccgtgggggccaaaagagttgaagtctacagcgactcccagctggtcgtaaatcaaatatcgggagagtattaaacacgcggcgagcgaatggctgcgtatgtaacaatagtccgcgtgagcattcttttcccgggggattctttctgctttgtagtccgtgaactcgaagctaagttagcttcagatagtgaaatcgaagggctgggggtggtacccgtggaacgcttggtagagccaagcatcaaagtaaaagaggccatactaacggttgggcaagaacccaactggctggtccccatcatagaatacataac

SEQ ID NO: 276406 - DNA, 752 bp, Cannabis indica
actatttggtatgtaatttagggttattaccctaagattctatatgtgttttgatatctattgaatacatgcatatatttcaagagttatgagcataagacataacttggttagacctagtatattactaggataaaccattgaaagaacgtaatgtatggattacgtaaatatatatgaatagggttaggggagcaaggcataaccaggttagactcggtaattataatctagataaaccttactaaggccttattgtaaatagacgtgtgagcgtaacacgtaggtctatgctacatagacatatatagacgtgtgggagcaacacgtaggtctatgatacatagacatatataggcgtgtgagcgtaacacgcaggtctatagcaaatagacaaatagtgcagtggcaccaataattaaatggtaaatatatatgttgagactaagggttatgggctcaaggcataaccaggttggactcggcaacaagaaccgagatgaactgatctaaggccttattgtaaatagatgtgtgagagcagcacgtgggtctacaccacgtagacataaatagacgtgtgagcgaaacacgtaggtctacactacgtagacataaataggcatgtgagcgtaacatgcaggtctgtgtcacacagacaaatttgaatagcattgttgtttatattgtatgatgagcatattattgatatgttttatactgtcttgctgggcttggctcacgggtgctct

SEQ ID NO: 276407 - DNA, 523 bp, Cannabis indica
aaacccatcaaaatattatagtgttgtgttgggtctctctcaaaaacttttgcttgtgaagtgaaaaaatagatgatatattgatttgtgttcgacccccttatatctatatacagtagaacctctattcaagaatactctattcaagaataacctctaatttgttataaaaaaaatgaagtcccaatttgggccagttataaataagaataacctctatattgtaattagttatacattttttaagtcccgtattaataaaatatacctctatataagaataattagatcttaaaaaaatatatacatatattttataaatttacttatgtaaaattaataattttatttcaaattatagtacatgtataaatattatatgtactcgaaaataattttaatataatatagtattaagaattgtttattggtatttttgttacattgatatttttttatattttaattttttttttctaagtgtaactctatttagttataacctctcaattagaatattatt

SEQ ID NO: 276408 - DNA, 225 bp, Cannabis indica
actcatgtaattggtttttattaatcaattaaaattctcaaattagactatgcctattctcaaattttcactagttgggtgattgaggatgtttgaaagccatcttgaccgacttcattgttagaaggatgggggacactcgtctaaaatcattcggcatcacaacaacaacctggtggttatgttggttgattgaggacgcttgaaagctgtccgaaccgactt

SEQ ID NO: 276409 - DNA, 564 bp, Cannabis indica
aaattcactaaaaacacatcagtttataaagaaaataccttgtttctttgcgagatacttaggacattgggatttccaatggcctttctcattgcagtagaaacattttcctttttgtgtattgccagaagctccagcatttttgttcctagctgcattcgcagcttgagctcgcttcttggcatttttccacttcttcttatgattggatttggaagtagaagcaacaagtgcctcaggattacttgtcttattaccatttccagaattctgaggtttattccctcttttcttgggacctccaatcaaattttcatatgtctgaaggtcattgactaaagtatgaaagtcttgttccttcttattcatgacataatttgatgtgtagggcagaaaatctggagtcaggctattcaagatgagactcacttgagtagtctgatccatttcagcaccatgattctgggcttcctggaaataactagccatctggagaaggtgatcacgcacattctgatggggttccatccgtgcgttgatgaatttcttagtcgcgtcgaaacg

SEQ ID NO: 276410 - DNA, 517 bp, Cannabis indica
cgagtaaggtttgggtttggattggggttcgactcccaatttgggtataggtctgatttggagtcttggtcctggtccggttacggttctggatctatgtttaatttcagttatgattccaagtccaagccctagttccagtcccggtcaactttcggttttggttccaattttgggtcccacagtacgggtttgggtccacttttggatttgggactgggttcaggtccgggtgtgcgtttgggtccttgtcagtgtttgggtccagggtcgggtcccaaatccagacaccgactatgggttttgtccaagcccttggtctagatccggatccatatctcagatcggagtctggttgtacttctggtgccgggtcttgagctgggtcctaggttcaagttcgggtatgggtcgggtactaagtcccggtcctagttctatttccctggtccttatcctgattctgggtccaagtcccgattattgtgtgggtttgggtcccggtctaggttcgggt

SEQ ID NO: 276411 - DNA, 736 bp, Cannabis indica
aaaaccacacttcatcattctttacctcactcactttcattttcctcaacagtagttgatgcacaatcaccccggagaatttcagttcattcgcattccaaaaaactccaaaaggagtttccttcaccctctcggtcaggttaaaggcttcaaactttgctttaatagaagcaaagtacccatttcctcggtaagtgatacgcccaggaaaatgctcagccaaggggagaatgagttctggagccatctgcaaatacaaacaggaagattataaatcgcacgtacgtcgcatagaaattgcacagaaatcgcataacagccaatgaataacatacaacatcgcacaaactcgcacataaatcgcacattaatcgcacaccagaaataatcctggttggcaatatatttgactataaatcgcacaaggcatcgccaaaaatcgcacaaatataataattgcaaacacaatagttataaaatcgcacaaagtcgcacaagaaatcgacaaaaatcccacaaattcaacaatccagatgcagcagtcaattatcgcccaaaatcgcacataatcgcacagaaatcgcacagacaccccacaacgaaacagttcttattttgtatccttaatcgcacaaatatcgcttacacgtcgcacaatatcgcacaaattcaaaaaaaaccccaaaatctatctccctaaactcagtttcttccccaaactctaaaattgataaat

SEQ ID NO: 276412 - DNA, 681 bp, Cannabis indica
cgcaggattaaaaactgttttactaaaacgatcatatctggagttctagagctcggattgaggtgatttcagtggcgttggaaagataattcaaagatctatcaattatgtagaaatagatttatcgtaattttaactttattggggtcaaaattaggttacaaagtgacgacctgttaagtttagtatagaaaccctaagttttaaaatttaaatttaaaacttatatctaacaaataagatttttatttaattattctatttagagttaaattagcatcagattataggggttattttattattttcttttataggtttaattagattataaaacctaaatctatcacattcttgatacgtaatatgcagagcctctaaccctaagaaaaataaatctcaatctctttctttcagcctgaacacaattcttagagaagacactcataaaatcctataccctacaagttatccatctcgctacctatcaaagatttataattttccttcttgtttcattctcttcgccaaacaacactcatgattttcatcaacataacattgagatcatcatcaccattctaataatttgagatttcaagatctagcactgattaagaagagtcatcaagaggtaagagagttcttccatgttgtgaacttttaggttaaactatgaaa

SEQ ID NO: 276413 - DNA, 503 bp, Cannabis indica
gatacatcttttagttcaatgggtgaagaaacgaaacaggtttaggctcaaaagggttcacaaaggatattcattttatggtaggcttgaaaggctcaaactatccaaacaaactgcctaaatcatgttcctattaaatgttgtcaaggatttcgcctcaaaagaataagacatgcaagttctaagctattcaatcaatcttaccacaaaccatagtaaaacaattataacatatttcacagatcgtcaaattatattcatacacaggttttacaagcatccaaactaatccaaagagttaacagaattaagcacacagtttcaaaatttcaggacatatcacaaataacaacagcaacaaaattgatcttggcttaattaacaacacactaaaccacgacaactaaaaaaaaaactaactaaacaactaaacaatcaaacaaataaaaaaaaattaaaattaagcccctcccccaaactaatttttcacattgttcccaatg

SEQ ID NO: 276414 - DNA, 519 bp, Cannabis indica
atttagggcacaaaacacaacaataactattcccattcatccattctttgtagaggttttggcctacttcggtgtttccccaccccaatttgcgcctatcagctgcatcatcttatcaagttttgccatcaccttctaagagcatctctaatggaggtgtaaataagtggtgaaaagctaaaatatagctcatttaacaaaaattgtgctccaatggtgtgccaaaaagtgatgtaaatttggcacatagaaaattttgtgccaaatttggcacaacatttgctatgatgtaaaatttacaccacaataaatgtactatttttcatttacatttatgttatttatattattttattagtatatttaactatcacattaaagtatgaaatatttatattatttttttattgtcttacatattaaaataataataaaattgattataaagttattagattttattttttaaaaaaaacattaattagatattaaattttacaattgtgcattggagcacaa

SEQ ID NO: 276415 - DNA, 694 bp, Cannabis indica
tatcgagtataggttgttactctgtcaaaagtaccatcgtacgaatgttcgagactcagtaccgtgtgggacacggggattagggttgtggttaggggtatgggcgtctgatcataaccttggatatatgtatgttatatgctttatgcttttcttactaagtctgttgactcacagtgctatgtttatgtgtaggtaagggcaaggccagagctgaggaaccgtgaggacgagcagatgaagagtgtacatgtcggggtagttagggctggagcgtacgatcctcaaaacatcagggcttttgtagttagtggctgggtgacaaatattttgtaaagaactagtaaacttttgtaaagtattttgtaaatgggatccgaaagtattttgtatgctatgttataagtatttaattaaataagccaaattttaattaatcacgtttttcattaacctcgttgattagcaaatagctgcacagtacgtttaaaatcacgtcaacacgcctacgatagttagggtgttaaaatttggtatcagagctgcaggttgtctttcgaagatcgtcacgacatgtacaatcatcatcatcagcagttagctcgttctacgattcagtaagcttttcttgctttagtagtttatttaaatagtatgaactaataaaagcctgttaggaagcatgttagtagcc

SEQ ID NO: 276416 - DNA, 489 bp, Cannabis indica
gcaggaaactttcaaaaaatcatagctctttcaaatcaaatcaaattcacacaaaaccttccagacctgttctatataccccaaagaacaaaaccaaagtaccaaaacagcccagaacacacagatactaaaaatgccatgtgagctccaagctttgagttcaaaactcaaacttggctaaagctcacctacaagcatcaaaactagattgaaactacataatcatggatagaaaagctgcagaaaacattctctaactcatgcaacaaacacaacaaccaatttcgaaatttctcttgaaaaaccatagttttgagtaaaagttcccaagcttgaatcaaagcaacaaccatgcatcatacacagctctaagctactcaaataatcatgctttaaacctcagaaacaacaacaaaatcacagcaacaacatcaacctaaactaagcatgcaacactcatctttttcatcaaaatttcaagaaactaaa

SEQ ID NO: 276417 - DNA, 887 bp, Cannabis indica
aaacacaactacgccatggatgaatactcccgggggaatgctgaggtggaggccctgaagaggatcttacgaattgagatgcaaaatactctcaacaacccggaataccaaaatctgtgggatttaaatttggatcccttgtcggattggttcggtcgtttcctcgggcccacattagctccctttgccgcggagatgaccagcgagtttgcgtcccagcttacccggtgtgcacctaggcggttcgctgcttgtgcatccttgaactccatcttccaagtccaggatctcagccactccctcactgtggtaagtattttgtagtttacttttctccttattattttttcttggagattcttacttatacttgtatcctttcccagcttgctgctgaggccggccgcctttccaagaacataattaatcatggcttcgtcctgtccgattttggggacatggatgaagttaggaagatccttcaggaccttactgctgaaaggcggctttatcaggaggatgctgagcgccgggaggcccttgccaaggccagtgaggaagaggccaagcggagggaagcgcaggcggaggcaatgatccgggaggaggcccttcggagagataggctggaggccaggcaccaagaggagctgaggacggagggcgaagccactgctaaggccaggcgagagcttcgggaggccagggaagccttggatgaaatggctgccaaggtgaggtccttagaggaaactcaccgggcaaacttggaatccagggccaacctggccgcggagctgaaggagctcagagacttcaaagaccaagcctcaaagaaggcaaaaagagatgagctctttctcctgtctcctgcagccggtgcgcca

SEQ ID NO: 276418 - DNA, 560 bp, Cannabis indica
acttgaaaagaaatctcccgaaagctttgtaaaaccttctcccaaatgtagcactattgttcttcttctttgtagacttgaaaacaaactcaagacaatacaatatacaaataaacagagtaagagtccaacatgctcttctctacaaaacaaagacactctttcgttaagatatgaatacaagtcaaagcgtatgaaagagatactaaacctagttgctatgaggtatatttataatcaatatacaccttattgacagctcatacacggtctgaacaagatcacaactcactaaaaaattccctaaaataaaacttcaatcagcctaggaatttctatttctgtacttatagaatcgtgagcagtaagagcgactttccttttatagaaaaggaaagtttaactctagttttctcctcaagaaatctgatcaaacaaaatgggaaactcacacaagatcacaatatcatagctggttaggtagaaagagatgagtaaccaagcttaccatttttaccttattttccataaataggaaagctagacaactttccttctaa

SEQ ID NO: 276419 - DNA, 428 bp, Cannabis indica
ttaggaattattagcaaaaagggaaagtggtggaatttagttttcagattctaatattattatttaaaattaatcaagtaatttaaagaataataaatacgaagatattgtattaaaagaaggtgggaatactaattgccaaatgcgaatttattgtattcagatatatttgagaagtcaaattttatgaaatttggtttgtaatctatgtttttatggtaacttaaaaggatacaatttttggaagttttacaacttttctattggaaattaaaataggaataattatgtcataataattaaattggattattttaagtaatttcaattcaatatagattgatttgattataataaagttttaccataaataaatatgtataaaaattacttttttgggataagtacaataaaggaatttgtaatat

SEQ ID NO: 276420 - DNA, 537 bp, Cannabis indica
gtgcaaaataactatatcaaacacttaattattcaaggttataattgtaattttatcatcaaatttttaactaaaaggacattttgtttttttttttaaaaaaaaaaaaggacatttattaacttaattgttagatttagggtcattttgcatcttggtccattaaaatattatattgaaagacattatcttttttcttttatttatactcatgtcacttctaccactagtacacatttcttctttcttgctttttttttttcaaaaaaaaaaaaaaccaaattgctaatttgacagtaggttaactcaaaaaaaaaaaaaatagctaaacgcatttggtacgtcctccttcctccagtaaaaagtagggctcacatgcatgagtgtttgtccatttaacataaatatagaaagatagaagtaaaaaagaaataaaaaagcaagttaacataaaaaagtgaaaaagaaaactgattttttagtcctcttcgtaaaaaaaaaaaaaaacaaaaaaaaaaaacaaaacaaaaaccaaac

SEQ ID NO: 276421 - DNA, 727 bp, Cannabis indica
aattttgctaattccattaaaccgacattctaaaattcctaccctagttcggaatattcttaaaagaattcttccataaatgttgtgacatttctaaccaaaatcgccgggcctaatatttattaaataaattctcaataattatcccaatataatctccatattaataaattacgctatttatttcattgagtaaattctcaataattaccctaagtaagatcataatcttacttcattaccaacataattacatatttagtaaaatatgcctatttaaatattatttattttcgggatattacagtcacctaggatgtttaagcaagcattgaccaatccaagcgtcaaactttgcctcaattttaggagagacgggatcagcaaatgaatcattaagagcataaaggctcttcacataagtaaccatcttaaaatccctctcatcccttactgattgagaacctgaggacattacctccattggagtgctcctcacatcagccgacccgaaatcaacaaaaggagatttcaatgctggtgcacgctttctcttatccaacagaggagtaccagaaacagtgtccttagcttcttcatcagtatgaatggcagctgacttttcgccaacaacatctgcattgggttgtgggacctaaaaaaaaaaagtctgaaattaacagttgcaaaacaacataaactttaagcaacaaaataaacataattt

SEQ ID NO: 276422 - DNA, 568 bp, Cannabis indica
atccatgaaggacaatagcttgaacccagaggttccctccaccatctggtcaattcggggtaaagagaagcaatcttttgggcaggctttgtttaggtcggtgaagtctatgcacacccgccatgtcccatttggtttgggcaccattatcggattggctagccactccaggcaatacacatctcgaatctggccatcggctagtagcttatccacctcttttttcagagcctctacctttattggatcaacgggacggcgcttctgctgaactggcagtatgtccagattaacgttcaagacatgggtaatcacatgcggacttatgccgtccatatctccttggcaccacgcaaaaacatccgtggcagcctttagcgctttaacaattttatctttctcctccggttctaggctctttcccagtcggaggatcttggtagggtcgaggtcgcacactgacacttcctcgatgtcttccatgggttttacaattttttcggatcccacatggggatccaactcatctcttttgccagttttggctcaatactttcacggaccatta

SEQ ID NO: 276423 - DNA, 522 bp, Cannabis indica
acgattttttgttacaatttaagttgcagcgctagttgcaatagggatttctatgtagaatttcgtaaaaatgcaaaataaactatttttatgtgtaaaaatgaataaaccccgaacaaataacacaaaataactcaaaccagttataattaaaatagaacttattctatagcagtgttataatgaataaaaacaaataatacgaattaactcaaaccattataaataaaataaaactggtaatatagcataatgaatacaaacaattaacacgcaataactcaaactgattacagttaaaaaataaagaggaaatcagttcctaaaacactgaaacataaattaaaaacgaaactagttccacaataaaatatctgatcataatacataatacctcataaaactggttattatttttttttttttttttaaaaaaaaaagtggggatcaattccaaaaaatattgagacataaatataaaaagaactgcttccataaaaaaaataaacacaaataataaca

SEQ ID NO: 276424 - DNA, 636 bp, Cannabis indica
gtgggtaattaattttttttgtaattaaaatcaagcatgtaaaaacttctttatagcagaagataaagtaatgagaactatggggaccccctgttttcaaaatagtacaaactagtttactagtacttttacaatataaactttgtaatcctaaaatactatcaaaatgaatcatcctgttcactgggccgatacactgcggctgatatgtacattgctgctacgacctcgaactcatggctgctcaacctttggtttccccttacctgcaacataaagcacctgtgagtcacagagactcagcaagaaaagtgaaataaacaataactgataataaccatcaattctatctcatgtcagcatgcttacacatttacataacatcataaaagcacaatcttggtactttataaagtaccccttttaccactcgttaaccacgagctgtatatgtcactatcgttgcccgatgaagcaaacgataagtaagaaacctaaccgcggtttcaagagtaattactcgtaacggtattaaccgtttccaaccctaggtcataacctaggctcaacaaatatctaatcaaagtcttgataataatcaaggccataaccattcaaccattaataattagccat

SEQ ID NO: 276425 - DNA, 775 bp, Cannabis indica
aagtcagcactatgttgggaggcgcagtgctcctcgggagagatcccggaatcaagggcaggggccggagtatcagctctccgctgccgtttgggcacctcctcggcaaccatcttgcccttgcgcttgcgaatcagagcaacttcttgctcttcttcactttcttcaacttcctcaggaagagcccattgctcttcttgaccttctttagcttcctcaggaagcgcctcctcctcatccactaagtcaatagtgtctggaggggcactggaagaagctttcaagggagtggccacctgggaggaagttaaaggaaggggagcgtcaggagtgtgagctccggcaagttcggccaaaatggcatccatggaattacctgctacaacaaaagaaaaaaggcaagtgttagaatatccatggaaacagtaaacactcgaataaagcaatcaagctagtcctaccctgactctctaattcggccctagcaaagttccgaatcttaacgctggcagcatcatccccgagatagctgtccgaaggccggaaccagctggaagaaatgtaggccgaagggtccaagggaacgggctccggaggaccagaacccatccgggaccgacctaggaaatctcctaagttggaaaaataataatccttaatatggtctccccaccaggtcgagggcatcctaaacctatggagacgctcatcgaaccctacaggcctaagactggcatattcgccaacggaaggaacataatgttgggttttatgc

SEQ ID NO: 276426 - DNA, 774 bp, Cannabis indica
tgaagaagagcttgcttgtccatttcccttaggattggtggctttcttcttatgaaacctttggtcactagagttgttgggagtgaactttctcttgtgagaattgtttggattggtcaccatggagatacttcttgctatcccctttttcatgtcctcttcttctttggcaagaatagcagtcatctcctcaatggtccactgctccttttgagcattgtagcttgatctgatcgaatcaaattgagaaggaatggtttccattacaaaccacaccatgtaatcctcaccaagatccaatcccatgcccttaagcttctggtaacaacccatgagcttgtcaatgtgagctctaatgtcacccgtatcagcataattagtgcgatggaacaaagttaagcactcatttttctcattctttgagaacttcttatacttttccttaatggcagcaagaaaatcttttgcattttcagtttgaggaatactatcacgaatggactcatccatgtgatacctcataagcatcaaacaacaacgattggaatgctcccaatcctcataggacttcttgtccttttcagtggcatcatcagcgggtttaggcggtgcatccattctcaaggccaagtccactctcataagagtcaaatttagcatgagggattcaacccactgcttgtggttggttccatttagcgtcaacatggcagagtttcttggaacgcttaaagctgaatgagaaacaagagcaataaccattaaatgcatgtt

SEQ ID NO: 276427 - DNA, 532 bp, Cannabis indica
tcactcagatttgcctagcgggtaatgccgctattggggacgatgaagaacttctaagagagcggatcagcattgatttggtctcgattcagcgtgttgccactcattgcacaccctcgactgctcctcccaaacgtcaccagccatctagcagtcagacgacttccgccaatcttcctcgcactcagcacgaacaaatcatggatcgcctagcacaccttgaggagaagcaacttacctactttcgctatgttcaggcgcgtgacactgcattagcaaaatctctaaagcgaatggcgccaaggccgatagttgacttcccagtgttcccacaagaagtgtttgctcgatgggctgatccagaagctccggaagactctagcgcttcagaggatgaccccgagggatagacagagggagtactttttctttcagcttcagtatttatttttcacttgtcttttctatttgtgttcttgttttttctgttatagttgttgttgtttgtcttgttgttttatgttcgggttgt

SEQ ID NO: 276428 - DNA, 463 bp, Cannabis indica
atgaaaataaaagtgttgagaagtgatagaggaggtgaatacttctctaatgaatttactcatttttgtgaggaaaatggtataattcatgagagttcggcaccacatacaccacaacaaaatggtgtagccgaaaggaagaatagaacatttcttgaaatggtcaattctatgatagtgtactccaagttgaacaacaacttatggggggaggcacttttaaccgcatgtcatattcttaatagaatacctatgaagaaaaatgacatgtctccatatgagttatggagaggaagaaaaccaaatattggttacttcaaagtgtgggggtgtcttgcttattgtaagaagaccgaaccaaatagaaccaagttgggttcaagggccataatgtgcatttgttggttatgccaacaatagtaaggcatatacgccaatggatgtggaatccaatgttgtaatt

SEQ ID NO: 276429 - DNA, 532 bp, Cannabis indica
acatacacttattctgttattcttaacataaaaaatactatttatggtaatttattaaagatgttccgagatacacagttcggtcaaattttgaacattccagagtacaaattccatccccaaattgctcacatccttttattaaattgaaggaggttaattaatcaccccaatccgaaagaattttgggaaaaagttattgcccgttatatattcgatttagtgaaggggactcctatttgatatctggtttggaatggtttggagattgtaataattttttatttagccaagaatcaaaccagtttgtcaatatatgctttcttggaactaaaactattgactgttgtcaattaataacattttctttatggggtcaagccaaatgacaaataattcataataaaaaaagaaatgttagggctttcaatttcaattctatctattgattatgacctaatatgattatcttcctattacaaatttctatacaatagcaggtttactaagataatttatagtcttctcagat

SEQ ID NO: 276430 - DNA, 693 bp, Cannabis indica
aataacaattctagagcatcaaacctacccagaaatcacacatgcaaaattcaccattggagctcaagctttgagttccaaactcaagcttgagcaaaccacctaaacaagcaatcaaactagcttaattcaacataactaagcataaaataacctctgcaaactaacaagaacaacagcaacaacacagaacataatcacaacattttccttccaaaattcatactttttcacataaaaactacaagcttaacaatctaacctacatgctttcaacatagcttaattcctatcaatttaacatgctttgaaccacataaaataatcacaaaacacagcagccaacaacatccaaaatcacatgcatttactcatcttttatcaaaaattccaagaaaacatagaaggataagttcaaggatcttacctacaattgaattacacttagatgagaagaaaatcacaagaattgaagagaaaaatctctgccctagcagccaacaccaagccgaaatggagagaaggaaaagagagcttgagttttttctatttttcttaaatttgactaagtgtaaaaatgtttgagaaaaaggaatttaaatcacattattcatttatttcagccaacaattaactccaaataaacatttaatttccaaataaaaactcacataagacaaaacactaatgggg

SEQ ID NO: 276431 - DNA, 664 bp, Cannabis indica
aaggggaagatgaccgtgacggaagcagcaagaggccaacaacaccaccagaaccacctcagcacacccggacatgtaatgtcatctccggagggtcagaggtcagcggcgtaacatactcagccgctaagaggcatgcacgtgaaatagtcgggacagagggtagaccaaagaaacaaccagcagcctataacggccagaccatcagcttcgtggacgacgaagcttcagatttgctcaatcctcaccatgatgctttagtcatttctttatttatttcgaattgttttactaaacgtatactgatcgataacggtagctctgctaacatcttatttttgaatgctcttagggagatggggatcgacgaggccaccatcatccgcaaatccacagtattggttgggttcagtggagagcagaaacactcagtcggcgaggtcacactccacgtttatgcagaaggagtcaacctacagacgaagttccttgtagttgactctccatcagcttataatgcaatcttgggccgaccgtggatccattccatgaaagttgtgccatccacataccaccaagtgatcaggttcccaaccaagtggggagtgaaagaaatatggggagcccaaaaaactgctcgagattgttatcaaaactcgctaaa

SEQ ID NO: 276432 - DNA, 555 bp, Cannabis indica
tcagattcatcaacaataggtgcgagttaatgcaactaacaggatgcattttcacactattgagttcatttgctaagagattaatttaggaatggatcggggtgagggttattcatattggcactacaacatatcaataaaacagaagtaaggttttggctctataaattcatacacaagttcaaaaaataacaaataattacatatgttataaaaatactaaatctaacgtagttaatttttcaaggtttccaacaaactgatacagtgtcccgtttaggcgagagtcaaagcgtcatccattgaatagagttgtcaattcatctaaaatgataaacattctagcaactttttattcgatcaagattggaatccagcgttaacccgtttaggcgtgagtcaaggctattctatcttatgagcttccaccattgtttcatactcttgaaagtcttatacagtcgctaccattagggtgatcaatactaatataaaaaacttacaagaatacttatctttcgagattaaacgatgctaacttgctaatgaacgttc

SEQ ID NO: 276433 - DNA, 694 bp, Cannabis indica
aaaagggtttcagatgaattcttacattatgtacatataatcatgaaataaatcatgtgaaccatgcaacattaaattttatttctgatctatattaataagcaaatctgattatattgaactgagttttatttagggcataaaacccaacactgacttctcacgagattgagaggctcgaagttccttctcagcagaggcttgctgggctcgagttcgagtagaagggcctgttggagtggagccaggcattgatgcagcaggaggtggaactgccaatggaggaggagattcctttgaagattcagaagaggaagtccaggtgcgaatgggtcttaccgatttgcgagcaacttgcttgggtggacgttttggcttctcggtttgagattcacgctggggaagcgatgaatctccaggctttgcaacagcaggaggatgaactgaagcagcagggggagcattggaaggagttgcaacggtttcttccaattttttagagtgccctagattcttggttctcaccattttggatctgaaaaagaaaatgaacagaaacacacaagaaacaagaaagaaggttcgggtaggtggtgagttaaatgacaaatattggtttatataaccttggaagcaaaacaagaaagggaaaccaattttgaaaattttaaaaggtaaccgccagcccatgaac

SEQ ID NO: 276434 - DNA, 648 bp, Cannabis indica
ttacaccagtcacaaccatactctaccaagtgatgtgctagagaaagggaaattcctggtcaatttactagacaaaacatgtgaatgtaaccggttccagcaagatgaaatcccatgtgctcatgcaatagctgtattctcaaaacgaggattgcgagtttacgactatgttgcggactactacaaaactgacgaaatgaaagcaacatatgacacaacagcaaacccattaccaaatgaaagtgagtggacactgcctgagagcttggaaatgatagtcctacccccaaacacaaaaaagagagcagggagacctaggaggagaagaataagttcaaaaggagagccaaaggtacaactaaagtgtggacgttgcaagaagacagggcacaacagaaaaacatgcactaatccagctctaccaccaaagcaacaagaaccaaaacaaccaaggcgcaagaaagcaaagacacaacaagaataaccggttttattgaatacaaagatacatttacaataaaaaaaaacactatatttgattttgtatgttccaataattgtttcaatatttgttgatcatgaaatatatcttcaaacataattggttttgaaaaaaaaataaaaattttcataatatagaattgcctt

SEQ ID NO: 276435 - DNA, 595 bp, Cannabis indica
cacatactggaaaataaccaattttccagtaaacgaaaagatactagaaatactcagtaacacaccattaaatttacacaaactcttaatcattcttccattcccgctactgtaaccatgggcagtttcttttcaaatggcctactaccccacattgaatgtaggctctcatgtagcgttcattttactggtgtcccttgcatctcgaccctctaaatgggtttacaaatcttttgttcccaccatgtcggaaactttggttactttaaattctcccactaggacccataactggtgggttggtaactttttttaaaatctttagggttaacaccttttacccgctccaacactagacatttactttcatgaatctcctttcatattatgtctttcgtgatctagttcttgcacccccagaagtaagggttagctcaaccacctgagcataaaaccagacaacttctagttgcttagccattatatctacattctgaatgatatactcttttccaccttcaattagatttaacccttctagcagccttagcaactactccatcaaacgaaactttgccaatccgtccagcttagt

SEQ ID NO: 276436 - DNA, 878 bp, Cannabis indica
gcaatctttgctaatcaaagaattttcttgaaaaacgtgtcaaattaaaacttttacattaattaataaactttataatatattaaaatatttacaagtgccgggatcccgttttcaaactttttaaacttaatatcccaaaatacataatttacaggtcgctcagcgactacaaaatataactcccagatgtcccgagaccgaacactccaggtcgcgccgcttcgacatgtacaatctcaccctagctcaggttcactcctgttcagccttcgcctttcctttacctacacatggaagtagaactgtgagtcgacagactcagtaagaaaagcatataacatatcatataatttctgacttgtacttaggcgcccatacacctatttacaaggcttaacagatgagtacgaacgttccatactagggtatagccactataccacatacactacgtacctcaatgtacgagtgtcggtagggtttgttcataccctgagtacccctgagtgatataccacgcactcccagtacctctccgtacttatgctggtatcacggtactctcagataacattcactataccaatacactctatactataaccgtataagtgttggtagtgcaaataacattttaagcatgcatatacacataactgttgggttttgtgccctaaataaaacctatttcaatataatcagatttacttattaataaagatcagaaataacagtttatgttgcatggttcacatgatttatttaatgattatatatataatgtatcaattctatttaagtccagaacatatgaatttgttaatgattataatgttgtcagcacagtggaatataatcttaattatatgttcgaa

SEQ ID NO: 276437 - DNA, 866 bp, Cannabis indica
tatagtgagatttctctcacctagaaactcgagaccagacccctctttgaaggacacgtgtatccagacttccagtgaaggctgaaatgtccaggagagacttctcgaagtttagacctcgcccaggataaaaccagcgaggtatcgcggatgcgacttaattcacaccgcataaccgtaatcctcatcatacagggtagacccaactcgcatatgtcagaacatgtgcgagtgcctccctctatacctccgcggcaagtatagaggccaatgccctatgatgcagttttggtcccaatgacccaatagccctaacggaccaatgtaagttcgcatgtccagatgctaccaacttcagcatgcgacgtctgtaacgagcgatcacctaaggacgcagacgttccaaacgtacgtgcgaccctacgaactcaacagacggaacacgaacggtcaactcgcagatgcgaaggacgcatacgttgatgagttcagtaactgtcatatatttattaatgttaacgttgtctgagtttaatcatgacaatttaatgtgtaaataatggattaacaataaatgtgatcctcatgtaaccgattgggcacctgctttgtatataaaggggtgatccaccatgaaaatgcacctacgaatcccttgctacagtggactaagcagaacaaaatctgactgaaccactatatttcattgtcttctgtattttttccagctttgttgtctgttctcgcattcctatttgagtactcgccgttttaggttgaatactcgcatttatcatctctcaaataattctatcttttaccagctaaattacacttcttggtgttgtgaaattctagtaacaaca

SEQ ID NO: 276438 - DNA, 736 bp, Cannabis indica
acctaaaccgactcagagggcgcaccttccttttaccaatccagcgattattcccatagaggatgtggtaatctcaatacccattctccgatgtggggtatcagtcccttttcatccttttatcgcagctatcctcaaacgttatgacgtgtctcctttccagctaacgctcaacagttatcgcacaaccctggctttttatgcgatgtatatggagtatgtacatagggctcccacagtagaagagtttagctacttctatgatataaaaagcgtaggccttcacaatggtttctactgcttcagcaaatgggcgacttttgaaattaacggggtagaagggatggtatctaatatgggagattggaaatcaaagtggttctacatattcaaagtcccagggattagaactgactttaaccgtcgacctagtacgtcgcatgtttcctgacttagacatttttctaagttactttgaggttttaagctaactcgctcttttttgctttcgcagatagaccatctcgtcctacactcgacgcgactcgcagggagacagctgaagttcttgggagccttcctgtacaagatcgcgactggcgattgttatgtacgactgctaaacttcgcgaacacaaactgatccctgagaacgcgagtctttggagagagccggtgtataaggaaccttctgaaaagcaacaagagcgaattgataaacgtctttccaagcaaa

SEQ ID NO: 276439 - DNA, 629 bp, Cannabis indica
taataaatctaagtcaaagttcaatatcggtcccttccgatgcatactccatgcatccaacctgagctttactttaaccaatgctctggaaagaacatagcacttctccaaatgcaagtaaactctgttgtagattatcatatcagtaaaaccctatgtctgataaatctaggaaactttattcacatagtcatgtttacttttcaatgtgttgacggcacaataaacaggatcaagtatgtgaaaagggtttcatatgaatttatacattatgtacatataatcatgaaataaatcatgtgaaccatgcaacattaaatgttatttctgatctatattaataagtaaatctgattatattgaaatgagttttagttagggcataaaacccaacaagatattaattaagaaaaaaaaatctatttaaaaaatattgaaaagtgtttttttttaaaaaaaaaaaattgaattctcaattaagaaattcaaaagtaaaaacattttataaacatattttgaaaatattttcactttttcaattttaaaaactacaaaactagattaaaaaagtagttaccaattatttattgaatttgtagtcaagtttttaactaatttttttaaaaaat

SEQ ID NO: 276440 - DNA, 1369 bp, Cannabis indica
atttggaaatacatgatatattgtgttatcccaattttttgcactctaacgtggcatcacatgatggtgacacgtggaatcgactctgagtatctgttcgcaagatataatccgaacagagtacctcatatgcatgctcgaggtaaagcaatcagcaatccgcgcagagcgaccaacacttagcgaattcagctttcgcatcgtgagtcatcaaggaaatccctataactcggggatcagattacaaggatatggcaagctgtccaaatcccacaattggtgtattctgtatttactatgcaatctttctacttatatccattgtaacgaaaagggaaatacttcatctccaagctcatagccctataaatagtgatgcatattcactgggcaaagggtcgaaagatttttccttgagagatattgtctaagaattcatattcaaagatattgttgtaagagctataagaaaaggaacttttctccttgttcttgagttaatacaaataacaaggattaggctattaccgaactactcggggctgaacctctataaaattccagtgtcgttatattgctttattatatttcaatcgttataaaccacttatcgcttactaaattagactcactgtcgttggctaaaagcgaggtcaacattttggtgctttcattgagagaagaatcaacagttgctcttcattctaaatctaaccacaagtccaatggtggtacagactcgtaggggcctggttgatccggcaaatccacaggcggtggatcctgcattgcagaacccaggaaacacaagggttttgccagctgttaatctcgagcaaccatcaaacgcgggtcatggtgtaacgactcctctggatgaaatcgcgcctggtgtgcaagagactgggaataccagtttagcacccagccagggcattcataacatagttgttccgcctactaccaacgttcgaacgaccattaaagatgatactgagatccaaaacctccgcgatgctcttgaactcatgcaaggtcatacaaacaccctacatcatgatcaggaggaactccgcgctgcggtaaatcttgcgttcgaagaacagagatgcatgtttgccgaatagagggacaaagagatggaagcattaagggctcatcatgcagagattgacaatcgtagtcagcaagctactgtgttgatacgaaaagcctatcaaactgttgggcagcaacccccaaatgtcatccccttgggtgagacagacgaagatccagcaatgaatacttctcagactataaatggtcagccgccaaatctctggtcacaggttacgcttgtgggccaagtagtaggtgggcagacctt

SEQ ID NO: 276441 - DNA, 737 bp, Cannabis indica
gcatcacagagattttgcaattcggttgcgtctccgatggtcgtctgggcattggctccaggcggaacagtcgtgttatgaatgccctagctgtgtgcggaactgttattcccagtctcttgcacaccaggcgcagtttcaataacaagagttgtttcaccattcaccatgcttctcgtctttccagggttgacagcaagtggaacccttgaactccctgggtcctacaatgtcggatccagcgtttgtgaattttctgggtcagacaggcctctacgagtttgcaccatcgtgttaaatgtcgaaaagagcgatttgcgatcctgctctcaatgaaagcaccaaaatgttgacttcgcttttagccaacgacaatgagtctttttacaagcgataaacgatatgtcgtaatgaatatataataaagcaataataagacacaggaattttatagaggttcagccccgagcagttcggtaatagtctaatccttgttatttgtattgactcaagaacaaggaagaagattccttttcttataattcttacaacagtatctctgaatatataattcttagataataatatagtcatagcttagctgcgtatcgactttttatctctccgtccccttacccagtgaacattcctcactatatatagggctggaaaacttgaggaggaagagtttcctctctcgttacaatgcgcaaaacagaaagatcgtgtgatcaatg

SEQ ID NO: 276442 - DNA, 577 bp, Cannabis indica
tatcattgaattctgaaatgcatgttatgtcatttagtgattttcataattttgcatttccggtgcccggtaacatggaactcggtgttttggctcagtaaaatcacaacttagtatgttagtattgtgggacattttattagacattgggaatgtcgggattggccgggaatttagaatttcccaaaatacccctttagtgctctttatgttactttagtgtgaaggggcaaaatggtcattttgccccattgttagtttgtcctttagtggactttatttggttaaattatatggttttaattgaaaagtgttagctgaatataaggttggatttgtatgattttccctttatttcaaaattagaaaagttagaaaatttaaaagaaaaagaaaagctctctctctttccctcttgtattcggccctccttgagcagcaagaaggtgggattcttcttggtgattcaagccctttgtagcaaggttttagtgatcaagttgttggtatgtcttccttagcttttctttaagttttttttttgaagttttgagaaatgtttataagttgcatgctt

SEQ ID NO: 276443 - DNA, 560 bp, Cannabis indica
tcctttgtctcattgttatttctaatttctatttctattaatcatttctcattcccagtttgagtactcgtcactctaggttgaatactcgcacttgttctgttattaataatatcatataaaattggtgttgcaaaattcactcgacgacatttggcgccgtctgtgggaagtcgagaattaaaatattaatcatttcaaataagaatatcctcatggctggaaaccaaacaaacggaggtgctaacaacgggtccatcaacaccggaatgatgaacgtaccgttatctagagctagaacaccgcctgtggacgtcattaatggtggagtagggaggagcaacatcagacctctcaatctgttccttgaaacagctggtcctcaagtcggggaaacgtccacacaaccagcaaccatgcactttccacctgtcactctggtggtgatatctgagggaatcatccagctcaccactgatcaatacacagcgatccaggatcaactgcgtgcactacaggccgaagtggatggacaaaatcgggcccgacgccccctcgag

SEQ ID NO: 276444 - DNA, 645 bp, Cannabis indica
aggtgaattgttgaatatataccactctacttgttcacgagatgcgcgatcaagtggccggagattgccttttgtgatgggtcgacattgagattgaaacacagaaagctttcgtgggacaacctcatcttcattacgatcaagacggttaaaccttgtttcaacccccttgaaatacattgaacaaaatgtcaaagcctcatcaataacgtaactttctgctatcgacccttcaggacgtgctttatttcctacgtagttcttcaattttttcatgtatctttcaaatggatacatccacctcataaaaacaggtccacccaaaattgcttcttcaggcaaatgaaggaccaaatgaatcattatgtcaaaaaatgcaggaggaaatatggactccattttacacaagattaaaataagatcttgttgagcaacctccatgtctttaacatttatagtccttgaacaaatttgcctgaaaaagttgcacagttcagagatggtggtcgatatagcgttcgggagaaacttgcgaacaccaacagacagtaatcgttgcattattacatggcagtcgtgtgacttcaatccgatgacatttgttaaattttcatttactttttttttcaaattcgaacaaaagcc

SEQ ID NO: 276445 - DNA, 463 bp, Cannabis indica
gcttttattatttattttttcattattttaatgccaaataattctaatctaaccctaggtggcatactataaataggtagtgatggcatcagaaaaagattatgcatcttattccatcagagaaaaacctgagtgccttctaccattaacctagccgccacctcccttctctcttcttccctattgaaactgaaccccttgagtgatagagtgagtgcccacacacatcaagtggtccctcaatcatagtgtggaagatcgtgaagaatctagattaaacagaaggacattctggctcagatcttggtgatacaagggttcgagatctgagtggaaggagacatcatattccgctgcaaccactgtaaggtttttcatactttatatgtgtttatttgtaatcattttagaagttcatattgttaaacatgttgggttttgtgccctaaataaaaccctttac

SEQ ID NO: 276446 - DNA, 364 bp, Cannabis indica
cgacgatttattaaggacttttcaaagatctccaaaccattgtccagtttacttgttaatggcgttccatttgagtttggagaagattgcttaaaggcattcaaggttctaaaggaaaaattgatttcagcaccaatagtcacttcaccaaattgggagctgcctttcgagttgatgtgcgatgaaagtgattatgcaattggagcggtcttcggtcaaagagttgacagggtgtttcacacaatctactatgctagcagaaccctgaatgatgctcaattaaattatgtcactacagagaaagaaatgctggaaattgtgtttgcttgtgataagttccgaccctacctaattgggaataagg

SEQ ID NO: 276447 - DNA, 589 bp, Cannabis indica
ttttgtggatttcggaattgacaggaaagatcgcgggcttcctcaacaagacaatgaccgagattgcagtgtatacgtcatgaagtacatggaggctgtggccaatgaggaagaagtagttgatcaggtataccactgtttagttagttcagaatgtactacgcaagtttgatggagattaacgttgtgtaatttaaatttaattcagtgttctactatcaagttgattagagttaattacattttctaagtttttgtttttgtttttgtttctgtattgtcccacagtttcacccgattgaggcacgtttggaaatcgctgcgaggatcataactgatgaacaaaatgaaattcgtaccaaagtggttgaagatcgtagggctgcacaaggcagctcatttgcatcatcctcggcccctttgcgtagtccgtcaaagtctccacgcgatcctcggttcagtacagcgaagtctcgccacgcaaacatgtttcccccctcaagagcctcccctaggattcggtctagcaaggctaagatttcatatggtgaatagtctgtaaaaacacttgtgttattattaggttgtg

SEQ ID NO: 276448 - DNA, 838 bp, Cannabis indica
tagatttaggggctccatggagacgaacgatctcctttacatacaactcagcatactgatccactgaatatgtaacttttcactggtagaaagtgagctgattttgtgaatccgtccactatgacccatactgaatcatacattcccgtagttctaggcaatccagttacaaaatccattgcaatgtcctcccacttccactcaggaaggactaaagattgcagtaaccctgccggcctctggtgttcagctttaatttgctggcaggttaaacacttggacacataatccaccacttctcttttcatcccataccaccaaaaatagggttttaaatcctgatacattttggtggttcccggatgcaatgaataaggtgtggtatgagcttcatcaagtacctccttcttgatctcttcaacattagaagcacaaactcgagctttaaataacaacattccactgttcgagactaaaaagtctctaggccgaccggccattacatcgtctcgaacctcaactagctcaggatattccaattgcgcttttctgattctttctaatagatcagattgaagtgttaaactgtgtaactttccaactacgaactcaatccctgcgttaaccatttcagaggctagttaaggggctatcagaacagtagtacaaacttgcccggaaccctttctactcaaagcatcagccacaacattggccttcccggggtgatataaaatctcacaatcgtagtccttaaccaattccagccatcttctctgcctcatgttcaaatccttctgggtgaaaaagtacttgagactcttatgatcagtataaa

SEQ ID NO: 276449 - DNA, 505 bp, Cannabis indica
tctgttaagccttgtaaataggtgtatgagcgcctagatatacaagtcagtattatatgatatgttatgtgcttttcttactgagtttgtcgactcacagttctgcttccatgtgtaggtaaaggaaaggcaaaagctgaacaggagtgagcctggctgagatgagattgtacatgtcgtggcagcgggacctggggtgttcggtctcgggacatctggggttattattttgtagtcgctgtgcgacctggttatgtattttgaatatttagtataaaagtttaaaaacgggatcccggtacttgtaaataattttgtaaagatataaagtttagtatttaatataaaagttttaatttgacacatttttcgagaaaattctttgattagcaaagatagcactataactgaaaaagtacagtagcgtgccttagttttagggcgttatagctatggtaatggagcgatgtctacttcgaatttttatttctcatgagatggtaat

SEQ ID NO: 276450 - DNA, 514 bp, Cannabis indica
gtccttcccattttgcctcaaatttgcctttcatccttctagttatgacaattggtcgtttcacagtaagcactagatctccaaccgaaaaagatcgaaatttaactttcttgttgaatgccccagctacctgggcttgataaatttcgagcttttgttgaatagcaagccgcttttcatctaatgcttcaagctcggctagacggacttgcacattttcatctgggtctgttagttgagtagcaatccttagtgaaggtatttgaacctccaaaggtaacactgcctcagacccaaacaccaagttataaggtgtgcaaccagtcgcagtcctcacagtggttctatatgcccacaaagcttctaggaggcgttcatgccaatccctcttattctttgtcgctgtcttcttcatgattttgcataacactttgttaaatgcttctgcttgaccatttgaagacgggttgtaactagccgagaaactatgcttgaatttgtacttgttcatcaa

SEQ ID NO: 276451 - DNA, 146 bp, Cannabis indica
tagcgtatctatatcgtggaacatatagagcgttctatataactgagagtgcaattcaaagttctatggtggatgcaacaaggaattaataagtcagtgaatttacttggtaaattctagagctgcttattggaagctcagatata

SEQ ID NO: 276452 - DNA, 523 bp, Cannabis indica
ttttcttaccttaattcagaagtcaaaagtatggccgacctgagtggaagaacaagctaagcaatcccggtcctatgtcacgacaattgaaacacaataaataccttaactcaaagttccggattaaaaccctaatttagaaatcaaacgtaacctaactcccagcaaccccaatttaggtcaagcatcccatatttaatttaaaacagatagtacacaactccccgggtcaaaactgaacataaagcaaacccgaaaaaattctcccctgcaggcaaccggtcgaccggttctgatacaccagaacccatccggtcgaccggttctggcagaccaggaacaaaagttcctcttcaccaaaatcgaaccaaaacccctccaaacctaaccaaactttccagaacagtatattaacataaatatggcataacctaagctgcaaaacacagtggttcaatctctagcttaaaatcacacactcaagtgaagaaatcaaatttcttttagcttcctcactcaccaa

SEQ ID NO: 276453 - DNA, 581 bp, Cannabis indica
tttttaatagtagaatagacttacatgcataatctaatgacatgcattttgattaccattaaacttattattcgaagcaaatagtaaattaaatacatgatatctacttgtaattatataatgcatgttcaggtgtataagccttattttggactcacacatataaggctactcaaataagatttcatataattactcagctagacttgtttttgtatttgttgttgaaagcagcatggtcaaaacacttgaacggtaccaaaagtgcagctatggcgctgtggaagtcagctgcaaacctagcaaaggagcttgaggtatacacacacacacacacacaaattatatatgtttgtcttatttatactccaaaattgtcttatattaaaatgatggttttgtattaaataagtgggatacttctaaaccttacacctggaagtaatatatctacagtacagttcatacatatatatatatatatttcaatcaatgtcagttgtgtcaagaattagtacttgatttatgtcagattatttttctcggtaatgacatcaatttgtactgtattacagagcagc

SEQ ID NO: 276454 - DNA, 607 bp, Cannabis indica
tttaaagttggagatttgttccttgtacatgaagggacaaatggttgggccagaggttattaagaaagagcgccaactgagaacgttcttagagatgagggcaacaatgtcaaatacagagtttatgccattattcgtgacgaaggtgagaaaagttgggaattcagagcctacgccgccgactaatgctctccctcggagtgtggtagggtcttgcgttctcgaaaaagatgttgggattggtatgaatgaggaggttccgaccaatgtagagcaagaacaagaagcgacaggatttcatcagtttgaggagttcgatacagccttctacaataacgatcctattgtagatttgaatatggacgatgaacatgatttggcagtcgataaagccatagcgggaccttccttgaggttacaatgtgtaccgagtaaccatggtacacagcgagaacgacaacctcgtagtgaaaattgcactacacctggaactagcagtagtcgacaaggcagaactgaagaacatgctcattctcgtcatgcaaccttctcaacgttctcctcttttaaagtttgtaccaagttcaaagctcctatgtggacaaag

SEQ ID NO: 276455 - DNA, 456 bp, Cannabis indica
cgctttttaaaggaaaaccgggattaaaaatagtcttttatcccggtttttctataataaccgggattaaaagtgattttttatcccggtttttatcagagcttttatcccactggcatacatcccggttttcattttagcaaaaaccgggataaaaagtatatttttgtagtagtgtaaattcccgaccactcccgtctcaatgtctaaataaccgtcccacaatactaacatgctaagttgtgattttactgagccaaacaccgagttccatgttgccgggcaccggaaatgcaaaattatgaaattcactatatgacataaaatgcatttcagaattcaataataacagcataaataattatttaaatatctataaataattttccataattaaatcataattaactgctaatttccaaattaaattaagcggtctttacaactatcccccct

SEQ ID NO: 276456 - DNA, 920 bp, Cannabis indica
cgccctctgagttggcttaggacgtaaagacgcaagtcgcagtaggttcagcctcgtaaaggtggtaaggtctgatttggtaaccctcgaaaccaaatcctcgcacgagaaaggctcgttcagctgggtgtcatcgaccgagtcagtaccgctcccttctgcctcttcctcttcatcgcctgattcgcgagctggggccgtccagtcgtcgtctgtctcctcgacctcgacatcaggcgcatgcctcgaatgaataaggtagtcgcgggctgacaccgtggactcgctgtctcgaatatcaatggtcccaggctcagcgagctcttgcaccattttctctatgtccgaagaagacattggacctagctctatgcctacggtaggcgcgatgtcctcctctgaaatcgaagctgggagaaaactatcttcctcctggtcctcgtcaccatcgaatgcgtggcctcccgagccgagcagttgactatccgacaggtcgctcatctgaaagatagaagatcttttcagcgtggtgaatgtgcgaaagcaaaataagtgatctcacccgcattaaactataaagtcgcacttgatagaatggtcagcatccttgcgaatgctgaccaccccatcaatatgcgagtagagataatactaaaaatgcgaataagtcacgcatcctgggccaagcgatatacctccagaaacggctgggagaaactcagtgactcaaggggcatgcgttttcaagcatgaccctgaagttactgaggtactcccaccgttccgagaatatctaccagccaaagagtacgctcatttgaacattaacgcatgtcacaaatggctgggtgtatcacagtatctcaagggacatataaccgcgtatatgaccattagaatactgtgacacacccaccatt

SEQ ID NO: 276457 - DNA, 394 bp, Cannabis indica
gacaaatcctcaaaatatttagttttaaacacccaagtagctgtccaaaacttcactttctcccaaataactaacgaatcattttcaaccccttcgaagatcttggcatttctctccaaccaaacggcccaaatagttgctagcaacgctgttctccacagtttcgtactccttttactaccattcagtttgctaactatcattagcgtcatagatcctagcatagcccaacttacttcaaactccaccaacagttttgaccatatctgtctaacataggcatattccaaaaatagatgtctcatatcctcatcactgcatttacaacagacgcaccatcctggtgagatatagagaaaaggtggtttccttttctgtagcttatcatgaacat

SEQ ID NO: 276458 - DNA, 620 bp, Cannabis indica
atgaattcaggactaaaaaagcttacctcgaaacgaagaacttcattgatgatatgctgaactaattcgtgttcgatttcatcattcaaataaaatattgtcttcttcctttccttctgattcctctcgttataccaaaatggtcgaaccaactccattgcttttttgaaaaatcgcaataaagtatcagaaccatctattacaaaagacttgttacgattctcttccaaatttaagcattggattaaagttataacctcatcaagaaacaacaacaatgttgaaaatattaaacattttgaacactttgaaaagtagacgttatggttaaaatatttaaagaaataaatcttattagaattgagaaagattggttgaaaaagcaagagagactaataaagtagttcaatgatcaagaaaaaatattagagaaggggttaaatatggagtcatttataattactattatcatatataaaaaacaaattatctctacttttatttgagtaggtacttatataaacatcaaatatggtttaacctgaatttattggacactttagtaaatttttaatacaaatatgttattttttttcctacaaatattatggttttttaaa

SEQ ID NO: 276459 - DNA, 494 bp, Cannabis indica
atattataaatgacaattttatttgatagttattttaattattaaataaatagttttgccatttaaagggttgaaattgtaaaaagtggtatttgtgaaaaataggtaaaatagttggaaaaagtgacaaaacccaaacttgtggtgctcattaagtggccggccatcaagtggtttttcaccctatttttatcattttttttattcctaataattcaacccaaacgctattgaagataatataaaaggaaggctatggtctcttcatgcacctaatgcctccaaagctaaaaacctagctttctgatgagacctcttctttcttcttcttcctcttgaattttcgaaacactaagcctttcttcacaaaataaattcagccattcgtgattgagtaagtgcccacacacatcaagttggtcctcaatcatagtaggtaagactgtgatgaatccaaacataaggaaggagtttcgggctcagatcttggtgat

SEQ ID NO: 276460 - DNA, 548 bp, Cannabis indica
tgattctataacagctccatgattctcagcttcctggaagtaactagtcatctggagaaggtgatcacgcacgctctgatgaggtctcatccgtgcgttgatgaaattcttagtcgcctcaaagcgagcttgaattgatgccatcccgaatagttcagttaactggttcatgatttctgcagccgtgagagtgttagcaaaccttgtcttcaaggtgtcaaccatgctagacagcatgaagtatcgagctttgttgttggcattctgccaacgctcgaacttctcctttactgccttggttgcattctcaccaggctgctcaggagccacttcagtcaacacaaacagggcattctcaccaatgagagcaatgtgaatgttctctctccatttgataaagttagatccattcagcttattatcagtcaacagtgacatcatggggttggtcattgtcatgttggatactacaaataacaataaatagaaatcaagtaaggttcaacacaaaatcacattcagaaattattagcacttagcaagtagga

SEQ ID NO: 276461 - DNA, 826 bp, Cannabis indica
ggtcattttgccccattattagtttgtcctttagtggacttagaaaataaatttattaagtgttttattatgttttgttggctgaaataaaggatatgattttgcatgtttctcatttattcaaagttagaaaaaaattacaaatttctcaaaaaacactctcttttcctctctctttttcggccccttgagcagcaagaaaagaggatttcctcttggatttcaagctgatttttgcattgattttgacctcttgttgttggtatgtttcctctagcttctcttttaaattttcttgatgaattttgatgaaaaggatgtgttgcatgcttagttttaggtcattgttgttgctgggatgttgttgatattttcagagatttaagcttgtttatttgagttgatttgagctgtttgtgatgcatgatagttaggttgagtaaaattatggtttttctatgcaaaagtttagttttcaaagagaaaatggagaatttggtggctgtgagtattgcatgagtttaagtttgttttctgcagtgtttttatgcatgcttatgtagttctaatctagttttgagggttgtaagtgagctttagccaagtttgagtttgaaactcaaagcttggagctctcatggcactttttgtttctgtgcattctgggttgtgttattgctttagatatgttatttgggtcctatagaacaggtctggaaggtttgaggttgtttgggtgtgatttggttgagttatgaaattttgaaaatctgcctgcgaggaaccggaattccggttgtgcatccggaattccggatgagggttc

SEQ ID NO: 276462 - DNA, 664 bp, Cannabis indica
tatatgttattagtgagatttctctcaccagaaactcgagaccacgacccccactaaaaggacacgtatactcagattttccacagaaagctgggatgtccctgagggactcctcgaagtttttaaacctcgcttaggatataaccagcgagaggtggcgagcaagaccaaagtctaatcacatccaagacaagagagtagaccgaatatatcgaatatatgcgatcatcctccccttgtccttgtataaaccaggagaacgattctctgtaggaacgagttgatcttaagaaccctgcagcctttataatgcaatatagactcgcatgtctaggttttatcagctcaacacgcgatgtctacaagaagcgactatctaaagacgcagacgtcctaaacataatgataaccctgcgagttgtacatcggaatatgaacagtcaactcgcaggtatggaagacgcatgcgttgatgaacttagtaactgtcattcatttattaatgttaacgttgcttagtttaattattgcaattcaatatgtaaataatggattaacaatgaatgtgatccttgtgtaaccgattggacacctgctttgtatataaagaggtgatccaccatgaaatggcacctacgaatcctttgctacagtggactaagca

SEQ ID NO: 276463 - DNA, 675 bp, Cannabis indica
ttgagaaatcctcttgaaattttcttgcccattttccatgggagaagagttcatgcctagccttgctccttagctcttcttgttgcatggaagttcttgtcctctttccttgtcttgatgatgaagccatggaagataattgattttggagagaggtaggattttgaaaagagaaaagagggattaggttttggtaagagaaatgttgatagaagagggtaggaggctgtcaaatagggttaggaaatcagaaatggggttagaaaaaggtttggaatggttttatggagagaaaaccgagtttggaaagaccaaaaggcccatgcccacggttcctgtagaaaacggtagtccgttttctctggtactgggaaaaacggactgccgttttctcagcacagtgggccaaaaaggggcctaacttgggttttaaaaatccgtttgatctcaaatcttttctaatagctcaaatatgataaaataaaaatgctcaaacaagaaaaactaaaaaatgatgaaaaatgacgatttacggtaagcttttcgaaaattgccaagaaaactagaaccttaccgaaaatgagttttatgcaacgaaattgaaaaattctttttccagcagttttatgaagtgaaatgtgaggtgtacaaacttacggaatcgaaaaatgttga

SEQ ID NO: 276464 - DNA, 769 bp, Cannabis indica
gtagtatttattttattttagttaagaaaattatgcttatactgcactacaaaaaaagaccacttttaatgataattttttagtcacaacataaattttttgtgactaaatgtgacttttattcacaacaaaaaattacttgtgactaaaacatagtatttagatacaagttatcactaatttagttttagtcacaataagaaatgtgactaaaaacacatttagtcactacaaattgtgatttttgtaactaatacttttagccacaaactttttagtcacaacgtgaaaataataagttatgattagtcataagttttttataagttttgttgtgactaaaagtaaaaagatttgtagtgttgatatataaatatatgtttatttactaatttttagacaattataattatattaggcatgtataattagaataatttaaaattatatttttatcgttgtaatgatttataatttagctttcatgtttcttttttttgttttaatttttattttctttaatttaaaataattgataaaatttaaattaaataatattaaattaaaaagggaattacctcatatactatttttttttttaaaatttaaggtttaggttttcttaaaatggtttctcctaatggtttctatatgggttgtttatattgatttttggttgtcgagtttagtttgctctgctagttgcataagaatttatatgtagaattccgtaaaaaaatcaaaaaaaaaaaaaaaactaaactttagt

SEQ ID NO: 276465 - DNA, 554 bp, Cannabis indica
agaattgagacaacagatttgaatgcaattctgaggtggattgagcgatcaaaggctggcagattcaagaaaggctaccagctctggaaaacaagaaatgcggtgctgtgggaatcagaggacccgaaagtcacaaccgtgatgatcagacagactaaagaagaagtgaagagaagattcacttgtgtttagcctaaaaatgtatctacaagtgataaccaacggtttttgaattgcacagttatagaaaaatcaaaacagagaaggaaagaaatgtaaaaaaagatttattgtatagttcgaaaatatatagatcttcattttgaagatgctattaggatgtaaagaaatatttggagtaatgaattatactaatttaccaaaaaaaaaatatcccttacaattaaaagcattagaaggcagaagcattataagtaagactccggccttaccactacaattaataatatttgtgatattttttattattatttaatttttgataacttttttttttaatacaaccaacttgaagacaatgcttaatacgaaca

SEQ ID NO: 276466 - DNA, 802 bp, Cannabis indica
atcgcgtttttcttccagaagatcaaggtagagtgattgtttttcttcattttgcgagatgttgaaaacatctcttcgtagggaacctgccttaatctcgactggtaccatggcttcgcacccgtaggaaagcgagaagggtgtttcactagtcgtgaaacgaggagttgtattgtaagaccaaagaacttgcgagagcttgtctggccaggtccccttacgttcttcgagtttccctttgatgatgtgctttattattttgttaaaagcttcagtctgtccgttgctttgtgggtaagcaactgcggagaatgctttcgtaattcccagatcgtcacataattgccgcatctctttacaatcgaactgctttccattgtctgagatgagtttgtaagggataccaaattgacaaattatggaattgtagacaaactcgcgcaacttagtcgctgtaattgttgctagtgctttggcttcggcccattttgtaaaatagtctactgcgactactgcatatttgactccaccttttcctttgggtagctcgcatattaagtcgattccccatactgtgaaaggccatggacttgtgatagaatgtaggttacttggtggttgatgggtatatgtggctattcgctgacacttgtcgcatttcttcgcaaaagcaaaagcatcctgcagggttggccagtaatatccttgtcgcatgatttttaatgcaagggagtttaccccctgtatgattgccacaaaatttccccccatgtaccctcacgtagtatatagttgcaatctt

SEQ ID NO: 276467 - DNA, 569 bp, Cannabis indica
atgcagaaatgataaaacagcaaaattgcaaaagtgaggcccaagtccactaagccatgaccggccacctttgtaggctttatcatttaatattttcattattttaatgccaaataatacaaacctaaccctatgtggcatgctataaatagatagtgatggcttcaggaaaaagtgacttttgcatcttgtttccttcagagaaaaacctgagccataacactaacctagccgccactctcctttcttcttcttcattgaatattttgaacccacttagtgatagagtagtccccacacacaggaagtagtacctcaatcatagtgaggaagatcgtgaagaaagaaattcaacaagaaggacattcgggctcagatcttgataatactctgcgacagaaacgatacaagggttagagacctgagtggaagaagagatattattccgttgtaccaaatgtaaggtttatcatactttatatgtgtttatttataattttccaagagttagtagcctgctagtagaataggcgtacatttttaatttttttaaataagcggcattagta

SEQ ID NO: 276468 - DNA, 838 bp, Cannabis indica
aaaatattacaagtttatttccaaaaaagcggaaaacagagttacaaaaaaaaaatcatcactggtagaccccaacccgcttggtctagtgtggcccgaacatgtacatacatcgcccaactcccctactcatggctgatcagaaacagatttaccctttcctgcacagtagagcacccgtgagccaagcccagcaagacagtaaaatatatcaataatcatatataactcatcacataaataataatgccatttcatatttgtctgtatgacacagacccgcgtgttacactcacacgcctatttatgtctatgtggaatagacctacgtgttacgctcacacgtctaattacaataaggccttagaacggttcatctcggttctagttaccgagtccaacccgattatgccttgaacacataacccttaatttcaatatacatctatatatatcatggcataacaattacatattgacaatttacgagggtaataaccctaagccaataaatcgctcactttagagtaataactctaatcccggtttctagactttcatatatatcatattccatataagcgtcattgcgcatatctctacgtgctaactactgtcttacctgatgtaccacaaatatggagattccaaatccccggatgctcctgaccaagtaccggtaatcctagtcacaattctgggatacacaagtataaggttaatccctaaatccattttcacaaattataaactgggcatttaaattctagatattcacatagagctcggaaagagctttccaacaatataaagaacgtcccaaacggagtcccgagtc

SEQ ID NO: 276469 - DNA, 143 bp, Cannabis indica
atattgtcatttaatatatttattaattagacataaaaagtctcttaattaacaaataaaacctagaatctcttttcttcacaattttgcccttgcttagtgaaaattcataaactacacatagtctaattttagaattataa

SEQ ID NO: 276470 - DNA, 525 bp, Cannabis indica
tggtggaggtttccgatgactggtaatggttttggtcccggcggaaggttgccggaactgggttttgatctcatcaaagaaaggattgcccatgtgaggatcagacagagaatactactccaccaaaactccatcatcgatttgtgtttatcttccccaaaaatccatgtttttaatattattgatagttttgcagattctattattaattgtaatctttatgttattgttgaggagaaataattgaagtgaagatataataaaatatatatatatatgtctagtcatcgcgcatacgctatatttattaatacgttatatgtcactatctaatattgtaatttaaatttaataattgtacatattttttaaaaatatttatctattattttttttttaggattatttactacaattcataatcaattatttcaatatatactcaaataaaagttgcttcttttaaaacttgcaaaacaaatttctagaagcaaaaattttcaattttttttttttattgttgtt

SEQ ID NO: 276471 - DNA, 694 bp, Cannabis indica
aagtttttttcttattaaaaaatagaattttcatagaattggatgggaatttgtgtatgttattctgattagattgttttaggatgtgtatacgaacttgtgcttgtttttctgcatgttaatcagtagtgttttattgttcaaacaagttgtcgatgacatgtcgataggttatcgatataatgtcgacaagattgaaagtgtttgagtctgtgttgttagtgtatgtcgataggatatcattggtatgtcgataggatgtcgaccttttttggaataaaagtggaggtctataatgtcgatagcatatcgaccttatgtcgatatcttgtcgaccattgttatgtagttgatatatgtttgataatgtcgatggcatgtcgacatgatgtcgaccttatgtcgacgattgttgttttctgcaaatatatttgtatgtcgacaggatgtcgacagtttgtcgatatgctgtccacaaagttattttgttactgtttttgtcataatgtcgacaacatgtcgacaggatgtcgacaggttgtcgatatgttgtccacaaagttattttgttactgtttttgtgataatgtcgacaacatgtcgacagtatatcgactgtttgtcgaccaaattttttgtttacttactgtttgataatgtcgacagaatatcgacatgatgtcgatgttatgtc

SEQ ID NO: 276472 - DNA, 467 bp, Cannabis indica
tgaccaacaactatactaattcagtgaaagttgtcttcataaaaattatagaaaatttcattatctttccaatgatataaagatcattaaaaatggattaaaactgagggagttatgattgttttactgaaactatttctgagaaagaatatggagtaacgaattacacaacttagcaaaaatacaaacttttgacattgaatggttcagaactagtgttgttactagaatttcacaacaccaagaaatgtaatttagctggtaaaagatagaattgtttgagagatgataaatgcgagtattcaacctaaaacggcgagtactccaatatgcaatgcgataacagacaataaagctggaaaaaaatacagaagacaatgaaatatagtggttcagtcagattttgttctgcttagtccactgtagcaagggattcgtaggtgcattttcatggtggatcacccctt

SEQ ID NO: 276473 - DNA, 700 bp, Cannabis indica
cttcttgatcagaagttctatttcccgcttcaggttcgtagcattcattggtgtcgtggccgtagtttccatggaaccgacaaaattttatcatgtcccttttgttggtatctttcttcatgggcccgggctttttgtacggaattagcgattgagtcgctatatacacacttttctatatcctcagttaggatagtgaattcagtgtgtttggcgcgatcacggggagtctgtctagttttttcggcgaactttcccttcttcccattcccttgcttgtggttgttgccttaacgcttgccacttgaattgctggaatattggggaagctgggcggacgttccattagaaggagccttcgttttgctcggcttttgctcaccttctgctcgctgaatggcttcttcgagcttgatgaaaccttcggcccggtcaaggaaatcactcattgagtcgactggcccgtttttccttatgtccttccatagttcgccaaggacttcaatgccccccagtatcgcggataactttccatcctcggttacccgtgataccttggtcgcttccgtcatgaatctgctgttgtatgcccggagtggcccgccaggtcactgttttacttcgatcaaatctcccagatgcaatgggagttggcgtgaggaagagaattctgcatggaaatccaaagagaaggttttcc

SEQ ID NO: 276474 - DNA, 598 bp, Cannabis indica
ccaacggggtcttaacatattaaaattcatataatttcacatatattgaactatataataatataattccatcaattactcataattatctagttagggctttgctaatcctttttcttaattccgggtattacattcttctttagtgtatccttcaaggttttgttgactgcttcaacttgaccattttcttgaggatgtgccactgcagagaaacttttgatgataccatggttctcacagaaatcagtgaaggattggctgtcaaactgtttgccattgtctgagactattttgtacggtagtccaaaccggcatatgatgttcttcacaataaagtcttgaactttcgttgatgtaatggttgcgagtggttcggcttcattccacttagtaaagtagttaactgctaccactgcgtactgtactctgcctttacctttaggtaattgcccaatcaggtcaattccctaaacggcaaagggccacagactttgcatctgtgttagctcattcggcggagctcttggtatctttgaaaatctctggcattttttgcacttcttaacataggttctcgaatctttaatcatcgttg

SEQ ID NO: 276475 - DNA, 840 bp, Cannabis indica
caagcaaggaaacgggaagaaagggaagtttacagataaatccgaacagactccccgtgatcatgccaaacaccctgcattcactattataattgaagatatagagagtgtgtatatggtaactcagtcgttaattccgtacaagaagcccgggcccatgaagaaagataccaaaaaaagggacatgacaaaattttatcagttccatggagactacggccacgacaccaatgaatgttataacctaaagcgggaaatagaatatttgatcaagaaaaacaacccgcacttgcagaagtatgtcaaagccaaccaagggcaaaacaaccaggatctgctacctccactgatagatggacacttggaagtcattattggaggcccgcacatcgctggagatacgggcaaagctggagagagatatgcccgaacagctcagtacgagcaagaagaagtcatcctagccatggaagagaggaagcccaaagttccacgagtaggagagccaaccataactttcaatgatgaagatgctgtccagatcagattttcgcacaacgacccgctggtcggggaagtccagatagaaaacaaaatggtggctagaaccatgatcgataatggagcttctaaaaacattttgtttaagactgcctacgagaagatggggctccagctcaaggatctaactccatgcctccagcctgtctatggtttctcggtcaaggagttgcaccagtggacaaatccagctacccatcactgttggacaagctccgacgagcatactatcatcgaccagccttgtatgacttaaaagctgtcacatcaatatttcac

SEQ ID NO: 276476 - DNA, 650 bp, Cannabis indica
ataaattttgaatttaaattctcaaacccggatttacttttacttggctgaaatgtgcaggcttcaacttcttgctgctgagatgatgcgtgtgaatagcactcgatagtgaatacctcggtcgaatgtgcttgctagagcttgtgacggtagctggttcgtggttgtgcaagagcgaatttcagcagctcgaggtgtgcgaaatgagggctcggtggtaatgatgaggtgatgaaggcgagttcgagcttgtggatggatggactagtgatggtgactcacggaatggtgaaggatgcagagttgtggttcgggttgtgagtcgatgtggttgggcggagggtgtaggttgactgggcaaagggttcgagcttggtggtgcgaaggtggtgcgattttggtgaactggagctggacgtggtgattcgaatggtgggttgtgagtgaggttgagtagtgtgcggatgggaatggtctgtgcaggggtgaatagtgcggctgggttcgagcttggagattgactggggtggagcaatggtggacgactagggtttgtttgctgaaagtgatgggctaatttggggggtttttcttcttcttttttttttttttaacatataaatgtatttatcattactacatattagtat

SEQ ID NO: 276477 - DNA, 152 bp, Cannabis indica
atgttcgtttggttaagctcgaaggagatcatcctttgcttactattcgccggatagaagctatagattccatgtttatgtacgtatcaccctgacctaaaagtacggcttaactaacaaatcaaagaacaggaatagcctttcaagattga

SEQ ID NO: 276478 - DNA, 548 bp, Cannabis indica
tggttttgacaagatcattatttgcaaagagttaaatattcctataaccaattgaaagtaatttcatctatgttcgaatatggatgtacattcaggagtggatataagtttcgttatattcttaagacgatcagtctagatatttaccttacgcaaagaaatttgaaatgcttaagaaatttcatgaatttctagcaatgttaaaaaccattaaggtaggtggttaaagatcttgcgagctgatatgggtggagaaatatttggtggatatgtagttcagagatcataaagttaaactttaaattgtatccaaacttacctccctagaaaattaaattgcatattgatgaaagtaaaaggtctatgaatagttactagcagttgcctaagtccttctagggatgtaccctagtgataggaaaattttagaatgatggaatgattgtgtacttattgtaaaccattactagattcatggatgtcctaatcatgttgagaaaagctagaactgttaactaagttttgcagttttgatagctattctaagt

SEQ ID NO: 276479 - DNA, 675 bp, Cannabis indica
aggtaggagtctttgggaaaatgtggaccatgtcagcttggtaagcaactgaaaatttctcataagactgtttctgatgtgaatacttccagagttctcgaactcctacatatggacttaatgggtccaatccaggttgaaagcttgaatggtaagatagttcgtggtaagagtaatcatggaaaagattttgaaaatactgtgtatggtaaattctgtaaatcttatggtatttttcataatctttctgctcctaaaaccccacaacaaaatggagcgattaaggattcccaccttcttgatcatgttttagacgaggctttgtatggcttgaaacaagcaccccgtgcttggtatgagcgtctatctgagtttttacactctcatggttatagaaaaggaaatgttattaaaacacagttcatcacacacattcaatttgatattattttttcatatgttgatgatcttgtttttggatctacttctaactctgaagtgcaggtttttgtttcccaaatgcaaaaggagtttgaaatgagcatggtaggtgaactcacttattttctcggtcttcaagtgaagcaatcagatgagggaacttttgtcactcaaagcaaatatgcaaagaacttggtgaaaaagtttggtcttgagaaagccaaacataccaac

SEQ ID NO: 276480 - DNA, 733 bp, Cannabis indica
tcccgtttttaagtaatttagggtattggcatccttttcatcgatagggttaagcttagtttgcattttatattcccgataagtgttttagcgagtctctcatcggtttttgaacataatggtttagggccctgttatacgtcgagctgcacttccactcaggctgaccggcacacttgagcacggaacgaggtaagatagcgtaagaatatatatatgaatgtttatgcttgctttggatgttaatataattacggtgttaccatcacgagtacccagggtacgtcgtgatcgtggtacaacacttagtaaattctcgggagtacagttaggactctaccaacacaagtacaaagttggtactttagtgcatatggtacagtagtcgtactacccttaagaacgttcttaaccatttggggagcttcgttgttaagctcagggcagcttgatcataaagctggcaacgtgttactttcgtgttttcttgcatatcttactgagtctgttgactcatcagtttgctaccttgtgtaggtaaaggaaaggcaaagctggaggaacagtgaggcggaactcgacatgattgtacatatcgcggcagtgcaacccggagggtttcggtcttttactattttggaatctgtattttgaaaatgcatgtccgcaaaacttttaaaaaaaaaatatatatatattatagtaaagtacttttaacctgaattttgatact

SEQ ID NO: 276481 - DNA, 390 bp, Cannabis indica
ccgggcaccggaaatgcaaaacatgaaaactactgaataacataaacatgcatttctgaattccataactaacagcataataaattatttaaatagctataaataatttcataaataatcatgattaactgctaatttccaaattaactaagcgggctttacagatatggtggataaggcattgcgagctgagggtgtagtgaagtgcaccttagaatctcgagagactccagttgttggcgaggctcctacccttcctacgtcaggatttaataggggaggtagtggctcggctactgatcaaaaaagaaaggcacctactgcatccagtggctcaggttagaacaagaggttccaagggaaccagggtcgaggcaatcgataaggtag

SEQ ID NO: 276482 - DNA, 845 bp, Cannabis indica
aacgacttcttttacgttgtttgattcgggagctgcacattcatatgtagctatgagaataattcatttttgggtaggccttgagatattttaaaaagagggtttggaaccctagtgcctagtggggagttggtggtctctaataggcgtattaggtctatgccaattaggatcgaagatagggagttgagcgttgatcgtatagaactggaattaactgagtttgacattatactgggaatggatttttatccaagtattcggccagtatagattgtaagcggaaaatggtgatttttcagccaataggtgaagatccatttgtttatgttgggtcagttcaggggtctcggatcccggttatttctgtattaagggctagggatttactatgcagtggctgtgtaggatttctagcagtggtaattgactccagcagacctgaaacatttgggcctggggaagttagagtggtaaaagattttctcggcgtcccgaggagttaccgggattgccgccacagcgagagattgattttgtaattgatctggcatctggagtcgaacttgtttctaaagtttccatataggatggctccagcgaaactcaaggagtttaagttacaacttcaggggatgctttgacattgggtttatccaacccagtgcatcgccctggggagctccggttctgtttatgaagaagaaagatggttccctcagaatatgtattaattatcaggaactaaacaaattaatgtttaagaacaagtacccgttgccctgaatcggcgatctgtttgatcagcttcagggaaagacagagttttcaaggattgatttacg

SEQ ID NO: 276483 - DNA, 520 bp, Cannabis indica
tttccaggacattggtaaagtatactagtttcgaatgtatggagtgttatagtgagatttctctcacctagaaactcgagaccagacccctacttaaaggacacgtatactcagattttccaaagaaagctgagatgtccctgagggactcctcgaagttttgaacatcgcttaagatagaattagcgagaggtggtgagcatgaccgaagtctaatcgcattcgagacaagagagtagctcgcatatatcgaacacatccgagcatcctccccgtgtccttgtataaaccaggagaacgattctctataaatgcgagttggtcttaagaaccctgcagcctttataatgtaatataggctcacatgtctaggtcctatcagcccgtcatgcgatgcccacaagaggcgactacctaaggacgcagacatccggagcataatcgatgaacccgcgagtttatcatcaaaatatgaacagccaactaccagatttagaagacgcatacgttgatgaactta

SEQ ID NO: 276484 - DNA, 513 bp, Cannabis indica
ttattaattaagagactctatatgtctaattaataattaaattaaatgacaatactatttaataatctattttagttattaaataattagttttggcatttaaaaggttagaattggaaaattggcgtttttgagaaaatagaaataaaaattgtgaaaactgcaaaatccaagtgaggcccaataatacctgtggccggccacttaagcagatatttccagttgatattttcattattttaatgccaaataattgctaacctaaacctagtagttgcctataaatagaaagtggtggctcagttcaacatatgccttttggtcagaaaatcagagattgctttttcagaaaaactgagccttccacttctctctctatagccgaccctacccctctctcttttcctcttctcaatttcgaaaccttagtgatagagtagtgcccacacacagcaagtggtacctcaatcatagtttggaagactaaaaaggatgacacacaaagagaaggac

SEQ ID NO: 276485 - DNA, 568 bp, Cannabis indica
gcagaatgacctggatgaactaaaatctggttccggtagagatgttgagcgagccaagtatatgtgaaactgaagacatcgagatgatagataactctccaacatggatgacgcctattatcaattatttactcaacgggcaacttccaaatgacaaaatcaaggtacaaaaactattgtattcagtgcctcgctacacaatgatcaaaggcaaactatgtagaagagggtattcaatgcccctacttcggtgtgttcttctcgcagaagcaaacgaaatcattagacaaattcatgaaggcttctgtggggatcatgcgagttggcaaagtctgtctaaaaagatcattagacaaggatattactggctaacgatcaataaggacacacatgagtttgtcaagaaatgtgataagtgtcagaggttttcacatatacctcgcgtactgccaacagaacttagaatgatgacctcgccctacccatttgctatatggaggatcgacctaattggggcattatccattgggtgaggtggagctaagtatgtggtagtagcagtcgactt

SEQ ID NO: 276486 - DNA, 551 bp, Cannabis indica
cgtgtagcagtcccaacacgcttcctcccatgcggcattaaatgcgacttgactgctcaggagaaacctgacacttcgcagagatgccttaacgttacctcgagcttccgggagcatatggggttccatatgccttctccgggagctacgtcctggaagcctcctcatggcataaagacttagcaaatatttttggattgtacattgcttggtctacgtgtccttgtttggttggtccacgtatattgggcaaaatcaggggcaacaacgtacatgactatgagaaaaaatttgaccgaaaaattattttggatgctaaaacaaataggggtgtatcaatatacctattttaagggggtgcattataaaattttcctatatttttaaattaaaacaaattaattaagtaataaaatagtaatataataatgggtgattatacaatgcactccctcaaaagggatatactgatgcacccttaatttgtttcggcatctagaagaattttttagtctaattttttttcatatttatgtacgttatagttattt

SEQ ID NO: 276487 - DNA, 268 bp, Cannabis indica
gctgccgaattttctagaaaataaaaaggaatatgttctttgttatgtttcttatttgcctactttggttatattgatgagagccatgttgatcatgttcggtgcatattgttgtttcacgctatgattggtattgagcactaggggtctagtggacggtgtgatatgcatttgatgcttgatttgtgattatttgtggtctctctactttgtttatacatttcgataatggtgataagatattttatttttataaagctaaccatgc

SEQ ID NO: 276488 - DNA, 679 bp, Cannabis indica
cctttgttttgggatacatttatcaagtgaagattaacttttgatttacctttcctttggtcgtcttctcctacggcctcacaagtcgagttttgtctcacaccttgaaacatctttttccctctatagaaaaattctatccactgatcccaagatacatttatatcatttgatttggcacaaactttgacactcttcaaatagttataaatttgagtgtggaaccttaaaagctctgcagtagtagaatgatatggagtgccaccaaccaattttttgttaagaggtatgaactcttcataaggaattcctaaaataggtaaccctccaataaccttcaagtcatacagagatattcccatctcaccgctgctatgatgaaatgatatataaacaactccataaattccagcctgattcaaagtatctcgatttgtgcgcaaaataaggtctgtccattcgataagatatgacgcaaatacagcatgtccatgaaagaaaaaattgttattggcctttttctctgctaaaacacgatgaaggcttggataaaagtccacagtgacttggtaatccatatcagcatcctgtttattgtaaacatccccaagaactttagcttagaaattgggaccaaagcctcgagtgtgctggataacattatcatcaagtgaagaat

SEQ ID NO: 276489 - DNA, 663 bp, Cannabis indica
gtgttttaattttttttcctagtgtacctctatataattataatctctcaattaaaatataattttcttagtctcaaatatattcttgaatatagaggttttactgtatatccatttatttatactatttactactatactaatctcattttttaataatttgtcatatactaataattaaatgaacaactagctacacctacactacgcactacagattaaatgcttctagatcctgacctcagtgtatttacacatagaactgtaaaatgcttgatttgaatgcccttcttaataaacaacaatcgaagaataaaatatatagataattaataataagatccatgtatattaattttgtttgttttataagtaataatgatcacatatgtactctttatttatgcaatatatatttgacgtacgtggctgaatggtctctttagacatgcatgcagcagcagcttataatattatttaataaaattactacttaactatttaattaataatcagctaccaatgcatcttgttcctctctctcgtcgatatatgcctctccagcatctgaagtgtaatattatggaatataggatcttcctctctttcttgatcgagttacttcctctccacccaattataaaatttaggtggcgtttggta

SEQ ID NO: 276490 - DNA, 531 bp, Cannabis indica
tggtgcattatggagagtcagaataaagtggccagggccagtaacggttggagagaatggagtccaagttgtccccgtaaccaaggtgaaagtccttggagggcttccgatgggagtgatggttatcaatcacaggctccgttggatttggagcaaagatttgcagaaatggaagctgtgattcaacgacatgaagaagagattcagaggttgaagcaacaaaggtctcctgtagtatctttaccgcaaatgccaattatttttgattcggtattaccagcaaaacatggaatggccggtaatcaagtggaaccattgcatgaaaagatttggatccatgaatcttcagtctttcagggggattcaaatatgaagaatgcttcttgggctgaaagccctgaggaaattattgtgagacctcaggagattatggcagagggtcaagatgtcacctgcctgattccaaattatggtggaagtggtaggagctccatgattgagcggaagaggaaacctacatcatcagtggtg

SEQ ID NO: 276491 - DNA, 524 bp, Cannabis indica
aagtatccctagtccatgtcatctcatggattagttgtgcatacattcagggtggattaaaaacttgtttgatgggtttagtccatctttttttgtacgctctatttatttatttttaatgatataatcattattcaaaaaaaagaaaaagcaagtgttgctacttggatagagaaaaaagaagtgatgaacattctcctcatgatttccacatacaacacacatagaattcgaaatggcacccatcttaaaaagctatgctttggaagacttagcatttcccagatctcttttctccattcaactttaaccattgggagacaaaacttatcataatttgcacttattttataagatgtagactggtattgtctagatggagtgaatggaattctgaaaacatccacaagctctttccataaattgatagacctaggagcaagcttgagataccaccgctgagctaggcttatcagcgtggcaggaaaaattctacaccgaatgtctgttggaatatattttac

SEQ ID NO: 276492 - DNA, 538 bp, Cannabis indica
ggtatctttcttcatgggcccgtgcttcttgtacggaattagtgactgagttgctatatacacactttctatatcctcagttaggatagtgaatgcagtgtgtttggcgcgatcacggggagtctgtccaggtttttcggcaaactttcccttcttcccgttcccttgcttgtggttgttgcctaaacgcttgccacttgagttgctggaatattggggaagatgggcggctgttccagtagaaggagccttcgttttgtttggcttttgctcaccttctgctcgctgaatggcttcttcgagcttgatgaaaccttcggcccgatcgaggatttcactcattgagtcgaccggtccgttcttccttatgtccttccatagttcgccaaggacttcaatgccccccagtattgcggataactttccatcctcagttacacgtgacaccttggtcgcttctatcatgattctgctgatgtatgcccggagtggctcgccttgtcgctgttttacttcgaccaaatctcctagatgcaat

SEQ ID NO: 276493 - DNA, 623 bp, Cannabis indica
gattcaaaaaaatttcgctaacaaacaattcacaaatcggcttccaagtctcgatattcaagtggtcaggagggattcccaaaactttctcccaatcttctggtttagtgtaatgttgtttaaaatgcctgtgtcttattgtctttcgctcactatacctttctgccatctccgaatataaagtccccataagtaggtctcggtggggattcccatcatatcaaaatagtactatgtaataaaataattttaaaattatattaatttacaaataaggatataaaataattacaaccatgaataattaaaaatcactcactcttattcgattgagcacttgatccttatattgttggggtacatcagaaaaatttaaatgatgacctgggcacaacatggttacttgctggcccataaatcgaacataagcgcttgcttcagtgccaacaacttttccagtttcaagatccacctcaaccgctaagggcttaccagcttctctcctttttttttcaaggttagtgtttgctgcaagcccacgaccctttctgaccagagatggaactttatttattcgagagaaaaattattttattagtacattgaacattcaccatttatat

SEQ ID NO: 276494 - DNA, 638 bp, Cannabis indica
agatgtagatttcctgtcatcaaggcatgcctggaaatctgaatcggtatagcctatgggatttaaagcaccaccattgtagactaacacgaattgtcgtgtactcttcaagtacttcaagatatgcttaacagcattccaatgttcctgtcctggattcatccgatacctactaacaattcccactgcataacatatgtcaggtctagtgcataacattacatacattagacttccaactactgaagcataaggaacccttctcatgttttctatctcttgaggatcagtgggacactgttccttagatagacggatacgaaatctagaaggcatggtttcccctttggtgttggtcattgagaatctctctaaaactttatatatgtaggttgtttgagagagagcaagggatctgttcttccggtttctgataatctgaatactgagaacataggcagcttcacccaaatctttcatttcgaattgagtgtctagccattccttgatgtcagtcattttcttgatattgttgccaaaaatcaaaatgtcgtcaacataaaggaccaggaagactaccacttagttttccttgagttggtaaacacaaggttcatcttcattctgaagaaagccgt

SEQ ID NO: 276495 - DNA, 508 bp, Cannabis indica
gtaaaataatttccaacaatatacactctgtatttctctactatatatcatctattatatatattttctatatcatatgtatatatactctattatatatattctatatcatatatatactctattatatatatattctatatcatatatatatatacactattatatatatgcttttatatagtttacatttacttgtatctttgagttttgagttgtaactcttttcttttatttgtattttgtgctttgggattgtaactctttatttaatatattgtccttgtaatattttgtttagagttgtaattgtcttagtcttttattcatcttattttattcttccattgtaatctctctattatttctaacaatcaagaagattattttttgttttcaatggaaggagaaactatcaagatgatgaaccaagacttggtgagattggaccgctttgatggcaccaatttcactaggtggcaagacaaggtgaggttcctcctaacca

SEQ ID NO: 276496 - DNA, 691 bp, Cannabis indica
atggatgtccaaattactaaattaattatcaccattaatgtttggttgtatttttctttattacattgatttagtttcccattcttaattaacacactaggactcaataaatatatacgagcattctggacaaataatgacagaaggaaagagattgtaaataaaaacaaacttaattaacactactacaaaagtcagaattcgcgacagtcttaaaaacgttttttttttaaagacagtcgctaaaaaaaattaagtaattatttaaaatcatcggaaaaaattagtatctccgaaggtttataacagtaaatcaaaaataggcgacgattttaattggaattcgtgaatttattgggcccttatacccaacgatttaaaactgtcgggtatagtataggcaacagttttaaaccgtcaggtataagggcccattcaaaaattgtcacctacttctcaccacatttcccacgtgcgcgcctacttcttttctatttctcacatgtccacctatttcttctcacctattgcttctccatttcccacaccctaaaacgaaaaacttaactctacaaaccccacccacgtctctgcaccattgccatcctccctctctcgatctcccctcttctcgtctctctcgtccattgatctccacccatccctcctctcgtcggtctccctcacctct

SEQ ID NO: 276497 - DNA, 724 bp, Cannabis indica
atttatttttgtatttataattataatattctatattttctagagcaaataaatatatacaaagtacaaaactatataaggttgtttcataccttggtggcacctgaaattgatgagaaaattgggattcgcgaaactttgagttggatcaaagataatccttggctacacgtgatcttggaaaatgattgtctttctgtggtgcaactgcaagccatgcatagttttattgttatgatcttcatgtttagccaagtgattaatgattgtaagactttgttaagttctttgaaggatgtttatttattttgtaaatcgatcagttaatatggtgattcactcatttacaagagtttttatattatacttgattgtcatttcagtttggagaattttcctattgatttgttaccccttctagtaattgagtttaatggttaataaaatgctgattttctattaaaaaaataatatttcaaaaaaatgaaataaaactataatatcatatgttaaattaggattttttttttaatttagcaaaaaaaaaaaatattttgggttttttttttcttccctttttctgaaaatgacaaagaatgatatcaatataaatggcataacaacacactaccgaatccgggcgtgatttatatggaatgatatcaatatattgactccatttttgcttcattattgagctttacagtacagtccagcaaagccc

SEQ ID NO: 276498 - DNA, 588 bp, Cannabis indica
tttatttcttgagttgatagcttcaaggtatgaactaggagtagtagtatcaatttcttctgctgatgcaagagcaaaagctgtgcaatcagcaaagccaaatctttctggtggcttgatttgtcttctttctctgtctctaaccagcatgtattcttgtgaatcatctggtaggttctcttcctcagttgcatgctcttcagtttctgaatgtgaatgctcatgtgtatccacctgatctgtagtttctgcattttccctgatgctttgaatttctaaacctgctgtgtctctgtcagtttgcttgtgatttgcagcaccagttttcatggccatttcatgttctttgaaaactacatccctgctgataatgcattttctgtggccatcttctaaacaccacagtttgtatccttttaccccttcagggtaaccaaggaacaaacacttgagagctcttggctctagtttgtcttgtctggtatgtgcaaaggctgtacaaccaaacactttgagatggtcaacacttggaacatgtccagtccatacttcttgtggtgttttaaatttcagggctgtggatggaca

SEQ ID NO: 276499 - DNA, 710 bp, Cannabis indica
acaacggaagctgaaagaggtcctggaatgcaaccaagaaaaccttgttttgcaactgaaatatcaaatcaaagaaggataccaaccgttgaggataaaggaagatcaaagcctgcatttctacatacaactaaaactaaaggaacccgacttcacaacatacccattgtgtgtgaatgtcatcaacaacccaccaacaagtatccaaactataataaaactataaaaaaactgaaaacaaactgaaaaacagaaacaactctacgaacataaactacaatgatctaaaatcaaattgttacccattgattacctaaaaatgaacaggaaacaactagaccaaataatattcccaaaaaacaacatacataaacggattacactattaaaaaactatgaaaaaactaaaacaaaatgagaagaaacattaaaacgaaattgaaattacaaaatatttaaaaaactagaaaacacaaacagaacaaaaaagacaacaaaatgcaacaaaattaagactaaacaaactaaaatgcaaaacccaacaaaagaacaaaataaaattgatcaagacaaattgaagccctaaaaatccaaacaaaaccaaacgaaatgctaaaatagaaaacctagaataacacaaaccaaatacacaaaaccgagaaaatgcaaaatacaacaaaatctagaaaaaggggaaaactaaaaagaaa

SEQ ID NO: 276500 - DNA, 541 bp, Cannabis indica
gtctggattcagttctgggtctaagtccttggttctgatcctggtctcggttcgagtttgggtctgtgtccgggtctatctttgggtctgattctaggtgtatgtttgacttcgggtccgagtctgtgtctgggtttgtgtacaggtctgcaccccgatcgaggtctaggtgcgggtcctggtccaagttcgggtcacgagtgccggtccaagtttgggtctgggtcaggatctcggtccagatctaggtccagcatttcgatcccagtttgggagttggaccgagtccaggttcgtatccggatccctatctaggtccaagtctgtgtttgggatcgggtctcacatttaggtccaggtccgggtctcaattccggtctgggtacacgaccgtgtcctggaccgagttctagtctcagtttgagtttgaggcaaggtgtgtgttcggtttaggtctgggtccgggtccaggtctcggtcctagtctttttctagggttcgggtttggcgattcttgttcaggttctaattttgggtcgca

SEQ ID NO: 276501 - DNA, 544 bp, Cannabis indica
aaataccaagttgaaaccctccacagtccaaacgccatcatacagcacaggcacaaatacaattgaatctgtcccaaagaaaaatacaaagaaataaacagaaaaaatcagcatacaatatcgcacaaggtactacagaagtcgcacaatgtcgcctaatacaacaataatatggtgaagtatcatgtcgcacaataatcgcacataaaagggaaaatatcgcataaggtcgcacaagaaaacatacatgacaaaattgcataatgctgcacaaatgtcgcacacaaatcgcctaacatcaaaatcgcacactaaatcgcataacaatcgtacaatgtcgccaaaattaatcatgtcacctctaacctcagatttctcatgaaatcgcacaaagaatcgcataaagtcgcataaaatcgcaaaaaacgtaaaaacccaaaaaacacagactgttcggaacaaactctacctccattttaaggacacaaaagccataaattacaactaacaacattcaaatccatacaatacaacaaaaacaaca

SEQ ID NO: 276502 - DNA, 800 bp, Cannabis indica
aatgcatcttcttattatttgatcggggcaatatttaaacaaataaggatcatcccacatgaaatttttcacttcagcataaaatttagatttatcttgtttagaccaatgagaaggaatttcaccagtgaccaaataattgacaatatcagcataccaaggaaaagaagatacatgcatgagttgttcatcaggaaaagtttcaatgatagtggtggaatcatgattagtttcaacaacaattctagacaaatgatcagctacaacattttcagaaccttttttatcacgtatctctaaatcaaattcttgtaaaagcaagatccaacgaattaaacgagatttagcatcttttttcgacaagagatatttcaatgcagcatgatcagaatagacaattattttagatcctaacaaataagacctaaacttctctaatgcaaacacaacagcaagcaattctttttcagttgtagtgtaattcaattgagcttcatttaaagttttgctagcatagtatattacatgaggtaacttgttaattctttgtcctaaaacagcaccaattgcataatcagaagcatcacacattatttcaaaaggaacattccaatcgggagggcgaataataggtgcactagtcaaaagggatttcaatttttcaaaggcaacatggcaatcattatcaaagacaaaagcattttcttttccaagtaaatgacataaagggcgtgaaattttgctaaagtcttttatgaatcttctataaaaaccggcatggcctaagaatgatctaattt

SEQ ID NO: 276503 - DNA, 694 bp, Cannabis indica
aaccccgtttttggttggaaacttcaggcacgagtggaatattgatgtgacagcttttaagcatacaaggctggtcggcctagcattacgttaaaggctgaaggaacatccaatatcaggaattgtgccatgatagttatgctcgttggagcttgtccaactgtgaggggtagccggatttgtcccagaggtgcaactccttggccggagaaaccatagacaggctgaaggcatggagttaaatccttgagctggagccccatcttctcgtaagcagtcttaaacaaaatatttgaagaagcgccattatcgatcatggtcctggacaccattttgtttgctatctggacttccacgactagcgggtcgttgtgcggaaatcttatctggacagcatcttcgtcgttgaatgttatggttggctctcctgcgcgtggaactttgggcttcctctcttccacggccaggatgacttcttcttgctcgtattgagctgtgcgggcatatcgttctcgagctttgcccgtgtctccagcgatgtgcgggcctccaatgatgacttgcaagtgtccatctattggcggaggcatcagatcctggttattctgaccttggttggccttgacatacttctgtaagtgcgggttgtttttcttgatcagaagttctatttcccgcttcaagttgtagcatt

SEQ ID NO: 276504 - DNA, 615 bp, Cannabis indica
agttccaatcccgatcagaggttagattcagttgtgggtgtaagtccttggttctgatcctggtctatgttcgagttgtgtccgggtccaggtctacctttcggtctgattctaggtgtgggtgtttgagtttgggtctgagtctgtgtccgggtttgtgtccaggtctggaccctgatctaagtctaggttcgtttcgaggtccaagtttgggtcctgagtgcgagccaagttttggtctgggttaggatctcggtcaagatctaggttaagcatttcgatcccagtctcagtcttggtctgaggctatgtctatgttcggttctaggtctgggtccgggtcctggtcacggtcccagtcttgttctagggacctggttcggcgaattatgttcaggttctaattttgggtcccaagtctaggtctgggttcgggtttggttcttcgtctaggttcgattcctattttgagtccaagatctagacaccgactactggtctgttcgaggccccgttacccgaatctcgagtcaagatctggatcactgtcacgggtctcgatctggttctggttcaggtcataggtcccatttctgagtttgggttcgggatcga

SEQ ID NO: 276505 - DNA, 612 bp, Cannabis indica
gtttcgtagttagtatattgtttagaatttttttttttagtgatgaaattatttgttgttatacattgagtttttagttggtgtaattttgtaattgtaaatatttcgtatattaaaaattaccagaaaaatatattttttcaccttataagattcagttttttttcctaggcataatttagttgttcgtcaataataattttgaggtttggtgaagatgagagaattaccttaaacacagcaaacataacaagaagtatataaatgtagaatttttgaagcaataagtagagtcataaacgttaaaacaacaatggctaaaagtagctagttataagaatgaccatagtaagactcttgtgtggaggaaggcggttccgggaaatacgcgttggagtggtcattgaatgagtcagatgctggttgattgtttggaggttgttgcccctgagatccagtgttatgttgacgatttgggcaccgtcgataatcatggtctgatgagcgacaaatgcgacaatgtcttgagtttcttgggatctgctccccgtttggtccttcccttgtatttcccgtaccctttgttctcacaacttcggggtctttaataat

SEQ ID NO: 276506 - DNA, 546 bp, Cannabis indica
atctaccgttgatagagttctcttataataacagttatcaaagtacaatagggatggctccttacgaattgttatatggcagaaagtgtagatctcccattcactgggatgagacaggggagaagaaatacctaggtctagaatcagtacaacggactaatgaagcaattgagaagattaaagccagaatgcttgcctctcagagcaggcaaaagagttatgcagatccaaaacccagaaatgttgagtttcaagtaggggatcatgtgttcctacgagtgtctccaatgaaagggatcaagcgtttcaggaaaagaggcaagttatgccctaggtttataggacctttcgagattctcgagaaggttggacaagtggcatatcatttagatttgcatccaactctctcagcaggtcataacgtattccatgtctccatgttaaggaagtacgtttcagaccctactcatgtactaagttatgaaaatcttgagctacaactggatttgtcatatgaggaacaaccagttcagatccttgacaaaa

SEQ ID NO: 276507 - DNA, 726 bp, Cannabis indica
ataatcaaccatggcttcgcctatctgattttggggacatggacgaagtcaggaaattctcaggatcttactgctgagaggcggctttatcaagaggctgctgagcgccgggaggccgctgccaaagctaatgaggaagaggctaagcggagggaagcccaggcggaggcgatgatccgggaggaggccctgcggagagacaggctggaggccaggcaccaggaggagctgagggcggaaggcgaggccactgcaaaggccaggcgggagcttcgggaggccagggaagccttggatgagatggctgccaaggtgaggtccttagaggaaactcaccaggcaaacttagaatccagggccactctggccgcggagctgaaggagctcagggacttcaaggaacaagcctcaaagaaggcaaaaagagctgagcttctttctcccgtttcctgcagccggtgcaccaagcgttttgacgatggcgtcttcatggcttggtctaccaacgaccagaacatcaagcttaccttctaccccaaacctgaggagatgatcgccaaattccgggagaagaagaaaaagcttgatgccatggtggaggcacgcatcggacctcgtctccctccgcgcatcgattaggccgctccgagattaacccagtacaaccaggatttcacccacttctttttttttctttatatatatttgtttatatacagctatttt

SEQ ID NO: 276508 - DNA, 525 bp, Cannabis indica
atacttgtgagtagatctaagttcctagtaaaatataatttccaacacggaaaaatgtgaaagagcttttcaagatctaaaagcacagctcgcaaaacctcccgtcctttctaaacctctggacggtgaggaactggggatatacctagcagtaacgaagcatgccgtgagtgccgtactgatcagagaagaagacggcgtgcagcatacagtctattacatcagtaaaagactcatcgaggccgaaggccgatatccgttgatagaaaagcttgcctactcccttattctagcaacaagaaagctgagaccttactttcaagctcatcctgttcgggtgtacactgaccaaccactacgaaaaatactgcaaaagccagatgcctctggacggttactcaagtggacggtagaattgggacagtacgaaatcaacttccaaccccgaacagctatcaaaggccaagccttggccgactttgtggtggaatgcacaggcaaaactgaaagcataccagaaagcga

SEQ ID NO: 276509 - DNA, 690 bp, Cannabis indica
tcacggacaggagggacgtaatgtatcagttaaaggggacttaccagaacaagaagtgctggcatcgcgagcccccgtatttggcacttggaccacaggccttggtttgggggtccttctctccaccgggctcccgatacgaaggagccttccggtggccacctgggccttattataagcctgatcctctgccttctggaagaggtactcctggtacttatcttctgccgtggcgatgatgtcctcccggagtaccttctccgcggtcggaaccctcacgtttgggcagatgactttggaaaggttggagtcatccaccgactgatgcccctggatcagcttggcgttttggcagttctccgtcgtgaccaactacccgacgtcgagggccttcttgtcatatgtggcaaaggtcttagcccgttggaggaaaagttgagtaggttcagtccgcgcataaggagggatcctaacccactccgtgagaagctccggatgctccacagcctggaacccggaggagaagaagaaggggtgacggtactccttcacatgtttctgctggttgaaagggaccgagccctcattcaaaggatgggcctggaaaccgtaaaagtcatccttaagtttgtctccctttttagggacggaaacatgttcttaaaaatacagaatctctgccggactggg

SEQ ID NO: 276510 - DNA, 791 bp, Cannabis indica
tgaaaaagtacttgagactcttgtggtaagtataaatctcacacctttccccatataagtagtgtcgccaaattttaagggcaaacaccactgctgcaagttccaggtcgtgagttgggtaacgctgctcgtaatctttcaattgtggggaagcataggctatgactttatctgcctgcattaacacacagcccaaaccctgccttgatgcatcacaatacaccacaaacttctcttgatcagatggcaaggcaagaacaggagttgtaatcaaccgttgctttagctcttgaaaactcttttcacacttatctgaccatataaatcgttggttcttcctagttaactcggataacggcatttcaatcttggaaaaacctttcacaaaacttcgataataacccgttaatccgagaaaacttcaaatttcagtgactcttttaggtctaggccaattcttcacctcctcaatcttccctggatcaaccataatcccgtctttcccaacaatatgccccaaaaaggacacttatgacagccagaactcacactttttaaactttgcatagagtttatgatctctaagtcgctgcagaaccattcgaagatgttgctcatgctctgcttctgaccgagagtacacaagaatatcatcgataaatacaattacaaaattatcgaggaaatccttgaataccttattcataagatccataaaggatgtcggtgcatttgttaacccgaatgacataaccaggatctcgtaatgaccatacctggttcggaaggct

SEQ ID NO: 276511 - DNA, 705 bp, Cannabis indica
gtcttgatttttatttttttaattataaattctaattaactaaagtcttactcgcaattatcttctttcattcactctccaccacacttacattgaaaatgattgacaacgaaaacatagaacctatagcaaatttgtccgaagatgaagataatttttttcatttcatgagttttgtgaaaaagaaatgtgaagaagatgtctctgacatgagtaacagtggaattgagcatgacactgaagatgttagccatgaatggattgatcctgatgtagctgtttggagtgattttttaaattttttgcagattgataaaaatttagaagactatataagtccatccacacctgtagattaggatgtgttagacaaatttctctcctcttatggacaactttaagcaaccaattattttagcattgcatttgggagacaaaccttttgggtagctgggacaaggaatattggaactttaacctttttgccctgtacataatgaaataccattcagccttgagcccgaatctttaattaaaattacattgaaaggcactcatcaatggaaactagttctagaaagaaagtgctagcagcagcaataacatttaaaattgactcccattcctatggcacattatcttgcaatcataaactgtacccaagctggatcgataaaaaaacatacttttcaagcacacatagtt

SEQ ID NO: 276512 - DNA, 1030 bp, Cannabis indica
attttgttcaagacacttaaatatttgatatttttcttagagatttaattaaataggaaaattatatttatgttgaaaattaatttattagttaattttagaacaacataaattagaataattgttttatttttattttattttattttaataagatttcgaagatgtatacttttaaatacattagatttcgaattctatcatacatatatttataaaaaaattaatttgagttgaaaatttcattatttaattaattttagaccagcttaaataagtaattttcatgatatttattggaaaatttaactaaggatggaaaataaatttctatttttcagatcttcctagggtgtaattttataaatattaaattaaaattatgtttagagttatataaattagtaatttgaattaaataaatgtatatgttaaaataaatagattaaaataagtatcaaatgaaaatacaactctttaaaataatgagctttagttataaggatattcgatctccattgttggtcttacatggttaattgtttcaatataacctcgagacgctagacttcgtctcccttatggatggttattcggtaaagcatttaacaccgtaaagatctcaaaagataagtattttataagtttttgtctctattcgactctcccctacggtgactacttagagataattttacagagtatgaaacaatagtggaagctcatcaaataagaataactttgactctcacctaccaagataacattggattcttattttgatcgaataaaaggttgctagaatgatgtccattttagattagttgactactctattaaataaatgatatctttgactcccgcctactgggacactatatcagtttgttagaaaccttggaaattatttaagatgtatttgttttatattttcatatgtctttattactcactgaatgtatgataatttctgaatgtgtatgaatttatattgaatcatgttgttttttgttattaattgttgtagttt

SEQ ID NO: 276513 - DNA, 910 bp, Cannabis indica
tttttgagatcatatagagttggcttccaaacgggttgcttgcccaagtcaggtcgatgaactccgtaggaattaaaactgccaacataatgtctcatgttgctttgcaaagtggaggttacgagaaaatgccatgtcaacttcgagatgtgtacaacagggttgctggtgcgaagcgagaagagaagatagagacggactcagaaggggctctgggatttcttgattgtctcgcagagaaggatcctaatttcttcgttgtctatcaggttgacgacgagaatcgcttggctaacttattctgagcagatggaaactcacacgtggactatgtagcttttggggatgtactaggatttgacacaacctacatgacgaatgagtacaataagcccctcactgttctcattggcgtcaaccaccatttcaacacatgcatcttcggatttgctctcctcctccacgagaagcttccatcatattcttggctacttcaaaaatttctagaatgccatggagataagaagccaaatgttgtagttactgaccaagatgcggccatgaaacaggctatcgttgaacacatgcccgatgttacgcaccgtctctgcgcttggcatctcaatacaaatgcttcgaaaaaggttaaagatccgatcttcttaaaaacatttaaggatctcatgtacaactactacgaggaggaagaatttgaagcaagatggttagacgtcatccaaacccaacaactaacagataatgaatggtgtcaaacaacattcgagtcaagacaacaatgggcagaaacttatttaaggggttcattcgttgcaggaatgagaaccacacaacgttgcgaatccatcaactccgctctaaaaaaatttttagagaagaattattgcttgcg

SEQ ID NO: 276514 - DNA, 731 bp, Cannabis indica
gtttactgctttcacagatatctaacacttgactctttcttttgttgtggcagctaattccatggatgccattttggccgcccttgctggagctcacactcctgacgctccccttcctttaacgtcttcccaagtggccactccctttaaagcttcttccagtgcccctccagacactattgacttagtggatgaggaggaggcgcttcctgaggaagctaaagaaggtcaagaagagcaatgggctcttcctgaggaagttgaagaaagtgaagaagagcaagaggttgctctgattcgcaagcgcaagggcaagatggtagccgaggaggtgcccaaacggcagcggagagcggacactccggcccccgcccctgattccgggatcccttccgaggcggaggaatatacagtgcctcccaacatagtgctgactccggttcctggagatgaggcgaggcaggagctccggatagccaaacataactacgccatggacgagtactcccgggggcatgccgatgtggaggctttgaggagggttttgcgagatgaaatgcaaaatacccttaacgatcagaactaccagaacccgtgggatctaaacttggaccccctgtcggattggttcaatcgtttcctcgggcccaccttggctccctttgccgcggagatgaccggcgagttcgtgtctcagctaacccggtgtgcacccaagcggttcgctgctt

SEQ ID NO: 276515 - DNA, 1111 bp, Cannabis indica
gaagaaagtgaagaagagcaagaggttgctctgattcgcaagcgcaagggcaagatgatagccgaggaggtgcccaagcgggagcgaagagcggacactccagcccccgcccctgattccgggatcccttccgaggcggaggaatatacagtgcctcccaacatagtgctgactccggttcccggagatgaggcgaggcaggagctccggatagccaaacataactacgccatggacgagtactcccgggggcatgccgatgtggaggctttgaggagggttttgcgagatgaaatgcaaaatacccttaacgatcagaactaccagaacccgtgggatctaaacttggaccccctgtcggattggttcaatcgtttcctcgggcccaccttggctccctttgccgcggagatgaccggcgagtttgtgtctcagctcacccggtgtgcgcccaagcggttcgctgcttgtgcatccttgaactccatctttcaagtccaggatctcagccactccttgactgtggtaagtatttcgtagtttacttttttcctcattatttttcttaaggactttactcactcttgcacccttttccagcttgctgcagaggccggccgcctttccaagaacttaatcaaccacggcttcgtcttgtccgaatttgggggcatggacgaagtcatgaagaccctacaggatctgactgctgaaaggcggacgtaccaggaggatgctgagcgacgggacggcccttgccaaggccaagttcgatgaagaggccaggcggagggaacgcccaagcgggggtgatgatcagggaggaggccattcggagggacaagttggaggctaagcaccaggaggagctgagggcggagggcgaggctgttgccaaggccaggcgcgagctccgagaggctagggaagccttagatgaaatggctgccaaggagaagtccctagaggaagtgcaccaggcggacttggagtctatggccaacttggccctggagctgaaggagctcaaggacttcaaagaccaagccttgaggaaggctaagaaagatgagctcctttctcccgtctctcacagccggtgcgtcaagcg

SEQ ID NO: 276516 - DNA, 849 bp, Cannabis indica
attgaagatgtctccttcccactttactcagagttcagaaatgccaccatctgatacttgctttggagcttctagctctagggatgaacaacttatcgactttgatgggtctgatgattatgttaacaaaggatttgacagtgaggcattgcctgcagagccaaccattccaccagaaccgattgtctcagcaaagacgggtaccatcatcacttgttccttcagatttgcttattcctcgaccggacccagtgttgacagtgtcagcttcagcaatcaccaactcagacttgaatgagcataccaaaaagtttgtgattgaatgcatgaaagacattcttcatttgtcatcttctcctttgaccacatcagacatttcaaaacatcgtgctgacgtgagtatgcaactcgacgtgttgagtaccctttgcgggcattataaatgtggtttagcagaggttgcatggttcactgactctgtcaatgatttgctcaaggcccaagaaaagtctctcgcttctgctcaagttgttgagaatgcccttagtcttgatgaatctcttatcatggatcttcttcgtcgtgataaggataatttggcagctatagatcatttgtccatatctgtcactaacaagacaaaggattttgaagattttaaagcaaaggaagcagagattattgcagcggaactagccatacaacaacgacgagctgagttcgaagccgataaagcatcgtttgaggtagacctttctagtctcaaagattccttgaaggagcaacaacatctcgctgaggagataagtcggtcaaaggaccaagctagtgtagaaaaattccatgaag

SEQ ID NO: 276517 - DNA, 738 bp, Cannabis indica
aaacatgttggagttttttatttactaaattttatatggtattttttaattcttacatttttataggattttcttttcataaagtttgatttcatagcatatatgtaatgttttttctcctaccaatgagtttctcaatatttttgatcttaacttgaacaccaccggctcaaattttttagatgatatacttgatgaaaacaataataattagtttatgttaattttagttatgtgtggatttatttaaatttttaattatgtttgtgcattgtcctgagcccgccagtatcccaggctcaggacaatgcacaaaatcctgatcttaacttgaataccaccggctcaaattttttagatgatatacttgatgagaacaataataattagtttatgttaattttagttatgtgtggatttgtttaagtttttaattatgtttggatttatttaagttttaaattatgtttggattttaaagttttaaattatgtatggatgttaattatttaattgggttattattaattttaattttatttataatattaataaataaataaattaatataaaaataaccatttatatttatctgaaaaaaataaataaattataaatataaatataaatatatttatcatttttatttttaattaaaatactatacgcgagaatcacgctatactgtgtcaaattaattctgacgcattaattaccggcagggcccgccggtatta

SEQ ID NO: 276518 - DNA, 758 bp, Cannabis indica
taaggagtctgggccaccaacatctgggtccgaactggtcaggagggttcctgagcggatgcaggcaccaactccacccatgcccgtgctgcctgaggtcaagaagggcagggaggtgatggctcatcacatgaaccggctggttcctgaggtcggtgagcagctggctggtgcggaccactcatctctggatgtgttggtgggcggagtcttgcaggagcttaccagggttagtcttttcttttcgacacttcccttttagcttttcatacttagcttcatatgctgaccttttcctttgtgcaggccggtttgaagctgggttatgcttactcccgggctaaatctgctgcttccaagagtacggctctgtccgacaccttgagggcggaggcggacttggccaagaaggaagctgaggaggccagggcggagactgcagctgttcgccatgagttgggtgaggccaacaagaagctttttgccgctgagaagaaggtcaccgtgctgacaaaggacctcgaggctgctgatcgcttagaggaaacaatcgagtctttatctgctgatgttgatcgtcttcaaaatgagaggacttctctacggcaggtcctccttcggctgaaggatgataaggacgcttagacggtcgaggcgaactgcttgagagagaaggttgatgctttggagactgtcggcctcgagctcttctttgatttttggaaggctaatccccaggccaactttgactacttagg

SEQ ID NO: 276519 - DNA, 669 bp, Cannabis indica
ccaaccaaaacgtttccaaactcaaccaaactttccagacctgctaattagaccctaataaacattttccaagtggtaaaacaaagcttcatgcacaaaatcaaaatccaccattaaagctccaagctttgagttcaaaactcaaacttggttaaatctaacaaacaagcatccaaaccaactcaaatctacttaaacatgcataaaatcacctctgaaaactacagcaaacatcacaaaacagcagcaacagatttcaacaattttctttgaaaaccatagttttgagccaaaatttcataacttaataaaatcaagtaatcaccagccctaacatgcttgaatcaacattttaaatcaaaaataaacctctgaaatcaacatcaaaatacagcagcaagaacaactcaaaaataagcatgcaaaccatttctttttcatcaaaaatcaagaaactaaaagaaaggaagctaggacaaggattacctctacaagattactaagaacttgctgaaaatcacaagaatcaaccaaagaaacccagccctagcagctcccaagcttggccgaaaaagagagagagagaaagagctttgaaaaaaattctaattttctaactttgaattttttaataatgagaaaatagaaatgctattttaactctttact

SEQ ID NO: 276520 - DNA, 580 bp, Cannabis indica
ctggttttttctccactggtaccccgattcttatgttcttgatatgttccggtagtacccactcatcctcctcgccaacaatattaattgtggcatcgtagatcttcttccacgtttctttagtgtaatatggagagcaaagtgtgtacacgctcacattctgactaactgctgcggcacatgcatggggacaagggaaacttagtgcctttcatgtacatgtaaagaacttctaacttcaattcatacaccaaggggtccacctccaactcctcatgcaaaacttcacgcaactttttcagtgtacagtcaatgtccaataccaatgtcttactttttgagaaatcaaatacccagttgaaaccctccaaagtccaaacgccatcatacagtacaggcacaaatacagatgaatctgtcccaaagaaatacaaacaaataaacagaaaaaatcagcatacaatattgcacatacatcgcacaaggtactacggaagtcgcacaatgtcgcctaatacaactataatatgctggagtatcatgtcgcacaataatcgcacacaaatcgcataaggttgca

SEQ ID NO: 276521 - DNA, 515 bp, Cannabis indica
acagtttttattaatttttttgagtttttatttttgccataacttttgactcaggactccgtttgggacgttctttatatcgttggaaagctctttttgagctctatgtgattatctgtaatttgaatgctaattttatatttttttagaagtggatttagagattaaccctatttgtgtaaattctgttattgtgactaggattaccgacacctggtcaggagcacccagggatttagagtctctactattgcgggacatctagtaagacagtagttagcacgtagagtgatgcatggtggcgcttatattggaaatgatatatgttagtagtcagtaatcaggattagggttattaccctaacatgagcgatttaattgcctagggttattaccctagtgatatatgttgtatgaatgctatgccatgatatatatatatatatatatatgagaatatgaatatgtaagatttagggttatgtgttcaatgcataaccaggttggactcggta

SEQ ID NO: 276522 - DNA, 524 bp, Cannabis indica
aatgtctgtaatactattgtcaagtgttcagcatgatcctcacgtgtcttagaatacaccaagatatcatcaatgaataccaccacaaacttatccaagaaaggtctaaaaactctattcataagatccataaatgctgcaggtgcattcgttaacccaaatggcattaccaaaaacataaaagtgtccataacgtgtcctgaaagcagtcttagggatatcttcttccttaatccccaattgatggtagcctgacctcaaatcaatctttgaaaagaactttgaaccaccaagttgatcaaataattcatcaatcctcggtagaagatatttgtttttaattgtcatctgattcagctttctatagtcgacacaaagtcgcaaagtcccataagctttcttggcaaacaagactggagctccccatggagaagtactatgtctgatgtaacccttatccatcccctaattgttttttcaattcagccaactctgcaggcgccatgcgataaggcgcaatgaaa

SEQ ID NO: 276523 - DNA, 718 bp, Cannabis indica
ttcttgaccaccatagaaactatgttggatttaatttaataaagaaataaacaaaagagattctattttcatagaatattcatcaacataatgatggtttcctatttgttgcaattaattgttttttctattttgatttcatcattcttttttatatagctttatattaaaataaagaaactgttttattgtttttaatattatgaaagtaataccgatgtattactttttatttttaagttcattatttcagaatacagtttacttgttagtttctttttaaatgttttatgtttgtttaatttcagagaattgaagtttttgtgtagctttaatggtggagagcttcgacgaattttaatggcggtccagtagcttcgactgagttgttcgaagagcttcaatggtggagattcgaacaatgcaaaattctagtttgagattgtttaaatttgtttgatttcagagaattaaagcttttgagtagctttaatggtggatttagttgccaagttccacagacatgattggagagctttgacaatcgatcgagttatgatttcgaagcttcgacgatagagtttggatttggttgatcgaagctttttttttttttctgggatgaatatatattgctcggtaagggtgtgatgcgcacgttttgggcaaacgatggttgcctgaaaattctgggttgccatttttttcggttggttat

SEQ ID NO: 276524 - DNA, 631 bp, Cannabis indica
tgttcttccaacaaagtcttgcactttttttggatgtgatggttgttaatggctcatccacttggtgaagtaatcaactgcgaccactgcatattgcacgccacctttgccattggtagctatccgatcaggttaattccccaaatggcgaaaggccaaggacttttcatctgagttaactcgttaggtggtgctcgaggtatcttcgaaaatgtcgggcatttgttatattttttaacgtaggccttggaatcttcgatcattgttggcctgaattaaccttgccttagaattttcttagataaactttgcccgacagcgtggtttctgcaaaatccatcatgtacctcaaacataagtcgtgtagcttcttctagggtaacacatctgagtaaggcatggagaatccttgtctatacataattccctctactatgatgtaccgtgcagccttccttctcatcttctgagcctcatttcgattatttgggagttccccagtgttaaggtaggttgcgattggagtcatccagtttggggatgtatcaatcatttcaatctcctccgtgccagtgatgctaggttcttcgagaaactgaataggaaccagattcggtttatcacttacatt

SEQ ID NO: 276525 - DNA, 362 bp, Cannabis indica
tatggagattacatcggattggacagatattgaacttggataagatatcataaacttaccgttgtatccatctaagtcaatatcagttagttgatcttaggtcaatagatcttaatcctaatatggttaggttcgatctcaattgtgttatttctgttcttaaagttgtttgttaaagctcggacggcctaatacttacatcttgggaacatgatagtataattgagtgggagcgctaatcaaagatatgaaatctataacttctataatttctagaagtgaaacgatgatttttttcgagcttggcttaatagagataaatgattgaggcctcattttaataattatattagtttactgaa

SEQ ID NO: 276526 - DNA, 658 bp, Cannabis indica
atggtatttaccctataatttaatataataaaagtatgtctaagcaatcgtaaagcaacatgtttagaaatacttgtgccaaatactctacatattaataccatttttactgttactatgttactagggacggacccattaacatatagcccccaataataataatattgtcttttaaataattaaatacaaatttttttaatttaataattataaactaaaataattgaaaaaaatcttcacaaaattaaataaatttaataaaaataattataatataactataaatatatatatatatagggcaagactatggtaggacctagcaaaagttccctaccggtagggaacgttttttgtaccattgattttagtatctatgtggttattatgatgtaaggtgtatactcttacgataggactgcttgtatacgattaaaactttatagatattataataatatttaattatatttatttttaaaaaataatattaataattaaaatttattaattttatttgaattatttttaaagttattttgtaatttttttatttttaaaagttattttgtaattaattttatattggtatttattttcaaaaagaattatttttctaaactcatttttttggcttcttattttttggcttttc

SEQ ID NO: 276527 - DNA, 652 bp, Cannabis indica
atatatctcattatgttacacttttacactttagtagtatcaatgtaattatatatatggtgtaaagggcaaaagtgatctggtaattaggggtgttcatcaaaccgctcaaaccgttcgcaccgcaaaaaaaatgtgatttgaaattctttgcggtgcagtcgcggtttgaatttttcttacaccgcgcggtgtggtttgcggttttgaattataaatatgaggttcaaaccacaccacaccgcacattataaaaataccaattttatatttatttaggtccaatatgtgaatgtctaacccaaagcctactaattattgtattattgaaatgtaattttttttatatttattttcaatccttatggtatgtttgacaagtgttgctcaaactttgttgtatatgtgatagcccaaactgcaaaaactactgcaccgcacttttttttgcagtgcggttctgcgattttttagtttcgcggtgcaagtgtagtttggaaaattagaaaaactgcatgtgcaggttagtttgaaaaaattgtcaaaaacctcaccctgcaaacacccctaatattaatatcatgagatgagttgtaaatgacgaaaataattaataattgtggtaaattgaagaataattaaattcaatgtg

SEQ ID NO: 276528 - DNA, 554 bp, Cannabis indica
aattttactacacatttttttaaaatatttatcactcttttaattaaaaaataaataaactactaatatttgttgcacaaacacatccaaagttttattattatcattttacaaaagctttgaatcaaaattatttttatctagctgcaaaaaaaattatttttatcataaaaaattataaagaacatatacatacatatgtccaatatctacactactgcaagcacgtaaaagtaacaaataaaagaatatttatatatatattgggtaattttactgttttgtacctcataacatggtataattttttggccaataacattaaattcaaacaaaggttacatggtatggtagtgtgtatgtacacttatgattttttttttttttgctaaaaaaaaagcaactgctgtataaaaaaaaattgttaaaaaaaaacaaaaaaatgactgctttatatatgtcgtgtgtatgtatacattaatggactttatttttttcagatttaagttaatagactttgttattttattttattttatttttttttgttattt

SEQ ID NO: 276529 - DNA, 637 bp, Cannabis indica
tttttttttttttttttttttcgatttttgcctatggtcgcgactaggctttatatggtcgcgaccaggggcgaaaaacgagatttttggccagtttttgactttttcaaaggtagcaaccctaatttctatttaaggggctcgtgttttagaaggaagggaggcagaaattggacccaaaagtgaaagaaggaggcagaggaagcaatggtggcgatccggaatgcaatcaccaactagttctttcttaaactcttgatttctatgttaatttctgttttagttttgattatggatgttattatggattttatgaactaaactcctatttagggagatgatgaatgttgattgaaattacttttggttaatgataattgctatttctcctttcttgattgtgaatttatccatatttgtgtttaattacatgtttaagattgatcaccttctacatgttctatgatcccaattcaaaatctgaaaagtgagaattgggaatgctaaaattggataaactaggttttgatgtgaaacgaaagtatttgcatagcctttgtgacatttagattattgcttaatgctgattatatgttaatctatctcagagatgattagataacatgtgatttaggac

SEQ ID NO: 276530 - DNA, 544 bp, Cannabis indica
tttcagagctttggttggttaatttcctgttagtctagggtaatgccatgttaactttcagtaggtagatttttggtttaaaacctaagtccccaattgtgatttagcgtatcacttatccatgttttgaacgatgtgatttaaggggctgtaatttgctaagcagttgttctactcaggctgggcggcacacctgaattcggaaatgatgtaagattattgcaatgttatgcatatgtatttacatgtttagcatacatgttgtttatgcttgttagagtacattgataatagtatcagtatacatagagttgtactggatactaataaatgtatgttggctgaaatactaatcgatgatatcacatcaatatggctagagtatgactagcatattgagtataggttgatattatggtcgatagtattttcatatgaacgttctagactcagtaccgtgtgggacaaggggatagggttatggttgggtgttgggcgcctgattataatcttggatattgttatgttttatgttatacttttc

SEQ ID NO: 276531 - DNA, 699 bp, Cannabis indica
tttctaaatattggggtccaaaattaaataaattcatacataattataaaataacagaaattagtgctaattgtctttactaatccaaattactaaagcggtcattactggcgctctgcagagtttcaaagtggcgttgacgagttcgttgcagttacaacgaaccacgtgaattctgacagattagctcgatgcccatgcatgcggtgtttgaatgtgaatttccacacacttggaactaagggttcatttatttctcagcgggatccaaccttcgtacaatccttggtatttccactgggagactttttctcagcccgcagttgaacttcctgaaaatgacgaagaggaaatggcagatgtgttggcagacatgttaagaggggaccctgggtttgacaaatctgccaacactactgattctttcaatgaaccccctatcaatgacaacaacaagtttgatgacttgtttaaggagatggagtctgagttgtatccaggttgcaaaaaatcagccctcaatgcactggtaaagcttatgcactgcaaggttttgaataggtggagtaaccactctttcgatatgttgctgtccatcttgattgaactatttccagaggggacaaaattaccgaagtcgcattatgagtcgaagatgcgattgcgcaatctaggtttgggttacgactcaatagatgt

SEQ ID NO: 276532 - DNA, 646 bp, Cannabis indica
atgtaacaagaaaaaaatttaattatttttttatcaatttttttatccatttcaaattttattccattccattcctattctcattcccattcccattcctattcctatattttcattcctcccaaccaaacgcctcctaagtggaagcagtggtaatgggaaatgacataaagtcataaaaatgattttgttgtcgtttcatgaagcaaacgacagtgcctgcctctgcctgcagtgccttacatatctgaaattaaacaaattttgtctgaaagtgaaacatgttgatcatagtgttgcagggtttcgatgctatagcctatactcatgaaaataaacgacacgcaaaagtagtgccgtttgttttaacattattacttgtttttgttgtcgtttcttatgaacaacacatgaaaggcacctttgcttaattttacctttctatttatatacttgtacattataggaggggtgagcatccgatccaatccaacattttcttcctcatccgatccaattcaattagtaattggatttggaaaatcatcatccaatccaatccaattagaccgcaaaatctaatccaatacaattcaattactaattggattggatcggttttttaatttggatatccaattacaca

SEQ ID NO: 276533 - DNA, 782 bp, Cannabis indica
tataataatataataatatacccatataacaatatccagatatatatatattctattaggcattatgcacatgccaataatatcaaatattatatcatcataaaaatctcatacatatttaaacccataaatatgtaaaataaaaaaaatactctctgctaaaaattacaaaaataccctttcggaagtagcggttattacaattatccccctctaaaagaaaatttcgtcccgaaattttattcaaataattctggatattgttctcgcatatcagactctagctcccaagtagcttcctcaaccacgctgtttctccataggactttcacaaaggtaattgtcttatttctcaaaatcctatccttttgatcaagaatctttaccggtcgttcattgtaggacaaatcttcctgcaaacccagtgtttcatagctcaaaacatgtgatgggtctgacacatatttttgaagttgggatacataaaatacattgtgcaccccagataatgatggcggtaaagctattctgtaatctacactacctactctgtctaatatctgaaatggaccaacatatctgggacttagtttccctctcttgccaaatctcttcaccgagagtccttttcgtggtgtcactcgaagaaacacatgatcacccacttcgaatagcttcgttggtgtgctgaagcgcatctggccctaggagtttgttctctcccaactcatcccaatgcagtggagacctgcattttcttccatactgttgggttttatgcc

SEQ ID NO: 276534 - DNA, 659 bp, Cannabis indica
tgaatgataatctgaaatttatttgaaattaattgagtatgaaatgacttatttacccttgtgagggtgtaggtgtgaatattaagccatgagggcattttggtcatttcacccctaattattatgtttgattaaaattgatttttgatgaaatgaaaagcaattttctggttttgctttcctcttggccgacccttcccctctctcaaaccctctcttaattttcaatttaagttgtgagaaatagcttgattttgtggtggattgtgaggaaaaatttgttggaagcttggagcttgtttgagcaagagattaaggtagctttccatgatcttaaacttattttagctgctgaattattatgggaaaagcatgaattatgtgatgttctcttgatatgcatgtgttcatgaaggaattttgcttaaagtattgagcttgtgtttatcttgcttaaatctgaatttttgatgtgttttaaatccttaatatttgctagctgctgtaagtggattaattgtaaatttggttgtgaaaagcaagcttgagttcatggaactcaagcttgggctttaatggcactttttgattttttatacaattgttgggtttaagttatggaatatgtttattatgacatatattgatgctctggaaag

SEQ ID NO: 276535 - DNA, 810 bp, Cannabis indica
taaattaccctacaaccaactcaatcttagctcgagtcatctcatttgctagctgctgggagatttgcttcaccgtatttaactgactctgaccctttctacttaaggcatcagcaaccacgttggccttaccagggtgataaaggatctcacaatcataatccttcaccaactctagccaacgcctctgtctcatattcaggtctttctgggtaaagaagtatttcagacttttatgatcagtgtatatctcacatttctcgccataaaggtaatgccgccaaatctttagcgcaaataccactgctgcgagttctaaatcgtgagtagggtacctctgctcgtactcctttaactgccgagaagcataagctattaccctcccagcctgcataagcacacagccgagaccctgtctcgaggcatcacaatataccacaaacttttccttatctgaaggaagagttagtacaggagcggtaatcaagcgttgctttaactccaggaaacttttctcacaccgatcagtccaaacaaacttctggttctttcgggtcagctccgttaagggtacagcaatctttgaaaaaccctcaacgaaccgacgataataaccagccaaacccagaaaacttctgacctctgtagctgacttcggtactggccaatcccgaacagcttcaatttttgccggatccaccatgatcccatctttatccactatgtgccccaaaaatgagacacgggataaccagaactcacactttttgaatttagcatacagcttattgtcccgtaatcattgtgaaa

SEQ ID NO: 276536 - DNA, 265 bp, Cannabis indica
agttgcctataaataaaaagtgatggctcagtcaaataataagttttcaattagtttttcaacaagctttctgtcagaaaattacttttcagaaaaactgagccttccctctctctctatagccgaaccaacctctctctcttttcctcttctaaatttcgaccctcagtgatagagtaagtgcccacacacagcaagtggtacctcaatcatagattggaagactgtgaaggatcacacacaaagagaaggacattcaggctca

SEQ ID NO: 276537 - DNA, 632 bp, Cannabis indica
ctgtttatttttctatttctttcattttgtaaaaaagatgagttttagtctgtttctgtttatttttctatttcttttatcaaagattaataataatctattaaaaaataaatattattaatttgaaattgatatttaagtttaaatatattaaaaataatattttattttaattttagggtttgaataattttagggtttgaaaattgagaaaattgtaaattggaaaaaatcccatgaaatttggattttttggtgaaatcacccatgttgcccacgaagaggatgcacgcaacctcatccgcgcgcggaatggttgtgcagcagggtggagcgccgagaatcgtcggcgtgtgcagcatctggtgctgcgtgtctgatgtccgaacctaggcaagctggccgagcattaagacaaaatggtgtctgaaatccgcgtgcgcagcacctccttgtccgagggtctagtgcgcatgagcaccaccctcgacacctaatggacccgatttttcaaacatccataacttctttgtttttcatccgaattgagttccgtaaaaacgaaaattgcttaatttttcacaaggaatccaaataaaatattttcaaaaagaaaaaaatattttcatgga

SEQ ID NO: 276538 - DNA, 555 bp, Cannabis indica
aaagagttcgcccacctgacccagcgagagaatatgagcatgacggaatatattactcagttcagccggttggcgaggttagcctcgggatttgcgccaaccgatttcagtaagaaagaaaatatctcgatggacttaatgtgaagatcaagtatgaccttatgatcactaccgacgataagaccatctaagctgagatggcgaagaaagcatggtgagctgagggcgcagctagatgtatgtggaatcagttaggactccggaatgtggcggggctcctaccccttctgcgtcaggtttcagcaggggaggtagtggttcggccatggactggaggaggaatcatccactgcatccggtggctcgaggcagaacaagaggttccgagggaaccagaatcaagacgatcgtcagggtagtgttaagacccgttattcctactggagtgtcttattagtaagaggcattctccgggtgagtgcttgggtcaaggttgttttgtgtggctgctagaatctctagtaaattgggtagaccctatgatagatatgaatc

SEQ ID NO: 276539 - DNA, 602 bp, Cannabis indica
aagggcattttagtcttttaaggggggattaggtggctgattgtgaggatgacacctagtcatttttgggcagcaaaggatttaatcaaatcctttttccaatttaggaaagtcaaaaagaaaagaaaaaagaaaaaaataacaaaacttgaaagagaagctctttcttctctctctctctctcttcgaaggcagcaagagcaaggtgaaaggggctgtgatttttgagttttcagcaaggaattcaagggatctttgaagctaaggtgaggtctagttttatccctctttctttcttgaattcatggatggttaatatgagatttctaggtttagtggttgttaggttttgaaatgattagggttcgaattttatagtttatttgagttaatttaagttcctagcagctgatattgttgatttggttgagctttgaattcaaagctttgggctttaatggcaacttgagtgttgattgtttgttctgtgaattactggttggaaaatgttgtgtatgcccttattaggtgctctggaaagtttcatggcaattggtggaagattgagcaataaatgagaggttttgggaaacctggtgcaa

SEQ ID NO: 276540 - DNA, 478 bp, Cannabis indica
ctcgaagatcaagggaacatgtatgtacattatgaaatgtactcacctcaaacatgttagaaagtacattcttcttcgctcttaatctccacccacaatctgtatccttacatgtgacgtaccaaatatcagtaccggacttcctaacgtagtagtcaaaccctttcttcattacatacaagccaaccaccatctttaaatgctctttgtctctaaaaaacattctcacatgtaactccccgcctgatgtgtcacccatagatatataatgactatgatcctcgatgtcttctcttgtataaattttctccttgaatttaccatagtagtaggtgatggaaatattttaccaggaactagatttactaacaagtatattttattaacatcctaatatgaattctaaaacaatgaaataagcacatataaagtttaggaaaccttacattgcgtggtgcggaatataatgactccttcc

SEQ ID NO: 276541 - DNA, 596 bp, Cannabis indica
atgaaatggccagcaagaggcacattaacctctttagagtctgacattttaaatttctgcattaatttttcaatgtagggactttgagacagtgtcagtttcttgttcttcttgtctcttgtgatgtcaatgccaagtattcttcttgctggtcccaaatctttcatatcaaactctccatgaagtacttcctttagcttagttatttgacttgaatcctttcccattataagcatatcatcaacatagatgagtaagaaagtagcttcttcagtttcagaacctttaaagtaaagacaagtatcatactttgatctggtatatccaactttagtcactacagagttgaatcttttataccattgtctaggagattgctttaatccatacaaggattttttcagcaagcaaaccagttctcctttatcagattccacctcgaatccttcaggctgtgtcatgtatattgtttcttcaagttgtccatttaaaaatgctgtctttacatccatttgctcgatttcccagtcattctgaactgcaagggcaagcatcattctgatggtcttcattttaaccacaggtgagaaaatctc

SEQ ID NO: 276542 - DNA, 655 bp, Cannabis indica
acttagtaattggaaaatatgtgttttagtatgttaattattggctgaaataggtgttatgtttgcatgttttcactctcactattcaaagagttcaaaaacttagaaaatttagaaatttcaaaagctctctctctctctcttttcggccaagcttgggagctgctagggctgggttctcttgtttgattcaagtgattttcagcaagatcaaagtaattctagtggaggtaaaccttgctctaacttcttttcttgtttcttggaaattttggaagaattttatggtttgcatgcttagtttaggttgttgttgttgctgtgattttgttgttgtttgcagaggtttaagcatgattaattgaggataattaagctgcttgtgatgcatgatagttaggttgtttagagttgtggaatttttagttcaaaagcttaagttttcaaagagaaattttgaaatttgttgctgtgattgttgcatgagtttgtgtatgttttctgcagtttctaaatgcatgtttatgtagtttaaatcatgtttaaatggttgtttatgagctttagcaaagtttgagttttgaactcaaagcttggagctcacatggcatttttgatatctgagatttctcgatggttttgttgctttagactt

SEQ ID NO: 276543 - DNA, 549 bp, Cannabis indica
tatcttcaattatcaacaatttagagattaatttttaattttctttttatcttacacacattgtgtttccttaagtatttgaacatcaatttttagtttatttttggattaacttaagaacatatttaaattatcaagcttttttaaacactaatatactgcattcggtatttactttttatttatattaaaaataaaatggtttattattaaaaataaaatagtttatgagaaattcatgggtcacttttcatttatatataataaaataaatcacattaaatccaaaaaaaatacgattgggtttttgctgttgtacatctacgattaggttttctttaattatttattgtattccttttcctattacaatttggacattcccatgagatcacacataatattccaatccgcacttcctcttttttcttcttcacaacttaataacaaaatatataagtaataataataataaaaaagaagcgtgacttttatcaaagttcacaaaaccaagcatcaatggcgaaaaaaacccaacaaagtttacag

SEQ ID NO: 276544 - DNA, 539 bp, Cannabis indica
ataaatcacattgcacaaagagatgggtctgaactgggatacttttttagggttagggaccttaggaatgagagcaatatttgtagcattaaagcctctatgcatattccctgactggaaaaagtccacaactgcatcacagaagtcttgtcccacagagttccagtagtgtttcaagaagagaactgacataccatccggacccggagccttcaagcttcccatagagaatagcgtttgtctaatttcctcgtggtgtgggatcacctcaagctcagactgctccaaaggggagagatgatcatggattaggtagtctaagctctctagagggccctgaggtgggtttttgaaaatatcacccagaaaaccagtaaactcattaccaatctcttcttaatgggtttttgaaaatatccacacaccatccttgttcaagatgctatctaccgagtttcttctattacgaatcgtggcggaaataaagaaaaaattagtacacttatcaccatccctaatccaagaaaccctggatctct

SEQ ID NO: 276545 - DNA, 512 bp, Cannabis indica
aaagcattttaaaaaaaggagaagctttcttccaaggcaagtaactcctttttctccatcttcttctcctcttccttcgagcaatctgaaccagccactagagggattggtttgcttcagccaacatcaattttcagagctaaatttcatctccaagctaaccttgcaccctaggtaagttcatccttctagtcttggtgttttcttaagttttcaagctaggttttgttatttttttaaaaattttcaaagctgtaggtttagtgagggtgtaggtttgttatccaagttaaatatggtttgttaatgcatgtttggattgaattcatggctgttgggattgattggtgagtgagaaagctaaaagaaacttgatttcttcacttgagtgtatgatttcaagctagagattgaaccattgtgttttgcagcttaggttatgtcatatgtatgttaataaactgttctggaaagtttggataggtttggaggggttttggttcgattttggt

SEQ ID NO: 276546 - DNA, 616 bp, Cannabis indica
tgagttgacaactctattcaatggatgatgctttgactctcgcctaaacgggacactgtatcagtttgttgaaagaccttggaaaataaactatgttagatttagtatttttataacatatgtgattatttgttattttctgaacatgtgtatgaatttatgaaccaaaaccttacttctgttttattgatgtgttgtagtgccattatgaataaccctcaccccgatcctctcctagttaatatcttagcaaaagaactctatagtgtgaaaatgcatcctggtagttgcataaactcgcacctgttgatgatgaatctgaagttccaaaaggcaaatctactaggaattgatttatcaagagaacaatgggtccaattcattcttaatagtcttcctccggagtataatgaatttgttgtttcttacatgatcaacaatttcaactcctccgacatggacaagctcgaagcagaattacgagcccatgaacggaatctgattgcaatgggtccccctgggtttgcaattcataatcagaggaaaaggattaagcatgaaggctctagcaaagctgcttcttcaagtacaattatcagacataatcttctatgtt

SEQ ID NO: 276547 - DNA, 423 bp, Cannabis indica
tgtttaagtagattcaagctggtttgaatgcatgttaggtgattttactcaagtttgagtttagaactcaaagcttgggctttaatggcactttttgcttcggtgcaatatgggtggttttggtgccttagaaatgttctttgggtcatatggaataggtctgcaaggtttgaattgatttggagtcgaattgtgcaagttatgaatttttatgtttgctgcctgcgaggaaccggaattccggttgtgcatccggaattgcagatgggggttctgaattttccagaagcggaattctggctgggcaactggtttaccggttggggaaatttcagaaaccctacatttcctcgattttatgttttaggggtattgccatgctttttatcgatagggaaaattttaattcctagtttaagtccc

SEQ ID NO: 276548 - DNA, 673 bp, Cannabis indica
ttcttggggccatatttcaaacttaagagaataagagaaatttttaagagtaagagataggtagaatacaagagcacttatgaataagatttccctttgcttttatagagcagtaaaaatgttgggaatgtatgaaaatttaatggtcattaaatgcgtaactgtacagggaaaacgcatgaaatggcgtatttgtcgactgaatgtcgatactatgtcgacatcatgtcgacaacatgccaatttagtgtcactgctaacacatttgtcgacgacatgtcgacttcatgtcgatatgttgtcgataggacacgtgtctgacatgcaacgtttcagttgggaagggttgttgggaacgtaggtaaaatttattaacattaaatgtgcaaccgtttttaattgtcgattgaatgtcgatggtatgtcgatattatgtcgatgacgagcatggttgttgttgttgtcgattgtatgtcgataatatgtcgacacaatgtcgacaatcagtgccctaatttctgatgttgtgcttctcgacattatgtctattgatatcgatgggatgtcgatttttatttttttttgggtgttttttcctttactcaccttgtttttttggtttgcaattgcaggagacaaagtgttccttgttgtatcgtacgatggtgtttgg

SEQ ID NO: 276549 - DNA, 781 bp, Cannabis indica
ggatacatattgagataggaacccaaacccagactcggaccaggacttgaaccccgactgggtcccgaactcagaccgagacctaggacttggacctggatggggaacctagacccgtgacacgggcataaaaattgggaccgagatcttcctgggacccggaccaggacctgggacccaaagtcgaactagactgggaccctgacctcatggcttggaactgacccgtagtcagtctttggatctgggacccatacccggactcaaacccagacccggactcagaccctgaccaaaacccacacccgtacccaagacttgggtccgagtccaagactgggtttgagtctaggaactagaatatgactaggacccagaactagagctggacgagatgcggacccgaattacaacttgaatcaggactcgggacacgaacccaaacccagacatgggcttggaccaagacccggacccaggacctggacctggattggagactcagacctggacccaggacccagacctagattggggtcccaaactaaaaattagaacaagaatcgagacccaggactgggacagtgacccaagccccaaccccggtctcggtcccaaacctggaccaggacatggacacggacagggacccaagatccgaatcagaccgaatattgggatccaaatcttcacccacgacatggggcttggacccaacccctagtgggggtctaaatatgggaatcgtaccaagacccgaacctggaaacatttctagact

SEQ ID NO: 276550 - DNA, 1156 bp, Cannabis indica
aacaatgtttgaaataaagctgattgtgtgactaaatatgaagacccataatccatttcagaagctctggtcaaaaattaagcagacctcattctttacaaatcaaaagtcatttgtggaaagatctgaacttagagaaagaaaaccactaactaaatacattcatgacttaatgataccaaaatggaagtagtgtgcagaagcacaaatataactaattggaagtgaaaattttgaattcaactcattcgtaacttagtatatttaagcaggtattcgatattatgtgaaacaaaacatcaaacacatggtgggcagtaccttagcttgttcttcgcacttctcactgcaaaaagcaacacttggagattgatcaactgcagaatttttaacctttttgagacagaaataacagacactttggatggtagagagagaagggtaagagacgacgggtttagccgtgtgtaagagctctccggcgctaattctcctagtcgcgaaaactcctcggccggatgactccgtgagctggacctggaccggcggcggtgctgcttggactggaatctcattgtcagcttgggcctcgtcggaggtggagaatgacgatcctagaggtgcatttttctgaaaacgctgcgttttaaaccgcgaaagacagctacggctgtggcggagcaaggtccagtttgacatttttaagtcaacacctttgactattcgattcccagacactaaagaggatttccttcctgtcaaactttatcggggcgggtccgccccgaccccttagaaacccgacattgtttatttattgagattttttctattataaactaagaatgtatcaaatttacatttatgaccctaaaaaagaaaataaacaaaaatagaaactaaaaagttgttaattacaaaaatgccggccaaagaaaaacggaaactccatcttcttcgtgaccagccgcacccttcttcgtgacccaccgatccaaccccaacaacccaatctcaaccatttttcttccaaaaccagcaaaatcaaaatctaaaaaaatgtagaactcataggaaacaagttgaatcccgaaaatccaaattcaaaaacggaaaggaaaaaaaaaaccaggaaacctccattgatgtacaaaaa

SEQ ID NO: 276551 - DNA, 103 bp, Cannabis indica
ggtccccacactagttgagacaatattacttgtaagactcattcaattggttttaattaatcaattattaaatagttagagttggcatttaaatggctgaatt

SEQ ID NO: 276552 - DNA, 760 bp, Cannabis indica
aacagtaaaataacactacaaaacagtaatttgttgttgattttagtaattttttctctttgccagattttatggtttttttctggtgtttctatgattatggtgttgatttgtccatccccaaccacgaaggagaggtgccgtttgtgttttgttactgtttacagtataaaagtaaatatattgggcatggacagtataaaagaaataaaaatgggcctggacagtaaaaatgtaaagtttgccgtgtcccaatatttttgaaaacatttagtaaaaaaatagtatttttgtaagtttctcttaattattgagtgatgttattattagttggctaaagctaaatatagtttggtcatcaaaagagcatttctcaccagagtggcttttctaggatctccttcaaaaactcttttatcatttcttattatttattgttattaggaaagactcggttaagctgacacatgtcatcacctaattagaccacctcatataaatattaatgacgtggtctagttagttgagaaaacgtgtcatcctagtcatcactttaatgagaaaacgattcaaataagtaaatgaattgcaattttagtaattttagatagtattattgttaaaaaaatcatagaacttctatttgttacaaatataaaattttgtataatgatgctgtaaatatccttaatgaatatgatgaatttttattcagctttttgtgtctatttttttttttttttttttatctttttatatt

SEQ ID NO: 276553 - DNA, 512 bp, Cannabis indica
actttcatcccctcgaatcaaatctaatatgcccttgttccactgatagttagcctggtcatcacccgcagcttcccaccgagcaataactcctgctgggaaaatacagggcatgatgacacatctatttgggtagacctctggataaaagtgttgtcgcctcctcatcaaatagaatgccgcatccaaatgctaaaacatgaaaattaaatatgtcagagattaaataaaaaaagagttagataaagtctttaaaagcaaaagcagtaaaaaagtcttaaaaacttacatcgttcccaagccaaaacttcggagtatgtagttcgaggaaccaagacgaatagtatcgaccggtgaagcactctctcgggtacttgttcccaatctggccgagtacccaattgtgaaaagtcttgagcagcttccgatcaaccactctaagtgggtccgcattcacgagtgtcgaagtagccctagccttcttcttaatttcagtgtactcagcgaaccac

SEQ ID NO: 276554 - DNA, 304 bp, Cannabis indica
cggtcggtgatacgtccctgaggttgagggtttgattctagccatctccacgatgttctccagctggtgggggcagattagggtggaatgaagctcagccgcatcccatcctgtggcccgagacttatacccctcctgggcaacaagacccagcgagacgtcttcaagggtagccagacgcttaccactcttcttggacgactttgaaccagacgcagacatgtcttgattctgaaaaaagagttaagattccagcagttaagccccataccaaaccctaaaccaagaaaaagggaatgggggt

SEQ ID NO: 276555 - DNA, 522 bp, Cannabis indica
cccttccaatgcccctgctgcctcagttcatcctcctgctgttgcaaagcctggagattcatcgcttccccagcgtgaatctcaaaccgagaagccaaaacgtccacccaagcaagttgctcgcaaatcggtaagacccattcgcacctggacttcctcgtctgaatcttcaaaggaatctcctcctccattggcagttccacctcctgctgcatcaatgcctggctccactccaacaggcccttctactcgaactcgagcccagcaagcctctgctgagaaggaacttcgagcctctcaatctcgtgagaagacagtccctccagccaagaagaaactcaagactaatccaccctcggcctcatcaagttccagttcagaagaagaggatccaatggaagtttcttcagacaaatcagtgtcacttcactctgagaaggacagtgaggacacagaactcgagccagagcttcctcgtccaaaacttgcttctgcagcaaaggcctctgctgctgccaaagg

SEQ ID NO: 276556 - DNA, 486 bp, Cannabis indica
aaaggcctctgctgctgccaaaggcaagcagcccatggaagaaccttcatctggtaatatcccttcctctctttctggctgtcctcgtttttattatcgagacaatgagcgtgactggaatttatatgcaaaccgtaagtttgaaagtgagaggaactatgatttgcatgctcatcgtgtttatggtattgtaaagttcattcaatttcatcaatgggaaaacactcttactggtttcattggatacattgcaaacattgttaaggatttttatgctaatctcactgatgatttccttgatgagaattctagactttatcgaagagtttatgttaggggtcattggttctctttttctgaaaaggatattgctcaagctttgcaattgcccgagaatgtatccaatgcagtgatgtccatggatcgtgagttgatgcactctgaactcacgggtgctcgttcagaattgaaaccaggggagagtct

SEQ ID NO: 276557 - DNA, 823 bp, Cannabis indica
tttgaaaacttgaaaataggtaaaaatctatctttttgctttagtttattatcttatttttaaaatttgattaatttatcttatttttaaatttaaggtcaaatatttaataattttttaataaaatgaccttatttgtaatttaaaataagattattttaatcatgaaattttaaattgaaattaagatattttgcttaacttttaaattttgttattttatttaaattaaattataaaattagaaaaatgatatttatttatcattttattttattgaatatttaattttattttaataacatgaaatttcaaaagttgttagcatcgttttgaaatagatatttaggttagttgaaaacctaatttttctaatttataggttaattttcgaaattaattattcaatttaatttgaaattttcgaaaataatattttaatatttaattttttttttgaaattaattaatttaaattaaataaatcctatatccaaccatacaatgtgttacatgtgtgtgttttatattgtttattattaaaacaaattttataaaacttattattgtttgatctaaattgccatggttaacatgttgacagatccaatgatctgattttaaccaatggttcaattgtcaataggtcaaataaataatttgtaacatgtaaattttgcattcttctttcatctgtgtataaacctagtaacatgataggatccatccaaattagtgtgcctgtgtgagcctatatgtttgctttgggcttagatgcatataggtatcccatttaatttttgtaattaaaatggactaggtt

SEQ ID NO: 276558 - DNA, 591 bp, Cannabis indica
ttgtcttccttgggctggtgcggtgcttgagcgtgctccttgacccccccaagacaaattaggaagattcttccatgcttgattgtaagaatttgagaatgccccattgttcactactacaaaattgggctttagaggcggtttttaagggctttcagcgtcggtattggcgaaattcgctaccgacgctgttccgggtgacgctaaagggttaaaaacaaccgacgccataggaagaccctatggcgtcggttattaaataatcgacgccataggggtcctatgacatcggttgtttcatataaccgacaccatagggtcttcctatgattttttttttcagcttccaattatgtattttagcataatttatatatattattttattattaatataattaaattaagtataaattatatataataaccataaatacaaattaaattgaaaagttgaataaatacacatctacattactctaagtgtttgtatattagctatctttttattaatattttatattatgtgtttgtatttttgtagtatattagtatatttttataatttttttttaatatattagtatcatt

SEQ ID NO: 276559 - DNA, 545 bp, Cannabis indica
ctgaaaagaaacaataaagaaactgtaaattaccttctccaaaggtaaatcaaaaatcttgcccttcaagtctcgaagggttggatttttggtgacgatggtgttgctccagttcagaatcctgggaatagaagatgaaactctcttacagaaagagttcaccattgcaggacagcattcataaaaccaaacagtgaaaacccaaggacatcccaatgccctataccagccatcatattggcctcccttctctgcctttctatttttcataatgatcccatgctcaatcctacctttgaatgagtcaattgtcaattcaaatgattccctaccccaacaatactcatcccaccgaccgctatcaactacatctagaacaaacctagacacttctttgtcaggagtattgctaagaagaaaacactgaatgaaatacaaaacagccattttcaaaccaatagactcatccaaaccccaccgactacccaaaaaagcatcctcgatggctttgttgtcaatagtttttacaccacggaaacatgttt

SEQ ID NO: 276560 - DNA, 516 bp, Cannabis indica
caagttatttatttttctgcaaatatttttatattctacctgttctgttttgttaatgcaaaactggtttctgcaataacagaattacattctgcttctgcaggcgcatacagttttatattttcgtatatataattgacatttgcaaaaatacggtttttgagtttggaggacattaagatcagtgagattttctttacttagaattaaagccagaagggagagctaggacttatgccaaactgaatcgagttctagctaattctagttggctagataaatataccatagctaagtataccttccttcctaaaggtgactttgaccatgtatagcccaacaattatttcggtgtaccaagtatttatttattggggttttttctattttaggttaaaattactcaaaataaacatttataccatcctaagaaaaaataaacatttgtatttttactaattacaaaaataatatttataaagtttttttattacaaaaatacaatggagagataaa

SEQ ID NO: 276561 - DNA, 653 bp, Cannabis indica
ttctgcatgcatgcatgctcaatcgattgatgaatcgatcttggttttattatgttgtttttttggttttgaagtttagggtttaattttacctattaagattcatgtttgcttcggtttttttgtttaattaagagataattcaaatcgaaagtatcgaagatgaatctcagattctcttgtgtttcacccaccaaggtcaactaatgtaattgcaactcagaatctgattacgactttttgcaataacgatgaattgggtttatttggaaattgagtttacacttaatattgcaccattgttgatgatacaggggaataagttttatttattttgagctttggtgctttaaagctagatggctttatggatgtttaattcgcaatgcatacttgtgtaaatgaatgattatttgtgggttgaagggattaagtatttgaaagtgtaaacgatttttggaatgtttgcagaaagcaatagagagcaatattgctttgaaagggttctcacaaaaatactaaagtttgccgatttgctgatttgataaaatatgattcaacaatattgtaatgtactaatgtgtaatggttacagagaaaggggataagagatgcaacaaaaactttgtgtgattattacaaattgaaaaaag

SEQ ID NO: 276562 - DNA, 704 bp, Cannabis indica
aagcagtcttgaacaaaatggttgaaagaagccccattatcgatacatggttctggccaccgtttgttgctatctggacttccacgaccagtgggtcgttaaagttatggttggctctcctgtgcgtggaactttgggcttcctctcttccacggccaggatgacttctttttgctcgtactgagctgttcaggcatatctctctgagctttgcccgtgtctccagcgatatgcgggcctccaataatgacttgcaagtgtccatctattgggggaggcatcggatcctggttgttctgaccttggttggccttgacatacttctgtaagcgcgggttgttttacttgatcagaagttctatttcccgcttcaagttgtgacattcgttggtgtcgtggccgtagtctccatggaactgacaaaatttcgtcatgtcccttttgctggcatctttcttcatgggcctgggcttcttgtacggaattaacgaccgagttgctatgtacacactctctacatcttaagttaagatagtgaatgcagtgtgtttggcgtgatcacggggagtctattcgggcttttcggtgaactttcccttcttcccgtttccttgcttgtggttgttgcctgaacgcttgccacttgaactgctggaataatggggaagttgggcggacgttccagtggaaggaaccttcgtttt

SEQ ID NO: 276563 - DNA, 735 bp, Cannabis indica
ttactaaagcagtcattacaatgaagtgcaggtgtttgttgatcaaatgaaaagtgagtttgaaatgagcatggttggtgagcttactttctttttgggtcttcaagtcagacaaatggaaggaggtacatttgtatctcaaagtaagtatgctaagaaccttgtcaagaagtttggtcttgagtcggctaagcaggtaagtactcctatgagcaccactttgaaattgacaaaagatgagaatggagtgaaggtagacactactctttatcgtagtatgattggtagtctattgtatttaactgctagtcgtcctgatatttgttatagtgtgggagtttgtgctagatatcaaagtaatcctatggaatctcatgtatctgctgtaaaaaggattattcgatatgttaatagtactctcgattatggaatttggtattctaaagatactaattctaacttagcttgttttagtgatgcagattgggcaggcaatgctgatgatcgaaaaagtacaagtggaggttgtttctttcttggaaataatttggtttcttggcacagtaagaaacaaaattctatttccttgtccacagctgaggctgagtacattgctgctggtagttgttgtactcaattgttatggttaaaacaaatgttgattgactatggatttgaattgggtgttttaactatcttttgtgataacactagtgccataaatatttccaaaaa

SEQ ID NO: 276564 - DNA, 695 bp, Cannabis indica
ttaaaaatgtgattggttgtagtttaattttgtgtttttgggttttaaaaaagttagatttgtgattggttgataatttcaaaataaaaaagtaagagagtatttgaagattttttagatttaataatttgaaaacatagaaaacataaaattgttatattcatttttaagcttaaaactcaaaatcatattcaaatttagtttttataaataccaaaccaatcaagtatttttatgtggacccccatcttttaagttttcaaaaatataaaattgttttcaaatctcaaaccaatcaagtttttcatcgttttttttttttttgtaataaaaatcataaaatttattaattaataaattcgttcaaaacaatagaacgcacttcagaggaacagtcctccaactgaagcgcacgacctgtagagaaacaagaatctcttgccaagcaatgagccaacttatttgcagatcgttttacaaaaacacaaattaacaaaggataaagccaaaagaaaaatttcgaacatcttgaacaataagaccaaactatgaaggtataaaaaataccgctctgaatcacttggacacacaccaagctatctgtttccaacatgactctatcctacgaatgagttacaatccaactcaaagcttctttaatgcctattatcttagcaatttcgggttgaacacaa

SEQ ID NO: 276565 - DNA, 614 bp, Cannabis indica
tcaaaaagtttcttgaactcttcccgtgtcatcacactgacatctcgagtttgattcactatatcccaccagacacaggcatgatcttgaaacataaaggtcgcactgtcacccacatattatcgaggatacggataacagtgctcatctactgatcagatcagccttaataatatcaatacctcccagaaaagccggaggttgcagcttcacaaaccgctcaaacacagagtcccagtgcggcataatatacacttggttacgcaccactggcacaggagctggtggtaacccttaattaacttgggcagcttgttgccttaaacgttgcaactcttcctcttgacgaagtatgatacctcgcattccttaaaacatatgctgccagtcaacaagaggattagcattgccaacccccgcattatcccccgaattctgcggaggtggaggcgctgctggtggatcggttcgggtagccccgggctctacttgctcgccctgcggtctggatgattgcggagggtccattatgttgggttttatgccctaaataaaattcatttcatataatcagatttacttattaataaagatcagaaataacattttatgtt

SEQ ID NO: 276566 - DNA, 1462 bp, Cannabis indica
tttattcctttgtttgtgactttgttaaagaagaatgtttgggttgatcctagtcccacaccaagttctgttaaggataatcgtagcgaggttgggagttttgttccagaaacaaatccagaggtgttggttgcggatgtattacctgaattaaacactatgatgccgagtgctgatattgtagcacaaatgcccttcattgatggtttttgtgatggtccagaccctgaatattatgttgagggcaatgatggcgtaagagacgacgaaggtacagaggcccctgctgctgtacctttgaacttgactccactatcgtaccaaataccaccgaggccaccgaggccaccgacacataaaagaatgccccgtagagaaaattgccaaacacctggtactagtagtagtcgtccaggcgaaaccagtcatgctagaggaactactgacagtacaggtcctaataatggtagagagaccaatgatgttagtggtcctactgatgctcgaggtaccaatgtgactggatggagcgatccattttcttcttcgacaagttacggtaaattcaaggagaaaatgtatacaagagaagacatcgaggatcatagtcattatatatctacgggtggcacaccaggcggggagttacatgtgggaaagttttttagagacaaagagcatttaaagatggttgttggcctgtatgcaatgaagaaagggtttgactactacgttaggaagtccggtactgatatttggtacgtcacatgtaaggatacagattgtgggtggagattaagagcgaagaagaacgtactttctaacatgtttgaggtgagtacatttcataatgtacatacatgttcccttgatcttcgaggaaaagataaccgtcaagcatcacctgtaatagttgcccatctaattaaggataagttcacaactgacggctcggatcagttgccctctgatataagaaaaagtatgcacaaggattacgggatccaaatgagttacgaaaaggcatggaggtgcagagagaaggcaatacacctggctcggggtacacctgaagattcgtactctttattacctagttacttgcacatgctacagttgcggaatccaggtaccatcacggattttgtggtagaagatggtcgcttcaagtattgtttcttctctctgggtccttctattcgggggtttaagttttgtcgacctgttgtatgcgttgatgggtctttcttgaagactaggtatggtgggcaaatgttgtgtgcagtggctttggatgcagggagtcatatctttccgatagcttttgctatagttgacagtgaaaaccacaattcctggacctattttatgagaaaattgaaagaaacgattggtgatgttgagaacttagcctttgtttcggataggcatcaaagcattgttcgtgctttggatatcgtgt

SEQ ID NO: 276567 - DNA, 519 bp, Cannabis indica
ggtaaaatatttccaacataaccatctctgcaaaaaaaaatgacaaagcaaaattagttaaatcagcagtagaattgactgggcacataaatatcaagataaaagaccccacatcaactactatctaaaatgttatttgcggaagaatcatctcgagtaactataaactccctagagccaatgatttcacggatgtctaaggtattaattgggaatagatcccaaactaattttcgatagccatttgagctgtattggtatgaaataccataatacgagctgttactagtgacctcgacatgaaattagggatacaacctatcaaacatatggccaatgagatctatgtagttccaagtataaaagttatattggttgtcacaaaatttgacgagacatgtgttgggttttatgccctaaataaaactccatttaattgtaatccattttattcaatatcaataaagaaacagaagtattttttcattcatttgtatgttttggttcatcttatcaatt

SEQ ID NO: 276568 - DNA, 589 bp, Cannabis indica
aaagtgccattaaagctcaagctttgagttctaaactcaaacttgagtaaaaccacctaacatgcattcaatctatgcttcaaactcataaacaagctaataataacttcagaaactagaatcaaactcatgcaaacacaacagccaccaaaacctccatttttctttgaaaacccaagctttttacataaaaatctatccaactagaacaaggaattcaagcatgcaattcaacctaattcaacctacttaactcaacattttaatcaaggaaacaacaacaacaatagacagcagcaacatcaccaaaattatcatgcaatactcaacttttccattaaaaatttcaagaaaacaaagagaagatacaagtgatcaaaccttgacttggattacacaaagaggagttgaaaatcacaagagttgagcaaaaacacccagccctagcagctccaagtcttggccgaaaatagagagagaatgagagcttttgaaaattttcttcttttctttaactttgtaattttttgataaaatgaaataaaaagcttttacacacatatattaattcatttcagccaattattaa

SEQ ID NO: 276569 - DNA, 744 bp, Cannabis indica
tattattaataattatttattatttcttagttactaagaaacttttacttctagagcgctacattaaattctacatactcctaattatcccaatacctatattatcaacttatcaaaatattctcattaattctatcaattaagcctgttatgacatttctagcccccgatcgagtctccaaggttgtcaaacctgaaaatatttttattccacatatagttcatattacattcacacatactatataaatctccgtaatttaaaaatcacgcttatttatccacttatagcaaatttaaaattttatgttgaactaaattagttggattatcatcccactcattacctggttaactcataatataaatataaaccctaattattaattattaagcttattgggatattacaaccatcccctccttataagaatttcgtcctcgaaatttacctgaataactcgggatacaactcccgtatctgtgactctaattcccaagtcgcttcctcaactttactattcctccataggactttaaccagagggatcgttttatttcgaagtactttctcctttctgtctaaaatctggataggttgttcattataagataagtctgtctggagctcaatatcatcgtaactcaaaacatgtgtcggatctgacacgtactttctcaacatagagatatggaagacattatgcaccccggataacgcgggtggtaaagctaatcgatagg

SEQ ID NO: 276570 - DNA, 548 bp, Cannabis indica
tggctagcctagctgacggcacggctatttcggcaggcaataccgcttcagatccatacactaaggagaacggtgtaaaccctgtagacccacgttttgaggtacgatatgcccataaagccagaggaatgaattcatgccaaattgtgggactgtcatgtaccatacgacttaatacccgcagcaatagcttattaaacgcttctgctatgccatttccttgcgggtagtacctggttgatttcccatggaaaatttgataatcttctagtaacttttttgtcgctttgccggtgaatggcgtgccattatctgacaagattctttttggaatgccgaaacgacaaatgatgtgttctaagatgaaggtggccacagcttctgtagaggcctttttcaatgggattgcttctgaccattttgtgaaacactctgttgcggctaaaatccaaattcttccctgagagggtggcgagattggacctatgaggtccatagcccaagtgtgaaggccaaggggtggtgatggattggagagggatagctgg

SEQ ID NO: 276571 - DNA, 510 bp, Cannabis indica
ggtaataaataaaagatttggacattcacataattattaatatttataacaaatacaagttttagcattaataatctacacttaaattttaattttttgtgactgtgaaataaatatcaattttataaacttacttataagtatagatttcagtttaaaaccaacactaaaaagtagaaaatctatttttgcaatatagtgtaacgcccgtacttttataaaaaatattaattttatttacaagtgttaaacgcggaaaaaaataatgtcgcatttttatttaatacttgaaaatgttcacaattgaccagttttcgtacaaaagacataataattaataactaaaataattgcgacataagttaaataacgtaaataaataaacagagcgccctagaccgcctgcagttatatggtcctcagcgagttcacacacacaagcaaccaaagttccactcgccaccggcattctagactccttggtctgcacatggtaatttgataagggtg

SEQ ID NO: 276572 - DNA, 503 bp, Cannabis indica
actcatccttccgcatcaatccgtggaggactcaacctttcccgggtcatctgtcccaatgtgagggcgccggtcgcggagaagaccttccgggacgagatcattgccacggcagagaagaaataccaggagtatctctaccggaaggcccaggagaaggcgtactctaaggcccaggcggcttccgggaggacgctccgcgtggggagcccggtggagagaaggagtcaggcgattgccgggaagccccttcacattggggattcaacggagagaagggctcccaggccacagcctttggttccagagccgaacactggggctcctggtgccagcacttccggcgccggcggtaagtctcctttggtagttcattatgttccttctgttggcgagtatgccagtcgtaggcccgtagggttcgacgagcgtctgtataggtttaggatgccctcgacccggtggggagatcacttgaaggaattttatttttcaaacttagg

SEQ ID NO: 276573 - DNA, 623 bp, Cannabis indica
aggcagggtgccttggagatcgggtgagtcctccgtccaagatttcggaggcacgcctccgcactctcgaccaggacggatacctgggcgagctggactgctacattcccgcccacgacaatcgcgctacaaaccctgataaggggatgtgcgcctggtcgggggctcacggccagcaaggggcgctgatgcccttgcacaagtacttccgggatgtggcggacttcttcggcctctgcccggctcagattactcccaagggcattaagtatttgtccgctctctttgtcctctatgcttcctagggatgggatgctccttctccccacgaggtcgcttggttcttcgacctgaagtctacccccaagcaaggcaggtcggggtatttttacttctctcagccaggcttcaagtggttgagcgggacggaccacaaggccatcagcaaaatagggcattttgttgatgagtacttcatggtgaaggatccgaacatcacccggactcggtttcagcacattccgacatatcaccgtcctcccctcacccttagtcttagggatttggctcaaaagcttgcccggttgccggtggaagatagggattgttgggttttgtgccct

SEQ ID NO: 276574 - DNA, 654 bp, Cannabis indica
tggttaaaagcaatgaaggaggaaatgtactctctcataaagaataagacttggagagttgtacttagacccgatggcaagagtgtggtatcttgcaaatggcttttcaaagtcaaggaagggaggactaaggatgaaccggtaaggttcaaagctagattggtggcaaaggggttcacacagaaagaaggggtagacttcacacaaatattctccaatataagactataaggttgatactatcactagctactcagtttgagatgtgaccacgacttttctacatgggaacctagaagaagacatctatatggagcagccaaaggggtttgtggttaaaggcaaggaagaccatgtttttcaagcttgacaagtctttatatggattgaagcaatccccgagacaatggaacaaatggtttgacacctttatgaccaaataggggttcaatagaagctattatgaccactatttgtactttaaaggttcgaaaacttctaaagtcatctacttgctattttatgtggatgatatgccaataattagcaaggagaggtcaaatatcaacaaggtcaaggatttgctcaagtcggaatttgaaatgaaggacataggtgtggctactaagattttggggatcaacattctaaggg

SEQ ID NO: 276575 - DNA, 575 bp, Cannabis indica
atatatatatatactacatgaaaagccacacgtcccaaaggtgtatgctactattacttttctcattaacttaatactattattattataccatccataattttcacatactaactaaatgatgataaataaaaatttaaaccacttctccatttcttaattaaatctaatctgtaaagacataaattccaaaacccataataattaatgaaagtctaactataaccccattctaataattcataataataccactttctaccaagttgaaaaataacaataataataataacttatttataaattctctatttccacatcgagatattaatactaacgtaatagaagataataattaaatattttggttattacagtgtctcttgatgatttgatttagttacatcaaagagttcttagaatagtgcaagtggattctggtcacagaatactcaactcatacagtttgaatccattgatagaaaatggttattaaacacttgtgaaagtgtaactgtatgatgagtaattctttctgggaccaccactactaatttaactctaagttgatttgc

SEQ ID NO: 276576 - DNA, 454 bp, Cannabis indica
ctaccatgtccttaatctgtatgtcacgagaagatccaattggtcaactttaacgaacaaattgaagaacataaataatacaactaagttgaacctaaccatatcaggagtaagatccatacacctaagatcaaccattgatattgacttaaaaagatataacggtaagtttatgatatcttatctaaaatcaatatcggtcccttcaaatgtatactacatacatccgatactggtaaactttgccaatgccctggaaatgacataacacttatccaaggtgtaagtataccttatcgctaattatcatgtcagtctaaatccagtgaattgacaaatcatgggaattaaacttttgaacatataatcatgattatattccattgtgctgacacactataatcatgaataaatatatacatagttatatatgttttggacttaatagaattta

SEQ ID NO: 276577 - DNA, 113 bp, Cannabis indica
ggttaaagtaaagctcaggttggatgcatggagtacgcatcagaagggacagatatttatctggcgaatagtaagtaagggatgatctccttcgagcttgaccaaacgaaaat

SEQ ID NO: 276578 - DNA, 561 bp, Cannabis indica
aacactataaataccccctaaagctcattaaagaggggtcgagaattctgggttgcacaagtgctagaagagtaaaaactcaccaagaacattttctgtattaaatactatcataaatacacagactcgtggtctaaggctcattaacgccccaaccacgtaaaaatctccttcttaatttcttacagctctctaaatgattattattttattggttgccaaaaacctcggtcaacaatgttaattgatattaatttttcatataaatattaatacaaaataatgtcaataaacataataattttgataacacttaccattgggtggagctgggaattcataacctgggtttgtggcacattctgacagaattcgtgcatcattagctaatccttcccatccagcaacaacatatgtgaacttcatgtcaaatgaacatatacacatgacattgtgagttgtatccaccttctgacctcgatatggtatttgttcatcaatggggacatgagcagagatatgagtcccatctatagctcctacacaattctaaaaataaaa

SEQ ID NO: 276579 - DNA, 598 bp, Cannabis indica
atggatggctagattgatcacatgggtaagtttagaaccctatttcatagtgggaaataatttagagaaaataaattatcgggattgagcggggttatggaatttgaccattttacccctagctttagaaatacctaagttatacattaaagggtattttagtcttttccttggtgggagtaggtggcagccatgggtgatgacacctagtttaatttagttagtaaattaaaaaaaaaagattactttgaagaaaagaaaattaagaaagaaggaaattggaatttgagttgttcttgaactctctctctctctttctttcggctggggcagaacaagggtaaagaatcaaagttttcatcttgtttttctgggattaagctaggattcaaggaggtttcatctaaggtaagccctagaactcttgtttatgtattattgagctttttacttagtttgagcttgtgattttgagaataagtggctgttaggttttaaaatgtttagggttcgaattctagagttattttgagttgatttaagtccctagcttctggttttgatgcttgatattggttctaagcaagcttgagttttg

SEQ ID NO: 276580 - DNA, 628 bp, Cannabis indica
aagtgttctatcatctatttttttacaagatgatcccactgcctctgttgtcttgacacaaccgaagaggccaataccatttagtttttcctagacataattcacggtaccttgtcgtagtgggagagtgtaaagatcgcttagtttaatttgaaaattagcagatatttaaggtttaattatgaaaattatttatagatttttaaataattatttatgttgttatatttgaattttgaatgcattttatgtcatatagtgaaatttcataattttgcattatcagtgcccggcaacatggaacgcggtgtatggctcagtggaatcaaaatttagtatttttttatagcggggccgtttatttagacattgggaatgttgggattagtcgggaatttagagttttcccgaaatacccttaagtgctttttaacccttttagtgtgggaggggcaaaatagtcatttatccccataagcctttgcccttttgtggacttattatttggtgataatgtgagttatgtaatgttattttggccaaaataaagaatagattatgcaatttttatcaattattcaaaattggaaaatttgaaaaataaggaagttttctctcaagctctctc

SEQ ID NO: 276581 - DNA, 732 bp, Cannabis indica
tgggaattactggaccctcatccggaattccggatgcacaaccggaatttcagttcctcgcaggcagcaaacataaaaattcataacttgcacaattcgactccaaaacaattcaaaccttccagacctattccatatgacccaaagaacatttctaaggcaccaaaaccacccagattgcaccatagcaaaaagtgccattaaagctcaagctttgagttctaaactcaaacttgagtaaaatcacctaacatgcattcaaaccaactcaaatcctcttaaacaagcatattataacctctgaaaacaattaaaaacattaacaacaacacagcaacagattcacaacatttccttcaaaaatcacatttttgagctagaaattccaaacttgaaacaaagtaatttacatgcatttctaacagcttaattaacttcaaattaacatgcttacatctcagaaattatcaataaaacacagcagtaacaacaactaagaattcatgcatgcatcatcatcttttcaccatttttattcaagaaaataaagaaagaagctaggaatcacataccacaatcaagagatcacaaacttaggttgaatctagctgaaaattgatgaaaatcccagccctagaatcccatgcaaccagccgaaaagagagagggaaaagagagagtttctttgaaaattttctctatttttctaagtgtagaaaatgatgctttgaa

SEQ ID NO: 276582 - DNA, 605 bp, Cannabis indica
ggtgtagcatgggtggtagcagtatttggtggtattccagtggatgaggatgaaacagggcttgaatgaggagaatcaacgtgaaggaattggtcaacagcttgttgcaggtcttgagcgtctggagtagggtgaagccgaggaaaaaattcctcaaaaggtgtcgaattggagagttggaaaggatttttcttgtgtggggatgatgaggtggcacgaagggtatctttgtattctaagagaggggggtttgggaagttgtcacaacggagaaggtatttggagcatttgttgtaagtatggtcaagcaaaccacagaaataacagaaattgggaaggccttcatacttgaaactaacccaacgtggctcagagatgcctctgaatcgaatggtcattcctctacggagaggcttagtgatatcaaacagaacacggattcgcagataaggtccaaagttttccactaaggaaagagggaagatttccagaagatcaccaatttcatcagcgataaactgagcgagttggggacttttacggccaaacggaatgcgatggacttgaacccaaaaaggggtgtatcgaacagagtcaggagtcgg

SEQ ID NO: 276583 - DNA, 664 bp, Cannabis indica
aacttggtgagattgaagttctttcctttctcactcaaggataaagccaaaagctggttgtattccttaaggccaaggtctattgggacatgggaagaaatgacaaaagtatttttctctaaatttttcccaccccataagaccagcagccttaagaggcaaatctctaccttcacccaaaaggaccatgaaacatttcatcaggtctgggagaggtttaaagatttgatgggccagtgcccacatcatggatacgaaagttggcgtcttgtcagctatttctacgacggtctcacagccgacaaaagacaattcgtacaaatgatgtgcaatggcgacttccttcagaaagatcccgaagaagctttggaatatcttgaagaaatctctgaaaaatcatacacatggagtgcgccaagtcctacggacaagccacgaacagccggagtctaccaattgaaggaggaggacagtgtgaaagctcaacttgaagctttgaaaaaacaatttgaggctttcaaaactcaagaaggtaaagcactccagatggctgcaaaagtggaaaagcaagaaccatgcttcatttgtggagggactgatcatcaaccacaagagtgccctagtcttagtatgttgaggggaggagatgaggaacagtgtaatg

SEQ ID NO: 276584 - DNA, 593 bp, Cannabis indica
actaagcagtccttagctaaatggccattttctccacaaacgaaacaaggttcgagtggtctggattgtgcttgggcaaccatgcgccctttttggccatctttagtcgtaaggatttcaatttgcttttttaaagattcgacttgggcctttaagctgtcctcttcccgaagttggtaaatcccagctggtcgatttctgttggtgctttcagcagcacttggaccagtccatgtgtgagatttttcagcaagctcaatgagaaactcaagagcttcttcgggttccttttgaaggaactcaccgttgcacatcatttctacgaactggcgctcacgacttgtgaggccttcatagaagtagctgacgatgcgccaactctcgtacccgtggtgtggacactgacttaagagatctttaaatctctcccagacttgatagaacgtttcattgtctttttgggaaaatgttgagatttgtcttttcaaactgttggtcttatggacagggaaatatttaacaaaaaatgttttggtcatttcttcccatgttccgatagacctagatctcaaagaatacaaccaacttttagc

SEQ ID NO: 276585 - DNA, 613 bp, Cannabis indica
acatattttgactcacattactggacaatgggaaagggaatgactgctactttactcctttactgtacaggtaactaagattggacgggatgcagtcctttatgttgaatctctcattgaatctataatgggaggactcgagggcttaataaatatccttgattctgaaggtggatttggagcactagagatccaggtaataatttgcatttcatatttgtaactagtaaagcaagaaataattgatgaagtctatatttaaggtttttgtatttcagcttcttccagagcaagcagcttcttacatgaattatgcatcaaggctttcaatgggttcaactaaatctccaagaggagcaggtggctttcctttacctggccatgaaagtcatcctgaaagtaatagttctattaaaatgtaagtcattgatcttcctataacttatgttctatagtaaccctggtttggtgtgttggttggggggtggggggggggggtgggggggggttgtctggtttctagctttataagtcactttgaatgattatatgtaattggacctttgtactgtctgtttccctcgtccataaggtgacggtatccttaacaagt

SEQ ID NO: 276586 - DNA, 503 bp, Cannabis indica
taaaatcaactcaacaagaccctaaaattcgaaccctaggcatatgaaaacctaacagctcctattactccaaaacaccatttcaacctaacttaaaagcttgaaaataaataaccaatggtctagggctttacctcactagcaatagcttgaatccttgctgaaaatccaaggaaatgaaaggaagaaatctggtttttgcctttgaattgccccagccgaaagcaagagagagagaggaaagcttgaacttttgattttttaacttttccttatttttctaaaaatgagaaaaggaatttctcaacctaggcttggctgaaaaaaataaaatgccaagtgtcacacacctaggcagccacccaatcccatatttacaattactattttgccctttaagttatatcttgggtatttctaaagctaggggtaaaatggtcaaaatccataaccccgctcaatcccgatactttattttctctaaaatatttcccactatgaaa

SEQ ID NO: 276587 - DNA, 518 bp, Cannabis indica
tccctttagtgctctttatgttattttagtgtgaaggggcaaaatggtcattttgcccaattgttagtttgtcctttagtggactttatttggttaaattatatggttttaattgaaaagtgttagctgaatatagggttggaattgcatgattttcattttttacaaagctggaaaaaattagaaaatttgaaaagaaaagcaaagctctctctctctctctcttttcggccaagcttggggggctgctagggctgtgattctttgcaaaattcaagtgtttttctcaagtttagagtgattttagtagaggtaatccttgtctagcttctcttcttttagtttcttgaatttttgatgaaaagataatgtttgcatgcttgtttgagttgttcttgctgctgtgttttgaagttgatttcagaggtttatttataatttaaaatgttgattcaagcatgttaggattggtgattacttgattttattgagatatgaaattttggctcaaaaactat

SEQ ID NO: 276588 - DNA, 567 bp, Cannabis indica
catgaagtttccttgtcctcatgcatgtgctgcatctcaggagcgaagtattagcgcgtacacactatgctcgccatattacacgactgaatattggaggaggacatatgaaggaacaattatgccagttggtgacgaggatgattgggaattgcctgatgacatcaagaacatgacagttggagtgcctgttgagaagcaaccagtagggcgacccaagaagcaaaaggttggaagaattaagaacaaccgaactgcttgtaacggtgaaaggattatcaaatcgcgaaattgtagcatgtgcggtgccaaggggcacaacagaagcacttgcaactaccgaggttaaaaatgttattttagtttatttgtatcgtgatgtgttggactattatgtattgttattgaattaatgttggactattttaaacattagaatttgtgatattttatgtttacataattattataatttgttgcacgaaagaaaggcgtaaaatttgtatgaactcttgaaaaaacataaacataccaataaaaaaaccagttacattgttatcttaataa

SEQ ID NO: 276589 - DNA, 536 bp, Cannabis indica
gggtggagcagtggtttggagaagtgctaaacaaaccacaattttagactctaccatggaggcagaatacatagctactgcagaggctgcaaaagaacttgtctggcttagaaagttcttctcatgactcggtgttgttcatggaatggaaaaaccattggttttgctttgtgataacactggagccatagccaacagtaaagagcctcgaagccacaagagaagcaaacatatagaaaggaaatatcacatcatcagagagtatgtggcaagaggggatgtactggtggagaaagtggacacagaggacaacctagctgatccattcaccaaagttttggcaggaactgcatttgaaaaacaccgtcaaaatttaggattaaatgatgtgtactgattcctttatattagtgcaagtgggagtttgttgggttttatgccctaaataaaactccatttcaatgtaatctttatcatttaaatatcaataaagaaatagaagtattttcatcacttattgtgtcatttggttcatg

SEQ ID NO: 276590 - DNA, 507 bp, Cannabis indica
aaacttgtggtatagatcctttcccacaaaacaactcttcaaatcttttttcgataaaaaaacaacatgaattactttacagtaaagatagagctttgaatcaaaaacatgattatttaccaaatattacctatgttgagtcaaatgtcaaaacaatgaccatagaaagaaaagtttacattggtatgtcaagggaaagaaattcaataatcatacgaagaaagaaatccataccataattgttgaattaatagttatgtcctgctcctattttcatatattccatggtaagagcatacctttcatggtacaaaacttgtggtatagatcctttcccacaaaacaactcttcaaatctttttccgataaaaaacaacatgaattactttacagtaaagatagagctttgaatcaaaaataaaactcagagttaattaatcaaataaaattgttaaataatatttttacaaaatacaaagtacatattaaacaatttgtaaaagacta

SEQ ID NO: 276591 - DNA, 626 bp, Cannabis indica
ataatctgggtttgtggcacattctgaaagaattcgtgcatcattagctgatccttcccatcccgctacaacatatgtgaacttcatgtcaaatgaacatatacacatgacgttttgagttgtatccaccttccgacctcgatatggtatttgttcattaatggggacatgagcagagatatgggtcccatctatagctcctacacaattctgaaaataaaatataaattaatggcttttgttctttctttatttattaaattttaaaataataataaaagagatagtataaatttttttaccttgaaaaatggataatattttggattgaatcgaatttctgaaggaactacatcaaacaaaggtggagtaattaactctttggataaatgacataccgccttcaaaactttcctaaagtattcagatgtagttgaggtggagtgttgaaatcgttcagcaactacacgatgtcgttcattatgtccaatgacaaataagaacatagcaacttgctcctcaacagaaagatagcgagagttcttcaataaatttttttcttttagaacaccacaaaatagtttgaagacgtccttatccattctgaataaatcataacacctact

SEQ ID NO: 276592 - DNA, 572 bp, Cannabis indica
cttttctgtggaagaacaggattagagacaatgggcctttttcctttgtccttctttggaacagcaggaggcactggagcagattctgtagtgacaggctcagtttctggttcttcactctcggatccagaatcatcaacaacaggaagatctttgggcacaaattcttcacttgaatcggacaagccctctgaatcatgatcctcctcactttcttctggttcagaatccgaggaagagaccgaagggggattctccttgagatttttggcctttgaagatgaagaaaccacctttttccctttggatgcaattttaggtttaaccacttcaggctttgaaggagtggaaaccttggaccttgttcgagaactcaccgtgggcaaggtcaccaaagcttggtcgacattaggagcaccattcgaagaagaggacttcgacaatgtgtgatcggatgaatgggattcatcatgatcacccaacccaggtgttggagaagcaataggagaggcaccaacaagaggagatgagaattttgccactgattttcgagcttgggtcttcgatttctt

SEQ ID NO: 276593 - DNA, 1245 bp, Cannabis indica
ttggttaagtatatgttttaagaatataaattggaaagaaaaagttaaaaaacatagtataaaaaaatatatattttatataaaataaaaattattaaaatgggatgtctttataagttttgtttttgaggtgtatataaattttttctaaaaaagtatatatattttaaggaatttttctaaaataattaattggggataaaattaaattagatataattaataaaataatcagattttttttttttgagaaaataaaataatcagattaatttaaatattttggtaaataaatttaactttgggtataaaaggaaaataagaaaccctaacccaaacccaaaccctatttcatcttcttcttccttccgcccctcttcttcctctatttcgtcttcacccgatctgcctccacagaccaccatgaccatcatccaaagccgcctccagtacagaccaccatcaccatcatccaaagccgcctccacttcggtgtctccactgcccctcgattcgactccgatacaaataaatcaagcggcggtcgactggacgaagaaatcctctatctccacgaacctcgaatcctctgcctcaaacatgaaccgatcgactgcgacgaagaaattcctcgaggtgttgtgctcctgttccactacgattgagacgaagaaccggtctaccctcaagtacacgaacgatgcccattgggtgaacgagacgatgtagtttctagatttgttgacgggactatccagcaacacgttgagcatgatggcaacgtacgagaagcgaggtgctcgccgaaaacagagggggacgagttttgggcaagtctttgttcttagtgttctgggttctcttgcatcttcgaatttcattttgaaacccataaagtgtatgaatatataattgatatgaatatgtaattcttttaggtataatttatttattttttagtgtatttgtttgagttgaatttgttgtttatgaatcaagaatttgttgttgtgaatcaagaaattgtctgttaaatttttttattcttaattttttaatttttatttatattattattattttttaaaatttatttatattattattgtaattagataattattcatatataataaattagtttaaatgtatttttttttaatctagataatatttttaccaacaattataaatagtcatttaaagttattttttctaacaatttataactgttggaaaaagtaa

SEQ ID NO: 276594 - DNA, 506 bp, Cannabis indica
tccataggcattgtcctaaaattcccaacccaagaagctggaatagcggttgtgaggggaaatcaaagggaggctaggcagtgctacaacattgttgcccacctacccgtactgatggtccaaaaaactattgagccagaaatggctgaagaagacaagttggatccccgtgtgggatttgaaaaaattgtagaaccaatggaggacgtcgaggaagtgtcagtgtgcgacctcgactccaccaaagtactctggctaggaaagagcctagacccggaggaaaaggaaaagataataaagacactgaagggtgccattgaagttttcgcatggtgccaagaagacatgactggcataagtccccacgttatcacccatgtcctcaatgtcaacccggatatgccgccggtccagcaaaaacgacgtcccctcgactcagtgaaagccgaagccttagagaaagaggtggacaaattgttaacgagcggcatgattcgagatgtcta

SEQ ID NO: 276595 - DNA, 733 bp, Cannabis indica
ctttattcattagataaaatattgcatagtgatattgataagtgatatcctcaatatattttttgttttgttttgtgtgatacagtgcaatgaatgagctagtgggagatgcgaattgggatcatggttgcttgagggatttggactccaatttctatattgttttaatgcttgtgtggttttggaataatatttttttggacttataaattatatttgatttgtgttgtattatgttgtgttttagagtttggacttttaactagacattataatttgtatggttggacttgtaaaatgtagaatgatgtgtttagagtttgtattaatgtgcttataaaataaattttattatattttacaaaaaaaaagttttgtcggttttaaccgaccaaaccgcggttcacattggtcggttttaaggatgtttctggattggtcagttggttttcggattgaaccaatccgaaccgaaaactgaaatttgaatttttatttgtaaaaaaactgaacaaaccgactgatgctcagccctacagtatggtatcagagcgccaaggtttttaaacttcttatagaccgaccgaacatgtacaatgatcgtcagagacaagctcaacccattgtgcagtaagtgctgagagtaaatgctttactgcttgtatgatcatttatttacagcttttccaattttaggcagtatgccagcatctagagtattatgtgatttatg

SEQ ID NO: 276596 - DNA, 669 bp, Cannabis indica
tctcccaaaatttggcaatcatctcctcaggtttggggtagaaagtaagcttgatattttggtcattggtagaccaagccatgaagacgccatcatcaaagcgcttagggcaccggccgcaggaaacgggagaaagaagctcagctctttttgccttctttgaggcttgttccttgaagtccctgagctccttcagctccgcggccagagcggcccgcgactctaatttcgcctggtgagtttcctctaaggatctcaccttggcaaccatctcatccaaggcttccctggcctcccggagctcccgcctggcctttgcagtggcctcaccttccgccctcagctcctcttggtgcttggcctccagcctgtctctccgcagggcctcatcccggatcatcgcctccgcctgggcttccctccgcttagcctcctcctcattggctttggcagcagcctcccggcgctcagcagcctcctggtaaagctgcctctccgcagtaagatcctgaagaaccttcctgacttcgttcatgtccccaaaatcagacaggacgaagccatggttgattatgttcttggagaggcggccagcttcagcagcaagctaaacaacaatacaagtataagaaaaaaatctccaaaaaaaggggaaaagcaaaattacaa

SEQ ID NO: 276597 - DNA, 597 bp, Cannabis indica
atgatcctctatagatgatctacattgcatagggataaaattatcgttacaccctttcaatgtattttatccttaaaacacttgccacttataaatgatattatagtgaattaatatagtcactaacatgaacgttctataatttatctctatttagaaagctcgaagaaaatcattgtttcacttctaaatatctatgattagcactcccactcaattgcactaccatgttccccaaatgtgcgtatcaccctcaccaaaaagtaggcttaactaacaaatcaaagaacatgtataatactcttgatatcgaacctaactatatcaggattaagattatttgatctaggatcaattatgtcatattgaattgaatagatattacgataactttatcatatctaatcaaagttcaatttcggtcccttccaatgtatactccatacatccgatactactaaactttgctaatgccctggaaaggacataacacttatccaaggtgtaagcatacctatcgctgattatcatgccagtctaaatccagtgaactgacaaatcaatgaattaaactttcgaacatataatcaagattat

SEQ ID NO: 276598 - DNA, 630 bp, Cannabis indica
aatgcttccttatgtattatttaaatagataacctcctaattattataccattcaaattattataaaaactattcatattagtatcttcctatacaactaataaggcaataatctcaatacttcattagcatttacttcccatttatttcaatatcttcccaaaaagaaaaaataaaataaaacaaagtattctcaattcacaattaatgtccctacctccaatttattacaaaatcccacatttataatttatataccaaaattaatattatgttatctataatattatgttatctataataaactcatatttataatttatatacccaaaattaatattatgttatctataataaactaataagaccaataatctcataattatataccataattgttagctattaaattttataatatttttacaattcatgatatcttgtaattttaaccaattaccctaaataattaggggccagccataaatcatgcgcgaaaaccttaaaaggcactaaagccataaacaatagcgcagctcatccatcaaatttgtacttccatttcttccatcaaaaaaactaataccactcatccagaaattctttaaaaatacaaataatataataatt

SEQ ID NO: 276599 - DNA, 578 bp, Cannabis indica
taatagtaagatattgaaacaaaagctttataaagtaaatattgtagtagtttttacctcattcagttgcagatttttcgttaactctgaaatttggatgttagtcactatttcgtgtaatctaacaaaagattttggagaataagcagagagaaaaatctagagaagaagagaagtggcgtaacgaccaacaaaaaaaattagagggtatataattctgttatatatattgggatggaaagagagagagagaagagatgagatataaatgggttttgggttgatgagatatattgttattctcagctagctctgatataaattagaatagaaatgtccaaattataataggaaaaggaatacatagatattgttataaatattaataattatgtggatatccaaatcttttatttattaccattaattgtaatcaacattcctctttttcttagtttcaatttttcttagttgcataaataggggttcatcccattggaataaacaactcagaaattctcattcactttctctttctctttctctcgtcatcttcttcttctttcttttcatttact

SEQ ID NO: 276600 - DNA, 653 bp, Cannabis indica
tgaaactatgaattcaaaatggtcaaaaacaaggtgagagacctcattctaaagtttagaagccttggaagtataaaaaatgagatcacaggagttcgagagtaagtacctagcatacaaattgacaaaagactagtgcgctgggttctgctcattcgattctgattctgattctgttttgaccatctatctagtttttcacaataacaaagatctataaagtcagagaagtaaaattcacaactttgcatttctcatttccagctcacacagaaacgaagagttttgagtctctcatttctataaaacagcaacatctctgagaagtggttaccaccttcgccacaaatggtgaggagtgatcaaaatatcctaatttaattgaataaattaagaagaaaaagaaagggttaaatatttacttttgtttttagtaaattttgagtagagtctaaagaggtgattggagagagaaagagagagaaagaaaagcatccccacacaaaaggtggtgggaaaaaagttctttttgtacacactgcgatgatggcgatgatgatgcctgcaatctccaacagcagcagcaacaccaatacccagcaccaccacccaacaaaacatccttctcttctcttctcttctcttctcttctt

SEQ ID NO: 276601 - DNA, 552 bp, Cannabis indica
atttatttttcgaaaaatccgtgtgcttggtgatgttatactcttgactaattttaattttgtgctttaaaagaacatggaatcatattaagtaatttttctagtaattgaattgatttatgtatgctaatttgacatgtggaaagttgtttaaaataaattctagaacttgcttgcttgctatttgaggcgaaataataaattatgcatgattaggaaagtgatttaggcaattttttggatcgattgtgcctttcaagccatccttgtaatttttatcctagttacccttttttgagccttaacctattctttgttctacacatattgagcctaaaaagataaaccccatgaatatccaaaatttcaaacctaatcataccataagtagatctttagtttgggggaatttggatgggaagttgttgtatgtgtgggaataagtgaaaattgagagaatgtgaaaaacatttagattgacagcaacttagaaaaaaaaaaaagatagaaaaatctgacaaccagtgttaaattcagaaaagatatacaaag

SEQ ID NO: 276602 - DNA, 655 bp, Cannabis indica
gctgctgcaaaggctgctaaagaacttgtctggcttagaaagttctacacaggactcggtgttgttcctcgaatggaaaaacaactggttttgctttatgataacactggagccatagccgacagtaaagagcctcgaagccaaaagagaagcaaacacatagaaaggaaatatcacatcatcagagagtatgtggcaagaggggatgaattggtggagaaagtggacactgagaacaacctggctgatccattcaccaaagttttggcaggaactacatttgaaaggcaacgcagaatttaggattaattgaaatgtactgattgttttatattagtgcaagtgggagtttgttgggctttatgcctaaaataaaactctatttcaatgtaatctctaccgtttaattatcaataaagagacagaagtattttcatcacttatttagtgtgtcatttggttcatgatgtcatttatatgtttattagatttattaattcatccaaacccttatcacattaatattcttatttattgtgtcgtcagcacagtggaaagtaatcaaaattgtgtgattaaatatatattcctagatttatcagttaatagggttttaactgatatgataatctacaacttagtttacttgcacctt

SEQ ID NO: 276603 - DNA, 741 bp, Cannabis indica
tgtgccggtcaacctgagtaaaacaactgctcgacgaattataggctcctaaatcacatcgataacaataggcataagtcactcgctaaatcacaaccaggacttgacttttaaaccaaaaccctatctactgcaacttaacatggtaataccctaaactagtagggagtcaaccaactagaaacttgaaactgacacgaaatgacaagctgaaaaatgggttttccctgctgcaaaatccgggtaaccggttttacaagcagtgtaaaatcggttagccggttttacccaaaaaaccaacaaaattcaaacccctaaccaaaacgtttccaaactcaaccaaactttccagactgcatattataccccaataaaaatattccaagtgataaaacaacaatcaaagctcagaatcaattttcaccattgatgagccaagcttgagttcaaaaactcaaagcttgctcatccaacaaacaacctaacaaaacttgcccaaattaacttattttaacataaatcaactacaaaaaacataacgaaacttcaacagcaagaacaacaaccaaaaacacaaaaataagcatgattcactttctttaaaaataagaaactaaaagagaagttgcttaagaccttaccttggcttggagattactaaaacttgctgagaatcacttgaaacacaaagaaaataccaaccctagctggtttagagggtttcgaagagagagagagaga

SEQ ID NO: 276604 - DNA, 619 bp, Cannabis indica
cctaacaattaggcacgttacgatttccgataatcataacctaatcttgctaaatcgggattactagaaataaaagtagaatttaaactttaaattatttacggaatgaaaataaagcttgtaactatttaaactttaaaaactattcaaaaagatttcttacatttcaggatcccataaaaattttcacaaaatattacaagtcaatttttacatgtcgacctaagcgacaaaactgagaatacaaaatgcagcagccgatggacttaacccgcatggtctattgtggcccgaacatgtacaatccacctccaagccctcgaactcatggctaatcacagactgatttaccctttcctgaacagtaaagcacccgtgagccaagcctagcaagacagtataaataataatatacaatatattctcaatggaagtaaatattgatgccaccacatctactgtctatttagcatagacctacgtgttgctctcacacgtctatttacaataaggccttagattagtttatttcagttctgattaccgagtttaacctaattatcccttacccgcataattctttatttcaacatatgtaacatggcattgcattcaaaat

SEQ ID NO: 276605 - DNA, 634 bp, Cannabis indica
ggagtttgcccctctgcggacctttccctttcgggaaatctgagcggacctttcgcggatcctgcacctttttctttttcccaggagtggaagtagggtttttctgctggttcccttcagagggataccttatagggctaggttccctagatttctgcttttgggcacttggcgaggattctcctggtgtctctccaagtccaacagggatggctttatgatgcacgtggattcctgctgcctccatggctttttgcatggccagcatcacctcttgcatctttttgttttgttctttttgggccgtgatctcagcttcgtgatcagtagccttttgtcttaagagtactagctccgtatagctgccttcgtcataggcgtcgtactcatcgaagtttccttcgtattcgtcgtcgtgggttccttctccttcctcagagcccacgtttactcttgaggccacatcctcatcgtctgggtcttgagcgtcttgaggaggacggggttgacgtgtgttgcgagtctccaccattgttgttttgtgatgttactgtctacttgcagacgcttccttcagctcttaatgaaagcaccaaaatgttgaccgaggtttttggcaaccaatataataata

SEQ ID NO: 276606 - DNA, 936 bp, Cannabis indica
aaatgcatccaaaaatccaatttttcatgctatatcaacccacaatcataccaaacttttaccgagcataaaccaagtaattagagaggaattacacttaattcactctccaacaacaccaaaaaccagcaacataaaaataagcattttacaatgaatttcagccccctaaactcatttatttcaacccaaacatgcttcaatccaacataacctcttatacaattaaacaaccacaaaaggaggttaaaccacacattattaagcttaaaatttcagtccacatgcatagaaattcagattcaaacaatataaaatcaaagctctaaacctagagtaaaattcatcataagttcctaatcaagaacttgaaccttcaagcaactttcaagcaagcatcaaacttatttttccagcaacaacacctcaaacaaaaacttgaatttaaacatgaaaattaccctaaaggctcatctagaacccaaccaacataatccattacaaaaccaagcaattcacacctaaatttctcaagattaatattgattctccccacatgcaaaccaagaacatcatacactattttcatgattttgaacaataaatttcagcaaggaaaatcaacaaataaaaggggttaagaactacctcaagctccaaacaaagccaagcacaaaacccatcaagaatccaagctttcaagatgaattttccaacacttaccaaaataaaaatatgaataaaagagggagagggggttcagctagggcagaggaaaaagcccagaaattttcctttttagaatgcaaaaataactcatttcactctcaaacacaaaagccaccaacaccaagcttgaatccaagcaagcacaacccaaaatcgcaaaattactcatttgcccttaaagccataaaacacccacataagcatttc

SEQ ID NO: 276607 - DNA, 617 bp, Cannabis indica
acacttatccaaggtgtaaatatacctatcgctgattatcatgccaatccaaatccagtgaactgacaaatcagggaattaaacttttgaacatataatcatgattatattccactgtgatgacaacattataatcatgaccaaatacatatgttctggacttaatagaatttatacattaaatataaacatgaaataaatcatgtgaaccatgcaacataaattgatttctgatctttattagtaaatatgattatatttaaatcagctttatttatggcacaaaatccaacatttaccttatgcaaagaaatttgaaatgtttaaaaaatttcatgagtttctagcaatggtagaaaacaaggtaagtggttaaagatctttcgaactgataggggtggagaaatatttggtagatatgcagttcaaagatcattaagttgattttttgaattatatccaaacttacctccccaaaaattcgatttgcatattgatgatattataaggtctatgattagttactagtcgttgcctaagtccttctaaggaaataccctagtgatagaaaaattttagaatgatggaatggttgtgtacttagtgtaaaccattac

SEQ ID NO: 276608 - DNA, 786 bp, Cannabis indica
aatttttaaaaataaaattttaagaacaaaaattttattttatttttacgattaaaaaatttaaaaagaaaaatattttcaaactttgccttaatgtttcaaagtttttatttgaggaaattacgtacaatatggcattttttccttaaatttcataaatatggaaaaattagagatttacttagcttatggcttttttataatttaagttagttgtatggaaaaagatttccatattttttagtttttattaaataaagccacattttcattttattaacctatgtttagagatttctaatatttttcaaagcaaatcattaatatatatacatttatattataattattttatttattttaactctacataatcattctttcttagcttaaatttctattttattttttctttaaagaaatctatttattaatatatgtagaaggtttattttatttttgacttaattattacaaagtatttttttttatttatttgaatataaattaacattttgatattatattttataaaggaatgcaatgatattttatttaaattcttaggtaccaagttactttagaaagcaggataaaagacaaaaagacaaaaacaaaaaaacatgttacttttgcattaaaaccagtcaaaatataacacactaaacctaatttaatatttaaggttccaggttactttagcaaacatcaggttacttttgatttgtcaataggttacatgtgtaagaaatataacacatcaaccaaatttaatatttcacgtat

SEQ ID NO: 276609 - DNA, 653 bp, Cannabis indica
atctgcattcgaaatacttgagatgagagagaggatcttctctcccagtgtacatcttccacgttggcatcttgaacttgtgaggtagtggcaggaggttgatttcgggcgagaaaggagttccgcgtgcgcagtctaactcaagatcattgttacgctgcccggccatgccatggaacatattcttcagtttgtcaagctgggcctgtacggctgggctgacttcattggcattatggtcgggttgggctacgtcaccatctttctgggcgaggatttgagtatgggctccggactgcacgttcgttgtagtattctgctcgtctgctccccttcttctgttcaggtcatcccataggtcacgaggtgttcccaacctttcgaacgcagaaaaacctggttgccttagcgattggttcgcttggcgggcaagtggaatggctccattattttgagtggatccatcgagcatgactcctcctgatgaattcccggacaaggtctgtccgcctacctcttggcccacgagtggaactcgtgaccggggattggacggctgaccgttgtttgtctgggaagcattcaccattgggtcatccttggcttctccaaggggaatgacgctcggcacctgctggcctacagtctgatag

SEQ ID NO: 276610 - DNA, 667 bp, Cannabis indica
gaggactgtgaatataacagaaaaaaactttccaacaaacttggaactcaaaaaggtcaacctgtttacttgcttggattacaaaaacctacaaattccaccttaatccaaacacagtgaacaagatgagaaagaccatagggggtataccagtcatcttaggtagaagttatgttaagcaaatccaagcaatgtttgaatttgctaacagatagaactttggtgcctgcatctgcaggattttcttcactgggaatcttttccagttcaacttctccttcttctaccttgtctctgatccaaaacaatctaacatcgatgtgttttgacctctcatggtagactggatttttgcaaagatgaattgcagactgactgtctgaaaatacagtcacttttctaggcttcatttgaatttcactcaaaattccttttagccatactgcctccttaaaggcttcagttgtggccatgaactcagcttcagttgttgatagggctactactggttggagctgaactttccaactgatgcagcattcatttaattgaaagcagtagctggttatggactttctagtatctctgttgctggcatagtcagcatcaacaaaaccttctagtttcatcttagaactagttttattgaactttaaaccatagtttg

SEQ ID NO: 276611 - DNA, 509 bp, Cannabis indica
tcctctctcgttacaatgcgcaaaaacaaaaagattgtgtgatcaatgctgaatgcaaggattgtgggattgaggctgagtacactgatagtgggatcgtgtgtatgccgtatccacttaagttgatccttgagtaatagggattgagttgatgactcatgatgcgaaagctgaattccctaagtattaagtgctctgcacggattgctggatatctgatcctgggtgtgccagcgaggcatcctgctcgatctattcttcccgagcagatgctccaagtggactccacatgtcaccattctcgtgctgccacgtcagagtgcaaaatttaggataacatttgccccccaactctgtacgggacctctgaggtggtgtgtagacttcttctgagctggctctgcctttggatggggacacgtgtcgagcatgaccgttcgagactcgatatgaagctgactgggcgtctcttcagttttcggctaattaatgctttgacaattaatatt

SEQ ID NO: 276612 - DNA, 494 bp, Cannabis indica
tttggtttgataaatgcaggtgcgacgtatcaaaggctggtgaatatgatgttcgcagatttgattggggacaccatggaagtgtatgttgacgatatgctcgtaaaatctcaacatgtgaaagaccatatcaaccatttacaagcaatgttcgaaatattacgacgatacaaaatgcggctaaatcctcttaagtgtgtctttggggtcagctcagggaaattcctcgggtttacggtgaatcagcgaggaattgaggcaaaccctgcgaagatcaaagcattagtagaaatgccatctttgactaagccgaaagaagtccaaagtctcacaggtaaagtcgtcgctctaaattgtttcatatcacgatcctctgacaaatgcaaagagtttttccaaatcttaaaaggcaacaaaaaattccaatggaccgaaaaatgcgaagaagctttccaagcactaaaaacgcatttgggacagcccccaatcctgtc

SEQ ID NO: 276613 - DNA, 363 bp, Cannabis indica
tattatcaagatctgagcctgaaggtccttctctttgtgtgtgatccttcaaagtcttccaatctatgattgaggtaccacttgctgtgtgtgggcacttactctatcactaaggttcgaaatttatgaagaggaaaagagagagggtaggttcggctatagaagagaaagggaaggctcaatttttctgaagaaagaattttctgagagaaggttattcaaaaacttatgaaaacttgttatttgactgagccatcactttctatttataggtaactactaggtttaggttagtaattatttggcattaaaataatgaaaatatcaatttgaaaaacttgcttaagtggccggccatggtgt

SEQ ID NO: 276614 - DNA, 663 bp, Cannabis indica
gtttgttgttagttagttggatttaaccgtgtaagcttatcaaactttggtttttatggtaaaatgatgaattagctgctgtggttgttgtttgtgtttgggtttgttttctggagttatattatggttatatatggtgaattgagcaggttttgaatagctagtttgtgggatgagcaagctttgagtttttgaactcaagcttgactcatcaatggtgatttttgtaatggtgcatgaagctgtgttttattgctttgttattgacctttaggatgtttagaacaggtctggaaagtttggagtggattggggttgaatttcttaagatatggaatttttagtgtttcctgcactgaaccagaattccggttcagagaggcctacaggaaccgaaattccggttaaggaaccggtctaccggttgggggcaaatttgggaaccctagtttttcccatttttgtgttatttagggtattgccatgtggtttatcgatagggaaacttttagtttcaagtttaagtccccgagaagtgatttagcgtatcacttatcagtgttgtgattattaggatttaggagcctgtaattcgccgagcagattgttccactcaggttgatcgcaacacctgaattcgtaatcaaggtaagattagtataa

SEQ ID NO: 276615 - DNA, 733 bp, Cannabis indica
aaaaaaaaaaaaaactaaatgtgaaatatcattggtagccaattcctaatattagtacaacatccaaataaaaattatataccacaacctaaataacatataagatagcagccaactacatcaaaatctaagcggtaaatactataataaaaataaaagagcagcataagaaaaaaattatcaaatagataaaaataaaatctgaaaaacattaatgagaaaaaagatatgacactaaaagaatagaggataaagacaaacctttatgaataaatttcaaaaattaaagggagcaaagcaaagaatcgggaggcaatagtcaaagaacttcagcgaagtaaacggaaaaatttgtgagagaagaaactttggtcgttgtttggaatcagctgctgtactttcgaggcatgaaatccgataaaaaaacgaggagagcttcgttacactttcgattgggaggaactaggagaaaattgttgaaaaattcagcaaactaagagaaaaaatttgatgagagaacaatctttgatcttctttctggatgaatgaataaaagtttgaagaaatctaaacgaatcgaaaaagatagagcatgtatgagacattaactttcattacaatgagaaataaggtcatttgctgccatttctcttaagataaacgtgatgatgtatatcaatgtagctttgggatgtatgagatgaataaagaagagaaatgcaagtaaatgacc

SEQ ID NO: 276616 - DNA, 582 bp, Cannabis indica
agaaggtgaaggcttcaggttttatacacacattattgtattatttctttcacccaaacactctgaagccgccacttcccctctctttcttctctgtttttcgaaattcctttgagtgatgagtagtgcccacacacatcaagtggtacctcaatcatagtatgtaagactgtggaaaatcagcaccaacaagaaggacagaagaagatccagattcagatcttgattatgctctactatagaaaggaatcaagggctagagatctgaatggaagaagtcattatattctgctgcacccaatgtaaggttttcataaactcttatgtgtttattttcattgttttagaattcatattaggatgttaatcaaacacacttggtagtaaatctagatcttggtaaaataattccaacaaaaacgacatccaaaaccgggtagtcgcatctgatatccaccataataccggggctcagattgaattcactccctgtacagattctaggtctttcacctacaggtgagtgcacacctgatctacttatgatgacacggagactaggtcgtgaaacaacaatatgca

SEQ ID NO: 276617 - DNA, 583 bp, Cannabis indica
aagtctggggagcatggtttagtacataaacaattactaaaataataaaattgaatgaaattaaacaaaagtccttaaatctaacaatctcaatagttcatgggaaatttctaacggctagaaaagtttagggggcatgatttggtacatgttaaagtttagagggtaaaaatcctaattagcctaaatttttattttgacaaaaaatcagttcagtgtcctatttgtaccattcgaaaaatacaaggtctattttttcatttaacaaaacagaaggtccaattggtaacttttgcaaaacactgagtctaaaatggtatttaccctttcttctttgttttttaaaatttatattttatagactagtatcttttttttttgtgtatattttgttgctttaacaattcatagcctatggctatcatgtttttaaatcaataaatatggttttatttttcttgtttcttttttcatttcacacttttttttcccttttcaatttttactttagtttcttctttcactttcttggattttgtatttttatttaacattaaaaattagggaaaaatttaaaaaatta

SEQ ID NO: 276618 - DNA, 681 bp, Cannabis indica
ctaagttaatatcactggttggttttaggtgtataaatcttaatctcgatatggttaggttcgattttagttgtattattcatgttctttaatttgttcgttaaagtcaaccaattggatcttctcatgacatacagattaatgacacggtagttcaattgagtgagagcgctaatcatagatatggaatctatagcctctataagtatttaaaagtgaaatgatgatttccgtcaagcttgacttaatagagataaataattgaggtctcattttagtaattatattagtttactaaaatattatatataggtagctaagtattttaaggattttaatgataaaatacattgaagggtagaaatgtaaatttgtccatattcggtgtagatcatctatagaggatctttgactattttgattgaaacaatggataatcataacgtacctttatcttggtacatatagagcgttctatataattaagagtgcaatttcgaatctatagtggcgcaagaaggaattaataagttagaatttactttgtaaattctagatctacttattggaatttatataggcccatggtccccacacttgttgagataatactgcttgcatacttagttaattggttttaattaatcaattataattctaaaattagacaatgtcttattt

SEQ ID NO: 276619 - DNA, 426 bp, Cannabis indica
aaagctcattaactgggatcgagaatcttgggctgcataagagcaagaagagtaaatactcagcaagaacattctctataattataagagtgaaacacccaccagatacattctcaccacgtaaaaatccttctctaaatttcttacagctctataaacttataatattttattagttgccgaaaacctcggtcaacagtaaggtttcctaaactttatatgtatttatttcattgttttagaattcatattagaatgttaataaaacatacttgttagtaaatctagatcctggtaaaatatacccaacaaatggcctcagagccatggtaatgatttactttcatgaaatatgaatgaaaacgatgttttgcattgatttggatggtttcatgtggtttatgtgcttatttgatgatagtttag

SEQ ID NO: 276620 - DNA, 1110 bp, Cannabis indica
gaggcaaccaaagtaaaaaatttgagcgatgatggcaagcgggccgccatcatggggggcattctggtgggaagtcggctgtggaaggatacaaggcggaaaccaacccatactatgagagacttccttgacagagctgatgagttcattaaactagaagaggctgaatggaacgccaaaggcctcaaccaagctaagggaaacaagaacggagcaagcactagtggccaaggctcccatggtcaggagagtaataataaaaatggctttaacaatggaaagaggaccaacaacgataatggtggaaacaactttattaacaacaaaaagccaaacaaagcatcctcatgaatgactatgtccttctaattgatacaatcttcagccacgtgcgacattccccttgtccttacctatgggtatgataacccatcatcctgccaaagggtgacttaccaccgagtatggagtagttgggatcatcccacctggaatatacaagttagcatgttacggtgccaacacaaagttagtactagtgtcttgccattaaaacggagagcacctacaaaagtactaccaatataagttgcttttcagcaatgacttaggctggttggtgtacccgcaaagtgtattttcatagctggtcgtcatacctaccaacaaagtttgataatgtaaaggcacaaattgcccacttttgatgtaataaggcatatttgcccattttattcatcaagaaaaaattgcaagttatttttcatataacgacgcagcttgtatgattgttattgaatcaaattgcaagcctaactaaggtcaagagtgtatgaaattatagtggcaaacccgtgacaataacagttcctatgtgaaagccctgattacttaacaagtgatcaagaggtgaacctacttagtcacttggggggcaaccatgctcatacatggactagtaagcataaaacacactcacttaaatagattttacaattttgaaactttcttttcaaattctaaagtgtttgtgcattgctcaatgtcttgagcaacctatatgttgtacatggttaactataaaaaaaaatgcttacgcatagtgtggta

SEQ ID NO: 276621 - DNA, 648 bp, Cannabis indica
cctatcctgattctgggtccaggtctccgttattgtttgggtttgggtcccggtgtaggtttgggttcgagtcctagtcaaggttcgggtttaggtctctgtctagattttgatctgagttcgattttgggtttaggtcttggtcctagtcctagcccttgttcggttctagttccatttccaattctgagttcaagtttggggttgagttcgggttggagttcgagtccttctcttattttgggttcgggtccggatttcagtctagggtcagatcacgctctaggtgtgggttcgcctcctgggtcgtggtctaggttgggtccgagtcccaagttccaataccgatctgagtctggattcagttctgggtctaagtcctttgttctgatttttctttcggttcgagtttgggtccgtctcaaggtctagctttgtctcttattctaggtgtgggtttgagttcgggtccgagtctgtgtccgggcatgtgtcctggtctggaccccaatctttgtctagtttcgggtctaggtccaagttcgggtccaagtttgtgtctgggtcaggatctcggtctagatctaggtccagcatttcgatccctgtcttggtcttggtccgagtccaggttcgtatccggatccc

SEQ ID NO: 276622 - DNA, 708 bp, Cannabis indica
tattcaaggatttcctcgatatctgtgtgattgtgtttatcgacgacatcctcgtgtactctcaatcagaagaggagcatgagttacatcttcaaatggtactgcaacggcttcgggaacacaagctttatgccaaattcaagaaatgggaattttggctatctcaggtgtcctttctagggcatattgttagcaaggatgggatcaaggtggatctaggaaaaatagaatccgtcagggattggcctagaccgaaaacagtgatagaaattagaaatttcttgggtctagctggttattatcatcggtttgtggaagggttttctgaaattttaacacccttaaccgagctcaccaaaaagaatcagcgatttgtatggtcagacaaatgtgaagctagttttcaggagctgaaacagaggttgattacagctccagtgctagctttgccttctgacaagaaaattttttggtttattgtgatgcatccatgcagggtctgggatgcgtactgatgcaagccgatcgggttatcgcttatgcctctcatcagttaaaagattatgagcagcgatacccagctcatgacctagaattggccgcagtagtattcgctttgaagatttggcggcattacttttatggggaaaggtgtgaaatttataccgaccataaaagtctcaaatatttctttacacagaaagattt

SEQ ID NO: 276623 - DNA, 614 bp, Cannabis indica
atattaaaatacgaaatttcaattggtatcagagcgggtcactaaattcttagtgagatcttgagtttattccgtttaatttgttttgtgtgagatgtttttgtttgcagaaggaagctctatcactcgaccacctctgttgaatgagtcgaattatccttattggaaggtcaagatgagagcattcatcaagtcacaagatgagaaggcttggagagctatacttacatgctggtcataacctactcaaagtgatgatgaaggtaatactaaggtaaaacctaaactcaattggactattaaagttgaaaaattatctagttataataataaggctttacatgctatttttaatggtgtcggtgaaggcttttttaaattaatttcatcttgtgaatctacaaaggaagcgtggaaaatccttcaaactcttcaaactcagtttgaaggtattgctgatgtagggtttatcatttaatattttcattattttaatgcaaaataattaaacctaaccctatgtggcatactataaatagatagtgatggtttcaggaaaagatgatgcatcttattcctttcagagaaaaacctgagccttctatctaacctag

SEQ ID NO: 276624 - DNA, 361 bp, Cannabis indica
aaatttgggtcacggggtacggcttcaggtccacttttgagttcgggattgagttcgagtcctggtctgagtttgggttcgggtccggatttcattttaagtccagatcaggctccaggtgtgggttcacgtcctgggtcttggtctaggttgggtccgagtccatggttcaaatcccaatctgagtctggattcaaatctgggtctaaatccttggttttgatccttgtctgggttagagttttggtccgggtccgggtctagctttgggtctgattctaggtgtgggtttcagttcgggttcgagtctgtgtttgggtttgtatccaggtctggaccccgaactgggtgtaggttcggg

SEQ ID NO: 276625 - DNA, 525 bp, Cannabis indica
tgctcttaatgggttattctaactctagaaatggggaaacacccatccaaggcatcgaaatggcaaaaattgagaaaatgaaaggcccggggaaccctgccaaaaccggctagccggtttttgtggcactgcaaaccggctagccggtttgcaccagtattccccaaacttttcatttgtgctcaattcttcaccaaatgcaatgaaaccttccagagtacctaataagggcatacacaatatattccaacaaataaaccaaagaaaaactcaatgaatcaagatatgccattaatgatcaaagctttgaactcaaagcccaaagttgcataaaacctataccaaccatcaaaaccagccacaagaagctaataccagctcaatctaaccctagaatttgaaccaaaccaacatcaaactctaacagctcctataacacaatttcaccatttcaaactaagcaaaacttaaaaaaactaaagaggggttcactagggcttaccttaacttgaatctcccaaggtt

SEQ ID NO: 276626 - DNA, 463 bp, Cannabis indica
acaataaaagtttgtgactaaaagtaaaaaatttgtaataaattatatattatgttgtcactaaaaagtccgtggctaaagatattagtcactaaaatcacaatttgttgtgactaaatgtgtttttagtcacaacacttgctgtgactaaacctaaattagtgacaacttgtatctaaatattattagtggtgtgcataaattgatccaatacaatgataaccggctgatctaattacaactaactgccaaacattggatatgcaattatgatcagaccagattggatgttatttataaatatctaattggattagatcggatgttggatggggtatccaaaaatccaatacatctaacatacaattgaactaattagtatgttcatttagtttggatgagtaattagattttatatattgttatacgtaacatatatatacatatgaaaattaacattaaa

SEQ ID NO: 276627 - DNA, 779 bp, Cannabis indica
cacctcagctcgtttttcttttcattaaagccagctggactatctgccaaaataaacttactgggctgacaaattgctacgcgatgattgctatagcaatgccagtcagcaataatcattttcctgctcctttttctccttgtcccaaacatttccaaatacctattcttgtatttttttctgcttaaaacacataaaaacaacaacataagtccatctaacacttactaacacacacacttccatttattacaaagacacaacaaactaaacacaattacacaatatagacattaattgctccacaattcacattaaattcaagcttaaagatatgaaaataactctaaatcttagagttatcaacaccccaaacttagaatcttgctcgtcctcgagcaatgacaacaaaaaataaacaaaataaagcacaacaacaaattttacacaaagactcacacacaagacacatgagagattctatagaaattcaagatggcctagcgaacattgatgctctcagaaaaaaaaatggaattaaatggaataggaaattgcttgccataactttatatgctgcccctttaaagtttttgtcattggataacattaatatttcccaaaagtcacctaatcaacaatttatacaagtatatcccacctaaactttgaacttctctccaactaccttaaactttttttttttttttattcatttaagctccataagttggattagtgcactcctctccactaatgtagtctaaacttatcccctt

SEQ ID NO: 276628 - DNA, 666 bp, Cannabis indica
aaaacaatctctaactcatgcaacaaacacagacaccaatttcgaaatttctcttgaaaacttaagcttttgaatagaaaatccataactttaaacaacaccactaatcatgcattaccagaagctcaattcaactcaaataatcaagaataaacttcagaaattaaccacaacatacagcaacaagaacactccaaaatcaagcatgcaattcactaactttttcttaaaacacaagaaaacaccaagaaaagctacaaggagaaatacctaaagtttaagcaccttaaaaccaagatgaatcttgctggaaatgcagaagaaacacaccaattccagctgctcaagaagtggccgaaagagagaggaagagagaaaagcaatttccaatttttttctaattttcttactttgaaccaaatgaggataaatgcaaaataaaccttttatttcagccaacataacaataaaataacatttaatttccaatttctaagtccactaaaggacaaaacataaatggggcaaaatgaccattttgccccttcacactaaaataacataaataacactaaagggggtattttgggaaattctaaattcccgaccaatcccgacattcccaatgtctaataaaccgtcccaacaaactaacatactaagttg

SEQ ID NO: 276629 - DNA, 542 bp, Cannabis indica
gaaggtgggataataaatgtaaaaattgaattacacaattgtacacatgtttgtcatgcacaaagcaatctgggcaattttcgcgacatgtcgcgacaccaggcgacatgttcacgacatagtgaagtagttggttaggcgggataataaatgtcacaaattaattaccatttaatgtggaaacgtcttttgttatcgatattaagcgacatatttgcaatatgttatcgacttcaaactgaacagtcaaaacatgatttgctatcgacatttaacgacatattagagataatttatcgacatgctaacaaacacttagaaacacaattttttcgacattaaacgacatgttagcgatgttgtatcgacatgtaagtaaaaatttgaaacttgaacacttttcgatattaaaacgacatattagcgacaattattgacatataaaactgtacagatttaaaaacaactatgcaactatgtttgtacaattgtaatggagttttgaaaatacaaaaaaattacaacccttgtagctattttac

SEQ ID NO: 276630 - DNA, 204 bp, Cannabis indica
gtaacggtaaattaatccatatacaatgtaaatcatctatagaggatcattgattattgggattaaaacaatggataactaatagcgtatctgtatcgtggaacatatagagcgttctatataactgagagttcaattccaagttctatggtggatttggaagctcggatatataggcacatggttcccatactagttgagaca

SEQ ID NO: 276631 - DNA, 591 bp, Cannabis indica
ggacgcggtagaggccgcggtcgagtcccgagaggtggacaggagaatccacctcaggccccggttgattgggaacaaaggtttgctgagatgcaaactagaattgagcaacaagaagaagagatccgacgacttaggcaacgagatgctcctgttgagcttcccccgcaaccgcctgctgcggctcctgcagcccctgcggtgccagctgagcaaaatattgctggtaaccgcatggagcctttatatgagaggttcagaaagcaagcgcctccagtatttctgggaggccctgatgttttaaaggctgagcagtggttgaccgttattgagaaaatactgaattttatgggagtggtcggaaatgatagggtggcatgtgccacatttcaatttcaagaggatgccctgatttggtgggaaatggtatccctcaccagagatgtgaccagaatgacctgggaagagttccgggaattattcaacgccaaatattacaatgaggcggtccgcagtgcaaagcggaaggaatttgttgagttggtacaaggtgagggtatgtcagtgactgaatatacaaccaagtttgat

SEQ ID NO: 276632 - DNA, 559 bp, Cannabis indica
agagagagctgagatgaacaaatagaaaaaaaagaaaagaaaaaaaaaagaaagaaagggaaaaaaaaaactctttttatatttataattttttttaattttaaattaattttatttaattttttttaaataatttttttacgtggaccaataaaattgtgtcacgtgtatattgtgtccacgtggacaatccaaccagacagttaacagctaaatttggacagaagtgttaaattgctaacagaacacgagtattgggagttttaccgcccaaatttaagttttgaagttaagtgaaaccaaaataaaagttttggagattttgccaccatttaccctaaatactttataaggatagtaactctttttatctctcgtggactttcacccaccaaaggtttagctatattccagtttcctctattcttgaacatcttttttgtaacgaccgtgatatctaactacttgtattattttatctatgaacgttcttcttcttcaaaaaaacaaaaaaaaaactactcttatatattgtttggtactagtagaatgtgaaaaa

SEQ ID NO: 276633 - DNA, 660 bp, Cannabis indica
cgttgttgttctaagggtcgctaacccgtagccttgaagaactctatggcgacgattattatgtaataagcgctgtcatataaggcccctatgacaacatgttatttcataggagtgtcctatgactttttttttcagctttaccattttgtgtaataaccaatttttaaaatttttatttaaaatctaagttttatttttgcactttttaaaagtttttttttttgtttttttttgttttttttgtctattttttacggaattccacatagaaacatttatagcaactaacaactaacggagcaacctaaatcactatcaaaatccgtatatagcaacccacatagaaactactggagcaaccctaaccataaatttgaaaaaaaaaaagactactacaaacaaaggcctttaatcccagtttttaaggccttttatcctggttttcgttaaaataaaaactgggatatatgcctgcagtgggataaaaagtccttgaaaaaatcgggataaaaggtaccatcccaatttttataaaaaaaactgggataagaggtcttaaaagacgtgaccttttatccaatgtaggtgtttcacattttttttttaaatttattacatttcattcattttttttttgtcaataattaataaatctaa

SEQ ID NO: 276634 - DNA, 601 bp, Cannabis indica
actagtcttgtttctcggtcccgatctccttctggtttcagttgtagttcaagtcacttggtacgagttcgggtcgattttgggtctgtgtttgggttttagtcttgatttgggttcggggcgaggtttaggtccgtgtttcggtctcggttagggtttgaggttgggtccggttttgggtgccgatccgggtggaaggcctagtctctttcgaagatcctagtccagttctagtccaagtttcgattttggttcccgagtgtgggtctgggtctgggtatgtgtccaggtcttggtttgagttcgagtttgggttcgggttctggtctgaatcccaaatccaaacactgactatgggtcaggtccaagcatcgagtccgggatcccaagtcccgaggtgggtcctaggtcatgatttgggtctcggccgggtcccggatcctgatccaagtttcgtaggcccgaacgttttaggttcccgacgtttggggttcccgaactttaaagggtttgggttccccgactctatgtccaggtccgtacggtgttgtatcctcggtcgaagtttagtgttttcgtattcgtgttcgggtcgttgagt

SEQ ID NO: 276635 - DNA, 849 bp, Cannabis indica
ataaaaatatatttttatatttgatgaaatatataggaaaggatgataagattatcaaatcgtaatttagtattttattatacaaagaaaattttttggggatttttcatttttacatttttaaaaaaaggtttttttttttttttttggtattttttacggaatttcacatagaaattcctattgcaactaatggagaaatttaaatcgcaaccaaaaatcgtataacaacttacatagaaacaactttagaaatccaaaccgtacataaatgtaaaaaaaaagttaaaaaataagtatatgagataatttctcaaatcttttctcatcttttaatacaatcaaagttataggtgaaaattaatggatttctgcacaaatatatattatgtatggacccctaataataatgaggggacagtagataagatatgataatagaagatctttgtatcataaatatcaatgtcttgtttagataataaaacagagaaaataaatttacctcatttattaagagtatacctaatcaaagtatttatagctataaatagaatgtttatagttgtagaactcatcatcatacacatataacaatttacacaaattattaatatagatatatatggagatgagatgaagatgaagatgactagcataataagctttattgtagttgttgctcttgttcctaatcttccttctactactttttgcaatttcaggtgggagagctttgaataatatcattcaacttcaatcaaaaatcaacggtcaagatagaagatggtgactattatcgaacccgcttctttgaaaacatattgcttgaaaagctgtccacaaaag

SEQ ID NO: 276636 - DNA, 551 bp, Cannabis indica
ggttacgccaagctaaacgagcagttcttgtgaaaacacttcagcaaagttgaagctaaaacctctctttttgctctaaacttacttagcaaagaaggttggtgaaaatgagtttgtgaacaaatgctcaatggtatttataggcaaacaaagaaaaggggtaatcatttcaaaaaacctcagacgcctcggttccccccaaagcgaatatgggaaatcgaaagcaatcaagtgcaaccgtcaaacgtggtgagagaaaatcggatttcaaagcattaattgcgtcagagcatttattagccgaaaacaaaagggacgcccagtcagcctcacgtcgagtcgcgaactgacgtgcctgacacgtgtcacccatccatacgcaaagacagctcggatgatgtaatgaccgctctagtaatgtggattagtaaaggcaattagtactaatttttattattttattattatttgtgaattaatttaaaatgtggaccccaatatttagaaataaatattagagttataatttctcaattctggagattttatta

SEQ ID NO: 276637 - DNA, 278 bp, Cannabis indica
ctactataataatgcatatatagcatatgttttactctccatattatgcttttatttaattactaatactatgtaataaagcttctttgatttgagtgataaaataaaactgtatgatatgttgtgatacataagtttttttattgatacactatgtaataatgctagttacttggtgtctctttaatctctgtagttgctttgttgttggttttgtttatagatacataagttttggtatatttatagatgtaatgaacatgtatgttgaagaaggg

SEQ ID NO: 276638 - DNA, 542 bp, Cannabis indica
actaggtcttgcttttccaagtaagatctagcttgctaaatgttaaaaatggccaaaaattaacattcaatcaacatttcatcacaactaattgaactaagacaagattacttcatcattgcaaaatcaaaacactagtccatacaagggttcataaccacccaaatctcaaagagtttagttcatagctgaaattaaaaactcaaaaccagaaaatatattgttcatggagttaaagagaaacttaaagagaagaaaatgatacaaaacgaagtggagagcaagagagatgagtggtgagctcaaatcctttctttggtagttgccttcttctccttcttctcaatcttcttcttctttctttgtactctcttctttctctgtacttagaaactttctgctgtgatttttcgtactcctattcaagtgcagccagccatcatctctattatgacctccttttctttttgccccccaattagggtaccaaagtttaccctaattggaaatcccaatcatcacccacttgtccttcattttcc

SEQ ID NO: 276639 - DNA, 538 bp, Cannabis indica
ttaaagcttgcacaacctatctaacatgctttcaaaatcacttaattaacttcaattagacatgctttacacttcagaaatcaacaacaaaacacagtaataaccacagccacaagaagcatgcatatactcaaaatttcaccatttttcataatttcaaagaagaaaattaagagaagctaacctagcttgaagaatgcttagaaaggatgagagtttgcttggaaatcaaagagaaaatcagcttcatgcaccctaatgcctcagccgaaatagagagaagagttgagagaattttctttttcaaagcttttttctaatttttgctaagtgtagaaaatgagaaaagtaaatgaataaagccacttaaaccatttatttcagccactaataaaataaaataacaattaattttcatttaataaactcactaaaagacaaaaagtaatggggcaaaaagaccattttgcccctccaccataaaatcacataagaatcactaaaggggtatttttgggaaattctaaattcccggcca

SEQ ID NO: 276640 - DNA, 634 bp, Cannabis indica
gtacatcatcgtagatgggatcatgtataaagaggatgctcaatgccattactcaggtgcgtcacaccaaatgaaaccgcaacgccttcatatgaagttcacgacggattctgcggaaatcatgcagccggacagagcttatcaaagaaaattctaaggcaaggctacttctggccgacaatgattgaagattcgaaagcctacgtaaagaagtgcgacgaatgccagagattttcaaagataccaagagctccgcccaacgagctgacgcagatgcaaagtccgtggccctttgccatctggggaattgacctaatcgggcaattacctaaaggtaaaggcggagtgcagtacgcagtggtagcagtcgactactttacaaagtggactgaagtcgaaccacttgcaactatcacatcaaagaaggttcaagactttatagtgaagaacatcatatgccggttcggactaccgtacaaaatagtctcggacaacggcaagcagttcgacagtcaatctttcactgatttctgcgcgaaccatggcatcatcaaaagcttctccgcagtggcacatccacaagcaaatggtcaagttgaagcagtcaacaagaccctgaaggacacactaaaga

SEQ ID NO: 276641 - DNA, 857 bp, Cannabis indica
gagtacaaatgttgagtatttggagaagatcatcacctttagtaactcccataaaggagctttggcattgtgaaagctgtagctaattaaggtcacttcatctgcattaccattaaatgtaatattcaatctttcaagtttctggaacaatatttcaacatatttcaaataaacacaatcagaaaatcttcttatcaagattgaaagccatcggataaatcagtatagtgtagttggaaaaacattattggtgaataagttatagaactcttttctaaagtcatcaaaatctatccggtaataacttggtaccatggcatgcaaaccattaatggaatgttaactttgtaatgtaaagattagaaccactgcatctgctatcaactctccctaattacatatttgatcttccattaatatatatatttatattcccgataatcatgacaacaatatgaaaagggtaaattggcataagtgtccaaagttttaagtttgtaagggcataaacctaatgtttatttttagcggcataagtactcaatgtttgtaaaactgtaaattttctctaatttcgtccgtacaaaccctgttattttcttaaacaggcgatgttgtttatgatctgtcacatacaaaccaaactcacacgtgcaactaggagttagttggagttagttggttgttcggtttttgacagttaattctgttaactgttatttttgacagttttgtattctttgttttgtccatttttaattttagcttgtataaatagcttgagaacctattgttttggttaagccttgtacatactctctcattgtaattctctccaagattaataaaacattcaa

SEQ ID NO: 276642 - DNA, 394 bp, Cannabis indica
ggtgattactcttggggtggactggtgattttggagaagtgtaaaaacctatctgaagtctctaagtctactagagagagattgaatgttaaagttgtaggaaaggtacttattcagtctaaggaaagttctatacatttttggcattgttccaacatttattaactactagtgttacttcctgattaacgcaaaagtagttgccaaaaagtaaagaatccagtatcccaagagagtagacatatagagagaggaatttcacaatatcaagtattttgtgattaaggaaaagtaatggtggaggaaaggttgtgtttagtacaacctgtcagatcctattacggagagtacactacatactacacttgatttggatatcaagatgttgagatta

SEQ ID NO: 276643 - DNA, 505 bp, Cannabis indica
aaatacatgtgggaatcatttccgaattctctatttcttagtgatccattcatgcttgaggtattttgcagaggaaatttaaattgagattgaagaagcctataaattcacaagataattagactgcataattagatatggaaattagcagagtatgagtaatttaataattatttataattatacgtgcattagtagaaaataaaatcttagtcaaaatagacattaatgaaataatttttcaatcatgaagattttattagattccaagtgtgccatgcaagtcattttgaaattttggcatttttgtattttatgcccagtaacagtagaattgacactttagccaatagtgtcacatatatagatacggtttagtatcttagaattagcgaaaaaaaaaatttatgtatagttataatattgagattttttagggtaattggttaagactattttactcctaaatttagagtttacttagcagtgaagtaagggctttcag

SEQ ID NO: 276644 - DNA, 724 bp, Cannabis indica
aaagtgagtgattttcaatcaaaacaccacaaaaaaagaataaaaaaaaaagaataattataaatacacactcttatttcaacaagcctctctgccagaatttgcttcttcagctgattcatcttatgatgagccatggcctcaagaccatcacttggctattaccccctgtaataaaatacaaaaacaaaggtataatcagagtcagacaggctatatggtaatcggatatgatccaatccgaaatcgaaactcgattgattgaattattggttttcaaaaatataattgagaaataaaattttagaatcaacataccgattgtgatgagaaaggaatgatcataaaccagagaaacagtaaaattgaagagaaaagggttagagaagagaaaggctgactcagcgctttggagtggagtcgcttggtttggacaccatggctggcttcgacgcttatcgagtgaggaaaaaaacaaaagcctcaacaataataataaaacggacgtcgttttagattgccacgtgtcaggatttactgacgtggcaccatgctgactgactttaatctttttttaaaaaaaattaagagtattcataaaatatttaacctaatttaattatagatatttttacttacgaattagattaaactaaaacatttaaaatttataaaaatattgattgataggtaaaaaaaattatacatatttgtatatatattt

SEQ ID NO: 276645 - DNA, 754 bp, Cannabis indica
ttacaattttgccacttttcaacaatttgtcttattttgtcaaaaatgccatttttttccaattcaaccacttaaatgtcaaaactatttatttaataattaaaattaattatcaaataaaattgccatttaacatatttattaattagacttaataaagtctctcaattaacaaataaaccctaaaatctcttttcttcacaattaagccctagcttagtgaaaattcatgaactagacgtagtctaattttagaattataaatgattaattaaaatcaattatctgagtcttaaatgcagtattgtctcaactagtatggggaccatgggcctatacaaccgagctttcaataagcagaactagaatttaccaagtaaattccctaacttattaattccttattgcatccacagtagaactgggaattgcactctcagtcatatagaacgctctatatgttccacgatatagatacgctataaacatttaaccatcgttctaatcccaataatcaaaaatcctctatagatgatttacaccgagtagggacaaatttactgtttcaccctcaatgtattttatccttaaaacacttaacttcctataaatgaatttcagtgagctaatataatcactgaaaacaagagctcttccatttatctatattaagccaagctcgaaggaaatcatcgtttcacttttatgtctagatagacatgaataacactcttgagattgaatctaagcatgt

SEQ ID NO: 276646 - DNA, 457 bp, Cannabis indica
actgtaaaaaatatgatacgatgcaaaatggggacccatacttgttacattaccaactgttacagttggtaatatttattaattatttctaatttggcccctcatcaaatcaaaaactatctaattggtccacatattaaaagggaaatttcattaattgaccctaataaaataccccatttcaaaatttataccctccactaatttatacaaattaattccactattactcatttctacccaaaatacccctcaaatttaattttcctattctctctctctctctctttccgtctttccctctctttccctctctctttctctctctgtcgtttgctattcgaacgctgccccacgacgacgacccaacgacccaacaacgcagtccacgaccacgaccccactccggccacccacccacgaccctgacccaaccctctctctatctactgttctc

SEQ ID NO: 276647 - DNA, 511 bp, Cannabis indica
actataatttgtttttttttttttttgctagttatgtgaaaaaaaatatatttttttcataaatattaaataatttaatattaaaaagtaaccaatctaaagtaaccgattcaatccgcaaaagtacggattggattggattggatttgagctattgatctaaaaaataaaatccgcacttagtgcggattgaatgttgtttgatcaaaaaagtacggattagatcggatgaacagtcctactttaaatggatcaaaaaagatagggtaaatggcggcaaaacccccaatactttcgttttagtttcattaaacccccaaaactcaaaattctgcgggtaaacccccaaaaccaggaaactgttagcaatttacccttttcgtccaaatttagctgttaagtgccatgttggcttgtccacgtggacacaatatacacgtggcaccattttattggtcaacgtaaaaaattatttaaaaaaattaaaaaattaaaataaaattaatttaaa

SEQ ID NO: 276648 - DNA, 182 bp, Cannabis indica
gtgaatttaggttataaattcttgatctgcttattagaacctcggttatatagacccatggtccccctagactatgtctatttgttattttttcactaagtaagggcgaaattgtaaagaaagagtttttagggcatatttgttaattaagatactttgtatggtccaattaataaatatga

SEQ ID NO: 276649 - DNA, 569 bp, Cannabis indica
aactacggggagtacacgaggctaaagagacagtcgatgccgacggacacgtcctggttaagggcgtggactacgtcagtgaggaacttgctgtggcggttcctcatagaaggcagggtgccttgggcgccaggtgggtaaaccctccatccaaggttaccgaggcgcgccttcgaactctcgatgagggcggatacctgggcgaactggattgctacattcccgcccacaacaatcgtgccacaaaccctgaaaaaggggatgtgcgcctggtcgggtgcccatggtcagcaaggggcgttgatacccttgcataaatacttcaaggatgtggcggacttcttcggcctctgcccggcccagtttactcctaaaggcattaagtatttgtctgccctcttcgtcctctacgcttcccaagagtggggtactccttctcctcacgaagttgcctggttctttgatttgaagtccacccccaagcaaggcaggttggggtacttctatttctctcaaccaagcttcaagtggttgacaggcacgaacgactcagccatcagcaagattgg

SEQ ID NO: 276650 - DNA, 492 bp, Cannabis indica
acaaagaaactctacaaaatgctctcagtctatactctataagaagaaatcaacccttcaaggtaaagagatcctccaaacttgactataagctagtttgcatcgatgaaaattgtacatggagtttcttggcatcaaaacatggaaaaacaaacatgttcaaaatcagaaagattcagcattctcatacatgctcaatagatgtcacatctgtagaccatcctaatgcaacaagcaacctgattggtagtgtaataagaaccaaatttgtaaagccaaagagagactacacaccaaatgaaatagtggatgacatggaagatgactattgtgtctccatatcttaccaaaaagcatggagggctagagaaaaagctattgtagatgcaagatgctgtccacacgaatcgtactctgaaataccaagaatctacatgatggaaaaatgcaacccaggtactacttgacaaccctaaaaccaagttttccaaa

SEQ ID NO: 276651 - DNA, 558 bp, Cannabis indica
agttgtattaattattatttttagattgtaataagggtatttagtacattttgcaaagttcagaaatttggataatataattgtcacctgtaactatatatttatagaatgtaaaattaatataaaatataaatgacatatatatgtaggaagtaactataaatttatttatttattttattttttttttgttggggtaaccgataaaggttaaaataacaagggtaacaaaagttacacaaaaggtggggaggtttctttcatccaagaaagttcattgtctatcctaaaggcatgcttagccaatctatgagcctcaacaataaagttgctgcacatgagaaagagatgccccaggaaaactagacaataaaactttaatatcagaaaagataacccccagttcatgcaaatacattgtctgaccctccaaagttgagaccaaagaaaattcatcagaaagaccctctccacgagaagtcccacatcttgagcccaacgcaaatctactactaacgcaactgtttctgtctggaaaattgaaaaagaacctgcaaa

SEQ ID NO: 276652 - DNA, 647 bp, Cannabis indica
ctcagcaagagttgccaggagatcgtccatgggcctggttgctccaacaaagaaataagtgttaggacattcatgagaacaaactacacttagcaaaaaagcaataaaactagtcctaccctgactctctaattcggccctagcaaagtctcgaatcatagcactggcttcatcatccccgagataactgtctgagggaagaaaccagctagaagataagtaggccgcatgatccaaaggaataggcgccgaaggtcccgagcccatccagggccgacctaaataatggcctaagtaggaaaagtaatactccttggcatgattcccccaccgggaagaaggcattctaaaccaacggagacgctcatcaaaccctataggcctaagacgggtatactcacggacgggaggaacataatgtattgataaaggggacttactagaacccgaagtgctggcatcgagagctccggtatttgggaccgggaccacaggcttgggcctacggggtcctctactccggtggagcttgcaggcatagagtcctcccagcggccgcctgggccttgatataggccagctcctgttccctcttgaagaggtacttctggtacttgtcctccaccatggcgataatgtcgtctcgg

SEQ ID NO: 276653 - DNA, 543 bp, Cannabis indica
aaaatacttgctagagattaagcaatcaaatcaagataccataaaatgttatgaggaatagacatcttgaatcaagtctttcgaatagactatgcaagaattcttctatcttattctcataattctgataagttatttctatccatgtgaatggttagacttgttttatcagaggtgttcttaagttcctatcacaattatcaaccaaacgaagatgggtaaagaattttaatattctcccactcaaccaaggtaatgtgatacattatcaaagaactttaatggtatcaataactattacaacagtaaatctaaactggaacatataatcaagatcaaggatttattctgataatagctaatttattatattatttccatgtttaaattatgtgtcacaaagggtactgtagaataaagtccacccctaagtttatagagattatgatccacccctaaaggttgtaaatctctaagtgtgatagagagtctgtggagttgaatataatccagagttcattagatataaaagatcgttgaact

SEQ ID NO: 276654 - DNA, 508 bp, Cannabis indica
ctttgattagtttaagcttgttaatcttgtgcaattgagcttctatttattgtatgctttgttgttgagcttgggctgaggttgtatggtatttttagttggattttcatgttaaaatggtgttatgctgctggatttttattaggtttgtgttggattgagttcatgttcttgaacttgagattttgatgagttgagcatgagttttgagtcatttatgtaatctgaatttttggatttgatgcatgagatatgtgtttttgatcctctgagatatgctagcagctctatttcatgattttgagttatatgcatgtttgggttgaattgggggtgagtttggcatattttcgaagctgaaatttgggttttctgggtttttaaacccagtggtcaggagcactgggtttaaacccagtggtcaggaccacgataatggcagattgctatttcttttaagtttttgtttttgccataactttcgactcgggactccgtttgggacgtt

SEQ ID NO: 276655 - DNA, 578 bp, Cannabis indica
acaaaataaaatctgacaagccggacgaggtgcatttctatgtgggaaggaagagatgtagatttgggagggtggagttcggcttggtcaccgggttaaacttattgcccggccctactgaggaagacatcaaacaaaatggaagctctgaccggttgattcaggaatatttcaacggtagtgcttcgatcaccttcggccaactgcgcagagtttttgagagctgcacagaagctgatgatgtttacaagttggggatggccttgtttgttatgggcgtcctcactggtaaggaggagaagactgccgttcctccttttgtgataagaatggttgataaccttccattcttctacgagtatccctggggaaagatttcttacaccaagctgatggaaagttgtaacaaggattacttggatgtgaagaataagatgttgaaaaagattgagaagggagtcactcagaaggaggcaaaatactcagcctacggctatgctgcagcgttgcagtattgggcatacgaggccatattacagctgggcaacgagtatgcagtgaggaggtcgcatggcttt

SEQ ID NO: 276656 - DNA, 562 bp, Cannabis indica
tatttcactcagactgcatcaagacaagggggaggatgatactataagaaagggctccatcgtggatgggacgtcgatggtgctattgcacttcatgaagaatatttggctcttgagcaagagaatgaaatggatgttgacgctcatatctctttgtttgatgaaggcgctgatgctcatacctctgtccctagtatgggtgtcgacgctcatacttctgtttctggtgggagtggcattgacgatgtgatgttctccattgctgaagatggtaccattgctccatagtgggtcttttatttaaactttaggtccaatttgtttaaagtatgaacatcgccattgtggcattaagtatgtatgcttaacgatccttttgatgtgcggacatcctcttaatgatgacccttttgaattttatgatgctttgatgtatgaacgttgcttttgcggtggtgtgacttattatcttaatttggtattaatattcttcatttttcattttgctgatgttttatgttattcggttgatgtaaattttgcattgatccatgtactatat

SEQ ID NO: 276657 - DNA, 816 bp, Cannabis indica
atttaacgccgtagaatctcgaaagattagtattattgtaagtattttattcttagtaacgtccatctaaatagtggcagctaagaataggacttacaaggtatgaaacaatggtggaatctcatgaaataggaatgaccttgactctcgactcaaaacgaagcaacgtcggattctcttttcgatcgaataaaaggttgctagaatggtatctattttagatgaattgactactctattcaatgaatgatatctttgactctcgcctaaacgggacactgtatcaattagttggaaaccttagaaattatttaagatgtgtttgttttgttatttttactatatctttcttactatgttacttgtatgataaattctgaatgtgtaagactttatattgaatcatgttgttttctgttattaatgttgtagtataaatatcgaatctccgttgttggtctaacttagcttgttgtttttaatgggacaaatcccaaagaattatcatccgttagacaaacataatagtgttagatctcaacagataagtatttgtaaatgcaacatctaattgtacatccaaagatgacaacttagattagtgtttacaatatgaaacaatgaagagattaataaaataaagaataactttgactctcgcctaaacgggacatcgttgaattcttaattaattaaaaattatccttaagtttttcctcttagaattttctatttagaattttcttaatgtttatattcattggtatgaatagtttataaaatctatctgcttatgatgtcattattatttctctt

SEQ ID NO: 276658 - DNA, 688 bp, Cannabis indica
cgtcttccactggagttgatcgaaaagatcatcaatcctaggtaatggatatttattcttaattgttagcttgtttaactcccgatagtcgatgcacattctcatagacccatccttcttattgacaaataataccggagctccccagggtgacacactaggccggataaaccctatgtcaagtaaccgttggagctgaattttcaattctttaagctcagctggagccattctataaggagccttggagaccggttctactctaggtgctaaatcaataacaaaatcaatttcccactaaggtggtaaacccggaagttctttgggaaaaacatctagaaattcctgaaccaccttgatatgttctggccgaacagagtctggccgagtcgtgtctaacaccacggccagaaaccctaggcatccatcacacaacaattccttagttgacagggccgaaatcactgggatccgagatcccaaaaccgaaccgacaaaagaaacggttcgtctccttctggttggaacattaccatcttcctcttacagtcaatactggccgaatacttggataggaaatccatccccagtatgatatcaaaatctgctaagctcatttctattaggtcaacacttaactccctatcgtcaattctgatcggcatagacctaatccaccttttggaga

SEQ ID NO: 276659 - DNA, 907 bp, Cannabis indica
gtgtatattttatgaggtaaatagatgagttagggcttaaggcaataagtgcgtaagtgtggtattggtgcttaactcgctggggttgttgattacaggggtactagtaatggaccctccgcaatcatctagaccacagggcaagcaagtagagctcggggctacctgaaccgatccaccggcaccgcctccacctccgtagaattcgggggataatgcgggggctggtaatgctaatcctcctgctgactgggagcagatgtttcaagaaatgcggagtgttatactttgtcaagaagaacagttgcaacgtttaaggcaacaggctgccccagttgatcaagggttaccaccagcacctgtgccagtggtgggtaaccaagggtatattatgtcgcaccgggactctatgttcgagcggtttgtgaagctgcaacctccgacttttctgggaggtattgatataattaaggccgagcagtggatgagcacaatcacccgtatcctcaataatatgggggtgacgggaactgaaagagtgaactgtgcagtctttatgttacaagatcatgcccgcgtctggtgggatattgtgggccaaactcgggatgtcactgtaatgacctgggaggaatttaagaatctttttgaagaaaagttttataatatttttgtgagaacttaacacatggaggactttatgaatcttactcaggggaaaatgtcagtggccgaatacaccctggagtttgatcggctatcgaagtttgatggtgatctggtgcccacagatttcaccaggaaacagaaatatgtgagaggactgaatgccacaatcagttgggacttgaagattaccacttcacatgaaactttgtacaagaaagtggtagagctagccttgatt

SEQ ID NO: 276660 - DNA, 849 bp, Cannabis indica
aaaaagccatggaggcggctggcatccacgtgcatcccaaagccatgtctgctggacttggaaaggaaccaaaggaatcctcaccaagtacccaacgacaaaaatctagggaaccaagccctataaggtatcccgctgaagggaaccaaaagaaaaaccctacttctaccccgagagaaagaaaaaggtgcaggatccgcgaaaggtctgctcagatttcccgaaagggaaaggtccgcagaggggcaaactccaaaaagggagtcttggccctcaggatcgagaggaccaaaaaagcgtttccatgcaccaatagcccggaggtagaggaagaagaggacagaaatgccctcccgtcgatttgagaaatcaaatcaatgggaatcaaggtgacctccgagatcaccttgaccaaaagaaatacgggcccgcggtctccacgggaacgttaaatgaaggaatcatggcagaactcgccatactctgaaaagatatcgcccgagtctctcggagacagaaattcgacgactctgactcggactgtgaggaccgggagccatgtgccaagcacatcctggaagcagagctctccaagaactttaagatgcccaagatggtagcttatactgggaactccgatccaagcgaccatctgtcacggttcaaccaggtcatgacggtcatgagagtcagcaatgacgcaaaatgtctgtgcttcccgcttactctaagcgggtccgcagaggaatggttcaagaaactggagccaggatccgtgggctgttggaacaagttacagaccaacttccggagacagtttttcgccgcaagaaaggttaacctggaggt

SEQ ID NO: 276661 - DNA, 526 bp, Cannabis indica
ttactctatcactataggattcgaaattatgaagagagaaagagagaggaagggttcgaataaggtagaatagatggctcaaaatttttgactgaaggcaagtttattcatcatcttttaatttgaggcaatcactatcaatttataagaatccaactaggtttaggtttaagttatttggcattaaaaaatgataaataaatggtaatataagccataagtggccgaccatggatgtgggtctccactttgcaattttgccatttttttcaactatttatcttattttctcaaaaatgcaatttttttcaattcaaccatttaaatgccaaaactatttatttaataattaaaattaattatcaaataaaattatcatttaatatatttagggttaattgcggcaaaacccccaatacttttattttacttgcacttaacccccaatactcaatttttggcggtaaaacctccaatactcgtgttctgttagcaatttaatattttcgtccattttaagtgttaa

SEQ ID NO: 276662 - DNA, 741 bp, Cannabis indica
gttgtgtcgtcagactttattgcatgtggcagtcccaacacgtttcctcccatgcggcattaaatgcgagatgactgctcaggggaagcctgacacctcgcggagatgctttgatgctacttaggcctccgggagcataggggacttcgtatgccttctccgggaggcaggtcccggatgctgcctttcttcataaagacttagcaattaattcaaatgttaagatcttttggtccacgtgtccctgtctggttggtccacgtatattgggaaaaatcaggggcaacatttacccccaagccttgtttatttaaaaaatgaacaaggcttgttcagatgcctccggttgactcctcggtttcctggcacgtgcttcgggcgcgtgaaggtgtatttaatgatcaccattattgcagcgattcactttttgcaggcgttgattcgtttcatgcccattaattgatacggcgcattaatgggtgtcagacggatactcaaacgtttccaccgccttaattacaaatcaatctagccgttggatcttgggaattcgaatcgtgcgcctccccagccgttcgattggtaggtgattgtgcctgttccacatgcaccttggcctataaaagccaccacctttccttcatttggttactttcatcctttcgccaaatttcttcgagttttccagagagaaagaaacccttagactagaaaaccttcaaacacttacagatttcttat

SEQ ID NO: 276663 - DNA, 665 bp, Cannabis indica
gtagtcttgagattgatatttctaattctaattatcaataaagattggtagcaatgctttcaaactggaatatgaccaagtttacattgaatttatgatcggaactagtataaatctcttgtgttattgtgtctgacaactatttagattcatctgtgttatatttttctagtttaatgtgtttgctggttttttgttcttgatttatttgttttgatttaaactttatttatttaagtaagattttgaatttagaattacaaagattaatttctatgtatcacagttaaatttcttacaaaatggatatagagacttaatagtaaattgctagtagctaatgtctagtttagtataaatttatagtgtcattgatgattcatttgtgagaatgacactacaaatttatattaaatgtataggagatgtacccaaacacgtttttagtgtgtactataaatttttgtaaaaatatttgtgagttattattaaataaaaaaatatttaattttttaagtgggggctttagctagtgtccatatttgtcaaggttgtttttggaaacgatcaaaaatccaagagaagtaatatatttaattggtattatatattttttctttgagggcgttaattggtattataggtttggttgggaggaatgaaaa

SEQ ID NO: 276664 - DNA, 1051 bp, Cannabis indica
gaggagctggctgctgcaaatccttctactccccaatctcccaagtctaaggagtctgggccaccaacatctgggtccgaactggtcaggagggttcctgagcagatgcaggcaccatctctacccgtgcccgtgctgcctgaggtcaagaagggcagggaggtgatggctcatcacatgaaccggctggttcctgaggtcggtgagcagctggctggtgcggaccactcatctctggatgtgttggtgggcggagtcttgcaggagcttaccagggttagtcttttcttttcgacacttcccttttagcttttcatacttagcttcatatgctgaccttttcctttgtgcaggccggtttgaagctgggttatgcttactcccgggctaaatctgctgcttccaagagtacggctctgtccgacaccttgagggcggaggcggacttggccaagaaggaagctgaggaggccagggcggagactgcagctgttcgccatgagttgggtgaggccaacaagaagctttttgccgctgagaagaaggtcaccgtgctgacaaaggacctcgaggctgctgatcgctttgaggaaaccatcgagtctttatctgctgatgttgatcgtcttcaagatgagaggacttctctgcggcaggtcctccttcggctgaaggatgataaggatgctcaaacggtcgaggcgaaccgcttgagggagaaggttgatgctttggagactgtcgacctcgagctcttctttgatttttggaaggctaatccccaggccaacttcgactacttaggaaacgccaaggaaatgtacctcgagtactgcgcggcccaagttgcctatggtgggaaagaggtggttgcttcaacttccgaccaggcttctgaccaggctgctgatgcttctctcgctcaaacaacagatcctcctactcaagtcggctcagaagaaccaaacccagagcctgggactccagccgtttgaacattgatctttttattcctcctgtttatatatatatatatatatatattagggct

SEQ ID NO: 276665 - DNA, 855 bp, Cannabis indica
agaaaaacttgggaaaaatctagtagaaacaatcaaaactctagtaaacacagatgaaaacatggtcccctaaattacaaactaccaaacagaaactagtacagtaggtttccagtctctacacatctttaaaagaaaaatctacaaaatcttttgttttataaatccaagtagcagaaaaacgattatgctaccatgctttatgtttagtgttgttagagaattagctgtatattaggtgtaaaagaattagggtaacttgtatttagtagtttcctattttgttggtagtttcctatttcctagtctcctagctttgtatataaatatgtactattctatgaaatacacacataattcgattcactattttctacatggtatcagagcattgtgattcaaaattcgaaattcgaaattagggttctgaaaaaaaaaaaaaaaaaaaaaaaatttaagggtttgagtttagggttgttttttcgaaaatcctatttggagtgaacattttttctcaccgcccacataggaagactgcccagccgccggactgcaaaacccaaagtccggcgtccagattcaccgcgcgtggggcccacgcgccgtcgtccgccgctgccaaccgtcccacgcgccggcgcgtgagggcgcgtccggcgtcttctccggtgtcggtcgacgcccgtcccactcctgctcctttctcgtcctccttgcttcggttttcggtcggttcttcgcattttgtggtttgtatacttttgttcttctttgttgtttgggttagtctattcctttgtagtttgctctcttcctttttcttgtcaatttttggttttcgtagattatggcaga

SEQ ID NO: 276666 - DNA, 629 bp, Cannabis indica
aactatggcaatttagatcaaacaataacaggttttatataaaaaaaaaattaataattgaacaatatataaaacacacatgcatggaacaagttggatagttggatataggatttatttaatttaaattaattaaataattaaataatttcgaaaatttaaaataattaaaaaaattaaaaaaaaataaaattaaataattaatttcaaaattaaacctataaatttgaaaaattaggttttcaacaaacctaaatatctatttcaaaaaaaatgctaacaacttttcaaatttcatgttattaaaataaaattaaatattcaataaaataaaatgataaataaatatcatttatctaattttataatttaatttaaagagaataacaaaattttaaatgttagcaaaatatcttgttacaatttaaaatttcttgattaaagtaatcttattttaaatttcaaataaggtcattttattaaaaaaaaaataatttaaaatataaatatctcaccttaaatttaaaaataagagaaaaataattaaattttaaaataagataaccaacaaagcaaaaagatagatttttacctattttcaaggttcaaatatcactaatatcttaaat

SEQ ID NO: 276667 - DNA, 642 bp, Cannabis indica
aatgtcgctacatgtcgcgacatatgtcgcgataagcgatgcagcaatttcttttgcgacatcgcataatgtcgctaacatatcgcgaacaatgtcgcgaatgttcattttcaataaatttaaaaaaaatacagaacagtaaagaaacatacccgactgttgaataacagtgcaatgtcggttgccttgacatcttgtttccgctggccctccggtgttttccagctcaacattctggggaacttggtcccgttgcagtgggcatacttcttccccaacttctcaattgcttcgtatgcccagtactgaaaggcaggtacatagccactaacagtgtactttgcctcctgagcaatcttcttccccttcttcttgtcaacattatccttgtaatgttgcatattctttcctaatgtctccatcagcttacgaaaagcgcgctcgccccacggatacttaaagaagaattcgagatcgttaacaaacttcaacatctcaggccaaacttggacattgccctcctttgatactaatacaccttcaatgaaagcgatcagtccaagcttgtaggcatcatctttatcttcgcacctctcaagttggagcataagggagtccaactgaacagaactcttccttcaa

SEQ ID NO: 276668 - DNA, 654 bp, Cannabis indica
attaggtttcatattgaagaaacaattcttaaggtaatgcatacacaaagattattggtgaaatttgaagaaggagaacctgagaaacttcgggtgaaaaacctcgaggtttctctcaatcggcgaaaccgcaaggccattttcttcagaaatgattttcaaggaaatgaagaatttcttccagcggaggagcttgacgcctgagattttccttctccggcgttgagtcggaagttcaggatttgattgttggacttggggtttaggcctactggcttagggttttactcttatgggcccggcccattcacaagcccactttattagactcgaagatgggaaaacttaaaggaattatttcacaaatacacgaaaacaattaaaaaaaattataaaaatacagttttacggaattttaaatattttatgattttttaatttatttcaaaaaatatgatatttttatattgtactcttttaaattttgatttttggttatttgtataatattttttgttgttgttttgatgtaatttttatgtagttttcttgctgttttcgtgtaatttttatagaaaaccgtaaaaatatatatataaaaaaaaaaaaaattcaaacgtaaaaatgtaatttttttttactaaaaataagtgt

SEQ ID NO: 276669 - DNA, 672 bp, Cannabis indica
cttccccaaaacttgcatggcctcaaatgcccaatattgcagcgcaggagcatatccgtacacgttgtacttcgcttcaggttgagtaacctttttctccttcttgtgtttcttcttggtcttatcgttcttatccatgtagttttgcctaagttgttgcatattcttagttgtggaagacaacaacttctgataagaaagaagaccccaaggatactcgaagaacttgtcttcattttctaccaactttagcatatctgtccagatatacacaccctcggcccgtgacagcagaacaccttcgacaaatgcacacaaccccagcttgtatacatcgtcagccacatcgcatgcctcaaacgctagccaaagggttttaaaggtcaccctttttgagttgttgagatagtctcgcaagatccgatcagaatcacactgtgcagtcaattcttctgacgaaggaccaccgctcatctttaagcccgtgatcaaaccgaactcagaccgcccaaatctagcttcggttttacccacgtaaaaccacacttcatcatttttggcctcactcactttcttcttccttagtaacagttgatgcacaataaccccactgaatttcaaatcactggcattccaaaaaacaccaaagggcgtctccttcaccttctgagt

SEQ ID NO: 276670 - DNA, 603 bp, Cannabis indica
acactaagtggccagccactaatggaccccactaagttacaattttaccattttatttcaaccatttatcattcttccaataatgccatattttctaatttcaatcctataagtgtcaaaattatttatttaataattataattaattatcaaataaaattgttgtttatattatttaataattagaccatacaaagtcacttaattaataaataaaccccaaaatctattttcttcataattaagccattacttagtaaaaattcataaataaaacatagtctaattttagaattataattgattaaataaaaccaattaactgagtctacaagcagtattatctcaactagtgtggggaccatgtgcctatataattaagcttccaataagcagaactagaatttgccaagtaaattctctaatttattaattcctacttgcgccactatagatttagaattgcactcttaattatatagaacgctctatatgtaccaagatatagatacgttatgaattatccattgctacaatccaaataatcaaagatcctctatagattatctacatcgaatatggataaatttaccgttctactct

SEQ ID NO: 276671 - DNA, 163 bp, Cannabis indica
caaaatttagagaagaaaagaagagagaagggttcggctatagagaaaagatagaggtcttaattaataaataagcctagaatctctttcttaacaatacatattctaactttagattataattattaattaaaatcaattaactgtagtcttacaagcagta

SEQ ID NO: 276672 - DNA, 636 bp, Cannabis indica
ccggcgcctgaccagttggtgaccctggggaggtcttcttctagtgcccctctaggccaaatcatcttgatcgatgaggacggagaggtcgaggaggaggaggaagagggtgagatcctggcccccttggaccgaaaacgcaagggaaaaatggtggaggcagagtcttccaaaaaggctaagagggtgaacactctggccgtcagctctgattcggggattccgtttgaagcagaagaatacactgtacctcccagtatcatccttacttccgtcccatcagatgaggagaggcaacaactccggatagccaagcacaattatgctatggccgagtacacaagggggaatgccgaggtggaagccctgaaaaaggtcttacgggaggctcagcgaaattccttacgcaaggaggccttcaggagcgcttgggacctgaacatggaccctctgacagactggttcaaccgcttcgtcagtgctacctcggctgtacaaaaaatttttgtaacccaacttgaataacccgctcaaaccaaaccgacaaaaccgataaaaaatgcaaaccaacataactcgacaaaattctaaaccgcccaatcagttaattgggcgggttgaaaattgacccaaact

SEQ ID NO: 276673 - DNA, 626 bp, Cannabis indica
aaagcaagacttgtagctcaaggtttttctcaaaggccaggtattgattatgaggagacatattctcctgtggtggatgcaataacattaagatatttggttagcctggctgtgagtgaaaaactcgatatgcgattaatggatgtagtcacagcttatttatatggatcactagatagtgatatttacatgaagatccctgaaggatttaagatgcctgatgcatataattcaagcaatcgagaaatgtgctcaattaaattacaaagatcattgtatggattaaaacaatcaggacgcatgtggtacaatcgacttagtgaatatttattaaaagaaggatataaaaatgatcctatttgcccatgtgtttttataaaaagttcaagtcctgagtttgttatcattgctgtatatgttgatgatttgaatattattggaactcctgaaaaactttcagaagctgtggaatatctaaagaaagagttcgaaatgaaagatttaggaaaaacaaaattttgtcttggtctacaaattgagcatttaaaatgtggaattttcattcatcagtcaacttatactgaaaagattttgagacggttttatatggataaatcacacccatt

SEQ ID NO: 276674 - DNA, 502 bp, Cannabis indica
agccttcccagccaaccagcaagcgccacgcaagctctccgtcagctcctcctccattcaagccgcgccaagtggcacctgcagaaggaaaagaagaaaaaaatggctgattaaatgtgttcagaccgaaaattacaaaataaaataccaaaaaaatccataattgtctcctacactttacacctaaatatccattttatcttcccaatttatttcacctaaataaacattcctattttattttaccaatctttttcactatttttccatccaaacaaactcttatttttttcaatactcttacacatactctatttatccattctcttcctaacactaattaaattaatcaatttatttattttattttgatttgcctataaatatggtgttggaagaccatttcaaaacacatttcttcacccccgaaacacctcttcaacccaaaacacttctccattccacactcttcatttttaccattttctttctaccattttta

SEQ ID NO: 276675 - DNA, 373 bp, Cannabis indica
tttaaaaatcgggaaaaatcggggtggtgatcaccctacccacgcgcgcggaagggctgctggcagcctcccagcgccgaggaaactcggcagatcacctcccttgcgcgcgcggatggtatgcaacgcataccatccgtacagtgtgctatttttcttcgttttcttaattttattttaaaataaatttagatattagtgtaatttgaatttgaaaatagtataaaatcaagtatcttattttaaatataaggttagtaaattttttggtaaatcgaccttatttagaataagattactataatcatggtatttaaaaggggaaataagattatttttgttaacttttttaaattttgttatttttacctaa

SEQ ID NO: 276676 - DNA, 576 bp, Cannabis indica
cccgtgaccccaaaatctcgacccaatttttacaatgttaatattggatactttaccataaaaagaattgtgacctcatatatccccattaaattatgggtaatatagatgatataatgatgcaggtttattcatatatcatgaataggtcaccacgtgcatgacacatcttcattactaacggcaccatgaataaaaacagatttagttttgtgcaacttgactatatacatacataggataatgtagtattctaatataaaaattatgaaagatgtagcaatgcaagtgggctacttttatttttgtttcagctcctctcttccccagacaaacacaccttgctctaattatttcaattacatctgtacactgtacactacctacaagacataatactatacaatccaatctaacgccatctctaattcgcctactaaaacattaaatatatatataatttgctttcacactatatttatcttaataaaacactacaaataaactcataaatgattttgttttcagtgtcacactaaatttaatgtatttatttttaaaatttttaataattaa

SEQ ID NO: 276677 - DNA, 834 bp, Cannabis indica
ttgctataccatcaacagagtattcttgcgcccaggtactcacaaaacaccatatgaaatctggaaagaagaacagattgaagatttgcttgaaaagcctgctgctgaggaaaaggaacctgacgaagcttcagaagcagtcgtcgaggttactgtgcaggaatctgttgctacagaaaatccaacaacaaaagaatccgagtatcctttaaattcaatcactgatccaatacagagggaaccatcctccagggttaaaaagaatcatccttcagatctcatccttggaaacttggatgagagcatggttacaagaagaaaatatgccaatataattcaatttttatgttttatttcttctttagaacctaaatctgtaaaagaagctttaatggatgaagattggtttttagctatgcaggatgagcttcatcagtttgttcgaaacaaagtctggaaaatgattccaagaccaccgtttgtgaacatcattggaaccaagtggatcttcaaaaataagagtgatgagtttggcactatcattcgaaacaaggcaaggttggttgcccaaggatacactcaagttgagggtgttgactttgatgaaacatttgctccagtagctagactggaatcgatcaggttacttctttccatagcttgcattcttggtattaaattgtatcaaatggatgtcaaatccgcttttttgaatgggctgttaaaagaagaagtgtatgtggaacaacctaaagggtttgaggatccacattttcctgatcatgtttataagttagacaaggcattgtatggtctaaaacaagcaccacgtgc

SEQ ID NO: 276678 - DNA, 378 bp, Cannabis indica
gaaatatcatcaatctttaagtgtgagccatcactatctatttataggtaaccacctaggtttaggttagatttatttggcattaaaataatgaaaaaattaaatggtaaaatctacactaagtggcctgccaaggaatggagaatgggtcccactttgcaattttgccattttatcatttccccatcttattttctcaaaaacgccaattttctaatttatccacttaaatgccaattccaattatttaatacctaaaaattaattattaaataatattgtcatttaatatatttattaattagactgatcaaagtctcttaattaacaaataaaacccatgatctcttttcttcacaattaagtccttgcttagtg

SEQ ID NO: 276679 - DNA, 627 bp, Cannabis indica
gaatttaatatgttaaaaaaaaaacttataaagttaccaaatagtatctaaaacataatagaattagttacaatatgaaaattattatatatattaattttaaagttgtctgatacaaaataaggaaccaaatgtgtatgaagaaaaaaattatcttgaatttaatttttttctaaataaaaagtaactaattgatatattatttacatcaaaagcaaccaaaaggttgcttttttttaaaatttgcaaaacactgaaatttctggaagcgagattttttttatttttttcaattttcggtaattattttatatttcggtatttatgctgacgtggcaatcggtatttgtgcaaataattttcttaaaggtatttttataaataaaatcaattttaagtataatattgaaaagacccctttttttaatgcttttgttttttaattatttgaagggttggggtcgttagggtctggagttcgggatggggccgagggtcgaggtctgggctggagactggggccatggtattcgaggttcgagccaagggccgaggtttaattaggctgtgactttcatttctgaggactttttctctggtgatgtcaactgtgactactttttagta

SEQ ID NO: 276680 - DNA, 427 bp, Cannabis indica
agggcataaaacccaacaggtgactctaccactgatcagaaaaggaaggttacctcggcatctggtggttcagggcaaagcaagcggttccgtgggaaccaaggcagaggtggatgccagggttactcttaccctgagtgccctcgttgcaagaaacatcatccgagagagtgcaaccggaagatatgctttctgtgtggcatggtggggcatttcgagaaagattgccctcaggcaaagaaagctgaggtaaaaccagtacctgctcgagtattcgctatcacccaagctgacgccgcagccagtccttctgttgtgacaggttagctttccgtcagcaactccttatttacagtattattttattcgggagctacacgctcatacgtggctacaagaatgattgatcttttgggtaggccttgtg

SEQ ID NO: 276681 - DNA, 560 bp, Cannabis indica
cccctttagtgttatttatgtgattttagtgtgaaggggcaaaatggtcattttgccccattgctagtttgtcctttagtggacttaattttggaaaatatgtgtttattaatgttatatgttggctgaaatgaataagtgaaatcctttatttttattttacaaagtttcaaaaaattacaaagttagaaaaattttcaaaggaaaagccatttctctctagctctctctctctttcggcctcttggtgcagcaaggaactttggatttttccttgtgatttcaactctttttggtgttcaaatcaagctaggttagcttctaatcatttcttctttaagtttgttgaattttgatgaaaaagatgatgttgcatgcttagtttaggttgttgttgctgcatgagttaaagtttgttttctacagtgttttgatgcatgattatgtagttctaatctaggtttgatgcttgtaggtgagctttaaccaagtttgagtttgaaactcaaagcttggagctcacatggcactttttgattctgtgaattctgggttgtttt

SEQ ID NO: 276682 - DNA, 642 bp, Cannabis indica
gttcgggttcgagtcctagtctcggtttgggtttaggtctctgttattgttttgatatgggttcgggtttgggtttaggtccttgtccaggtccttgtccttgttcggttctagttccatttgcgattctgagttccagtttggttttgagtttgggtcaaagttagagtcctggtctgagtttgggtcaggaccggatttcagtctaggtctagattcggctccgagtgtggtttcgcgtcctgggtcttggtctaggttgggtccgagtcttaagttcaaatcccgatctgtgtctggattcagttcttgctctaagtccttggttatgatccttgtctggcttcgagtttgggtccgggtccgagtctgtgtccgggtttgtgtccagatctggaacccgatctgggtctaggtttgggtccaggtccaagtttgggtcccgagtgcgggtccaagtttattaaaagaatctaaatcctaatatgcttgggctcaactcaggagtgctattcatgttctttgatttattagttaagcctcttttaggtcagggtgatacgtatattttgggaacgatgatagtatgattcagtgggagtataacaatggttaaatgagatagcatattgatatcgtgga

SEQ ID NO: 276683 - DNA, 666 bp, Cannabis indica
ggagatgaatctgtagaggcaactggagtgggttttttcttggatttcttttcaggtggttgatacgtggtgtcacttgaggattttcgtttggtttgaacacgttcactggttggggtaggaatagaaaccttagatggaggacgaggagggcctacgggttttgagggagactggtgactcgacgaagaacgagtgactcgttttgacacaggtggggaaggagacgacagtgaaggtcgaacctttttagagagaggaggagccttacctagaaatgtacgaggtttctgactgaccggaggtgagggtggagacggagtcgactcaggacttgggggatgtgcagaaccaccaacctccgactggtagaggacaatgtcacgacagggattaggcagtgcagtctcgactgtaggagccactgtaggatcaccagtcgatgccatggatggaacaaacatagcaacaaggggtactgcaatgggtgtggtattctccatgatagagagaaaaaaaatttgaatggtgcagagcttagggtttctgagaggaaagtgaaggagtgagactgatcactttccgtaggccttaagtataggcaccctgacacaactgaccaggcaagaataatgatgattttttttaaaatttgatttttgccaa

SEQ ID NO: 276684 - DNA, 641 bp, Cannabis indica
aaaagacaaagttatctttaaatttaaaatatattaaatatcaaaatatctaatcttataattaaataacaaataaatattaaagaagttaacaaaattttaaatctgaccataataggaaatatttaaaattagaaacattccaaaatagaaatatttaaaattggaaaaattccaaattgaaaatattttaaaattggaaatatttcaatttagaaatatttgaaaaaggaaaaatgaattttgggaaacaatcccatgaaaaattggatttttagggaaaaatcccaaaaaatcgcacttttgggttgctgccaaggattgggcgtgcaacaggctccacgcagccttcatgcgcgcgcggaggagtgatgcacgccgaggaacttcggcgcctgcagcatgcctgaccgagaaaactcggtcagcggcagggtgcatctgggcgagatgcacggtgacacgggcgtgtcacgcgcgcgcggatgggttggtgagtgacgcacctgatgcgtgcaattgagcacccatgcatacccgaaatcccgattttccaaaattcataactttttcaatttttatcggaatcgagttccgtaaaaacgaaattgcttaatttttcataaggaatccaaataaaa

SEQ ID NO: 276685 - DNA, 525 bp, Cannabis indica
actgaactgactaacaatctattacactacagtaaagtctaaaagtattatatgcatctcaatattatgtgtcataacatacttttgtccttttaatttaaacagtgaaccatttactaaattaaacatcataattatttggaaaattggtttcatataatttcttttcactcagtaaatcattaatgaaattaacagatgtaaactttctcttctctagcgagggtagctagctgattgttaaccaaaagatatactttgcaaaattaaaaatcttaaacaaaagattgtgaataatcgtttgacaaaagtattccccaaaaatttaggcaatataattataagaacagcaactaattaagaccccgacacaatgttaagtgttaaaattggtgtcatatttgagggtatacactttagtaaaatgttaaatgtgatcttaattatgttttaacattataaataagtgtggttataatttattattaggtcctatcaattttattttagaataattatcttttt

SEQ ID NO: 276686 - DNA, 143 bp, Cannabis indica
aaatcttctagccgccaccttctctcttcttttcttcttcaatttcgaaatccttgagtgatagagtagtgcccacacacatcaagtggtatctcaatcatagtgtgtaagactgtaggagattccaaacaacaagaaggaga

SEQ ID NO: 276687 - DNA, 533 bp, Cannabis indica
ttttatattttttattattttttcctataatataaatttatatccatttgatataaataacttataatatttttaaattatatttatatcactttttttattaaaaaaaaagaaaagaaaattgtagtttataagatcactctaatgtgatttgttaataatataaatataaaatatttttaaaaaaaaaaaaaaaaataagaaatttaaatattttttccttcgaaaaaagatatttttattttttataatatattataaataattaaatacatttttagaacaaaataatttattatactcttttaatcaaagatccagctgcaggacatgaaacacgagccagaaggggcagagtgcggatgccaggagtacactataataggaggcgagggaggttgaggtggaggatcgcaaaggtgtaagcatgttaggttttgtgaccgagtcagatggaggaacaagagacgtgtcagaacatgtgtcactcgcagaagatgtgatagactatctaataaatcatcatcattccc

SEQ ID NO: 276688 - DNA, 466 bp, Cannabis indica
cgataagggggtatacttttacctggtcatgcctttcgggttaaagaatgctggggcaacttatcaacgaatggtaaaccggatgtttaaaggccttctggggcggaacatggaagtatacgtggacgacatgttggtcaagtcgaaggcatacggaagccatgcggatgacctagaagaatgcttcgaagtggttcagagatatgggatgaaacttaacccaaagaagtgcactttttgggtcaaatcgggaaagtttctgggcttcattgtcaaccagcgggggatagagagaaacccagagaaaatccaagctctcctaagcatgccttcccccaagaaacacaaagatgtacagagcttaaccggaaaggttgttgccctgagccggtttatctcccgatccacagacagtgcattccctcttcaacatcctgaagatatgccaaaaaatttgaatggtccg

SEQ ID NO: 276689 - DNA, 551 bp, Cannabis indica
gacggtttttatgggttccggatccatcctgctaacgaaggggtggttccgtataataggcagactcacgtcaaggagtatcgccatcgctttttcttttcctccgggttcagggcaatggaccacccggagctccttactgagtgggtgaggatccctccatatcagcggactgcccctacccagaccttcctccggagggcccaggcctttgcttcctatgaccgagccgatcttgacgtcgggggtttggtcactacggaaaactgcaggaaggccaaacttatccttccgcatcaatccgtggaggactctaacctctcccgggtcatctgtcccaatgtaagggcgccggtcgcggagaagaccttccgggacgagattattgccacggcagagaagaaataccaggactatctctaccggaaggcccaggagaaggcatactctaaggcccaggcggcctccgggagggggcttcgtgtggggagcccggtggaaagaagaagccaggcgattgccgggaagtccgaggctaaattttttgacaa

SEQ ID NO: 276690 - DNA, 523 bp, Cannabis indica
cctagcctcagacccgaactgagattggaactcgggccctgacacggtcgttgacccagaccggaattgagacccggacatggaactaaatctgggacccgatcccaaacacacacttggacctcgatagggatccggatatgaacctggacttagactaagacccagactgggatcgataagctggacctagatttggatcaagatcctgacccagacccaaacttggacccgcactagggaccccaacttggaactggacccaaacctagacccagatcagggtccacacctgcacacaaacccggacatagactcggacacgaactcaaacccacaactaaaatcagacccaaagctagacccagacccagacccaaactcaaacccagacgaggatcagaaccaaggacttagacccagaactaaatctagactcagattgagattggaacttgggactcgcacccaacctagaccaaggccgaggatgcaaacacacacccggagcctgatctggacc

SEQ ID NO: 276691 - DNA, 674 bp, Cannabis indica
tttaattttaccaccaagaggagaaggttgaaaaaatattagaatatgaaaatattattggtgcttattagtaatttgcaaagaatgtgaaagtctataaatatatagttgtgtagctattattagatatgaaatgagataatagaacttttttcaattagaagattaatgtacattttactattaataacatacattattataacacaaccatgttttacttaattactaaatatactgacacatattttatttttataaaacaaattgttcaaataattatactattttaattattaattaaaataaaaaactaaaatattaaataaaactaacactacgtggcttgacacgtaacaatcacctagtttatatatatgtgtctatataactaaaattcttggtttatgagaaatttatgggtgactttttatttttatttaataaaataataaaatattatttatatataataaaataaatcctattaatatttgaattgatatttagtatatttcaactctatatataatcacaactataactctagaaattaaaaatatatatatataaaataatcgtccattttatttatattatttaaaataattcattgtggttcaagatcacaatgaacagaaaaagtggcaaaaacacaaatgtagttcaaaatc

SEQ ID NO: 276692 - DNA, 670 bp, Cannabis indica
aaggggttattctaactctggaaatggggaaacacccaaccgaggtaccgaattggacaaaaattgagaaaacgaagtgttcgggaatcctgccaaaaccggcaaaccggtttttggggcatggcaaaccggtttgccggtttgcaccagtaatcccaaatcacttcctttcttgctcaattttccaccaaatgataccaaactttccagagctcctaaacaatgcatacacaataaatcccagccagtatttcacagaaaaacacaataaatatcaacttgccattaaagcttaaagctttgcattcaacacttaaaattgcataaaatcattaacaccaatcaaaaccagctgctatggcctaatttctactcaacctaaccctaaaattcgaaccaaacaaatatcaaaccctaacagccccaataacacaatttcactacctcaactaacttaaaacttgaaaattagagaagaggatcattagggcttaccttaggttgatttcccccccttgaatccttgctgaaaactcagagaaatggaaaagaaaattgattcttgcccttggttggtcccagccgaatgaaagagagagagagttcaagggaaaatggctttttccttctaattttcctttttcttttcttttttgactttcctaaattg

SEQ ID NO: 276693 - DNA, 497 bp, Cannabis indica
atctgaagtttctttttcagcaacattaaaagcaatacctttacctctatcagcaatggacttgggtttgtccttctgcttgatttgctgattcaattcaaaagtgcgcaaagaacccattaattcttccaccttcattgtgctaaagtctttagcctcctccattgctaaaagtttagtatcgaacctctctggaagaactctaacaatttttctcacaagaacagaatcatcaagtttttcaccaagagcaaaatattcattagcaatatcagatagtttttcatagaattcagttagggtttcattatctgacatcctaagatcatcaaatttggtctgaagcataatatatctagaacgcttaacatcagatgttccttcaaactgagtttgaaggatctgccaagcatccttagcagattcacaagaagatataagcttaatataaccttcacctactccattaaatatggcatgtaaagctttgctattat

SEQ ID NO: 276694 - DNA, 565 bp, Cannabis indica
atagacaggggcggagccacataggggctgccccccccttcaatttttaaaaattttgcactactaaacatatataacatatatatatatatataatcatataataaaaaatattaatacatacaagaactacaaaattagtatttacttatttaaatataattttattattaagaaaatatctacagttttattttatatattaatgtagtaaattattatattactattttattagacttaattaatttgttttaatttaataatatatttagtaaattatttaataaatagtagtaaaattaactaattatattattcttaaaatcaatatgagtattttttctttaagaaattacatatcattattattttggtaatattaaattaaactccgtcaaattttagcgtaacactcgtattttattttaatttaatgatttgattctatttttttaaaaaattattgtataaattaaaaatgtattttttataattgacacacatccttaaaaggtattaaagtcaccaaatttaaatttattgtatattgcactgtcggata

SEQ ID NO: 276695 - DNA, 757 bp, Cannabis indica
gaatcgtgcgtttcccccaccgttcgattggtaggtggtgacgcctgttcctcatgcatttttgcctataaaagccaccatctttccttcatttcggttacttcccatttcttgccaactttgctcgaatttcctagagagaaaattctcagacccagcacgaagcctttgaacactttgcgattttcccagttcttccttgcttgctgctaccagtccttctcgttttcactcgactcgcatcaggacccccagttcaacacttcattgtaactttttgcatcctttggcattattgaatggcatgctattactcgttctgtttgttcttttctgggtttgcattcgagatttctgggcatgcaagtgtttaagttcttcatgtattctgttttgaatttactgctttagttgtaggatcgccattatcatgcctctgttgttattgtgcattttcattgtagaagaccatacgctcttcgttcaatgggtgttagggcatagaataggatcttttctttctgtttcctttatcgtgtaaaaccaccttctgcgattttactgcacccgacacttgttcagggaatctttctagggtttcccgtgtgacacgtgtccggagggggcctctttccagcggttaggggacccccattccctttttcttgacttagggtttggtatggggcctaactgctggaatttcttttttttttttacagaatagaaaaatgtctgcttctggctcgaagtcctc

SEQ ID NO: 276696 - DNA, 614 bp, Cannabis indica
cctagttgatcctagatcaaatgattcttaatcctgaaatggttaggttcgatctcaagagtattattcatgttctttgatttgttcgttaagcctactttttggttagggtgatacgtacattttgggaacatggtagtgcaattgagtgggagcgctaatcatagaaatagaatctatagcttctatctagacatagaagtgaaatgacggtttccttcgagcttggctaaacagagataaatggttgagtactcatttcagtgattatgttatttcactgaaatatcatttattagtggctaagtattttaaagataaaatacattgaagggtgtaacggtaaattaatccctatgcaatgtaaatcatttatagaggatcattgattactgtgattataacaatggacaatttatagcgtatctatatcatgggacatatagagcgttctatatataactgagagtgcaattccaagttctatggtggatggaatgaggaattaataagttagtggatttacttggtaaattctagatctgcttattagaagctcggatatataggcccatggtccccatactagttaagacaatactgcttgtaagact

SEQ ID NO: 276697 - DNA, 638 bp, Cannabis indica
atctaatatatttatttatttttgttacaatataataatatgcaatactaaaaaaaattatgtaacttaattttgttattatatatatttttttttaaaaaatatgtgataaatctatttttataatttttattagctaatttattagatttggccattttcttaatttttcttaaaaagtggacatttactaacttagttaccaaattgagggccattttgcatctcaaccctaaaaatatggaatttgaaaattatatttacaaaaaagtggcaaataaaataccataaaaaatattaactttgaacaaatgccatataagggtggtaaagtttaaaatgccatatttatgaaacttttttatagaatctcatatttggtgtaattttcataaataaatatatatagtttttttattaaaaaaaaaaagcgacgttgttttttaaaaaaaaacttaaattaattaattaatataattattaatcataaaataataaaaaaatataagaaaataaataaatatttataaacctaataaaaaattaaaaaagagagagaattaaggagcgaagagataaagctatttgaagtgattttagaatgccatgtcaccgactcatacttctcctttatatat

SEQ ID NO: 276698 - DNA, 551 bp, Cannabis indica
ctgatgctgcagccagtcctcctattgttacaggttagcttcctctcaacaactcctttaattattcttttgggtaggccttgtgatattctagaaagagggtttggaaccctaatgcctagcagggagttggttatctctaataggcgtattaggtctacactggttaggatcgaggataggagttgagtgctgaccttatagaatttgaactaactgagtttgacatcatacttgggatggattttttgtccaagtattcgatcagtatagattgtaagcggaaaatggtgattttttagccagaaggtgaagatccatttgtttatgttggatccgttcaggggtctcggcatctggttatctctgtattaagagctagggatctactacaccgtggatgtgtaggatttttagcagtggtgattgactccagtagacccgaaacatttgggcctgaggtagtcagagtggtaaaagactttctcgacatgtttctcgaggagttgccgggattactgccgcaatgagaaattgattttgtcattgat

SEQ ID NO: 276699 - DNA, 587 bp, Cannabis indica
ggcgaaccaggatcaattttcctggaatcatggagatatgatagggatcgaccctaagattatctgccatcacttaaatgtggatccaaactacccggtgaagagacaaaaaagaggctcttggattccaagaggcaaggggcacaaaaataggaagttgacaagttgttagtcaacaattttatacgcgaggtattgtatccctcatggatagccaatcctgttctcatcccgaaacctaacggaacttgaagaacttgcattaatttctccgatatgaataaggcatgcccaaaggactgttttccacttcccacaaatcgaccagttagtggatgcaactactaggcacgagcttatgtcttttatggatgcatattctggatataaccagataaaaatgtatgttccagatcaagaacatacaagcttcgtaaccaacacgagactctattgttataaagttatgtcgtttggactgaagaacgctggggtaacgtatcaacaactagtaaattaaatgttcgcaaatcaaatagggcgaaacatggaggtttaagtcaacgatatgttggtgaaatcgataa

SEQ ID NO: 276700 - DNA, 945 bp, Cannabis indica
cacaataaacaagaatatcagtttgataagggtttggatgaatttattaatcaaatatgtaaatagatgatcacatgaaccaaataacacattaaacaagtaatgaaattaaatcagtttctttattgatgattgaatagaaaagattacattgaaatatagttttatttagagcacaaagcccaacattaattgcttagaatttgcttttctttcaattgagcccattatgtcccacaataaatttgacttaaagagggtggacctcgttgagggagacgttaagatagaattttcgaaagcagatccggacgcagaagtaatcttggaaaccattccaaagaagaaaggtaaaaagaagaccgtcctgatagtctacaattcattcgtctaggaaatggatcaaatcactaataagttcgaaagctaagacatgctccaaagatatatgacgaacaccgcggtgtcagtaatttcttagattatgttggcacagccggctttcccttgtgaaagagtcatcggttaagtgtgttgacaaattaggagcatggagttgtgcgcacattatctacagggctcatttgtcattgataacttcgctagcttctgcgctcacatagggatcgcacctttctaggttataccacaatcttataagctcttagatggatggtcttcttgtgcagctacgggaactggaagtccaaagtctagaggagattatgtatttttatgtggtcaaatcgcaactcatgcaaaacaggagaatcaagattggattttataacactacaggaaatgtcacttttaccagtcacagttcgctactgcgctggtaaaagtaacttttaccagcgcatttcgtaaactgcgctggcaaagagttaagttttaccagcgtacatttgcagtggctaaaatctaacttttaccagcgcattt

SEQ ID NO: 276701 - DNA, 819 bp, Cannabis indica
ttgaaggttattggagggttacctattttaggaattccttatgaagagttcatacctcttaacaaaaaattggttggtggcactccatatcattctactactgcagagcttttaaggttccacactcaaatttataactatttgaagagtgtcaaagtttgtgccaaatcaaatgatataaatgtatcttgggagcagtggatagaatttttctatagagggaaaaagatgtttcaaggtgtgagacaaaactcgacttgtgaggccataggagaagacgaccaaaggaaaggtaaatcaaaagttaatcttcactctattccattgaacatttcaaaagagggtagtcttgcagcctttctgtctttatggctaagtcgttttgtttttcctactgagggctccaacattagacctgaaactttttatatggcttcaatgatggcccacggacacaaagtttcacttgcaccctctgttttgggatacatttatcgagctttgtatgattcagccatacatggccaggggcgaggtcaagccttcttacctatgcattatgtgataggttggttagccgagcattttcgccatctctatagtggttgggatcttatggatcttcctcatttaagtaagtatggcgggatccctgctgaacgtcgaagcatgaatggggctagacatattttaaggggagaggattatgttatgcatcggccatattcatttcccatggagaaagatctagactttctggataatgaagatttatctgatgagaaatttgagttactgatttctatgcgttcttctttg

SEQ ID NO: 276702 - DNA, 575 bp, Cannabis indica
caaaaatttaagcaaaaacaacatatgtacccaaaattagtttatgcatcctttttgaaaaattctttttccataagcttaaacatgattaatatgaagtgtacaagctgaaaaaaacagaaaaagcttcaaaaatgagagattttggcaagttttactcgttttggtcatagaaggtcattttaagcaacttacttaccaaaaattgattttatgtaaaattttcatgcaaaatcttttttgacaactgataaatgatgaaacaaacatgttcaaacaagaaaattaaaaaatatcaaaaatcctaacttttcagtaaccaaattgaaaaattcttttttcagtagttcaagaatgttaaatgtgaggtgtacaaaattacagaattgaaaaatattgaaaattgatcaagtttggtaaaaaacactcttttaggtctgaaaaagtcaaaattatgcaagatagtaccaaaatcaagatttgagcattatttttgaaaaattatttttgagacagtttatatatgagtatttaaacatgtaaaagctttcaaaacaacaattttctcaacaata

SEQ ID NO: 276703 - DNA, 481 bp, Cannabis indica
tttttaattagtcacaattttttttacttttagtcacaacaaaagttgtgactaaatgtaagatcttttgtagtgttgcaaaatcccgactctcagctgcaaccctagtcctaactcagactttggcttggatattcggatctcaactctggaccccaatctttgacttaaacctcaactcaaaatttgtttaaaaccctatcttaatttgataattattaattttgaataaacattaattaatattgtgatataacaatttaatgtagttcaaatattagatgagtagccacatatattaatatataaagtatgagtgtaagtagccagggccggctataagcctgtgcatcctggtctattgcacagggcccatttaaatagggcctaatttcttgccttctttttaggttgatttttttgtttttttattttttttttatgaaatgaaatattaaatgaagtaaaacagtatgaaaaa

SEQ ID NO: 276704 - DNA, 689 bp, Cannabis indica
caaagctatggacctagctttgagttccactatcgagccaagttaacgggcttgactaacccttacaaccggggaatttttcaccaaggtttttcccaaacctctcacaatagttttcttccaaggactatcaacctcaccggattgttgaagtgccaatctcactatcggattgttgtagtgacaatctcactcttctcgggttgtttacaaaaccggtgtcaacctcacctacaaccgagttgtttttctaccggtgccaacctcacctctcaatacaatgaatatgtaattttgaaatacaaagcaaactctctctaataagataaaaaacaatgtaaaatcctaaagagaattgcaagcacactagagaagataaaaacaagtttggctcaagtgtgtgtagttggtgtgtttatgaaaagatgataattctttagcttagaacacttagaatgatgttatatgatgaatagaagctcaaccaaccttaatttttgagtgaaaaacaagtttatagtaggaacaaaaactagccgtttatagccgttagcacatttttcaaaaagaatcctgggaaaaacggactacctatctgcgaaaaacggactacctattttcaataggtaggccaaaaatcaggcaggttcaaaacttgcatttttcggcactaaaacgcacataactct

SEQ ID NO: 276705 - DNA, 988 bp, Cannabis indica
ttcgaacatataattaagattatattccaatgtgttgaagaccctataatcattaaaaaattcatatgttctggacttaactagaattcatacattatatgcatataatcatgaaataaatcatgtgaacaatgcaacataaaaatgttatttctgttctttattaataagtaaatttgattatattgaaatgggttttatttaaggcataaaacccaacagatctttgattattgggattagaacgatggttaaatttgtagcgtatctatatcgtggaacatatagagcgttctatataattgagagtgcaattccaagctctatggtggatgcaataaggagttaataagttagggaatatacttggtaaattctagttctgcttattggaaactcggttgtataggcccattatcctcatactagttgagacaatgctacttgtaagacttagttaattgatattaatcaattataattctaaaattagactatgtctagtctatgaattttcactaagctagggctttattgtgaagaaaagagattctagggtttatttgttaattaaaagactttattaagtctaatgaataaatatattaaatggcaattttatttgataattaattttaattattcaataaatagttttggcatttaagtggttgaatttaaaaaattgtatttttgagaaaatgagataaatagttgagaaaaatggcaaaattacaaagtaggggcccacatccatggccagccacttaaggggtattttacgatttattttatcatttttttaatgccaaataattcaaacctaaacctagttggattcctataaatagatagtgatggccacaacttaaaagaagatgatcgcacttgcctttagtcaaaatttttagccatcttctctgtgccattcgaatccttcctctctttataatttcgaaccatatagtgatagagctagtgcccacac

SEQ ID NO: 276706 - DNA, 703 bp, Cannabis indica
attgtgtttatcgacgacatccttgtatactctcaatcaaaagaggagcatgagttacatctttagatagttctgcaacggcttcgggaacacaagctttatgcgaaattcaagaaatgtgaattttggctatctcaggtgtctttcttaggaaaaatagaatccgtaagggattggccaagaccgaagacagagacagaaattagaagcttcttcggtttagccagttattatcgtcggttcgtggaagggttttctaagatttcaacacccttaaccgaacttacaaagaacaattagcagtttgtgtggtcagacaagtgcgaagctagttttcaagatatgaaacagaggttgattacagctcgagtgctagctttgccttcagacaaagagaaatttgtagtttattgcgatgcatccagatagggtctggggtgtgtgctgacgcaagccgatcaggttatcgcttatgcctcctgttagttaaagggttatgaacagcggtacccgactcatgatctagaattggccacggtagtttttacatttaagatctggaagcattacctttacggagaaatgtgtgaaatctataccgaccataaaagtctcaaatatttctttactcagaaagatttgaatatgagacagagatgatggttggaattagtgaaagattacgactgtgagattctctatc

SEQ ID NO: 276707 - DNA, 755 bp, Cannabis indica
tcaaactcaagaaaactatgagggagttacaagaagcttacccaaagcttgaaaccaccaacaccttgctgaattaagcttgaaatgaagaagaaaattgacaaaccctagctgcctctaggtggattcgaaagagagaaagagagagagtgaaaatgtgatcttttccttagttttgtaaaaaatgaattaaactaattcttttctttctttttgttaaaataaatctcagccaacataaatcaaataaaccaaattataagcttaaatttaaaatcactaaagacaaaacaattcatgctaaaaagaccattttgccccttaacactaaaactcactaaaaataaccaagggataatttgggaaattctaaaatcccgaccaatcccgacattcccaatgtctaactacataagatgtgattctactaagccatacaccgtgttccaatgttgccgggtactgaacatgcaaaattacgaaatttctatatatgacatataaaatgcattctgaattcaaataaatcatcataaattaataatttagaattaatagataattttcataacaaaaccacaataatatgcgaaaattcaaatttaggctaagcggtctttacatgcagcaagttctaaatcatgagtcaggtatcactgttcatattctttcaactgacagaggcataggcgaaaacccgatcgtcctgcatcagtacacatccccagacccctgtcctggatgcatcacaataa

SEQ ID NO: 276708 - DNA, 450 bp, Cannabis indica
atattcccagacttttttctttttcatagaatctatttctaaatccatgtcggctgaccattgtttctgcttgggacttgtcattgcctgtttataggttaatggatcatcattaatattgtcaccaacgaccctattatttcaccatccaagccataacgagctggttttgtagaaatcctcccactacaacaaggagttgtgaccttctgaacaggaacatttgtggtagatttcttattgtaacaacttgcgttggttcaaccaagggagtgggattatcctttacttgagtagaagaggatggaacattaaaaggaattatatctgaaagaatttcttctaacactactttactttgcggcttgaagtccttaatatagtcatcttcaaggaaagtggcgtttgtagaaacaaatactttattatccttgtgactataaaatagtc

SEQ ID NO: 276709 - DNA, 622 bp, Cannabis indica
atctcccaccaaatacgggcatcatctcgtagcatataagtagcacacctgacccggtcattatcttcaactcgcataaaatcaaaaatggatgttatcatactcatccattgctccgccttgagtggatcagcaccaccctcaaacactggcgggttctgcttcctgaaccgctcatataatggttccaaacgattccctgcatccggtggcactaccagaggtgccggaggatcaggattaaggtttagagcaggctgagctcgctgctctcttaattctctgatttgctcaccctgctgccgaatagtttcttgcattgcagcatataactcttcccagttaggtggtggtggagggttctcaccctcaccggcagccccgagcccagctagctcacgggtacccctaccagtccgcctcgggtgcataactatacacctgcgatcacattccatgtaatagcaatactgataagtatttccatatattataattctacccacaccattacgatatcaacataattcaaataatcaggtaatcagaaaattaacaaactatcttttaacttaaagcttactaaaccatgagtcgatcaggtccttgcagccaatgtaca

SEQ ID NO: 276710 - DNA, 577 bp, Cannabis indica
tgattgggagctcctgatctttttgttatttcaattcagttcttactatttgtgatccctatgcttttcatcagttttatttgaatcagatcaatttcctaactattataaaactaatttgcagctatttacataaatcttactttgtataattgctatttgttggtacccgttaattgaaattcctgcataatttataaactattataaaacgataatgcaactataaggcaaccacaaaaaataataaacggacttatacgtaacatgtcgttccttaattcgaattagatcttgttattgtgttttaaaaaactgaattgcacattgtaaaccagaaatcaaccagaatgcaactgtatataacgtagatttagtattttaaaaaatttcatatcataccttgttttggattcgaggggaagctccagatctgtttaatacagatttacattgcatgaatctggattttcgattgtagagggagttgttttgaacgattaaaaccaaaatcaaatgtttaatttcagtttcttcccaatttttttggttttttcacagtttttctggttttttt

SEQ ID NO: 276711 - DNA, 738 bp, Cannabis indica
ttgaggcaaacccagagaaaatccaagctctcctgagcatgccatcccccaaaaagcataaagatgtgcagagcctaaccggaaaggtggctgccctgagccgtttcatctcacggtctacagacaagtgcatccccttcttcaacatactgaagaagtgtcaaaagtttgagtggtcggacgagtgcgaggaggcattcaaaaagctgaaagaacatatggccaagcctcctatcctatcaaaacctgttctcggagaggacctatttctatatttggctgtctccgagaacgcggtcagcgctgccctagtccgggaagaagagaaaactcaacatcccgtgtattatgttagcaagcacatgataggagaagcatccggaaggctcctcaagtgggcaatggagttaagtcagttcgacttacactacgttccccgaatctccataaaaggccaagccttggcagacttcataaccgaatgccatgaagccgaggcaactgcaaatgcgccaacaccctcggtccccacatggagagtgtttgtggacggagcctccaatgaaaatggatccggagtaggggtggcaatgatatctccgaccggactgcgactccaggcagctctatggttcgacttctcagcttcaaacaatgaggccgaatacgaggccttgatagcagagctgaggctagcaaaagtcataggggccaaaagagtggaagtctacagtgatt

SEQ ID NO: 276712 - DNA, 467 bp, Cannabis indica
attggttgcagcggaataatatatctccttccactcacatctctaacccttgtatcctttctgtcgcagagtatcaccaagatctgagtccgaatgtcttctctttgatttggattcttcacgatcttccagactatgattgacgtaccacttgttgtgtgtgggcagtactttatcactcaaggtattttgaaattggaagaggaaaaagagagaatgagagggtcggctatagtgagaaagtagatggctcaactttctgaaaggcaatctcttgaattactgaataattcttattttggtgtgagccatcactttctatttatcggcaaccactaggtttaggttagtaatcatttggcaataaaataataaaaataataattggaaaaaatctattcaagtagctggccatggtgttaatgggccccacttggaattttgcagttttaacaatttttatttct

SEQ ID NO: 276713 - DNA, 794 bp, Cannabis indica
gatgcttcaggtttttggaggacttgccggagcgtgtggttggttagcaccttgatcggatgtgcttggaagtatggcctcaattttctcgaggccattaggaggcaaaagaccaacttttcgatgatggggtacctcgtttctgctcctatcatgcgcttgctaacatagtacacgggatgttgagttttctcttcttcccggactagggcagcgctgaccgcgtgctcggagacagccaagtatagaaataggtcctctccgagaacgggttttgataggatcggaggcttggccatgtgttctttcaactttttgaatgcctcctcgcactcgtccgaccattcgaacttttggcacttcttcaatatgttgaagaaggggatgcacttgtctgtagaccgggagataaaacggctcagggcagcaacctttccggttaggctctgcacgtctttatgcttcttgggggacggcatgctcaggagagcttggattttttccgggtttgcctcaattcccctctggctaacgatgaagcccaggaacttccctgatttgaccccaaaggtgcatttctttgggttgagcttcatgccgtatctccggactacctcgaaacactcctctaagtcgtccgcatggctactgcatgctttggacttgacgagcatatcatctacataaacctccatgtttcgtcccaggaggcctttgaacatccggttgaccattctttggtaggtcgctctgacgttcttcattccgaagggcatgactaggtaacagtatac

SEQ ID NO: 276714 - DNA, 372 bp, Cannabis indica
ttgtgagtagatctaagatattggtaaaataattccatcatgttgctttgtatgtcatattgatgtttgattgttgtttgtgaattctgggaaaaatagttacttttctgtttctgtaattatttttattggatagtttggaaaattctaagcaatttacttttttacagaactcgatttcgatttaatttgaattagttatgaatttttgaaaattagaaaaatcggggtggtgagcacttaacccacgcgcgcggatgggctgccagcagcctccctgcgccgtgaaatcaaggcaggacacccctactgcgcgcgcgggtggtatgcaacgcataccatccgtacagcgtgcaatttttttcgttttct

SEQ ID NO: 276715 - DNA, 616 bp, Cannabis indica
aacataaataactgctaatttccaaattaactaagcgggctttacatttagcctgtcacttacctatgttatgattgatgtgatttaggagcatgtaattcgccgagcagttgttccactcaggttggctggcacacctaaattcagaaacgaggtaagattagtataatgatatgtatatgtatatacatgtttagtgtgcatgttagttaagcctgttagatatgtattttggcttttgtactatccgacagtataacatcagtacgtctagagtatgactagcgtaccgagtataggctgatattatggtcgatagtaccgtactaattgacagtatcacatcggtacaactagagtatgactagcgtaccgagtataggctgatattatggtcaatagtattgtcgtacgaacgttctagactcaacaccgtacaggtcacggggatagggttatgattgggggtatgggcgttcgatcataatctgggttattgctatgttataattaatgcttttcttactgagtctgttgactcacattgctatttccatgtgtaggtaagggcaaggctaaagctgaggagccgtgagagcgagcaggtgaagattgt

SEQ ID NO: 276716 - DNA, 722 bp, Cannabis indica
aaggtcacctattaaactcatttcaaactcattagtcattaaagtgacaaatgtttggacttcactatcacaagttgagccaaaaatgatgtcatcaacatatatttgggcaacaaaaattcctttgtcaatatgtttaatgaatagagtgctatctgcagtacctcgagtgaagccatgagagatgagaaatgaggtgagtctatcataccacgcacgtggggcctgtttcagtccatataaggctttattgagcttgtacacatggtgtggatgatgtggatcttcaaacccctgtggttgtttgacatagacttcctcttgaattaccccattgagaaacgcactcttgacgtccatttggaagagtttgatcttcagaaagcatgcaatgataagaagtagccgtatggattctaatcgagccacgggtgcaaacgtttcatcaaagtcgatgccttcgacctgactatatccttgagccacaagtcgagctttatttcgagtcactgtcccaaattcatcagacttgtttttaaacagccattttgtccctataacattcgcaccatctggtcgagggaccattatccagacaccaagtctcttaaaatttcccatttcatcctgcatggcagccaaccagaactcatctaacaaagcatctcgaacacttttgggctcaatctgtgacagatagcaggcaaaggctaacaaattct

SEQ ID NO: 276717 - DNA, 658 bp, Cannabis indica
tatggagaggctgagttcgtttcttgttttgaggctacatcacatggtgtatggctaaagagtttcatttcaggccttagagtggttgattccattgcaaggccgctaaagatgttctgtgacaattcagctgctgttttcatggctaagaacaacaaaagtggaagtcgaagcaagcacatcgacattaagtacttagctattagagaacgtgttaaggaaaataaagtggtcattcaacacattagcactgaattgatgattgccgatcctatgacaaaaggcttgccacctcataaattcaaggatcatgtagagaacatgggacttggttcccttatgtaatttgtacaaataaagttattattaatgaaactcttattttgatttttctcatatttatgcgcatcttaattttacatttgagaaaaatttcagaggacctgaataaacataaggtttagggtttattcacttaagtacattgccacataaagtacattgttatataataaatgtattgtaatacatggaagataatactcgattcataatgaggacatgtcgctatgattcgtatgtttattatataatgaggaacgttgggtttgaatattttagtttaaatgctgaccaagtgggagaatattagaatatt

SEQ ID NO: 276718 - DNA, 537 bp, Cannabis indica
acaatacttgttgtgactaaaactaaattagtgacaacttgtgtctaaatgctatgttttagtcacaagtaattttttattgtgactaaaagccactagggctgtgcatgggttgggttggctgggttggaggtattttaacgagccaacctaattacgtcggcctggaaatttctaacccatttaaaacttcttttttgtataacccaatccaacaaactatacatcgggttgggttgggttggtttgggttgggttataacccttttaaaattctgtcctttaatttttgttaccattatttatttttctaagaatcgttgaattaaaacctgataacctaatgcaaagaaattcatgtcaaagtttagtatccaaaatattacagtcacaaaaacataaatttaaaattattatacagtcatccgattccaaaaaattgtagtgaataaaaatttaaacaattccaactaaaatgatagaattcaccgaataggcatctcctaaattctcctttgctgtagcattagcttcttt

SEQ ID NO: 276719 - DNA, 513 bp, Cannabis indica
aagtactttaactctaaagtcaaaaatagaaaattcactattggcgatatggtcttaagaagagtctttccagccacccaagaacccggagtgggggtacttaaaccaaattgggaagggacatatgaaattgaggatgagatcggcttcggaacctataagctaaaaagattggacggaaccatcgtgccaagggcttggaacgccgatcatctccggaagtattatcaatagtccaaatatgtaaacttaggccttgttgaatttgtaccgtaaaagtgtatgcaacctctaaattttaaataaaactgagtgccttaaaaacaaaattttcatgccactcagggggggtactaaggcctaccacatggacgaatttaaaacagaccaaaagtaaaagcaagaccaaacagaatatatatcaaagtgaacatatatatttaaaatatcctgacccaaagggcaggttcaaaaaaaatatatatataatataccaagggcctagggacgggc

SEQ ID NO: 276720 - DNA, 1046 bp, Cannabis indica
ctttcagcaactccaatagttatcgcaccaccccttttacgcgatgtatatggagtatgttcatagggctccctcaacttcggacttcgctgtctccgcgggctgcgtctccttgggcttcggcccctggagttcttccctcggggactgcgagatcgtgaacgcggtattggtgatttgcgcttgtctttgcccttctctaactctgccagagaattctcgattctcttgtggggttcggccatggcgaagaattcgactaaggattctggccttcgagcttgtaactccttccagaagtcggtcctcggcaaaatacctgttatcagcatacaaacaagcgaagactcgggagccttctcgacttttgttacctctgcattaaaccgtttaaaatagtcttgtaaagactcaccaggttcttgtttgatgttggccaaagtcgtataaggcggcctataggtcatcgtagcctggaaatgtgtgaggaataagtcgacgaaggtttcccatgtcgatattgatgcctcaggcaattgggtaaaccaatcgtgggcgttctcctcgagtgttgccgcaagaatgcggcattttgcaagctgtggtacctgatccacctccattatagtattgaatttttcaagataatctatagggttagaagtacctttatactttagggattcggatagacgaaaccccttgggaagttgggcttgtcgcacttctgtagtgaagggcgaggtaccatgcaacttgtatatgggctttcgttgctgctcgagcattttcaaagcttgcagaagcatgctttggtcaatccctccagtcgcaggagtcggggctgctgcgactgcgggagtcgcaactactgcggcgagatttgctgggacattgatcccagtggtcgcgatcggcgcggtaggcgggttattgtaagtgttgacaccctgatcgtccgcatggggatcacggagtgtctccgtattatgaggggcgcgagaacgcgctctaaaaactgcgttgaggtgatcacgcagatcacc

SEQ ID NO: 276721 - DNA, 534 bp, Cannabis indica
tgggatccggatctggacccagggcctggacaaaacccgtagtcggtgtctggattttggacccagccctggacccgaaccctaacaaggacccgaacccacacccgaacctgaacataatccccaacacaaaagtggacccgaacccgtaccttgtgacccaaaattagaacaaaaatcggaagttgaccgggactggaactaggacttggacttggaatcataacttaaatttgacctaaatctgaaaccgtaaccggaccaggacccggactccaaataagacctagacccgaattgggagctggacccggatcccaacccaaacatggaacaagcctagggacacagaaccagggtcgggacctagaaccgcatccaagtctcgatgccgaacccaaactcagaattgggaactgaaccagaacaagatcaagacgagtgacagtgatgcagatcttcactcgggattcaggtaacggtgcctggaatagacctgtagttggtgtctagatctgggactcagactaggac

SEQ ID NO: 276722 - DNA, 877 bp, Cannabis indica
aaaaaaaccataaagaagaaggctaagcattataccttgcattggacctcctatttctgattgaaaactctttaattgtagcaagggtagtttagtcatttaccactcccgacaaatccccgatatctccaatgcctaacaatagtaccacgctattgacattctaaatcatacaaaatgtgactctctaatggcccacgtagctttccaccgttaccgaacacaagcacagaaagcgcgaaattcacatatgtagcataattaatacattttaaatttaaataaatctccataaacatgtaaatcataattaataactcaatattgtaattaaccctaatcatttaataatccaaaatattaatcttaagcggtcattagtgcaaaactttttatctatatattatgcataatttgctttgacaaagagccataacttttcatttgaatattatttattaatgcatgtattattttattgttcactattataattacaaccttaaattttttatagtgtattccatacatattgtttaaaacaaaaattttaaattattaaattaatttaaaagttaaattaataataaataataaaaaatcatgtctttacaagggtagcaattcgatcgtttatagtacgtttgaagcaccttataattaaagttgtcataaactataaaatttggatgagatcgacaataaatcgaaatcgtttagatatttttttagtacaaaatttttcatctatttataatgtatttttttatttgacaaaatttattattcaatttttatttgacaaactttttatttgattattattattattattgcatatgttattttattgttcactattatactttatgtaata

SEQ ID NO: 276723 - DNA, 556 bp, Cannabis indica
tggtcccaaactttccagacctgttctaaactatccctagaacaaatccaaggcatcaaaaccacccagaaacctcaaacatgaaaaatgccattggagctcaagcttgagttctaaactcaaacttgagcaaaaacacctaaacatgcaatcaaaccaacttaattctacataatcaagctcaaaataacctctggaaactcaagcaaacatcctcaacaacacagcaacaaaatataacattttctctcaaaatcacatatttttacatagaaaacttaaagctttgcataacctatcttacatgcttcaacacagcccaatttaacttcaattaacatgctttaaaccacataaattaacacaaaaccacagcagcaacagcaactataaatcatgcaagaatcatcacattttcatcaaaatttcaataaaattcaagagaaaaccaaagagctaacctagcttgaagattgcttggctttggatgagaatccactaagaaatcaaagcaaaaatccccccctttgcacccacatgcacagccgagagagag

SEQ ID NO: 276724 - DNA, 77 bp, Cannabis indica
tacggtaagtttaataaatatatgtcaaagttcaatattagattgtcatatcagtaaaaccccagtgttctgataaa

SEQ ID NO: 276725 - DNA, 558 bp, Cannabis indica
agagtcaaagataccatccattgaatagagttgtcagctcatctaaaatgaaaaacattatagcaaccttttattcgatcaagataagaatccagcgttgtcccgtttagacgagagtcaaggccattctatcttatgagcttccactattgtttcatacttttgtaagtcttactaatagtcgccaccattagggttatccatactaaaaagaaaacacttacaaaaatacttatctttcgagaacacccgctacctttcgacttgtgggagctctattagttgaccattgatagttgttgctagctatcctttccaaaatctcaaaagcttcattgtaagacttggaaagaatggctccattagcggaagcgtccaacaccatcctagaggctgcattgagaccattgtaaaatgtctcaagttcgatacaatgaggaataacatggtgtgggcacttcctcaacaactccttgaatctttcccatgcatcactagtagtctcgtctttcaattgttgaaaagacatgatctcgcttcgaaactttgcatttcttg

SEQ ID NO: 276726 - DNA, 576 bp, Cannabis indica
ctcgtcctttgcccagtgaacatgcattactatttatagggctatgaacttggagaagaagtatttcccttctcgttacaatggatataagcagaaagattgcatgataaatgcagaatacaatgatcgtggcatttggacagcttgccatatctctgtgatctgatccccaagttatagggatttctttgatgactcatgatgcgaaagttgaattcactaagtgttgatcactctacgcggattgctgatcgctttgctctagacatgcctatggggcatcctgttcagactataccctccgagcagatactcgaagtttattccacgtgtcaccatcatgtgatgccacgtcagagtgcaaaaagtgggataacatttgccccccaagtctgtacaggacttctgaggttgcatgtagacttcatccgagccgtttcaacctttggatggggatacgtgtggagcgcgtctatccgagactcaatgtgaggctgactgggcgtcccttcgatttttggctaattaatgctctgacaattaatattacaaaatctgatttctctcaccacagtt

SEQ ID NO: 276727 - DNA, 733 bp, Cannabis indica
agtgattcacaactagtggtaaatcatgtatccggagaatatgaagctcgaggacaaaagatgatagcatatctgagcaaaatacaagatctgctcgcacaattcaaaagctacagtctcagacaaattccaagagaagaaaatacaactgtagacgcgttagctcgattggcaagcagcaatgtaattgacaaggcaaacctggttcctatccaattcctcgaagagcctagcatcactggcatggaagaaatcgaaatgattgatacatccccaaactggatgacaccaatagcggcctacctccagtttgggaaactcccagataaccgaaatgaagctcggaaaatgagaaggaaagttgcacggtacatcatagtagaagcaatcatttgtaaaagaggattcttgatgccattgctcaaatgtgtcgctcaagaagaagttgcacgactcctatccaaagtacacgacggattctgtggaaatcatgccgccggacaaagcttatccaagaaaattctaaggcaaagttacttctggccgacaatgattgaagattcaaaagcctatgttaagaagtgtgacaaatgccagagattttcaaagataccaagagctccacccaacgagttaacacagatgcaaagtccgtggccctttgcaatttgggggattgacctgatcggacaattacccaaaggtaaaggtggagtgcagtatgcagtggtag

SEQ ID NO: 276728 - DNA, 939 bp, Cannabis indica
gcatatatgagcaaaatacatgatctactcgcacaattcaaaagctacggtctcagacaaattccggaagaagaaaatacaactgcagatgcgttagctcgattggcaagcagcaatgtaagtgacatggcaaacttggttcctatccagttcctcgaagaacctagcatcactggcacggaagaaatcaaaatgattgatacatctccaaactagatgacaccaatagcggcctacctcgagtctgggaaactcccagataactgaaatgaagctcggaaaatgagaaggaaagctgcacggtatatcatagtagagggagtcatgtacagaagacgattctcgatgccatttctcagatgtgtcactcaagaagaagctgcacggctcctatccgaagtacacaacggattctgtggaaatcatgtcgccggacaaagcttatccaagaaaattctaagccaaggttacttctggccgacaatgattgaagattcaaaagcctacgttaagaagtgtgacaaatgtcagagattttaaaagataccaagagctccacccagtgagttaacacagatgcaaagtctgtggccctttgccatttggggaattgacctgatcggaagattaaggtaaaagtggagtgcagtatgcagtggtagcggttgattactttactaagtggactgaagccgaaccactcgcaaccattacgtcaaagaaagttcaagactttattgtgaagaacataatatgccggttcggactaccgtacaaaatagtctcagataatggcaagcagttcgacatccaatcctttactgatttctgtgcaaaccatggtatcatcaaaagtttctccgcagtggcgcatcctcacgcaaacggtcaagttgaagcagtcaacaacaccttgaaggatacactgaagaaaaaact

SEQ ID NO: 276729 - DNA, 716 bp, Cannabis indica
ttggtttttctttctaatttgagtactaactctgttgtctcaagatcttattctgctttcaggttcaatagtttatgagaagtcaaggtccaattgccagattacctgttgaccctgagatagaaaagacctgtagaagaaacagaaggaggaggaaattggaaagagcggcactagagattgaacaagaagaagtcatggctgacaacgccaataatggcaacaatggacacaacggaggaggtgtagaagaccaggctaatggacataacaacaatgaccgtagcctgagggactacttacttcctaacttgacaggggcccgatcctgcataaggccacctgctgttgacgcaaacaattttgaaatcaagccagccatactgcagatggtccaatcttcagtccagtttgggggactgccgtcagaagacccaaacatgcacctcgccaacttcgaagaactgtgccagacattcaagatgaacggagttagcgatgacgccatcagactaaggctgttcccattctcactaaaagaacgagccaaatggttattcttaccaactcattctatcaacacttgggaggaattggccctgaaattcctatccaagttcttcctcctgcaaagattgccaagctgagagctgatatcaataacttcacccaacaggacagtgaatctctttatgaagcatgggagaggttcaagg

SEQ ID NO: 276730 - DNA, 684 bp, Cannabis indica
gagctgaagaaagctactgtaaacgaacacttgacttcacaaacatggtggagactagaagtactcgtcagcctcgcccactagaagatgctcaagacccaaatgaggaagatgtagcctcaagagcagctgagggttccgaggaagaagaaggaattccagatgatgactacgagggaaacctcgatgagtatgcctacgacgaaggtagttactcagagttggtgcttctcaggcaaaaagctatcgatcacgaagccgagatcgaagctcagaaagcacaaaaccaaaaaatgcaagaagtgatgctggccatgcaaaaagccatggaggcggctggcattcacgtgcatcccaaggcaatgactgctggacttggcaaggaaccagagacgtcctcgcctagttcccaacagcagaagtctagggagcctagccctataaggtaccctgctgaagggaaccaaacaaaaaaccctacctctaccccagggcgaaagaaaaaggcgcaggatccgcgaaaggtccgctcagatttccctaaagggaaaggtccgcagaggggcaagccccaaaaagggagctttggccctcaggatcgagaggaccgaaaaagcgtttccgtgcaccaagagcccgggggtagaggaagaagaggacagagatgtcctcccgttgatctga

SEQ ID NO: 276731 - DNA, 960 bp, Cannabis indica
attatcattctcaattcacccggaatcctacagggaggttaagacagccattaagtatgggagaactgagatcactcttgaagaagtaatctcagctttgaaatcaaaagatttggaattgaaagttgaaagaccggggcatactaatggggatgttaacataagtaggggaaggcctggacaaaagaaatcatggcaaaacaggggtagaagcactagtaggggttcacataagggcatcaatcatcatcacaaagggaggtcaaattctaagggtcctaaagatcctaatgggtgctatcattgtggaaagttagggaatttcaagagagaatgctacttttacaagagaagcaatgggaaacaaaattcagatcatcaagaggaatcaaacaagcaaaataagactaagaatgactattaaaatgcaaacctaagtgatggttatgatagtggagatgtctatgtggctgcatcatcttttaaagatgattggattattgattcgggttgtacatttcacatgactaacaataagtcttatttgtttgattacagagaatctagagggggcaaagtaattattgggaatgaccaaacatgcaacattgaaggttcaggttctattaactttaaaatgtttgatggcattattagaactttaactaatgttagatttctattagtgtacttgatgatcttggtgttgttagcaaaattgaggtaggtacaatcaaattggccaaggggtctatgactatcatcaaaggacacaaaaatgttggtctatactacttgcaaggaagccccatagcttgctgccacaacaccaaggagtatgttacagaagacactaaggttgtcctatggcatagaaggttgggacacattagtgaaagagggctacaactcatgagtgaacaaaagctacttggtgaggataaggtaaccaaggtagat

SEQ ID NO: 276732 - DNA, 614 bp, Cannabis indica
tttaataaattaaatattcaataaaatagaaaatagtaaatacatacctttttctgattttacaatctaatttaagtaaaataacaaaaatttaaaaaagttaacaaataaatatcttatttactcttttaaaataccatgattatagtaatcttattctaaataaggtcaatttaccaaaaaaataaaatttaacaaaaaatctgaccttttattcaaaataagatagaataatcaaaatttaaaagaaataagaaaagaggtaagcaatacttgattttatcctattttcaaattcaaattacactaatatctaaaattaattttaaaataaaattaatttatttctgataattagatttgaaaattgaaaaacaaaaatcaaaatacaaaactatacaaaaaataggaagtcaattccatgaaatagcatgaaaaatacgaagaaaacgaaagaaaaataagcaggtggtacggacagcatgcaaagcatgctgtatgcgcgcgtaatgaaggtgaacagccgagaaaactcgacgctgggagactgccagcagcccttccgcgcgcgtggggtgggtgatcaccacctcgatttttttcgattttcaaaa

SEQ ID NO: 276733 - DNA, 803 bp, Cannabis indica
atacctactcattactcccactcaacagtaggtgtctggtctaatgcattgcaaagcatatctgagacctctcactattgattcaaggaattctttctttggcctttatcttttctggaatagaagaaacttttccttagataaataaaatctatgtctagaagtcgagtagcttctatagattgctattagaaaaatgttccaacaccttactaaaataagttgctagcactagagtaattaattaaccaggtataccacaagccataggcttagataaactcaaaccttttacactaggaataggaaattttgttaagcccattgaatacacttactaatgaaatttcctatcttgtccttgtaatagaaaacttttgttgttccatacgaatggttttaaccatagttctcttggctttgcttcttagttccttattctgacaatccattacttgtttaactaacaatggatttcatcacaagtgtcttccaagtcataacagggtgagttccttgaaaccatcccactacgacaaggtaccgtgattatctgtctaagaacataagtggtattatcctcttcggttgtgtcaagacaatagaggtagtgggaacaccttatacaaaataagatgatagaacacttttggaatcaagaaaaaaaaaatatctcctctattttgctactttgtttccagacttagtcattttctttgaaaagtagtatttgtagaaacaaacacttacttatctaattactatgggatggtccacccctaatcacttagaatagctatcaa

SEQ ID NO: 276734 - DNA, 517 bp, Cannabis indica
aaccctagaaagattccctgaacaagtgtcgggtgcagtaaaatcgcagaaggtggttttacacaataaggggaacagaaagaaaaagaccctattctatgccctaaacaaccattgaacgaagaacgtatggtcttcttcaacgaaaatgcacaataataacagaggcatgataatggcgatcctacaactaaagcagtaaatgcaaaacagaatacatgaagaacctaaaacacttgcatacccagaaatctcaaaatgcgaacccagaaaagaacaaacagaacgagtaaaagcatgtcactaccaaaggatgcaagaaacttacagtgaagtgttgaactgggggtcctgatgtgagtcgagtaaagacgagaaggactgatagcagcaagcaaggaagaactgggaaaaatggcaaagtgttcaaaggtttcgtgctggttttgagaactttctctctaggaaattcgagcaaagatggcaagaaatggaaagtaaccgaaatgaaggaaag

SEQ ID NO: 276735 - DNA, 638 bp, Cannabis indica
gcttcttttgtaaagttacatgattctctcttgcccattccttccccgatcgtgagggagtcctggtctccacctccccaggattggataaaaataaactgtgatgttagagtgggtttagagagtatgtgcacagctgttgtagcaaggaatcatatgagaagggtgatttgggttcatacggctcggttggatttctctgatgtgttatgcggagaagctgcgacttgctatttggccgtctcgctggctatggagtttgggaataagtttgttattgtggagagtgactcgagactagctatcaatgctctcaatgggaaggagttatattgggctcttgataactatgtctccttttgtatttagtcatctcccttttttattagttgtaatttttctaatgttagtaggtcttgtaattttgttgcccataatgtggctaagtgggctttcacccaccaattgtacagatgtattttgatctcctccttaccggaggagttattttgtaatgaccgagatgtctaacatttgctttatttaatgaatgactaggcttattttttttttaaaaaaaaacgtgaaataaatagtgctaagaaaaaagttaggcaaataccattttggaccctgtg

SEQ ID NO: 276736 - DNA, 501 bp, Cannabis indica
gcagactcagatgggccagctagcaactcaggtagcaacccgccctcaaggaaatttgcctagcacaactgaagttaatcccaaagaaaactgcaaagcaattaccctgaggagcggtaagaagtatgatgggcctgagttaccacaaccagttgaggtagatgaagaaataaatgctcaaccagtgcaaacaccaacaccaacagcagagaaggctactgacagcccagcacaaccacaacagtctccaccaattagcattgatcaccatgtgaaaataccctatcctcagaggctcagaaagtcaagtctagacaagcagttcaccaaattcctagaagtcttcaaaagactacacatcaacattccttttgctgaagccttggaacaaatgccccgttatgtgaagttcatgaaggagatattgtctaagaagagaaaattggaggactatgaaacagtggcattaactgaggagtgtagcgccattttgcaaaagaa

SEQ ID NO: 276737 - DNA, 572 bp, Cannabis indica
tatttttgtaaaaaaaatacaaatgttagtattctatgtaaatttccctaataattgatggtaaggaagtgaatgagttgtgcttggaccattgcctctcttttgcaaaaataccaactattgagttgggtttccaagctccaaatataacaatagttcactaactcaaatctgaaaaataacacaaaattaaaataaattaaatattttcaactaaaataaatttaccattaataatatgaaatatttaatttatattaatttaatatgcataaataaagacttaaaatgtacaaatttgagccttaatcacaacccccaactagcttattgctagcctctagcaattcaagcgaaaaaaaacaatgtcaacataatattttctaggttaaaatttttgaaaaatggcacaaatattcaagaaaaatattagtaacaagccaataagaactatacagaattaccttgaataaatctagagttgtgagtgtgtgcaccaaacccgaaccttcttaccgcaaaccaaaacacataaatgctttcgaaaaatgtaccaagtgaaagtctcaact

SEQ ID NO: 276738 - DNA, 173 bp, Cannabis indica
ggttcgaaatttatgaagagaaaaagagagagagagtgatttcgctatagagagaaaagggaaggctcactttttctgaagagagaattttctgacagaaaagcttatgaaaacttgtgtttttgactgagccatcactttctatttataggcaactattaggtttaggttag

SEQ ID NO: 276739 - DNA, 657 bp, Cannabis indica
aaaatattatttttccaatttaaccacttaaatgccaaatctaattatttaatataaattaattattaaataaaattgccatttaatacatctattaattagacttaataaagtctcttaattaataaaaaaccctagaatctcttttcttcacaattaagccctagcttagtgaaaaatttataaactagacatagtctaattttagaattataattgattaattaaaatcaattaactgagtcttacaagcagtattgtctaaactagtatggggaccatgggcctatatatccgagcttccaataagcaaatctaaaatttaccaagtaaatccactaacacgaattgccttgtacctttcaagtcaagtacttcataatatgcttaacatcattccaatgttcatgtcttgaatttttctgatacctgctcacaattcctactgcataacagatgtcaggtctagtgcataacattgcatacattagacttccaactgctgaagcataaggaacccttctcatgtcctctatctcttgaggatcagtgggacactgttccttagatagacggacaccaaatctagaaggcatttgtgcccctttggtgtttgtcattgagaatctctctaaaaccttatctatgtaagttgtt

SEQ ID NO: 276740 - DNA, 551 bp, Cannabis indica
tcagtttcctccgcagaggtaaccatcactgagacggtagtgggcaagaaaataggaacagaaccaatcaagatacgctcccattcttggatcattacgggggagccaatcttagttggcctcccttctgtcttggcaacctttgttgcagaccttttcactgcccgggcttgcctctttttaaatccctttgctgccttgcctcttaaggcctgtgcagtcttagtaatgcttttcacacctttccctctgccagcctttttagctggtgtaggtgtcttcacattctttattggttcgggcaccctgcatgaaatgggtgctcgatcaatagagaatgctgccaaaaagcggctctttttccctccttgggcagaagaggttgttggtaacttgtagaagtaaaccgtgacttgtggtgccattttttttcctgaaaacagtaaacatgattagcaccataaagttaaagttgaatagtagtcatcatatttggagatgaaaaggagaatgggtcccactgggcgtgccaaaaattatgttaagcaaaa

SEQ ID NO: 276741 - DNA, 706 bp, Cannabis indica
gatggaggacgaggagggcctataggttttgagggagactggtgactcgacgaagaacgagtgacacgtttggacacaggtggggaaggagatgaaagagaaggacgaacctttttagagataggaggagccttaccttgaaatgtacgaggtttctgactgaccggaggtgaggtaggagacggagttgactctgaactcgggaaaggtgcagaaccaccagcctccgactggtaaaggacaatgtcacgacagggattaggcaatgcagacgcgacagtaggaggcactggaggatcatcagtcgactccatggatggaacaaccatagcaacaggggtgactgcaatgggtgtgatattctccatgatagagagaaaagaatttggatgaagcagagcttagggtttcagagaggaaagtgaagaagtgagactgatcacttaccgtaggccttaagtataggcaccctgacacaactgaccaggcaaaaaaaatgatgatgattttttttaaaatttgatttttgccaaataaaccgtacgcgcccaaattgaatatttactaccacatcatacggcacactaaacgaaacaaaccaacgtcatcaggcaataagtgtatcaaagaaaccagacttgtgacaaatataccccaatatatgcatttagcccacacttagacaaaacagaaaaataacaaaaaa

SEQ ID NO: 276742 - DNA, 559 bp, Cannabis indica
cgggttctaaggaagcatacgaaagccattggatggactttagcagatattaaagggatcagcccttcaactgtaatgcatagaatcttaatggaggaaggagtgaagccaaccattgatgcacaacgaagattaaatccaccaatgaaggaggttgtcagaaaagaagtcttgaagtggttagatgccggggtagcgtatcctatttcagacagtaaatgggtgagtccagtccaagttgttccaaagaaaggagggatgacggtggtgaagaatgagaagaatgaactcatcccaaccagaactgtcacgggatggagaatttgcattgactaccgaaaactcaacaaggccacaagaaaagatcactttccactcccattcattgatcagatgttagacaagttggcaggacaagagtactattgtttccttgatgggtactcagggtatcaccaaatagctatagcaccggaggatcaagagaaaacaacattcacatgtccatatggtacttttgcttttcgacgaatgccatttgggctgtgtaatgctccag

SEQ ID NO: 276743 - DNA, 855 bp, Cannabis indica
gattacctaaattaggtaaggagtccttgggaaaatgtagaccatgtcagcttggtaagcaactgaaaatttctcataagagtgtttctgatgtgaatacttccagagttctcgaactcctacatatggacttaatgggtccaatccaggttgaaagcttgaatggtaagaggtatatttttatgtgtgttgatgatttctcttggttttcatgggtagaattttttagagaaaacattgatacttttgatgttcttaagtatctttgcttgaaattaaaagttcaaaaagattgcaacattggtaagatagttcgtggtaagagtaatcatggaaaagattttgaaaatactgtgtatggtaaattctgtaaatcttatggtatttttcataatctttctgctcctaaaatcccacaacaaaatggagcgattaaggattcccaccttctttgttttagacaaggctttgtatggcatgaaacaagcaccccgtgcttggtatgagcgtctatctgagtttttacactctcatggttatagaaaaggaaatgttattaaaacacagttcatcacacacattcaatttgatattattttttcatatgttgatgatcttgtttttggaactacttctaactctgaagtgcaggtttttgtttcccaaatgcaaaaggagttcgaaatgagtatggtaggtgaactcacttattttctcggtcttcaagtgaagcaatcagatgagggaacttttgtcactcaaagcaagtatgcaaagaatttggtgaaaaagtttggtcttgagaaagccaaacataccaacactcccatgagcacaactttgaaattaagcaaa

SEQ ID NO: 276744 - DNA, 503 bp, Cannabis indica
cttgtaagactcagttaattggttttaattaatcaattataattctcaaattagactatgtctatttgtgaatttatcacttattaagggcgaaactgtaaagaaagagtttatagggtatatttgttaattaagagactttggttagtctaattaataaatataataaatgacaatattatttaataactatttatagttattaaatagttaaaattgacatttaaatggttgaatgtgaaaactggcaattttgagaaaatgggatacagaaatgataaaacaggaaagttgcaaaagtgaggcccatttccatatgctatggccggccacatgcatagcttttatcatttaatgttttaattattttaatgccaagtaattcaaccctaaccctatgtggtattctataaatagaaagtaatggcttcaggaaagtatgacaattgcatctcattcctttcagagaaaattcctgagccgccacctctctctctctttct

SEQ ID NO: 276745 - DNA, 554 bp, Cannabis indica
gcgcgcggaaatcatgcaaagggcttgcgccgagttttctcggcagattccccctacctgcgcccgcggacagtatttgcatactgtccgtaccacctgccattttttttcgttttcttcgatttttcatgttatttcatggaattaacttccgattttttgtgtagttttgtattttgatttttaattttcatatttcaaatctaattatcagaaataaattaattttattttttaaaattaaatttagatattagtgtaatttgattttgaaaataggtaaaaattaatttttgcttacctcttttcttattttttttaaaatttgattattttatcttaattttaaatctaaggtcagatattaaattctttttataaaatattctattttaagtaatttgaccttatttagaataaaattactataatcattgtattttaaaaaggaaataagatatttttgctaacttttaaattttgttataaaatcagaaaagggtatgtatttatctttttattttatttatagaataacatgaaatttaaaaggt

SEQ ID NO: 276746 - DNA, 520 bp, Cannabis indica
aaccaaatgggacatggcgggtgtgtatagattttactgatctaaacaaagcctgcccaaaagactgcttcccccttccccggattgaccaaatggtggacgccacctccggattcaagctattgtccttcatggacgcctatgctggctacaaccagatcaagatgcacattgcggatcaagaatgcactagcttcaagaccgataagggggtatactgctacctggtcatgcctttcggactaaaaaatgctggtgcaacataccaaagaatggttaaccggatgtttaaaggccttctgggacggaacatcaaagtgtacgtggacgacatgttggtcaaatcaaaggcatgtgcaagtcatgcagacgacctcgaggaatgctttgaagtggtccggagatatggcatgaaacctaactcgaagaagtgcacgttcggggttaaatcaggaaagtttctgggatttttcgtcagccaatgggggatagaggcaaactcggaaaaaattcaagccct

SEQ ID NO: 276747 - DNA, 626 bp, Cannabis indica
aaaattccccaaccggtagaccgttctgcaaccggaattccggttatgagaattcttggaccctcatccggaattccggttgcacaaccggaattccggttcctcgcaggaatttttcaaaaattcacacaatgctcaaatcaattccaaaccaccccaaaacttccagacctgttctaaataacccctagaacaattctaaagcatcaaactcacccagattgcacataaacaaaaatcaccattaaagcttcaagctttgagttctaaactcaaacttgatcaaacactaccaacatgcaatcaaaccagtccaaacctaattaaacatgcataaaatagcctctgaaaacaactacaaacttcaacaacatcacagcaacagattttaaccaattctctttgaaaaccatagttttgagctaaaaacttccaagcttgaaattaaagcaattaatacgcattaaactagctctaatctacctaaaacagcaagattaaatctctgaaacatcacaataaatcacagcaacaagaaccacaaaaacaagcatgcaacaacacttctttttcatcaatttttcaaaaaaaaaaaactaagagaagagctagagagaacataccac

SEQ ID NO: 276748 - DNA, 533 bp, Cannabis indica
ctgaaatattccaaatcagagaatactctcttcataaaagttttagaaaatcgaattccctttctaatgacactaaaatctttaaaatcggagttataacgtaagagatatagatattataccgaaacagttttctagaaatcctgaaacaaatggatttcgaactacagcaataaaacaataattttgacttagaataatcaataattagtgaatggtttcttcataaaacatttagaaaattgaattatcttttcaacggtaccaagatcgctagaatcagatcattattcagagagatatttgaattttactgagacaacttatatagaaaatataaaaaaacgatttacaacaaacagcgtagaaatactaatttttgacatagataaatttcgattcagtaaaacctttcttcataagaattatgggaaattcaataagctttctataggcaccaagattgcgagaatcggatgagtatttaaagagatatgacagttttactgagacatgtttcattctgaaaaata

SEQ ID NO: 276749 - DNA, 702 bp, Cannabis indica
ctgtgtagtcccatacctacactagtcctcagaatcatcccacttgaccttccccaggcggtgtgggattgcacagcttacccggtattcccttacggatcacgggactactgactgtcacaatcaccccccttacggggtccgacgtcctcgtcgaccacacttccggctgggtcaaggctctgataccatttgtaacgtccccgcttcaagcctccattattgcgctgcccgaaatcaaccatacaggttctactacagtgtcactcaaataatctcttacttcatagaattcatttgctctcagccctgtggtaggaagatttatacccacactacctaccccgagcctaataggctctcaattttacttactagatcaccccaggtacacctcctagtacattcgtgatcattcctttctcatagttaaaatctatctaactagaattaatgctaataagcattaccacacgtgaataaacattattagcaactttatatcaaaaacttatgacacttctctaataactttacacatatcaaatatgaagacaattcaaataattagtaaataaaccactaatcaactaacaattagcacttactagaccatgagtcgaacgagtcttcgcagccaatgtacatatcaaaccagtcttcaggatctttaaaccttggtcgctctgataccatgttgta

SEQ ID NO: 276750 - DNA, 729 bp, Cannabis indica
ccacgacaccaacgaatgctacaacttgaagcgggaaatagaacttctgatcaagaaaaacaacccgcacttacagaagtacgtcaaggccaaccaaggtcagaataaccaggatctgatgcctccgccaatagatggacacttgcaagtcatcattggaggcccgcacatcgctggagacacgggcaaagctcgagaaagatatgcccgaacagctcaatacgagcaagaagaagtcatcctggccgtggaagaaaggaagcccaaagttccacgcgcaggagagccaaccataacattcaacgacgaagatgctgtccagataagatttccgcacaacgacccgctagtcgtggaagtccagatagcaaacaaaatggtggccagaaccatgatcgataatggggcttcttcaaacattttgtttaagactgcttacgagaagatggggctccagctcaaggatttaactccatgccttcagcccgtctatggtttctccggccaaggagttgcgcctctaggacaaatccggctacccctcacagttggacaagctccgatgagcataactatcatggcacaattcctgatattggatgttccttcagcctttaacgtaatgctaggccgaccagccttgtatgacttaaaagctgtcacatcaatatttcactcgtgcctgaagtttccaaccaaaaacggggtagggtgtcttagagggaatca

SEQ ID NO: 276751 - DNA, 772 bp, Cannabis indica
actaaggctatgcttcagattcttaatcatcagggggacatctccccaatcaatcaaactatcattgtgctcatccctaaaaagaaaaatcctaagcatgtttgtgattttcgaccgattagtctttgcaatactttctataaatgcctatccaaagttattgcaaatcggttaagacttgtgcttcattccattatcagtatcaatcaaagtgcttttcttaaggggcgccaaatcactgataacattcttcttgcgaatgagattattcatgccatccattctagaagatcaaggaaggttggttgggctgctattaagcttgatatggaaaaggctttcgacagagttgaatggccttttttaaatcggttgcttgctcatgttggttttccttcttcgttttcctctcttataatgcgttgtctttccacggtccagtttcggttatccataaatggttctctcactgacactttccattctacacgtggtattcgacaaggggatcctttatctccctatcttttccttttaattgctgagggtctctctgctgcaattcgattgcaagaaactaatgctcatttttctggcattcagatttgcaggggtgctcagcccttgtctcatcttctatttgctgatgatagcatggtcttcaccccagttcattctcgggccagtgattcccttaatgttattctcgatctttacaataaagctacgggtcaattggttaacagagataaatcctctatccttttctccc

SEQ ID NO: 276752 - DNA, 526 bp, Cannabis indica
acccgatcccaaacacagacttggacttagatagggatccggataagaaaatggactcagaccaagacccagacggggatcgaaatgctggacgtagatctggaccgagatcctgacccataccaaaacttggacccgcactcaggaccccaacttggacctggactcgaacctagaccctgatcggggtccagacttggacacaaacctagacacagactcgaacccgaactcaaacccacacctagaatcagacccaaagctagacccggacctggaccaaaactcgaacccagtccaggatcaaaaccaaggacttatacccagaactaaatccaaaaacaaatcgggattggaacttgggactcagacccaaccttgaccaagacccaagatgcgaacccacacctggagcctgatctggacctagactgaaatccgaacacgaacccaaactaagaccaggagtcgaactccgactcgaactcaaacccaaactcgaactcagaatcgcaaatggaactag

SEQ ID NO: 276753 - DNA, 575 bp, Cannabis indica
tctcgtgcaccactctctctctctagaaaaaactgaaaaaacttctcaaaaaatttccctctttctcgtccgtcccactctctcttccctcttgaatggttgtttctcggtgggtgttggtggaaaaccgaagcacaacccaatatcactcaagaatcttacaccattacaatgggtaagttgtgttttaagcattttgttagactttatgtagtttaaaattgttatatgtgtcgtatttgttggaactgctgttttttggtctgaaattgttgagatctggcaaatctggttttcagtcgaaatctgggttttccagttgttatcgatgatatatcgataacttatcgatggtttgtcgataattgtacgaggaaaggtcagtgatgaccattgtcgacgtgttctcgacaagtatgtcgatagcatgtcgactaaaaagtaatcaccatattattcacaagttgtcgacattttgtcgatcgtttgtcgatagcatgtcgacaaaaataaatcaaccttgtgtttagaacttgtcgacattttgtcgacactatgtcgatgcaaattaaaaa

SEQ ID NO: 276754 - DNA, 502 bp, Cannabis indica
agtcagtatatccatctatttgcctatcagatgaatctgaagaaagctgctgcaatttatgacagttggctttaataccaacttaaatgggacctaccagcaactatatataggggttcctctattctaaaaagagaggtctgaggggagagttccgatctctaatattctccaatgctcatactttagattcagtttagagagagagagtccaagatcatagtgagtgtgtgtggagggatgtaaaaagggagtatcactcttgaagtgatttccctcaatgtgaggcatttctttgtaattacttgctgtgttgagttgtaatcttgggctcaatctattgtgtactactgactattcctattcaataaagatccatcatccatccattattgagttaagttttctttgtcttatttcaattaagttcaagttttggttttgtgattggttttagttttgatttgtgtttcttgaatattgttactgctgtaacaacttg

SEQ ID NO: 276755 - DNA, 951 bp, Cannabis indica
agccaaaaaattaggaatggaaatcattcgtgacagaccttctcgaagattatggttgtcacaggagaactatgttgaacgaatacttgagaggttcaacatgaaggatgcaaagtcagtttcttcgccacttggtggccagttcagactcactaagaagtcatgtccatcttcggaagaagaaaagaggaagatgttggctattccttactcttcagcagttggaagcttgatgtatgcaatggtttgtacgagaccagatattgctcatgcagtgggagtcgtaagtcgtttccttgcaaatccgggcaagcagcattgggaagctgtaaaatggatcttcagatatctgaaagggacattaaaaatgtgcctaagctttgggaaaggagaaccaatcttggaagggtatgcagatgctgatatggctggtgatcttgacggtagaaagtctacatctgcatatatgtttacttttgcagggggagctgtgtcatggcagtcaaagttgcaaaaatgtgttgctttatctaccacagaagcagagtatattgctcttgcagaagctgggaaagaaatattatggataaagaattttctccaagaattgggtttgaagcaagaaaggtacgtaattcattgcgatagtcaaagtgcgattgacctgagcaagaatgctacttaccactatagaacgaagcacattgatgttagatatcattggactcgtgatgcacttgaaaagaagctattccaagtgcagaaaattcatacagacaagaatgcagcagatatgctaacaaaggtgattcctcggcataagcttgagttgtgttccaagcttgctgggatgagttctcgatgatgaagacacaaattcaattcttcctcatggattgaaaaaagggggagaattgatgggtaatggttgtttttcaaccatgtgaaaat

SEQ ID NO: 276756 - DNA, 445 bp, Cannabis indica
aaaataaatacttgaaaaatatctaatttaagttgttctaaaataacaaaattttcaacttaaattatttttcaaaattgaattaaataacaaattaagttactaaccacttaatttgacaaatattccattttaagttgattcaaagttaacaaactttcaacttaaaacaatattccatgaatctctcaataactaattcctagaattcctcaacttaattttggatttaaaaaatattcaaattcaagttgatacaaaaattagttaaaagtaactaatttgcaacttaaataggaatattttatgaaatattaaataattaagcttcagaagaatctaattagttataattctatatttcattaaactaagtgtgtttttcttaaattaatttcaaaatattcaaatgaaaaattaattttatatatttcgaaattaatta

SEQ ID NO: 276757 - DNA, 753 bp, Cannabis indica
gagactttccttcctaacttcttcttttatttaattcttttgtaaaaaattaaatcctatttttctttttttttttaaattagtaaccagcccaaaaataaaataaatcaaatcaccttcccatgcaaaattaccaatatacgcttctaccaaaaaaaaacaaaactaaacaaaccctaggggcaatttggtaatttcagttaatccgccaaaccaatattctaaaattctaaacgaaaccagaatacttccaaaataatccatcctttaatgctgttaacgcagattttcattaactaaatttgagcctcacagtaatgatttcacatagaagaagtaaaagcaatcaaaataaagaatatgaacatagggttttttatgtggttttgtagttaaaattctgcatagtccacgagtcaatcttattcagattttttgagtatttttcaaagtctctttcatatgagttttttcgtccccacatcttgatcttgtctgccactatttataattacatagtggccactaaattacaaaagttgacggtaatcgttatagcaattattttctcaaatcatgctaagtaaatgaggtttttatttataattcacacagctatgagtatcccgcttttattgggccgagatgaacgcacacttaaggatatacgtaagcctaatctcatggggatggttcgttaggaatggtggcgagttaactttgatggcgagttgtgacacgtcatatgacttc

SEQ ID NO: 276758 - DNA, 785 bp, Cannabis indica
aaaacccaacactcccttcaataccactctgattaccttgatcccaaaggttaaaaaacctatttccctgaaagactatcgccctattagcctctgtacaactatttataaaatcatttcgaaagtcttggctaataggcttaagcttatcctcagccctttgatttccctaaatcaaagtgctttcctcaaaggccgcctcatctctgacaacattcttatggcacaggaaatcctgcattccataaacaataaaaagcaaggcagagtaagttggatggctgtcaagcttgacatggccaaggcttttgatcgagtggaatggaaatttcttcataaaattatggaaaaatttcagtttcccagccggtttatcaagctgatcatggcttgcatcaccacagccactttcaaattcaacattaatggccaagctttggggcttgttaccccatctcggggaatcaggcaaggtgatccactctccccatatctctttctcatgtgtgctgagggcctttcatctatacttaagcgtgctgagagacaggatgaggctttcggtataaaattgcacgctcagccccaaagatttcccatctcctatttgcggatgacagcattctgttctgtaggtcaaacatccaagcgtgtaatgccattaaagaagcccttgaccagtaccaaaacatctctggccagcaagtaaattttcagaaatcctctctgtttttctccccaaacacaagtctcacatatcaaacccttattcaagactatatgca

SEQ ID NO: 276759 - DNA, 571 bp, Cannabis indica
aagagattattctctgatttagaatatttcagtgtcaaaacttcatatttctgatgtctcctgtgattcgttattctatattctttctcaaaaattatttcagtaaaactgtgataaccctctcggttttaatctattttcaataatattcaacatatcattagaaagataattgaattgtctataatttttatgaaggcaaccttcattgaattcatttagttgttggtaaaaaataatattctttctactgtattgaaagagttagaattttaatgttagggccttgatctatgtgttattatagggagtagtgacaggataacaatgtcttaaacaacgggatttgaggtaagaaaattaggtagttttgtatgtatttacctgcataaatttagattctttgtatactgaaatatgagttatgatttgttattataagtctgtatatggtactgagaatgtgtggtatggacacaatatgaggttgtgaattaatatatatatatatagattatggttgttatgacctatatatgttgtatgttgtgtgttgtatgttgtatgctaa

SEQ ID NO: 276760 - DNA, 548 bp, Cannabis indica
gtatgtatataataattttttttctttttcttcttttcctcttttttttcttttttttcaaggggtggcacaccccaaacttaattttaatcacactcttctcttctttttttttacaaggggtggcacccaaacttattatataatatatataactaaatataatcttgttcttccgctcttgggttgcccaaatgtgatacaataaggccaaggcaacccgaagtccttcttcaagcttctttcaaagtgatggaggtctttgcttggttgacctcaccacccccaaacttcactccttggcttttcaccaagaattttcttcttgaaagtgcatcacgtagttccaccaccccatcgggatatactctcaccaccaagaaagatccatcacaccttgaatctagtcgtccatgagtagccttcgttaaagagttggcgaaaatcacttgttgcccaacttcaaacatttgagaccaaatttttctactaagcttctttttctttctcttctttttgggtggttttttagggtcaaatgatgtttt

SEQ ID NO: 276761 - DNA, 582 bp, Cannabis indica
attaattttgattaatcaattataattctaaaatcagactatatctagtttatgaatttttcactacgttatggcttgattgtgaagaaatagtgttttggagtttgtttgttaattaagagactttatggagtctaattaataaatatcataaatgacaattttatttgataattattttaattattaaataaattgttttggcatttataaggttgaattggaaaatatggtattattgaaaagaagaataagtgattagaaaaagtggcaaaattgtaactagtaattggacttattaaagtgtacagccatatgttattttttgcccaatattttattcttttttaatccatttaattcaaccctaaccctattgaagaatagtataaaaggaaggctatggtctcattatccaactaatgactccaaagctaaaaacctagatgagacctcttccttcttctttcttcttcaattcgaaacactaagcctttcttcacactaaataatttcagccattagtgatagagtgagtgcccacacacatcaagtggtatctcaatcatagtgtggaagact

SEQ ID NO: 276762 - DNA, 453 bp, Cannabis indica
taataaaattgaatgaaattaaacaaaagtccttaaatctaacaatctcaatagttcaggggaatttttaacggccaaaaaaattcaaagggcaagatttaatacattttaaaatttaaaaggtaaaagtcctaattagccatttttttttattaataactctttttttttttttttcttaataacttactatagtattagtttggatttaatggtaattaaaaaaataaagatatttttgtaatttattataaaaagggatattggggctaaaccccccaaacttttgggtttgtgacagttaaccaccaaaactcaaattttggcggctaaactacctgaactccacttccgttttggtccgcactattccgtcactttggctccgtttaatggtaaaaatggcttacgtggcacaatccttgtcagcaactcatgccacattggcattaa

SEQ ID NO: 276763 - DNA, 540 bp, Cannabis indica
aagatcctggataaatataattccaacacggctgtcttcataccttcagcccaaaatctccctggaacattcttcgcatgtagcatgcttcgacatgtttctgcaagatggcgattcttcctctcggctactccattctgttgttgtgtatttgcacatgtgaattgatggcgtatgcggcattctcgaagatactcagaaaattcatctgaggtatattcgccaccgttgtctgttcgaaggcatgggattttcttgccgacttctccttctactatttctttaacttctttaaattttgaaaaagtttcagatttttctttcataaagaaaacccatacgtatattgagaagtcgtcgatgaatgtaaccatgtactgcatggcgctgattgatggttgtttgactcacccaaacacgtcagaatggaccagctccaatggtgctttagctttgaactttgaatcttcatacggtaattgatgcgccttaccgtattggcagccagcacatacagtctctgttctgacctcaagttga

SEQ ID NO: 276764 - DNA, 886 bp, Cannabis indica
gcacaatattcaatataatcccacaaagcacaaacaaggatttgggataagttgctaacttagagagaatcttttcgttatttcttccttcttttatatgaatggatttaatacaaggtcataaggtgaagtttaccttggatgagtttggaattcctttgaatccttttcttcatattatatgaccaaatttgttacaaattcaatatatttattctcttttactattattattattattattattattattattattattattattatttgatcatatataaagatacatcttccagacccacataatttccttgttccagcaatggttgaaactcatgaatggccaattaattagttccatgtttgaatgggatgggacaatgtctgtattatttcttttcttttttataagtagcaataaagggtgctacttcccttctaagaaaagaaggagcatagttatagggcgcaacccaagcagcaatcatacattattacatgatctataaatctctgagagtccaaacaacatttttaaccaggcattcacctaagggaaaaagaagaagaaaaaaagtatattagaattgaggaggagaggggactacaatccaaaataagtttgtttcacccatacgaaacaccatagagtagggcccatcgactccgcttcaataggggaggccacatgcatgcaatatgccccaaatgacttccacaaatctcctaacgctcccatcttctaaattaaatggcttgattctatatatggggtgtatttctaattatttggggagctaataaataagattcaagttgtacaccctcaaaaataattcaaacttaaaaaaaaaaaaacaaattgaatttaccggaattataa

SEQ ID NO: 276765 - DNA, 588 bp, Cannabis indica
tctcgagtatgagcttgatgtttgcttagttaagcatgattttgttgtgtattctcaatctgaaatttggtattttttttttatgaggatttagatgcatttgagttgtgatttttgagccttaatatgcgatttttaccctctgtttggttggggttcgaaatctaggaaaagttggcatgtttaggccttaaaaatggagtttttgggtgttctgaacccagtcgtcgcgacgggatttttggccgtcgcgactgggtttggcagtgagaaaatatgtttttcccgattttgttttggccataacttttgactcgggactccgtttgggacgttctttatatcgttggaaagctcgttccgagctctatatgattatctgaattttaaatgccatgattgaattttatgagtatggaaccaggggttaaccctatgtgtgaaatatcccggatttgtgtgactaggattaccggcacctgatcaggagcacccgggaatttggaatctctttctattgctggacaacaagtaagacagtgattagcacgtagagtatgcgcagtagcgcttatattgagaatgata

SEQ ID NO: 276766 - DNA, 503 bp, Cannabis indica
attacacattttgtacaataagagttcaactacaatattaatttgagacacaaattaaattatagaatgataaagaattgaagttgtagtacaacatgccatgaatgaagaaatgaatatcttaaagagcaataaagtttatctttagtaaagttgcctaatggggtggagaacattaattaagcataggttttttcaccaataatattcattaggcaacattgagaaacataaagatataaaagaatattcattgctaagaagttcattttgaactaagaatcaataacaaaggagatttacattctcacttgtttttataaaagattctattatagaccttggcatttgttgctcgtttcaattcattaatcaattccaaacagtgaactagaggagaaggtatacagactgccataaagattttcctctaatagtggtgaacatatgcaagcttaaggtgtctacctatagattaaaacaaacatctcacaaattggtat

SEQ ID NO: 276767 - DNA, 677 bp, Cannabis indica
caggagcacattagaggcatgaaaagtagtatatgtttttttctaacatttcatagtcagtaactttttctccacacaacattaatttagaagtgatattaaacattgcagagttataatcacttactgatttaaaatcttgcaacctcaggtgcaaccaatcattcttagcctttggcaatatgacagttttttgatggtcatatctttctttcaaattttgccaaagcacaagaggatcttttacggttaaatattcagattttaacccctcatggagatgatggcgaaggaaaatcatagccttggccttattttgttttgtttcagtattttgatctttgatggtgtctccaagacccatagcatctaaatggatttcagcatcaagaatccatgacaaatagttttttccagaaatatcaagtgccacaaaatcaagttttgcaaggtttgccatggagaaaactatatcaatataaagtgtaaattattagacatatacataaattttgaaaaaaaaatacaacaaaatatagtacaatctaaaatatagaataagataataagattaaacaatataatatgataaacaaatcaacacacatatataatatataagcatctatatagatatatataagcatagacatatattgtataaatattaattcatt

SEQ ID NO: 276768 - DNA, 679 bp, Cannabis indica
aatgctccaaaccgtggggcaattcagcgggatgccaactgaagatcctcacctctatctccgttcattcttggaggtgattgattctttgaagatccaaggagtgagtgaagaggtgttaaggttgaagttattcccattctcactacgagaccgagctagatcatggctcaacactttgcctcctgattctgttaccaattggaatgatcttgctgagaagtttctgaggaaatactttcctcctactagaaatgcaaaattcagaagtgagatcatgtcttttcagcaacttgaagatgagtcggcaagtgatgcgtgggagaggtttaaggaactttttcgaaagtgtccacatcatggcattccacgttgcatacatatggagactttttgtaatggcttgaatgcagcttctcgaatggtggtagatgcatcggccaatggtgctattttgtcgaagtcttacaacaaaacatttgagattttggagaccattacaagtaacaactaccaatggtccaacacaagagctccaacaagtagaaaagtggcgggggtccttgaggtagatgcaataacggctttgacagctcaaatggcttccatgacaaatgttttgaagaatttgaccattgggaacgctaaaaagattcaaccagctgctgccattcaaagt

SEQ ID NO: 276769 - DNA, 981 bp, Cannabis indica
  modified_base (890)..(890): a, c, t, g, unknown or other
aagtctaaggagtctgggccaccaacatctgggtccgaactggtcaggaggatccctgagcgggtgcaggcaccaactccacccatgcccgtgctgcctgaggccaagaagggcaaggaggtgatggctcactacatgaaccggctggttcctgaggtcggtgagcaactggctggtgctgacgactcatctctggatgtgttggtgggtggagtcttgaaggagcttaccagggttagtcttttcttttcgacacttcccttttagcttttcatacttagctccatatgttgactttttcctttatgcaggccggtttgaagttggcttacacctactcccgggctaaatctgctacttccaagagtgcggctctgtccgacaccttgagggcggaggcggacttggccaagaaggaagctgaggaggccagggcggagactgcagctgttcgtcatgagttgggtgaggccaacaagaagctgtttgccgccgagaagaagatcactgtgctgacaaaggacctcgaggctgctgatcgctttgaggaaaccattgagaccttatctgctgaagttgatcgtcttcaggatgagaggagttctctgcggcaggtccttcttcggcaaaaggaagataaggacgctcaggtggccgaggcagaccgtttgaagaagaaggtcaatgctttggagactgccgacctcgagctcttctttgatttttggaaggataatccccaggccaacttcgactacttgggcaacgccaaggaaatgtacctcgagtactgcgcggcccaagttgcctatggtgggaaagaggtggctgcttcaacctccggccaagctttgccaggctgctgatgcttctcctgctcgaacgcaagntcctcctgctccagctggctcagaagaaccaaacccagagctgggctccagccgtttgaacattgatatttttatctctcctgtttatata

SEQ ID NO: 276770 - DNA, 723 bp, Cannabis indica
gattatgagcagcgatacctgactcatgacctagaattggccgcagtagtatttgctttgaagatttagcggcattatctttaaggggaaaggtgtgaaatttataccgaccataaaagtctcaaatatttatttactcagaaagatttgaatatgggacaaaggcgttggttggaattagtgaaggattatgattgtgagataatttatcattctgggaaggccaatgtagtggtcgatgccctgagcaggaagggtcccgatcaggtagctagcatgattcagatctcacccgagttagcagaggacatggtcagatctagcattgagtttgtgctaggcaagcttcataacttgacgctgcaatctgatctgttagaaagaattaaggttgctcaaatgactgattcagagttaataaaaatcagagaagaggtttcagctggtcaagcaagggatttttaattgtcagacaatgggatgctattgtttaaagctagggtttgtgttccaaatagtatggaactaagaaatgagatcttcaaagaggctcatactaccccatattccttgcatctctacaccaccaagatgtatcaggatcttaaaccttacttttggtggagcggtatgaagaagaatttggtagaattcgtatcgagatgcctaacttgtcagcaaatgaagcctgagcatcagagaccagcagggttgttacagcct

SEQ ID NO: 276771 - DNA, 697 bp, Cannabis indica
caacatttcaactcgtgctccaaatcagtgcgccgaaatcgaagattgccataactatccaaactccattcagatcctggcttagcgagcgtcggcatcatgtcacccacagtctcgtcgctcacctgccctttttgcgcggagtattggcactcgacagagcttaacccaaacaggtcattgattgctgcagctgaaaatgagactgggacttcacgcaccaccactacagtgggccattcttgggataggaagttggcgtaaaattccttgacaacttccatgaccgcctgctctctttgttggacaaaaagtccccaatctcgctgatgaatcgtggcactgacccattcgggcaactcatcaatgtcctcaatatcggctactaatccacgctccatataaaattcccgattgtccaccttctcatgatactttgtctcagctgccgggcaatgaaacttaggaatttcatgcagtgacttctttttattcttgttggcggtcttcttaactttgggcattttcttttctttgcacttgcacactaccccaacacaatgactttcttctttgttgccttactcactgctgcccctttacacaacaagaactcgtacaaagtacctcactgtctccaacccacgaaaattcaaagccctcacaccaaattcactcttatttttttttttttttt

SEQ ID NO: 276772 - DNA, 534 bp, Cannabis indica
gattcaaataacaaaaatcttttgtttagaagtgatctagcgttaccaaaggtgggacaatttatgagtattgtctggaatcctagatgaattaaaggtgacgattgtgtagtaattttgagattatgtaggagtgggactacctatgttagcaagaagcatctttttttggtagctcaccatgacggaactccatggttgagtgtccttgacttggggtggtttcatttaagaaaatttcccatgaagcgtgcgagtaagagcaaagcacgttagaaacacttggattggtccgtgggaccagccgtcagtccaggaaacagctagagtgatgcagtcatgtataaaagccattaattcgtgggaatgagggcccaatggaggcttgaagcagtgacgttactgaggtaacgtataaaagaacatcaggaagagtagtggtatcactaaggtaaagaagattacctaaattacttaaggtgatacgataatgatggagagtactttataattgactagatagtcaatatggta

SEQ ID NO: 276773 - DNA, 506 bp, Cannabis indica
tgggtgcagcagaattaaatgactccatccactcagatctctaacccttgtatcctttctgtcgcagagtatcaccaagaactgagcctaaaactccttccttgaatttggactcttcacagttttacatactatgattgaggaccaacttgatgtgtgtgggcacttactcaatcactaaggcttgaaaatatttgtgaagataggctatagtgtttcgaaattaaagaggaagaagaaggaagagctctcatcaaaaagctaggtttttagctttggaggtattagttggataatgagaccatagccttccttttatactattcttcaatagggttagggttgaattataagaaataaaaaaaattgataaaaatagagtgaaatccccacctaatggctggccacataatgggccctacattagtttgggctttgtcattttcctcaactatattatctatttttgcataaataacactttttgcactttcaaccctataaat

SEQ ID NO: 276774 - DNA, 735 bp, Cannabis indica
gggtgtatttaatactcttagactacaccaaatcagaattctagacttgccttagtgctagaaagtctgctgatgagatggtgattactctgggggtggactaatgattttggagaagtgtaaaaacctatctgaattctctaagtctaccagagagagactgaatgttaaagttgcaggaaagatgcttattcagtctaaggaaagttctatacatttttggcattgatccaacatttatcaactactagtgttacttcctgactaacgcaaaagtagttgccaaaaagtaaagaatccaatatccctcgaagagtagacatatagagatgaatttcacaacatcaaagattttgtgattaaggaaatgtaatggtggagaataggatgtattgaatacaacctatcagatcttattacggagagtatactacaaacaacacttgatttggacattaagatgctgagattatttgaaatgcacttttttgttttatattagtgcaagtgggagtttgttgggttttgtgccctaaataaaacccatttcaatataatcagatttactaattaataaagatcaaaaatcacattttatgttgcaaagttcacatgagttattttatgattataaattctattaggtccacaacatatgtaattgtttatgattatagtgttttcaacacagtggaatataataaagattatatgttcgaaagtttaattccctga

SEQ ID NO: 276775 - DNA, 628 bp, Cannabis indica
atgatcttgagggtcttggcggtggaattggccataggagcggcgtcggaggaggttggaaacttggaagtgagggagtgagtagtggtagtggtagtgagtgagcgaggaatacgaggatcttttatttttttgttgatgctggccgaaatgaatttggacctatgattggcctattgggacattatctccctaagcccctgttaggaccatttaatatctaatactctaccacacaaaattatcaaataatatacagtgtgtgtatttattcctcctaataccatacactagtattttagcaaatctcataacacaattcataaagatttgttctattggttgataaaaattgttccattaaaacctaacgcttatttatacatttatattttggataattgtaatagatacatgtgtaacatttacaaaaaatttatacgtatacttaggttgtccatctaattggcaagacacgtgtcactaccaaatacgtgatacatgggtgacgtggaaaattatagaaggttaatggataatttttccccaacaactttgacattactaaatcgtgcgccctgaattttttttttatgttaaaaattcctctcgaactattgagattgtt

SEQ ID NO: 276776 - DNA, 648 bp, Cannabis indica
aagtaaaccctcttaaccttattccagtttaaaatattctttaaatcataccttaaccaaaataatccttttattctgactaataaatctgtatagtgcataacttattaactttaaaatattattgtgtcaaaattttcttacgaaaaacgtgaaaatttaaacaaactaccctaaataattaggggcccaaccatataataggtgctaaagccttgtaaggcgccacagccataaataatggcgcaaaatagaacaaaatcaatataaaacaaacctataacaaaaaagaaaaacattgaaaagtgaaagaataaaaaagttgtgaaacaaaaaagaaagaaaaatattgaactcatttacagcaacaaacgatagacaaagaaaattaaaatagaaaactcttaaggtaacttgaacaatgaatatgatcaagaggtattaaactacagaaaagttgcttcagaatcgtgatcactggcaatataaccaattctttcacgaatcacacagacattatatcaaacagtatgtacaccaactaaaatactatcacaattcacataaaatcgaaatgcggctatataaaatggaatgaattcagactacgaaaaagaaaaaaagaaaaacagagagagagatatttac

SEQ ID NO: 276777 - DNA, 553 bp, Cannabis indica
taggtgtctttaatttcattttctcatttcaaaaaaattacaaagttagaagaaaatagaaaattttcaaaaactctctcaagctctctctctcttttcggccaaggcttggagctgctagggctgggttttcttggttgattcaagtggtttttagcaagatcaaagtgattctagttgaggtatttctttgtttagtttcttactttgttttcttgaaatttttaatgaaaaagatgagtaatgcatgatgattttggtgatgttgctgctgttaattgttgttgttgtttccttgattaaaatgttgagttaagtaggtttaattaggttgaattgcatgcttgtatttcttgttctagttggatagattttctatgtaaaaagcttgggttttcaaagaaaaattgaggttttggtggctgttgtgtttgcatgagttagattctagtttctgaagttgttataagcttgattatgagtttgaagcatagattgaatgcatgttaggtgattttactcaagtttgagtttagaactcaaagcttgagct

SEQ ID NO: 276778 - DNA, 1143 bp, Cannabis indica
ttgcgagctctctcagatcttcatacacttcaccaccaatatcaggattttcatcttgcatatgattctgaggttcatcatgagcttctgttggaatttgttcaatcacaggatcaatagtaggagcggaagcggaagcaacaggtacagggacataaatacgttcttccctgaacacaatttctcttgacccttgacttgaaccaaattcatcttcaaaatagacagctctatctgattctatcaccctggtggtgtgagaaggacaatagaatctagaacccctcgaaccaatagtgtagcctacaaaatagccactgatagtcttcggatcaagcttcttagattgtgggttatagggccttacttcagctttacatccccaaacatgaaaatgacgcaaactcggtttcttgcctgaccacaactcgtatggtgtctttgggacagacttgctaggcacttgattcaagatataagcagcagtccttaatgcctcaccccataaaaattctggcaagctagaatgaatcaacatacaacgtaccatgtcaagaagtgtgcgattccttctttcagcaattccattttgctggggtgtccctggcattgtatatcttgcatcaataccacattcttgcaagtatttggcaaaaggcccggggttccttccagtttcatcataacgcccataatactctccacctctatcagaattgacagctttaattttctttcccttttgaagctcaacattcgtcttgaaaatcttgaaagcatctaaagattcagatttttcacgaatgagctcaacatggccatatcgggaaaaatcatcaatgaaggtgataaagtatttataaccacccatagcaggtggaacaaaaggcccacaaatatcagtatgaataagctctaacacatctgcgcatctgtctgacttactctttctaatcttggcagtcaactttccttttatacaatcaacacaggcagtaaaattagaaaaataccaaggtcctgaagcacaccatctttcaccaatctctccattctatctctagaaaatatggcctaaacgtttgtgccaaagcatggaagatttcaaaatactgatcttgtcacgtttagaaccaacaacaa

SEQ ID NO: 276779 - DNA, 557 bp, Cannabis indica
attctgacagcttgccatatctctgtgatctgataccaaagttatagggatttcttcggtgactcacgatgcaaaagctgaatttgtaaagtgttggcgtgctgcgcggattgctcactgcccggctaagaggacttcatccgagcgaatgtatgtggtgccctgttcggtatatttcttgagaggagatacatagagatgattccacgtgtcaccatcgtgtgatgccacgtcatcagagtgcaaaaattgggataacaacaacaataaccttgtatcaactcttactttgatatggtattggataaatccactttagagatctatgggtgtaaagaccacttagtttaatttggaaaattagcagttaattatgattaattatgaaaattatttatagatatttaaataattatttatgctgttattattgaattttgaaatgcattttatgtcatatagttaattttctaattttgcattccggtgcccggtaacatggaactcggtgtttggctcagtagaatcacaacctagtatgttagtattgtgggacg

SEQ ID NO: 276780 - DNA, 518 bp, Cannabis indica
aataagtcttggaaacatgcgattattcaagctgttcatctgaacacccgcgaacattcaaattgttcatccgaatatccgcgagtattcgagacgtgaatcagtgcctatgaattgtgtgcggttatgtcagtttacaggccctatactatgaatgttacccagtttcatttacccaaaacacataaatacccactagcatacattcctaaaaagccttcaaaaacatccaaacccagaaagtaaagcgcaatttctccaaaaacaaaaacgaaaatgcagaaaactaacctttagttttgattcctgcgaattgctctcgatcacgtctgagattgaaaatgctgtggaaagtggcaggaaatctggggatgaattttttctgaagtgtatgaactgtggggaagctaagaagagggaaaaatggggaaatttgattcgtatcaaaacgtttaaatacccatatcccttactaattgggattgtgacacgtggcagccagaatgtctaaagtcgcc

SEQ ID NO: 276781 - DNA, 535 bp, Cannabis indica
aaaacaagttataattttttttttttaaaaaaaatgtggggatcaaatgtctcggatataataaaaatagaaccggttctataatataatgaataaaaataaataatacacaataactcaagccggttataattaaaatataaccggttctataacacaatgaataaaaacaaaaaacacaaaataactcaaaccagttataattaaaatagaaccggttctataataatgttataatgaataaaaatcattaacaagaaatacctcaaaaccgattataactacaatagaaccggctataaaatataataaatataaacaagtaacacacaataatttaaaccgattacaattaaaaattaaggagaaattagttcctaaaacactgaaacataaattaaaaacaaaattagttctacaataaaaaacctcttaacacataatacctcataaaactgattataatgttttttaaaaggttgaggatcaatttaaaaaaaataaatgaggcataaatatgaaaagaaccaactcc

SEQ ID NO: 276782 - DNA, 959 bp, Cannabis indica
tatattagtaggggcctgctcattcatccctacggctggatctgtttctgggacaaaactcccaacaacacttcttgggaggacagttggcggagtaggccccaaaagcgcatgccttttaaccttagtcacaaacagtggcagcaagttctccacactcatttttgccttcattcttaagaacaatcttacttgactatctttcactaaaacttctggcggtatcatattgcctttcatgtacatataacacacctctattttcagttcatacacaatagggtctatatccaactcttcatacaaaatatcattcatcttttctaaagtagtgtcaacctcaaacattaacatcttactttttggattattgaaaatccagttgaaaccttcaactgcccaagccccatcatatagtacaactacaaacacatttgaatctgcaaaccaaaatgaccacaaattataacaaaccaatatgtcgcaagatatcgcgaacctatcgctacttatcgcgaaccaattacaaaaaaaagtatgtcgacaaacgtcgcgaacttgtcgagaaaaataaaaatatccacaatataacacaataattctatgtgtcgcgacttgtgtcgcgacatgtcgatacatgtcgctaaatgtcatccctaacctcttgtcagctagtaatcgctaaatgtcgctaaccatgtcgaaaaatatcgctaaaattgcaaaaaaaaccagtaaactcgcagacttgctgcatttcggttcattgacaaagggtgtcaaaagggtacataaaaaccacggatatgtgtagatctattactttcaacataaatacatctaaatcaaacaataattactaaagaaattacatacccattattgtttaaaggaatgactttcttagagctttggttgggtttcaagttccctttgagtaaggcggccgaacactagct

SEQ ID NO: 276783 - DNA, 524 bp, Cannabis indica
ttaaaaatttgagaaaaaaaaatagtttcgtaaagcaactaagataaatactcacacacaaaaaccagttaaataaaataaatcaataaaaaaactggttccttaaattaactaaataaaaaatcagttctcgaaacaactaaattaaaaactagtttctaaaataaataattcaagaattaattaaataaaaaatcagatgacataaattaaaatggactcggttccacaacaaaatgactaaaaacaaataacacacaacaactcagaaatcagttataatttaaaaatagaactggttctataacataatgaataaaaataaataacacaaaataacgcaaactagttataattaaaatataactgattctgtaacatagtgaataaaaataaataacacaaaataacttaaaccagttataattaaaatagaaccggttctataacagtattataatgaaccaattttataacaatgttataattaataaaaacaaataacacaaaataactcaaaccgg

SEQ ID NO: 276784 - DNA, 500 bp, Cannabis indica
ttcttgaagaatcttgtcaaaaaatttagcctcggacttcccggcaatcgcctggcttcttctttccaccgggctccccacacgaagccccctcccggaggccgcctgggccttagagtatgccttctcctgggccttccggtagagatagtcctggtatttcttctctgccgtggcaataatctcgtcccggaaggtcttctccgcgaccggcgcccttacattgggacagatgacccgggagaggttagagtcctccacggattgatgcggaaggataagtttggccttcctgcagttttccgtagtgaccaaacccccgacgtcaagatcggctcggtcataggaagcaaaggcctgggccctccggaggaaggtctgggtaggggcagtccgctgatatggagggatcctcacccactcagtaaggagctccgggtggtccattgccctgaacccggaggaaaagaaaagcgatggcgatactccttgacgtgagt

SEQ ID NO: 276785 - DNA, 1017 bp, Cannabis indica
tttagctttattttcttgcagaattttctctattccatagcttgttattttccgaaatttgatcaattaatatattccaagtgtgaaacctgaaatcaaagaaaacaagcgtaattctattccaaaaagaataacaaagaaggaaaacaactataaaaagtgacccaaaatgtagactaaaaatagcctaacacccgccccgccccactggatcagatactcggatcggatcagatccgatccgacccgtcttatacggatcggatctgatccgacccaatttttttttttttaaaaaaaaaaatattttatatctaaatttataattattttttccaaaatttatttgtttaagaactaataatgcatcatttttttcttatatatttttattttatttgtcaaaatcaataaaaaaaaatatcaaattcttatcacataaaaatgtgatcatgtataacctcaattctcgcataacctctctctcctttactcccctatatatacactatcatatttccccattcaataactaccctcaatggccaatgcacaatgactcaaacacaaccttttattcactataccctcccacactctcctaaacataaggcctaacagatattgaaatatatttacaaaatacattatctcggatagagtcctctattgagactatttctttatactaagggaaacaaaatctattttataataaccattgggtatacaagggactacctatactggatttaagcagagtgcggaacaattttcggtggttcttttccaattctgtttattgcaattaatttctactgtaatgttgttgttttcatgtttcatgtttattttttcactttaagactaacatgatcatgatcctgccttttgttctattgattgctcaaagttccattttttttttaataaatgtattgtaagtattttatggtaccactttctagacactgtggtctgtatatgcaactcgtgtacggacttccatgaatgttt

SEQ ID NO: 276786 - DNA, 610 bp, Cannabis indica
tctatacctcccctagaacatttctaaggcatcaaaacaacccagattgcacataatcaaaaatcaccattagagctcaagctttgagttctaaactcaaacttgagcaaaaccacctaacatgcaatcaaactagcttgaatctcctaaaacaagcataactaagcctctgaaaacaattaaaaacattaacaacaacacagcaacagattcacaacattttcttcaaaaatcacatttttgagctagaaattccaaacttgaaacaaggtaatttacatgcatttctaacagcttaattaacctcaaattaacatgcttacatcacagaaattaacaataaaacacagcagtaactacagccacaaattcatgcatgcatcataccatactttcttaaaacacaagaaaacacaaagagaagttataagagatcaaaccttgatttggattacacaaagaggagatgaaaatcacaagaatttgagcaaaaacacccagccctagcagcccaagacttggccgaaaatagagagagaatgagagtttttttgaaaattttcttcttttctttactttgtaatttttttgtaaaatgaataatgaataa

SEQ ID NO: 276787 - DNA, 585 bp, Cannabis indica
taaaaataaaagaatattctgttaaatttaccgattaggtttgatctcccgttaacaaataaacccaataattaaaccccaaaaaattaaacaattttttaaatattaataatctctttttaaattaaaaaaaaaaaaaatcatcttagccacatatttctctaacaaacctatcttggaagaatattaatatatatattttttttttaaaaaaaaatactttatttttttattccgatgcataatctgatgttattctttttaattatagtccaagtgtttgcactccataatctatatatctatctataatataggtcattactttttttcttaacttattgattatacaggtataattattaattttaattgatgataaaatttaataaagaatactccaccttgaaaccgttctctgttttttttttattggttggtgttaattcgccccgatgattcaagtgtcatggtttagcagaaataccacttatatctttgtgtgattacagatataccacttctgtcattgacccactttttagctttataaatgcagatgctcatataatattaacactttac

SEQ ID NO: 276788 - DNA, 616 bp, Cannabis indica
tcataagccttactcatatcaagcttcatggccatgaatccttttttaccttttgttttcctcttgagatagtgcatgatttcaaaggctatcaggatattatcagagataagccttccaggaataaacgcactctgagtaggagagatgatatgatcaattagcactctcattctattggcaaggaccttcgaaagaatcttgtaggagacattacagagagcaataggacgcaaatcacccatagaggagaagttcttcttctttggaatcaacactagatgagtgtcattaagaccaatcggcatgcattcattgttgaagaactccatgacaagcttaacaatatcagtgccgactatgcccaatgtttctgataaaaaccgggactcataccgtcaggacctggagctttatcaggatgcatttggaagagagcttgcttaacttcatcaggtgtgattgggcaaagtaaggcatcattttgttcaacagttacagtacgccgaatgccattaacaacagagccacatatagcatgatcagtagcatagagaactgagaaataatcaattattacctgatcaagacccgaatcccagcctttccacacgcc

SEQ ID NO: 276789 - DNA, 631 bp, Cannabis indica
tttttataaattattttattaaatttttagtttttattttctatctccctctatcgtatcttgacattatcatacttcacagtgaacatttggacaagatcaggcatgaatataacgacaaaattttatgtccgtggtttcacaagaaggtataacgacaaaattgttaagttttaattcaatcatttatattcctctcatattaatacattttatgtatttagatatatgagttgcacaagcttggaactttacaaaatggtgatgagttactcgctctcgcttccgggtccgattacttagcaacattttacgaaggttgtgtagtgaatggtgttcggtttattgcatcaaagcgagaccaaaagcggaagacacaaaatagtggtgttactgttgctggaactgaagggtttaattattacggcacacttgaagatgtaatcactatatcttatactggtgcatatacagtgtcattgtttgaatgtaaatggtataacactaatccattaagaaagaagacaatcactgaaaataatataactagtataaatactcgtggatattggtatcaagatgaaccgtacatccttgctaaccaggcgaagcaagttttctatcttgaaga

SEQ ID NO: 276790 - DNA, 505 bp, Cannabis indica
ttatttatttttattgtaaactaaaagatctatatagacaaaaatattatttaataaaattataatttattataactaatattacttaccaaaaattaaattattatttaatcacaaaaaaaaaaattatcacaaaaatagttatagtaattccttaacaattattgtgtatagatatagctataggtacgtaaagaagaaaaatgtggttaatggcacgctatgggaccgatgacttgtatcacataattccagaaattattagatttatagagaatccaatccaaatgattggtgatgaccccaacaaccgccttctctttattttgtctctcatttaattctataccataaattcaaccaaaaatatataaaccacttattaataagtgacactattatacactaacactagtacacgccaatgtataatttcaaattagtgatggactatatatgaggaattctagaacccactacttggcatggtggctcgagattcaaa

SEQ ID NO: 276791 - DNA, 524 bp, Cannabis indica
catacgcctttgtcttcgaacgtgaggtttactgcagcacgcagttcgtcctgatcatgatgtagagtgttgttatgaccctgcgtgagtctgagcgtgtcacgaagattttgtagttcggtggcgtctccgatggatgtctgggcattggttccaggcggaacaatcgtattatggatgccctggttgggtgcggaactgttattcccagtctcttgcacaccaggtgcaattccagtaataagaactatttcaccattccccacgcttcccgtctgtccgggattaacagcaggtagaacccttgaactctctgggtcctgtgatgtaggatccatcatctgtgaatttgctggattagacagacctctacgagtttgcaccatcgtattggcggttggatgtcgaataaagagcgatttgtgatccttctctcaatgaaagcaccaaaatattgacttcgcttttagccaacgacaatgagtctattttataagcgataaacgatatgtagtaacagatat

SEQ ID NO: 276792 - DNA, 547 bp, Cannabis indica
tcataacaacacacaagaaagatagaatttcgaaattcttattgagagagtagtgcccacacacagcaaacagtacctcaatcatagattggaagactgtgaaggatcaaattcaagagaaggacattcggactcaaatcttgattatactcggcaatagaaaggactcaagggttagagatctgagtggaaggagacatattattccacttcacccaatgtaaggttttcttaactttatatgtgtttactttttatcgttttagaagttcatatttaggttgttaatcaatatacttgtgagtagatctaagatcctggtaaaataaataccaacaactggcaccagagccatggtaattgatttgcttgcaagaaatttggacttaaaatgatttgtttgtgatttcggtggtatcatgttgttttgtgtgttgtattgatgattgattgatgtttgtgaaattcaggaaaaaataattgattttctgtttctggaattatttttattggatagtttgaaaaaaattaagcaatttcctttttt

SEQ ID NO: 276793 - DNA, 531 bp, Cannabis indica
atggcctcctcgtgcaactcatcatcaattcatgacatcgaccttactctatcaaattcaccaccacccaccatataatatatatatatatatttatatatatatatatcaaatttgctatatagctatatagctacattaattttctttcttccatgacaatgatctctttctgccttcatgtctccatccaatttcatgaatattccgcactctcaatggtccactttttaaattcctcaactacacaactacacttcatattattaatttattacttttttcattaattttcggtttcattttattagattgttttgaaaatttaggaatttttagcttcttaacttaaaattatttttatttttaaaacaaaaaaaataaaactaatatgagccatttagttaatttttaaaacagtttattaaacgttaagttttaaaaattagaaatagaaacatcaaatgttgttttctattttcaaaataattttttttgtctaacatattatattttatatttttgcttaca

SEQ ID NO: 276794 - DNA, 974 bp, Cannabis indica
ctgattcctgcatggcacgagctctcgatcgagttacagggcccgtgtaggaggtaagcttagcagttgaggtgacccttgttggtcggtagccctggagaaacatccagtcaccatgttctcttcggaatgagttagggcttgctttgggaacccttacactatcgcttctagccttctttgggaaggagaaaggcgtcctacacccttcatctaataaagggcgttcattgatctcagcagatgccccctgttgaccttggcggttgacagagattacgatcggaggcctaatcggggtgcctcctactaattccctcatttcaagagggtttggtgaaggtgaagtgtttgtccccctcctcccttttgttgccttcctacctctccgaggttgagaagtcggtgttgcctcagtttcctccgcagaggtaaccatcactgagacggtagtgggcaagaaaataggaacagaaccaatcaagatacgctcccattcctggatcattacgggggagccaatcttcgttggcctcccttctgtcttggcaacctttgctgcagaccttttcactgcccgggcttgcctctttttaaagccctttgctgccttgcctcttaaggcctgtgcagtcttagtgatgtttttcacacctttccctctgccagcctttttagctggtgtaggtgtcttcacattctttattggttcgggcaccctgcatgaaatgggtgctcgatcaatagagaatgctgccaaaaagcggctctttttccctccttgggcagaagaggttgttggtaacttgtggaagtaaaccgtgacttgtggtgccattttttcctgaaaacagtaaacatgattagcaccataaagttaaagttgaataatagtcatcatatttggagatgaaaaggagaatgggtcccaccgggcgtgccaaaaattatgttaagcaaaaatttcacattta

SEQ ID NO: 276795 - DNA, 747 bp, Cannabis indica
agtcgcgattggggtcgcgacttggccaaaggcaagtcgcgaccactggagcaaaaaaaattcacgagtttctgtaaaagtccaggtcgcgaccagggtcgcgacttgaaaaataggtcgcgacctaggaaccctcaggtcgcgaccactgggctccaggtcgatttttttttcacgcttttcacgattcaattaaaaagaaataatgtctggtactaatctaaaaattgaaaatactaaaaatactaaagcatactaaaaacataatcaaaaagtctgaaaaattaaagaaaacacttgggttgcctcccaagagcgctgtctttatcgtcatatagccggacgctgagccttgtgcttcaaagtggcgccagaatcatggcggacttggcttggtcaaattgacctcccaagtaaagctttaaacgctgtccattaactttgaaagttgctggaccaacaccttttaactccaccgctccataaggaaacaccttgaccactgtgaatggtcctgaccaccttgacttcagctttccaggaaacagtttcaaccttgaattaaagagtaacacttgctgccctggttgaaactccttccgtactagaccttgatcgtgccacttcttagttctctccttgtatatttttgcgttttcataggcttcgtttcgaaactcctctaactcattcagctgtaacaatcttttctcccctgcagcttttagttccatgttaagagtcttc

SEQ ID NO: 276796 - DNA, 898 bp, Cannabis indica
caatctccagcaatggcttcaagttagtactttcggtcatcttttatcatcttcttcttctttaatttaacaaaggttatatagaattatgatttagggttttttatattaaagcacttttaggaatatgtttagatctgtgatatatatttttcttgagtgttttataaatcctaacatttctttctattaaaaagtggagtctaaatagtcttttaaaaataattacatcatcatacaagctaggggtgtttatccgatccaatctgcactatttggctcatagtgcatctgatccgcactaggtggagattctatattttggatctaatacaatccacgtagtaactcaaatctaatccaatccaatccgtaaaagtacagattagattggttattttgaattggttactttttaatatttattaaaaaaaaattcatataactaacaacaaaataaaataaattgttattattttatgttttcaacaataaattaaaataaatgaaacaaaaaaataaaaaattcaaagaaaaaacataaaaaaaaattgtaacgtataaaaaatatctaattttattttaaattgtatgtaaaaaaatatatataagaataatagaatatacatttgatctattaaattttataatataattatattatatgtattagacttttaaattactattttctttatattaaaatattattgggaaatttttatatatatacattatatacattaatattacagaaaaaacgttaaataaaaacaaatccatgggtatgccgtgacacgtcatcaagcttaccgtgattagcttcaataattttggaaccaccggcgatgaaggagaggcgcccacaattccatatttctcggccatcttctagcgc

SEQ ID NO: 276797 - DNA, 963 bp, Cannabis indica
gaacttctcctttcttggaaggtttagaaccggatgcggaagcagacattttggtctgaaaaaaatcaagaaaatccagtagttacggaccccaaaccaaaccctaatgttcgaaaaaaagggagtggggtcccctaaccgctggaaagaggccccccttggacacttgccaaatagaaaatcccaagaggcttccttggcaagaatcggggtgcaaaaatcccaaaggcagtgacattgcacaggaaaaaagaaaaacgaagagaaaaggaaaaaagggaaaatccgaaaaagcaagatctaatctaagccctaaaggcgttattacgcaagatggggatgattcctcaaatagaaacgtaataacaaggagcaatctaaacgcaaagaagaggaatttaacgcatcatacagtaaactcaggcgaattcattcctagaagctcgacatccaacccagaaatcataaaacatgccatataaatgaacagtaagcaagtatacaatatacgaagaacttacatgaagtttgaaggctggaggttggagttgatcgccggtagaacgaagactggcaacgtcgaaggaataaaagcaagaaatctatgatgtttgaagcttcttttctctctgagaaaactcttcagaaaatttggtaaaatgctgaaagtaaccaaatgaagtaagaaggctggcttttataggccagaacaggtgtgagacagctgtgatcaaccaccatcgcacggtcaggatggcaatcgattcgaattctacagatccaacggttggattaaacactcatcaaggcggtagaaaatgtttgagtacccgtctgacacccatttaatgcaccgtatcaataaatggacagaaaacgaatcgttgtctgcaaaaaagcgaataattgcagtaatgatggtcattaatatgtcaccacgcgcccaaggcacgtgccgggaag

SEQ ID NO: 276798 - DNA, 809 bp, Cannabis indica
gccgtgtgctaagcacatcctggaagcagagctccccaagaactttaagatgcccgaaatggcagcttataccgggaactccgatccaagcgtccacctgtcgcggttcaaccgtgtcatgatggtcatgagagtcaccaatgacgccaaatgtctgtgcttcccacttactctaagtgggtccgcggaggaatggttcaagaaactggaaccaggatccgtgggctgttggaacaagttgcagaccaacttccggagacagtttttcgccgcaagaaaggtcaacctggaggtcagagccttgactaacatcaagcagttgcctacagagaccctaaaaaactatctaaagaggttccgagaagaagcctcgaaaatcaagaaagttgatgacggacaacagcttgcccttctccaagcaggcatccgtacagggactcccttctagaacgaactacaacaggaaggagcttcaaaccttcaggacttccagaaaagagtctaaaaatacatcaacctcgaagaggcccaaatagtggcctatggaggatactatcccaccgggatagtagggtatatgcccggagcccagccgtcgggtactgtcccgaccgcggctccaccaatgagcggcatacaattctctgctactctcggatacagtcagggccaggctttggcccccgcatcatcccattttggaaatccctcggggataaatggacaagctccctcgcactccgctccaaccgccagcctgccaggtccttcccagggctcgaggagtaaacgatcctccaaaggcagca

SEQ ID NO: 276799 - DNA, 534 bp, Cannabis indica
aaatcaaattccctatttttccctcttgtttcttaacttcctctctcccttacagaaacttcaaaaccattctcaccttttgctcagatttctaccattcatctaaagcatccttcaatctcagaagcaatcaagagtaaccgcatactatatttgagaaagggtgttctttctgggttttgccaaactaaaggttagtttcgagttccattgtatttcttgctttctatatttgagaaagggtgttctttctgggtttcggtattttggggctttagaaaatgcatgtttgtaagggatatgtatgaggttatattttttgggtaagaaactgggtagttttatgaaaaatgacctgtaatttggaataaccgcatactatgtaagaaacatttaaatagacactgttccatactttgaatactcgcgggtattcggatgcacagttcgaatactcgcacattgacagaacttatttacctatttagctagcttttttaggattttataagctgtgggttgaattgcgagagt

SEQ ID NO: 276800 - DNA, 741 bp, Cannabis indica
cagcctttctggatttgacgagcatgtcatccacgtacacttccatatttcgcccgatctggtctttaaacattttgtttaccaatctttggtacgtagctgtagcattttttagaccaaacgacatgactttgtagcaatagagactcatatctattcggaaacttgtatgttcttggtatggtggatacattctgatttgattgtagcctgagtaagcatccatgaagcttaatatttcgtgtcctgctgttgcgtctacgagctgatcgattcttggaagtggaaagtagtctttagggcatgctttgttgaggtctgtgaaatcgatacagactcgccatttcttgttcggcttgggcactaatacgggtttcgcgacccaagccgggtaaaaagcttcaattatgaagttgttgttgcgcaactattcaacttcatcttttagggctactgctcgttctttgtccaacagccttcgtttttgttgaactggccggaagttgggatcgatattcagaacatattgaaataatagaagggttgattccgaccatatccgcatgtgaccaggcaaaaatgtctaggtttacttcgagcaacaagccttttcaaatttttaattttttggtcgggatagctggatcgatctcgatctcttctaatttttccacaggtccaacattgttgcttgggtccccatgtcgaggatccacatcttcatcctcgccttgggaagtt

SEQ ID NO: 276801 - DNA, 702 bp, Cannabis indica
taaggattgtaagcatagaaaagactttaagggacccaaagtaaatgctatcgaggaggatatcattgctactcttagtgaggtgaattccgtgcaagggaaagtgaagggatggtggtatgatacatgtgccaccgttcatgtcacatatgacaaatcattgttcaagacctttgaagagtcaaagggtaaccatgagatccaaatgggcaatgaggtcaaatcaaaggtactaggcaaaggtaccattgatgtgtttttcacctctggtaagaaagtcacattggtgaatgtgctttatgtgcccgacatgaatagaaacttgattagtggtgacttacttggaaagcccggcattaaggccgtttatgaatctggtaagctcatacttaccaagtctaatgtatttttgggcaaaaggtactcttgtgagggaatggtaaaattgtgcaccaatgatgtaacttttaatgttagcaataataaagcatctagttccacttatataattgagcatgattctttatttttgtggcatcttagattagctcatattggtttttctactatgaaaagagttaaaaaatgtggcatgattgattgtgatataagaaattatggtaaatgtgaaacttgtgtaaaagcaaagatgattaaaaaaccttttccaaatgttgtgagaaattcaaaattgttagattt

SEQ ID NO: 276802 - DNA, 953 bp, Cannabis indica
aaacacatactcctgcaataagttgaattggatagttggatgtaggatttatttaattttaaattaattaaaaaaattcaaaaataataataataaaaaaatatattttcggttttgaaaaaaaattaaaataaaaaaatttaaaattaaaacctacaattttgaaaaattaggtttcaactaacctaaatatcatttcaaaaaatatgctaaccatcttttaaatttcatgttattttataaattaaatattcaataaaataaaatgataattaaatatccttttctgattttataatttaatttaaataaaaaaaataacaaaatttaaaagttagcaaaatatcttatttctattcaaaatatcatgattatagtaatcttattttaaatttaaataaggtcaaattatttataaaaaaaaataaaataattttaaaaaaattaatatctgaccttaaatttaaaaataagataaaataatcaaatttaaaaataagataaaaaaattaagcaaaaagatagatttttacctattttcaagttcaaattacactaatatcttaaattaattttaaaaaattcaaattaatttatttctgataattagatttgaaatatgaaaagtaaaaatcaaaatacaaaactacacaaaaaatcggaagttaattccatgaaacagcatgaaaaatcaaagaaaacgaaaaaaaaaaatagtgagctgtacggatggtatgcagttgcatactcatccgcgcgcgccactaggagatcagccgagaaatctcggcgcaagcctttcctggcatgatttctgcgcgcggaaaagggtatgagacacccctcggagtgtcgctcagaaaaaatcatgtccgaacacgcatctgaccgagagaaactcggttccgcgcgcgtggggttgggtgatcatcctatcttttttaaaactcaaa

SEQ ID NO: 276803 - DNA, 486 bp, Cannabis indica
aaaagcttctccacggtggcaaggccgcaaataaacggacaagcagaagcggtcaacaaaatccgaaaagtcaccctaaagaaaaagctgctggcctgcaaaaacaattggcccgaagaattgccaagactgttatgggcctaccggacgaccccaagaaccacaaccggccactcgccattttcaatagcgtacgattgtgaagcaatggtcccagtagaaacattattcccgtcccacaagagaacaacttacgatccagcaacaaacaaagctttattacaggaagcgtcggatcaagttgacgagctacaagacgagtctcaaatacgaatggcagcttatcaaaagaaggtgactaagtactttaactctaaagttaaaagtagaaaatttactattggtgatatggtcctaagaagagtcttcccagcaactctagaacccggagtgggggtactgttggatattattttaccaggatct

SEQ ID NO: 276804 - DNA, 990 bp, Cannabis indica
gcacccaatggaggtaatgtcctcaggttctcaatcaacaggggatgatagggattttaaaatggttacttatgtgaagggcctttatgctcttaatgattcatttgctgatcccgtatctcctgagattgaggcaaagtttgacgcgtggattggtcaaggcttgcttaaacatcctaggtgactatttttattatttctgtatttgtattctgttttatttttcaattttattttggttttaatattgtttttttgttgtttgtttgttcttttaggcattacaattgttatgttgatggtgcgaagaaattttccccgggttttagattaggtgttgattatgtggaggataaaacatggttttatcatttggctacttgcgacatgtttataaatgactcggtaaagtttctattttccattatagtttatgatagttggttttcagttgctttttaaatattttttaagtttagatactgtattaaagtttttaaacagttgttcaaccttttgatttgtgtttctgtcatgtttttgtttcagcatatgaacaccatattctattaccttaggaaaaaaggtaaatattcttccgctgttacattgaattttgcgacaactgattgtctctttgatgattccatccaagcgttgtaccacaagttcaacaaagccaaggcaatgaagactaagatgtcgcacattcatgctgcccacccaatagcgcattacatccgaggtttgcgaattccgtgttctaagccttggtatgaagtcgatcatgtgttattcatcataaatctaaggagggaaagtcattgggtgtttggtcgtcttgacttgaatgatgggattttgtttctttataattctttgaggactgccaaaatgaatgctgcagctaggaatgcaatgaaggcttattctgtgttgctccctttgttttttgatctccttggattctggaagaataggtcacatgct

SEQ ID NO: 276805 - DNA, 602 bp, Cannabis indica
actcaggctgaccggcacacttgagcacggaacgaggtaagatagcgtaagaatatatatatatatatgtgaatatatgcttgttttaatggtttggactactatcactaatatgaatgtgattattagggtgttagtatagtgttatatattagtgtagttacggtgttaccaacacgagtaccaggggtacgtcgtgttcgtggtacaacacttagtaaatcccgggggtacagttcgggctctaccaacacgagtacagaatcgatactttagtgcatttggtacagtagtcgtacttcccttaagaacgttcttatccatttggtgagcttaattattgagctcagggcggcttaatcataaagccggcatcgcattatttttatatatatcttgcataacttactgagtctgttgactcattagttcgctaccttgtgtaggtaaaggaaaagcaaagctggaggaacagtgagatggagctcggctgtgattgtacatatcgcggcagtgcagcctgaagggtttcggtcttttactattttggagtctgtattttgaggttgcatgttagcgagtttttttaaaaaaatattata

SEQ ID NO: 276806 - DNA, 847 bp, Cannabis indica
aagggttcaactaggtcttactttccaagtaagatctagcttgctaaatgttaaaaatggccaaaaattaacattcattcaacatttcatcacaactaattgaactaagccaagattacttcatcattgcaaaatcaaaacactagtccatacaagggttcataaccacccaaatctcaaaaagtttagttcatagctgaaattaaaaactcaaaactagaaaatatattgttcatggagttaaagagaacttgaagagaaggaaatgatacaaacgaagtagagagcaagggaaatgagtgatgagctcaaatcctttctttgaatgttgccttcttctccttcttctcaatcttcttcttctatctttgtactctttcttttcctctgtactttttctatccttgctgctgtattttttttcgtaccctttcaaagtgcagccacccttctctctattatgacctcctctttcctttttgctccccaattagggtaccaaagtttaccctaattggaaatcccaatcatcacccacttgtccttcattttccacatgtttgttgagtcaatagccaaattccgccacctcagctcgtttttcttttcattaaagccagctggactatctgccaaaataaacttactgggctgacaaattgctacgcgatgattgctatagcaatgccagtcagcaataatcatttttctgctcctttttctccttgtcccaaatatttccaaatacctattcttgtattttttctgcttaaaacacataaaaacaacaacataagtccatctaacacttactaacacacacacttccatttattacaaagacaca

SEQ ID NO: 276807 - DNA, 678 bp, Cannabis indica
ggattggatggctgaccgttggttgtctgggaagcattcaccgttgggtcatcctcggtttctccaaggggaatgacgctcggcgcttgttggcctacagtctgataggctcttcgtatcagcacagtggcttgccaactacgattcgatctctgcatggtgagcccttaatgcctccatctctttgtctctccactcggtgaacatacgcctctgctcgtcaaacgcgaggtttactgcggcatgtaattcctcctgatcgtgatgcagggtattgttgtgaccctgcatgagtccgagcgtagcgcggaggttttccaattcggttgtgtctccgatggtcgtttgggcattgatgcctggtggaacagtcgtgttatgaacgccctaactgtgtgcggaaccgttgtttctggtctcttgcacaccaggcgcagtttcagtaacaggagttgtcccaccattcaccacgcttcccatctgtccaggattgacagcgggtggaacccttgaactccctgggtcctgcaacgtcggatccagcgtctgtgagtttgttgggtcgtacaggcctctacgagtttataccatcatgtcgaaagagcgatctgtgattcttctctcaatgaaagcaccaaaatgttgacttcgcttttagccaacgacaatgagtgtttt

SEQ ID NO: 276808 - DNA, 493 bp, Cannabis indica
tgttggaagagtatcaaacgaaaaacaagataatataccgaccaggagtacccaacagattaaagaacgaccatgttcaaagaaaagtctaaactcaagaagtcataaagttttcttgagttagggcaaaaaagttcatgaagcttggaataagcaaaatggaaaacagacacaatgcagttctaaaataagccttacggctgaaagctaacacaaggatatggaaaagaagagtcgcagaagtttcaaaccctagggtttcctaaagtgttctttctacaacgaagttacattcaaagcgtaagcatgcaaaggaaaagcataaagggaactagaaacttaatcaaagattcgaatgtccgggttcaagcaagccagcaatcgtctgtaggcactttggcaactctgaagccagaaaattttctcttttcgctctgaaagtttacttaacaacgaagggtgatgaaatgaggtaatgtgccagtactccaag

SEQ ID NO: 276809 - DNA, 502 bp, Cannabis indica
tatatatagtatccttaccctgatcacttggttgatcaatacattatgagattggtatagttgacttattgttaagattcaacggaaagtaaatagtatagctacgataagccatgatagggttgaacttattttaaataggttattagtgcactttaagttttaatacatatatggtatagtcttaagtaaataatcattattggaatgtatgtttaagaggtttagaagttttagaggtagaattaagaagctgggatatgttttcgcgaattaaagaggactgcaatatacatgacatggatatgcctggaataattgatggtatgataagtatgaagttaagtgatacctcagatggctagtatattagaagaagcaaccattgaacataactatcagaatctattgacattacagattcaaacttcaccaatatagtaaggtaataccaaagtagataaaagttagtatagaaaactagctaatccacaatcaattc

SEQ ID NO: 276810 - DNA, 1186 bp, Cannabis indica
gtctcggggcggccgatggtacgtcccggacgtcgcgggcttgattccagccacctccacgatgttctccaactggtgagggcaagttagagtggagtgaagctcggccgcttcccatcccgtagcacgaggtttgtacccctcctgggcaacgggacccagcatgacgtcttctagggtagccagacgcttacccccattcttagaagattttgagccagatgcggacatttttttattctgaaaaagagttaaaattctagaaattaggtcccataccaaaccctaaatcaaaaaagggaatgggggtcccctaaccgctggaatgaggccccctccgtacaactgtcaacaagaaagccttagaaggatatcctggacaaaagtcggctgcaaagatctcacagatggtgacattgcgcatgaaagaaaaagaaagaagcgcagaaaatcgagaaaaacgaagtcttctctatgcccttgaaggccatcacacaaagagaatgagtgagcctttacaaaaaataacaacagtgcgtaacaagagtaaccctaacaccagagaagggaaatctagacgtattacgtaaaaactcaagggaatacattcccagaaacttcaaacactaaacccagaaaaacaagtaaatagtaaagcatgccatgaacacaacagtaaagtaagggatgcgagaaacttacatgaagtgttggaactgggggtttgctgttgatcaaacaaagaaatgtaaactgacagtgatgagcaaaggttagcaaagaaatctgtaaagtgtttgaaggttttctggtctgaggatttctttctctctggaaaactcgaagaaagttggcaaaaaaaggaaagtaaccaaatgaaggaaaggtggtggcttttataggccaaagtgcatgaggaacaggcgcaatcacctaccaatcgaacggctggggaggcgcacgattcgaattcccaagaatcaacgggtggattgattcgtaattaaggcggtggaaacgtttgagtatccgtctgacaccattaatgcgccgtatcaatcaaggggcatgaaacgaatcaacgcctgcaaaaagtgaatcactgcattaatggcgatcattaaatgcaccttcacgcgccaaaagcacgcgccaggaaaccgaggagtcaaccggaggcacatga

SEQ ID NO: 276811 - DNA, 506 bp, Cannabis indica
tcataactgaagtttaaagtttacatcagtaatgcaagttacattatttatctattggtagtagggtcacaaatattctacgttctagtagttctttattagcgagccattaagtcgagccaatttataaactcccactccaactactgcttcgatgacatatggaccctcataatttgggttgaacactcctgcagatgcgtctctcgtatttgcaaagactcgtcttagcagcaagtctccaacattgaacagtcttctcttgactttcttgttgaagtatcttgtaactcggtgctggtatgcggcgttggtgatttgcgactcagttcgtttttcctcaagtagatccaagaataattttaaaagttcctagttttcttcttgattataaacctctcttctgtgagtcgatatgttaacttcagcgagcagcattgcttccgagccaaatactagtgagaaaggagtgtgtcccgtagctatctttgttgggttttatgccc

SEQ ID NO: 276812 - DNA, 510 bp, Cannabis indica
gtttaaattaatcctttttgactatttctaatttggcccctcatcaaattagaaattgtctaattggtatccacatattaaaatcataacaatcatgcccttaagtcataaactttattccaaaatagaccacataaatttgacttatttatttgatgacccaacacacattttatatatacaattgtgaccccaattatttctaacaatctcccactgggtcacatatgtatacatataaatgtgttaaccttattgagctcataactttgtcatcataaccataggcatgtgcaatctcgtccattaactatccatttacaaccaatggcatcattccaattttaaatatccatttacaaccaatgggttttacaccttctggtaatgggacaacttcccaaactttattgtcttgcatagacttattctcttcattcatggcatcattccacttttgagagttagaacttttcatggcctgatgaaagttgattggatcatcttcca

SEQ ID NO: 276813 - DNA, 487 bp, Cannabis indica
aaatggaggatttttaaaaaaaaatgggctaaaaaggttaagaaatgggggagatatggtggtgaggagggggctgcggcgagggttttgctgggtatattgctctctggttttgctggttgctgagagaagtgggaaggaagaagacgatcgaacataatatactctgaacgaccctatagcgtcggttccttcatagggaccgacgacatagggtacacgtgtcagcaaactgtaaagaccgcttagtttaatttggaaattagcagttaatcacgtttaaatatgaaaattatttatagctatttaaatagttatttatactgttattattgaattctgagatgcattttatgtcagttagtagttttcataattttgcaagtatcatggaactcggtgtttggctcagtaaaatcacaacttagtatgttagtagattgggacggtttattagaccttgagaatgtcgggaatggccgggaat

SEQ ID NO: 276814 - DNA, 518 bp, Cannabis indica
ctatccaacaaatgcctaaatcatattcctattgaatgttgtcaaggatttcgcctcaaaagaataagacatgcaagttctaagctatccagtcaatcttaccacaaaccatagtaaaataattataacatatttcacagatcatcaaattgcattcttacaatgttatacaagcatccaaactaatccaaagagttaacagaattaagcacacagttattttgcaatttcagagcacattacaataaacagcagcacacaattatcttctagctttttgcccattcctaactaaaaacagaaaattaaagcagaaaattaaaaatgcagaaaataaattttttaaatccctccccccaaactaaagattcacattgtccccaatgtgacattaaagaaaaaggaaaggaaacttacctgagcgccacatcaacaagcggttgacgcccgtaataagcgtcatgcaagacaacttgaaaattgttgttgtacttgccttcaagcttggcaagtgatga

SEQ ID NO: 276815 - DNA, 653 bp, Cannabis indica
gtttgggatcgggtcccagatttaggtgcaggtccgggtctcaattcgggtctggttacacgatcgtgtccgggcccgagttcaagtctcagtttgggtctaaggctagtctgtgtttggttctaggtctgggtccgggtcctggtcacggtcttagtcttgttctagggtcctggttcgacaattcttgtttaagttctaattttggctcccaggtctaggtttgggttcgaatttagttcttcgtctgtgttctggtcctagtctgagtcccagatctagacatcgactactggtctgttccagctcccgttacccgaatcctaagtcaagatctggatcactgtcactggtctcggtctggttctggttcaggtcccaggtcgcatttctgagtttgggttcgggatcgagactggggtgcggttctaggtcctgaccctagttctgtgtccctagtcttgttccttgtttggttccatttgcgattcttagttcgagtttaagtttgagttcggatcggagttcgagttctggtctgactttggattctgtatggatttcagtctaggtccagatcaggctccaggtgtgggttcgcgttttgggtcttggtctaggttgggccaaattcccaatttccaatcccgatc

SEQ ID NO: 276816 - DNA, 644 bp, Cannabis indica
acctaaggtagaaatttacacaatacacttgaaaatagatttttcttttatacttttaaggtttttttttccaatttatattttttacggaattcttttttcttcaacagtatttttatactttttttagagaaaatgttaggtttataaacgaaaaataacactccgtagtttttcttaataaaaaacttatgttgttttcccgtagcagctttatcaaaatataatattattttgaaaataataggaaatataatattttagttattttttttttaaaaaaatcctaaaaatgtaataaataaataaatctgtaaagatgttaattttttttcccttttttatattcatgaaatttggtaattcataaaaataccataaaagtatgtatatttttgtaaataattttctatatttttgggcctcatggagtgggtcaataggcacaaatcaagtgtccccatccatgaaagtcaagaagactacaaagtagtcaccccaccacaaaatctatcaactccaaaaagtgccaattgaaaaattaaaaaccagaacccatacattttttctttattttttttatagaaaccagaacccacacactttaggaggcgtttggttaggaggaatgaaaatataggaat

SEQ ID NO: 276817 - DNA, 598 bp, Cannabis indica
ctcttctactgaggggcccctatggacatactccatgtacatcgcatagaaggctagggcagtgcggtagctgtttggagttagctgaaaaggcgatacatcatatcgcctgagaatagctgcgatgaagggatggaagggaaccgataccccacaccgaaggatgggtattgagactaccacatcctctgtgggaatgatcgcagggttagtaaacggaagatgcgctctctgagacggtttaggtcgctgaaacgcgagtcgcagcaaatttaacctcacaaaggtggtgaagtctgatttggaaaccctcgaaattaaatcctcacacgcgaagggctcattcagctgggtatcgtcaaccgaatctgtcccactcccttccgcctcctcttcgtcctcacctgactcgcgaactggggtcgtccattcatcgtccatctcctcgacctcgatgtcaggagcatgcctcgagtggataaggtagtcgcgggccgacaccgtggactcgctgtctcgaatgtcgatggtcccaggttctgcgagttcctgcaccatcttttcgatgtccacagaagacatcgggcctagctctatt

SEQ ID NO: 276818 - DNA, 635 bp, Cannabis indica
ttagaaaattcatatttagaatgttagattatagatcattatcaaacatacatgttagtaaatctagattatggtaaaataagtttcaacacatacactatcattaaaaaaaattgactaaaaaactcttctgtatgctgaatcaaatatgttatcatgtatgttgtagctatttaggatcatttgtaaatttttcaaaaaattctgaatagtttacaatgtcgaaattaaagtttaaacagttagttactatgtgtataagaaaaacagtcgcaaatactacaaaatatataaatcttgttttcgatattttaaactatttaaaattatttaacaatttacaaataatcttaaataactattacatacaaaattattaaaaaaaaactaactaatttttttttagtttaaatagtcttaggagataaaagtttaaccctaaaccacttctttaaataggtgtaatctaaactaggggtggtgcagaaagtacatccaatccaattctaaccgaccgatctaatataatcggatatccaatcataattggatcggatcggatgcaatttaaaactaccaacttggatcggatcggatgttggatgagacatccgatccaactggataactgatcc

SEQ ID NO: 276819 - DNA, 435 bp, Cannabis indica
aaacaaaaaagtgcatttcaattaatctcaacgccctgatatcgagatcaagtgtagtatgtagtagtctctccgtaataggatctgacaggttgtattcaatacaatctttcctccaccattacatttccttaatcacaaaatccttgatattgtgtaattcctctctatatgtctactcctctagggatacttgattctttactttttggcaactacttttgtgttagtcaggaagtaacactagtagttcataaattgttggtacaatgccaaaaactgtatagaacttcccatagactgaataagtacctttcctgcaactttaacattcagcctctcggtagacttagagacttcagataggtttttacacttccccaaaatcactactccacccccacagtaatcaccatctcatcagcggactttcta

SEQ ID NO: 276820 - DNA, 409 bp, Cannabis indica
agctgactactctattcaatgaatgattacgttcactctgacctaccgggacattgtatcagtttgttgaaaaccttggaaattatttaaaatgtgtttgttttgtattttcacatgtctttatttgctaaatgcttaataatttcttgattgtgtgtgaatttatattgaaccatgttttttctgttattaattgtagttgtaaatttcgtgtaaaataagaataactttgactctcgcctaccgggacatcgttggattcttattttaatccaaattatcctttatttttcctcttagctttctcatttcgaatttgctatgataatatatcattggatgaatggtttatagctcattttcttatgatgtcattctattttctcttatgaaattgaatgacgcagat

SEQ ID NO: 276821 - DNA, 554 bp, Cannabis indica
aacggagctaacaacgggtccatcaatattggaatgatgagtgtaccgctgtctggagccggagtgccacctgtggacgtcattaacggcagagtagggagaagcaatatcagacctctcaacctattcccaaaaacaactggccctcaagtcggggacacgtccacgccaccagcaaccatgcattttccccccgtcactccggcggtggtatccgagggaatggtccagctcaccactgatcaatatgctgcgattcaggatcaactgcgggcactacaagccgaagtagatggacagagtcgagctcgacgccctcctcgagttcccgccattcgcaacgataaccctcaggtaacaacttctagacgtcatactaaccgtgtacgcagggaacgaagaactaaccctgaagctctggacctgaaccatccgatgtcaagggatcaatccgcaaggtttccaaaccagagcgcacaaatcgacgaagatcctgagcgccgtaatcctcgcagccgaccatcgagagataacgacgcagaatcagcctcttc

SEQ ID NO: 276822 - DNA, 471 bp, Cannabis indica
ttggatatccaattacaattggattggattagatgctaaaagttagattctaattggattggattggttattagatgtcaatatcaaaatccaaattaaaaaccgatccaatccaattacatttatatatattaaaaaattatttatataataaaaaatattgaaaaatataataaatatttattatatttttattagattttttttgtatgttgaatttgtaacacttgattgtttagtgtatttattttcatgatgttttgttctattttattacttagaaatgttgttgttttgattatttaaaacttttagctacaatacaattgtaaaaatagtatgtttatgaagtattaaatttaaaaaaaaaaatgatactttgtgttttacctatttttctttatatttataagctaatattaaaatttaggtctgtaattggatatccaattaaaaaaccgatccaatcca

SEQ ID NO: 276823 - DNA, 591 bp, Cannabis indica
tcaaaagttaactcttattgatacaaaggtaaattaatttatttaatactcaattgaatattaaatattatttttttaatttcataaatttaattgaaattgtatacttactttaacacagggaaataaagtagaagctacaatttttgaatctgatatcgacacttggaaagatacattaaatatgtatcaatggtattacatcagtaatgcacgtgttactaaagcacatgaccattttaaatacaaagattatccataccaatggataatcacctgtacaacaaaaatagaagaatcgacaaaaaatgaagacaaaaaccaacaaccagagtacaaaatagtcaactttaatgacttagacccctacatatcttctaaagaagacattggtaattatatattaatatacttaatatattttatttttatgtaaattttttattaaatctaaacaaaattaataatcaaaatgcagatatattagccgtcgcaatacaagtcaaggaaccgaaagatgtaacaacaacctatggaataaaaagaatacaagaaatatatttgattgataagaggtaaaaaaaaaacttg

SEQ ID NO: 276824 - DNA, 338 bp, Cannabis indica
aagatatggcttgattgtgaagaaatagtgtttttggggtttatttgttaattaagagactttatggagtctaattaataaatattataaatgacaattttatttgatagttattttaattattaaataaatagttttggtatttatagggttgaaattgtaaaaagtggtatttatgaaaaataggtaaaatagttgggaaaaatgacaaaacccaaactggagtggggcacattaagtggccgaccatcaagtgaattttgaccctattttatcatttttttattcctaataattcaaccctaaccctaaaagaagtagtatataaggatagctaa

SEQ ID NO: 276825 - DNA, 513 bp, Cannabis indica
aaatggaactagaaccgaactaggactaggaccaggaccaggaataaacctaaacccgaacctagagcaaaaccaagaaagagaccttaacccgaaccgagactaggactcaaatccgaacctagaccaggacccaaacccacacaataaccgggacttggaccatgaatcaggatagggacttggaaaacagaactaggatcgggacctagtacccgacccagacccgaacttgaaccaaggacccaactcgtgacccggcataagaaatggaaccaaactgggacccgagattgggattcggatatggacccagggcttggacaaaacccgtagtcggtgtctggatttgggacctagccctggacccgaaccctgacaaggacccgaactcacacctggacctgaacccagtccctaacccaaaagtggacccaaacccgtaccgtgtgacccaaaattcgaaccaaaaccagaagttgatcgggactggaactaggacttggacttgga

SEQ ID NO: 276826 - DNA, 631 bp, Cannabis indica
tgtattttatgatggggaccatccagctgggttcttgcccaaccgttagcgtggtctcttttattttgatgcttggctctgccaagcgttccactggtactacccccagctcttcgatttcgctatctgaggctaacttagccagacagtccgcgtgagcgttcttttcccgggggattctttctattttgtagtccgtgaactcgtggagcagctcccggactattgttacgtacgcggccattcgctcgccgcgtgtttggtattctccggatacctggtttacgaccagttgggaatcactatagacttccactcttttggctcctacagcttttgctaatttcagccctgctattagggcttcatattcggcctcattgtttgaagctgcgaagtcaaaccgtagggccgcctggagtcgcagtccggttggtgatatcatagccactccggctccggaaccgttttcattggaggctccgtctacaaatactctccatgtggggattggcggtaccggcgtattcgcggttgcctcggcttcgttgcattcagtaatgaagtccgccaaggcttggccttttatagaaattcggggcatgtagtgcaagtcgaattgacttagctc

SEQ ID NO: 276827 - DNA, 537 bp, Cannabis indica
ttcgtctgggttctggtcctagtctgagtctcagatgtagacaccgactactagtctattccaggccctatcacccgaatcccgagtcaagatctagatcacaatcacgggtctcggtctggttcttgttcaggtcccaggtcccatttctgagtttgggttcgggatcgagattggggtgcggttctatttcctgaacctggtatcgtgtccctagtatggttccatgttttcgtctgagttcaggttccagttcggttcctgagtccaggtttggggtgggatccgggtccggctcccaattctggtctaggtctgatttggagtctagatcctggtccggttacggttctggatctaagtccaatttcagttattattccaagtccaagtcctagtaccagtcccggtcaacttccagttttggttcaaatttttggtcacagcgtacggtttcgggtccacttttggttttgggactgggttcaggtccgggtgttggtttgagtctgtgtcgggtactaggtcccggtccta

SEQ ID NO: 276828 - DNA, 509 bp, Cannabis indica
atatttttaaaatagggggacccatgttaatattacttatcttttatcataaagcagtttttatatggttaattttaattatgaaaaatttaattacccagaattttggtataaatatatagtatttaaataagaattttataaaaacacactcacgtggcgtcctgttggacagagcgttacaggtaaactttgcgaatgccctggaaaggacataacaattatccagtctaaatctagattatcacgccagtctaaatccagtgaactgacaaatcacgggaattaaacttttgaatagggatgttcgcggtgcgggtggtgcggtttttaaccattttttcaaaccaagccgcacatgcggtttttccaattttccaaactgcactcgcatcgcgatactaaaaaactgcaaaaaccgcaccgcaaaaaatgatgcggtgcggtgcggtttttgcggtttgaactatcacaattttttttttgaaatcatcataaaataattaaac

SEQ ID NO: 276829 - DNA, 564 bp, Cannabis indica
tcttcggagagcccaggcctttgcctcttacgaccgggccgatcttgacgtcgggggtctggtcactacggagaactgcaggaaggcaaaactcatccttccgcatcaatccgtggaggactctaacctttcccgggtcatctgtcccaatgtgagggcgccggtcgcggagaagaccttccgggacgagatcatcgccacggcagagaagaaataccaggagtatctctaccggaaggcccaggagaaggcgtactctaaggcccaggcggcttccgggaggacgctccgcgtggggagcccggtggagagaaggagtcaggcgattgccgggaagccccttcacattggggattcaacggagagaagggctcccaggccacagcctttggttccagagccgaacactggggctcctggtgccagcacttccggcgccggcggtaagtctcctttggtagttcattatgttccttctgttggcgagtatgccagtcttaggcccgtagggttcgacgagcgtctgtataggtttaggatgccctcgacccggtggggggatca

SEQ ID NO: 276830 - DNA, 159 bp, Cannabis indica
atctaagatcctagtaaaataaaattccaacaactggcctcagagccatgataaatggatttgcttgcaagtaaatttggtacttaaaacgatttgtatgtgatttggatggtttacattgttgatctatgtgttatatgatgattgtttgatgtttgt

SEQ ID NO: 276831 - DNA, 651 bp, Cannabis indica
tgttaaaatttataacctgaataaattaacaccacttaggttactgcaaattaaattatcacctactttggtacaaagaatcatataacatattaaatcaaaacattacctgtcctgagcaacgcgaatataatgcaaaaatttgttgaattgtatgcaaagaaccctcatttgcatctaagaagagtagactatcaccgacaaagaatagatggcttatactgggagcctctcttgcaactttcagcccaaaaatttctttctttgattctgcctgcttaattagcgaggagagtccctccgcacatattaagaaaagatagggagaaagtggatccccttgtcttaaacctctcgttggcaccacttcaccatgaatagagtcattgatttggaatgaataacgaacagatgaaacacatttcaagactatattcacccattcggtcttgaaacccatttttaacatcattttctcgataaacttccattctactctgtcataggctttactcatatccaacttcattgctacgtaacttcgccttccgactttcttgcttttaaattatgaaggcactcataggcaataaggacactatctgttatgagtcttctcaggacaaaagcactttggttctcactaattaa

SEQ ID NO: 276832 - DNA, 874 bp, Cannabis indica
actcagaatcgcaaatggaactagaacttaactaggaccaggaccaggacctaaacccaaacccgaacccagatcaaaacccagacagagacctaaacccgaaccgagactaggactcgaaaccgaacctagaccgggacctaaacccacagaataactgggacttggacccagaataaggatagggacttgggaaacataactaggaccgggtcctagtacccgacccagactcgaacttgaacataggacccagcacgtgagttgacaccagaaatggaaccagactgggacctgagattggtatccagatctggacccacggcttggataaaacccgtagtctgtgtctggatttgggaccctgccctggacacgaaccctgacgaggacccgaacccacacccagacctgaaccaagtcccaaacccaaaagtggacctgaacccgtaacctgtgacccaaaattggaaccaaaacctgaagttgacccggactggaactaggacttggactaggaatcataactgaaattggacctagatcaagaaccataaccggaccaggacccggactccaaataagacctagacccgaattaggagccggacccggttccaaacccaaacctggactcaggacccgaacccgaacctgaactcagactcaaacatggaaccatactagggacacagaaccagggtcgggacctagaaccgcaccctagtctcgatcccgaacccaaactcagaaatgggacctgggacctgaaccagaaccagaccgagagccatgacagtgatcgagatcttcacttaggattcgggtaaaggggcctggaacagaccattagtcggtgtctagatctgggact

SEQ ID NO: 276833 - DNA, 723 bp, Cannabis indica
gatttaggcaaattttctttggatcgattgagccttccaagcctacctaaaagttttatccttagtatacccaaagttgagccttagcctattttaaaaaatttcaccacttaactaagctgaattcgttatctttaactattttccttctcaacatgccttattatgccataagctgttaagcaagtttggggggaatgaattgttgtaagtggggaataatctttgagagtaagagattggaaattaaatagttgttatgtgttgtgcctctattgaaaaaagagaaagaagaaaaaaaaaagaaagaatgacatgtgataatttcttcttgagaatcaattgtgaacaatgaggtaggcacatagggaaaaatatgcaatctcttactattgtctttgggatatatgaaaaaaaaagagataagtgcgggtgcttgcttggttaattgtgcttatggtataacgtagcttaaatgacttgtcacctacccatgtacctaagccacgttgtgataaccgaaaaagacctattgattccaaagaaaaatttgtcaacattagtggagagaggtatgtcatccaaacttattgatcatgtgttagtggaatgtcgggaagtgtagaatggttgtgatatgaacgtcaaaagcgatgttttgtgtctgtatgaattgcttacttctgaattgtgcatccaagttagttcttagagttagcaagt

SEQ ID NO: 276834 - DNA, 556 bp, Cannabis indica
aaccgtgaaggtctctcccccacttcatctgttggcgtcctcgataacatgcccacacgcaaatgcctgaccgccccaactcttcatgcacaccatgtcatctaaaagtgcatcccgcaggatgtgactctcgagtcaactatctcattagcacccctgtcgatttccacatgcatgcactaacttcccactcaaccatccaactgattcacacttgcatcacgtccttctggctcccacggtatactaagttccaatgatgtagccctctggccatcatgcaaactctagtacccttctcagccctgctggcttccttgatgcctttattccacaactccgcatctctatcgatgtctttgtgtgacttacgccctatggcgatttaacaagccaacacattccactcaactgcctcggcgcttccatatggatcaaataaaactcgcatgcgaacacctccaagtacaaccatcctctgacgattgcggcctctgcctgccttggtctccatgtgcgtccctcttgacacacaacgtagcaactgaagcattcc

SEQ ID NO: 276835 - DNA, 667 bp, Cannabis indica
cacgagggaaatcacagtaatgatcgtgataaaaggggaaagcaagtggtccaaaataacaacaatggggtgaaaaggtcctatgtagaatttccaatttgccccacatgcaataggaaacatcttggggagtgtaagatgaagtcaggggtgtgctacaattgcgggcagccaggccatctgaagaaaaattgcccaaagggataaaagaaggagaaccaagtcgctcctgctcgagtgttttgctctcaccagaggagaagcgtccacaagcaacactattgtctcaggtcaggtttctattttacggattgccttgtaatgttctctttgattcttgagctactcattcttatatagctactagggtaattgatagtatagataaaccatgcgacctacttagatgtggtattgtgacggaattaccctcaagagaaaccgtgctattaacaagaagaatgtgagatgtacctatcatcatcgaaagcaaagaactcatgggcgacctaatagagctggaaatgaaggaatatgatgttatacttgggatggattggctatctagtcacggcgcgacaatcaagtgtcgaaagaaactggtcgtttttaaaacaaaggctggggatcggtttattttcaagggcgacaagctggcccttaggac

SEQ ID NO: 276836 - DNA, 253 bp, Cannabis indica
aacctaaaatagcgagtactcgacctgggaatgtaaatacttaacaaaaaactagaaataacaagaagacaaaggataatagtggttcagtcagatcacgttctgcttagtccactatagcaagaagatgtctgcgttcttagatagtcgcatttatggacatcgtatgacgagctgataaaacctagacatgcgagtctatattggtttatagaggctgttaggtcatcaggaccagctcgcactatagaga

SEQ ID NO: 276837 - DNA, 526 bp, Cannabis indica
cctttagtgttatttatgttattttaatgaggaggggcaaaatggtctttttgccccaatgataatttgtcctttagtggacttagtaaatgaattttatgtgtttattttaattatttgttggctgaaaagaatagttagaatcccttattttatttcattttacttttcaaaatttcaaagttagagaaaatagaaaaatttggaaaactctctctctcttttcctctctctttcggcctcttggtgcagcaaaggaattggattttttcttgtgatttcatcctcttttgtgttcaatctaagctaggttagctcctcatctcttcttcttaaaaatttgttgaattttgatgaattttgtgtgttgcatgcttgatattttggatgttgttgctgctgtattttgttgatattttcagagatgtaagcatgataatttgaagttatttaagctgttagtaatgcatgatatttgctttgtttcaagcatggaatttttagctcaaaaatataatttttcaaa

SEQ ID NO: 276838 - DNA, 478 bp, Cannabis indica
ttagctagaaaaggaagttggaagaattcgagacagtggcactcactgaggagtgcagtgcaattttgcaaaagaaactaccgcccaagcttaaagatccgggtagtttcaatattccatgctctatagggggttcggtggaaactaaagctctatgtgatctaggagcaagcattaatctaatgccattgtctgtcttcaaaaggctaggattgggaaaagcaaagcccacaacagtgactttacaactagcagatcgttctttgactcatcctcgtgggataattgaagatgtactggtgaaggttggtaagtttatcttccctgctgatttcctaattcttgatatggaggaagattcaactattcccattattttgggaagaccattcttagccacggggcgagcattaatagatgttcaaaagggagagttaaagttgcgagtgcaagatgaagaggtcaattttaatgtttt

SEQ ID NO: 276839 - DNA, 531 bp, Cannabis indica
tatcaaggtcattggtactgagttcctgtcaagacatcccagaacgctatgatttaaaacgtgtttaaatacatgatcattttgacccagtaacagcggattaatcacagctgtgtgattttcgaatattaaccgcatttatactacgtgatatgtaatcaaaccccacgattttaggggataaacattgtaaagattacggtcaaatctgtaattaactgcctactatgtgattataaatagaggcaagttagattaaaaaaggaacgaaaaaaaatcataagtgaagaggccctgaaaaatcatcagaaatctaataagattgactcgtggactatgcaaaattttaactgtaaaaccacgtaaaaaattctttgtgttcaaaccttttcctttactgtttttatttttctatgtgagattatcactcttaggctcatatttagttaacgaaaatctacgttaacagtttggtgctttcattgagagccttcgtgaaaaagctcagaaaaaaccctccttttgtaaaaa

SEQ ID NO: 276840 - DNA, 636 bp, Cannabis indica
attgatacggcgcattaatggtgtcagacggatactcaaacgtttccaccgccttaattgcaaatcaatcttgttcgttgatttctgagaattcgaatcgtgcgcttcccccaccgttcgattggtaggtgatgacgcctgttcctcatgcagctttgcctataaaagccaccatctttccttcatttcggttacttcccatttcttgccaactttgctcaaatttcccagagagaaaaattctcagacccagaaaaacacctttaaacactttgcagttttctccagttcttcttcgtttgttactgttagtccttcttgtcttcattcgattcacagcaggacccccagtctcaacacttcattgtaagttctttgcaccctttgcttcattattaatatgcatggcatgctgttacttatctgtttgttcttttctgggtttgtattcgaagtttctgggaatgcaagtgtttaaatccttcatataatcggtttgagtttactgctctagtgataggattactgttgtcacgcatttgttgttatttttgtagaagaccatacgttcttcgtataatggtcgcttagggcataggatagactgttttctttctattttctgccttttctttt

SEQ ID NO: 276841 - DNA, 399 bp, Cannabis indica
aaatcagatacaagtcacactgtttttggcagatatcaagtccatatacatgatcaagaacctaaagagcagccaatcaattcaactcttctagctttcattttttacatattctcatttgtgaagagagagttctttttgtgagaacctagttgttcatctaggttttagtgtttatatatttgttggttagaacatcttgattgaacaagagaaaggtcttcgggagaagacttgttcaagccttacttcggtaggaagtaagcactcacaccttaaagacgaaaggagttcactgtttgatggtggttcagaaatcagattcgtgaattgtattacaaaggattacgacaaaaatttagagggagtctaaacttgtataagtcaattgtctttgta

SEQ ID NO: 276842 - DNA, 528 bp, Cannabis indica
tatcaaagtaagatcatttaaaatttaataaaaaaataatatctgatcttataattaaaataaataaaataatctaaaatttcaaaattaaccataaggctcctttgtaagaaatcaaattttcaaaattcaaagcctactaataatagaaactaattttaattaatttaaaaaaaaatttaatttattctgacaattagatttttgattgaaaatttagattctacacaaaattctaccaaaaattagcttttgtttcaatgaaaaacggtttttgaatcaaaagttatgaagaaaacaagtttggtgcacaggggtatgcattgcccatttgaccgagcatcaaggttgtatgcagcctatcttaccgagggacatggacggaatagggcaagcttcggacatgctagttgtttgaagcgaattttgtccgagcgagccgcacctgtcctcatgcgcgcgtgtatgcatcccgaaaccagatattttcattcatattaaaaaaatcataactaattcataaaaaaa

SEQ ID NO: 276843 - DNA, 701 bp, Cannabis indica
cctccgagtgtttgttgatcagagacttaggtctctgttcttataggagttgagtctagtgatgccattggtgcaattggaactcggaaccgactttgagcaacactgggagtcgtcatggtagccttcagtgactccatttgtgattttattgtggcattttcactcctaaatgctgcgttctcctccttaaaggttgcattttctcgctccagaactccagttcgctcagccatctcgcgcatctgggccattatcgtggcaagctgttcattgacattgggttgttcctgggcaacaaactctccttcttctgccatttgaagtgtggtaatgatagatcgccttgctcacagtcagtttgtcagggccccacggtgggcgccaaattgtagatgctaaaatctacaatgatcggaatgagcgtttgtgggcaccgacaacctgcggaacaaagacaaaggatgaccgtgaaaccttgggacaccggggtggtgccggccgaaggcactccgacggtcaagtcagtaaatttatagtgcgaagtagaaaagaaaacaagaaatgtaaataaatacttcctgtgtttatggttatgtggtgatccacggtcaaacctcgctcaccggaatgagaaagagtacgtcagatcgtagagaaatgataagtttagtagtaaaactatagagagagagagagag

SEQ ID NO: 276844 - DNA, 685 bp, Cannabis indica
tgtggttagattttgaatgaagacgattcttgattctatctcccaatgaaagcaccaaaatgttgacctcgcttttagccaacgacagtgagtcttatttagtaagcgataagtgatttgtagcaattgagatatagtaaagcaatgtaaagacataagaattttatagaggttcaaccccaagcagttcggtaatagcctaatcctcgttatttgtattcactcaagaacaaggagaaaggttccttttcttatagctcttacaataatatctctgaatacaaattcttagatgatatctctagggtaaaatctctcgacccctttgcccagtgagtatgcatcagtatttataaggccatgaacttggaaaggaagtatttcccttctcgttaccatggatataagcagaaagattgcatgataaatgcagaatacactaatcgtgggatttggacagcttgccatatctctgtgatctgatccccaagttatagggatttctttgatgactcatgatgcgaaagctgaattcactatgggttgatcgctctgcgcggattgctgatgactttgctccaggcatgcctatgaggcatcctgttcggactgtactttctgagcatatactcaaagttgattccacgtgtcaccatcatatgatgccacgtcagagtgcaaaaat

SEQ ID NO: 276845 - DNA, 570 bp, Cannabis indica
cacaccatcaaagggaaactcgaagaacgtaaggggacctggccagatgagctctcgcaagttctttggtcttacaatacaactcctcgctccacgactggtgaaacacctttctcgctttcctatgggtgcgaagccatggtaccagtcgagattggggcaggttccctacgaagagatgttttcaacatctcgcaaaatgaagaaaaacagtcactctaccttgatcttctggaagaaaaacgcgatcaggcgtacttaaaaaatgcggcttaccagcggcgaaccgcaagatacttcaattccaaggtcaaggcaaaagtcctgcgaacaggagacttggtccttcgaagagtaatgccaaataccaagaacccagcgcatggggtcttcggggataattgggaaggaccatatctcatcgcggaaaagattggtgacgcaacatatcgactcgcagcactcgatggtactgcgattccacgagcttggaatggcgaaagcctaaaattctattatcaatagtactcgcattatctaatttgtattcgccttgtacttatacttagt

SEQ ID NO: 276846 - DNA, 540 bp, Cannabis indica
ttttaattaatcacgatttccataaacctcgttgattagcaacgagctgcacagtatgtttaaaaatcacgtaatacgcctatgctagttagggtgttacaatttggtatcagagccgccaggttgtcttccgaagatcgtcacgacatgtacaatcatcatcagcagttagctcgttctacggttcagtaagcttttattgctttagtagtttatttaatttttatgaaataagaaaagcctgataggaagcatgttagtagcctgatagtagaataggcgcatgtttttaatttccaaattaagcggcattagtaagctctctatgatcatgacctgatgtgccaactcttggtttcgcaggctgttcagactagatggacgccaggcggaacaccaggagtcagggcaactcagtagggtcaaatcagggccaaggagctcagtttcccccgcatgctaggggccggggtagaggtcccacgggcagggcccgtggtcggggtgatgataacccgccaaaggctgcccaggctgctc

SEQ ID NO: 276847 - DNA, 465 bp, Cannabis indica
gtggttttacagagtaaaaaagaaaaaaaaacccattctatgccctaagcaactgttgaacgaagaacacatggctctcttcaacaaaaatgcacgattataacagaggcatgataatggcggtcctacaactaaagcagtagacacaaaacagaacacctgaagaacctcaacactcgcacacccagaaatctcaaagtacgaacccagaaaaacaaacaaagcaagtaaaagcatgtcattatcaaaggatgcaaaaaacttacagtaaattgttgaactgggggtcctgaatgtggtcgagtaaagttgagaagaactggtgaaagcaaacactggaaaagtggaagaaatgtctaagtgctaagacagttcgtgctgttttgaagaattttctctctgggaaattcgaacaaaaatggcaaggaatggaaagtaaccaaaatgaaggaaagatggtggctt

SEQ ID NO: 276848 - DNA, 552 bp, Cannabis indica
aacagtggctcaatctcttcctacatatgctatgtctgttttcttgttgccggtggaaacctgtaataagctagagggtatgatgagcaaatattggtggagttcgggatccaatcagaaccgtggggtaagttgggtgagttggaggaagctgtgccgccataagcatcatggggggcttggttttcgagacttaagggatttcaacttagccatgttgggaaaacaagcttggaggttagttacaaatgctcattctcttgttagtcgggtatataaggcccgatattatcctcagggttcttttttgagtgcttctcttgggccgaatcctagtttcatatggaagagtatttttgaaacgcaagctttgattaaggagggagctcgtcggggggttggtccaggtacgaatattagtgttcaatttgacccgtggcttgcggatgagtctcaaccgtgggttacttctagagctactggtatggagacgtggacggttaataatctcatggtggtaggagaacgggcttgggatttagaggtggtttc

SEQ ID NO: 276849 - DNA, 514 bp, Cannabis indica
ggggatagttgtaaagaccgcttagtttaatttggaaattagaagatatttaaggtttaattatgaaaattatttattgatatttaaataattatttatgttgttatatttgaattctgaatgtatttttatgtcatatagtgaaatttcataactttgcattttcggtgcccagcaacatggaacgcggtgtatggctcaggagaatcacaacttagtatttttagtttagtgggacggttcatttagacattgggaatgtcgagattagtcgagaatttagagttttcccaaaatacccttaagtgcttttaacccttttagtgtgggaggggcaaaattgtcattttgccccataagcctttgtccttttgtggacttaaatttggtgataatgtgatttacgcaaggttatttaggctgaaataaagaatagattatgcattttcatcatttattcaaaaattggaaatattgaaaaaataagaaagtttctctctcaagagctctctct

SEQ ID NO: 276850 - DNA, 822 bp, Cannabis indica
caatcaaggttcttctagtagcaggaatcgtgccccaaaataataggaacttctcgaccggcctcatagtcaaggataatgaaatcagtcggaaaaatgaacttatccacttgcactaacacatcttcaattttcccttcttgatgagtcatggaacgattcgctaattgtaaagtgacggtggttggccttgcttctccaattcctaacttcctaaaaatagacataagcatgagattaatactagctcccaaatcacaaagagctcttccaggatctcaaccaccaatagaaattggaattgtaaagctcctcagatctttcaatttgggtggaatttttctcttcaacatagcactacatccctctgttaaagtaacagtttcaaactcgccaagcctcctttctttttcaaaatgtcctttaaaaacttcacataggttggcatttgttccaaagcttccactaatggtatattgatgtggagctgctatagaacatcaagaaatctccggaattgaccattgtcttgctgcttcttgaatcgttgaggaaatggtggaggtggcttttgcaaagacttttctgcagcagaatgctgacttgatgctgtaacatctaggagaattttagcagttgaaatttcaggtttttcttcatttcccctctttttggattgaagagggctccttgctgccttttgttgcagccacatttgactccagaatttttccgcttctcaaggttaccgctttccaatgctctttgccatctcttcgtggggttttcggtgtcactagggaaagtgccttgtggtctatt

SEQ ID NO: 276851 - DNA, 599 bp, Cannabis indica
atccagatgatttagcaaaggtacatcatttttttccttttcaagtatattttcttgaataatgagtaggttgaactcaaatagttatttggtgatactttctttttaaagaagctaatgatagtgtctagtgggatgggaatgcattattggtgaagattttgtggccttgatctattcaaagctagttttgtaagtattttgaaattgtaattaattgtttgatgtagatgaaaggaaagaagaaagtttcaagagatcatttggctccaccgactcagccaccgataaacccaaaggggcctaataaacagtctgtcaaacggtacattccccctgcaaagacacaattattgtctggactttcagagattgtgaagaattggcctgctaagaaatcaaagagatactatattaaaccggaagtgttcggaggagaaggccaagagtgttggatcagcgctgacgaggtggaagatgtgtgcgagctccatatgattggaaatactgttatgtctctttggtgcaggtataatagttaataactaagttaatatctaagttaaaaattatatatacaactgtttattaataatctg

SEQ ID NO: 276852 - DNA, 456 bp, Cannabis indica
cagaataatatgactcattccgctcagatctctaacccttgttcctttctgtcgcagagtaataataagatttgagcctagatctcgttctctccttcgggttggttaccaccgtcttccgcacctatataccctaataaaaaactaggactttccttgtaaacagattccaactttatttttttatgaaaacaactaatgtcctatttgttcattccaaacttattatgcttgagaattacactatttcttctttcttactcttcctttctaagagatctgtctgttggaattattttaccaagatctagatttattatcatgtatgttatttaaaatcccaatatgaatctctaaaacaatgaaaataaacccatataaagtttaagagaaaccttacagtgggtgcagcggaattaaatgatgttgggttttgtgctctaaataaaatccatt

SEQ ID NO: 276853 - DNA, 827 bp, Cannabis indica
ttttcgtgtaggcgtggccataattggccgttagattgggcgaccttaggcattctgactgccacgtgtcacgatcccaattaataagggatatgggtatttaaacgctttgatacgaatcaaatttcccatttttccctcttttctcttaacttccctccagtgcatacacttcagacaaaatccactcccagattttctgccactttccacaacattttcattctcagaagtgatcgagaataaccgcaggaatcaaaactaaaggttagcttctaaatcactgcattttcgctttctgtttttggagataatgtgctttgttttctgggtttggatgtttttgaaaacttttaggagtgtatgctagtgggtatttatgtgttctgggtcaatgaaactgggtaacattcatagtgtaggacctgtaaactgacataaccgtatacaattcataggcactgattcacgtctcgaatgctcgcggacattcggatgaacaatttgaatgttcgcgggtattcggttgaacaacttgaataatcgcatatttccaagacttatttccgcttaactgttgactagactttttaggatctttacatgtcgcgggctgagtggtgagagcattaattgccattccaaatggtgggtgtgtcacagtattctaatggctatatatgcgaatatatgtcccttgagatactgagatacacccagccatttgttgacgtgcgttaatactcgaatgatcgtactctttggttggtaggttgtctcgaaacggtgggtgtctcgcagtaacttcagggttatgctcgaaaatg

SEQ ID NO: 276854 - DNA, 646 bp, Cannabis indica
gaataactttgactctcacctaccaggacatcgttggattcttattttaatcgaaattatcctttaattactcctcttagcttattcgttttgactttacttacatagtatatcattggatgaatggtttataaatcatctgcttataatgtcattctattttcttttatgaaattgaatggcacagatgactataatcctgatattctatcccgaaatgatataatcctcgatcttagaatctcctacttatatatgcttactttaggcaaattagacttagagttagattagtagtggtggtccaagctagaatcattactcattgtatatttggtataaatttaagtctttggctttaaattttagattccaaatagaaattttatatttctgtttccagaatacaatacagttcaactttcacaagtgattagtatccactttctatcaataaattcaaattgtatgttaatatggaatgtgagtttgatattctgtgaccgaatccacttggactattctaagaactctttattgtaactagacctaagtcatcaaaagatcacaaccacattcttatataaatctatgacatttgtatcttattcatagtgattttgacaagatcattctctgcaaagag

SEQ ID NO: 276855 - DNA, 846 bp, Cannabis indica
tgcaggtattgttcgaggtctacccaagcttggtaaagaaagtgctggtaagtatgaaccatgtcaacttggtaagcaattaaaaatcactcacaaacgtgtgtctgatatcaatacgtcaaaagtattggaattgcttcacatcgatcttatgggtccaattcaagttgaaagtttaaatggtaaacgatatatttttgtatgtcttgatgatttctctcgtttcatttgggtagattttttaagagaaaagtatgacacttttgatgctttcaaaactctttgtttgagattaagagttgaaaaggttgtaatattgggaaaactgttcgaattcggagtgatcatggtaaggagtttgagaactcagtttatgatgatttctgtaagtctacaggtataactcatgaattttctgctcccaaaactcctcaacaaaatggagttgttgagaggaagaatcgaacattgcaggaaatggcaagagtgatgttaaatagcaagaagttgacaaagcgattatgggctgaagctattaacacagcttgctatataataaacagagtgtttattcgtccaggtacctcaaaaacatcttatgaaatctggaaaggtaaacgccccaatgtaagtcattttcatgtttttggatgtgtgtgttatgtttatagagatcgtgagcatattggtaaatttgatgctaaaagtgatgttggtgtttttattggatattccttaaacagtagagcttatcgtgtttataacatgagaactcaaactgttttggaatcagctaatgtggttgttgatgattttaaagatttttcagagttttccacagaagcc

SEQ ID NO: 276856 - DNA, 893 bp, Cannabis indica
gatgcagaaaattcaaaacgtaaagcagcgtgtaccttgaaattattgggactgattaacaagatcccactaccagaaccttcgctatttgaggctccatcgacgtacaatgtccacgtctctctgtttgctatagcaatgtcgcttctgtcttctatgagtgctacctcggtgctggggaattcaagtataaaatctgccaaggcttgccccttgatcgcagttcttggtttatacttgatgtcgaactgactcaactccatcgcccattttaacaatctccccgatgcttctggtttcgctagaacttgtcttaaggggtagttcgtcaaaacttcaatgctgtgagcctggaaataaggtcgcaattttcttgaggatattatcaaggcgaaagccaacttctccatttggggataacgcgtctcggcatccagtaatcgcttactgacataatacaccgggtattggcgtccttggtcctcgcgtattagtaccgaactaatcgcatattctgaaacggctaaatagacggataggacttcaccggacaatggctttgacaagatcggaggttgccccaagtgtatttttaaagcttgaaaggcctgctcgcacttttcgttccaatggaactttttgttgcctttcaaaatctgaaaaaactccttgcacttatcagaagatctggatataaagcggtttaaagctgcgactttacctgtgaggctttgaacctcctttggcttggttggtgatggcatttccaccaatgccctgatcttcgcgggattggcttctattcctcgctgattaaccatgaacccaaggaatttcccagagccaactccaaagacgcatttcagtggatttaaacgcatcttataccgtcg

SEQ ID NO: 276857 - DNA, 654 bp, Cannabis indica
gaattgatcatatatttttcaatcaaaaaaaacaaaaaaaataaagtgtcattcgtcaaaaattaataataataataaaaaaaaaatcttaaaataacaagataaataagtaataaaaatggtagtgttataattttgcttaatcaagttattgaattaattaattcaaattttaagttgtatcaataagaagttttccaatctagttttctgtacaaggcataagcaaagcagccatatatatgatcaatccattttcgtttgtaattataaagtcatgagcttaatttgtacataaaactagaattattactttaatttaatttgttattgctttcggggtatgtatgttatacttaatttatctcactcattacttcactctcttaaagttaattaattctcttttactaataaataaagaattcatgaatgatcgattaaagaagaaagaagatgaagaagaaaaagaacattttagttaccatcaagatttctctgaaggatgccttttttgtttccatacttaattactacttaacttcaacacacactctcaaataataataacttttttcttttctctaattaacacttaactaccctacggcttatataaccatatcattagtataattctactcaaattaggat

SEQ ID NO: 276858 - DNA, 532 bp, Cannabis indica
aatcaagcataaagtatcaaaaaattacactaatatcaacatacatgcatctcaagaacattcaaaactcaaagacctatttaaccacttccatttcaacaacaatttaaaattaaaacagtaagaaaactacctccaaatcttcaacaattcaaactccaaagaattcccacaaatcaagcttgaacccaagctatttctcaacaaattcacaagttgataaacatggataaagagagagaggggaatcggtatgggggctgagaaacaaactgaaaaaaaaggcatttactttatttaaaaaattcctttttgttgtagataatacaaagggtcaaaatgacaataatgtccctagggccataataaagcataagcataaaaaaagggaaaaaaaaatgtcattctcacataacacccaattaattcccaaataaattttagatttcacatatcaaataaaaatgccaaataatcaatccaatttacatttcggtccctaacccggttcggcccgaaattcccggttgtg

SEQ ID NO: 276859 - DNA, 986 bp, Cannabis indica
agtttgggttcgggtcctgatttcgtctaggtccaaatcaggctccgcgtgtggttcgcgtcctgggtcttggtctaggttgggtccgagtcccaagttccaatctcgatctgagtctggattcggttctaggtctaagtccttggttctgatcctggtctgggttcgagttggctctaagtacgggtctaccttttggtcctattctaggtgtgggtgttagagttcgggtctgagtttgtgtttgggtttgtgtctaggtctggaccccaatctgcgtctaggctcttgtccaggtccaagttcgggtcccgagtgcaggtccaagttttggtgtgggtcagtatctcggtccagatctaggtccagtatttcgatctcagtctgggtcttggtccgagtccaaatcgtatccgaatccctatctaggtccaagtctgtgtttgggatcgggtcccaaattcgggtgtaggtcagggtctcagttcttgtcttggtactcaatcgtgtccgggcacgagttccagtctcagtttgggtctgaggctaggtctgtgttcggttctaggtctgggtccagttcctggtcacagacctagtctttttctggggtcctggttcagcgtttcttgttcaggttctaattttgggtcccatgtctaggtctgggttcaggtttggttctaggtctcgaccctggttctatgtccctagtctggttctatgtttgaataagagtccaggtttgggttgggatccgggttcggctcccaatttgggtctaggtctaatttggaattcgggtcctggtccagttacggttctagatctaggtccaatttcagttatgattccaagtccaagtcctagttccagtcccggtcaacttcgagttttggttccaattttgggtcacaaggtactagttcgggtccacttttggttttgggactgggttcaggtccgggtgtgggttcgggtccttg

SEQ ID NO: 276860 - DNA, 501 bp, Cannabis indica
ttaagtccagaacatatatattattatcctaatttttgcactctgacgtggcatcacacgctggtgacacatggattaactccacatatctgcccgaaagagatgttccgagcagaacaccacatataccttcacggacaaagtcctcctagccgagtagtggacaattcgaatagcatgccaacacttagcaacttcagcatttgcatcatgaagcacaaaagcaatccctataaatttgggatcgtatcacagagatatcgcaagttgtccaaatccctcaatcagtgtattctatatatgtaatgtgtaatcttgccaattatagacattataaacaaaagggaaatcttccctcaagcacatagccctataaatagtgatctagtctcactgggcaaagggtcgacaaaaattatctaagagagcatactctgagatgtcgttgtaagagctttaagagaagaatctctgtattctttgttcttaagtcaatacaaa

SEQ ID NO: 276861 - DNA, 743 bp, Cannabis indica
acagaggctgttttatcctggggacgccgtggttgctagactgccgtgcacacttcgggcagagccgcgaaacgtcttaaagagagcgacattgtccgcgactcagccagattattctatcggtaattcgttccaattttactgtatttaatttcggtataacaattttaagacgttcagttctgctatggctgctaccgatgaattttctggttctgcttctaacgatattaacaagcctttccgttttgagggattacattttaagcgatggaaacagaagatgttgttctacctgacgatgaagaaagttgctttcgttctcactgctctgaagccagtcgtctctgaagcttctaccgacaaggacaaagaggctgaacgcgagaagcaacaaaaggatttggactcctgggtcgaaaatgacttcctctgtaagaattttattcttaacggtttatctgacgatctgtatgactattataattcagataaatcagcaaacgaaatatgggatgctctgcaaaagaaatacgatactgaagaagctggaactaaaaagtatgctgtcagtcgctacctcaagtatcaaatggtggacgacaaacctgtggaagcccaatctcacgagcttcagaaaattgcacatgagatcatctcagaaggtatgactttagatgaacagtttcaagttgctgtattaattgataagttacccccttcctggaaggatttcaaaagta

SEQ ID NO: 276862 - DNA, 637 bp, Cannabis indica
tgttgggaagagaatggataaatagagtatgtgtaagagtattggaaaaaataaatgtttgtttggatggagaagtagtgaaaagatagggtaaaaataaattaggaatgtttatttaggtgaaataaattgggaagagtaaaattgatatttaggtgtaagttgtgggagaaaatgagaattttggctttttgtatggtaatgtatttggctgagatgtaacaaatttaaacaaccatttttttcctttttgtttttcttctgcaggtacacttggcgtggcttgaatggaggaggggctgacggagagcttgcgtggcgtcgtctggttggttgggcgctgacgggagtggtgccagctgggaaggaggcagctgctgggcgcacgcgtggcaggtcgtgattggagctgaagctgattcgtggggcctgcgtggaagaaaagcagcaggaggaaacagattgccactctcggctgtctggggtgtgcctcacgcacgcttctgggcctttagatcttcacacggacggcttcgattggagcttgaagttgaccgagagtgggtctcttcttggtcaaatctgattttcttttacaatttgtatttttgaccccacttcttcaaactttcttcaa

SEQ ID NO: 276863 - DNA, 573 bp, Cannabis indica
tattctatgaagttacccaggtttttacctaaaaaacatagcctcatgcatatcatctataaacattcatccttaaataaccctcatgcacactaaaaacccagaaaatatagtccccactcaaatagaaaatgaagcatggtgaagattcaaaaactaaccttttactttgataaatctgtttccacgaatcgcccttgacagcaatgcagaatcaagaagaacccacgaataaaggcaaaaatctgggcaatttacggagatttttcttagaggtttctctaagagtgaaggaacaaagaagttaagggagttgaaggaaaatgaggggaaatggggatttttggttcgaatcagggggtttaaatacccaaatccctcattcattgggatcatgacacgtggcagttggaatgcctagagtcgcccaatccaacagccagagatggccacgcctacacagaaaccgaagagttttgtgacgtggcaccataaatgcaataaaagtaatgattatagccgtcatttttcgaaaaccctcgaagggacaaccaaaggtcacctccttgtgac

SEQ ID NO: 276864 - DNA, 807 bp, Cannabis indica
aggtttgctaacactctcacggctgcaaaaatcatgaaccagttaactgaactgtttaggatggcatcaattcaagctcgctttgaagcgactaagaatttcatcaatgcacgaatgaaatctcatcagagcgtgcgtgatcaccttctctagatgactagttacttccaggaaactgagaatcatggagctgttatagatcagacaactcaagtgagtttgatcttaaacagtctaactccggcctttctgcccttcacttcaaattatgtcatgaacaagttagagcttgactttcacgagttaatgaacaaccttcagacatttgaaaatttgattggaggaccacagaaaggaggagctaaagctcctaattctgggaatgctaatggtgcggctaaggctaaggcaaacattccctctacttcaaaatccaacaacaagaagaagtggaagaatagcaagaagcctattgaagctgtgaaaacagttaaaaagaaaaaggccgctaatcccggagataagccaaaaggaaaatgcttctattgcaatgaaaagggccactgaaaccccaatgccctaagtttctagcaaagaacaaggtatttcttctatgctataaactcatgtgttttagagaattatatcccccttgagttattaattctggacctactaaccatgtttgtttttcttcttttttcagctctagctgcttagacttggactgctgtcctagcgagttgagtcggatggttggacagatgggtggagattgtccaagattgaagatgaagctcagaatct

SEQ ID NO: 276865 - DNA, 686 bp, Cannabis indica
ttgacttagggtttggtatgggacctaactgctggaattttctctttcttttttgtttttcacagaatagaaaatgtctgccttggttcgaagtcctcgaagaagagcgggaaacgcatggccactttggaggaggtttccctgggacccgttgcccaggaggggtataagtcccgagcaaccgggtgggaagcggctgagcttcattccaccttaacctgtccccatcaactggagaatattgtggacgttgctgggatcaaaccttccacttcggggacctatcaccggccacctcgcgactcggagacgcctaaccataattacggcggcttcggagcctggagccagacgcacctgatggccggtgccatgctcccacttcaggactattttgttaattttcttgtttttgtcggccttgcgccataccaactcattcctcaagcttatcgcctgcttcaggcttatttattttttatgccgcccgcggatggggatctccccgcccggcggaaattttgtatttttatgaacttgtatccgtccccaagaaaggggacaaacttaaggacggtttctatgggttccggatccatcccgctaacgaaggggtggttccgtataataggcagactcacgtcaaggagtatcgccatcgctttttcttttcctccgggttcagg

SEQ ID NO: 276866 - DNA, 688 bp, Cannabis indica
tatttatgtgtaatatgtgaaaaatgaaatatttggtgtttgtgaatgtgattttcggatgagtaaatcaattaacacttcactttatcttctttcttttttttttctcagcaggtggacacgtggcaggcgctggttcgttgtggggctggcgagctggggacgtggcgcacgctggtaggctgggtgctgacgggctggggaccacgcaggctggagagagagagaagtctgctgtgcccacttgctgctgtctggggtgtgctacacgcgtggatctgggccattagatctgtccacgaatggtgcggagggggagctgactttgaccgcaagtgggccttgcataagggctgatgagatttcttttttttgaaaattgcacttttagctccatttcttcaatatttcttcaatttaatcccaatctttttcttctaaacacacctaaaaatacataaaattaattagataactaaaataaaattaaaaataaataccacctaacatattataataaaataattataaaaacacacaaaaacatataaaattacaataaagctaataaattcaaaactaattaaaaacttaagaacgaaaccaatttttagttaaaaaaatgtgaaaaaataactctaatttctagagttatcacaaccccaaacttaaaattttgctagtcctc

SEQ ID NO: 276867 - DNA, 759 bp, Cannabis indica
agcactcgcaaccatcacagcaacaaaattgcgcgagtttgtctatacctccataattggtcgctttggtattccatacaaactcatctcagacaatggaaaacagtttgattgtaaagagatgcgacaactatgcgacgatctaggaatcaaaaaggcattctctgcggttgcttacccgcaaagcaatggacagactgaagctgttaacaaaataataaaacacaccattaaagggagactagaagatcgcaaaggggcttggccagacgagttaccgcaagtcctatggtcttataatacaactcctcgatctacaactggcgaaacacccttctcactttcttacgggtgcgaggccatgttgccagttgaaatcggggcaggttccctacgcagagatgttttcaacatctcgcagaacgacgagaagcagttactctgccttgatcttctggaggaaaaacgtgatcaagcgcacttaaaaaatgcggcttaccagcagcgaactgcaagatactttaactccaaggtgaaagtaaaggtcctgcgagcaggagacttggtccttagaagggtaatgccaaataccaagaacccaacacatggggtctttggagataattgggaaggaccatatctcatcgcggaaaaaattggtgacgccacataccgactcgcagcactcgatggtactgcgattccacgagcttggaatggcgagagtttaaaattatattatcaatagtactcgcatta

SEQ ID NO: 276868 - DNA, 610 bp, Cannabis indica
tctgcttctgcttctccggtgactccgcctgcgcccgcgccgcctgctccagcaaccggagcttctggttcgtcatctgttccgatgaaaactgccagaaagtcgaagaccaaagcttgaaagtcgacttacaaccttgcttcccttggtgttactgttgaacctgctgctgcttctgcttctacagaaatggctgaattcaacttgtgtttggggagaatggagacaagtcaagccttacttctcaggaagatggacaacatcatgaaatacttccgacccaatgatgatgaataagtggttcaattctctatctcttgctttttatttgtgaatgcttaaactactatgaccttgttcatggtttttgttatctttggctccttgatagacaaaaagggggagtagtacttattttttgtggattatgtttttttgtggattatgtgttacaactctggatccttgtttttagggggagttgcttgttttcggtttgcaagcttttccgtccaaaaaaagttatcggtttgcaagcttttccgtccaaaaaaagttatatgttttatgtgttagagagctttcatgcagggggagtattttctatact

SEQ ID NO: 276869 - DNA, 377 bp, Cannabis indica
caaatattatcaatacacttttttatgtcaggagaacagttattatggaccttctcattgcgcaccctccaaatagtatccacaacaatcgaggcatataggaaaacatcatcagctcggatccctctgttgtttagatcccaaatgaacttgacccaatcccaaacacggatgccagtgtcacacacagggaaaatgccccagggagaggagcgccaaagatgaaaagccacatcgcaggacagggaaagatgttcaaaggattcctcccccaagccacataaggggcagctagtgtcctctatatggaacctctttccaatcaccgctctaacagggagagcactggaaaggatacacctgttggaaattatttt

SEQ ID NO: 276870 - DNA, 858 bp, Cannabis indica
tttagaacctagaagatctgaaaagagctaggttactttataatctgtcattcacttcaagaataggatagcaattaggcattaacgatttgggtaaacaacaacaggattctcctccctatcatctcatcttgcttaactttaactgtgttataagttttctgaattactttaattcttttaaatcataaatacttttgatttgccaaatagaattataggtatagtttagtagtagtaattaatccaattccctgtggttcgacctcacctgtgtgagttactacttgattgcgtatacttgcgtagtgtttataattttcgcaacaagtttttggcgccgttgccggggaattgtataaagattgatattacacaaaattatactaacttctactttggtttatttctcttgctgaatttctaacctgtctcttgcaaagctgcttttatctatttcaggtatcttgagtgcatgcgccgccaagggcaagcagttgtattacccgtcgaccctgaaatcgagaaaacttgtggagaaacaggaggaacaaaaggcaagagagagtttcagcacctgctgaaacaccagaaatcatggctgacaacgctaatgctgcgaataatggaggcaacaacggtaataatggaggtgccgttgaagatcaagctaatggccgcagcttgagagattatatcctcccaactcttacgggggttcagtcatgcattaggccaccggcagtggatgctaacaacttcgaaatcaagcctgccatactacaaatggtgcagtcttcagtccagtttggtggactcccttctgaagacccctaatctgcatctatcgaacttcat

SEQ ID NO: 276871 - DNA, 1112 bp, Cannabis indica
aaaacccacgaacccagaccaccgttcgaacccacggccacccaaacgaacgccccaaccaatcggcgccacccacgaacccagacgtcgaacccacggccatacgcagtctaacctagacgacccctcgaacccacagccacccgcacgacccagacgacccagacgaccagtcgaacccacggcgaccgaggagacccgcgaacccacccacgactggaaaaacctacacagacgtcgaacccaatacccaggtttgttctttatttttttttaactttaaattcacaatctgcgaaaaacttgaaatgtatttgtttggatttatgaattttagagtttggggaagaaactgagtttagggagatagattttgggggttttttgattttgtgcgacattgtgcgatgtgtatgcgatatgtgtgcgattagtgatacaatttaaggtctgtttcgttgtgggattgtgtgtgcgatttctgtgcgattatgtgcgattaatgactactgtatctgcaattgttgaatttgtgcgattttgttcgatgtcttgtgcgagtttgtgcgatttatgactactgtgtctgcaattgttaaatttgtgcgattttggtcgatgtcttgtgcgattttgtgcgatttatattcaaatatgttgccagccagcaaacagaattaaattatttctggtagtgcgatttatgtgcgagtttgtgcgatatagtatgttatgcagtggctgttatgcgatttctgtgcgatttctatgcgacgtatatgcgatttataatctttctgtttgtatttgcagatggctccagaactcattctccccttggctgagcattttcctgggcgtatcacttaccgaggaaatgggtactttgcttcaattaaagcaaagtttgaagcctttaacctgaccgagagggtgaaggaaactccttttggagttttttggaatgcgaatgatctgaaattctccggggtgattgtgcatcaactgctgttgaggaaaatgaaagtgactgaggtaaagaatgatgaagtgtggttttacgtgggtaaaaccgaggccagatttggaaggtctgagtttggattgatcac

SEQ ID NO: 276872 - DNA, 1115 bp, Cannabis indica
tagcttggtgacacttgcaacctttttctcagccaaagattaagtaattaatttacttagttagaaagaaagaggaattagaagaaaataccaaaattcaaaggaaaagcttcctttcttctctctctcacttcgaaaccagcaagaacaaggggaagggctgctgattcttggtgtttttagcaaagaaaccttgggagatttaagttaaggtaagctctagtgaaacccttctctagtttttaggtttttgcttagtttgaacttgtgaaattgttatatgggggctgttagggtttgatgcttgcatagttcgaattctagggtttctatggattgattttagtacatagcagctggttttaaggtttattgttggttttatgcaactttgagctttgagttcaaagctttgagctttaatggcaacttgggtgttgatggtttgttctgtgatttattggttggaaaatattgtttatgccctaattaggtactctggaaggtttcattgcatttggtggagaattgagctacaaatgaaagactttgggaaacctggtgcaaaccggctatccggtttgcagtgccacaaaaaccggctagccggttttggcagggttccccgagcctttcattttctcaattttcgtctttgcggtgcctcggttgggtgttttcccatttccagagctagaataacctattgagaagatatagcagaacctagggttttggttttgggtttcccgggattagggttttaatcatgtaacttacccggtttcaaaatgtgattagggcatccatctagcacgagatttccgttcaggtcggccagcacacttgaattcagaaatcaggtaagaactgaatataatatgtgatgtgattatctgaatgtatgtatatgtgtgtgtatatgcatgcttagattgttatttacactaccaacacttgtatggttatgatacagagtgcattggtatagtgagtacaatacagtgataccaacactagtacgggaaagtactaaggtgtgtggtatatcactcagtggtactcagggtacgaaacaaaccctaccaacactcgtacagtgaggtacgttgtgt

SEQ ID NO: 276873 - DNA, 875 bp, Cannabis indica
ggctcaactcatggaattgcacaagaaagcctccataacatcccctgttgaaaatcagaatagctcccaatcttagaagcaagtaatcattcaattaaaacaaaattactatctcaaagtaacatcctgcagtgttaaaagtaagaacaaaaaaacatgtgggaaaagtgatgaggtgagaccaccaatttcaagtcgctctactaatgaaaacagacatgtttctaaatccaagtctctccatattccatccaaaaacacaagaagagggagagataagttaaggatatatcattccaaaaataatgctatgaatatccccttagtctattttcaaggagaaccataacaaaagttgttaatggagtgatatgaggtaaaatagcaaaatgtcacgaaacaattttgagagaacctgcaagtgtttgggaacgaatcggagggctaagcttcgacagcttcaagatgcttgcgacggaggctcgactggggcagatcggaacacagcgttaatgaaggcaaatagaggctcaattgttgtctccagagctcttgttttttttttttaacttaaaaagtaaaatgctgttagatttttatattagcgtatatttgaaaaataaatactatatatatatatatctttatatattaaaagtgcctatctaacgacatttcttggtttaacattcttggtttaacataatatacttaaaaataaaagaatattatgttaaatttaacgattaggtttgatctcccgttaaaaaataaacccgataattaaacccaaaaaattaaacaatattttaaataaacaatcttttaaatattaataatctctttttaaattaaaaaaatcatcttagccacat

SEQ ID NO: 276874 - DNA, 425 bp, Cannabis indica
actccgacccgaactcaaacccaaactcgaactcagaatcgcaaatggaactagaatcgaactaggactaggaccaagaccaggacctaaacccaaacccgaacccagatcaaaacccagacagagaccgaaacacgaaccgagactagtactcgaacccgaacctagaccgggacccaaacccacacaataaccgggacctggacccagaataaggatacagacctgggatccagaactaggaccgggacctagtacccgacacagacccgaacttgaacctaggacccagctcgtgaccctgcactagaaatgaaaccagactctgactccagattggtatctgaatctggacccagggcttggacaaaacccgtagtcggtgtctggatttgggacccagccctggacccaaaccctgacaa

SEQ ID NO: 276875 - DNA, 1083 bp, Cannabis indica
ggcataaaacccaacatatactgttacaaagtgatgccctttggtttaataaaagcaggtgcgacttatcagaggctggtgaacatgatgttcgcagatctcattggaaacaccatggaggtatatgttgacgatatgctcgtaaaatctcaacatgcgaaggatcatattggccatttacagaccatgttcgatatattgcgacggtataagatgcgactaaaccctatgaaatgtgtctttggagttggctctgggaaattccttgggttcatggttaaccagcgaggaatagaggccaatcctgcgaagatcagggcattggtggaaatgccatcaccaaccaagccaaaagaggtccaaagcctcacaggtaaagtcgctgctttaaaccgctttatatcgcgatcttctgataagtgcaaggagttttttcagattctaaaaggcaacaaaaggttccactggaccgaaaaatgcgagcaggcttttcaaaccttaaaaacgcacttggggcaacctccgatcttgtcaaagccaatgaccggtgaagtcttgtccatctatttagcagtgtcggaatatgcgattagttcagtactaatacgcgaggatcaaggacggcaatacccggtgtattatgtcagtaagcgattactggatgccgagacgcgctacccccaaatggaaaagttggcgtttgcttgataacatcgtcaaggaaattgcgaccttatttccaggctcacagtatcgaggttttgacaaactaccccttaaggcaagttttggcaaaaccagaagcatcagggaggttattgaaatgggcgatggagttgagtcaattcgacatcaagtataaaccaagaactgcgatcaaggggcaagccctagcagattttatccttgaattccccagcaccgaggtagcactcatagaggacaaaagcgacattgctatagcgaatagagagctgtggacattgtacgtcgacggagcctcaaataacgagggttctggtagcggagtcttattaatcagtcccagcaattttaaggtacatgctgctttacgttttgaat

SEQ ID NO: 276876 - DNA, 590 bp, Cannabis indica
attgttggagattcgggcaaagctcgggagaggtatgcccgaacagtgcagcacgagcaagaagaggttatcctggccgtggaagaaaggaagcccaaagttccacgagcaggagagccgaccataaccttcaacgatgaagacgctatcaaaattaaatttctacacaacaacgcgttggtcgtggaagtccagatagccaataaaatggtggccaaaaccatgattcataatggagcctcttccaacatcttttttgaaactacttatgaaaagatgggactccaactcaaggatctaaccccatgcctcgagcctgtctatggtttctctggtcaaggagtcgcacctctaggacaaattcacctacccctcactgttggacaagctccgacgagcatgactgtaatggcacaattcctgatattagatgttccttcagcttttaacgtaatgataggtcgatcggccttttatgacttaaaggctatcacatcaatatttcactcatgcctgacgtttccaacaaagaatggggtagggtgtctaagaggaaaccagtagtctgctcgggattgttacaaccttgc

SEQ ID NO: 276877 - DNA, 557 bp, Cannabis indica
agggtgttcttggataaacctgacttatggcactacagacttgggcatctaaactacagagacctgaagaaaattgtctccatcaaagttgtctgagggattcctgaatttagattgggaagagatcatgtgtgtggtccctgccaacaaggtaaacaaattaagtcctctcatcctcctataaatgccttacttacttccaaagtactggaattagtacatgttgatctgatgggtccaatgcaaactgcaagcattgcgggaaaaagatatgtgatggtgtgtgtagatgacttctcaagatatacttgggtaaacttccttaaagaaaaatcagacacctttggggccttctcctctctttgtctgcagcttcagaatgaaaagggtgtcaccataggcaaggtttatcgggtcagaagcgatcatgggaaggaatttgaaaacgacatatttgctcaattctgtaataaaatgggtattagccatgagttctctgcacctaagactccacagcagaatgggatagtggaacaaaaaatagaactcttcaggag

SEQ ID NO: 276878 - DNA, 336 bp, Cannabis indica
gtgtatgttttggttcaccttatcaattgcttgtccatttgatttataaattcatctgaaacccttttcagatattggaaagtgaacatgactatgtgaataatttactgatatgataatctacgatagagttttcttgcatttggagaaatgctatgttctttccagagcattagttaaagtaaacctcaggttggatgcatggagtatgcattggaaaggcaaccgatattgatctttgacttattaaacttaccgtaatatctattcaagtcaatattgcctagttgatctagatcaaatgatcttaatcctttatgattacgcttcgaatct

SEQ ID NO: 276879 - DNA, 667 bp, Cannabis indica
caaattgctgctgcttctatcttactgttttttttatagcactttcttaactagtagaattgtctcatttcatctttctagtccaaaacctggacaagatatttttctcatataataaatttgtctgaagtttaacatcgtcacaactcagaacatgggtcgagtctgattcatattttctcaacatggagacatgaaacacattatatactccggacaacgcaggagttaaggctagctaataggctacctagcctatttaatccagtgaacatgtatataatatttctcttgtaccacacttattaaggtacctaaccagtggtacatttaattatcactttttaaataaacacctcataagggaagatattattctaagatattctaacctttatcaaatatgctcacagtatatttctaatattctattgatcttcgcaggttacccacctttcaagaataaagcattatactattttcgctttaacttccatggttctcaataaccttctttaattcttaacatcatagccaaaaatatcaaccttggaattttacaagattagactattcctttgtatgaattttgtattctcatttatagtataaattgtctacactgatagacaacatattaactctgtatgtccaatcgttactactc

SEQ ID NO: 276880 - DNA, 685 bp, Cannabis indica
atatgtcgccccgtgttttgagctaatatttaaaagtacgactgaaacaaaattgtaagataagatacgtttaccactatttttttattaagatcatagtaacaattataaatgttaaggagtttcgtcacaaatatcttaattataaataatttttttagtttaatttttttcattatcgtgtacgtagtagttatttaatacatattacaaaattttgataaatttgaaaaaatttaacaatattcaattgcacgcgtgaatattttattttatacacgtataaaaaaatattttttaaacattattttatataatgtaaattatttttaatttttcaaaatttataaaataaattatactaaaataattttgtaaatgtggaaagagaaactcatgtgggtatattgtagaagcacttaataatttatttattttcttttctttctttcctaccaaacgaataaatgaaattaaaaagaaaaatgaaagaccattaattatagctgtgaagtgtctgactggttagcttgaagtgactaattttggtgattgttaatctccaaccaaatctctaatactatggctttatgtcttattaattgataattaatgattatttttgtttggaaataaaaaataaattaataattatccttccttttttttttcttttgtaaaatgg

SEQ ID NO: 276881 - DNA, 190 bp, Cannabis indica
cacttatatgtcaagggtattaataatttcaacaaccatcagtttcctcacctacatagaaatcagtattgaaatcgttaatattttagatagaaccagatggaaggaggactttcattgtttatcatagatcaaggggattttcaccaaaaaaaagttaggggtatgagtctatgttggaaattatttt

SEQ ID NO: 276882 - DNA, 571 bp, Cannabis indica
aatggaattaatttgtacaaattagtgaagggtctaaattttgatattgagggttttattaggggacaaaaaatgaaatttcccttctataaacccttccacaaaatgtggtagaataataacacaactacattgaaaaaccaaaaatgaatcaatgaattagattcatcttggacagatgaagtggtcttcaaaggaatcatgttaaagacgttctctttctctttgaaacagactcctgtaaaaacaaatgagagaagggaaaaatcttgttggatcaaatcaattgaaagccacttgcctatcctattcctactatggccaaagtaatctaaaaggaaattaaagaatgaatagtgaaagagcacgcgtatgttcttgccactcactgcgcaagtcttacactgcaagcactgaaaaggttggacttgaagatcatttaattgacctctcatcatgggttccttatcattcaaaaaccagaaaattacactacatacttcttttaagagaaatgctacagggcaccagtggtgcctagtaccaacctatgtgtcaaatatcgctattg

SEQ ID NO: 276883 - DNA, 1148 bp, Cannabis indica
aagagttacttcttacgcgaaatatgcattattatgcttggatatgtttgttaatgatctataattaattatatatattaggttcaaagatatagaggagggcataccaaatgtgcatttctcttcgaagaagctgacagatttaggattcgaattcaaatacagcttagaagacatgttcacaggagctgttgatacatgtcgtgcaaaggggttgcttccacttacccatcaaaccaatatgaagtcccaaaacatgagtactccagataatgagcccaagaaagagtccaatgaaaaagctgttgctgcttaattaactagcaggcatccaatttatgtactaattagaagttgtcatctttttttaatatatatcaaataaatttttaatgtctttttttatcaagaaagtcattaaatgatctatgtatttgggtttaataattattttacaacaatgactatcctcacaaattaaagattggattatagaggtccactagatattagaatttattgaagaaagaacaaatatttctattgtgcctttcaggtaatcggaaaataaagaaatagtcaatatattcatgataattatatatttacaaaataccgtcattttacaatctgtaggattttactgttttaaccctacaccaacaaagccaataatatcagtcttaaggtcagaattgacctttccttgtctaagtaaaacttagaccaatacgaccccgtattaaccccacgacaccaatcttgatgtcgtatgaaacctttgattcaaagactcaatagaagagtctagaatcccaaacactcagacacaattcactcatacactcacaaactcgaaaccctagcagagcaagttctctctgagaacttgctcgattccaaaccctaggaacccagaaaacccagatctaaacacacacacacacagattttaggtttagatgaatgaaaaacaagtaataggaaagaaatcaccagatttgtttcagagttcaccccaaaattagggctacgtctctgtcaagctcgtctcagagattagcttgatatccactatgattcaaaggcaaaatacagacttttggagcttcctgtcacaagatctttgatcaggtaaactcagtttt

SEQ ID NO: 276884 - DNA, 691 bp, Cannabis indica
acctagtcatgcccttcggactgaaaaacgccggagcaacctaccagagaatggtcaaccggatgttcaaaggcctcctgggacgaaatatggaggtttatgtagatgacatgctcgtcaagtccaaagcatgcaacagccatgcaagcgacttagaggaatgtttcgaagtggtccggagatacggcatgaagctcaacccaaagaaatgcacctttggggtcaagtcaggaaagtttctgggcttcatcgtcagtcaaagggggattgaggcaaatccggaaaaaatccaggctctcctgagcatgccatcccccagaaagcataaagatgtgcagagcctgaccggaaaggtagctgccctaagccgcttcatctcacggtccacggacaagtgcatacccttcttcaacatattgaagaagtgtcaaaagtttgaatggtcggacgagtgcgaggaggcattcaaaaaactaaaagagcacatggccaagcctcctatcctgtcaaaacccgttctcggagaagacctatttctatatttggctgtctccgaacacgcggtcagcgctgccctagtccgggaagaagagaaaactcagcatcctgtgtactatgtcagtaagcgcatgataggagccgaagcgaggtacccaatcattgaaaagctggtcttttgcctcctgatggc

SEQ ID NO: 276885 - DNA, 671 bp, Cannabis indica
cctagttcggttctagttccatttgcgattctttgttcgagtttgggtttgagttcggtcggagttcgagtcctggtccgagtttgggttcgtgtccggattttagtctaggtccagatcaggctctgggtgtgggttcgcgtcctgggtcttggtctaggttgggtctgagtcccaagttccaaccccgatctaagtctggattcagttccgggtctaattccatggttctgatcgtggtctgggttagagtttgggtccaggtcaaggtctaactttgggtatgattctaggtgcgggtttgagttcgggtcggagtctgtgtccgtgtttgtgtccaggtctggaccacgatcaggctaggtaagggtcaaggtccaagttcgggtccgagtgcgggtccaagtatttttcttcgtcaggatctcggttcagatgtaggtccagcatttcgatcccaatctttgtcttggtccaagtccaggttcatatccgaatcactatctaggtccaagtctgtgtttgggatcgtgtcccagatttaggtccaggtcaaggtctcagttccggtctgggtacacgaccgtgtctgagcccgagttccagtctcagttggggtctaaggttatgtctgtgttcggttctacgtctgggtccgggtccttgtcacg

SEQ ID NO: 276886 - DNA, 638 bp, Cannabis indica
ggttttgatctgggttcgggtttggctttaggtccttgtcctggtcctagtcctagttcggttctagttacatttgcgattctgagttcgactttgggtttgagttggggtcggagttcgagtcctggtctgagtttgggttcgcatccggatttcagtctagttccagattaggctccgggtgtgggttcgcattctgggtcttggtctaggttgggtccgagtcccaagttccaatcccgatctgagtctggattaagttcttggtctaagtccttggttctaacctggtctgggttcgagtttgggtccgggtccgagtctagcttttggtctgattctaggtgtgggtgtttgagttcgggtacgagtctgtgtccaggtttgtgtccaggtctaaaccctgatctaggtcttggttcaggtccaagtcaaagtttgggtcgcgtgcgggtataagtttgggtgttggtcaggatctcggtccagatctatgtctagcatttcgaacccagtctgggtctttgtccgagtccaggttcgtatcgggatccctatctaggttcaagtctgtgtttgggatcgggtccaagatttaggtccaagtccgcgtctcagttccggtctgggtacacgac

SEQ ID NO: 276887 - DNA, 508 bp, Cannabis indica
ttatatacaaattgatcttgggtttattaataatttttcttacaaatccatatattaatagattaaatttgtaaatgacataagaaagagatattatcaaaaataaattatcgcactctattttacaccctttttttgcactcttcttatattctagtgagtcatttttttggtaatgcttattatacttaataattagtcttaatattataacttaattacatttgtgccattcaaattaaattattctattattctactaatttagcaatttgttctttataggagaataaatatatttttaattgtttagttttttcatcacttaaacaaaaactacaattaattatgtattttttgtaaattataacttttataaagagttataacaggtgtacatgcaataattttttttaatgtatattgatactcttttaaatttaaagtcactaatgttataatggtgttagtatatatgtattattattttcctttttatttttaaatt

SEQ ID NO: 276888 - DNA, 552 bp, Cannabis indica
tggagctgagtcagttcgacttacattacgtgccccggatttccataaaaggccaagccttggcagacttcatcaccgaatgcaatgaagccgaggcaacagccaatacaccggagccaccaatccccacttggagagtatttgtggacggagcttctaatgagaacggttcaggagccggagtggctatgatatcacctactggattgcggctccaggcagcactccgattcaacttcacagcttcgaataatgaagccgaatatgaggccctgatagcagggctaaaattggctaaagctgtaggagccaagagagtggaagtctacagtgattctcagctggtcgtaaaccaagtttccggagaataccaaactcgcggcgaacggatggccgcgtacgtagcaatagtccgagaactgctccacgagttcacggactacaaaatagaaagaatcccccgagagaagaacgctcatgcggactgtctggctaagttagcctcggacagcgaaatcgaagagctgggggtagtaccagtggaacgcttgg

SEQ ID NO: 276889 - DNA, 778 bp, Cannabis indica
attacaattaaaaaataaaggagaaatcagttcctaaaacactgaaacataaattataaacaaaactagttctacaataaaaaaacctcataacacataatacctcataaaaccgattataatttttttaaaaaaaattgagggataaatatgaaaagaatcttttccataacaaaataaataaacacaaataataactcaaatataatataaagaaactgtttatatttatcaactagttaaaaatttaagataagaaaactgattccgtgaagcaactaagataaaaactcacacacaaaaaccagttaaataaaatagcttaaataaaaacatccattcaacatgctccaacccaccaaataattacactcataccatatctacctcaaaaatactcattcattatgtctatataaccggtttgagttattatatgtttttattaattataacattgttataaaactgtttcacgataacactgttatagaaccagttctattttaattataactggtttaagttattttgtgttatttgtttttattcactatgttacagaaccagttttattttaattataaccggtttgcgttattttgtgttatttatttttattcattatgttataaaaccagttctatatttagattataaccgatttctgagttattgtgtgttatttgtttttagtcattttgttgtaaaaccgagtctattttaatttatgtcatctggttttttatttaatcaattcaaaaattaatttttgaat

SEQ ID NO: 276890 - DNA, 739 bp, Cannabis indica
tgatatagatacgctatgaaagtttaaccatcgttctaatcccaataatcaaagatcctttatagatgatttacaccgagtagggaaaaatttaccgttttacccctcaatgtattttatccttaaaacacttagcttcctattaatgatatttcagtaaactaatacaatcactgaaataagaactcttctatttgtctctattaagccaagctcgaaggaaatcatcatttcacttctatgtccagatggaagctatagattccatatctatgtttagcgtgcccactcaattgtactatcatgttcccaggctgtatgcgtgatccgaaccaattggtaggctttgactaacaacttaaagaacacaaataacactcttaagatcgaaccgaaccatgtcaagattaagatcttttgatctaagatcaaccagtgatatttacttagaaagatacaacagtaagattataatatctttaccaagatcaatatcggtcccagtccaatgtatactccatacatccgatactagcgtactttaccaatattctggaaagaacataacacttatctaaggtgtaagtaagctttattgctgactatcacatcagtgtatgtctagtgcactaatgaatcatgggacattatattttgaagcatataatcacaattattgtaacgtccccgcttcaagcctccattgagtccttacacccacggaatgaatggcttttat

SEQ ID NO: 276891 - DNA, 927 bp, Cannabis indica
atactaggtcgacgattaaagtcaatcctaatcccaggaactttgaatatataaaaccacttcgatttccaatctcccatattggaaaccatgccttctaccccattaatctcagaggtggcccatttgctgaagcaatagaaaccgttatggaggcctacactctttatatcatagaagtagctgaactctgctaccgtgggtgccctatgtacgtactccatataaatcgcatagaaggctaaggctgtgcgataactgttgggggtcaattgaaagggagacacatcataacgcttgagaatggctgtaatgaagggatgaaaagggatcgataccgcacatcgaagaatgggtatagagactaccacatcctctgtgggaataatcgctggattggtaaaggaaaggtgcgccctctgagtaggtttaggtcgcaaagaagcgagtcgcagaaggttcagtcttgtaaaagtagtaagatccgatttggtgaccctcgagaccaagtcctcacatgagaagggctcgttcagctgagtgttgtccaccgaatcagtcccactcccttctgcctcttcttcttccttacctgactctcgagctggggctgcccaatcgtcatccatctcctcaacctcgatgtcaggggcatgcttggagtggacgagataatcgcgtgctgacaccatagatttgctgtctcgaatctcaatggctcctggttcagcgagctcctgcaccattctctcgatttctgcggaagacatcggacctaattctatacttccagcaggtgcgatctcctcttctgagattgaggtcgggataaaactatcttccctttggtcctcgtcaccatcgaacgcgttgcctcctgagccaagcagctgattatccgacaggtcgctcatctgaaagatagaa

SEQ ID NO: 276892 - DNA, 809 bp, Cannabis indica
gggcctttttggactttttcacttttttcgtttttttagttaatgttagttggtttggctaaaagggagagattatttattattttgtagtgattttgtacacaataattaaatcaaggataatgttgattgaaccgaccattattaattacatttggataacgttttaaattctgtagtagattacattacggggttattagataatgtttggattttggggtaagctaagctaagctaaagccaacctaatttccactcttaaaaaccttgactaatgactcttgccttgggagaatattctatttatattcattcgtattattttggctaattaccttattggtgaatcttttatccctgaaattttggatttggtgatggtaggtatggccttagtaaactttattaatataaacgctttttctaaaaaaaaaaaaaaaacaaaaaaataagtaaactttattaaaaggaaagtatgcaaccaattccacaccacacccctctattttagccaattattgtgggcacaactttctacttttccaagtcttaattactgtgcaatttgcattattgggctgctgcaaaagagaagtgcattattgggctagtgggcccatgatccaactgttgaagattggaatgagcatatgggcttcagactcctaaaactgttgcaaaatgggctttaatcctattttttaatggattagatagtgtttgcttacatttgaggaaattacattttatattctttttatattgtcttttttattttattttttttttataatttattattttta

SEQ ID NO: 276893 - DNA, 835 bp, Cannabis indica
aatctaaaaaaacaaaaaaaaaaaaaaaaaaaaaaaaaaaaaccaataaaattcaaacctttaacagtccatctcacgagtaacacatgataaactaataagaagaccccaaaaccttaaaaatctctaatttagttggctaccatagtatacgagccctaaaacatgaaagaggcactaaccctaattttaacaaaagagtttcagtacaaattgggaatgaaataagcaaaattggggaactttaaagaagacccagatcgtgaactagctcttaacctttttgtatttgtcatatattttttttctttcttgagctaatgaaatgagatttgaagaattgaagaagatacaagagatttcgatgaaagaagatgaatttaaacaaaagggttagtctaattcttacaaagtgagaagaaaagcagtgaaaggtctgagcttgatggtgattcctttgttgtgttgtagttgttgaggcagacgagtgtggcacaagactgggggcttcagtcttctgtacatgcatgattgctttagcgctcttaatacggtaaaatttaaaaacaaaaatatattaccaacaatttattttttttaaatatatatatatacatttggatcctcatcctctataattttttttaaagaaaaaaaaatccatatttgccaataatagatgatcatgtagttcataaatttgaaaacaaaaatggataatggataataatattttacttgatccaacatttaattgattttttttctttttataatttagaattatcttaaaatgtctccttttttattttaaattttagggtttttttttttt

SEQ ID NO: 276894 - DNA, 649 bp, Cannabis indica
aggttgatgacggacaacagcttgcacttctccaagcaggcatccgtactgggactcctttctggaatgaattgcagcaagaaggagctgctagcctccaggacttccagaagagagtccaaaaatatatcaacctcgaagaagcccaaatcgtggcttgtgggggctactatcccaccggaatggcacggtatatgcccggagtatcgccctcgggtactgccccgattgcaaccccacaaacaagtggcatacaattctctgctacccctgggtatagccagggccaagccttggcaccagcattatctcactttggcaacccgtccggagtaaatgggcaagctccttcacactctgcttcggctgctagcctaacaggtccttcctagggatcgaggagtaagaggtcctccaaaggcagcacccggacgagagagaagtgccagaaaaaggggtacaccccacaatatactcaatacacggagctgtcggactcccaagagcgtgtgtacttcgctactagccaaaatacacactaccggagaccacagccgttgtacaaagatagctcccggagagatccgagcaaaagatgcgagtaccacaacgacattggtcatagcaccaatgaatgtaagaatctcaa

SEQ ID NO: 276895 - DNA, 501 bp, Cannabis indica
ttaattaaattcaaaataaagactttcattttaatactatcgtaatatagtgatcccctgtttatcactaatctataactcaagcttgaaacttaaggaaaagtaaaaccttacctcaagtttctttttccttgaacttacctatgctcacagctgctgctagagttggttttaggctaaagattgaagaaaaaaaaaggatgaggatggtggtggtttttgtggcacgaagagggagcgagagagataggatagggtttagtttttttcttttttttaacgttttaatatatatatacagataactttaaattttaatataataataataataataaaataataataatattaataaaaactttattatttcttagccattaagaaatctatacttctagggcgttaagttaaatttgacatactccttattaccccaatacatacactatcaactaatcacaatatttccattaaaactaataattaaacctgttatga

SEQ ID NO: 276896 - DNA, 589 bp, Cannabis indica
aacccagacccaaacccagaccagaacctgttcttggacctagaccttgactaggacccggattgggaccccgacccgtacccgaacagggacctggacttcgaccaacacccggaccctgactcaaacttgaactcgtactaggacctagactcgcaccaaaactcgagattcaaacccgaatctgaatttggacctagaccgggaccaaggatccgaacctagatgggggacctgggccccagacctgaacctggacccagacttgtactaaggatccagagccagatgagggacttggacccgaaactgggaccgagacctaaaactcgaccacagtatcgagacacgagactcgaccctatacctagaatccaggacctgactactgggacacaaccccaaactcggacctaaacccaaacttaggacgcggcccaagacccgggacccgaactggaacaagaacgagatccaagacccatatctgaatctggacctgaggcttggacttgacccgtagacagtgtttgaatctacgacccggacccaaaatctgaatcggaccagacctgggacagtaacagga

SEQ ID NO: 276897 - DNA, 636 bp, Cannabis indica
attgcctctacttcaaaacccaaaaagaagaagtggaagaatagcaagaagcctcttaaagctattaacatagctaataagaataaaaaggctgctgatttaaaggcaaagcaaaaaaggaaagtgcttctattgcaacaaaaagggccactggaaaccctagtgtcctaagttcttggcaaagaaacaaggtatttctatttatgctataaactcatgtgttttagagaattattatcctctttggttattaattctggatctactaaccatgtttattttcttcttatttcagctttagctgcttaaacttggattgatatcctagcaaatttagtcgaatggttggacagaagggtggagattgtccaagtgaagatgaagttcgaaatcttctttaatttttgaattattgttttagtttatgaacaatttagtttcaattaattagtttgggattttattccctatttcatattattgcagacaattcattatgatatttttgagattattaataaaattttctctttaaaaattttcattatgaattgagcttaatgtttactttatcttgtgtatgccaatactaattatattattttgtttcatattttgtatgtgtttgtgttttat

SEQ ID NO: 276898 - DNA, 647 bp, Cannabis indica
ttcttggacacaaaatttcaaaagcaggaattgaggtggataaggctaaagtttcaacaatagagaatttgccacctccagtttctgtaaaaggagtaaggagtttcttaggacatgctggcttctaccgaagatttattaaggacttctcaaagatctccaaacctttgtccagtttacttgtcaatggcgttccatttgagtttggagaagattgcttaaaggcgttcaaagttctaaaggaaaaattgatttcagcaccaatagtcacttcaccaaattgggagttgcctttcgagttaatgtgcgacgcaagtgattatgcaattggagcggtcttgggtcaaagagttgacagggtgtttcacacaatctactatgctagtagaaccctgaatgatgctcaattaaattatgccactacagaaaaagaaatgctggcaattgtgtttgcttgtgataagttccgaccctacctgattgggaataaggttattgtctatacagatcattcagcgatcaaataccttatgaccaggaaggatgcaaagcctgtgacagtcagtagtcccgtgatccgtaaggggaaacaccgggtaagctgtacaatcccacactgcctggggaaggtcaactgggatgattct

SEQ ID NO: 276899 - DNA, 898 bp, Cannabis indica
gattaaattaataattatgaaatgtacattttcgaaatatatttaatattatttatgttgttatgctatttaatgtaagattacccaatttctgtgtttgtcttcggaagcggtggaaagcggcgctgggcctttagagagtcatattttgtgtttctagaatttcagtggggtgttataagctaaattttagagacgttagaattttcggggtttgttatttgaccaatttacccttggaagtttttatttgttttagtttggtcaaaggttaaataggtctttttaccctaatgttctttgtcttgtagtggatttgggggctggtgtatttcttcattgataaaacacaattaataaaaaaaaaataaataagaggaaaaacctagaaaagtggagacttcttcatctctccctctctttctttcgaattccccaaacccagcaaggaggtgggtgttctttgctgtatcttgtgaattttagcaaggtttctattcctttgaatcaaggtaaatcttcctagcttttctatttaagtttttcttagtctttgaagtagattttatagctttaggcttgaattaggggctgtgtgtatgagtttggtttgggctcttaatctgaagttaggtaattgtaggttttgttgttttaagctgagtttgttggctattttggtgtttggatggaaattcaagttcaagagcttaggttggagctctaatggtggtttggaattttatgtgattttatgggttctgttgattggaattggtttatattattgtattcaggtattctggaagtttttagaaagtttgggattaatttgagttgtgggggtcggatttttggttcccagttcagaaccggaattccggttcctgggagcctg

SEQ ID NO: 276900 - DNA, 1059 bp, Cannabis indica
ttttctttttttgttataggtttgttttatattgattttgttctattttgcgccattatttatggctttggcgccttacaaggctttagcacctattatatggttgggcccctaattatttagggtagtttgtttaaattttacgtttttcggtattgaatgtataaaaaattttgacacaataatattttaaagttaataagttatgcactatacagatttattagtcggaataaaaggattattttggttaaggtatgatttaaagaatattttaaactgaaataaggtttaagagggtttactttaaacgctaattcctattagctatgttttggtttatatttttttaggaattttcagcataaaaggaaagtgtttagaattttagtattcagattctaatattataattaattaagtaaattgaagaataagaatcttgaggatcttgtaataaagggaggtggaaacactaatggtctaatgagaatatattggttcagatatatttgggaagtcaaattattatgaaaatttggtttgttctcaatattatgggaatgtaccaaaattattatattatttgtatttttaaagaatttctggatgagtggtattagtttttttatggaagaaatggaagtacaaatttgatggatgagctgcgccattgtttatggctttggtgccttttaaggttttcgcgcatgatttatggctggcccctaattatttagggtaattggttaaaattacaagatatcatgaattgtaaaaatattataaaatttaatagctaacaattatggtatataattatgagattattgccttattagtttattatagataacataatattaattttgggtatataaattataaatatgagtttattatagataacataatattaattttggtatataaattataaatgtgggattttgtaataaattggaggtagggacattaattgtgaattgagaatactttattttattttattttttatttttgggaagatattgaaataaatgggaagtaaatgctaat

SEQ ID NO: 276901 - DNA, 528 bp, Cannabis indica
tgcttcggttttgaagtgacacataaacaatttgcttcggtttgagcagttgacgttattaccgtagacgcaaattttgattttcttacttcaattttggaccgacgctaaatgtttttttttttttgcttcagttatgaaccgaagcaaaaaaaaaacaagtgcacaaacggtaattggttttttgcttcggttatgaaccgaagtaaaagactttttaaaaagaaaaaaatcaacaccatcgcaccaccaccaccaccaccatactattatacatctcacaccaccacatatacacatatttgaacaaccattttaactcaaaatcaagaagtttaaaccagcgcaccaccaccactacaccatcaccaccgcaccaccaacatcgcacgccaccactgcaccaccacccatggcgactgcaccaccgcaaccctaaaaaattagccaacatcaaatgagaaaaagagagatagagagagagagagagagagagagagagagagagagagagagagagatacaaag

SEQ ID NO: 276902 - DNA, 764 bp, Cannabis indica
agcagatgtttcatgaaatgcgaagtttcatacttcgtcaagaggaagagttgcaacgtttgaggcaacaagctgccccagttaatcaagggttaccaccagctcctgtgccagtggtgggtaaccaagggtatattatgccgcaccgggactctgtgttcgagcggtttgtgaagctgcaacctccggtttttctgggaggcattgatattattaaagccgatcagtggatgagcactgttacccgtatcctcgataaatgggggtgacgggaacagagagggtgaattgtgcggcttttatgtttcaagatcacgcccgcgtttggtgggacatagtgaatcaaactcgggatgtcagtgtgatgacatgggaagagtttaagaaactttttgaggaaaagttctataatgtggctgtaaggacttcacaccaggaagattttgtgaagttgactcaagggaaaatgtctgtggccgagtatactctggaatttgaccggttatcaaaatttgctggtgatctggtgcctaccgattttaccagaaaacagaagtatgttcgaggactgaatgctacaatcagtcgagacttgaaaattaccacatcccatgacactctgtacaagagagtggtagacttggccttaattgctgaggaggccgagcagcaagtgatgaaagagcaggctgcaaaggatgccgccatggcatcaaaccctcctgctggtggtaatgtcagtaaggggatcgacagtagcaacc

SEQ ID NO: 276903 - DNA, 490 bp, Cannabis indica
cctagtctcggttcgggtttaggtctctttttggttttgatctgggttcgagtttggtttaggtccttgtcctcatcctagtccttgttcggttctagttccatttgcgattctgagttcgagtttggatttgagttcgggtcgaagttcgagtcctggtctgagtttgggtttgggtccggatttcaatctaggtccagatcaagctccgggtgtggtttcgcgtcctgggtcttggtctaggttgggtacgagtcccaagttccaatcccattctgagtctggattcagttcaaggtctaagtccgagtcttaagttccgatcccgatctgtgtctggattaagttcttggtttccttggttatgatcatggtctaggttcgagtttgtgtccgggtccgagtctggctttgggtttgattctaggtgtgggtgtttgagttcgggtccgagtctgtgtccgggtttgtgtccaggtctggaccccga

SEQ ID NO: 276904 - DNA, 521 bp, Cannabis indica
accaaagaggtattcgtgtcacaactataccaaagaccatagttaactgtcccagctagatatttgaaaattcttttgactgcagagagatgagactgtttaggattagcttgatacctggcacataaacctacactaaaggatatatcaggacgacttgctgtgagatacagtaagccacctatcatacttctgtatagagtggggtctacagggtcaccagactcatctcgtgacaatttggacgtggtgcctattggtgtgtgtgcatgcttgacctgagagaatccaaacttatctaacatagacttgacatatttagactgtgaaatgaatgtgccatgatctagttgttttatttggagtcctagaaagaaagtaaggtcacctattaaactcatttcaaactcattagtcattaaagtgacaaatgtttggacttcattatcacaagttgagccaaaaatgatatcatccacatatatttgggcaacaaaaattcctttgtcaatatgtttaat

SEQ ID NO: 276905 - DNA, 1067 bp, Cannabis indica
taacaaaaagtccatgccaagtataatgtcaaactcggctaatggcaattccacaagatcagcgctcaattctctattttcaattctaattaatacagatctaacccactttcttgaaataattaattctccattaggcaacagggttccaaaccccgtctcaagaatatcactaggtctatcaaactgatcaagaagtcttgatgacacataagaccgagtagcacccgagtcaaataaaacagtataaataaaaccattgattagaagctgacctgcaactactgaagggctggtagcagcatcagcctgagttatagcaaatacacgagcaggtgcaggcgcaggtttgacctcaggctttggttcctctttcttcaactgatgacagtctttcttaagatgtcacactgaaaacaagctctccgattacaagtcccggggtgatgcttcttgcaacgcgggcactcaggataggagtaagtttgacgccctcctttgttctggtttcctcgaaaccttttactttgccctgaacttcccaaagatggaaaagttcttttcttttgctcaaaagtggaatctccactttcctttcctggacccgaaacagggatagtagtggtcccaccgacaccaggaggctctagggtttcttgcaaaaacttaactgctccctcagctcgaagagccttatcaaccatttctgtataagttgtggtatcattcgtggtaataaccaagtcatgcctgatcttggcattcagtcttgccaaatacttttccttcttgctaaagtctgttggtacaattccggaggctagcttggccaagcgatcaaacttggttgtatattcagttacagacattccttctccttgtaccaactcaacaaattccttccgctttgcactgcggactgcctcattataatatttggcattgaataaatcccgaaattcctcccaggtcattctggcaacatccctggtgagggataccatctcccaccaaatcaaggcatcctcttgaaattgaaacgtggcacatgccaccctatcattccc

SEQ ID NO: 276906 - DNA, 629 bp, Cannabis indica
aaattaaaattaaaaaaacaaattaaataattagctgtctaattttagaaaacttgttattgctattaataataatttgatggcgagctatcgaaaaacaaataagactaacaacgaaataaaataaaataaatcatatcacagacaaggttaaaacaatcaaaattatattacaaggatatagattttttaaaacactcaaaatcatattgtcatagagacaagactaatcgcagtaacaaaaattaaatcgcaatagcaaaatattgtgaaaatttcaacacgcaagtgcacgtatcgtttacaagtaataatactcacaagagtaagatcatgggcggctaataacagggccccaaaaataataggggattattattattattattattattattattattattattattattattattattattattattttgaaaatataaaaagaattaatattgagaataggaaaggttattattggtagttttccatagcataacgttaatattaatgttatgtacaattattatataaatacacaattaacattcccatttttatctcattcttcctctttctctcattcttttttttaagtaaaaccagtatcattctcttcctttctc

SEQ ID NO: 276907 - DNA, 732 bp, Cannabis indica
tcaatcagaagaggagcatgagttacatcttcagatggttttgcaacggcttcgggaacacaagctttatgccaaattcaagaatgtgaattctggctatctcaggtgtccttcttagggcacatcgttagcaaagatgggatcaaggtggatcccgggaagatagaatccgtcagggattggccgagaccgaagacagtgacagaaattagaagcttcttgggtttagccgggtattatcgtaggttcgtggaagggttttctaagatttcaacacccttaaccgaacttacaaagaagaatcagcgatttgtctggtcagataagtgcgaagctagctttcaggagctgaaacagagattgattaccgctccagtgctagctttgccttcacacaaagagaaaatttgtagtctattgcgatgcatccagacagggtctggggtgtgtgctgatgcaagccgatcgggttatcgcttatgcctcccgtcagttaaaggattatgaacagcgatacccgactcatgatctagagttggccgcggtggtttttgcattgaagatctggcggcattacctttatggagaaaggtgtgaaatctatagcgactataaaagtctcaagtatttctttacttagaaagaattgaatatgagacaaaggcgtcggttggagttagtgaaagattacgactgtgagattctcaatcaccttgggaaggccaatgtagt

SEQ ID NO: 276908 - DNA, 302 bp, Cannabis indica
tatcatgttcccaagctgtacgtgtgacccgaacaaaatagtaggctttaactaacaactctaagaacataaataacactcttgagatctaacctaaccatgtcagaattaagatcttttgatctaagatcaaccagtgatataattagaaagacacaacggtaagattataatatccttaccaagatcaatatctgtcacagtcctatgtatactccatacatccaatactagcatactttacaaatgtttaggaaagaacataagacttatctaaggtgtatgtgttgggttttgtgccc

SEQ ID NO: 276909 - DNA, 1337 bp, Cannabis indica
tccaacaccacctacaagtctgagtcccgagtcctgggtccgagtttgagtcggggtcagggtttaggtccgggttcgagtcgggggcccagtcagggtcagtgtccgagtttgggttcggcttcgggtcagggtttgtgttcgggtcggggtcggggtccgaattcgggtttgtgtcccgatccaggtctcgggtagcggttcgggttcaggtctcgggtcccaggttcgggtctaggtctgggtccgggtttaggtctcagtccaggtgcgagtccgcgtctcggtccgggtccaagtccaggtctcagtccgggtcccggtccgagttcgggtctagtctcggtcccgcactacaagaaagctccttttgccgacgcataagctcgccggcaaaagtacatgtaactcgtcggcaaaagctgccggcaatggtttgtcggcgaatgaccttttgccgacgaaatacagacttgcgccggtaaaagcatttacaccggcgtatttgttcgccggtacaacgtaatcgccggcaataagtccgccagctcatgtgtctttgacgacgttttgccggcgatgtaatggcgagaaattttttatttttttatttaattttataatacttttccccgcacatgttaagcgccagcaaaagatttttttttaaaaaatttatttataaattaatttttaaattaaatttatattaaaaatcgaaataatactaaatataatatccaatatattataaaactgacatttataatgttattacaaaaactatatatattaaacgtaagtaaaagtattcagaaaacataaacagtaatatctacagtgtaaagtaaaaaaaactacaaaatcaacagcatcatcttcgtcatcagtgggaggggcagcctatgaggaggaaccagctgcatggccaggaggctgaaatggtggaatcggtggaatcggaggcagatccggcatgttaaaccctggaacagcgctggccaattggatcatttgttgttggaacacagccatcatctgattttgagtcatcatcatttgttgttgccactggttcctgttggaaattattttaccaggatcttagatctactcacaagtatgttgattaacaccctaaatatgaactttctaaaacgataaaataaacacgtataaagtttaggaaaccttaaattgggtgcagcggaatataatgactccttccgttcagatatgtagcccttgattcctttctgtagcagagcattatcaatacctgaacctggatctctttctctgaatctttgatgctgaaactccttttgctgaatgtc

SEQ ID NO: 276910 - DNA, 540 bp, Cannabis indica
agacaggctgaaggcatggagttaaatccttgagacggagccccatcttctcgtaagcagtcttgaacaaaatgtttgaagaagccccattatcgatcatggttctggccaccgttttgtttgctatctggacttccacgaccagcgggtcgttgtgcaaaaatcttatctggacagcatcttcgtcgttgaacgttatggttggctctcctgcgcgtggaactttgggcttcctctcttccacggccaggatgacttcttcttgctcgtactgagctgttcgggcatatctctctcgagctttgcccgtgtctccagcgatgtgcgggcctccaataatgacttgcaagtgtccatctattggcggaggcatcagatcctggttgttctgaccttggttggccttgacatacttttgtaagtgcgggttgtttttcttgatcaaaagttctatttcccacttcaagttgtaacattcgttggtgtcgtggccgtagtctccatggaaccgacaaaatttcgtcatgtcccttttgctgg

SEQ ID NO: 276911 - DNA, 211 bp, Cannabis indica
gaaagtaatcaagattatgtgatgaaatatatattcctagatttatcagtacacatggtttgactgatatgataatctacaacattagtttacttgcaccttggagtgctatgttctttccagggcattggttaaagtaaaacttgggttggatgcatggagtatgcatcggaagggaccggtattgaactttgaatcagatatgttaaac

SEQ ID NO: 276912 - DNA, 501 bp, Cannabis indica
gtaatccaagagtcaattcttttgaggtatctcatgaccctctctatagcattccaatgctctgcactaagtctactagtaaacttgcataataatcccacgacataggcaatgtcgggtctagtacaatcagtggcatacctaagactgccaatgatgctcgcatattcagattatcttacaccatcaccagtgttcttaaataattttacactgggatcatatggtgtacaagcaggtttacagttaaagtaattatatttctttaagatcttctcaatgtagtgagattgatccaaagaaattcccttttcagacctagtgatctgtataccaaggattacattcgcttcacctagatctttcatgtcaaaattttcacataacaaagatttcacattgttcacgacatgaatatttgatccaaaaattagcaagtcatccacatataaacaaataatggtacacacattttttctagatttatagtaaatgcatttg

SEQ ID NO: 276913 - DNA, 579 bp, Cannabis indica
agtgtattcttggaagatcaaaacattctctgcaatctccaacaatgacttcaagttagtgcttccgctcatattttatcatcttcttctttaatttagcaaaggttatttatgattttaggttttctatattgaagcactttaagaatatgtttagatctgtgatttatatatttcttgagtgttttataaaccctaacaagtggtatcagagccacctttgttgaattaattgaagatatgatgattttgtttatgaaatttgggaattttaaaaattagggttttgatatatttttaatactagtgccgcaattttttttttttttggatacaataatatataatatatatcaatggattaattgtgcataagatcgacgtttatggaagaccaatactgcggctgtcaagttatatatatatatatatattatgtatcacatatgtgttttcttagatttgtggcttcagcgtctatacatatgtaattttgttttcttttttttcttttggatttaattaataaaagcttctgtgtatatggttctttgtttttaatgttggtcttgtatgact

SEQ ID NO: 276914 - DNA, 655 bp, Cannabis indica
ttaaaatataaaacataaaaatcgatatttatgttgattttttatgtgaaaagtcattccaaaaaataaaattaaaaaatgaaaataggattagatgtattagtgggatcgataatttgaatcactttattattatcttttcattttattgtgattatagtgaaacgacaatgccatcaccaaaacgacattgattatgataactgttgttactgatatttcgcaacaccaaaaagtacaatttaactggaaaaagagagaataatttgagagatgacaaatgcgagtattcaacctagaatggcgagtactcgaataggaatgcgagagtaaacaacaaagcttggaaaaataaatgagacggtgaattatagtggttcagtcagatttcgttctgcttagtccactgtagcaagggattcgtaggtccattttcacggtggatcacccctttatatacaaagcaggtgcccaatcggttacatgaggatcacatttattgttaatccattatttacacattgaattgcaatgactaaactcaaacaacgttaacattaataaatgtatgacagttactgaattcatcaacgtatgcgtctttcgcatctgcgagttgaccgttcacgttccgtctgttgagctcgtaggatcg

SEQ ID NO: 276915 - DNA, 559 bp, Cannabis indica
aaaattcaatcagaaagagaaccactattaattctggtgacttcacctgagaagacgaccaaaatcaatcaaaacaggggctgttttgaattcatgaaaaaaaattgtagaaaaactactacgaaactaaaattcaaatggaaatccagtttaatttgcataaaactaatatcttgacttcatttttcagatacatgaaagacaaatctcaaaaagttgaactggagttcccaaacaatccaactcaagtataatctaaaaaaaattacatcgatactatagtaaaatatttatcctggtgtatttttgttgttttctaaatttataatggtgaatttgttcatattaaatcataaagagacatgtagatagagttacgtacgtgaaaacactgttctgatttttaatgtttcgtaacagttgtattacattacagttgcataaacattttgctaatagttgtttcgtctgatgcaaccttcggccaatcacccagcaaccacccagaaacttttgtgtgattgaaatcttcgtccgatataaccttcggccaaccacc

SEQ ID NO: 276916 - DNA, 822 bp, Cannabis indica
tggtatttttgggaaaatagaaataaaattgtggaaactgcaaaatctaagtgaggcccatcacacccatggccggccacttgtattgaatttcccaattattattttcatttttttaaaatgccaaataattactaacccaaacctagcagctatctataaaaggaaagtggtggctcacaccgaataaggcaattaagcaattactctgtaattcaggaaactgcctctttcagaaagttgagcttcccttttctctatatatagccgcccatctcctcttcctatgcttgaaccatacacaacaatacaagagagatacaatttcgaatcctagtgagagagtagtgcccacacacagcaaacagtacctcaatcatagattggaagactgtgaaggatcacatccaacagaaggacattcgggctcagatcttgattatactctgcaatagaaaggaatcaagggttagagatctgagcggaaggagacatattattttgctgcactcactataaggtttctcatactttatatgtgtttacttattatcgttttagaagttcatatttaggttgttaatcaacatacttgtgagtagatctatgatcctggtaaaatttaattccaacaactggcaccagagccatggtaattgatttgcttgcaagaaatttggacttaaaacgatttgtttgtgatttgaatggtatcatgttgttttgtatgttgtattgctgattgattgatgtttgtgaaattctgggaaaaataattgattttctgtttctagaattattttaattggatagtttggaaaa

SEQ ID NO: 276917 - DNA, 512 bp, Cannabis indica
gaaaacactataaaaaagtgacccaaaacataggccaaaaatagcctaacaaacgtgtgagtgaggataaagcacgctggaaagacacatgctacattgcagtactaatgtcgatccaagaatcaattaagaatagtgtatggcacacgatatcagtttgagaatgtattagtagtctatagtgaagaatggtatgattggaaatgtatcagaatgtttagttattagtaagtgaaattagagtgttggtggccagcaagattatattagtctgagaagactcccaactagaataggaaaaaataactatgggttttaaagtaaaatcactgaggactaccgaattgtatgaccccactgggataatagtggataagaggcactagatcaactattaatatagacaacatgtaaaacaaaataaaatgttgaaatgaatattaaggagacggttaaacttcatgaagttacaaagttaactgtactaggtcatgatgttgggttttatgccc

SEQ ID NO: 276918 - DNA, 583 bp, Cannabis indica
caaagtaattctagtggaggtaaaccttgctgtagctcctttcttgtttcttggaaattttgaaagaattttatgatgttgcatgcttagtttaggttgttgttgctgctgtgattttattgttgtttgcagagaattaagcatgtttaaatgagttgaattgagctgctagtaatgcatgatagttaggttgattgagttatggtttttctatgcaaaagcttgagttttcaaagtgaaattgtgagttttgttgctgtgtttgttgaggtcgatttcttgtgttttcagaggctattatatgcatgtttaagtaggtttgaactgatttggatgcatgttagttagatttaaccaagtttgagttttgaactcaaagcttggagctttaatggcatttttggtttatgtgtgttctggactgtgtagttgctttagaaatgttctatgggatgtttagaacaggtctggaaggttttgtgtggtttggatttgttttgaatgagttatgaatttttgagttctgcctgcgaggaactggaattccggttgtgcatccagaattccggatgggttttgaaaa

SEQ ID NO: 276919 - DNA, 667 bp, Cannabis indica
attgctagaaaaccctaaaaggcttgataattcccaaagctatttactagagagttcccttagtgcttagagatagggggaaataagcttttggacaaaggtgtaataccttgttcaagtcatgatgatcccttctaatctacactcaaggttgtgagtgagtgtatatatattattctcttgttatatatacaaattttatattacatgtgttcttatcttcttctatatttcttatatataatatatatagtgtatatatattgtatattatgttgttgtaatatttatttaatctctttgttggtctttgtattgtattacaatagagttgtaatatcttgattttcttccattgtaataaaatctctaacagtaatctacttattttttgtatatgttttgttagtgggacaatattatgagttaggatttttttttccttttaaaaaaagccttttacataataaatcgttattatataaaatattttttggtattgatgatacatcaatcaagctagataagttgttaataaattctcaatttgccacattataggcagcaaactaagccaatatttttaataaaattttaaattttgttttttgttcaaaaaattattttataagggaattttaattttatatacttaaaaataaaaaaa

SEQ ID NO: 276920 - DNA, 600 bp, Cannabis indica
ataaaaaccgagcttcatgcaaacaaaccaaattcaccattaaagcatcaagctttgagttccaaactcaaacttgattaaacaacactatcatgcattcaaatcagttcaaacctacttaaacatgcataaaataacctctgaaaactacaacaaacatcaacaaaacaacagcaacagatttcaacaatttctctttgaaaaccatagttttgagccaaaatttcatatcttgataaaaccaagtaatcaccaaccctatcatgcttgaatcaacattttaaatcataaataaacctctgaaatcaacatcaaaacacagcagcaagaacatcaaaaactagcatgcaacctaaccattttcttcaaaaaaatctcaagaaactcaaatagcaagatgaagaacttaccaacaattaaagatcacaaaaacttgctaaaaagagcttgaatcaccaagaagaattccaccttcttgctgctcaaggagggccgaaaacaagagggaaagagagagagcttttcttttttctaaattttctaactttttacttttaatgaaatgagagaaaataatcaaataataaaccttatttcagc

SEQ ID NO: 276921 - DNA, 515 bp, Cannabis indica
gaatttttgaaaattttgaccatgaaaatattaatatgacaaaaattaagaaacatgcttgaatatgctcaccacccccaactaaaataagacagtgtcctcaatgtctaaagatataaaaattaaaagaatagggaaagagaacacctggagagcaagcaaccatggatagcagcgatattgatcctcgaaaaaacaaaacaaaaacaaaggaaataaatagtgaataaaatataaacataaacagaaatagaaacaacctgatcattctgggtaggccagagtcacaaaggtgatctcctcaggtaagcctaccctcttaccagaatttgtcaatatcgcacatggacccgaagaagcgtttcatagatcgggtctggaatcgcaaattctcatattgcgacggtgatgcttcatcttgggacatctcaacaatggaagaaacattagcttcctcaggtggataaagcatattttcagtatcaaagtcatggaggagatcatttaaaaaatca

SEQ ID NO: 276922 - DNA, 542 bp, Cannabis indica
gaaataaactgaataacataatttcttatcagaaaaatatccaaatacacatgtttcatgaaacaaataaaacacactaaagacaaactcccactgaatctagatatcctcataatctaaaacacccatacgagcagtgtgctcatgaaagaccttgggtggcaaacccttagtaagggggtctgcaatcatggagtttgtacttaagtgttctacacaaatctgtccactttgtaccctttcttttacaacaaggaacttgatgtcaatgtgttttgacttcgtcgagctcctattgttgttggaatacaatacagctgacttattgtcacaatacaacttcagtggtctttcaatttcatccactatgcgcagcccagtgacaaagttcctcagccatataccatggttggatgcctcataacatgcaacaaattctgctgccatggtggatgaagctatgagtgtttgttttgtactcctccatgatatagctccaccacctaacagatatatgtagcccaaagtagatctcctactat

SEQ ID NO: 276923 - DNA, 606 bp, Cannabis indica
gtcttaagaagagtcttcccagccacccaagaacccggagtggggtacttaggccaaactgggaagggccatatgaaatcgaggacaaaatcagttcaggaacttataagctaaaaaggatggatggaactattgtgccaagggcctggaacgccgatcacctccgaaaatattaccaatagtccaaatgtgtaacttaggctttgtttaaagggtttgtactgtctaagtgtatgcaacctttgtattttaaataaaactgagtgccttaaaaaccaagttttaatgccactcagtggggtactaagggataccacacggacagacgaaaaacaagacaaaagtaaaacatcctgacccaaaggctgatcctgtgtatctacttggagtacgaccatgcgatgatgaagaggctgattctgtgtcgttatctcttgatagtcgactgcgaggattatgccgttcagggtcttcatcaacttgtgtgctttggtttgggtaccttgcggattgatccctcgacgttggatggttcaggtctaaaccttcagggttggttctatgttccctgcgtacacggttagtatgacgtctagaagtcgttac

SEQ ID NO: 276924 - DNA, 543 bp, Cannabis indica
aaatgaagcataaataaccagcaacacaaaaattaaaaaacaacacacctctacaaccttttttacagtgacattgtcaaaaatatcatctgattcaacatttttaactgggatttacccttcctctacatataaacaaaacaataataaacaacacaaaaacaactgttaaacaacaaaatactacattcaaacaaaacaaacacacaaagacaagataaaaagaagaaaaaagacatattacatatgaaagtaatacatcccatagaaatataggagtaagtaagataaattacaagaaaacccctaaaacaacacaaaaacaactaaaaaataccttatcaagcttggacacatgtaaaaattcattgtccaactcaaaatctgagtctgaatttcaaccacaggacaaggacgtttggacatcctcctcttcgaagtttcaccaagaaatttacgtttgcttggaactggtgaggtaaggcttgggggtgttccttaaaattcctcttacccattaaggatcgacacaagtttttctga

SEQ ID NO: 276925 - DNA, 630 bp, Cannabis indica
taaacaactgctaatttccaaattaactaagcgggctttacatgaaaatacttctgtttctttattgatatttaaaagataaagattacattgaaatagagttttatttagggcatacaacccaacaccatggccctatgtaatcaagcttctaataagtagatccaaaatttaccaagcaaatttcttaacttattaatttctcctgactccactatagatttggaattgaactcttaattacatagaacgttctattaccaaaaatagatgcgatttgaattacccattgtattaatccaaatagtcaaagatcctctatagttaatctacattgagtagggataaatttaccgttctaccctccaatgtattttatccttaaacacttagctaattgtaaatgatatttcagtaagctactataatcagtgaaatgagatcgcaatcattgttaagccaagctcaaaggaaatcatcgtttcacttctagaagttatgaaagctataaattctgtatctatgattagcgctcccactcaattgtactatcatgttcccaagatgtaagtattgcgccgatctaattggtcagctttaacggacaactcaaagaacacaaataataca

SEQ ID NO: 276926 - DNA, 699 bp, Cannabis indica
gctcccactgaattgtactatcatgttcccaagatgtaagtattgcgccgatctaattggtcagctttaacggacaactcaaagaacacaaataatacatttaagtcaaaacttaaccatcttagcattaagatcttttgacctaagataaactaagtgatattgacttagatagatataatggtaagtttatgatatcttatcctatgtcaatagcgatccagtttgatgtatactccatacatccaatattatacttttctaatgtcctagaaaggacataacacttatccaaggtgtaagtaaactttatccctgattatcatgtcagtataaatctagtgtactaacaaatcatgagacttaaactttgaaatatataatcataattatattccactgttgacaacaccataatcatgaataactatatgttcttgatttaatagaatttatactttaaacatataatcatgaaatgtgaaacatgcaacataaaatgatttccgatcctttattaattagtaaatctgatcatattaaaatgagttttatttagggcatacaatcccaacaaactcccacttgcactaatataaaactaaaagtgcatttcaattaatctcaacaccttgatgtccagatcaagtgtaggatgtagtattttctttgtaataggatttgacaggttgtattcaa

SEQ ID NO: 276927 - DNA, 648 bp, Cannabis indica
taaaacttattaactataaaatctaatttttaagttaaaaattaaaatgttcaaactttaaatacaaaatagtttaactaataaatgtaatttatataatataagatatacacttttattaaaaaaatatataaatcggtttaattcagtttattcgggttaattgggcggtttagaataatttgtcaaccacccaatatattcattgggcggtttgaattttcattgtattatttcgggttgtattttttgttggtttattcggtttggtttggacagtttattcaggttgggcggtttgtaaattttattgaacacccctaatatagagtaccgaaatgatggtgttgggtagttaaaatgtgaaataacaatgctaaataataatataaagagtaatttgcggcataaatacctaagttttatgccgagtagcagataaatacctaagtcgtatttttggcggtaaaaataccttccgtcactagtgtggaacttccgtaggtacctggccgttatgtgccaagttagtgtccacgtgtcattctttgattagtccacgtcatttaatttaaaatttttatttgtaaatcaatttaaaaattaaaaataaaacaaaaatagttttaaaataaaataaaacaataa

SEQ ID NO: 276928 - DNA, 560 bp, Cannabis indica
ttgtaaggcgccaaagccataaataatggcacaaaatagaacaaaatcaatataaaacaaacctataacaaaattaccagtatatcctattatatcagctcacccaaaaaagaacaaaatcaataacaaacaacaagatgaaatcaactatccaccatttcagccttcaacccaacacgacactgaccgagatctcccaggctcaaaactaaatttaaaaaatttaactcaaaaacttcatcacactgtgcaaacatttaagcaaaaattctaaaatctataggtctttcactaactcaaaaagaaaccagcataaattccaaacaaaccaactacaaacaatcttaatgaatctaaaactaaaggactagtgttatctagattcacatactgtatgtatatacaatctgtggcacaaaaatgaaaaataaaataatataaactagaggaatagtgttactatgttttagaaatccgtctcctatggagaaattggggtctcacgggccaagaaaatttagggtattaaagattttgggttcgaaaagatatttctaaaa

SEQ ID NO: 276929 - DNA, 818 bp, Cannabis indica
ttcattttaaatggatttggttagtattatgttatatgaaaataatgtaagagcttattactaatttgtaaatagtgtgacagcttataaatatgtaattgtgtagttattattggatatggaataaaaaatgataagaaattagaattttggttaagttgagatattggtgtaccgtctcaaagagtgcattttgaacatttgtcctatacttcaaggtgctttaatataagacaaatttttgaaatacactttttgagacaatgttaatctttcaattcaattaaaattttaatttcccattccatattcaataataactacataattatataattatagactttcacactatttataaattactaataagcccttacactaacactttctcacctttcaaaatcaccttatccttaatgtggcaaaaaaaaaaaaaactcaaaataataacaataaacgcatttgtttgtttactaagagagcgtttggtaacacttttgttttttaattttttaatcacaaataagaaagtaaaattttgttttaaaaaacgaaaattgtaattctataaccacttttgttttttaattttaaaaactaaaaaacaaaaaaacaaaaagtgtaattctaataatttttatttttatttttatttttttgtattttatttaagttgggttccaagaccgagtttgggaccatggtccgagttcaagactggagcccgaatcccaaggtccaagttggggtcagagtccaaaatattaattaagaaaaaaaattgtaaaagtgattttttttttattttcaatttt

SEQ ID NO: 276930 - DNA, 430 bp, Cannabis indica
tttttagctgagggaagttttaatgactggcataatatttctgatcgattaaaaagtcatgaacgaagtacacaacatattgagtcaattgctagttgggtggaattagaaaaacgactgaaaatgaagttaacaattgatgcaagtttagaagaacaaattaatcaagagaaaaaatattggaaacaagtgttagagagaattcttgctattgtaaaaagatttgggcaaaataatttggcattgcgaggagatcgtgaaaaactatatgagaaaaacaatgggaatttcttacaaattatagaattacttgctgaatttgattcaactatgcaagaacatgttcgtcgtattttaagaggtgagactcattatcattatttgagtcacaagattcaaaatgaaatgatacaactactggcaactgagg

SEQ ID NO: 276931 - DNA, 652 bp, Cannabis indica
agatcctggtaaaataattcccaacattaactccatgccttcaacccgtctatggtttctccggtcaaggagttgcgcccttgggacaaatctgcctacccctcacagttggacaagctccaacgagcataactatcatggcacaattcctgatattggatgttccttcagcctttaatgtaatgctaggtcgaccagccttgtatgacttaaaagctgtcacatcagtattccgctcgtgcctgaagtttccaaccaaaaatggggtagggtgtcttagagggaaccagaatcggctcgggaatgttacaaccttgcagtggccaaggctaagaaggaagtatcctccagccagagcccggacaagggaataaatattcccaagtaggaaacttcccaaggcgaggatgaagattgtggatcctcgacttggggacacaagcagtaatgttggacctgtggaagaattagaagagatcgaggtcgatccagatatcccggccagaaagctaaaaatcagaaagggtttgttgctcggagtaaaatcggaattgataaaatttctgagagcaaacctagatgttttcgcctagtcacatgcggatatggtccggatcgatccttctattatttcgcacgtcctgaatatcga

SEQ ID NO: 276932 - DNA, 607 bp, Cannabis indica
atgtggatcctcgacttggggacccaaacaacaatgttggacctgtggaagaattagaagagatcgagattgatccagctatctccgccagtaagctaaaaattggaaagggtttgttgctcgaagtaaaattagggttgataaaaattttgagagcaaacctagatgtttttgcctactcacatgcggatatggtcggaatcgacccttctattattttacacgtcctgaatatcgatcctaacatccggccagttcagcaaaaatgaagactgctggataaagaacgagcagtagccctgaaagatgaagttcaaaggctgcacaacaacaacttcataattgaagctttctacccggcttgggtcgcgaatcccgtactcgtgcccaagccaaacaagaaatggcgagtctctattgatttcacagacctcaacaaagcatgccctaaagactgttttccacttccaaggatcgatcagctcgtagatgcaacagccgggcatgaaattttaagcttcatggacgcttattcaggctacaatcagatcaaaatgcatccgccagaccaagaacatacaagtttccgaacagatatgggtctcta

SEQ ID NO: 276933 - DNA, 601 bp, Cannabis indica
gacgaggcgcgtccgagcagccctcccgctgctgagggagaggaggagattgaacccctaactatggggagtacaacgaggctgggcaaccagttgatgctgacggggacgtcctggttgcgggcgtcgattacgtcaccgaggagcttcctgaggcggttcctcataagaggcagggtgccttgggcgccaggtggatgagtcctccgtccaagatttcgggggcacgcctccgcactctcgaccaggacggatacctaggcgggctggactgcttcattccagcccacgacaatcgcgctacgaaccctgataaggggatgtgcgcctggtcaggggctcacggccagcaaagggcactgatgcccttgcacaagtacttccgggatgtggcggacttcttcagcctctgcccggctcagattactcccaaaggcattaagtatttgtctgctctcttcgtcctctacgcttcccagggatggggcactccttctccccatgaggtcgcttggttcttcgacctgaagtctacccccaagcaaggcaggtcggggtatttttacttctctcagccaggcttcaagtggttgagcgggac

SEQ ID NO: 276934 - DNA, 470 bp, Cannabis indica
gacacagcctgatcgtactgtttcttcccactctctttctcagcctccaagtcgcgagccatctcagcgatcgtgtcctgcgacttcttgagctcgagctccacctgttcttttgccctgttgacttcctcgagctccttctccttggccttgttaagctcctccatcctcgccacctcctgcttcagcttctttatgttctcttgaaaatggacgttctgcctcttcagcgaatcagtttccttcgaaggagtagccgcggctttcatgaacaaagccatggattgcacggccagttcagtagatcgagaagcaagatcctcgtaaggaatctcagccagtaatttttcctgcatggccagaaagtcgcgagcacgaacaggagagtcgatgacgactttcttccccttgtcctgagtagtcttagccaacttcttggaggaatctgcagcaagcgaagtcatcacatc

SEQ ID NO: 276935 - DNA, 571 bp, Cannabis indica
tgtcgcggtttccccttagggggcggcttcttgaagactccattcctttcctcaattgcatagatgtggtctcgtggcaccgcgagttcggtatagttaacgaagtgtggtccacctttccttttcggtgaggactccttctttggaggagatttggccaacttcagacttcgctgtctccgtgggctgcgtcttcttgggcttcgacctctggaatttttccctcggggactgcgagaccttgatcgcggcactggtgacttacgcttatccttgcctttttccaactctgctagagaattctcaattctcttatgaggttcggccatagcgaagaattcgactagtgattctggtcttcgagcttgtaactccttccaaaaatcggttctcggcaaaacacctgttatcaacatacaaacaagcgaagactcgggagccttctcgacttttgttactttcgcattaaatcgtttaaaatagtcttgtaaagactcaccgggttcttgtttgatgttggccagagttgtataggaaggcctataagtcatcgtggcctgaaagtgtgtga

SEQ ID NO: 276936 - DNA, 569 bp, Cannabis indica
tctaagtttcgagtttgggtttgggtccaggtctagcgtttggggctgattctacgtggtgggcttgagttcgggtccaagtctttgtttgggttagtgtcaaggtctggaccccgatcagggtctagtttcgggtccagttccaagttggggtcccgagtgcgggtccatgtttgggtctgggtcaggatctcagtcaagatctaggtccagcatttttatcccagtctgggtcttggtctgagtccaggtttgtatctggatccctatctaggtcaaaatctatgtttaggatcgtgtcccaaatttaggtccaggttcgggtctcagttttggtgtgggtacacgactgtgtccgggcccgagttccagtcttagtttgggtctgaggctaggtctttattaagttctaggtctggttccgggtcgtggtcacagtcctagtcttgttctacggtcctagttcggcgattcttgtccagattctaattttggatcccaggtctaggtctgtgttcgggtttggttcttcgtctgggttgtgttcctagtctgagtcccagatctag

SEQ ID NO: 276937 - DNA, 684 bp, Cannabis indica
gttttcttctcttgtggcttcgaggctctttgctataggctatagcaccagtgttgtaacaaagtaaaacaagtggtttttccattccaagaacaaaaccaaatcctgagaagaactttcttagccaaacaagttctttagcagcctcagcggcagctatgtactcgtcctccatggtagagtctgatattgcagtttgcttagcgcttgtccaaacaactgctccaccccaagagtaaaaaccatcccatatgtagactttctgtcatcaagacaagcctagaaatctaagtcggtatagcctacgggatttaaagcaccacccatgtagactaacacataatgcctagtatttttcaaatattttaaaatatatttatctgcagtccaatgttcctctcctgggtttgtctgatacctgctcacaattcctactgcatagcatatgtcaggtctattgcataacattgcatacattagactcccaactgctgaagcataaagaacccttctcatgtcttctatctcttgaggatcagtgggacgacacttgttccttagatagacagataccaaatctagaaggcatttgtgcccctttggcatcagtcattgagaatctctcaaaaaccttatcaatgtaagttgtttgagagagagcaagggatctgttctttcgaattc

SEQ ID NO: 276938 - DNA, 677 bp, Cannabis indica
ttatatgggtcacagacggtacttgcctgcaaatcatcctgatagacggaagaagaaagcattcgatggtactgaagagggtgatatggctcctttgccactgtctggggaacaaattctccaacaagttcaacttgtagattttaagtatggaaagacgcaaaaaatataaaaaaactaatggttgttttcaaagaaagtcaatcttctttcgtcttccatattggaaaagtctactagttcgacattgtttggatgtcatgcatattgaaaaaaatgtgtgtgagagtattattggtaccttacttgatattcccggcaaaactaaggacggtctaaatagtcgtttagatctcgttgaaatgggtatacgacaatctctggcacctgagaagaaaggtgaacgtttatatttcagtttgcaaatcacttgcaaatatgaaagtacccgatggttactcgtctaacatcaagaacttggtgaatgagactgaatagaaactaatgggtctaaaatcacatgattatcatgcgttaatgcaacatctgcttccattgccattagatcagtcttgccaaaaatgtttgagagtgtttgacacatgttttcattttcttcaataagttgtgcgggaaagaattagaattggataagttagatgcattacatgaacatg

SEQ ID NO: 276939 - DNA, 615 bp, Cannabis indica
accacataaatttgacttatttatttgatgacccaacacacattttatatatacaattgtgaccccaataaattctaacaatctcccactgggtcacatatgtatacatataaatgtgttaaccttattgagctcataactttgtcatcataaccataggcatgtgcaatctcgtccattaactatatcaacataggatcaaagcgattttcgttgtatcaatcacaactaaacccatcaatggtcacatatatcaacatagccaaatgacatagatcaatcatgataatgtggtatgaaaattacatgcatggtgatctattcatgtcaattttcaattggtcctactttactttatggagatcaaaactttagcttaaatgtacaaagtgaaataaactgaataacataatttctgatcagaaaaatatccaaatacacatgtttcatgaaacaaataaaacacactaaagacaaactcccactgaatctagatatcctcataatctaaaacacccatacgagcagtgtgctcatgaaagaccttgggtggcaaacccttagtaagggggtctgcaatcatggagtttgtacctaagtgttctatacaaattt

SEQ ID NO: 276940 - DNA, 725 bp, Cannabis indica
cataaattggatccaaaacataggctaaaaatagcctaacaatgattatataggtatggaatttatagcttctataagtatttagaagagtgtaacgatgattttcttcgagcttggctgaatagagataaattattgagatttcatttcagtagttatattagtttactaaaatatcatttataggtagctaagtgttttaagaataaaatacattgaaaggtagaacggtaaatttgtccctattcaatgtagatcatctataaaggatctttgactattatgattgtaacaatggataatcataacgtatctatatcttggtacatatagagtgttctatataattgagagttcaattcaatttcgaatctatagtggcataagaaggaattaataagttaggaaatttacttggtaaattctagatttatttattggaagcttagtgatataggctcatggtcccctgaatagttgagataatactgcttgcaaacttagttaattggttttaataaacaaataaaaatccaaaaattagactatgtcttattaatgaattttcactaagcaagggcttaattgtgaagaaaagaggttttgggatctatttactaattaagatactttgtatggtctaattcataaattatataaatgacaatttcatatgataattagttataattattaaataactaattttggcatttataggattg

SEQ ID NO: 276941 - DNA, 659 bp, Cannabis indica
  modified_base (453)..(453): a, c, t, g, unknown or other
  modified_base (460)..(460): a, c, t, g, unknown or other
tttagactaggctttcgacctgtccaaagctcataaggtgtttttgcaactgctttacttggtactctattcagaatgtaagctgctgtctttaatgcttctccccaaagggactcaggtaaggtagaatgagtgatcatgctccttaccatatccttaagagtcctatttcgtctctcaacaacaccattcatgctaggtgatcctggcatggtgtactgtgggataataccacattcctttaggaatttagcaaacggtcctggacgttgttcacctgagccatcatatctactgtagtactcaccaccacaatcagatttgacgttcttaatcctttgttgagttgattctcaacttcagctttgtaagctttaaacacgtcacagactgagatttttcatgaatgagatataggtacccactaatgtgagtaatcgtctatgaatgatntaaaatntagttgacctaagccaagatgtccgtaggaaattggcccacgaaataatctagtgtgaatcaattctaacacgtctgaagctctattggcacctaatctcttagttttggtctgtttacccttgataaaatctacacagacattgaaatctgtgaagtcaagagactctaaaatgtcatcagccacaagacgcttaatt

SEQ ID NO: 276942 - DNA, 878 bp, Cannabis indica
agtacaaacgaaacaaaatatataaatctaaatatggcaaactaaaaaaaatattaagataatcttattaagtttgaaaaaatatgaaaagaggaagaaatataaaaaaataaatataaaatttaaagttatcgtgatttagataactaaatacttttatgtatcaatatttattttgttttaaagataaaattacatttcttcttaattttttaaaataattacaagtaataaatataaacacaaaaaaaattaaaatttaattttaggaataaaaataattttactttttattctttaacatttaaaatccaaaaagaattattaaaaattaacataaaatatattttaaaaatattattgtactcaagtattatcatacatgatcccatataaattttactataaaaattacttatggttttgaaaaaaattaatacataattatctaaccaactaaattacttaattcatttcaacaaaatgaatatatttaattcaaattttaataatagagaataattaaattatggaatgcacacattttaaaaatatttatgtacatatatctcattataaaaaaagaaaaattaactaaaataaattgataaaaataaaatactaataaaaataattaattataaagcatatgaataaaacaaaaacaaaaaagaattaaacaagaaagattagagcatctttaatagagatgcaaagtaataagtgatgcaaagttaaaatataactcgcttaataacaattgtactccactagtgtaccaaattagctttgtgtgcccaaaattgatggaaatttggcacaacaaatattatgctaaatttttgacacaatatttgttattgatgtaaaattttaca

SEQ ID NO: 276943 - DNA, 786 bp, Cannabis indica
ctcctgatgccagcacatccgaacctggtaagtctcccttaacggtccatcatgttccttctgctcaagattatttccggtgtaggcctatagaatttgacgaatgtctccttaaatttagaatgccccttactcggtggggtgatcatgccaagggcttttatttttccaacttaggtcatttctaggccagtcccggatggggtccggacctcctgcaccttgttgtcgagtgaattttgcaacaccaattttgtataatattattaataacagaaagaaatctatatgaagaacaactgcgagtattcagcctagagtggcgagtactcaaacggggaatgagaaatgattaacagaaagctggaaataacaatgagacaaagagttatactggttcagtcagatcacggtctgcttagtccactgtagcaagagtttcgtaggtgccatttcacagtggatcacacctttatatacaaagcaggtgtccgatcagttatacaaggatttcattcattgtcaatccgtttttacacattgaattacaataattaaactaaacaacgttaacattaataaatgaacgacagttactaagttcatcaacgtatgcgtcttccgagtctgcgagttgactgttcatattccgatgttaaactcgcaggtttatcattatgtttaggatgtctgcgtccttagatagccgccttttgtggacatcgcatgacgagctgatagaacctagacatgcaagtctatcttggtttatcaaggctacagggt

SEQ ID NO: 276944 - DNA, 438 bp, Cannabis indica
aaaaatggaaagcggtaaacagatgatcacacaaacagtaaagtatttactctcaatacttattgcaccatgagtcgagcttgtctctaaccatgaatgtacatgttcggccggtctacaggaagtttaaaaccttggcgctctgataccaaattgtaacgccctaaataattaggcacgctacccaagatacttatgaaaccctaatcccctaaacgggattactaatgagattagcgacgaatttaatctttacaataaacggaatgaaaataaaacttgtgataatttaaactttacagttgggatcccaaaaatatttacaaactttattacaagtctttttcagttagccggcctaagcggcaaaatagagtttcaaaaatttaacactggtagactcttaacccgcttggtctgatatggcccggacatgta

SEQ ID NO: 276945 - DNA, 748 bp, Cannabis indica
gatttgaacatgagacagagaagatggctggaattggttaaggactacgactgtgaaattttatatcaccccgggaaggccaatgttgtggccgatgctttgagtagaaagggtcccgggcaagtttatactacggttctgatagccccttaactagcctctgaaatggttagcgcagggattgagttcgtagttggaaagttacacaatttaacacttcaatctgatctgttagaaagggtcagaagagctcaacttgaggatcctgagctagttaaagttcgagatgagattatggctggtcggcctagagatttttcagtctcaaacagtggaatgttgttatgcaaaactcgagtttgtgttcctaatgttgatgagcttaagaaagagatacttgatgaagctcataccacaccttattcgttgcatccgggaatcaccaaaatgtaccaggatttaaaaccctatttttggtggtatgggatgaaaagagatgtggtgcattatgtgtccaagtgtttaacctgccagcaagtcaaggctgaacatcagaggccggcagggttactgcaacctttagtccttcctgagtgaaaatgggaggacattggaatggattttgtaactggattgcctagaactacgagaatgtatgattcagtatgggttatagtggacatattcacaaaatcagctcactttctaccagtgaaagttacatattcagtggatcagtacgctgaat

SEQ ID NO: 276946 - DNA, 515 bp, Cannabis indica
tcttaattcttaacatcatagccaaaaatatcaaccttggaattttacaagattagactattcctttgtatgaattttgtattctcatttatagtataaattgtctacactgatagacaacatattaactctgtatgtccaatcgttactactcggtcaaaatcataagatcccatagtacataattcataattatgtctttctattccttctatgagatctcctaagctgatctactgacttaacttagtaacaagttaagtattcatttctgatagatattcaattagagcacttcttatttccacccacttacttgtctcaataccttgtaaatttctgcttattaacacatcacttcctcttaataatttctggaacgactaccgattttgcatcctaatatgaatctttctagcgtactttgtcctcactcatacacttcccggggtgactccccgaaggatttcccatcttgagattaccccaacttaaatatgcttaactccaaagta

SEQ ID NO: 276947 - DNA, 633 bp, Cannabis indica
tttctttaacaaaatataaaaaatgtcaactaaaaattttaaaaaatataaataaaaaaagtataagatcgccacctagacttctttatgtctttccttaatatttatatatagatatagattttctatattaaataaaaattaaaaacttacttgggtaaaatataaactcaataaagaaatgtatttatggatatggaaagttgcataacaaaagtattatttataacctacatgtataacagcttaggtgtttctaaaccatgtgggacttcaagtaaatatgtgtagtagtttatttctttacaaaatataaaaatgtcacaaaattttaaaaatataataaaaaaagtataagatgccacctagactcctttatgctttccttaatatttataacaatagtatattagtattaatactattgttagttttttataaaaactagaaataaacactatattagtattaataatatagttgttaaaaactgcagtaccatatataatataaattattgttgtattataatctacatggataataccttatgtgtttctaaaccatgtgggactttaagtggatatgtgtagtagtttatttcttaacaaaatatgaaaatgtcacaaaatt

SEQ ID NO: 276948 - DNA, 545 bp, Cannabis indica
agaccgagacccgtgactgtgatcaagatcttgactcgggattcaggtaacgaggcttggaacagactagtagtcggtgtctagatttggaactcagactaggactagaaccaagacgaagaaccaaacccgaacccagacctagacctgggacccaaaattagtacctgaacaagaatcgctgaaccaggaccctagaacaagacaaggaccatgactattacccgcaccctgacctagaaccgaacacaggcctagcctcaaacccaaactgagactggaactcgggcctggacacggtcgtgtacccaggacggaactgagacccggacttggacctaaatctgggacccgatcccaaacacagacttggacctagatagggatccggatacgaaccttgaccatgaccaagacccagactgggatcaaaatgctggaccagatgtggaccgagctcttgacccagacccaaacttggacccgcactcgggacccgaacttggacttggacccgaacctagacccagatcggggtccagacc

SEQ ID NO: 276949 - DNA, 689 bp, Cannabis indica
gtttattctttaaatctctttgttgcaaagtggtagatgtgtcaaagttggaaaatctccgattagaaattgttgaagtgttgtgttatttagaacaattttttcctccatccttttttgacataatgatccacttaactgttcatctggtgagagaggtaaaaatgtgtgggccagtgtatttgagatggatgtacccaatggaacggtacatgaaaatcctaaagggttatgtaagaaacagaagcaggccagagggttcaattgttgaatcctacatcgttgaagaggctgtagaattttgttcagacttcttgtcaaatgtagcaactgttgggtcatgtcttcctcgaattgataatgaaattagtaaaggcatatgataaatgcacacacacgcgcgcggatgcatggttttggcctaggaaagaggctgcaagcagcctcatttgaccaagggacgtgggcgcgagctgcccttcagacagggtgttgtcccagcgtccgcgcgcgcgtgtgtgcattcaaatccttatattttcgtcgaacttcaaaaaatcataactaattcataaaaaatccaaattaggttctgtaaaagcctaaatttattaattgttcgtctaatttccagaaaaaataattacagatcgaaataaaaaatatttcagtaacatatattgcgattt

SEQ ID NO: 276950 - DNA, 639 bp, Cannabis indica
ccatattaaattttattgtattttttattaattaaaatgaatatttctatatattttatcactatattatttatttttgtttgctatgtcatttatgtgtacaccatcggcataaaatttatgtataatgaatatacatatattattgctaataatataaaaataactcagttaaaaaaaactgatctcacaaactaaatatataccgtaatattttatttataataaatgataatattattggtatttaaatttatatattaattcaaaaattctattcaaattaatataatagaaggtaatgattcaatcctaccattttttaaagtattaacattaccctccttaaggtagttataatactaagggaataacattctaaggctaaagactcaaaacaataatgtttcacattatcattcccttgttagcattaacccattccaaacactcctaaatgtatatggactaaattagaaaatttctaactcgagttaatgctccacatggacaactcatctggtaataccctaaaaaaatcaaatatattgacaatgagataacatgagagaaagttttttcttttcttttctttttttttggtgaaaagggtggtgcgattgcaccagattcattgaa

SEQ ID NO: 276951 - DNA, 767 bp, Cannabis indica
gtaaaaataacccactaataagtaaaaaagagttttttataataccaagaaaagaattataaaaatcttatcataatacttttcaaaacattaaggaaggttatgttattaaaagtcatgacacttttataatgtattttatgacttatactaaagtattattgaaaactcttttataatactttttatgtattattttaatacattaatatgtttaaatttgcattatctttatgagttttcataatacattatttcacttatactaaaagggtcagtttggcacagctgtgctgtgggaaaaaacagttgtaattgtgctgtgagaaaaatcagctgcagaagaactgtgaaaaaaagctgagattataaatttcaaagtactgagttgttaagatctattatgatgataatgataacgttataatctagtttattataataacaaatatataaaaacttattttatataatatttttatttttaatatatttattttttattctttttataagtttaaatttatatgcatttgataaaaaataatttataatagttttatattatattttatcaaatgtaaataaaaaattcaaaacttaagaatataagaaaaattcaaatgttgatatggttttttaatattaaaataaaatataaaatatcttttaaaaaaataaaagatttaattattattatttattttattataattaatttattttaaatattttttatttttctaatatataataaatgaataata

SEQ ID NO: 276952 - DNA, 519 bp, Cannabis indica
catcgacgggaagttgagtttgatgttggtgattatgtcttcttgaaagttactcctatgcgtggcgtaacgagatttggagtgaagggtaagctagcctcgaggtatattggaccttttgaggttatcgagaggattggggaggtcgcttaccgattaaacttaccaggacagttgggacatgttcataatgtgttccatgtgtctatgttgaggaagtatactccagatccgtcacatgttattgagtatgaggctatccctcttcaggaagatgtgacttatgaagaacaacctgtcaaaatcttggcgagagagctaaaagtgttaaggaacagagagattccagtagtcaaggtcttatggaagaaccacagagaagacgaggctacttgggagttagagtccgagatgtatatgaagtatcctcacttatttaattttcaacttgaggttgtactttgaaatttcgggacgaaatttctttaaggaggggagaatgtgagatctcggtttgac

SEQ ID NO: 276953 - DNA, 694 bp, Cannabis indica
ctagttccatttgcgattctgagttcaagattgggtttgagttcgggtcggagttcgagtcctggtctgattttgggttcgtgtccggattacagtctaggtacagatcaggctccgggtgtgggttcgcatcctgcgacttagtctaggttgggtcgaagtcccaagttccaatctcgatctgagtctggattaagttctgggtctatgtccttggttctgatcctggtatgggttcgagttagggtcagagtccgggtctagctttgggtctgattctaggagtgggtgtttaagttcgggtgcgagtctgtgtccaggtctggagcccaatttaggtctaggttcgggtccaggacaaagttcgggtcgtgagtgcgggtccaagtttgggtctgggttaggatcttggtcctgatctaggtccaacatttcgatcccagtctcggtcttggtctgagtccaggttcttatgcggatccctatctaggtccaagtctgtgtttgggatccggtccataatttaggtccacctccgggtctcagttccagtctgggtacacgaccgtgtctgggcccgagttccagtctcagtttgggtctgaggctaggtctgtgctcggttctaggtttgggtctgggtcctggtcacgatcctagtcttgtactagggtcctggttcggcgattcttgt

SEQ ID NO: 276954 - DNA, 327 bp, Cannabis indica
cttagagtagtgcccacacagagcaagtaatacctcaatcataaaataatttccaacaccaggtccctatcctattcctgattttgggttccatttttttttgttttgggtcctagtccgggttcgggtttgggtcctagtctgggttctagtactggtttggttggggtgtgggtattggtccagttacggtttgggtttcgattttgggtctgggttccgtcgttcgtagtctgggtccgaggagtggggtttgagtccgtggtcgtgagttcgggtccgaggtctagatcccaatttgggtctgagtttgggtccgggtctggg

SEQ ID NO: 276955 - DNA, 676 bp, Cannabis indica
agacgagggtgatcctcgtgcaagagttgaagcaaatcctggtcaatctgatgtctgagttcccaagactcacctgagttcatctacaaaagacaacacatgagatgagtgttggacggaatatcaaacgataaacaagcaaatatgccgaccaggagtactcaacagattaaagaacggctatgtctaaagaaaagtcagaactcaagaagttataaaattttcttgagttagggcaaaaaagttcatgaagcttagaataagcaagatgaaaggcggacgcaatgtagttcagagacaagctttatggttgtaaacccacatgaagacattataaagaagaatcgtagaagttttaaccctagggtttcctatgcatttttctacggcacagtgaaagttgcattcgaaatagaaacatgcaaagataagcataagggaaatcagaaacttactcaagattcgagtgtctgggttcgagcaacgtctatccaaccagcagttttatgaaggcactttggcgattttgaagcgagaaaattttcttttcgctctggagcttacttagcaaagaagggtgatgaaatgagtttatgtgccactgttgtgggtaattataggcaagtcacgaaaaggggtaattgtctcaaagaaacctcagacgcctcatcttccc

SEQ ID NO: 276956 - DNA, 830 bp, Cannabis indica
atgcttgcttgcactcaaagcaggcagaaagttatgcagatcccaagccacgggatgtttcattccaacctggtgatcatgtctttctacgagtatccccaatgaaaggaatcagacgttttggaaagaaaggcaagttgagccctaggtttattggaccttttgaaattctggaaaaggttggacaagttgcttatcggttggctttacctccatcattgtcagctgtgcataatgtatttcatgtttccatgctgagaaagtatgtatctgatccaatgcacgttttgagttatgagatgttggagttgcaacctgacctatcttatgatgaacaaccagtgcaaattctggataggaaggaaaaggtccttcgaactaaaaccatatcgttggttaaagtactctggagaaatagtaaagtggaagaagccacttgggaactggaatctgatatgaggactcagcatcctgaattgttcaggtagatttcgggggcgaaatccttttaacggggggatgattgtaaagaccgcatatgattaatactttggattattaaatatttagggtttatgtatgagattaaattaatatttatgaaatgcatattttggaaatgtatttaatatcatataagttattatgctattttatgaaaattactcaatttctgtgattgtgttcggaagccgtggaaagcgacgttgggcctttagagaattgtattttatggttaagaatattttttggggtaccattgttaggttttagcggcgttggtattttcggggtttggaaaatgaccattttacccttgagatgtttta

SEQ ID NO: 276957 - DNA, 571 bp, Cannabis indica
acataggggtaatttgtctcggcgcctttcagttttcggctaagataatacacgggcttttctttcccttcgacttcttgtgctaacagtgtcccgatagatgtctcggtaacagctaaatacaatagcaatggtactccttgtactggtgacatcataacctgaggagaagacaacacacttttaatcctgtcaaatgaattttgctgtctttctccccaataaaatgatacacccttccgcattatggcctgtagtggatttgtgagttccgccaaagctggtataaaacgtcgtaagtatgatacttttccaaggaagctttttagttcttttgctgactgtggtgctcccatggctaatatagccttagttttgtcttcatctatgcttataccctttttgtgaacaacaaaccctaagaattttcctgcgctcacaccaaaggtacatttaagaggattcattttaagtttgtatctttcacacctttggaatgctctctcgagatcgcgaatgtgattaaatttattttgggatttgacgatgatatcatcaacatacacttcta

SEQ ID NO: 276958 - DNA, 569 bp, Cannabis indica
cctcatgcatttttgcctataaaagccaccacctttccttcattttggttactttccattccttaccatttttgcttgaatttctcagagagaaaatttcctcaaagtagcacaaaccgccttaacacttgaacattttctgtaatcttccagtgttcgatttcaccagtgcttctcaactctcgctcaatcatacccagtacccccagttcaacaatcaactgtaagttcttcgaatctttagactctagcatgcttacatttattttgtttgttttctgggttcgtactcagagatttctggagtgtgagtgtttgagctctttgagttctgctcttacgtttcactgtattagttgtagtcgtacagttttgtttgaagaaggccgtgtatccttcgtttagcatttgcttagggcataggaagaccttttcttttcctttttgcaaaaccgcttttactgtgattttactgcacccgacacttgttcagggattctctttcgagtttcccaggtgacacgtgtccggagggggcctctttccagcggttaggggacccccactcc

SEQ ID NO: 276959 - DNA, 631 bp, Cannabis indica
gctgtaaatgagtttttttctttcttttgtttcacaactcttttttattctttcttttttcaatgttttctttttttgttataggtttgttttatattgattttgttctattttgcgccattatttatggctttggcgccttacaaggctttagcacctattatatggttgggcccctaattatttagggtagtttgtttaaattttcacgtttttcggtattgaatgtataagaaaattttgacacaataatattttaaagttaataagttatgcactatacagatttattagttaaggtaatgttttaaagaatatttttaattgaaataaatgcttaagagtagtttactttaaacgctaaaattacctattagctatcttttaggtttatatttttttaggaatttttcagcataaaaggaaaagtagtttaaaattttattgaagaaaaagaatcttgaggatcttgtaataaagggaggtggaaacactaatggtctaatgagaatatattggttcagatatatttgggaagtcaaattattataaaaatttggtttgttgtcaatattttgggaatgtaccaaaattattatatttatttgtgtttttaaagaaattctggatg

SEQ ID NO: 276960 - DNA, 603 bp, Cannabis indica
acacaaggaagcagaactgtgagtcgacagactcagtaagaaatgcatataacatatcatataatttccgacctgtaaataggcgcccatacacctatttacagagcttaacagatgagtatgaacgttctaactgcctgtgttattgaccatgatatcactcctaccagctctataatcgtgctgtaggaccggcactatgttcgtgccgctatgatagcatcaataacatcaaaaagtataattggccatgatatcactcttaaccagtacgatgcctgtacttctgaaccgacacaatggttgtgtcgctatgatagtaccaattcatacttttgggggtgaataccactcttaaccagtacgatgcctgtactgctaaaccgactcaatggttgtgtcgctatgatatcacccgaacatatacaatgatacacacatcatgcatatatatcatacatatacatacacccagataatgacatgacacattatacacagttcttacctgctttccgaattcaagtgtgctggccgacctgaacggaaatctcgtgctagatggatgccctaatcacattttgaaaccgggtaagtcacatg

SEQ ID NO: 276961 - DNA, 612 bp, Cannabis indica
agagatgatggaggggatatccatctttgttgatcctctcactcaagaatctatggcttaggagcctcctctaagatgtggtctatcttgacctcaaacgggtgacctagagcattcaaagaccgcccatcctcatcataagaacccaaatggtttcctaaaatcatggtgtaagtcttgtactgcctcccaacaagtacaacctatttgccttcagatgcactatatatcccagtcgaagcctcttcttcttggctagccatgggctgcttggccacaggtttttcaacctggtcggcccctaggttatcatgttgagattgtttagcctcctaacaataccgaccctccctctcatcatcaactgagcgatgtgagggtcgcaagggagtgccctacagcacgtttgtttggtcctcgacatgagaagatgagatttaaagatttacccattaatgaagtccactgtggatgctcgcgagaagattggatcgtcaaaaggagcaaaaaaatcttgggaaatggtgacttgtggggcattgggttatagaggagaacttgaagaattttcttggatttttcttgaagagaattcaaagagagagagagaga

SEQ ID NO: 276962 - DNA, 577 bp, Cannabis indica
atccctgctatttattgttttaaaacctctttgttcccaaacccaaagcctataacccttaactccctcaagatatcctagaaaaacacatttcatagccctaggttctaatttcccaatactttggtgtgcatatgctgcacacccaaatactctaagattagataagtcaggaggtttaccagaccatttttcttcaggagttttgaatccatttgcactggatggacttctgttgattaaataaacagcagttaaagctgcttctccccaaaatccttgggataaccctgattgtaacagcaagcatctcactttgttgagaattgttctgttcattctctctgcaactccattctgttggggtgttattctaactgtcctgtgtctctgtatgccattttctttacaatagtggttaaactcatcattacaaaattctaatccattgtcagtccttagagtttttagtttttcatttgtcaaattttcaacaagtgttctcccctgtgtaaatttagaaaaagcctcatttttatgttttaaaagaaatgtccagactttccttgaaaagtca

SEQ ID NO: 276963 - DNA, 610 bp, Cannabis indica
gtacttagtataaaccattactaaaatcatggacgacctaatcgtgatcttaagaaagttaaaactgttaaccaaggtttgcatgtttgatagttgttctaaagtgattaggggtgcaccatcccatggtcattaagataagaacgtgtttgattcaacaaatacaacttttctaagaaaatgactaagtctgaaaacaaagtagcaaagtagaggagatattttttccttgattccaaagtgttctatcatcttatttgaaataagatggccccactgtctctgttgttttgacacaaccgaagaggtcaataccatttagtgttcttagacaaatagtcacggtaccttgtcgtactgggagggtttcaaggaactcaccctgttatgacttggaagacacttgtgatgaaatccattattagtttaaacaagtaatggattgtcagaataagaaaataagaaacaaaaccacgaaaactatggttaaaaccattcatatggaacaaccaaaggttttctattacatggacaagaaaggaaatttcgttagtaagtttattcaatggacttaaaaaaacttcctgttcctagtataaaaggtttgagt

SEQ ID NO: 276964 - DNA, 668 bp, Cannabis indica
agtttatctaaacctatggcttgtggtatacctggttaattaattactctagtgctagcaacttattttagtaagatgttggagcatttttctaatggaaatctatagaagcttctcaacttctagacatagatttcatttatctaaggagaaatttcatctattccagaaaagataaaggccaagaaaagaattccttggatcaacagtgagaggtctcagatatgctttcgcaatgcattagactagacacctactgttgagtgcgagtaatgagttgctatcaaattaatctaggaaagaacattggaagaaaatcaagtaaatcttaagatcaagaagatgaactatatgttagtcgataagggtggtatttaatactcttagactacaccaaatcagatttctagacttgccttagtgctagaaagtctactgataagatggtgattactcttggggtggagtagtgattttggagaagtgtaaaaacctatctgaagtccctaagtctaccagagagactgaatgttaaagttgcaggaaagatacttattcaatctatggaaagttctatacatttttggcattgtaccaacatttattaactactagtgttacttcctgattaacacaaaagtagtttccaaaaagtaaagaatccagta

SEQ ID NO: 276965 - DNA, 507 bp, Cannabis indica
gtatgggatgaagagggatgtagtagattatgtcactaagtgcttaacctgtcaacaaatcaaagctgagcatcaacgaccggcaggattacttcagccattaacacttccagaatggaagtgggaagacattgcgatggactttgtggttggcttgcctagaaccacaggaatgtacgactcagtttgggttgtagtggatcgctttacaaagtcagcacatttcttacctgttaaggtaacctatacagtggatcagtatgctgatttgtatgtgaaagaaattgttcgtcttcatggggtaccgaaatctatcgtttcagatagagaccctaaatttacatcgaagttttgggtgagtttacaaaaggctatgggaactaatttgaaattcagcacagcctttcatcctcaaacagatgggcaatctgagcgaactattcaaatacttgaagacttgttacgagcttgtgtcatggttttggagggtcatggagtaagtatttg

SEQ ID NO: 276966 - DNA, 473 bp, Cannabis indica
gttactttaagatattaaggactcgtttggaacgccgtattaggtcgtattgtattgtattgtattatattgaattggattatatatcatatttttatataatactatgttaaactttaatttatactaaaatattatatatttaagtgtccataaaagttaataccacatatagttttacataaaaatatttcataaaatacaattcaatataatacaatacaatacaatacaatacgacttaatacagcgttccaaacgagccctaagttaacaaaatttaatatcctctcttacagggatggaggcagagaaaatttgtgagtggtcaatgtaaaaaaaaaaataatttaaggggccattaaatacattttaataaaatataaaaaaaaaatacaaaattataacataacttaaaaattataaaataatactaatatactagaaaatacaaacccatattataaatttaa

SEQ ID NO: 276967 - DNA, 909 bp, Cannabis indica
attttttttttagatttaaccgaataataatgtggccagaaattattttaaaagtaaaaaagaagagagaaagacgaaaagagaaaaaaatgaagaaagaggaaacgaggggctaaaagaaaaagaggaaaataaataaaataaaaacgttataaaacttggaaaactttgtcaaatgtgatcaaaatacgtggtaataaaaaagcttacgtcaaaattgtaaactaggtgtaattaaaagtgttaaatgtaaattttcttaaaaaactaaagggtgacaaaatagatatttggacttattttagagtgatttgggattaaaactttatctcaataatttgattggtttttttttcttttctttttttttttttttactttttatttttttatattttggctctcttttttaatgttagcaatgggctcttatgtcaatatcttctaatttcaagcattagatattttcttagtaatttttttatggagaaatctaatctaattgatatatgtttctaatatattttttttgctaaaatatgttcaatatttattattaaaataaatgatatattaaataatagagtgtgagaccatagtatcaatataatgctaatattatagtagttttagaagtaaatgtgccaaaattattttagatgagaaagaaaataaaatattatatttttagataatgtagagattcttgacaccattttaagcatcaagcattgttgatgctcttatacaatccaaaataatatctcgtttcttttttatgttctacaagtggaagagcggttacaattgacttcgtccccattatagaaaagtagaaacaaaaatgaagtcagagactttgactttagtgttggtgaatctggccggagtcatggaaaaggccgaacg

SEQ ID NO: 276968 - DNA, 307 bp, Cannabis indica
agtattatctcaactagtgaggggaccatgggcctatataaccaagctttcaataagtggatctagaatttacaaagtaaattctctaatatattaatttcgccttgtgccattatagatttggaattgaatagcactcttaattatatagaacgctctatatgtaccaagatatagatacgttatgattatctattgttacaatcttaatagtcaaagatcctctatagatgatctacactgaagagggataaatttatcattttacccttcaatgtattttaccttaaaacacttagcaacctat

SEQ ID NO: 276969 - DNA, 762 bp, Cannabis indica
atgcttttgtatgccttagaccagacacctgctgttgagtgggagtaatgagtaggtatcagattaatccaggagaagaacattggaagacaatcaagtaaatcttaagattaagaagaggaactatatgttagtctataagggtgtgtttaaaactcttagaaccttatttcttagtgggaaatattttagaggaaataaattatcgggattgagcggggttatggattttgaccattttacccctagctttagaaataccctagttttaagtttaaagggcattttagtcttttggttaaggggagagtgaggtggctgcccaattaattgacacttggcaagttaactttcagcataaggattaattaaaattctttttctcatttgaagaaaatcaagaaaagaggaaattggaaatttgagtttctcttgaactctctctctctttctttcggctgggacaaccaagagcaagaaaccagatttttccttccatttctttggatttaagcaaggattcaaagctattgcaagtgaggtaaagccctagaccattggttatttattttcaagcttttaagttaggttgaaatggtgtttttgagtaataggggctgttaggttttcatatgcctagggttcgaattttagggtcttgttgagttgattttaagtcctagctgctggttttgatgattggtttaagttttgtgcaactttgaacattgagttcaaagctttgagctttaatggcaaatt

SEQ ID NO: 276970 - DNA, 527 bp, Cannabis indica
atttggtgcgctgaatttttctttttcaggtgtaatctagtgtatgaacgagcaagaagaagaccttgaacttgctcctattgaccccgaaattgaacgcactttcagacaaaggaggaaggaacaaaaggctaaaaaacgctgcaatatggccgatgggtttgaaattgggggtgctcataatgaagccaatcctattgctttggccgatgatagagcccgagcaataagagagtatgcagcccctatgttcaatgagctaaatccgggtattgtgagacccgaaatccaagcacctcactttgagctcaagcccgtcatgtttcaaatgctccaaacggttggtcaatttggtgggtcgccaacggaagatcctcacctccatattcgctcatttttggaggtgagtgattctttcaagctacaaggagtaagtgaagaggctttaagattgaagttgttcccattttccttgagggatcgggctagagcatggcttaacactcttcctcccgattcggtgacta

SEQ ID NO: 276971 - DNA, 738 bp, Cannabis indica
ggtcattttgccccattgttagtttgtctttttgtgacttaataaattggaaaatatatgttatttaaatattattttggctgaagtaaaatgggttaagtgcctttcaatttcattttctttcaaacttagaaaaattacaaaattttaaaaagaaaagctctctcttttcctctctctattcggccacttgagcagcaagaaaagaggatttcctcttggatttcaagctggtttttgcattgattttgacctcttgttgttggtatgtttcctctagcttctcttttaagttttcttgatgaattttgatgaaaatgatgtgttgcatgcttagttttaggtcattgttgttgctgggatgttgttgatgttttcagagatttaagcttgtttatttgagttgatttgagctgtttgtgatgcatgatagttaggttgagtaaagttatggtttttctatgcaaaagtttagttttcaaagagaaaattgagaatttggtggctgtgattattgcatgagtttaagtttgttttctgcagtgtttttatgcatgcttatgtagttctaatctaggtttgatgcttgttatgttgtttagtcaagttttgagtttagaactcaatctttgacctttaatggtgaattgagtttctgtgtgtgaagctcggttttgttgccttagaaatgttctaggggatatatagaacaggtctggaaggtttgaggttaattgg

SEQ ID NO: 276972 - DNA, 824 bp, Cannabis indica
gactattaggattgtaacaatggatagccataacgtatctatattgtggtacatatagagtgttctatataattgagagtgctaattaattccaaatctatagtggcccaagaattaataagttatagaatttacttggtgaattctagatctacttattgaaagctttgttatataagcccatggtccctcactagttgagataatactcgttgcagactcagtcaattgattttagttgatcaattataattctaaaattagactatgtcttatttaagaattttcactaagcaagggcttaattgtgaagaaaagaggttttggggtcaatttattaattaagagactttgtatggtctaattaataaattatgtatatgagaattttgattgataattaattacaattattaaataaatagtttttgtatttataggattgaataggaaaatatggtattatcgaaagaagaataagtggttaaaaaagtggcaaaattataactatagattggtcctttatggctggccctagtgttaatttttgcccaatattttattctttttaatctatataattcagccctaaaccctagttgaaacactataaacggaacatgatgttctcatctcatcctcttgtcaacttgactattcaacctagcaaaatctagttttcattctctgacaactagtagatgagagacaccttcaatagtgatttcaagcctccttcattgttcttcatcatattcaaaaccttgagtgaaagagggccatgcccacacatagcaactcaagtactcaatcataatgagtaa

SEQ ID NO: 276973 - DNA, 1111 bp, Cannabis indica
gagatcatggctacccgcccgttaggccggggcggtagtccgggaatatgctgggcgtcacctgcgggagcagctggagccaatactcctgccgtaccccctggtgttcccggaggcatacccccagccacctgacccggattaaggtggggcaacctattcttgatccactcatagaggtggcccaatcggattagattttcgatctcgtctttgagattcttacattcgttggtactatgaccaatgtcgttgtggtactcgcatcttttgctcggatctctccgggagctatctttgtacaagctgtggtctccggtagtgcgtattttgcctagtggcgaagtacacacgttcctgggagtccgatagctccgtgtattgagtatattggggggggtacccctttttctggcgcttctctcccgttcgggtgagttattttataaaacagcgtaaaaatattaaaatatatatatgaacgtaaaagtgtaattttttttaccaaaaatagtactttaggtaaattaaaaaataaaatatattaccaagataaaatattaaaacaattttttttaaaagaagtatatgtttaattttttgttgttacatatatttttgagtagatgtaaaattaatttgtagttgcttttaagttttgttattccaaattttacaccctgacatggcatcacacgatggtgacacgtggaataaactttacatatctgttcgcacgagatatgccgaatagagcatcccatatagtcgcacagacgaagtcttcttggtcaggaagtgagaaatccgaacagaacgcatacacttagcagttttaaacactcacatcattagtcacagaagaaatcccgataattttgggattatatcacagagatatggaaagttgtccaaaacccttgatcagtgtattctgtatttaatcaggagggaaacttcttccccacagcttctagccctataaatagtgtttcattctcactgggcaaaggggggagaaacttatctaataattcatattcagagatattattgtaagagctctaagaaaagaaatcattatattcttgatgggttttatgccctaaat

SEQ ID NO: 276974 - DNA, 612 bp, Cannabis indica
tgcatgagatttttacgtggttgctgcattaatgagccttagcccacgagtctttcttatttatgagagtatttattacagagtatgttcttggtagttttctctcctaattgctctcttgaattcttatgagcccagaattctggacccctatctcagtgtatttggggggtatttataatgttttttggggtgatccctagaactgaagcacttgtctttctgtgtagtttcagtaggggcacataatcccagtagatacaaaataggaaatacatgacctataccttaggtctcttaggggttaggtggataaagtcttttatccattcttgattgaagtgatctctcataaagtagtcatcactagccttattaatcatagcataatagctgtacaagaggggttacgccgtcagacttattgattatgacagttccaatacgttttctcccatgcaggattaaatgcaaggtgattgttcaaataatgtcatgttccccccggaggtcccttggcgttcctctggtctctgcgagtacgttgagcttttacctttcctccaggagggcatattcttggtgacactcctgaagctgggagacttagtc

SEQ ID NO: 276975 - DNA, 420 bp, Cannabis indica
tcctatattttcattcctcccagccaaacgcctcctaatatattgcattccgtattcaataataatctcactttcaaataacatagaaaaaacctagcataaaatttagtatacgtgcctcacacgtaattttttgctagtatatacataataagtctatagtataccgacattgattttgctggttttgtccctatataagaaagttttcacaatttctaatggtaaattgtgatagttaacatatatagagtacattaaatattatttcttatagggaaatttgacaatatatgcttaaaaataattggtacactaaaaatatgctaggatattttgcatcatgcaaaatatacttaaaccatttttcccttacaattttaccccttaacaaataaaaaacaaaaattcataacactt

SEQ ID NO: 276976 - DNA, 397 bp, Cannabis indica
agggtacatgcccggagtatcgccctcgggtactgccccgaccgcaactccacaaacaagcggcataaaattctctgccacccccgaatacagtcagggccaggcgttggcgccagcgtcatcccatttcggcaacccgtccggaatgaatggacaaactccttcgcactctgctccgactcctagcctggcaggcccttcccagggctcgaggagtaaaaggtcctccaagggcagcacccggacgggggagaagcgccagaaaagggggtacactccccagtacactcaatacacggagctgtcggactcccaagagcgtgtgtactttgctactaggcaaatacacactaccggagaccacaacagttgtacaaggatagctcccggagagatc

SEQ ID NO: 276977 - DNA, 562 bp, Cannabis indica
aagtgaatcgctgcagtaatggcaattaaactcacgcgcccgaagcacgtgcctggaaaccgaggagccaaccggaggcatctgagcaagccttgttcatttcataactagacaaggcttgggggtaaatgttgccccagattttgcccaatatacgtggaccaaccaaacaaggatacgtggacacaaaggttttagtaatcaagttaaatagctaagtctttgtgaagaaaggtattatcccggacatgcctcccggagaaggcatgcaaggttttctatgctcccgaagaccaaggtggcatcaaagcatctccgggagatgtcaggcttcctctgagcagtcatctcgcatttaatgccgcatgggaggaggcgtgttggacctgccacacgcaataaagtctgacgacgcaacccccgatctgcacctacaaggctatgatcacttaaatctaatgacggttactctgtgaagaatcacatcagtcaaaaggctataaggacaacccacataaaatccctacagcacctagggatttgaccatgcattacccatggt

SEQ ID NO: 276978 - DNA, 528 bp, Cannabis indica
ctttacttaataaaaaaaaatatgctcctacaattgcatgctcataatattataaaagttttccttctcttatgaacatccttacatgccattaagagtaaaactatttattctcctctgaacatccttacatgtcacttgagaacacattatgcaatacaaaaaaataacaaacaacaaagagtaggttagaaaaccttatgtaaacttctctttatatcatgctcttccgttgaatgttactacatacaaaagcttaactttctatttattaatttacaccatagagttacagtgtcacctatagtttcatagttgttactctatcagttatagatacttgttctcataacattgggaaataagcactcaggccctttataatttcttatataattttaatgatccattcaaccaccactcagtatgagctcgcttcttagtttcctttaggctatttctcagacagtatagtctttgattcctattgtagtcttgtgattcttttaccacttcattgtatcttat

SEQ ID NO: 276979 - DNA, 509 bp, Cannabis indica
tttttaagtttttttaattattattataattacatatagaatatatgaaatttgattatttttaattaagtttaatgttataattatataaatttttaaaaatttggtatgtttaataatttctttgaaaaaggcctaattttgaaattttacactaggcccttcattgagacggccctggatgctggacctcaacttttggagaacaaccactgacatcgagatcactcgagggattgctaaaggaaccaattagacattggttttcaaagagaagaccgagtaaatctttatcgatacggttgtcatctccccaatagtcactcgagatcatctgcacataaaagacaaggggaggtgagcaaccagacaaagcgacaagatttagacaagactctaatcaatcgtacccaagggtatttaccagataatttcattttacaaggctgggtatcagcaaagtacaatttcaagtgtaacaactgttggaatttattttaccaggatct

SEQ ID NO: 276980 - DNA, 1265 bp, Cannabis indica
gaccgataagggggtatactgttacttagtcatgcccttcggactgaaaaacgccggagcaacctatcagagaatggttaaccggatgtttaaaggcctcctggggcgaaatatggaggtttatgtagacgacatgctcgtcaaatccaaagcatgcaacagccatgcaagcgacttagaagaatgcttcgaagtggtccggagatacggcatgaagctcaacccaaagaaatgcacctttggggtcaaatcaggaaagtttctgggcttcatcgtcagtcaaagagggattgaggcaaatccggaaaaaatccaggctctcctgagcatgccatcccccaaaaagcataaagatgtgcagagcctgactggaaaggtagctgctttaagccgcttcatctcacggtccacggacaagtgcatacccttcttcaacgtattaaagaagtgccaaaagtttgaatggtcggacgagtgcgaggaggcattcaaaaagctaaaagagcacatggccaagcctcctatcttatcaaaacccgttctcggagaagacctatttctttatttggctgtctccgaacacgcggtcagcgctgccctagtccgggaagaagagaaaactcaacatcccgtgtactatgtcagtaagcgcatgataggagccgaaacaagatacccagtcattgaaaagctggttttttgcctcctgatggcgtcaaggaaattgaggccatacttccaagcacatccgatcaagatactgaccaatcacccgctccggcaagtcctccaaaaacctgaagcatccggaaggctcctcaagtgggcaatggagctaagtcaattcgacttgcactacatgccccgaatttctataaaaggccaagccttggcggacttcattactgaatgcaacgaagccgaggcaaccgcgaatatgccggtaccgccaatccccacatggagagtatttgtagacggagcctccaatgaaaacggttccggagccggagtggcgatgatatcaccaaccggactgcgactccaggcggccctacggtttgacttcgcagcttcaaacaatgaggccgaatatgaagccctaatagcaggactgaaattagcaaaagctgtaggagccaaaagagtggaagtctatagtgattcccaactggtcgtaaaccaggtatccggagaataccaaacacgcggcgagcgaatggccgcgtacgtaacaatagtccgggaactactccacgagttca

SEQ ID NO: 276981 - DNA, 163 bp, Cannabis indica
actatgcaagcattttaccatttatattttcattattttaatgccatagaattctaacctaaacctagctgactttctataaatagaaagtgttggcttcaggaaactgagacttgcatcttattctttttcagagaaaacctgagctatagccgccaccctc

SEQ ID NO: 276982 - DNA, 704 bp, Cannabis indica
agcgttcttttcccgggggattctttctactttgtagtccgtgaactcgtggagcagttctcggactattgttacatacgcggccattcgctcgctgcgcgtttgatactctcccgatacctggtttaccaccagttgggagtcgctgtagacttatactcttttggcccccacgacctttgctaatctcagtcctgctatcagggcttcatactcgacttcgttatttgaagctgagaagtcgaaccgtagggctgcctggagtcaaagtccggccggaaatatcatcgcaacccctgctccggatccattttcgttggaggctccgtccacgaacactctccatgtggggaccgacggtaccggcgcgttcgcagttgcctcggcttcattacattcagtgatgaagtccgccaatgcttgtcccttttatagagatgcggggtatgtagtgtaagtcgaattgactcaactccatcgcccatttgaggagccttctggatgcctctggcttttgcaggacttgccggagtgggtgattggtcaacaccttgattgggtgcgcttgaaaatacggccttaattttcttaaggctatcaggaggcagaaaactagtttttcgatgatggggtaccatgtcttcgcccctatcatgcgcttgctaacgtagtacacgggatgttgagttttctcttcttctcgg

SEQ ID NO: 276983 - DNA, 578 bp, Cannabis indica
cctccctcttttcggtttggtgttgggctgctagggcagagatttttcctcttcaagcttgtgattttctcctcctctaagtgtaattcaagtaggtttgatcccttttatttcctttgtgttttattcaagaaaaatgatgaaatgtgatgatgcatgcatgttgtgttagatgttgttgctgctgcttttgttgttgatttttgaggatcaaagcatgtttatgtgttgaataattgagttgttgaaagcatgtaagttgattgagctaggttttggttttctatgcaaaatatgtgaaattttgaaagaaaatgtgatgttttgtttctgtgaattgctggatgttgttgtttgttttcagaggctatattatgctagtttaggttgattttagttggtttgcatgcttgttatgtggttttgctcaagcttgagtttggaactcaaagcttgagctccaatggcaaaatttgtgtatgtggtttctgggtaggtttgatgccttggaaatgtttattagggtctatttagcaggtctggaaagtttgggatcaattgggttcgaattggtcaag

SEQ ID NO: 276984 - DNA, 514 bp, Cannabis indica
ctcaccggattgttgaagtgccaatctcactatgagattattgtagtgacaatctcactcttctcgggttgtttacaaaaccggtgtcaacctcacctacaaccgagttgtttttctacgggtgccaacctcacctctcaatacaatgaatatgtaattttgaaatacaaagcaaactctctctaataagataaaaaacaatgtaaaatcctaaagagaattgcaagcacactaaagaagatataaacaagtttggctcaagtgtgtgtagttggcgtgtttatgaatagatgataattctttagcttagaacacttagaatgatgttatatgatgaatagaagctcaaccaaccttaatttttgagtgaaaaacaagtttatatagtgtaggaacaaaaactagccgtttatagccgttagcacacttttcaaaaagaatcctaggaaaaatggactacctatctgcgaaaaacggactacctattttcaataggtaggccgaaaatcaggca

SEQ ID NO: 276985 - DNA, 637 bp, Cannabis indica
agatatatttaaggagttgtttatgattacataaagaaatatattaagtaataggaactcatttgcattttcttttttctttcctcagaccaattaacttattattagtttcataaaatatgttcactttagtatagcatgtatgtgaaagaaaataattaggaacgtacaaccactttattagatgtatgtcaaagaaaatgataacaagtggagcattagagaacaaaaaaaaagactttaaagtacgtgtaaatttatgtatctcaaaatgactacttaatttaatagacaattaatttctacttagtagggcaagtgctaagtggatagggattaaccccccttttcaagtcaagctattcagctggatttttccattcctatgtaaatgctgcttaaatttaacgcatgacattaaaaaaaatcactactgaataattaaatactttaattctttgatataagaaaataaaataaaggttaattaagaatttttctccccaaactttaatatgtactaattatactcttaaacttttaaaattgttacaaattcactttgaactattgtgattgttagattaacgatttttatttaattttagtaaaaaattctaacatagatgaaagttca

SEQ ID NO: 276986 - DNA, 522 bp, Cannabis indica
tttttaagagtgttttttttttttgattgtgttaagagtttttttatggtttgttgttgatagagaaacaaagtttaggttgtgctcacttaaaagtatagtattacataaaagtttgaattttgagggtatcttataaagaatattataaagtaaaataggaataaaaataataaaggataaataaatcaataaagaaaaaacaatctaaaccaaaatcatctctataattttctagaatcgtctatatatatgaaaaatgttacgtggtaaagggagtcttttagtgcatgatgattaataattaaacttaaaaagttttagttttattacatgtaaacttaaaaatgatcatagagcaaggacttatatattagcttttatgtacattttgccatgtggcatcttattatcagaaaattaataaattaaagggtaaataccattttgcaccctatgttttgcaaaagttgcagattagaccctgtgttttgttaaataacaaaatagaccctgtatttt

SEQ ID NO: 276987 - DNA, 273 bp, Cannabis indica
taatttagacatataaagtctcttaatcaataaataaacctaaaatctcttttctttacaatttcgcccttgcttagtgaaaattcataaagtagacatagtctaacttttagaattataattgattaattaaaatgtaaattccctaacttattaattcctcattgaatcaacacttagaacttggaattgcactctcaaaaagtaggcttaactaacaaatcaaagaacacggataacactcttgagattgaacctaaccatatcaggatt

SEQ ID NO: 276988 - DNA, 473 bp, Cannabis indica
gtgtgtgggcactcactctatgaaggggttcgatttcaatagtgaagaagaaggaatgagagtggcagctaggttagggagagaaggcactcagttttactctgaaggaataagatgcatcatcttttcctgaagccatcactacctatttataggatgccacctagggttagtcagaattatttggcattaaaataataaaaaaataaatataaaagcctacataaatggccgtcctgggctttggatattgggccccacttttgcaattttgctgttttatcatttctacatctcattttctaaaaaatgccaatttttaaattcaacaatttaaatgccaattcaacaatataaatatatattgcatttcgaaaaaatgaagtatataagaatactactttcgaaaaaattctttaaaataaaataacaataaatcctggaaaaattattctaattttatgttggcccaa

SEQ ID NO: 276989 - DNA, 619 bp, Cannabis indica
aaataagtcttagcttttcatcttgccactgacattgcttaacttgttgaagtagcattggtgtagccactatgttagagatacaagctactccttccccttcatagtatggcaagttataatcacccattgtaattgtccttttccagtcctcaagaaccaaacatgccaaagtaccatgaggcttcctacttagtgcatcagctactatattagctttcccaggatggtactgcaaagtgaaattatagtcctccatatactcaaccaatcttcttttcctcaagttcaagtccctttgagtaaaaagatacttcaagctcttatgatcttagtataactcaaactttacgccatataaataacatctcaaaatttttaagacaaagattaccgcagcaagttctaggtcatgcgtagggtaattcttctcatgtggtttcaattgtcgagaatcataggcaaccaccttgccatttttcatgaggacacctcttaatccagtacatgaagcatcagtgaataccacatatggtttctcattattaggaacagtgagaacaggcgtggaagttaatctttccttcaattctctaaaagcttcttcacaactatcatc

SEQ ID NO: 276990 - DNA, 484 bp, Cannabis indica
ttccacaattcgaaacccatagtgaaagagtgttgtgcccacacatagcaagtcaagtactcaatcatagtgagtaagacagtggtaaccaaatccgaaggagagaaagagatccaagtttagatcttgataatgctctgctacagaaaagaatcaagggctagagatcttgaacggaaggagtcattatattccactgcaatcaatgtaaggttttcttaaacccttatgtgtgtattttaattgttttagataattcatatttaggatgttaatcaacatacttgttactaaatctagatcctggtaaaatattcctaataaatggcctcagaaccatggtaatgatttactttcatgaaatatggatttaaaacgatgaatattatttgtgtgtagatttggatgtgttcatgttggtttatgttgatgaatgtatgtgaattataaattttttccacgaaaataattttattttcattct

SEQ ID NO: 276991 - DNA, 507 bp, Cannabis indica
acagggcaaaaatgttaaagtttcaatattccttgtcctagctacctaaaaggtttgtctcccaaatgcaatgctaaaataattagttgcttaaagttgtccataagaggagaaaaatttgtctaacacatcctaatctacaggtgtggatggacttatatagtcttctaaatttttataaatctgcaaaaaatttaaaaaatcactcaaaacagctacatcaagatcaatccattcatggctaacatcttcagtgtcatgctcaattccactgttactcacatcagagacatcttcttcacatttctttttcacaaaactcatgaaatgaaaaaaattatcttcatcttcggacaaatttgctataggttctatgttttcgttgtcaatcattttcgatgtaagtgtggtggagagtgaaagaaagaagataattgcgagtaagactttagttaattagaatttataattaaaaaaaataaaaatcaagactttaaagattaatta

SEQ ID NO: 276992 - DNA, 589 bp, Cannabis indica
gtaaaatatttccaacagttaagaccttcgtttgcttggtttccagccattatgattctccttctaaatcagcaagaaagtacttctcgttcccacagacgacgccaaatgttgttgaaggaattttacaacaccaaaacaaataataacaataataatgataataataatatgataataagtgcgagtactcaacccaaaacggcgagtactcgaactgggaacacaaatacttaacaaaaacttgaaatacaaagaacacgaggaagtatagtggttcagtcagatcacggtctgcttagtccactgttgtaaggattctgtatgtgtgtcatttcacggtggatcactcatttatatacaaaggaagtgtccgatcattatacaaggattacattcattgtcaatccgtttgtacattgatttacaataattaagctaaaaaacgtaaacattaataaataaagaacagtttctattcactaaatacaacaacgtatgcgacttctaatgtgcgagttggctgttcatattctttcgtaagctcgtggacttgaatacacctaacacttagttgagcctaagatgt

SEQ ID NO: 276993 - DNA, 575 bp, Cannabis indica
ttacaattttttaacactcaaaaagtcatcgagtttgttttttatagctctacttattaaggtagaaaaataatttagattgactcctctattccgtttattaaatgaattatattcaagttgacacattagcttaaaaatgacacaataatgacctactacatacacttatattcattctatttattgagaatcaaaacttcaatcttcttcactagattagccagacacacacaatatctggacataaacacaagacacaatattataactcaaactcataaatatttagtcgaaacttgaatgaataatgctactcttttaagttttaagactgtatatgactatgcaattttggttattgtattatcattgctgctacataattgatcatttttagatttttgatgtgaaattttgtattgtgagctttttagagtttctaatagacgtcaatgagtaatagatttatataattatacttaaaataaattttgataatgttgtttggtggattcctattttgttattaggtaacataatattattattcgttaggtatgtcacaattatta

SEQ ID NO: 276994 - DNA, 744 bp, Cannabis indica
ttctttagacttccctttcttcttgttggtagttacttctcgaccatcctttacaacttccagtcgacaacaagtaggaatttcagttgcagcaaatactttgaaagtctcttcttctttttgaacacgcaactttaactcccccttctgtacatcaattaatgctcttcccgttgctaggaatggtcttcccaagatgataggaatattctcatcttcctccatgtcaagtattaagaaatcagcagggaagatgaacttaccaacctttaccaagacatcttcaattataccccgaggatgagtcaaagaacgatctgccatttgtaaagtcactgttgtgggcttggcttcccctaatttcaatcttttgaacatagataggggcattaagttgatactggctcccagatcacataaagcttttgtttgtatagaaccccctattgagcatgggatgttgaaactacccggatcttttagcttgggtggtagtttcttttgcaggaccgcactgcactcttcagtaagtgccaccatctcaaattcttccaactttcttttcttagataggatatctttcatgaactttagataagttggcatctgttccaaagcctctatgaatgggatgttgatatgcagtttcttgaatatttcaaggaattttgaaaactgcttatctatcttattcttctgaagtctttgaggataaggaattttgatgtgatggtcaatgctgat

SEQ ID NO: 276995 - DNA, 538 bp, Cannabis indica
tcatatataaaaaacaaatcatctctacttttatttgagtaggtacatatataaacatcaattatggttgtaacctgaatttattcgacacttaactaaatttttaatagaaatatgtgattatttttcccttcaaatattatgggttttttaaaatatttttatgaaatgattgcataaattggtataaagaaataaattataattttcaaaaacacaatattttacttttttaataaaacacccatttaaaattttgccatagcctaaagctatagagagcaaaaaaaattctttatatatttttcgaaaattttagatagaaatataaaaaaagtaaggttggtatttaatttcgttacatttataggagcttgagtgactaagaataaataatgactagtttttattaataattttggagtggatttacattttttatttttatttttatttaaaatttaaataaatttataaataatgtatatctttattttaatatttgatgttaagatatttatgagtatcctaataatac

SEQ ID NO: 276996 - DNA, 501 bp, Cannabis indica
tggagcatttttacgcttgttatcttttatttttacagatttaaaatagaagaagattagaaaatattagagaaaaatatgggaaaaagataaaaatatctcacaaaaagatgatatttaaaatagagaaaactgtgtaagaaaataaagttgcaacttcaagcttgaattcgatgatgttctgactagattttggaaaacgtcaaaacatgaaagttctagatctctcttttatctttgcgaaacatcttgaatcgtccaattccaagccatatcgagagaattatggccaaattactatcagtcaatgcagtagaaaactcacatcctcttctaatcctaagtagaataggttttgtaatcctaaggagaataggtttttttcttcagcgaattttatcttattttatcattttttggctataaaataaggggacttcaatagttttggcaagaaacttcagagagaaaaaaagagagaattcagatacagagtggaga

SEQ ID NO: 276997 - DNA, 585 bp, Cannabis indica
gaatgttgtgcttacctttgtgctgccatgagagagcgcaggagagggacatagcgagagagggtggagaagagcgacggcgtggctcgtgttcgcggaggagagagagccgtgaaatgaaataaaatttacatataattttgaaaaaatgagatatgatttttttggggggttgatatcttaaaaggagggaactaaaatttaagatgggaaaaataaaaattttaaatttaagatgttggaaataaatttttgatctgaaaggcatgggaactgccaacagttttaaaccgttggtaattcccttttacaaatacacgagattttttaaggtacgtttaaaaatcgtagcctatacctcccaacactttaaaactattgtgaataccctatttttcttgacggttttaaacgctcgtttaatttttttagcgaatgttatccaaaaatagtattttttataactgtcgcgaatatcccttttcgtattagcgattgctctcaattaaagcacgaatgttgacctcgcttttagccaacgacactgagttttttaaagcgaggaaattgaatgatcaattacta

SEQ ID NO: 276998 - DNA, 882 bp, Cannabis indica
agtagaataggcgcatgtttttaatttccaaattaagcggcattagtaagctcccgttgatcatgacctgatgtgccaactcggggtttcaaggctgttcagactagatggacgccaagcgaaataccaggagtcagggcaactcggtccggtcaaatcaaggtcagggagctcagttttccccaaatgttaggggtcgaggtagagatcccaggggcagagctcatggtcagggtgatgttaacccgccacaggctgcccaagccaatcacgaagcccagaattgggaaattaggtttgctgaaatgcaagccagaatagaggagcaagataatgagagtcagagattgagacagcagggtgctcgtgcagtgcctgtgccagaagttccagtggcacctgcccctgttgtccaggccgaacagtagtagcggcgaatagaatggaacccctgtatgaaaggttccgcaagcaggcacctccggttttctaggaggtccggacgtcatgaaagtcgagcagtggctaacagtggttacgaggatattgaattttatgggtgtcaccgggaatgacagggtggtgtgccacctttcagtttcaagaggatgcgttgatctggtgggacatggtctcccatatacatgatgtcactacgatgacctgggaaaagttccaagaaatttttaatgcaaagtattataatgaggccgttagaagtgccaagagaaaagagttcactcacctgacccagaaggaaaatatgagtgtgacagaatacacaacgcagtttgatcggttggcaaggttggcctcgagaattgtgccaaccgctttcagtaagaaggaaaaatatcttgatgggttgaatgtgaagatcaa

SEQ ID NO: 276999 - DNA, 652 bp, Cannabis indica
aaaatgtacttttcaagcactaacaatcattttaatcgaaatagtaaaaattttaattttctaatagttgtacccctttgtgaaatgtggtctagacccacatcgaaatatttttcggcactagtcataataaattttgggccacatttcacaaataggtacccttattagaaatgtgatattataactattttgataaaaatgatggttagtgtttaaaaataactttttctcttaatatgtctaatagaaaagtgatgcacaatggtcttggcttcgtccttgtaaaatttcacaatttttcaagatgtgtagggtgagattttggaagaacactaatgagtgcaagagtaaggaaaaaagttgttaaaatttaccctgaacagatgaacattttcaatttctgaattagggggtcattttaaccaaatttaaagcgaacctaattttatattcacgtgttagtagtacaaattcaatgtgactggtagagaaaaaatattctgagatgtgtccgagacacatttcacaaaggggtacccctatcagaaatgtgagatttttactatttcgattaaaatgatcgttagtgcttaaaaactatattgtttctctcaacgtgttcaatagaaaagtgatgcacaacggtctt

SEQ ID NO: 277000 - DNA, 514 bp, Cannabis indica
tcacccctttatatacaaagtaggtgtccaatcggttacataaggatcacattcattgttaatccattatttacatattgaattgcaataattaaacccaaacaacgttaacattaataaatgtgtgacagttactaagtccatcaacgtatgcgtcttccgcatctgcgagttgactgttcatgttccgtttgttgagctcgcagggtcatcagtacgtttggaacgtctgcgcccttaggtaatcgcctcttgtagacatcgcatgttgagctggtagaacctagacatgcgaatttatatcggtttgtcagggctattgggtcgttgggaccaaattgcatcatagagagttggtctctatgctttcgcagaaatatagaggggatactcgcatatgtcctgacacatgcgagttggatctaccctgcataatgtgaattacggttacgtggttcgacttaggtcgtactcgcagtatctcgctggttttatcctgggcgaggtctaaact

SEQ ID NO: 277001 - DNA, 805 bp, Cannabis indica
agaaagaaaatatgagtgttacagagtatacgacacagtttgatcatttagcaaggttggcctcgggaattgtgccaaccgatttcagtaaaaaggagaaatatctagatggattaaatgcgaaaattagacatgatctaatgattactacttatgacaaaaccacctatgctgaaatggtggaaaaggcactgcgagttgagggcgcagttggatgcatgacagagtctgctaggactccagtggttggcagggctcctacccctcctacatcaggctttagcaagcgaggtagtggttcggccatggatcagaaaaggaaagcatccactgcaaccggtagctcaggtcagaacaagaggttccgggggaaccagggtcgaagcagtcgccagggtagttctgagacccgatacacttacccagagtgccccagttgtaaaaggcaccatctgggggagtgtagaggacaagggtgctttcagtgtggcatgtcagggcattacaagagggatttccctcaattcagaaccgaggcaccaaaggctccagcgaaacccactccagtaagggtgttcgccattactcaggctgatgcagaagccagtccttcagtggtaataggtcaactctcggtcaataactctttttactctgtactgtttgactctgaggccactcattcttatgtggcagccacaatctttagtaaattggacagaccgcgcgacagttatgaattagggtttgaaaccctattacctggcggagagttagttatctccaaaaggtggattaggtctat

SEQ ID NO: 277002 - DNA, 541 bp, Cannabis indica
gacattttctaccatataacatctcatagggagccatccatattgtactttggtagctattgttgtaggagaactcaattagaggcaggtacttactccatgaaccctcaaagtccatgacacaagctcgcaataaatcttccaatatctgaattgttctttctgattgaccatcaatctgagggtgaaaggttgtgctaaacttcaacttggtacccatagccttctaaagactcacccaaaactttgatgtaaactttggatccctttctgaaacaatagatttgggggctccaaggagacaaactatctcctttacatacagttcagcgtactgatccactgaatatctaactttcactggcagaaagtgagctgattttgtgaatctatccactatgatccatactgaatcatacattcatgtggttctaggcaatccagttacaaaatccattgcaatgtcctcccacttccactcaggaaggaccaaaggttgcaataaccttgctggcctttgatgttcagccttgatctgttg

SEQ ID NO: 277003 - DNA, 545 bp, Cannabis indica
gagtttcgaaatgaagcctatgagaacgccaaaaatctacaaggaaagaactaagaagtggcatgaccaaggtctagtaaggaaggagtttcaacctgggcagcaagtgttactctttaattcaaggttgaaactgtttcctggaaagttgaagtcaaggtggtcaggaccattcacagtggtcaaggtgtttccttatggagcggtggagttaaaaggtgatggtccagcaactttcaaagttaatggacagcgtttaaagctctacttgggaggtcaatttgaccaagccaagtccgccatgattctggcgccactttgaagtacaaggctcagcgtccggctatatgacgataaagacagcgctcttgggaggcaacccaagtgttttctttaatttttcagacttttttgattatgtttttagtctatgctttagtatttttagtattttaaatttttagattagtaccagacattattctttttagttgaatcgtgaaaaacgtgaaaaaaaagttttttttcggactggagcccagtgg

SEQ ID NO: 277004 - DNA, 639 bp, Cannabis indica
ctgtttgttcttttctgggtttgcatttgaagtttctgggcatgcaagtgtttaaaacctttatataatcggtttgagtttactgctctagtgataggattgtcgttgtcatgcctctgttgttattttttgtagaagaccatacgttcttcgtataatggttgcttagggcataggacagacttttttctttctgttttctttagcgtgtaaggccgtcttctgtgaatttattgcacccgactcttgtccagggaatcctcctagggtttcctgtatgacaggtgtccggagggggcctctttccagcggttaggggacccccattccctttttcttaatttagagtttggtatggggcctaactgctggaatcttactctttttacagaatcgaaaaatgtctgcttctggctcaaagtcatcgaagaaaagtggtaagcgtctagctaccctcgaggaggtctccctggggcctgttgcccaggaggggtacaagtctcgggcgaccggatgggaagcggccgagcttcactccactccactctgacctgtccccatcagttggagaacattgtggaggtagctggaatcaagccttccacatcagggacctaccatcggccacctcgcgacgcg

SEQ ID NO: 277005 - DNA, 407 bp, Cannabis indica
cgagaaagtatgggaaccaataagtctgcaagccattcaaaggcaaagtctatgagtagatcgcgatttgtgagtaagacaaggtctgccagcaattactcccaatcgaatctgcgagagcacttgaatcgaaagaaacctgacctttgccaatagcttggtccaaagcaagagaatcccatccaattgcagataaacgagttagaggaaaagttcaagtgatatcaattggggaaactagggagacaatctggatacgattcagacgaggagcttgagccgtatcatccagacataatgaatacccttttgttagaaattattttaccaggatctagatttactactaagtatgtttgattaacaaacactatataaagttagaaaacgttacagtgggtgcagcg

SEQ ID NO: 277006 - DNA, 672 bp, Cannabis indica
aggcagaaaagaaaaatttcaacacaatagaaacacttgaggaatatcaagttacttttgctgtgtccaagttagagggtggtgtagcagattggtgggagaccttgtctaggacaatggaaactgatgggatgacttggcgtgattttgaggaagtttttagggagcaatattttagtccatctcacaggagggctcttattggagtatttgattgtctaagacaaggggatctgactgtgaatgaattttacatgaagtttgtagagctatcctcttatgcatatcctggtgttgttgaccaacccttggtgattgaacagttcatgcgtcctttgagacctgcgatatgtggtcctacagcccctttgacctttaacaacttgactgagtgtgtgacagcagccttacgaactgaggctcatgtagaggggaatgagaagaagaacacaagcagaggaagaggaaatgactgaaagaggaccaagaagaatcaaggacagtggtcccaagggcaacaatttagtgggggtagcactagtagtggttcatttggaaagacacgtagtggaccatacgggtgttttagttgtggtcaacaaggtcataaggagaaagattgcccacaatgacaacaaagatttcaagcatctcatggaggacccatatgga

SEQ ID NO: 277007 - DNA, 454 bp, Cannabis indica
actatgtctatttgagaatttatcacttattaagggcgaaactgtaaagaaagagtttatagggtatatttattaattaagagactttgattagtttaattaataaatataataaatgacaatattatttaataattaattatagttattaaatagttagaattgacatttatatggttgaatgtgaaaattggcagtttttgagaaaatgggaaacagaaatgataaaataggaaagttgcaaatgtgaggcctatttccatattgccatggccggccacatcattgccctttatcatttaattttttcaattttttaatgccaagtaattcaaccctaaccctgtgtggtattctataaatagaaggtaaaggcttcaggaaacacacacaacacaattgcattcttttcctttcacagaaattttcctgagccgccactctctctctctct

SEQ ID NO: 277008 - DNA, 725 bp, Cannabis indica
cacaaataagcccttgcttagtgaaaattcataaacgagacatagtctaattttagaattataactgattaattaaaatcaattatttgagtcttacaagcagtatggtctcaactagtatgaagaccacgggcctatacaaccgagcttccaataagcagaactagaatttacaaagtaaatttcctaacttattaattcctgattgcatccactcataaaacttggtattccactctcagtcatatagaacgctctatatgttccacgatatagatacgctatcaacatttagccgtctttctaatctcaatactcaaagatcctctataggtgatttacaccgagtagggatagatttaccgtttcacccctcaatgtaattttatccttaaaatactcagcttcctgtaaatgatttttcaatgaactaaaatataatcactgaaataagagctcttccatttacatctattaagccaagctcaaaggaaatcatcgtttcagttctatgtcctgatagaagctatagattccatatctatgtttagcgctcccactcaatcacactaccatgttcccaaaatgtacgtatcaccctgaccagaaagtaggcttaactaacaaatcacagaacatgaatagcactcctgagattgaacctaaacatgacaggattaagatctttgatctaagatcaactagtgatattgacttagaaagat

SEQ ID NO: 277009 - DNA, 517 bp, Cannabis indica
tgccaagaatggtctcccaagaatgattgggacattgctatcttcttccatatccagaacaatgaagtcagctggaaagatgaacttgtcaactttaactaacacatcctcaatgactcctctaggatgagctagtgatcgatccgccaattggagagttaccgtggttggctttgcttcacccaactgcaatcttttaaacactgacagaggcatcaagttaatgctggctcccaagtcacatagtgcatttattccttcaattctcccaatagtacaaggaatagtgaaactccctggatctctgagtttgggagggagtttcttctgtagaatggcgctgcactcttcagttagggccactgtctcataatcctccatctttctcttctttgacagaatctccttcatgaacttcacataacttggcatctgctctaaagcttcagcaaagggaatgttaatgtgtagtcttttgaaaacctctaggaatttggtgaactgcttgtctagactt

SEQ ID NO: 277010 - DNA, 547 bp, Cannabis indica
attcctccttgcgccactatagatttgaaattgcactcttaattatatagaacgctttatatgttccaagatatagatacgctatgaattatctatcgttctaatccaaataatcaaagatcctctatagatgatttacatcgagtagggataaatttaccgttctacccctcaatatatcaatccttaaaacacttagcttcttatttatgatattttagtaaactaatataattattgaaataagagtttttccatttatctctatcaagccaagctcgaaggaaatcacaatttctcttctatatctagatagaagttatagattccatatctataattagcgctcccactcaattgtactatcatgttctcaagatgtatgtgttgcccgaaccaattgttaagctttaacaaacaactctaagaacataataacactcttgagattgaacctaaccatatcaagattaagatcttttgatctaagatcagccaagtgatattgacttaaaaagatacaacgataagtttataatatctttac

SEQ ID NO: 277011 - DNA, 566 bp, Cannabis indica
gtgtgggttcgcgtcctgggtcttggtctaggttgggtccgagtcccaagttccaatctcgatctgagtttggattcagttcagggtctaagtcctttgttctgtgcctggtctgggttcgagttttggtacgggtccaggtctagttttgggtctggttctaggtgtgggtttgagttcgggtccgattctatgtccgggattgtgtcgaggtctggacccagatctgggtcaatgttcggtgtaggtccaagtaggggtcccaagtgcgggtacaagtttgggtctgtgtcaggatctcggtccaaatctaggtcaaacatttcgatcccagtctgggtcttggtccgagtccaggttcgtatcccgattcctatctaggtccaagtcagtgtttgggatcgggtcccaaatttaggtacaggtccgggtctcagttccggtttgggtacacgttcgcgtcgaggcccgagttccattctcaatttgggtctgaggctaggtttgtgttcggttcaaggtctaggtccgggtcctggtcacggtcctagtcttgttctagggtc

SEQ ID NO: 277012 - DNA, 768 bp, Cannabis indica
tacaacaaacagtaccttatctttggaaacatcaaagatagtagtcttcaaaactttgaaagtaggttgactattgcatgtccactgagtgatccttggaatacgagagctttccttttggcagtacttacctttcatgtacttacaacactcgtagaaccaaacttgaagaacatgaggacaaccaatcaaagtgtaaaaaacactcggcctctttcccgaactccttgccttcctaaccccctcaacccaactatcaagcttacccttcaatgaggaaatagtcaattcaaaagaactccggccccaagcaaattcattgtacctcccactatctacaacatctaaaatagacttgggtacatttttatgcttagtgccactaagcaagaaccactccacgaaatacaaaactgccaacttcacagcatcctcatcagaatcaccccacctcttggtggtaaaacattccctaacagattccttagtgatagaggacgaagttggccaatatctttcacaaagactattaacctcttgcttaaaatctaagacactacagtcaccttcacagtctaacccagtaatcaatgcaaattcctcaatgctaaacctaagcctaacaccgcgtatcattacccacaactcagcatcattaggttgctgaacctcccggagcaacaacccatgaaacacttggggttgaactttaaaatcgggaaggttaaggaaatgaccaaaacaggtttttgaaaacatttcaagctg

SEQ ID NO: 277013 - DNA, 351 bp, Cannabis indica
taagtaccaggagtacctcttccgaaaggcccaggaacaggcttactctaaggcccaggcggctgccgggagcccccttcgcattgggagcccggtcgagaggagggcccccagaccaagggctcccgaagcaagaaaagaataggaggctcagtttcatctgacaaaagttaagtgtgaatgagagccatcactatctatttataggtaaccacctaggtttaggttagaattatttggcattaaaataatgaaaaaataaatgataaaaccctataagtgtggccggccatgggccttggataatgggcctcacttatgcaattttgctgttttatcatttctgcatct

SEQ ID NO: 277014 - DNA, 529 bp, Cannabis indica
atgttgaaatatgttttaccaggatctagatttactaccatgtatgttatttaacatcgtaaatatgaatttctaaaacaatgtaatttaaacacatataaagtttcagaaaccttacattgggcgcaacagaattaaaatgactccttcggctcagatccctcacccttgtatcctgtctgtagcagagtatcaccaagatctgagcccgaatctccttctctctaatttggattcttcacagccttacacactatgattgagtacaacttgatgtttgtgggcacttactctatcactatatagttcgaaattatgaagagagaaagagagaagagaggttcgaatagcatagggaagaaggttcaaatttttgactgaaggcaagtgtgttcatcatcttttgatttgaggccatcactatctattcatatgaaacaacctaggtttcggtttaaattatttggcattaaaaaaaataaataaatggtaaaatagagcaataatggccggccataggatgtgggcc

SEQ ID NO: 277015 - DNA, 613 bp, Cannabis indica
aggatttttggaccgtttcaacgatccaagcttcccaccttcttcttcaacgacttattgtagtgggcaagctttcaattcccgctgtaaagaccgcttaactttaatttggaaattaatagataattaggatttaattatgaaaattgtttataagtcttgaattattaatttatgatgatatatttgaattcagaatgcattcaatatatcatatatggaattttataattttgcatgttttgtgcccaacaacattggaacacggtgtttggctattagaatcacatcctagtatttttagtatagcgggacaatttagttagacattgagaaatataaagaatagtcgagattttagaatttgccaaaatacccctaggtgattttgtgattagttagctttagaaaggaaaaaatagtcattttgcctaagttaacctttttgtctttagtgagtttaatggggtttttattctgaatattaaattaactaagtttaataaaactaattaatatcttcattatataaaaaaataagaaaattaagacaaaaagatacattttctctcaattctctctctctttttaaccctcctagaaccagctaggg

SEQ ID NO: 277016 - DNA, 489 bp, Cannabis indica
ttagaagttcaattttaggttgttaaatcaacagacttgcaatagatctaagatcctggataaatataataccaacaatacgggggccaaggcctggccctgactatatccaggagtggcagagaattgtctgtcgctcattggtggagccgcggtcgggacagtacccaacggcggggctccaggcatataccctgctatcccggtgtgatagtatcctccatagaccactatttgggcctcttcaaggttgatgtacttttggactcttttctggaagtcctgaaggctggcagcttcttcctgttgtaattcattccagaacggagtccctgtacggatgcctgcctggagaagggcgagctgttgtccgtcatcaactttcttggtcttcaaggcttcctctcggaacctctttatatagtttttcaaggtctctgtgggtagctgcttgatgttagtcaaggcgctgacctccagattgacctt

SEQ ID NO: 277017 - DNA, 300 bp, Cannabis indica
accatcatcatcaattgtaggaacatcataataaatattctcaccacgatcttcttgttcatctgcttcttcattgacatgctcttcgtggttttcctgttcatctcccccatgatcatcatgcactatgggtgaaggaactgagctagtactcacaggaacattaacaggggacttttgcttctgaactgtgtcattgtcttcaaatatttgatcttcaagaaacaccactgttgggaattattttaccaggatctatctgagcccgaatgtcctccttcttcaagctttgatccttca

SEQ ID NO: 277018 - DNA, 807 bp, Cannabis indica
ttctttttttttggagattctttcttatacttgtattgttgtttagcttgctgctgaagctggccgcctctccaagaacataatcaaccatggcttcgttctgtctgattttggggacatgaacgaagtcaggaaggtccttcaggatcttactgcggagaggcagctttaccaggaagctgctgagcgccgggaggctgctgccaaagccaatgaggaggaggctaagcggagggaagcccaggcggaggcgatgatccgggatgaggccctgcggagagacaggctggaggccaagcatcaagaggagctgagggcggaaggtgaggccgctgcaaaggccaggcgggagctccgggaggccagggaagccttggacgagatggttgccaaggtgagatccttagaggaaactcaccaggcaaacttagagtcccgggccgctctagccgcggagctgaaggagctcagggacttcaaggaacaagcctcaaagaaggcgaaaagagctgagcttctttctcccgtttcctgcggccggtgccctaagcgcttcgatgatggagtcttcatggcttggtctaccaatgaccaaaatatcaagcttaccttcgaccccaaacctgaagagatgattgccaaatttcgggagaagaagaagaagcttgatgccatggtggaggcacgcatcggacctcgtcttcctccacgtattgactaggccgctcgagattaacccagtacaaccaggatttcacccacttctcttattattattattatttttttttgtatatatttgtttac

SEQ ID NO: 277019 - DNA, 542 bp, Cannabis indica
ggaatagttgtaaagaccgcttagtttaatttggaaattagtagctaatcacgttttactatgaaaattatttatagctatttaaataattattatactgttattattgaattctgaaatgcattttatgtcattcagtagttttcataattttgcatttccggtgcccggtagcatggaactcggtgtttggctcagtaaaatcacaacttagtatgttagtagtttgggacggtttattagacattgggaatgtcgggaatggccgggaatttagaatttcccaaaaatacccctttagtgttatttatgtgattttagtgtgaaggggcaaaatggtcattttgccccattgttagtttgtcttttgtgacttaataaattggaaaatatatgtttattttattatgttttggctgaagtaaaataggagtaagtggcatttaatttcattttcatttcaaaaatcaaagttagaaaagaaaaatacaaaatttctcaaaagctctctctcttttcctctctctttttcggccacttga

SEQ ID NO: 277020 - DNA, 792 bp, Cannabis indica
ctcctcgtttccctggctcaagcctcgagcgcgtgggggcaaatttaatgatgtcatttaatgcagcgatttgctttttgcaggaatgtctccagccgcctcctcggtcttctgatacgaacttggggcgcgtggaggtgcgtctaataatggcattaaatgcagcgattcgcttttgcagaggtcgattcgtttcacgccctatgattgatgcggcgcattaatggtgtcagacggatactcaaacgtttccaccgcctttatggcagattgatctgatccgttgattttcgggaattcgaatcgtgcgtctcccccaccgtgcgattggtaggtgatgacgcctgttcctcatgcgtttttgcctataaaagccaccactttcccttcatttcggttactttccatcccttgccatttctgctcgaatttcctagagagaaaattccccaaagtagcacgaactgtcttagcacttatacactcctttcagttttccagtgtttgccttcgccagttcttctcaactttcacttgttcacattcagtacccccagttcagcgatctactgtaagttccttgcatccttattaacatgctttcatttacttcgttcgctttctgggttcgtattttgagacttctgggtgtgtgagtgtttaagttcttcgagttctgctttatgtttactgcgttagttgtagaatcgccattatcatgcctctgttgtaatcattgaagagagccatgcatttttcgtttaacagttgcttagggcataggatggtttt

SEQ ID NO: 277021 - DNA, 658 bp, Cannabis indica
cttttcatacttagctccatatgctgactttttcctttatgcaggccggtttgaagttggcttatacctactcccgggctaaatctgctacttccaagagtacggctctgtccgacaccttgagggcggaggcagacttggccaagaaggaagctgaggaggccagggcggagactgcagctgttcgccatgagttgggtgaggccaacaagaagctgtttgccgctgagaagaaggtcaccgtgctgacaaaggacctcgaggctgctgatcgctttgaggaaaccatcgagaccttatctgctgaagttgatcgtcttcaggatgagaggacttctctgcggcaggtccttcttcggctgaaggacgataaggacgctcaggcggccgaggcggaccgcttgaaggagaaagtcgatgctttggagactgccggcctcgagctcttctttgatttttggaaggctaatccccaggccaacttcgactacttgggcgacgccaaggacatgtacctcgagtactgcgcggcccaagttgcctatggtgggaaagaggtggctgcttcaacttccggccaagcttctgaccaggctgctgatgcttctcctgctcgaacaacagatcctcctgctctagtcggctcagaagaaccaaa

SEQ ID NO: 277022 - DNA, 636 bp, Cannabis indica
taaaaaattcactaaaagtaatagtttttttagtgtatacaaaatttaatatttaattaaactaataataatatatacacataaaacaatgctaaacattactaataccacttagcattttttatagggcgtaaaaaaaagcctcttttaattagtctagcatatctccactattctgtctatgcatatctttggtgtgctgtcaagttttaatttaagtatccatttctggatatttaaacaacaacttttggtgttttcaatgtcacaaacggctggcatggtggccctaaggctgcatggtggggcctagggctctgcatgtgaggatgggtgaattaggggtattttgaggggtcctatatgcatttgctatatatgagttgtccactatcactccctatttatttccccctcattatataaacattataaacctaaacaatcagaaaagtgtataatcattgttcaaaaaaaaaaaaaaactgtaaggcccacgttagaattagccaaaataaataaatagaaatagcatgagtaaccaaattagcccattttaaaataatcatgtatattaatgtttagggagaaaggtgtaaagcccgcttagttaatttggaaattagcagttgttta

SEQ ID NO: 277023 - DNA, 510 bp, Cannabis indica
gctttgtcctcactcacacgcttcctggaaaacttcctaggagctcacccatcctgaaattgtcccaggtcaagcacgcttaatgtggagttctttcgtgatgggctaccggaaaacaagatgcaccttgctgatataggtagtaccaatcaatctatttaagctctcttcaactatgtagtctgatacctacatagcctcagaatcatcacacttgacattccccaggcaatgtaggattgcacagtttacacgatatttccccttacggatcacgggactactgacttaatgagataaatccttaatggattttcaccattagacatacataatagtgttagatcttgaaagataaatattgtatatgcagcatctagctgttcatcaatggatgacatcttagactagtatttttacaatatgaaacaagaagattgtataaataagattactttgactctcgctaatcgaaacatcgttggattcttatttataaacgaaattatc

SEQ ID NO: 277024 - DNA, 789 bp, Cannabis indica
gaatgtccttatatgctaactgtgatgggtgtatgcagcaagaggaggatatttgtcacgcgttgtggtgttgtccaagagttcaaaaaatttggaagcagctgggctactccaaattcaaggaccaaagtgttcataatgcatcggcctttttgtggtggcagtgggaacatctctcaaaggaggagttcatccgatttgtcggtttttcttggttgatttggcaaagacaaaacaaatatatctttcaacacaaggccccggacaacaaatattggattccttgggcgatggagacaatagaacaacacctgggactgcaacaacaactaccagccgctccttcatccaagcccttaacctcctggcagcctcctcccaaggacatgtttctcatcaacacagatgcatcccttgtccacggtcaggagggctgtggcttaagtggggtaattcgaaactatgctggtgatttaatagttgtgcaactgtgtacattccaggttgtatggctattaatctggcagaggctactgccattcatttagggactcggctagccattagctggtctatctcgaatgcatgggtagcttcgaacagctagtcaatcatctcagctattgtgaatggtgcttcttcttcaaccgattgggggcagatggtgctaactatcattcaattgaagacccaattttcagtcgctgcattttttgattttataccagaaaattgtaataaagttgctaatagtttagctaagtggagtcgtgtgactcaaaagtctga

SEQ ID NO: 277025 - DNA, 757 bp, Cannabis indica
gcactgttacccgtatcctcgataatatgggggtgacgggaactgagagggtgaattgtgcggcctttatgtttcaagatcatgcccgcgtatggtgggatatagtgaatcagactcgagatgtcagtgtgatgacatgggaagagttcaagaaactttttgaagaaaagttttataacgttgcagtgaggacttcacaccaagaagattttgtgaagttgactcaggggaaaatgtctgtggccgaatatactctggaattcgatcggttatctaaatttgctggtgatctggtgcctacagattttaccagaaagcagaaatatgttcgaggactaaatgctacaattagtcgggacttgaagattaccacatcacatgacactctgtataagagagtggtagacttggccttaattgctgaggaggccgagcagcaagtaatgaaggagcaggctgcaaaggatgccgccatggcatcaaaccctcctgctggtggtaatgtcagtaaggggaccgacagtggcaaccctgagcacaaacggaaggctgaggcttccggagcttcagggggaaatagaaagtttcggggaaacagaggtggccgtcagggtcgcgggtcctcattccgatcatatccagaatgttctaaatgcaagaagcatcatcctggtgagtgccgagccaaggcatgtttccagtgtggcatggtgggccactttatcagagactgtccccaagccaagagagaagagcc

SEQ ID NO: 277026 - DNA, 557 bp, Cannabis indica
aagtctcaactattccagaaaagataaaagccatgaaagtattccttaaatcaacagtaagaggtctcagatatgctttagtatgccttagaccagacatctgctgttgagtgggagtaatgaataggtatcagattagtccaagaaacgaacattggaagacaatcaattgaatcttaagattaaaaagaggaactatatgttagtcgataagggtgtatttaatactcttagactacaccaaatcagatttctagactttcttagtgcttgaaagtctgctcatgagatggtgattactttggggatggagtagtgattttggagaagtgtaaaaacctatctgaattctctaagtctaccagagagagactgaatgttaaagttacaggaaagatacttatttagtctaagaaaagttctatacattattggcattgttccaacatttcttaattacaagtgttacttcctgacaaacacaaaagtagttgccaatagtaaagaatccagtatccctagaagagttgacatatagagaggaatttcacaatatc

SEQ ID NO: 277027 - DNA, 675 bp, Cannabis indica
agttatgaggcttgagctgcaaccagacatgacatacgaggaacagccagttcagatccttgatagattggataaagtccttcgaaataagaccatagccttggtcaaagtactctggagaaacaacaaggtggaggaaaccacctgggaattagaatcagatttgagagcccagtatccggagttgttcaggttagatttcgaggacgaaatccttttaaggggggcatagttgtaaagaccgcttagtttaaatgtggaaattagcagataattagggtttaattatgaaaattatttattgatatttaaataattatttatgttgatttatttgaattcagactacatttttatgtcatatagtgaaatttcataatttttacattttcggtgcccgacaacatggaccacagtgtatggctcagtagaatcacaatctaataatttagtatagcggggcggtattgttagacattgggaatgtcgggattagtcgggaatttagagtttcccaaatttacccttagtacccttttttatgttgttttagggtggaggggcaaaatgaccatatgtattttgtcctatactggacttgattacatttagtaggttgttttatgttgggtgatattaatttaataaaatgaaataagaggattcatttacttc

SEQ ID NO: 277028 - DNA, 591 bp, Cannabis indica
cccattttagaacttttctttggcaaaggaggaggagaagagttcagctatggaggttttatttaaaaaaaaaaaaactgaaaagaaattgaaaataataaaaaaaaagaagaagagaaaaagataagtgaatgatgtaaggtgtgattgatataagtcatcaatcaatgacgtggctgcatgcatggaattgatgtgtaagtggtataattgtaataaaagaaagaggaaaggtaaaaatgatgatgtaagcgtgtaggggtttttttgtaataaattgagtaaattggatttttgatgtaaaaatttctattttatttaactttgactaataaaaataattatttattttttactactttttaatttcttaaaaatatatttcttttgggtgatgtgcaatttttctttttagagttattatcaaatattttatttgttgttatttagttattcaataaaaaaaatgagtgcattttttattttttggacgtacaatatacttttgagttagtgagcaattgttttatatttgtttttaagttttttatttattttttttatttttgttatattattgatttatgtttt

SEQ ID NO: 277029 - DNA, 1091 bp, Cannabis indica
acagtgctttttcaattacagtgcagtctttgctaatcaaagaatattcttgaaaaatgtgtcaaattaaaacttttgttttgaaaattaaactttatattatatcaaaatatttacaagtgtcgcgatcccgttttcaaacttttaaacatattataccaaaatacataataattaggtcgcacagcgactacaaaataaaatccccaaatgtcccgagaacgaacactccaggtcgcgctgcttcgacatgtacaatcccatcctagctcaggttcactcctgttcagctttcgcctttcctttacctacacatggaagcagaactgtgagtcgacaaactcagtaagaaaagcatataacatatcatataatttccgacttgtatctaggcgcccatacacctatttacaaggctcaacagatgagtaagaacgttcaatactagggtatagccactataccacatacactacgtacctctctgtacgagtgttggtagggtttatttcataccctgagtacctctgagtgatgtaccacacatactcagtacctctctgtacttatgctggtatcacggtactctcagacaacaatcactataccaatacactctataccttaaccgtataagtgttggtagtgcaactaacattttaagcatgcatatacacataacatatacatacattcagttattgatatcacacattatattcagttcttaccttctttccgaattcaagtgtgctggccgacctgaacggaaagtctcgcgctagatggatgccctaatcacattatgaaaccgggtaagttacatgatcaaaaccctaatcccgggaaacccaaaaccaaacctaggttctgttatactccctagagattactcaaactctggaaatagggaaacacccaaccacgacactgaaatggacaaaaattgagaaaatgaagtgttcgggaatcctgccaaaaccggctagccagttttacacgtacgggcaaaaccgctagccggttgcacctgtctcccaaacccttcacctcttgctcaatttccaccaaatgctaccaaactttccaga

SEQ ID NO: 277030 - DNA, 694 bp, Cannabis indica
ttggcctatgccatgagcatagtaagtcgatttgttgctgaccctggaaatctgcactgggatgcagtaaaatgggtcatgaggtatgttaaaggatcactgaacataggtttaatctacaaatctacagagaaaagtgaatgtgaggttgaaggatttgtcgactctgattatgctggatgcattgacacaaggagatcattgacaggttatatcttcacagctttaggtggatgcattagctggaagtcaaacctgcagaaagttgtagccctgtcatccacagaggccgagtacatggctgcaactgaggcaataaaagaggcactgtggctaaaaggcctatcaaaagaactcgggtttaactctgaggacatgactgtccattgtgacaaccagagtgctttgcacttaatgaaaaatcccatgttccatgatagatcaaagcatatcgacatcaaacttcactttatcagagagatcattgccaatggagaggttcaagtgaagaaaatctgcactgaccacaaccctgcagacatttttacaaaatgtgtcactcaaaccaagtttagacactgtctgaacttggtcaacatcaaggaaattggatgagtttccaacttcccttaaatgttcagcccttcctgctcatgttctctaagtctaagtatctatgccaaggtggaattgt

SEQ ID NO: 277031 - DNA, 805 bp, Cannabis indica
aatgaaatgggttttcaggtacctagtagggacacctaaggttggactcatctacaagcaacaaaagttcagcaccaacatagaaggatacagcgatgccgactatgccggggacagagacagcagaaagtctacttcatcttacatgtttctactaggaggaaactgtgtgagttggaaagcccaactccaacctgtggttgcactttcaacaacagaatcagagtacatatcaaccacagaagctattaaagaagccatatggatgaaaggacttttgacagagatcaagttacttaaagaggttcctagagtgtactcagacagtcaaagttgtgtacacttatgtaggaaccctgtgttccatgaccgaactaaacatatagagattaaataccactttataagggacaaggtgactcaaggtgagatacaagtggaaaaagttcctactgaggagaacccagcagatatgggaactaaggtggtgactctcaacaagttcaaacattgtatgaacctgttgggagttgacacaggatggtaaatggacacataatcaagcaatgaccctcaagacagcaacaagtaaataaagcaaaggcagaaacttttttggactgctagtatggaaatttaggtggaaattgttggataaattcccatactatctgtcacataaataagttacaaggaaaaataaattagacctttttacaaagcctcaacagaccattataactcatagagttgtcggttctgttttcctaggcttagatctttatttctttacaatatgaagaag

SEQ ID NO: 277032 - DNA, 629 bp, Cannabis indica
ttttgctttgccaaacaaaaactcatgatttatttacggacatttaacacccgtaattttttcagtgttttataatttagtactgaaaattctcaacttttaagagcaaatcctaatttttgtaataaataatggtgcagatggaaaactctcataacaatctccaacacgaataaataaaaaataataataacaatctttaacacaaataaattaaaataaaaaattaatttagtcataacaccacccaattaaattatttatttatttatttggaagaatcttgaattaagttctattttgattaaaatttaatttttgttttgaaaaataatttagtttaattattatttaacagaacgaaaaatcctataaacaaaacttatcctctcaagtaattagtgagaaatttttttatgttttaattttatatatttaatttttggtgtttttatggcaatactctttctatttaatttttggtgtttttggtgtaaatttgaggcttctattaaatcttctaattgtattgcacacctatgtataaattacatatttttggtggattcgaaaatttagtgtcacgtatacacagtaacaatttcagttaacatttaatagtaaaattt

SEQ ID NO: 277033 - DNA, 649 bp, Cannabis indica
tacaataatatctctgaatatataattcttagatagccttagcttatagcgtttcggcgtatgatctctgtttacagtttttcgatcgatccccctgcccagtgaacattcctcactatttatagggcaggaaacttgaggaggaagagtttcctctctcgttacaaagcgcataaacagaaagatcgtgtgatcaatgctgaatgctaggatcgtgggattgaggctgaatacaccgatagtggaatcgtgtgtatgccacatccacgcaagttgatccctgagttatagggattgagctggtgactcacgaagtgcttggttgaattcgctaagtgttgctcattctgcacggctcgttgagtattccattatggacatgccagcgaggcatcctgctcggcatgttgatccgaccaggtgctctaagtagatgccacgtgtcaccattcttgtgatgccacgtcagagtgccaattttgggataacatcatcttattcgaaatatgatgatcccactgcctctgttgttttgacacaaccgaagaggacaataccatttagttttcttaaacataattcacggtaccttgtcgtagtgggagagtttcaatgaactttacttcttatgacttgaaagacactagtg

SEQ ID NO: 277034 - DNA, 523 bp, Cannabis indica
ttgaccataatttgtcaagggggagattgttagaactattattttctatagtgacaaattatgtccagtagcattccagttgcgtctgggtctcgtagtgttttgtctggggttcgtactgttagtgttagtccacgtcagcaaagatattttaggttttaattgttcagatggtaacagctgtctatttcgggtttcttggtttagctgggtataaatacgatttctgggtattttgttgacgaactttttgatcggagatttggggattacgtttcttttcgtcttgtttcttctgtatgtttcatggcaggtcagatcttggagcttgaggatgttcatcaatggcggaatgatctgaatctggaattgctgagttcaaactgaagggagttcagtgtcatcttcatcatcagatctgaagggatttcaggttgaagacatgttgaagaagagctcagttgcagcacaagggattgtgcattaacaatcagtgttcttgattgttgttggtaattcatta

SEQ ID NO: 277035 - DNA, 540 bp, Cannabis indica
tgtttaggaagttttatttgtcattgatgccggaaaagtcaccggagtttgctgccggtgccggaaaagtcaccggagtagcggtcggtgccggaaaagtcgtcggagttgctgccggcgccggaaaattcgtcggaattggcattttcgccggaaaaatcactgaaaaatcaccaagaaaccgtttcttgaagtctaagaaaccggtttcttggtgattttttcgttgacaatgccaattctgacgacttttctgacgctaacagctactccggcgacttttccggcagcgacagtaaacttcagaaaagtcatcagaattggcatagtcgccggaaaaattaccaagaaactggtttctagtttctagatgaagaaacccgttttttggaatttttttcggtaatttttctgtacgacaatggcaattctgtacgaattttctagcgttggtagcaactctgacgctaatacaccgacatctactccggtgactttttcagtaccgacagtaaactctgggaaattcgtcaaaattgg

SEQ ID NO: 277036 - DNA, 566 bp, Cannabis indica
aaaaattatattttactattttaacataagtatattttttatatttattttaagtattaactaaataaattcatgaaaaatacaaaaatgatcgaaaaccaaatctaacaattctaacaaagtatatagtatgtactaagccccgaataattaactttcaattttctgaatggtctaggtatttttcataattaaatttagaaataacacaaataattcatgaaaaatacaaaattaaatgcaattcaaatctaccaattttgcaagaatttatatctgataaataatcatataaaataaatttagatttttctgagtaatttaaatatttttcctaattaatttgacaaataaattaaataattcataataaataaaataattgcaagaaaattctcaaacttcatagtagacctaaaaatacctaaaacaagtcaagtataagaaaaaatatgaaataaaacctttaaaaacccctgaacggagcttcgccggcgggtcgtcttctccggccacggcgagttccaaactcccgttttcttgctttcgacgcctcctttcaatta

SEQ ID NO: 277037 - DNA, 822 bp, Cannabis indica
ttcgaaccagcggcagcagcttttaggaacagggtcatcgactgcgaagccaactccacagagcgcggaacaagctcctcagaagggatcttctccgccttggacatgaactcctcgcccacgaacttctcctgcatggccaggaagtcgcgagctcggacagttggctcgatcaggactttcttccccttgtcctgcgtggtcttggccagcttcttggaagaatctgcggcaagagtagccaccacatcgctcttcctcttctgggcgacaatgggcgaggtcgtcgttgctccacccttcggcttgatcttaaggacgggcgcggacttcaaaaaagtcatctctgcgaggataaatgaaagataagtgtaaataaaactcaagacatcagtttataacaagagataaattacctgagattggtcgagaagtttgcttggagaggcgtttgtctatccgctcttgttgcctctcagacggttctttgtatactggctctctttgaagacttgcgttctctggaatcagctggtgttctcgcagcttggcagtcgtacacagtaatcgccagtcgcgatcttgtaccggaaggctcccaaggatttcggctgtctctctgcgagtcgcgtcaagtgccggtcgagctggtctatctgcgagaacaaggaaaagcgagttagcataaaatctcaaaataaatcagaaaatgcctaagttaagaaacacgcgacatactaggtctgcgattaaagtcagttctaatcccagggactttaaaagacgtagaaccacttcgatttccagtcccccactgttcga

SEQ ID NO: 277038 - DNA, 1058 bp, Cannabis indica
cgtagtaaacataaaattcgtaacattcatcagtaaatatctcccagttatcatgaataatttgtctgcacataggctccctagtcaatgcattctcaaaccggaacctcttaataaccacatcaattttccaaaaagcaagatcaagcaagatgggggaatggtcagaagcagagacctccatattaaacagctttgcattcgaaaaaaatagaattccaagaataagagattagagcacgatcaagtctaactcaatccagtttaacgtgccttttcacttctcccagtaatggatgtccaattagttccatatccaaagctcacactcatcaactgcgtcttgaaacccattaataagtcaggatgggtaggggcgctccccatgcttatcactttgagaaagagtattgttaagatctccaagaatacaccaaggcaaagtagattccccagcaagttgacagattttcctccatgtattctgtcgcaagcttctttgagtctctctatagaaaccggttaggcaaaattctggatgaccatcgaggttgaacaccatgtcaatgtgattggagctaaaactaaaaagtttcctttcgtcttgggttttccaaatcatagctaatccgccactgtgaccaaccgcatcaaccacaaaacttgcttcataccccaaacaacttttaacaaactcaactttttattttttactaatagtttcacacaagaatatgacattaggcttcttttggaacacaatttcctttagaaattgaattacccaggggttcccaagcccttgccaattcctacttaagagactcataatccttggcgggcccaaacgttggtacccgccaataactcgttttttttttttattaaaaatgccatcttccacaattgcctcatgattatttttattattacccaaattcacttcagcttcatcttcaataaggcccatttcttttccttcatcaggcgtcttccctccactctcaccaacaacctcatcactaacaattatttgggctcggcccataacttgttct

SEQ ID NO: 277039 - DNA, 264 bp, Cannabis indica
gttaaaactgcaaaaacaagtggggcccattacttaaaccttggccggccactttatgtggaatttcaaattgataataattcctaacctaaacctagtagttgcctataaatagaaagtgatggctcagtcaaaatataagttttcattattcttctgacagaaaattctctcttcagaaaaactgagccttcccttttctataccttggccgaacctctctctctctctcttttctcttcataaatttcgaaccttagtgat

SEQ ID NO: 277040 - DNA, 515 bp, Cannabis indica
acttgagtaaccgtccagaggcatctggcttttgtagtatttgtcatagtggttggtcggtatacacttgaataggatgagcttgaaaataaggcctcagcttccttgttgctagaaggaggcaataggcgagcttttctagcaacagatatcggccttcggcctcgacgagtcttatactgatgtagtagactgggtgctgtacgctgttctcttttctgataagcacgacactcacggcatgctccgtaaccgctaggtatatccccagctcctcacggtctagaggtttagaaagtacaagaggttatgcgagctgtgcctttagatcttgaaaagctctttcacattcttctgtccactcgaactttttgtttccttgcaggatgttgatgaatggaacgcatttatccgttgattttgacacgaatctgctgagtgcggcgatttgaccagttaggctttgcacctcttttgttttgttggcgagttcatatccaggagggcttggattt

SEQ ID NO: 277041 - DNA, 821 bp, Cannabis indica
gacgacactataatcatgaacaaatatatacatatttatatatgttctggacttaaaaaaatttatacattaaatataatcatgaaataaatcatgtgaaccatgcaacatagaatggtttcttatcttttattaattagtaaatctgattatattgaaatgagttttatttagagcacaaacctaacaaactcccacttgcactaatataaaacaaaaagtacatttcaaataatctcaacatcttgatatccagatcaagtgtagtatgtagtattctctctgttataggatctgacaagttgtattcaatacaatctttcctccaccattacatttccttaatcacaaaatccttgatattgtgaaattcctctctatatgtctactcctttagggatattggattctttactttttggcaactacatttgtgttggttaggaagcaacactagtagttaataaattattggtacaatgccagaaactgcataaaactttccgtaaactgaataagtatctttcctgcaactttaatattcagtctcactagtagagttaaagatttcagatcggtttttacacttctccaaaatcactactccacccagagtaatcaccatctcatcagtagactttctagcatcaatgcaagtctaaaacctgatttggtgtagtctaagagtattaaaaaaccacccttattattgactaacatatagttcctcttcttgatcttaagaattatttgattgtcttccaatgttccttccctggattaatctgataccaactcattactcccactcaacaacaggt

SEQ ID NO: 277042 - DNA, 670 bp, Cannabis indica
gcattggtggaaatgccatcaccaaccaagccaaaggaggttcaaagcctcacaggtaaagtcgcagctttaaaccgctttatatccagatcttctgataagtgcaaggagttttttcagattttgaaaggcaacaaaaagttctactggaacgaaaagtgcgagcaggcctttcaagctttaaaaacacacttggggcagcctccaatcttgtcaaagccattgtccggagaagtcctatccatctatttagccgtttcagaatatgcgattagttcggtactaatacgcgaggaccaaggacgccaatacccagtgtattatgtcagtaagcgattactggatgccgagacgcgttatccccaaatggagaaattggctttcgccttgataatatcctcgagaaaattgcgaccttatttccaggctcacagcattgaagttttgacgaactaccccttaagacaagttctagcgaaaccagaagcatcggggagattgttaaaatgggcgatggagttgagtcagtttgacatcaagtataaaccaagaactgcgatcaaggggcaagccttggcagattttatacttgaattccccagcaccgaggtagcactcatagaggacagaagcgacattgctatagcgaacagagagacgtggacattgt

SEQ ID NO: 277043 - DNA, 743 bp, Cannabis indica
caagagactggaaacaacggttccgcacacagccaggacattcataacatgactgttccaccaggcatcaacgcccagaggaccatcggagatgcaaccgaattgcaaaacctccgtgctgcgcttggactcatgcagggtcacaacaataccctgcatcacgatcaggaagaattacgtgccgtagtaaacctcgcatttgacaaacagaggcgtatgttcgccgaatggagggacaaagagatggaggcattaattgctcgccatgcagaaatcgaagatcgtagtcggcaagccactatgctgatacgaagagcctatcagactgtaggccaacggtgaatgccgtccaatccctggtcacgagttccactcgtgggccaagaggtaggcggacagaccttgtccgggaattcatcaggaggagtcatgctcgatggatccacacaaaataatggagccattccacctgccaaccaagcgaaccaatcgataaggcagccaggttcttctgtgtttgaaaggttgggaacaccccgtgacctaagggacgacctaaacaaaagaaggggaacagacgagcagaatactacaacgaatgtgcagtccggagcccatactcaaatccccgctcagaaagacgctgacgtagcccaacccgaccagaatgccaatcaagtcagcccagccgtacaggcccagcttgacaaactaaagaatatgtttcatggcatggccgggca

SEQ ID NO: 277044 - DNA, 838 bp, Cannabis indica
aagaacttttattaattctggaaaaattaaaaaatcgcgactttccacgactacactagcgacatgttgcgatataggaagaacatttattaattctggaaaaatttaaaaactgcgactttccacgattacactagcgacatggtgcgatgtaggaagaacttttatcaattctggaaaaatttaaaaatagcgacgtttcacgattaagttagcgacatatagcgacattaatggaacttttatttattcagtgaaaagtcgatatttagcgacgtttaacgattacatttgcgacatgaagcgacatgtagccttgcaatatttgcatagagatccaggcttcacctgtttaccatttaaataacctaacttgcagcgacggcagccttcggggaaccctggtggtggagccggccatacacctgttttgttaaattttttttcaagttttagaaacctccactcgttcataagccgttcatcttcaaaacgtttcatgtcgtcaagcactttttgcatttgaggcgtaatttccccacaatcaggctcctgcttgatctcttcaggagtaagaatcggatatttgcccttgttccttctagtagacattgctaagagaattatcttaagagggaaaaaattaagaaaatatgtaacttatgagatagacaattggcttttatagagaaaactagtagttgggaaggtgggataataaatgtaaaaattgaattacacaattgtacacatgtttgtcatgcacaaagcaatctgggcaattttcgcgacatgtcgcgacacagagcgacatgttatcgacatagtcaagtagttg

SEQ ID NO: 277045 - DNA, 610 bp, Cannabis indica
gatgataccatggttcgcacaaaagtcagtgaaggattggctgtcgaactgcttgccattatctgaaactatcttttacggtagtccgaaccgggagattatgttcttcacaataaagtcttgaactttctttgatgtaatggttgcaagtggttcaacttccgtccacttggtaaagtaatcaaccgctaccactgcatattgcactcttcctttacctttgggtaattgtccgatcaagtcaattccccaaatggcaaagggccacggactctgcatctgagttaactcattaggtggagctcgaggtatctttgaaaatctctggcatttgtcgcatttcttaatgtagggttttgaatcttcaatcatcgttggccagaagtaaccttgccttagaattttcttagataagctttgcccggcggcatgatttccacatgttgcctctgatttcactcaatatacgtggaccaaccgaacagggacacgtggatcagataacttatgaatatttgctaagtctttgtatgccacaaggaaacaccctgggcataggtcccggaggaggcacccggagtacaaggtgctcccggaagctcgcatagca

SEQ ID NO: 277046 - DNA, 626 bp, Cannabis indica
aagaaaacagaaagaaaaaagtctgtcctatgccctaagcaaccattatacgaagaacgtatggccttctacaaaaaagaaaataataacaacagaggcgtgacaatagcaatcctatcactagagcagtaaactcaaacagactatatgaaggatttaaacacttgcatgcccagaaatttcgaatgcaaacccagaaaagaacaaacagataagtaatagcatgccattcaataataaagcaaaggatgcaaaaaacttacgatgaagtgttgaactgggggtcctgctgcgagtcgagtaaagacaagaaggactggtagcaacgagcgaagaagaactgggaaaatcgcaaagtgtttaaaggccttgttctaggtctgagaattttctctctaggaaatttgagcaaagttggcaagaaatgggaagtaaccgaaatgaagaaaaggtggtggcttttataggcaaaaatgcatgaggaacaggcgtcatcacctaccaatcgaacggtgagggaagcgcacgattcaaatgctcgaagatcaacggaccagattgatttacaataaaggcggtggaaacgcttgagtatccgtctgacaccattaatgcgccgtatcaat

SEQ ID NO: 277047 - DNA, 870 bp, Cannabis indica
tggttgatccaagcaagatcgagtcagtgaggaattggccgaggccaaaatatgtgactgaagttcgaagtttcctcggtttagaaggatattatcgatgttttatcaagggattctctaaaatatctatgccactgacagagttaactaagaaaaatcaacgattcgtgtggtcagacaaaagtgaagcaagttttcaagagttgaagcaacgtttgataacagctccggtgttagctttgccatcaaaccaagaaaagtttgttgtttactgtgatgcatccagacagggtctgggatgtgttctgatgcaagctgacaaggtcatagcctatgcctctcgtcactgaaggactatgagcagcgctacccaactcatgacctagagcttacagctgtggtttttgctctaaagatatggcgacgttatatttatggtgaaaaatgcaaaatttatattgatcataaaagtctcaagtactttttcaccctgaaagacttaaacatgaggcagaggaggtggctagaactggttaaagactacgactgtgagattctgtatcatcctgagaaagccaatgttgtggctgatgcacgaagtagaagaggtcccgggcaggtttgcaccacagttttgatagcccctcaactagcttctgagatggtttgtgcaggattgagtttttggttggaaagttgcataactgacacttcaatctgatctgttagagaaaataaaaaatcacaactagaagatcccgagctagtcaaggttggagatgaggtgatggctggtcaggctaaagacttttcagtctcgaataatagaatgttgttgtataaagctcgagtttgtgttcctagtcttga

SEQ ID NO: 277048 - DNA, 1202 bp, Cannabis indica
aactgtggggatattactgttcttttatattgatgagtggtcctgattttattactaatattttcttattaatataggagttaatccatatcttttaaattagtattttgtaatataaataaaaggatcatttataagctttattttcctacaagggtcaaagtgtgacctttgaccacccaagttatggatattacacatctgccacagcctagggctcgggtcgtgacagaaaaatggtatcagagcaccgggtttaattacctcggagtgtgtcaccaaatagtttagatttattttaaataataatagtaataaatatcttggtatttatatgtataaggcatatttatattattagcatccaatcctcactaactgattagcttttggttctcagacctaagaaaatgcctccaaaaggaaagaagacaaggagaacggttggagaagacgcccctcaagctaatgtccaacctccacaagctgaattccctatgaacgcccttctcgaagccttaagagctattcccgctcaacaaatggatcctgccgctcgacaaagtcatcattttcagatctttcatcgaatccaagtgcctgagtttgagggtggacaagatcccatggtagctgaaaggtggttgaggcagataaagaaaaatttcaacacaataggaacacctgaggaataccaagttactttcgctgtgtccaagttagagggtggtgcagcagattggtgggagaccttgtccaggacaatggaaactgatgggatgacttggcgagaatttgaggaagttttcagggaacaatattttagtccatctcacaggagggctcttattggagtatttgatggtctaagacaaggggatatgactgtgaatgaattttacatgaagttttagagctatcctcttatgcatatcctggtgttgttgatcaacccttggtgattgaacagttcatgcgtcgtttgaggccagcgatacgtggtcctatagcccctttgacctttaacaacctgactgagtgtgtgacagcagccttgcgaactgaggctcatgttgaggggaatgagaagaagaacacaaacagaggaagaggaagtgaccgaaagatgaccaagaagaatcagggacaatggtcccaaggacaacaatttagtgggggtagcactagtagtggttcatctg

SEQ ID NO: 277049 - DNA, 575 bp, Cannabis indica
acaactaacgaggattaggctattaccgaactgctcggggctgaacatctataaaatttctgtgtcttattattgctttactacatattcttattacgacatatcgtttatcgcttatcaaaaagactcattgtcgttggctaaaagcgaagtcaacactttgcttaaatcaactaatatcagcataaaacatcaattaaactaagtccactaaaggacaaactaccaatggcaaaaatactattttgccctaacttaagccaaaaagtcataaagtaacataagggtattttgggaaattctaaattcctgactattctcgacattcccaatgtctaacaaaactgccccactaaacaaaaatactaagatgtgattctactgagccatacaccgcgttccaatgttgccgggcactgaacatgcaaaaatatgaaatttctatatatgacatataaaatgcattctgaattccaataaatcatcataaataattattttaatattaataaataatttccataattaaaccctaattatcggctaatttctaaatttaagctaagcggtcttta

SEQ ID NO: 277050 - DNA, 539 bp, Cannabis indica
cacatcaccaatgaatgcaaaaatctcaaagacgagatcgaaaacttaatccgactgggacacctctacgagtggatcaagaatcaatttcctcatcttaactcgggtcaggcgactggagctttgccacagggtacatcagggggtgcgacaggagacagcatatccccggtctgccgcccagacctaacgggagagtggccatgatctcgggaggaccccatatcggaggaactacccgtaaagagctgaagcggtatgcaggggccgtgaaacacgatgaggtttgggaagttacccaactcccagcttaaaggccctggctgatggatcaacccatcacattcacggaagaagacgctaagacggtgcgttttccccaccatgacccgttggtcatagagaccccaatcacaaataaagtggtggctagagtcctgatacaaccggaagtcccggaaattacttttcaaagaggcctttactgcaataggcctgacggaccgagacctctcaccaagtggctcccaactcacagg

SEQ ID NO: 277051 - DNA, 590 bp, Cannabis indica
gttgttttttcttatcaggaattcaatttcccgcttcaagttgttgcattcattagtgtcgtggccgtagtctccatagaatcaacaaaactttgtcatgtcttgcttgttgacatcaatcttcataggcctgggcctcttatatgggtctagtgactgagttgccatgtacacactttctatatcttcagtcaaaatagtgaatgcagtgtacttggcatgatcctcccggggagcttgttcagattttccagtgaactttcctttcttcccattcccttgcttgtggttgttgttggaacgtttaccacttgagcttgaataatttgggtaatggggaagttgggcggatgttcttgtagaaggagcctttgacttgccaggcttttcctcaccttccgctcgttgaatggcttcttcgagcttgatgaagccttcggctcggtcaataaaatcactcattgagtctatcggcccgttcttccttatatccttccaaagttcgccgaggacttcaatgccccccagtatcgcggataactttccatcttcagttacccttgaaactttggtcgcctccgtcatgaatc

SEQ ID NO: 277052 - DNA, 933 bp, Cannabis indica
cccaaaaaacataaaaacgaggaaatctagggtttctgaaaattgcccaaccggcagaccggttgtccaaccggaattccggttctggaaattttcaaaaccccatctggaattccggatgcacaaccggaattctggttcctcgcagactaaaatcaaaaattcataacttcatcaaatcaaatccaattcactccaaaccttccagacctgttctaaacatcccaaagagcatttctaaagcaacaaaaccgagcttcaaccacagaaactcatttcaccattaaaggttcaagattgagttctaaaactcaaacttgactaaacctccaaaacaaccactaaatcaaacctaactcaacatatttcaacatcatacaactccagaaaacacatttaaacaacagcaacaactacagcaacaaacttcatcatctttctttaaaaaactctagctttgaagtaaaaactaccaacttgaatcaaagcaaacaacatgcattgaactagctctaaaccactcaaaataacaagattaatcctctataaacaacaacaaaatcacagcagcaatcaacactacaattcaacatgcaacaatcatctttttaagcattttcaataaattacaaaagggaaaggtatagaaaccttaccaacacttggagaacactagattggatgaatttaactagaatcactaagaagaagccacaaatccttgctgcacaaggaggccgaaagagagagagagagactagagagaaaagccatttttttaattttttctaatttcttcctttgaaatgaaatgagggtaaaagcaaaataactcttttatttccgcccacataataatcaaataacattcaattccaattactaagtccactaaaggacaaactaatggtcattttgccccttcacactaaa

SEQ ID NO: 277053 - DNA, 667 bp, Cannabis indica
ttgtctgtatgatggcgtttggactgtcgagggtttcaactgggtatttgattcctcaaaaagtaagacattgatattggacattgactgtacactgaaaaagttgcgtgaagttttgcatgaggagttggaggtggaccccttggtgtatgaattgaagttagaagttctttacatgtacatgaaaggcactaagtttccacctgaggttttagtgaaagatagtcaactacgagtgttcttgagcatgaaggcaaaaatgagtgtggacaacttgttgccactatttgtgactaaagtgaagaagaatttggcgatttcactggtaacatgcctaatatactaactgtctactttttacgatttctaagcatgtatgtgcgacatttttagcgagctaagcaagttattatttcaactttgataatatttgcgatttgtatgcgatatatgtgcgacagttgagcgatttcacatttcacagtataatataatacaattgtaaaagtttatcatcattaagtctacacatttcacagtataatataatataatacaaggcataacattacataaaactaccatgtcaagttctagtaaaataagtctacacaccacctatgtctaaaggtgagcatgttatcatcattaactagctctaacgatc

SEQ ID NO: 277054 - DNA, 514 bp, Cannabis indica
gttgccgattcgatttattttagttgaaattcaaaaatgcctcgctaacgaacaattcgcaaaccggtttccaagtctcggtattcaagtagtcaggggggaatttgagaactgtgtcccaatcttctggttttttgtaatgttgtttgaaatgcttgtgtctgagcgtctttcgctcactataccgctccgccatcaccgaatataaagtccccataagtaggtctcgatggggattcccatcgatatcaaagtagtactatgtaataaaataatttaaaattatgttaatttataaatgaggacataaaattattacaacctttaataattaaaaatcactcactctaattcgattgagcacttgatccttgtattgttggggtacatcggaaaaatttagatgaccacccgggcacaacatgctcacttgttggccaagaaatcgaacataattgcttgcttcagtgccaacaactttgccggtttcaagatctacctccaccggtaaggg

SEQ ID NO: 277055 - DNA, 522 bp, Cannabis indica
ttcttctacaagagttataattccacatttagttcaatattatgatatatttaatgatccaagcattttttttttcttctttagagtcattgctcgtaatgacgttaaaacaaaaggttttactgatagaaatcgtgctctgtatagactgtattcatatttgactttagcataaatcaaactatctggtgcttatgataaattgttattgttagttttagatttactgtatatatgcagaaagctaactagtaaatatgaagaaaatttatgaagtgaaagcattcagaaattgacccaacattaaacctaactttaaaaaaccagagacaacttatatcagactatgagttagacatagaatgaaaatttgaacaaactcctactaatagtataaagaaaataagaaaaaagaaagaatacagaaagaacgtagcgattttgatccactgaactactaacagtagccatcatccgcatattactctcatcatgttcttgtttacaattattgtcttccac

SEQ ID NO: 277056 - DNA, 652 bp, Cannabis indica
aatataaatacattccaaaccatcacataaacttataaatttcaatgtattacttaaatattatacgtcttgcatttttagatgcaaaagtattaattaaatttacatgatcaagttttgcaactaaatcatgttcaatggataacatagctaaaccgcttaatctttcttgagacatggttgaacggagataagatttgatcaaggtcaatttggaaaaactccgttctgcatgggcaacagtgaccagaatagttagaaaaatcctataagaaatccaagcatttagataactaccatccacttcttttatatagctcaacacatcgatagctcttttggtagactttgacgcaacatatataactcttggtataggtcatcattgtcaaggtctgaaatctcaccatgcttcattaagtttgtaagattgatacaaaaattcttcaaagtgtcatcatctgcagactttaatttctcaaaatcaaacaatagtccaaaattctcctcaaaattctgaaattgttcgaacctagttgaacaataattatttttattagttattatggtaggaagtgaaatataattttaaataaagcactataaaagtatgcatacctggttttaaatgatgaaatagcttgatcaatta

SEQ ID NO: 277057 - DNA, 522 bp, Cannabis indica
aagttgaaccttagtagccaagcaaccagataaagcacgccacatgagttggtgcactttgggagggacatgaagcttccatgcaattttccatatcttaatctcagactcactagtattagtgatctctgaatggtgcagcaaccgatatgcctccctcacagtatagaaaccataaagatccttatgccaataccaagtatccataggagtatcctgatcaatattagttcgaatgatgatctctttatctcggtcattgaatatatctgaaaccacctctaaatcccaagcccgttctcctaccaccatgagattattaaccgtccacgtctccataccagtagctctagaagtaacccacggttgagactcatccgcaagccacgggtcaaattgaacactaacattcgtacctggaccaaccccccgacgaactcccatcttaatcaaagcttgcgtttcaaaaatactcttccatatgaaactaggattcggcccaagagaagcactcaaaaaaga

SEQ ID NO: 277058 - DNA, 571 bp, Cannabis indica
aagtggtgggcactaacggcatccagaaacgggccaacaaagtcattcatcattcgaaagtacgacagaaaggtgatacacacttgtgatctaaacataagatttgccgacaaaagacaagctacaacgaaattgattggaaactacatcaagccacggtttaccaacataaaaacaactcaaacgccacaagacatcagaggagaaatgaaacacaagtatggggtgagaatgaactacatgaaagcatggagaagcaaagagcacgcgcaagaagaattacgaggaaaagccaacgaatcatacaagctgctgcccagttttttgcacatgttgcaaaaaactaatcccggaacaatagtgcacatgcaaacagaggatgacaacagcttcaagtacttgtttgtcgcactggatgcttcaataaaaggatggaagaagtgcaaacctataatagttgttgacggaactttccttaaatcaacatatggaggtacattgctctctgcttgtacacaagatggaaatgggcacatttttccactagctttttctgttgtggattcagaaa

SEQ ID NO: 277059 - DNA, 385 bp, Cannabis indica
tccctaatggaggaacgttcattagcaatttaacgccgtagaatctcgaaagataagtattatttgtaagtgttttatttttagtatggatcaccctaatggtggcgactattagtaagacttacaaaagtatgaaacaatggtagaagctcataagatagaatagccttgactctcgcctaaacgggacaacgctggattctcatcttgatcgaataaaaggttgctagaatgtttatcattttagatgagctgacaactctattcaatggatggtatctttgactctcgcctaaacgggacactgatatcagtttgttaaagaccatggaaatcatttaggattctaggtttcagtattttcgcttgtcattcctacttgcta

SEQ ID NO: 277060 - DNA, 761 bp, Cannabis indica
ggccagtacacttgaatctggaaagaaggtaagaactgtgtataatgtgtaatatgaatatctgagtgtatgtatatgttaagtgtatatgcatgcttatatgtcagttgcactaccaacacttgtacagttatggtactgagtgcattggtatagtgtgtattgttaaagagtacattacagtgataccaacacaagtacagaaaagtacagggtgtctgtggtatatcactcaatggtactcggggtacgaaacaaaccctaccaacactcgtacagtgaggtacgtagtgtatgtggtataatggttgtaccctagtatagaacattcttactcatctgttaagccttgtaaataggtgtatgggcgcctagatacaagttggtattatatgttatgttatatgcttttcttaccaaaactgtcgactcacagttctacttccatgtgtaggaaaggaaaggcgaaagctgaacaggagtgagcctggctgagatgaggttgtacatgtcgtggcagcacgacctagagtgttcggtgtcgggacatctagggatactattttgtagtcgttgtgcgaccggttatgtattttggtatattttgtataaaagtttaaaaacgggatcccggtacttgtaattagttttgtaaatcataaagtttggtatttaatataaaagttttaatttgacacgttttttgagagaattctttgattagcaaagatagcactgtagcgtgccttagcattagggcg

SEQ ID NO: 277061 - DNA, 723 bp, Cannabis indica
cgaaggcgtgcctcagtaaccctagacagagggcttacccaccaagcgcccaaggcaccttgccttctgtgaggaaccacagtagtaagctcctcactgacgtagtccacaccctcagcaaggacgtctccgtcagcgtcgactgtctccctagcctcattgtactccccgtagtttaggggttcaacctctggttcttcctccgcctcggaggaactgctaggacgtacgtcgtcctgctcctcaatctattggacctcaacgtccccttcatgatccctctcctcctggatggctggatcctgttcggcactgggcaaagtggcgtgccgagctacttgaggatcagatgcgtcggccaaacgagttgttttcttggtacgagccatcattctatggctggatataagattttggggagaatgtccttcactggaagaaggtgggctatagcaaagacgaggatggtcctcgtgcaaaagttgaagcaagtcctggttgattcgatgtcctctctaccaaaaatcacctgggttcatctacaaaagacaacacacaagatgagtgcttggtcaaaatatcgaaccataaacaagaaaatatgtcgaacaggaatactcaacagattaaaggacaagaatgttcgaagaaaagtcaaaactcaagaagtttgaaattttcccgagttagggcaaaaaaattcatgaagctaagaataagcaa

SEQ ID NO: 277062 - DNA, 597 bp, Cannabis indica
atcaaacatcaatatgacacacagagcaacatgataccatccaaatcacaaacaaatcgttttaagtccaaatttcttgcaagcaaatcattttaccatggctctggtgccagttgttggaattaatttaccaggatcttagatctactcaaaagtatgttgatttaacaacctaaatatgaacttctaatacgatagaaaattaaacacataaaagtaagagaaatcttacattgggtgcagcggaatatatgtctcctctcactcagatctctaacccttgattcctttatgtcgcagagtataatcaagatttgagcacgaatgtccttctttgttgactctgaattctacacagccttcctcactatgattgaggtattacttgatgtatgtgggcactactctatcacttagaggatttcgaaaaacagagaaggtagagagagagagagagtggcggcttcaagataattttgagtgaaagaaaataatatcaaagtttgtctaaaaaactgaagcctttaccttctatttatagaagaccacatagggttatggttgaattacttgacattaaaaaatgaaatataaatg

SEQ ID NO: 277063 - DNA, 593 bp, Cannabis indica
ttcttgaaaaaaatgatgaaaatggatgaaaatgcatgtagttttggatgttgttggctgctgtgttttgtgattattttgtgtgattcaagcatgttaaattgataggaattaagctatgttgaagcatgtaggttagattgttaagcttttagtttttatgtgaaaaagtatgaattttggaaggaaaatgttgtgattattttctgtgttgttgctgttgttcttgttagtttgcagaggtgatattatgcttagttatgttgaattaagttggtttgcatgcttgtttaggtggtttgctcaagcttgagtttggaactcaaagcttgagctccaatggcaaattttgtatttgtggtttctgggtaggtttgttgccttggatttgttctttagggtatttagaacaggtctggaaagtttgggaccaattggggtcgaattggtcaagttatgagattttatggttgctgcctgcgaggaaccggaattccggttgagcatccggaattccggatgggggttcagaatttcccagaaccggaattccggttgggcaaccggtctgccggttggggatttttcagaac

SEQ ID NO: 277064 - DNA, 678 bp, Cannabis indica
ctcaaatccatcagaattcttctctccattgcagccactttcgattatgaaatttggcaaatggatgttaagttagctttccttaacgaaattcttgaagaaaccatctatatggtgcaaccagaaggctatgttcttccaggacaggaagggaaagtttgcaaactcaatagctccatttatggacttaagcaagcttctcactcttggaataaaaggtttgatgaaataattaagtcctacggctttcaccaaaatgaagattaaccttgtgtttaccaactcaaggataatcaagtggtagtattcctggccctttatgttgatgacattttgattattggtaataatattaagaaaataactgcatctaggaatggcttgacactcaattcaaaatgaaagatttgggtgaagctgcttatgttcttggtatttagattatcagaaaccggaagaacagatcccttgctctctctcaagcaacttacattgataaggtgttcaagagattctcaatgacaaataccaaagggcacagatgccttctagatttggtatctatctatctaaggaatagtgtcccactaatcctcaaaagatagaggacatgagaagggttccttatgcttcagcagttgggagtctaatgtatgcaatgttatgcactagacctga

SEQ ID NO: 277065 - DNA, 513 bp, Cannabis indica
gcgcccttcagtgtttttattattttgtctttttcctccggatccaggctcttccctatccggagtactttagtggagtcgtcgtcgcacactggtatttcttcgacgtcctccattggttccacgaccctttcggaccctatgcgaggatccaactcatcctcttcagccttctctatttcaggggactcccggaccatgagtacaggtaggtgggtggcaacattgtaacattgcctggcctctccctgatttcccctcacagttccgactccggcttcctgggtagggaattttaggcacaagtgtcggattgaagtaattgcaccaaagtccactagggccggccggccaaggatcgcgttgtaggctgttggacagtctaccaccacgaaggtgcaatatttaaatgtgctctggggggtatccgggcacagggtaaccgggagccttacttttcccatcgggattagcgtcgtcccgttaaaccccgtgagctgtgacccactaggc

SEQ ID NO: 277066 - DNA, 682 bp, Cannabis indica
ccttttttttcttttttagtgtgttggcgcactcagcctgaatgtgaccatatccatcacattctctgcacttaattcctcggcccttttgatcagtagaggcttgtcctggtttgaaatttactcctttgtttctcttgagaagattttctttgtcagctggtgaattttttctgtagttctttttcaagaattttgcatagtttctcgttaacaaggcaaccgtttcatctgtaatgccattcaaatcttccagaacaggtttcttgttttcttggtgaataagtgcaatgctggcatctgacttttctttcaccacctccttttgtttcttggttttcttccacctggacagtgatagctcatagttttgcaaagacccgatgagttcgtcaagatcgagttcctcaatgtttctcatttcttcgattgaggtaactttggacatgaatcttctggggaggacaccaagcacctttcgaaccagtttcgagttagagtaagttttccccagagcatacgattcattagagatgtcacacagttttgcatggaattcagccacagactcatcctcctccatggtaagattttcgaaagcctttgccaaggcacgcagccttgatttcttgacagcatcagttccctcgttcttaattttcagcttctcccatgcttcctt

SEQ ID NO: 277067 - DNA, 553 bp, Cannabis indica
attgggcacctgctttgtatataaaggggtgatccaccgtgaaaatggacctacaaatcccttgctacagtggactaagcagaacgaaatctgactgaaccactataattcaccgtctcatttatttttccagctttgttgtttactctcgcattcctaattcgagtactcgccattctaggtcgaatactcgcatttgtcatctctcaaataattctctctttttccagttaaattgtactttttggtgttgcgaaatatcagtaacaacaaattccttaacttataaattcctgatccttgcaccactatagatttggaattgcactctcaattatatagaacgctctatatgctccacgatataaatacgctatgagttatccatttgttataatcctaataatcaatgatactctatagataatttacattgagtagggataaaattaccgttacacccttgaatgaattttatccttaaaatacttagctacctataaataatattttagtgaactaatataatcactaaaatgagcactctatcatt

SEQ ID NO: 277068 - DNA, 141 bp, Cannabis indica
tattagagtaaaaatataattattatttataaaattgttatactaaatatttagaaaatacagtaaataattgatttttttacgaaaatataaatattatttttaatgtttctccaaacgtaaattatttatgtaattttt

SEQ ID NO: 277069 - DNA, 713 bp, Cannabis indica
ctggtggagcgggatgaagaagtatgtggtagaattcatattgcgatgcctaacctgtcagcagatcaaggatgaacattagagaccgacgagtttattacaaccgttggcacttcctgagtggaagtgggaggatatcaccatggattttgtggttggattacctaaaaccacaggtttatttgattcaatttgggttgtggtagatcgattcatgaaatttgcacattttctaccagttaaaacaacctttacagtagatcagtatgctgatttgtccatcaaggaaatagtaagattacatggtgtaccaaagtctatagtttcagatagagatccgaagtttacttctaaattttggcagagtttatagcgggatatgggtaccaagctgaaattcagtatagctttccatccttagattgatggacagtccgaaaggacaattcagatactcgaagatatgttacgagcctgtgttatggatttcgaggactcctagagtaagtacttaccgttgataaaattcttgtataataacagttctcagagtacgatagggatggctccctatgaattgttatatggcagaaagtgtagatctcccattcactaggatgaaacaggggagaagaaatatctgggtccagaatcagtacaatggactaatgaagcaatagagaagattaaagccagaatgcttgcctctcaga

SEQ ID NO: 277070 - DNA, 505 bp, Cannabis indica
aaacccaacaggagcgtggagtgagatagaaagaaagggtgagatagagagagggagcggggagcgagatagaaagagagggagagatagagagtgggagcgaggagtggggagcgagatagagggaaggggagagagagagttgagtgggagctagatagaagaaagcgaggagagataaaatgagagagcaaaaaatggggagagatggaaagaaggggagagatagatgttaatttcatttttggcatatttaattgataaaaatattttattattatttgtattttcggctggtatgtattaatatggtttccttatttgtgtgtatctaaacttggaaggaaagttgtctagctttcctatttatggaaattgaggtcaatatggtaagttttgattacacatttattcttttctaaccagctgttaatctgatcttgtgttgagtttcccttttcttagatcaggtttcttgaagagaaaccggagctaaacttccttt

SEQ ID NO: 277071 - DNA, 816 bp, Cannabis indica
caatggataattaatagcgtgtatatatggtggaacatatagagcgttctatatagccgagagtgcaattctaagttctatgcgtgcattcaacgaagaattaataagtcagtgaatttaagaggtaaattcttgatctgcttattgaaagctcggatatataggcccatggtcccacactatttgagacaatactacctgtaagactcatttaattggttttgattaatcaattataattctcaaattagactatgtctatttgtgaatttatcactaagtaagggagaaactgtaaagaaagagtttctatggtatatttattaattaagagactttggttagtctaattaataaatataactaatgacaattttatttaataattaattatatttattaaatagttaaaattgacatttaaattgttgaatttgaaaattggcgtttttgagaaatgggatgcataaatgataaaattgcaaaattgcaaaagtgaggcccatatccagaagccatatccgggcacttgtatagggtttatcatttaatattttcattattttaatgccatataattcaaacctaaccttgtgtggcttactataaatagttagtgatggcttaggaaataatgacatgcatcttattcctttaagagaaaacctgagccatctttctaaacctagccgccacctctctttccttcttcttctttggttgtttcggaaccccttagtgatagagtagtgcccacacacagccagtggtacctcaatcatagtgtggaagatcgtgaagaatccagattcaaca

SEQ ID NO: 277072 - DNA, 808 bp, Cannabis indica
aaggctgtactaaactttaacttgatacccatatccttctgaagactcacccaaaacttcgatataactttggatccctatctgacacaatagacttaggggctccatggagacgaacgatctccttttcatacaactcagcatactgattcactgaatatgtagctttcactggtagaaagtgagctgattttgtgaatccgtccactatgtcccatactgaatcatacattctcgtagttctaggtaatccagttaccaaatccattgcaatgtcctcccacttccactcaggaaggactaaagattgcagtaaccttgccgacctctagtgttcagctttaatttgctggcaggttaaacacttggacacataatccaccacttttcttttcatcccataccaccaaaaatagggttttaaatcctgatacattttggtagttcctggatgtaatgaataaggtgtggtataaacttcatcaagtacctccttcttgacctcttcaacattaaaagcacaaactcaaactttaaataacaatattccatagttcgaaactaaaagtctttaggccaaccggccattacatcgcctcgaacctcaactaattcaggatattccaattacgcttttctgattctttctaatcgatcagattgaagtgtttaaactgtgtaattttccaactacgaattcaatctctgcgttaaccatttcaaaggctagttaaggggctaacagaacagtagtacaaacttgcccgaaacccttttctactcaaagcatcagtcacaacattggcct

SEQ ID NO: 277073 - DNA, 773 bp, Cannabis indica
gttaatcatgtttaattatgaaaaattatttatagctatttaaataattattatactgttattttttgaattctgagatgcattttatgtcatttagtagttttcataattttgcattttcggtgaccggtattttggaactcggtgtttggctcagtaaaatcacaacttagtatgttagtagtttgggacggtttaatagacattgggaatgtcgagaatggccgggaatttagacctgttagtgtgaaggggcaaattggtcattttgccccattgttagtttgtcttttgtgacttaataaagtggaaaatatatgttatttaattattctttttggctgaagtaaaagaggctatgtggcatttcaatttcattttcttacaaacttagaaaattacaaaatttctcaaaaagctctctctcttttcctctctctttttcggccacttgaggcagcaagaaaagtggattttcctcttcaatttcaagtgattttcagcaagttaaagtgtttctagttgaggtatttcttgtctagttttcttcctttgttttcttgaaattttgatgaaaaagatgagtaatgcatggatgattttgatgatgttgctgctgttaattgttgttgttgtttccatgtttaaaatgttgatttaagtatgtttaattaggttgaattgcatgctagttattcttgctctagttggatagatttcttgttaaaaagcttgagttttcaaagagaaattgtgtgaattgttgctgtagt

SEQ ID NO: 277074 - DNA, 494 bp, Cannabis indica
aagcgctgccctggtccgggaggaagagaaaactcagcatcccgtgtactatgtcagtaagcgcatgataggggccgagacaaggtacccggtcattgaaaaattagtattttgcctcctgatggcgtcaaggaagttaaggccatacttccaagcccatccgatcaagatcctaaccaatcatccgctccggcaagttctccagaagcctgaagcgtccggaagactcctcaagtgggcgatggagctaagtcaattcgacttacactacgtcccccggatttccataaaaggccaagccttggcagacttcattaccgaatgcaacgaagccgaggcaacagcaaatacgccggtaccaccaatccccacctggagggtatttgtagacggagcttctaatgagaacggttcaggagccggagtggctatgatatcaccaactggactgcggctccaggcggccctccgatttgacttcacagcttcaaaca

SEQ ID NO: 277075 - DNA, 877 bp, Cannabis indica
gtatactgtgagcggctacgggcggacaaacgatctagaacgccggtggtgccttagttttattttaagcagttgataaatctaacacagtggaaatgcattatttaaaattatttacttactgtatcttgttttacaaatgaaggatccttctctgttgcattttgattttttttaaaatccactgttgtatttaaattattttttttatcttttcaaattatgcatgaaaatagtatttttgtaaaataaggcaaaatatcggggcgttacaattaatttcttttaacctttactataatatgattattttactttcacactttttcttatatttttttaactattttttctctatcttagaaaaaattaagagcacttctcttatatatttctctattacataattaataaaaatattattttttggtatgttttgtagtatatttggagttaatttatgaattatttgtatattttatcaaggttgatgttttgttattttttaattgatttatagttgtctttatattattttattagttgttttatttattattttactattgttttatattagttatttttttttggttattatttatgtatattttgttacagttgtttgtttagttttatatgtcattttttatggtgtatattttttagttatttaccactaaaaatatttttattgtatatatgtatttattttatttattttttaaagtggttttttgagtaatatttattttatttcaaactagttacttttttagtttatttttttatttctatgttgtattttttttttaatttagtgttattattttttagttttgtttctttgtatatttttttagtttttattatgttg

SEQ ID NO: 277076 - DNA, 574 bp, Cannabis indica
atatagaacactctatatattccaagatataaatacgttattaattatccattgttataatccaaataatcaaagattctccatagatgatttacattgagtagggataaatttaccgttctacccttcaatatattttatccttaaaatacttagattcctataaatgatatttcagtaaactaatataattactgaaccaagagctcttccattaatctctattaagtcaagctcgaatgaaatcatcatttcacttctatgtcaagatagaagctatagattttgtaactatgattagcgctcccactcaattgtactaccatattctcgagatataagtattgggtcaatctaattggtcagctttaacgaacaactctaagaacacaagtaggaaagttgagatcaaacctaaccatctcaggattaaaatctattaatctaagatcaactaagtgatattgacttaaaatgatataacagtaagtttatgatatcttatctaagttcaatatcggtccagtccgatgtattctctacacatctgatactagcatattttactaatgcc

SEQ ID NO: 277077 - DNA, 819 bp, Cannabis indica
agaaacattatgctgattaaaaacacaatctgacgaaaaacaagactctctagcaagacaatgagcagccctatttgcagatcgtttaacaaactttaaagaaacattatttaaagacgagagtaagacccgacaatcatcaacaagtaatccaaactgagaaggcattaaaattgaactatgaatagcttgaaccaccaccaaagcatcagtttcaatgactacattgggccattgctttctttcgatccaacttaacgcctccttaatcccaatggtctcagcaatctcaggcttaacaaccccaagtcgagactcagaaattgcttcaaggagagaaccattcgaatcacgagctacgcaaccataaccaaacttgttttgttcttgaaaaatagccccatcaacattaatcttgaccatattagcaattggtttcttccaccgctcatcgacattattaatatcatgaattaacaatgcccccgtcttttgagattgagcagtacaatattggtcaagcactattctagccgatcggaccacatcaatagcagaacaacttttattattccataaaagatcattgcggacagcccaaattttccaactaacacacgcagcttccttgacaactgctgcggactggtgcaaaacaaggtcggacagccagttattgaagccgtggctgaccacaccagcagggacaatcgaaacagtccagcagctgctcgcgaacctgcattccagcaagacatggctgatagtctccactgcattattgcagaaagggcagtacagatcaacattgattttctt

SEQ ID NO: 277078 - DNA, 595 bp, Cannabis indica
gttcatctaattcaatctgcattattttgctcatagtgcatccgatccgcactaagtgtggatttcatattttggatccaatataatccgcacaatagctcaaatctaatccaatctaatccgtaaaagtgcagattagattacttttcaatattaaattatttaatatttatagaaaaaatatattttgtcatataactatattgttattttatgtctctaacatcaaattaaaataaataaaataacaaattcaaaggaagaaaaaaaattgtatgtataaaaaatgtttaattttattttaaattttatgtaagaaaaaaaattatatataagaatggaatatatatttaaatctagggaaattatagtaaatgaccccaaattataggactatgttagtaaatgtcttcatttcaaaacttgaagcaaaatgacacttttagattatttattatttatattgtcttttgccacaataaaaaaatcaataatttttttatatttattttgaattataagcaaattagttaaagattacggtatatctataagttttgttaaaatcttttttatttgaaagttatgtcaattt

SEQ ID NO: 277079 - DNA, 780 bp, Cannabis indica
gaaaaacaaaaattaggccttgttcgatagtatgtaattgcttaatatataaaaatatttacgaaaatccacttctttggctttttgtaagaagttgcagagaacaaaatgattgaaaaacaaaggaggggaggagagagttctagcaacggaggtgggacagttagaagaagagagtaaatactaaaaagaaacgtgggtttcacagtaggtttattttttttaattattattttatttttcaaaagagagacccgccctaaatcttgtgaccactctcccacttttttgtttggcaggttcacttgaaaaagatttctgccctttatggggccaccaacctcacatatagccaacaaattaaaaaaaagaaagaaaaatagaaaaagttaaaatgaaagttgggtatatctttaatcctctttgcaaaacaccaaggacttgtttgttacgccgtataagggtcgtattgtattaaataataaataacactatgtttagataaaacaatgtattgtattaaatattacaaccaaacttttttaatacaatgtatgatgtattctttaatatattatgggatcgtttggtttgccgaattgtattgtattgtaatatattgggttgtattgtattggattgtataattttaatacaatactatgtttggcattgaattgtattaggtacattgggttaaattatataatgtttggcttacattgtattgtattaattaaaaaatttgtgaaaattcaaaaaaaaaaaaaaaaaactaag

SEQ ID NO: 277080 - DNA, 675 bp, Cannabis indica
attcaataaaaaaaaaataaaaaaaatccactaatcaattaacaatcaatacatactaagccatgagtcgaacgagtcttcgcagccaatgtacagatcaaaccagtcttcaggatctttaaaccttggtcgctctgataccaagttgtaacgccctgaccctcagggacgccacgtgtgtgccttttaaaagaaaaaaacttattatcattaatctataaattttagaaaagtgtggtttaatttaaatcttgatatatattcaaaataaaaactttcattttaaatactgccgtaatataggggtcccctgtttataaaataaaaatattcttttacaatagattacatttccaaacatagaaaggaatttgatccttcttcccagaagccaagaccccacagctgatatgtacattgctgggagacctctgactcatggccgaacacaacctccttacctgcaccacgaagcacccgtcagtcacaatgcctcagcaagaaaagctactaattagacattatggaaagtgcaagcagatttcataataatattatatacatactggtaggtcttacatatgtcaatctacatatacagaaataacataacgtttatgtaagcacacttaatacataatgaagaatatttatagctattcataatcaaccatc

SEQ ID NO: 277081 - DNA, 783 bp, Cannabis indica
atcgatcagctcgtcgatgcaacagccgggcacgaaatattaagcttcatggatgcttattcgggctacaatcaaatcaaaatgcatccgccagaccaagaacatacaagtttccggacagatatgggtctctactgctacaaagtcatgccgtttggtcttaaaaatgccggagctacataccaaagattggtcaacaagatgtttaaagaccagatcggcagaaatatggaagtgtacgtggatgatatgctcgtcaaatccagaaaggctggggggcacatagacgacctggatgaatgttttaaagtcctcaggaaatacaacatgaaactaaatcccttaaaatgctcctttggagtcagctcgagaaagtttctaggcttcatcgtcaatgctcgaggaattgaagccaatccagagaaaatccaagccctcctggatatgaactcgccaacaaaaaccaaagaggtgcaaagcctaactggtcgaatcgccgcacttagcagattcgtgtcaaaatcaacggataaatgtgttccattcttcaacatcctgtgaggaaacaaaaagttcgagtggacagaagaatgtgaaagagcttttcaagatctaaaagcacagctcgcaaaacctcccgtcctttctaaacctctggacggtgaggaactagggatatacctagcagtaacggagcatgccgtgagtgccgtactgatcagagaagaagacagcgtgcaacatccagtctattacatcagtaaaagactcgtcgaggccgaa

SEQ ID NO: 277082 - DNA, 753 bp, Cannabis indica
agaatccaaccaacaagaaggagaatcagcatcaaggatggaaagaaagagatcaaggtttagatcttgattttgttcagctacagaaaggaatcaagggctagagatctgaacggaaggagtcgttatattccgctgctcccaatgtaaggttttcttgaacccttatgtgtttatttcattattttagaattcatattcggatgttaatgaaacatacatggttgtaaatctatatcctagtaaaatatttccaacaatattgatgtgacagcttttaagtcatacagagctggtcggccaagcattacgttaaaggctggaggaacatcaaatattaggaactgtgccatgatagttatgctcgtcagagcttgtccaacagtgaaggctagccggatttgtcctagaggtgcaactccttgaccggagaaaccatagacaggctggaggcatgaagttagatccttgagttggagccccatcttttcttaagcactcttgaacaaaatgtttgaagaagctccattatcgatcatggttcaagccaccattttatttgctatttggacttccacgactagcgggtcgttgtgcagaaatctaatcttgacagcatcttcatcgttgaaagttattgttggctctcctgctcgtggaactttgtgcttcctttcttccacggccaggatgacttctttttcctcgtgctaagctgtccgggcatcctctctcgagctttgcctgaatctc

SEQ ID NO: 277083 - DNA, 626 bp, Cannabis indica
ataaaattaagaattcatgtttgggttttgaaataacccttaactaaaagaaaactactcagaactagacattaatgaaaatcataatatttaatttgtagtttttttgaattttctcctccatttgtagtctaagaggtcttatttatagtaataggaaagttagttgaatcctattagaattaggattctatttatagtggatagataaatcctcttagaattaggattctatttataatagtattaggaaatatctcggataaagataactcatcttttaaacaaaagataaaaaatcgcaactcttcttgaaaatttatctttattttcgctatctttttttagaaatttcctgctgcgacgactgatagtattttggccataactctctcaatattactcggaattggacgattcaagatgttctggaaagctaagaacgagatctaaaactttcatgttgagctccaagtccaattctgcctttaagttcgtccgaatttgcaattaagttccgccttgtacaatcgagctcgccgacttccattattttccaccaaaatatgttaaaatccctccaaaagactctaaatggatgaatagtatttaaaataacctaacaa

SEQ ID NO: 277084 - DNA, 865 bp, Cannabis indica
aataaatttgattatatttctcgcaatttatcttaatttttcgattttcaaatgatgtatttgatctcatgagatagtgttttgcctccgtccttgcaacatattatcttgtctaccaaacatgccctaagtttagacacatagccattgcatggcaagaaaaacttttttttcttctttttttaaaaaaaaaaaaaaaataatgaggcaagaaaacttcatttcactaaaagtgggccaagattaatgggccatggcccatgaaagggatggaccaatccaaccgaccgactagattgggttgacttggacatttcttttgtttcgtaaagaaaggctcttcttaccccatttgggctttctttgccccatcaaagggcccatattcttagtgggttgtgggttttgtgtgggacatcaagcccaaaagacaaaataatttttgatgggatttgctagtgtttgaggtccactcaactaataataatggtaaattgaaaaagtgaaagtgtgagaaaatatcatcattttaagtcatggtacttttaggaaatttagataagaaacttctttatttattattaaaaaagtgttactgtgaacctcttaattaatttttgtgtctagaaacacatatcgaaatatttttcttcatagcggtgttcgttatactcacaatatcattcttgtaaattttttaaaatttcgaatagtttacagtgctaaaaataggtttaaagtttttgaacacacgttgtaaactaaaatatcatgaactctatttcggtattgtaaactatttgaatttttttttaaaattcacaaagacgatattgtaactataaaaaatatcactatgaaaaaa

SEQ ID NO: 277085 - DNA, 556 bp, Cannabis indica
ccacatttgtagcatgctttttgcgcgacactcgccgagatgacgtttggtacatttagggcattctggaatgtttcgcccactgctgccattaaatcgttggtcgttatcacttttgtacctcttgtcttgacttggctgcccggactggtcctgtccccgtttcttgtggtcattagaattggctccacctttcttagattctctcctggcagcattttccttccaaattttgttttcactccgctcagccgtaagagccatttcgacaacttgagcataactgaattgaccccttgacacaatttccacatctcgagcaaccattggtttcaggccttccacaaatcgatgtgctcgcactctatcagtaggtaccagatctggagcaaatttcgccaatctatcaaatttttgtgcatactcagtcacagtaagactcccttggactaacccagtaaattcatcgacctttgctgctagaactgctgagttataatacttctcattaaagacccttttgaaatcgtcccagttcatggtatctacatccttt

SEQ ID NO: 277086 - DNA, 490 bp, Cannabis indica
ctaccgatagggaaaaattgggaacgctagttcttcccatttttgtgttgtttagggtattgtcatgctctttatcgatagggaaacttttagtttctagtttaagtcgccgggaagtgatttagcgtgtcacttatcagtgttgtgattattatggtttaggagcctgtaattcgccgagcagttcgttccactcaggttgaccggcacacctgaattcgaaatctaggtaagattagtataacagtatgcatatgcatttacatgtttagcgtgcatggttggcttcgtaccatccgacagtatcacatcggtacgactagagtatgactagcgtaccgagtataggctaatattatggtcgatggtactgtactgtttgactgtatcacatcggtaaggctagagtatgactagcagctagagtatgactagtgtaccgagataggctgatactgtaacacatcggtaaggctagagtattactagc

SEQ ID NO: 277087 - DNA, 394 bp, Cannabis indica
tcctacttgctaagtgctaataatttctgaatatgtttttgtgttaaacattatttgatttctatttattgttatttgtagtatccaacatgacaatgaccaaccccatggtgtcactgttgactgataataagctcaatggatctaactttaccaaatggagagagaacattaacattactctcatggtgaaaatgccctatttgtattgactgaagaggctcctgagcagccgggtgagaatgcaaccaaggcagtaaaagaaaagttcgagcgttggcagaatgccaacaacaaagctcgatactttatgctatctagcatggttgacaccttaaaaacaaggtttgcaaacactctcacggctgcagatatcatgaacaagttgactgaa

SEQ ID NO: 277088 - DNA, 593 bp, Cannabis indica
gggtgttaattgaggtgatttaggtgaagtttggttgctaaattcgtgatgttcttgctggtttcctgggttttcaacccaggtgccgcgacatgggttgagcatgctgcggcccaccccttgttggtggaacctgggatttgtcccaggtgccgcggcatggcttgggcatgccacggcccgccctcgattttgagggcagtttgagtgcaaactttaaaaattcataacttttgattccgaactccaatttgggagttctttatatcgttggaaatctcgtttcgagctctatgtaattatctgaattttaaatgccatgattaaattttatgagtatggaatcaggggttaaccctatttgtgaaatcctagattgtataactaggattactggcacctgatcaggagcacccgggaattcggaatctctgctattgtgggacaacatgtaagacaatggttagcacgtagagtatgcgtagtgccgcttatattgaaagtgatatgtataattatttagtaaccgggattagggttattaccctaatacaaacggtttagtagccgagggttattaccctagtgatata

SEQ ID NO: 277089 - DNA, 519 bp, Cannabis indica
tggcttttgtttcaatgaaaaacgatctttgaatcaaacgttatgaagaaaacaagtttgaggcacagggtatgcaatgtatgcattgcatacccctgcgcgcgcggatgcatgattttggcctaggaaagaggctgcaagcagcctcatttgaccaagggacgtgggcgcgagctgcccttcagacaggggtgctgtccgagcgtccgcgcgcgcgtgcgtgcattcaaatcctgatattttcgtccaacttcaaaaaatataactaattcataaaaaatccaaattaggttctgtaaaagcctaaatttattaattttttgtctactttccagaaaaaatacttccagatcgaaaaaaaaaatatttcagtaacatatattgcgatttctaaactatcatcaaataagcacataaaccacatgaaaccatccaaatcaacacaaatcatcattttaattcatatttcatgaaagtaaatttaccatggctctgaggccagttgttggatatatttta

SEQ ID NO: 277090 - DNA, 527 bp, Cannabis indica
atcaatcaaaagtaagcaattgcacaataaacactcttgaatgaacaaaaccaatttactaaacatagcaataaaatatcaaatcataatttaagtcaagaaaataattctagcaaaataaaaattaactcataatagattgtgcaaaaattacaaaatttaaaagaaaagaaagatagaaataaaaacccatttagagcttgtcacaagactctaagtttcttctccaaattgctcttcttcttcctcttgatttttgccaatctcaaaattaaaaatgctaaattaaaaccctaaataaaactctctctctctcttcttctttttcttcctttttcttcttttcttcactgtcagccgcctcctgcttcttaattctttttagcttcctccttcctttcacatatatacatatctatatcaaatgccaataaacccttgcaaaagaaaaataatgatcagcccattattttcatttgtctatcctttttttttttttttgacttttcaactagtaaagtaaggcc

SEQ ID NO: 277091 - DNA, 1305 bp, Cannabis indica
atgactcggcgggagttgttcgagagacaagtgtgcacgaggcacacggtcgcgcgaaaaatgagcccattgttactcggatggttggaaggctgaccttggcttagagaagtcaaggtgccgcacgggtgttccgctgcctgaaaaggtgagcccgtgacagttggtatcagagccaagttcatctcagtgggaggtgaacctggttggcctatcctagagaggatgtaggcgtgtggacggatcgagatggtccgaatgttggaacaagacgtcgttgagccagttagccttttaaagaggatcagtaggctgagatggagttaagacttggttgcttctcttcatgggaatactggacatcctaaagaggagacatggatggttgcttcgagtcaagttcagggatgctagaaagacaactaccacgtgaaactgtagagaggcgcaacagaatgtttgaaactcgttggcataggacaaggttgaggggatagtccatgttgtatgcttggtacactaggccaagtttgcctgagtgacattgtaagccgcaggaggcgcttttgttgaaaaggaagcttgctggcaggagtgtggaagtagtgcagggaccgtcagattcttgttagtcacgacagaggtcgagagttgataaccgagatggttcagatggggacagacatggaatgcttcagttgctacattgtgtgtcgagagggacgcacatggagaccaaggcaggcagaggccgcaatcgtcagaggatggttgtacttggaggtgttcgcatgcgagttttatttgatccatatggaagcgccgaggcagttgagtggaatgtgttggcttgttaaatcgccagagggcgtaagtcacacaaagacatcgatagagatgcggagttgtggaataaaggcatcaaggaagccagcagggctgagaagaccgagcgcaagcattgagatggcgctagagtttgtgtggaggccagagggccgtgccagtgagacttagtagtcatgttggcctgcgaaggtcgagaagggtgctagagtttgcatgaaggccagagggctgcgtcattggaacttagtacaccgtgggagccagaagggcgtgatgcaagtgtgaatcagttggatggttgagtgggaagttagtgcatgcatgtggaaatcgacaggggtgctaatgagatagttgactcgagagtcacatcctgcgggatgcacttttagatgacatggtgtgcatgaagagttgggcagtcaggcatttgcgtgtgggcatgttgtcgaggac

SEQ ID NO: 277092 - DNA, 608 bp, Cannabis indica
aattaaatttgcataatcaagttttgcaactaaatcatgttcaatggataacatagctaaaccgcttaatctttcttgagacatggttgaacggagataagatttgatcaaggtcaattcggaaaaactctgttctgcatgggcaatggtgaccggaatagttagaaaaattctataagcaatccaagcatttggataaccaccatccacttcttttatataactcaacatatcgatagctcttttggtagactttgacgcaacatatataactcttggtataggtctgaaatctcaccatgcttcattaagtttgtaagattgatacaaaaattctccgaagtgtcatcatctgcagactttaatttctcaaaatcaaataatagtccaaaattctcctcaaaattctgaaattgtttgaacctagttgaacaataattatttttattagttattatggtaggcagtgaaatataattttaaataaagcactattaaattatgcatacttggtttcaaatgatgaaatagcttgatcgattatgcaaagaaaatagtcaattttaaatgactctgctgctgattgtgtcaccccctcattgacactt

SEQ ID NO: 277093 - DNA, 610 bp, Cannabis indica
ttgtgaaaaagaaagatggttccctcagaatgtgtattgattatcgggaactaaacaagctgacgattaagaacaagtacccgttgcccaggattgatgatttgttcgatcagcttcaggaaaaggcagtgttttcgaagattgatttacggtctggttatcatcaacttagaattcgggagaaggacataccaaagactgcttttagaaccagatatgggctctatgagtttctggtaatgtcattcggattgattaatgctcctgcggtctttacggatcttttgaatagagtattcgagaattttctcgataactacgttgtagtgtttatcgatgatattcttgtatactttcaaccagaaagaaagcacgagcgtcatcttcgggtggtattacagtgaattagggaccacaagttgtatgcggagctttaaagtgcgaattctggttgttcggggtgtcctttctgggtcatattgttgaggagaatgggattatggttgatccaaacaaggtggagtcggtgaagaattggccgaggcccaagtctgtgatagaaatttgaagttttctcggtttagcagggtattatcgatgtttcgttgaa

SEQ ID NO: 277094 - DNA, 717 bp, Cannabis indica
agattatgacgtatcaacaaatgcttccaatactcgagctcaaaaaatattgacttcttcttccatggcccttgaggttcatttgcaacaacgtcacttttctcacgacgaccttttcttttctttggatttgcttttcgctttccaaggtggaattgaactttattcaacttttctaacacttgttcccctagcaaaggtggcggtggcaatccaaattcttgcttaccgtcaaatgctttcttccaagtgcgaaacacatgttcttttggcaaaaaccttcggtgtcccatgtaacacatcttcttcgagtgttttaaatacatagaacatgttctctcctcacaaataggacatgctttgtaccctttcacactgtatccagaaagatttccgaaagctggaaaatcattaatggtccacagtaatatggctttaagattgaactcttctttcctaaaggcatcgtaagcagaaacaccctcatgccacaatcgactcaagtcatcaactagaggggctaagtacacatcaatgtcattaccaggctgtgaagggcctgatatcaacagtgtaagcatagtgaacttcctcttcattatagtttagaatccctattgaatttgtattatttacatactaaggatatataaatattcagtttattatatatttggaacaatttaatttaaattttggtgttggttatgactaata

SEQ ID NO: 277095 - DNA, 680 bp, Cannabis indica
aggttaaattgagccctaggtttattggaccttttgaaattctggagaaggttgggcaagttgcttatcggttagccttacctccttccttgtcagcagtgcataacgtgtttcatgtttccatgctgaggaagtatgtatctgatccaatgcacgttttgagttatgaagcattggaattacaacctgacttatcatatgatgaacaaccagtgcaaattctggataagaaggaaaaggttctccgaactaaaaccatatcattggtcaaagtactttggagaaatagtaaagtggaagaagccacttgggagttagagactgatatgagggctcagcatcctgagttgttcagatagatttcggggacgaaatccttttaacggggggataattgtaaagaccgcatatgataaataccttgtattattaaataattaaggtttatgtatgagattaattaataattatgaaatgcatattttggaatatatttaatgtatcatatatgttgttatgctattttatgtctaattacccaatttctgtgtttgtgttcggaagcggtggaaagcggcgttggggcctttagagaattgtattatatggtttagaatatttttcggggtatcattgttaagttttagcggtgttggtattttcggggtttggtaaatgac

SEQ ID NO: 277096 - DNA, 538 bp, Cannabis indica
cagaaactaaaacctaactcatgcaacaactacagcaacaattcacacaatttcactttgaaaactcaagctttttaacaagaaaattaaccaactagagcaagaacaactagcatgcatttcaacctaactaaacatacttaattcaacattttaaacatagaaacaacaacaacaactagcagcagcaacatcatcaaaatcacccatgcattactcatgtttacatcatttttcaagaaaacaaaggaaaataagctagacaagaaatacctcttcaaggatcacactagacttgctgaaaatcactagaatcacaagagaaaatccactttcttgctgcctcaaatggccgaaaaagagagaggaaaagagagagagttttccttttgaaatttttttctaattttactaagtttggaaaaatgaaagaaatgccacataaccctttacttcagccattaaaagcattaaataaacatgtatttttcaattattaagccacaaaaagacaaactaacaatggggcaaaatgacc

SEQ ID NO: 277097 - DNA, 909 bp, Cannabis indica
tgttgggaatgtaggaaaatttattaacattaaatttgtaaccgtacaagtgaaacgcatgcaatgtgtatttgtcgactgaatatcgatacaatgtcgatagcttgtcgatagttgaatggattaattaccattgtacacgtgtctgccatgcaaagtgcattgtggagtctatatcgatagtatgtcgatggtgtgtcgatggtttgtcgatgaggactgtcacccttacagttgatgtttttatcgacaaaatgtcgatgggatgtcaatatttgttatttttttggtatttttttcctgtaatcacctttttttgtttgaaattgcaggatcgacagtgtttcttgttgtatcgtacgatggtgtttggtgtgttgagggttataattgggtttacaaagcagaaggcagcttgacgttgacagttagaactgacacaaccatacaacaaatgcgccaaattttatatgaagagttggaggttgatcctttggcgtatgatttaaaattggagatttgttccttgtacatgaagggacaaatggttccgccagaggttattaagaaagaacgccaactgagaacgttcttagagatgagggcaacaatgtcaaacacagagtttatgccattattcgtgaccaaggtgagaaaagttgggaattcggagcctacgccgcctactaatcctctccctcggagtgtggtagggtcttgcgttcccgaaacagatgttgggattggtgtgaatgaggaggttccaaccaatgtagatcaacagcaagaagcgacaggatttgatcagtttgaggagttcgatactaccttctacaataacgatcctattgtagatttgaatatgaacgatgaacatgatttggcagtcgatgaagccgtagcattacc

SEQ ID NO: 277098 - DNA, 709 bp, Cannabis indica
ttttaatggcagcaagagtttatgggttattctaatatttcttcctttctttgcagcacaaaccgagacaacaacaacccaaaaaactcactcactcaatgttttactcactcaaaaccgaacccccaaaaatcccctttaaactttcggccaaaacatatcaaacccgaaaactcaagaacatgaacacatacacaaatacaaataccagaaaataataagagtgagatgagagaatgcaaacagtgattaaagtagatgacaccaaaactttgatctcggagttcgcccaaaacaaccggctacttctccgtcaagccctcaaagcttgaatccattcatctcaaaataggttacaatctttgatttacaactttatatttctctctgtttttctcacttttgatactaacaaaactctcttttcttttacatgaacactctaggaggagctcacatggagatgacaactctcagccaaaaggctctcattttctctgttgttaaatctcttgttctctctggctgtgactatttactttttgttgtatctcttattttgctctgtatattattgcttgttgtatctgagaaaagcacctccttttatatactgttctgtgatctgatctagggcagagccctagtgatatttgtaactgtttttagttgtaactgtctttgtaactgtcttgatatttgttgtatc

SEQ ID NO: 277099 - DNA, 461 bp, Cannabis indica
gtaaacttggtgaatgatggaaatgatagtgtattcgtctagtgttaacttttattttgtaaacatttgttactaaaactttttacaattaaatgaatttttaatttctttcgcattaacatttgtgtaaactttcaattatgtgtttcacattttgtgaattcttacatttttttccgtcttcaaagtaaagtacaatgtcagctacgttagcgacataccatggtggagatggtgatggcagggatccccctgatccttctagggtaccgtcgtcctgcgaatcaggttttcatattttttcagatctaacattgttctgaatataaatagtgaatgtatgatttactaataataataattttctctcgaataaatatagttccacctccggtcagaaagggtcgtggggttgcagcaaacgctaacctcgaaaaaaaaaaaggagagaagctggtaag

SEQ ID NO: 277100 - DNA, 425 bp, Cannabis indica
gtgtgggtttgagttcgggtccgtgtctatgtccgggtttgtgtccaggtctggaccacgatcttggtctaggttcgggtccaggtccaagttcaggtcccgagtgggggtgcaagtttgggtctgggttatgatcttggttccgatctaggtccagcatttcgatccctgtctggatcttagtccaagtaagggttcgtatccagatccctatctaggtccaagtctgtgtttgtgatcgggtttcagatttaggtccaggtccgagtctcagttccggtctgggtacacgaccgtgtgcgggcctgagttctagtctcaatttgggtttgaggctaggtcagtgttcggttctaggtctgggtccgggtcctggccacgctcctagtcttgttcaagttctaattttgggtcccaggtctagg

SEQ ID NO: 277101 - DNA, 508 bp, Cannabis indica
acgactaagtccagatcaagctccgggtgtgggttcgcatcttgggacttggtctaggttgggtccgagtcccaagttccaatcccgatctgagtctggattcagttctgggactaagtcctttgttctaatccttgtttgggttcgagttttggtccgggtctgggtctagctttgcgtctaattctaggtgtgggtttgagtttcggttggagtctttgtccgtttttgtgtccaggtctagaccccgatctgtgtctaggttcgggtccaggtccaagttcgggtcccgaatgcaggtccaagtttgggtcttggtcagcatctcggtacagatctaggtctagcatttcgatcacagactggttctttattcgtgtccaagttcatatttggatcactatctaggtccaagtctgcgttggggatcgggtccaagatttaggtcaaagtccgagtctatgttccgctctggttacacgacgatgtctgggcccgagttcgagtc

SEQ ID NO: 277102 - DNA, 699 bp, Cannabis indica
tagcgtatctgagaaaaatacataacctgcttgcacaattcaaaagctacagtcttagacaaattccaagggaagaaaacacaactctagagcgttagctcgattggcaagcaataatgtaagtgataaggcgaacttggttcctatccagttcctcgaagagcctagcatcactggcacggaagagaccgaaatggttgatacttccccaaactggatgacatcgatagcagcctacctcaacactggggaactcccagataatcgaaatgaagctcgaaagatgagaaggaaggctggacgatatatcatagtagagggaattatgtacaggagagggttctccatgccattgctcagatgtgttactcaggacgaagctggacgactcctatctgtggtgcacaatggattctgtggaaatcatgccgtcgagcagagtttatttaagaaaattctaaggctaggatatttctggacgacaatgattgaagattcaaaggcctatgttaagaaatttaacaaataccaaagattttcgaagatacctcgagctccgcccaacgagttaactcagatgcagagtccgtggccctttgccaattaaggaattgacctgatcagacaattcccaaaggcaagggaggagtgcagtatgcagtggtagcggttgattacttcactaagtggacggaggcc

SEQ ID NO: 277103 - DNA, 603 bp, Cannabis indica
tagaaattttttattaaaattaaagtccaatttttacgtgttttaattgcctaaaaccgacatgaatctctttatttatgcatggagattcaaatgggagtgattccatgaatttttatcgtcggaattcgttttcctgttcgggtttgggtcggggcagttttttcttaaaaaaaaaaaaaaggaaaattccaaatttttataaatttttatttatttggaatattaattattttcctattttgtgttaatttagtcaataaattacattcattcaatttccatttttaatttaatacatatatttagaattaatatgttatttagtataaattgaaaatggaaatttgttttaaattggtaattaattacatgatttatttaggcatgtaataattgtgcatttaattatttattaccaaatttatgtaatttattgtttaaattaataaaagtttaaaaaaatctgccattaagtatattctttaattttgcatttaattcatatcatataattaattgtactaatttgtatatttaccttatttatacaaattgattattagtacaaatatttaagatattatatggtcataaatgcat

SEQ ID NO: 277104 - DNA, 539 bp, Cannabis indica
gtagtcgcaaatagtttttattagcgtcattttcaaaacgacgcaaaaaaattttcgacatttataaaccgacgctaaatacttacttttctattttattttaagcgtcggttaaaaaatgacgctaaatgtttcatggcattttaaaactgtcacaaaaaacttattccgtcggtttaaaaatgtcatatctattacgaaaatactttttttttacctattgcgtcacttataaaatgaagcacaaatataagtaagggaaaattgcaaatttttcatgcaattttccccacctgcattatcaaattttagaataactctatataatagtaaatacataatacaaaaaaaattaaaataacatttttaaaacttatataaaattagtaatcgattctattaactaatcacacaataccaaaattgttaataaaatcgattctaaaacttaaattccatgtatatcgtaaactaaatataaactaataacatatgcaaaagataacaataatcataaaacttgttactcatgtattata

SEQ ID NO: 277105 - DNA, 957 bp, Cannabis indica
gaggggtagacattttttttgttctgaaaaaagaaagaatccagcagttagcccccaaatgaagaatggcgaggtggtgaaagtaaccaaatgaaggggaagggctggcttttataggccagaacgggtacaaaccaactgtgatcaggcgtcatcgaacggtgggaatcgaatcaattcgcattctacagatctaacggttgggataaatgatcatcagggcagctggaaacgtttgagtttttgtctgacaccaattaaatgcgccggatcattaatggatgggaagcgaatcgttgcctgcaaaaagcaataaattttaatgatgactgtcataaatgcagcccacgcgcccgaagcacgtgccaggaaatcaatgagacagccagaggcacctggcaagcctcgtttactttgcaccaaacaaggcttgggggtaaatgttgcccttaatttcgcccaaaatacgttgaccaatatgacaataacacgtggatctaagaggcacgactattagatgaatcgactaagtcttttttgcatcaggagtgtcaacaagaagatacctcccggaggagaggtgaaggctccacatactctcggagaccaagggaacgctaaggtatctctgggaggtactggaccctatttgaacagtcacctctcatttaatgcccaatggaagaaaacgtattggaacttccataagcaatatgtctgacggcgtaacccctcttttcctgctattacgctatgattaataaggctagtgacgactactttatgagggatcacatcaatcaagaagggacaaaggattatatccacctaacccctaagatacctatagtataggctatgtatttcttatttttgcatcgactggaaatatgtgcccctatcaaacctgcaatgaaaagcaacatgattcagttctagggatcacccagaaaaaca

SEQ ID NO: 277106 - DNA, 640 bp, Cannabis indica
cctactttgtatataaaggggtgatccaccatgaaaatgcacctacgaatcctttgctacagtggactaaacagatcgaaatctgactgaaccactataattctttgtcttgtttactttttccagctttgttgtttgttcttgcattcccagttgagtactcgccattctaggttgaatactcgcacttgtcatttctctaaaaattctcttttatatcagttaaatagtactttttggtgttgcgaaattcactcgacaacaaaaccaagaatgataaaggttggcgaattccaaagaaaactagtcaagggaaggtgcatcaagctcgaaacacgaacattgaaagcaaagcaggtgataactcgtttaatgctctgtaggaccatgagggcagtttggttcatgatggcaatttggtttagaaccctaaccctagtggaaattagtataaaaggaaggctatggtattgatcaccctaatggtggcgactgtataagacttgcaagagtatgaaacaatggtggaagctcataagatagaatacccttgactctcgcctaaacgggacaacgctggattccaatcttgattgattttagatgagctgacaactctattcaatggatggtatcactg

SEQ ID NO: 277107 - DNA, 640 bp, Cannabis indica
tcaagctaccttcttggatgttatagttgctagtggttcgacttctgtccactttgtgaaataatcgaccgctactaccacatattgcactcttcctttcgcccttagcaactgaccgatcaagtctataccccaaatagcgaagggccatggaccctgcatttgcgttagctcgttgggtggagccctttggtattttttacaaactttttgacattttttcacaccttcgaacatactccatggagtcttctatcatggttggccagaagaatccttgcctcagtaccttcttggataagctttgccccccagcgtgattaccgcaaaaaccttcatggacttcttccattagtcgttgggcttggtcttgatgtacacatcgtagtaggggcattgagtaccctcgccgatacatgacaccatcaatgattaggtaccgggtggccttccttctcattttctttgcctcgtttttgtttgtgggcaatgtcccttgttctaagtaagcagctatgggggtcatccacgattgagtcgtatcgagtaggagtacttcttctttagtgcggatgcttggctcgggtaagtattctattagcacaaggctggctttatctatcttttcacttgttgccaa

SEQ ID NO: 277108 - DNA, 785 bp, Cannabis indica
agcttattgccattccttaactaaaacaaaaactaaaacaggaaattaaaatgcagaaattaaagtgcagaaattaaaataagtgcagaaattaaaatttttaagtctctccccccaaactaaatatgacattgtccccaatgtatacagtaacatgcagagaaaagagacttacctgagaccctatcagaaagggttaggtgctggcggctggtcatatgggtagaaccgaggaggttgcgccaaataattcggttcatcaatcccgatgttcattctgttgatgagagagttaagttgctgaacttgtccctcatcatagacactcctctgcaccatgtattgttgcatgtggttgttctgctgaattatataacgcagttgtgcatgagtgtattgcgttgtgggatcgataggcccaggcaattgtaggggctgctcctcttcttcttcaacactaagctctcgttgccgctacgcccttgcggtgcatgaggtggaggttggccatagggatgtggcaacaccgtgttatcatactctaattggggaacttcatatgccccacagagttctgtgataactcccgccaaaccaaaaccacctcccgtggctccttgcacgatctgatcaatgctatgccttatgaattgtccaatgtttatgttgtaccccttcattatggcgtacacatatttcaggcgatccatttggacatcggagaagtgcttatttggcactaaccgagcacttacaaagtacaaccatgttttcgccaccgggtt

SEQ ID NO: 277109 - DNA, 777 bp, Cannabis indica
  modified_base (567)..(567): a, c, t, g, unknown or other
agaaaaaaaaaatcaacaaagaaaaccagtaatcagatccgagactctaaatttaaaaggaagaaggagaaaaagaaaacctttccaatctttgaagtggcggtaagaggttcggcggcgtcgttttccttgttatcagagtgaagagaagatactttatcagatacagaggtacaacccatgtctaagcagccaagatccatggcagaaaactggaacttgcttgcttccacgaaaaagatgaagcgaatattgagggaattgaaaatgaagttgaaatttgaaagtgaaaattaaatgtttaatcggaatttgggggaaaaatcaattgtattgatttgataatgtatatattttgcaagtggtctcttgttattgttattgtatcggttttttttttttttgaatggtaagtactaagtagccgttacaagtctcgtccctgtttgcctccaacggtcctataatcgtctgcgtcgagcttgcaaagattggagtcccattaactaatcgacattcgacacctgtaccttcttggtttttttttggtttttttttttttttttntttttttaaaaatttcctaaatttctaatagggttgtaaaggaattttctttttttttttgatgaaatagggttgaaaggaattaagatcccctcttaaaaattaatttaaatgtgacacatcaactaatttaatttatattaaaaaattgaacttttaattgagtcaataaaaatagttaacatatttaatataaattaaattagttga

SEQ ID NO: 277110 - DNA, 548 bp, Cannabis indica
aacttgccttatgcctaatccatgcatctcgaaaattaaggcctacttccaggcacatccgattaaggtgttaactaatcaacccttgagacaagttttataaaaacttgatgcttctggaagattaataaaatggtcaattgaactggggcagtttgacataacttatcacccaagaacatccaccaagggccaagccttggcagatttcttaatagaaggaataactccagaagaaaatccccttgttcaacgagacgaagatacttggaagttgtacgtgttgggctttatgccctaaataaaactctatttcaatgtaatctctatcatttgaatatcaatatggagacagaagtattttcatcacttatttaatgtgtcatttggttcatgttatcatttatatgtttatttgatttataaattcatccaaacccttatcacattaatattcttctttattgtgtcgtcagcacagtggaaagtaatcaagattatgtgattaaatatatattcctagatttatcatgacactgggtttaatt

SEQ ID NO: 277111 - DNA, 722 bp, Cannabis indica
tatttttaattatatatcttttatgacatgctatcgcaagtaattagtaggtaaaatttttatttttaaatttaaattatttatatacttaaaataaattaattttttaattaaaatattttcaaaaattaatatttataatttttttatttttttattttaagaaaataaataaattaaggttagtatcaagttacaagtaatttattaattatttttaataaattttgaaattaattacaactgtctaataatgatctaacgactagaagtaaatataatcatcatagttatatatttaaagtaactattaaaattttctttaaatatatatatatatttaaaaaatacatatacaatagatattttaatgtaaaaaatagtaatttaaagatctaacacatatgatacaaatatatttcaaaacttagtagattaacgactcatttgatccaatatgttgtattgtgttggattgcattgtattgtattgatattatttatgtttgatattgacttgtattaatagtcgtgtaaaattatattatttttaccacaaatttatattttattcttatttatatagaaagcataatctaaaataaattaaacatttatttatacatatacaaattttttactttttcctttcaagtttattgtaatttaagaaaagtaaactacagaagaagataaaaaatttaagtgtataaaaattaaaa

SEQ ID NO: 277112 - DNA, 557 bp, Cannabis indica
ttgttatttttctgttggcctttatagttataatttttgttattttatagttattttttcttattttactgaaatacagtattttcataattttgaaactctaaaaacagtatttttgtaaaattagtatggtaaaaatgtaaacaaactctgagtcatagtacttttgtaaacttttcccattttacagtatattttttttaattccccctaattgtttggggtaagttgaaaaatgcctcttttattcatcaattaatcaaatttacctctaattttatatttatttgaaacatacctctttttatatgtattgtacccaaaatacccttacataagagaatcacatggagagtatcttgaagtgacaggggtaaaattggtacaatgtttaaaaaaagaggtaaaaatgatagattttaaaaaagaaggtaaaaataaaagaggacaatataaaaagggtatagagtgtaatttcctctaattgttttgaaattcttcacttgcaaggacagacctgagaccacaatacttaagcccaatccattttgggacca

SEQ ID NO: 277113 - DNA, 507 bp, Cannabis indica
gtcaagaaagttggatgacgcattgtgggcctatagaacagcgttcaaaacgccaatcaggatgtcaccatatcggttggtgttttaaaaggcttgtcatttaccggtggagttagaacacaaagcttattgggcaatgaaaactctgaacatggatttaaaagctgctgggcagaaaagactactacagctggatgagttggaggaatttcgaaacgaagcttatgagaacactaagatttacaaggaaagaactaagaggtagcatgactgaaatttagccagaaaggagtttcaacctgggcaacaagttctacttttcaactcaagactaaagttgtttcctggtaaattaaagtcaaggtggtcagggtcatttacagtgatcaaggtgtttccttatggagcggtggaactaaaaggtgaaggccctaatactttcaaagtgaatgggcagcggttaaagctctacttgggaggtcaatttgatcaaaccaagtccgccat

SEQ ID NO: 277114 - DNA, 762 bp, Cannabis indica
gacgtggcaccataaatgcaataaaaggtaataattacagccgtcatttttcgaaaccctcgatgggacaaccaaaaggtcacctcctcgtgacaacccttcacctgtctctcgagcaatagtttccctctgtgaccgcacctgtcacatcgcgaaactaggggcatgtgttatagtgagatttctctcacctagaaactcgagaccagactcctatttaagggacacgtgtattcagatttccaatgaaagctgaaatgtccgtgagagacttctcgaagtttcaacctcgcccaggataaagccagcgagtatgacctaagtcggatcgcataaccgtagttcgcattatgcagggtagacccaactcgcatgtgccaggacatatgcgaatatcccctctatacttatgcgaaagcatagagaccaactctctatgatgcgaacgacccaatagccctgacaagccgatatagattcgcatgtctaggttctaccagctcgacatgcgatgtctacaagaggcaattacctaagggtgcagacgttccaaacgtactgatgaccctgcgagctcaacaacggaacatgaacagtcaactcgcagatgtggaagacgcatacgttgatggacttgataactgtcgttcatttattaatgttaacgttgcttgggtttaattattgcaattcaatatgtaaataatggattaacaatgaatgtgatccttgtgtaaccgattggacacctgctttgtatat

SEQ ID NO: 277115 - DNA, 735 bp, Cannabis indica
ttctgggaattttcaaaacccatccggaattccggatgcacaaccggaattccggttcctcgcaggcagaaattcaaaaattcacacaatgctcaaatctaatccaaacaacctcaaaccttccagacctgttctataggacccaaataacatttctaaagcaactacacagtccagaacacacatataccaaaaatgccattaaagctccaagctttgagttcaaactcaaacttggttaaattcaactaacatgcatccaaatcagatcaaacctacttaaacatgcatataaaagcctctgaaaacacaagaattcgacctcaacaaacacagcaacaaaactcacaaatccactttgaaaactcaagcttttgcatagaaaaaaccataactcaagcaacctaactatcatgcattactaacagctcaaatatcctcaatttaacatgcttaaatctctgaaaacaacaataaaatcacagcagcaacaaccacttaaactatgcatgcaacctcatctttttcatcatttttcaagaaaacaaaggaagaaaagttagacaagaaatacctcttcaaggataacactagacttgctgataatcactagaatcacaagagaaaagcaactttcttgctgcctcaaatggccgaaaaagagagaggaaaagagagagagttctttgagaaatttgtaatttttctaagttttgaaaaataaaaatgaaatgc

SEQ ID NO: 277116 - DNA, 505 bp, Cannabis indica
ataaaccgctgattctttctagttaactcagataacggcattgcaatattggaaaaaccttccacaaaacgccgatagtaacccgctaaaccgagaaaacttcgaacttcagtaactgtttttggtctaggccaattcttcactgcttcaatcttccctgggtctaccataatcccgtcttttccaacaatatgccccagaaaagatacctgtgacagccaaaactcacactttttgaactttgcatagagtttatgatctctgagtcgttgcagaaccatacgaacatgttgttcatgttctcttctgaccgagagtacacaagaatatcatcgataaatacaattacaaaattatcgagaaaatccttgaataccctgttcatgagatccataaaggctaccggagcatttgtcaacccgaatgacataaccaggaactcgtaatgaccatacctggtttggaaggccgtcttcagaatatcctcttctcggattctcaattg

SEQ ID NO: 277117 - DNA, 600 bp, Cannabis indica
attgatgaacagctagatgttgcatttacaaatatttatctattgagatctaacactattatgtttgtttaatggatgacaatccattagggatttgtcccattaacacaacaagtcaagttagaccagcaatgaagattcgaaatttaaactacaattaataacagaaaataacatggttaaatataaattcacacacaattcagaaattattaagcatttagcaagtaggaatgacaagcgaaaatactaatacatacaatcctaaataatttccaaggtcttcaacaaactgatattagtgtctcgtttaggcaagagtcaaagataacatcgattgaatagagttgtcagctcatctaaaatgataaagattctagcaaccttttattcgatcaagatgagaatctagcgttgtcctgtttaggtgagagtcaaggtcattctatcttatgagcttccaccattgtttcatacttttgtaagtcttactaatagtcgtcaccattagggtgatccatactaaaaataaaacacttacaaaaatacttatctttcgagatctacggcgataaattgctaatgaacgttcttccatta

SEQ ID NO: 277118 - DNA, 843 bp, Cannabis indica
ttagttcaaaatactgtcgtaatatggggatcccctgctaataaaattcttttataaccaattataaaaccattaatacaagagtaggttatacatccaatcatagaaaaaggggtgatcctgcttcctggaagccaagacaacacggttgatatgtacattgctgggagacctctgactcgtggccaaaaagaaccgctaatcttcttacctgcatcatgaagcacccgtgagtcataatgactcagcaagaaagctattagacaaaagaaaattatggaaagtgatagtagatttcttttcaacagattattcataccagtagattgcactctttcaacgtatatttacaattcaacgtctatacgagcaactcattacaaaattaagagtatttatagctatacataatcaacaatctcagcatttcataaaacaccttaatcatgcattatcataaatattcattttcaatgcttcataaagcaccctagttcacacattagcatatccacacaatttcagtgcttcataaagcactccaatcatacatcattacaacctgttttcttacatccctaagccactgagactgtaagaaaaatgaccaatttcataagcaatttaacatttattcaatcctaccttaacaaaaatgtattcaattacaactcatcacataataacactcttgatcgttccacaacttcataaccacataatttaggtacttcataaagtacccctaccactcgttaaccacgagctgtatatgtcactatcgttgtccgatacaacaaacgataagtaagaaacctatccgcggtttcaggagtaattact

SEQ ID NO: 277119 - DNA, 599 bp, Cannabis indica
tacttctggtggagcggtatgaagaagaatttggtagaattcgtatcgagatgcctaacctgtcagcaaattaaggctgaacatcagagaccaccagggttgttgcagcccttaaccctacctaaatggaagtgggaggaaatcacgatggattttgtggttggattacctagaaccacaggtttgtctgattctatttgggttgtggtggatagattcacgaagtctgctcattttctgctagttaaaacaacctattcagtggatcaattagcagaattgtacgttaaagaaatagtaaggcttcatggggtaccaaagtccatagttttggatagagattcgaagttcacctacaagttttggcagagtttgcaacgagctatgggtacaaagttaaaattcagtacagcattccatcctcagacagatggacagtccgaaaggaagattcagatattggaggatatgttacgagcctgtgttatggattttgaaggctcttggagtaagtatctaccgttgatagaattttcatacaataacagttatcaaagtacgatagggatggctccctatgaactgttgtatggtagaaa

SEQ ID NO: 277120 - DNA, 523 bp, Cannabis indica
aaaaatatcataatttgttggtctaaaattaattaacaaattaactttcaacttaaatgtatttttatagttaattaaatattagaaaatataaattagttactaaaaatcactatctagaatcttttcgttaaactaagtgtgtttttctaaattaattttaaaataatctaataaaaaattaattccatttattttaaaattaattatgttgctaattcaattttacttaggttaaactagcataattagcctaatataattatttaaataaggcaaataggccttcacagttagggttgttcatgtgagggagggatgtgttcagtatgtcgtacccactactaatgactcaaaggagaggaatttaaccttaaattaaataattgttattcattgactaagctcaattctaatcgggcctaaataaaatcatcaaggtaatatttcattttagcaacctagtctatttgcatatctagaaataaatgggcaacctatatgtatctaagcccaaaagcaa

SEQ ID NO: 277121 - DNA, 478 bp, Cannabis indica
aggccactacccctgtccgccgtatcggacatacggaaacgtacactcacaccacgcccagtacactcacagagagagagaaaaaatttctctaaagcttattctatgtcttcccataacgactatgtggaataaatatcataaatatttacaacatacccgattataacaaaaaaaaaaaataaaaataaatagttttagatgccgaaagagacatgatgtctaccaaattacccgttgtagtacagaaatttccgatatatatatattttttgaattttaatgtataaataattttggtaatttaattaaaaaaaaggggggtttatttttgaaaaagaggcagaaaaaaaagggaagaaaattcgaggcaaagtaagaagggaggggcaaataagtaaataagagttgtttgagtttggaaaatggaactttgaataataaaaaaggagaggcgggatcgccaggtagagagtat

SEQ ID NO: 277122 - DNA, 623 bp, Cannabis indica
ttggaaattatgtgtttttttttttttaagttaatgttggctgaaataaaaaggtttattttgattattctctcattttcatttttccaaacttagaaaaattagaaaattctcaaaaagctctctctcttttcctctctttttcggccctttgagcagcaagaaaaagtggtgttttccttggttctcaagctggttttagcatagattttgacctcaagttgttggtaagatccttgtagctctttcttttagtttcttgaacttttttgatgaaaagatgatgtttgcatgcttagtttaggttgttgttgttgctgtgattttgttgttgtttgcagaggtttaagcatgattatttgagtagattaaagctagtttgatgcatgttagttgccttgattcaagcttagaatttttatactcaaaactatggtttttcaaagtgaaaatgtgaaaagagctgctgtaaagtttgattgtgtttgagttcagtttctgcagtttttatatgcatgaatatgtgattttaatcaaggtttgatgcatgatagggttgtttaaccaagtttgagttttgaactcaaagcttggagctttaatggtcatttttgatatctgtg

SEQ ID NO: 277123 - DNA, 738 bp, Cannabis indica
cttcgtcatcgcatggccgcactccgagcagatatacaaggtccggctctgtacaaacacaacagggaggacgttatcaagtacaccgaggtgatctacgtgatcatctcaacgcagttttcagggcacgctcccgcggcccacataatactgagacgctccgtgatccccatgcgggcgatcagggtgtcaacgcaggtaataacccgcctatcgcgccgatcgcgactactgggattaatatcccagcaaaccttgccgcagtggttgcgagccccgcagtcgcagcgactccagcccctgcgacaggaggaattgaccaaagcatgcttctgcaagctttaaagatgctcgagcagcagcgcaagcctatatacaagctgcatggcacctcgccttttactgcagaggtgcgacaggctcaacttccgaaagggtttcgtttatccgaatccctcaagtataaaggtacttctaacccgatagattacttagaaaaattcaatactataatggaagtagaccaggtaccgcaactcgcgaagtgccgcattcttgcggcaacactcgaggaaaatgctcatgattggttcacccaattacctgaggcatcgatatcgacgtgggaaaccttcgtcgacttattcctcacgcatttccaggccacaatgacgtataggccaccctatacgactttggccaacatcaaacaagaacctggtgagtctttacaagact

SEQ ID NO: 277124 - DNA, 544 bp, Cannabis indica
cgacccgagcgaacaacgagacccagtcgaatcccaccaaccccaatcgcagcaatccaggttagtttttgtggaatttttctttgaatttctcctttaaaatgcatacatttgtggttgaatctagtattgaattggaagttgttattttgtatgttatttgggatgatttgtgcaataaaattgtgggatgaatatgggtttcgaacaatagctgttttctgggtttttagattattgtgcgattttatgcgattccatgtgcgattttatgcgacgtaacacgagtctgtacaggttctggtctgggtctttagattattgtgcgacattgtgcgatttatatgcgatattgtgcgattttcgcctagattaatactttttggtatgtttagcgacttttaggcgacattatgcgatgtttgtgcgatgtatgacatatggtatatgttgtgcgattttaacaatattatgcgattaatgtgcgatttttgtgcgatgttaactgacaggatcttgaattttttagttgttttgttctgta

SEQ ID NO: 277125 - DNA, 671 bp, Cannabis indica
atatttagggtgttaatcaatatacttgtgagtagatctaagatcctggtaaaataattttcaacaattcatacgaaggaataatctaatcttgtgagattccaagattgatatcttgggctatgatgttaagaattaaagaaggttaatgagaaccgtggagattaaagcaaaaatagcatgatgttttattcttgtgttatagtgagatttctctcacctagaaactcgagacaagactcctatttaaaggacacgtttattcagatttccaatggaagctgaaatgtccatgagagactcctcgaagtttgaacctcgccaagataaggccagcgagatcttgcgagtacgaccaaagtcggatcgcgtaactgtaattcgggttatgcaggatgagagaatggatccaactcgcaagtgtcgggacatatgcgagtatcctctctatacttctgcgaaagcatagaggtcaactctctatggtgcgatttggtcccaacgacccaatagccttgataaaccgatatagactcgcatgtctaggttctatcagctcgatatgcgatgtctacaagaggcgattgcttaaggactcagacaatccaaacgtaatgataactctgcgagctcaacaacggaacatgaacagtcaactcgcagatgcggaa

SEQ ID NO: 277126 - DNA, 220 bp, Cannabis indica
atttaggcacaattattttaaaaaaaataattaatattttatctacaaaatttataatactatcaaattgtatactctaaaatatacttttatctccagaaacatattagaagttgttttagaaataataacattaaatcctttttaaaatttccctttataattatatttaaaatttgaaaatcatagctaagaatagttgtacacaacttacaactta

SEQ ID NO: 277127 - DNA, 534 bp, Cannabis indica
gaaatttgaagcttgaaaataggtaaaaatctatttttttttttgctttgtttattatcttattttaaaatttgattattttattgttgacttcgcttttggccaatgatgagtccatatttatcttataaatatgattaatttatttattagtattcttaaattgattctttaaattattgattagtgtgatattaattttttaggttattttaaagactattcatccatttagagtcttttggagggattttagcatattttggtggaaaatagtggaagtcggcgagctcgattgtacaaggcggaacttaattgcaaattcggacgaacttaaaggcagaactggacttagagctcaacatgaaagttttagatctggttcttgtctttctagaacatactgagtcgtccgattctgagtaatatcgagagagttatgacgaaaatactattagtcgtcgcagtagaaaatttctgaaaaaagatagcgaaaaaaaaaaaagataaattttcaagaagagttacgatttt

SEQ ID NO: 277128 - DNA, 764 bp, Cannabis indica
gtgcttggtatgagcgtctaaacttaaatttttgctttctcgtgattacaaaaggggaaatgttgataaaacactttttaccaaaaacattaatattgatgttatttttgctcagatatatgttgatgatattgtgtttggttctacttctaactctgaagtgcaggtttttatttcttaaatgcaagaggagtttaaaatgagaatggtaggtgaactcacttattttctcggtctccatttgaagcaatcagatgagggtacgtttgtctctcaaagaaagtatgcaaagaacttggtgaaaaattttggtcttgagaatgccaaacatatcaatgctcccatgagcacaacattgaaattaaccaaagatgaacaaggagtaaaggtagatcaaactttgtatcgaagtatgatatcttactgctagtcgtcctgacatttgttataggttggtgtttgtgcacgatatcaggaaaatcccatggaatctcatctttctgttttgaaaagaatcattcgatatgtaaatagcactgttgattttgggattcggtttttaaaagacactaactctaatcttgtttgttttagtgatgttggtcgggcaggtaatgcagatgatagaaaaagcactcgtggtggatgtttttatcttggaaacaatcttgtttcatggcacaacaagaagcaaaactcaatctctctatccactgtagaggctgagtatattgctacgggtagttgttgtacccaattgttat

SEQ ID NO: 277129 - DNA, 895 bp, Cannabis indica
ttaagtcatacaaggctggtcggcctagcattacgttaaaggctgaaggaacatccaatatcaggaattgtgccatgatagttatgctcgttggagcttgtccaactgtgaggggtagccggatttgtcccagaggcgcaactccttggccggagaaaccatagacgggctgaaggcatggagttaaatccttgagctggagccccatcttctcgtaagcagtcttaaacaaaatatttgaagaagccccattatcgatcatggttctggacaccattttgtttgctatctggacttccacgactagcgggtcgttgtgcggaaatcttatctggacagcatcttcgtcgttgaatgttatggttggctctcctgctcgtggaactttgggcttcctttcttccacggccaggatgacttcttcttgctcgtattgagctgtgcgggcatatcgttctcgagctttgcccgtgtctccagcgatgtgcgggcctccaatgatgacttgcaagtgtccatctattggcggaggcatcagatcctggttattctgaccttggttggccttgacatacttctgtaagtgcgggttgtttttcttgatcagaagttctatttcccgcttcaagttgtagcattcgttggtgtcgtggccgtagtctccatggaaccgacaaaactttgtcatgtcccttttgctggtatctttcttcatgggcccgggcttcttgtacggaattagcgactgagtcgctatatacacactttctatatcttcagttaagatagtgaatgcagtgtgtttggcgcgatcacggggagtctgtccgggtttttcggcgaactttcccttcttcccgttccttgcttgtggttgttgcctgaacgcttgcca

SEQ ID NO: 277130 - DNA, 824 bp, Cannabis indica
tgaaaatcacccaaccggcagaccggttgtccaaccagaattccggttctgagaattttcaaaactcatccgaaattccggatgcacaaccggaattccggttcctcgcaggcagaatttcaaaaattcataactcaacaaaatcaaatccaaatcacacaaaaccttccagacctgttctaaacatcctatagaacaattctaaagcatcaatacagcccagaaagcacagaattaaaaatcaccatgtgagctccaagctttgagttcaaactcaaacttggctaaagctcacttacaagcctcaaaactagcttagaactacataatcaagcataaaaacactgcagaaaacaaaccctaattcatgcaataactacagccaccaaatcctcaattttcactttgaaaaccatagctttttaacaagaaaattatccaactaaagcaagaacaactagcatgcatttcaacctaactaaacatatttaattcaacattttaaacatagaaacaacaacaacaactagcagcagcaacatcatcaaaatcatccatgcattactcattttttcatcatttttcaagaagacaaaagtaaagaagctagacaagaattacctcaactagaatcactctaacttgctgaaaatcacttgaaattgaagaggaaaatccacttttcttgctgcctcaaatggccgaaaaagagagaggaaaagagagagagagctttttgagaaatttgtaatttttctaagttttgaaaagaatgaaaagaaaatgccacataactccttttacttcagccaacaaaagcatta

SEQ ID NO: 277131 - DNA, 735 bp, Cannabis indica
agctgacctgttaccacagaggggctggcttctgcatcagcctgagttaacgcaaacacccttgctggagtgggttttgctgcagtcttcggtgcctcaattctgagctggggacaatctctcttgtaatgccctggcatgccacattgaaagcatccctgccctttacactcccccagatgatgctttttacaactggggcactctgggtaagtgtatcgggtttcagtaccactctggcgattgccccgaccctggttcccccggaacctcttattctgacccgagccactggttgcagtggatgcctttcttttctggtccatggccgaaccactacctcccctgctaaaacctgatgcaggaggggtaggagtcccgccaaccaccggagtcgcaccagactctatcatgcatcccactgcgccctcagctcgcaatgccttatccaccatttcagcataggtggttctatcgtcagtagtaatcatcaggtcatgtctgatcttcgcatttaatccatctagatatttttctttcttgctgaagtcagttggcacaattcccgaggccaacctcgccaatcgatcaaattgcgttgtatattcagtaacactcatattttctttttgagtaaaatgagtgaattcctttctcttggcactcctaactgcttcattgtaatattttgcattaaaaagttcctggaacttttcccaggtcattgtcgtgaca

SEQ ID NO: 277132 - DNA, 570 bp, Cannabis indica
ccccattagtattttgtcttttagtgatttttattaaatgaaaaataaatgttatttatgatttatttggctgaaatgaattgatataggtgtcttttattcatttttcattttacaacaaactcaacacttagaaaaaaatagaattttcaaaagctcttttctctcaagcactctctcctttttcggccctccttgagcagcaaggaagtggaattttccttggtgattcaagctcattttgagcagattttgtgatctctatttgctagtaagtcttcttcatcctttcttaatgttcttgaagtttttaagatgaaaatggtaggttgcatgttagttttggatggctgattgttgctgtgtttatatgttgttttcagaagcttaattaggtttaaaatgaatggattatctaggttttaatgcatgcttgctatcttgtttaaagctatgggtttttctatgtaaaatatgtgatttttgaaagaaatggttatgttttgttgctgtgatgttgtggaagtttgttattgtttccagaggttattctaagcttgtttatgtaag

SEQ ID NO: 277133 - DNA, 805 bp, Cannabis indica
gtctcaaacaaaatccttaagtttttttgtaaggaaccaaacccttaagttttttttttttgttgataagtaaccaaacccttaagttaatacacaaaaataagaataaaattatgatcaaacaggattctcattttttttttttttttgttaagatgatccatttttattaaagctatacaaggactaattcaatgagtttccaaaatattttttaaaataaataataacaagaatatgagagagacgacactagctcaatgccaattggaaacagtcctagatattaaattttggttgccataatgccatttgtaagtgacaattatcattaatttgaaacttttttttttgtatataaaacaatttgaaaatatatttaccattagaaagaagtggtcatgaacaacttttttttggttttattgccttagcttaaaaatatatttgagacaaatagatcaaaattatatttaaatatgtgtgtattattttatatcaaactatatgttcccacacatattagttggtaaaaatctaatcaaaactagattatattactaaagcaattgtattgttaaaatgcgcggaagtatttgtcagaagtattcgaatattttgattcatctatttttacttcaaaataaataaataaattactattgtcaacttcctgttataatttcttagtcaacctccacgcctaaaaatacataacggaatattatttttttaattttttttacgacggtgttcgttatgcttataacatcatttgtaacgccctaatgctaaggcacgctac

SEQ ID NO: 277134 - DNA, 531 bp, Cannabis indica
tctctcactagggaattcaaaattgtatctctctctcttgtgtgttgtgttgatttcgtgtgtcacaagaggaagaggagagggcggctatatatagagaaaagggaagctcaactttctgaaagaggcagtttcctgaattacagagtaattgattaattgccttatttagtgtgagccaccactttccacttatagataactgctaggtttaggttagtaattatttggcatttaaaaattgaaaataataattgggaaacacactcaagtggccggccataggtgtgatgggcctcacttggattttgcagtttccacaattttatttctattttcccaaaaatgccaattttccaattctaaccatttaaatgccaaaactaattatttaacaactaaaatagattattaaataatattgtcatttaatataattattaattagacatatagagtctcttaattaataaataaacctagaatgtaaagcccgcttagttaatttggaaattagcagttatttatgtt

SEQ ID NO: 277135 - DNA, 889 bp, Cannabis indica
tgacgtactcgtgtataagagccatttattccgtgggtgtaaggacccaatggaggcttgaagcggggacgttacagaaactctctgctagggtttcgaggaaatcagagagtgagggagtgaatgagaaggttctcgattccttccttggttttgttcaaagacaaaacgaggccgttttggggactaactttgaaaagtcaaagtgaacagggaaaggtcgaaattgaccttaaatattgattggtttgttttgttggtgtagggccaagatagtaaattcctatcttaaatttcctacaatggtatcagagcttggttaaagctggaaaagaatcaacattcaaactaatcaagaaggaagaaaactcaagcaagaaatcaagaaacacaaacaagaaattcaagaactcaaccagatcaacttgaaatctttaacaaaggatttctgggacacattataattatctttacaactaaattgcctattaacacttatctttatttgatattatttagattcattaactatgagcaatttaaaggttgacattgacaaatttgatggttctggtgattacaggatttggagaaggaaaattaagtcactcttggctcaacagaaactgttgagagtgcttaatgatcctatagaatggccagaagggactaccaagattcaacaagaagaatacttggaaactgcaactggaatcatgatattcaacttatcagatgccataatcagattaatagacaaggaggaaacccctgcccagatttggaagaaactggaagaacagtttcaacagaaatccctaaccaacaagatttcttgaaggaaaggattttttttaaaatgagttcatccaaatctcttgatcaaaat

SEQ ID NO: 277136 - DNA, 679 bp, Cannabis indica
agtaatgatttagttaaaaaagaaaaacactcgccctttttctgtcttggctagttgggtgactgtatatacagtataacctctatttaagaataccctattcaagaataatatctaatttgttataaaaaaatcaagtcctaatttggaccaattataaataagaataacctctaaattgtaattagttatatatttcaaattctcgtattaacaaagtatacctctaagaagttatttttttttttatttaaacgtttatatattacaactatattttacctgagacttgaacccaggacctccaagacacacacacccacctatggccacttgagctagcctcaagttgtaagtgggggtgggagtgcaatacctctaagaaggatatttctatatccctaagaataattacatcttaataaaatatatacatgtattttataaaattatactaaaaaaattattcactcaaaaataattctattatgataaaactaaggattgttaaatgtcattgttgttacattgggattttttttttcttagtgtaattctatttagttataattttttaacctagaattataatttacttaatataagtgtagggatatgattttgtcctgttattgtactttctacggattgtatccgtgatgtatgacagccgtcagat

SEQ ID NO: 277137 - DNA, 636 bp, Cannabis indica
atggtggagatacaagacattttcaatgagatttccatatcatgggttgtccaaagagtatcaattagaaatcttcctaaatgggttgaatccaagcactagggaatgggtagaaagaggagatggtaccaccaatttctaccaactatcaatcgatgaagcctattggatgttggaagacatggcggagtacaacaaatggtgttgtaattgtccaaacaataaccatatttgggaggacaactacgataatttggacctaaattttgacacttactctcaaggaccaaatgatgagattttagaagatttacaagagttcaatatagaagaagatctttctcaaatggctaaatcaagctcatttgaggtattgatgatggagttcatggcgaaaaatgatgccttaattcaaaaccaagctttatccttgaggaaattggagaaccaatttgagcttttggtgaatgagttgcgtgataaatcccatgaaacttttggtattgatatggaaaattcaagggagaaagaagaaagtgaaaatgtcattttgaggagtggtgatgagttggagatacttggggaaaattttgagcagttacaagagctcacttcaatccaaagtagtgaagaaaa

SEQ ID NO: 277138 - DNA, 728 bp, Cannabis indica
tttgcccctccacactaaaaaaacataaaaggagtcctaagggtattttgataaattctaaatttccgactaatcccgacattcccaatgtcaaaataaagtgtcccactatactaaaatactaaattgtgattctattgggccatacaccgcgttccatgttgtcgggcaccgaaaatgcaaaattatgagatttcactatatgacataaaaatgcattctgaattcaaataaatcaacataaataattatttaaatatccataaataattttcataattaaacactaattatctactaatttacaaattaaactaagcggtctttacatctagaattataattgagtaattaaaaccaattaattgagtctgcaagtagtattatctcaactagtgaggggaccatgagcctatataatcaagcttccaataagtagatttagaatttacaaagtaaattctctaccttattaattcctccttgtgccactatagattcagaatttcactcttgattatatagaacgttctatatgtaccaagatatagatatgttatgattatccattgttacaatcaaaatagtcaaagattctctatagatgatctacactgaatatggataaatttacccttctacccttcaatgtattttatccttaaaacacttagctacctatagatgatatttcagtaaactaatataattactgaaatgaggcttca

SEQ ID NO: 277139 - DNA, 654 bp, Cannabis indica
gacttttatgcgatgatggtgcgatgtttgtgcgtttattcattaatttatgtattatttttgcgaattatgtgcgattaatatgcgacatttatgcgatatctgtcttactgttttcttttggaacacagcaacttgatgccatggcgcacttattgagaagaagacggaccctgtacccagaagtctacactcgaaaaggtgtagttttggacacatctgctccacagatatttgccatgtattggaatttctatgagggtgacaagagcaagatgaaatgggatgaggccgttatgaattacgtgcaggggataccgcacagttacttgccatgttgggagaaccaggattacatatactttgtcttgcaccttcccaaagagcgccactgggtggcagttgaggtggatattgacaactgggagatcattgtatatgattctgatatcggtgccacccctgaggaagccatgaagtcatatttgaagccttacagcgagctatttgcgaatctaattcgagctagcggttattttccatacaacaattatgtacatccggtggacttgggcgatctcagtcagctcctacccctacattatagacgagctacctctgaggttgcaccacaaacggagagcaggtgaatct

SEQ ID NO: 277140 - DNA, 446 bp, Cannabis indica
tgatgcaggaggggtaggagccccgccaaccaccggagtcccaacagactctgtcatgcatccaactgcgcccttagctcgcagtgccttatccaccatctcagcataggtggttctgtcatcagtagtgatcatcaaatcatgtctgattttagcatttaaccctaccaaatacttctcttttttactgaaatcggttggcacaattcccgaagccaaccttgccaaacgatcaaactgagtcgtatattcagtaacactcatattttctttttgagtcaaatgagtgaattcttttctcttggcacttctgactgcctcattatagtacttggcattgaataactcctgaaatttctcctaagtaatagttgtcactgttgaaatttattttaccaggatcttagatatactcacaagtatgtttttaacaccctaaatatgaa

SEQ ID NO: 277141 - DNA, 776 bp, Cannabis indica
ttaataaataatattaatgagtaacaagataattaaaatataaagttattgtatgttaaaatttggcacaaaaaatagtatagtgttaatttaattagcacaatttttaattttagttaaatttggcacacatttggtatcaccattaagattaagtttcagcaaaatattctaaaaaataataatatgccacatttatagttctctattggagatgttttaaggtatccaatactatggatgagtggtattagtttaaagagacttcaggagtttattcggtaaagagtgcttacaagtttctcaaagtgctttacggtaagtggttggaagataattattagggcatttggaaggctttatggtaactcaaaattcctcctaaggttaaagacttattttggagggcatattctaggtgtttaccaatactgatccagttaaaaggttgacatgttgatgtggtcgtcatttatttggtgtgccaaggtatggatgaatcaatcctccatatatattttggttgagtgtcctttagccaaagcttgttggcagcgagttgatggggttatttgcagcctttcgaccactgttttttaaagatagttttatgatctggtcatgaatttttgaagactttgatttgacatcttgcaatgatttgttggtttctttagaaagcaagaaatgggctgtttgacaagtaaaaaatgttacaaatggggtgatggctgttgcgttgtcttactttaatcagtggaagattgctcacaaaa

SEQ ID NO: 277142 - DNA, 196 bp, Cannabis indica
tttatctctattaagccaagctcgaacgaaatcaccatttcacttctatgtcctgatagaagctgcttactttatgcatccaacccaagcttactttaactaataacctgaaaaggacatagcacttatccaatgtgcaagtaaactacattgtagattatcatatcagttaaaccctgtgtactaataaatcata

SEQ ID NO: 277143 - DNA, 529 bp, Cannabis indica
taatttttttttgtatttgtgaaataatccctttatttaattggtgataagaatagagtaaaatgtttatatttaaaatttcacaactacgtggcccaggcacagtataccaagcataattagagttgtataagttagttttggacacagaagatatcaatggaaagatctcaaaaaaatctataactttcatgaagagataaaaactaacatcatgcatttagtgggtcaaaacaacattgttacgtaagtagtccgtgcagggtgggaaaatctaactagtttttattttaggtgaaatcataaacctaggctagatggatgtagaaataaaagaggaaattaggaatgaaaacttaccattttagctcaggtcaattaatgagaatgaatgactcattcttgcacccaaggtcttgaaactctatagatagaggtgcaaagagctctcattttcacatcaccttatagtattgagccacaagagaatacaaagagagaaccacaaaattgagagagagagagagag

SEQ ID NO: 277144 - DNA, 839 bp, Cannabis indica
atcacgatgggtgaaaaaaaagggtaaggggaaaaaagttcctcacaaagttatgcgttacttcccactcacaccgagactaaaacgattatattgctcaagacacactgcggaggatatgcggtggcattactcgcagagaccaaaagaagacggtgtgcttaggcatcctgcggatgctgaagaatggaagcggtttgaccgccttcatccgtcttttactgttgaacctagaaatgtcagactgggattggctactgacggttttaatccatttggcaacatgagcaactcttacagcctgtggccagttatttgtgtcccatataatttgccaccgtggaagtgtatgagttctgaatcgttgttgttggccttattaattccaggtccatcatctcctgggaaagacatagatgtattcatgagaccgttaattgatgaactgaaacagttgtgggagacgggtgttgaagcccgagatgcctacaacagaactgtgttttcaatgcgtgcggcagtgttgtggacaataaatgattttcctgcttatgctctaatgtctagttggagcacaaaaaggtatatggcgtgtcccacttgcaatgaacacactccttccattggcctaaatagtaagattggatatgttggccacagacgttttctcgaaatgagtgatccgagaaggagaagcaaaaagtacaatggtaagcctgagaagagagcaccacctcctgtattgacgggggatgatattttatctcaattagaccggattccattgagtttgcctggaaaacacaaacagttcgggggtgtgaaacggaagcattcta

SEQ ID NO: 277145 - DNA, 508 bp, Cannabis indica
atcttttttaaatcttagattttattttttttccttgtcgtctaatcatgtcctgtataacagaatttacatgttcccagcattatggcaataaataattctcttccatattgtttgccctgagcccaaatagctcgctaatcagactatttgattgcccttactgtataacttatcacatatttagtccacatcttctaactatttaaaactcaaacggatattaatatcaatatgcatataccatacacatattcttataaaaattatcagtatgctactttccaacatactttataatagcctaggcaggtaatccaatagcaattaatataaacacttactataccatgagttgacctgtcctcgcagcaaatgtacatattcgaccagtcttcaggacctttaaaaccatggctgctctgataccaagttgtaacgccctaatctatagggacgccacgtgtgtgattttataaactagtttaatactaatagaataattaat

SEQ ID NO: 277146 - DNA, 507 bp, Cannabis indica
ttcttcttttcctttttttttccttttttttaaggggtggcacaccccaaacttaattttaatcacactcttctcttttttttacagggagtggcacccaaacttattatataatatatatatataactaaatataatcttcttcttctgctcttgggttgcccaaatgtgatacaataaggccaagacaacccgaagtccttcttcaagcttttttcaaagtgatgcaggtctttgctttgttgacctcaccacccccaaacttcactcttggcttttcaccaagaattttcttcttgaaagtgcatcacgtagttccaccaccccatcgggatatactcacaccaccaagaaagatcccgcaacatggaactcggtgtatggctcagtagaatcacaaattagtatttcagtgtagtgggacggtttatttagacattgggaatgtcaggattggccgggaatttagaatttcccaaaataccctttagtgccctttatgttatt

SEQ ID NO: 277147 - DNA, 615 bp, Cannabis indica
caaaacatagtttctatatttacttacattatcttccaaaaaatttaacaagcaactaggataatttttagtattgcaacaaaaacgtgggatttatcttttcaaacctaccggagtcaagttcatggcaattgcctctctcattttcactccactctcattcatttctccattaaaacccgaaagcttctccacattttcttcttcttctttgtcttcaacaacagtgagctcgagagttttgatcagaaaattgtgaagcaaacaacatgtaacgatcacaaaaggtcgaaactcaatgcactcttctttccactccttggaaagaatctgtcaccgattaggaactttttaataaaaaaaactattttaaaaaagtaaaaaaaataaaaaaaaaactctaaaataaaattagaataatttttttgcatatacatacttttttaataagtgagttctatttgcaccctataaaatgataaatccactctattaataaaaaaaatataaacttaaataatttttaaaaaattactcttaatattttttttaaatcttttcctcacatcattttatattttatgttaattttaacacttattttgattttatttt

SEQ ID NO: 277148 - DNA, 529 bp, Cannabis indica
ttctaattgatgatttcggttttacttttatttagaacaaatcaaataaactttatttggtcaggtttgaaatccaaatttgttgatcttggttcaatttggaaagtttcctatctggtcctgatctactgctggaaaacccgattctgatattacaaattaggaatttttttaagtaaagttttgtattgctgggaaattattgttgtgtctgtctctagggtttctatgttctataaataaggcctagagagcagccaaacaatttttatctcttctagtctcatattttcatatctttctttgtgagaagagtgtttcatttataaaaacctagagcatttgttttggttttctttattatgatctcatactatttatagaataggttgaagaggagctttgaacaagtgtgggtcttcgggagaagacttttccaagtctcatttcgagaggaagtgagcatattgtttgggttttatgccctaaataaaactctatttcaatgtaatccattttattcaatatc

SEQ ID NO: 277149 - DNA, 545 bp, Cannabis indica
cctacttgctatgtgctaataatttctgaatgagattttgtgttaaactttacttaatttctatttattgttgtttgtagtatccaatatgacaatgaccaatctcatgttatcactgttgactgataataagctgagtggatctaacttccttaaatggagagagaacattaacattgctctcattggtgaaaataccctgtttattcttagacaaaaatcacggtaccttgtcgtagtgggagtttttcaaagaactcaccctgttatgacttgaagacacttgttatgaaaatccattgttagtttaaacaagtaatggattttcagattaagaaactaggaagaaaagcccagaaaactatggttaaagccattcgtatggaacaaccaaaagttttctattacaaggacaggaaaggaaattttgaaaataagcctattcaatggacaaaacttcctgttcccagtattataggtttgagattatctaaacctatggcttgtgtatgcctagtatttacttactctaatgcaagcaactt

SEQ ID NO: 277150 - DNA, 494 bp, Cannabis indica
atattgatattttaattggacatattttattaaatatgtgattaagtgggtattagagtaggattataatcctacttaaactaattacgagttgattaggaaaatatgagtaaatgaataataaagcgtaattgattaattacggagattgtattgaaatatgtgggtatcgtagataccataattcgaataaaatattttcgggcctggcaattgtggaactcgacagaatggtcagaaatgtcacgattgttgaaattgtgttatattggaaattataccggactaggttaagatgttgagaactaggttaaatcgggaaagttagaaaattaccaaaatgcccctaggttattttaaagtttaatttctttgggggtaaattagtcattttgtataataggtattttgactttctagactttgtgggctgcccactattattaaaaaaaaaaaaaagaaagaaaataataagaaaccctatttaagggaaa

SEQ ID NO: 277151 - DNA, 860 bp, Cannabis indica
ctttatcttttaaatatcaataaagaaacagaagtattttcatcacttatttgtgtgtcatttggttcatgttatcatttacttgtttatttgatttataaattcatccaaacccatatcacatttatattcttgtttattgtgtcgtcagcacagtggaaagtaatcaagattatgtgattaaatatatattcctagatttatcagtacacagggtttaactgatatgtgaatctacaacatagtttacttgcaccttggataagtgctatgttctttccagggcattggttaaagtaaagcttgggttggatgcatggagtatgcatcggaagggaccgatattgaactttgattcagatatattaaacttaccgtaatatctattcaattcaatatcacctagttgatcctagatcaaatgatcttaatcctgatatggttaggttcgatctcaggagtattatacatgttctttgatttgttagttaagcctactttttggtcagggtgatacgtacattttgggaacatggtagtgcaattgagtgggagcgctaagcataaatatggaatctatagcttctatctagtaaatagaagtgaaatgatgatttccttcgtgcttggctaaacagagataaatggttgactactcatttcagttcactgaaatatcatttacacgaggctaagtgttttaagcataaaatacattgaagggtgtaacggtaatttaagccatataaaatgtaaatcatctataaacgcatcattgattattgggattataacaatggataatgttcttggtctgcttattggaagctcggatatataggcccatagtccccatacta

SEQ ID NO: 277152 - DNA, 278 bp, Cannabis indica
aatgcctaataaatcctaacctaaacctaggtggttgcctataaatagatagtgatggctcacacttaaaagatgatgaaatttcttgccttcagacaaattttcctgagccatcctccttctattttcgaaccagccacttctcttccttcttcataattttcataccttgagtgatagttggcgatactctgctacagacacgatacaagggttacagatctaagtggaaggagccattaatattccgctgcacccactgtaaagtttcctaaact

SEQ ID NO: 277153 - DNA, 712 bp, Cannabis indica
taagtccaaatagtaaccagtacttaacaacaacctaaaatgccctattgcttccacatttaccgacttgccatctcccacataaatgcttctttcagcatcatttggctttcggtaactcaggcaaccctgcatagaaacactgatgttagtagtagcaccggaatctaaccaccaagtgtttcttggtactgaagctaaatttacctcagaacagaccaaagtaagaaatgtacctttctttgctcgccatgcaatatacttagcacattccttcttcatgtgtcctttcatgttacaaaagaaacaagcatcatcattgttggcttgagtttgtttcttatgtgcaggacctttatccttagcagcctcattctttcttttcttgcccttatctttagaggtgcttgccaaatgagcactttcagtcttctcttgcttcaatctttcttcctcttgaacacaaaatgaaatgagctcattaagagtccacttctccctttggcagttgtaactgaccttaaattgactgaattgtggaggaagagagataagcactaaatgcacaagcaagtcatccgaaagctcaagctttagtgccttcaactttgaagcaaggtgagacatttccataatgtactcccttatattttaggtgagacatttccataatgtactcccttgtattttccttgcccttaaacttcatgga

SEQ ID NO: 277154 - DNA, 570 bp, Cannabis indica
ggtctttcagtttgagttgtatgtagaaatgcaggctttgatcatcctttatcctcaatggttggtatccttccttcacttgatatttcagttgcaaaacagtgttttcttggttgcattccagggcatctttgagtttctgttgcaaatcttcatagttacaattggcagaaatgtagtgtccactggcttcataattttcataattcattcgatcatcgaattttccattgtagaagactaggaatggaatgtctttcctttcctgtgtttttgcaatggttattagtccgaggcaacgaattttaaaactggttttattatgttatgaaatagagtacaaacttacttctatctctgttcctttgttcaagcattgtatttcctgtcctgattcctgattttgccattttttggttgttaataaactacaaagaaacgagaataaaactattaagaaacttcatttaaattttgggaaactaaccatttctcaaactgttctgtcctctatcttttccacaataaattcctgcaaaaaacgtaatgaaactattattaaatgattat

SEQ ID NO: 277155 - DNA, 889 bp, Cannabis indica
cttcttgtattgaaaatataataaaatgttggcacaataaaattacaaaataaacaagttatgcactagacaaattttactagttggaatataagggttatttaagttaaggtatgatgtaaagaaaattttaaaatgatattttaaaaatattttcaagtgaaataaggtttaaggaggattaagtttaaacgataatagcttttagctatggttggttcatatttttaggaattattagcaaaaagggaaaatggtggaatttaatattcagattctaatattattatttaaaattaaccaagtaatttaaagaataataaatacgaagatattgtaataaaaggaggtatcttgtcaaatgcgaatttattgtgttcagatatatttgggaagtcaaattttatggaatttggtttgtaatctatgtggtataggaaggtatcattataaatgtttttatggtaacttaaaaggatacaatttttggaagttttacaagttgtcttttggaaattaaaataggaataattatgtcataatagctaaattggattattttaagtaattttaattcaatatagattgatttgattataataaaattttaccataaataaatatgtataaaaattgctcttttgggataagtacaataaaggaatttctaatattttagaaatggggacattaataatgaattaatatagttgattttgtctattttgggtaggattatggaattaatgggtcattaatgcttaataatcaaggttattttgtttcattgtattgaattacactaatcattgataatcaaggttattgaagtacattattcgttacttactttattattgcgataattttcaaagtaaacttttgatat

SEQ ID NO: 277156 - DNA, 106 bp, Cannabis indica
ataaacctagaaaactcttttccttacaatttcacccctgcttagtgaaaattcataaaattagacatagtctaactttagaattataattgatcaatcacgaatc

SEQ ID NO: 277157 - DNA, 543 bp, Cannabis indica
ttttggatgttttacactctcaacgctaaatgaatgtgatttaagagtgttagtacagtgtgacatattggtctggctacagtgttaccaacacaagtaccagggggtacgttgtgtctgtggtacaacacttagtagtttccgggagtacagttagggctctaccaacacgagtacagaattggtactttagtgcaattggtacagtagtcgtactacccttaagaacgttcttaaccatttggtgagcttgattattgagctcaggacggcttaatcataaagtcggtgttgcaatgcttttatatatttcttgcatatcttactgagtctgttgactcatcagtttgctaccttgtgtaggtaaaggaaaaagcaaagctggaggaacagtgaggcagaactcgacaatgattgtacatatcgcggcagtgcaacctggagggtttcggtcttttactattttggagtctgtaatttggggattgcattctagcgagttagttttaaaaaaaaaaatatatattatatgtacatattagt

SEQ ID NO: 277158 - DNA, 605 bp, Cannabis indica
ccccttcacttgctaaaaagcttcctaagaaactaaaaaactcctcagaagagcaacaaagcttaggttcaagctaataccaaaatgaggttaaaaggtattggaaaaaaggaaaggtccattgaatgtgatgtaccagagggttctagtttttttttttttttttaaaaaaaaaaaaaaagtcatctaccatttaaggtagaggctcgaaccaccaaaatgatcaaatctttaaagaacatcaagtatgtaagattttgagtgtttttttattattattatttttttttttgtgttttttcctgttgtttttttttttttcttgttgtgtgtgtattttttttttcctattgtgtggattttagttgtttcaatgcccagttaaaaaaaaagttatattctagtattgattgagttgttatgcgattattattttaggttttttttttttttaattttgttgtcctttctaaagaaatagttcatgggtttatgtctttcactattctgtttttaattagttattttttagttttcatagagttattgtacgacttttattctagggttcatgagattttttttttaaaaaaaaaaacttgaat

SEQ ID NO: 277159 - DNA, 649 bp, Cannabis indica
cagaaccaagaatccgaatctttatacttacaatggagaaagtcttttccccttaggtatttggcctcaaggatcttacaacataacgactgactcccattcattaaattccaccccatttcgacaaaaaggcaagattcatttctttggttttccgaaaccccagtccccccaaggacttggggaggcacagtttatcccaggctttaagatagagtccatggttccctttctcaaagccccaccagaaatcacgaatcaaggcatcaatcctgttcacaagccggttagacaacttggtggtttgcatagcataaatgggcattgacagaccaacagatttaatcagggtagcccttcctgctttagataacgttttagccttccacccctgaagtttagaagttagattgtcaatgatgaaattaaagtcagcatctttttgccttgatctgaaaagcggcaaccccaaatacttgataactccttccggagttccaatacccagagcttcctttattcctctcctcatcccaaccggggtatttttgctgaaaaaaattgaggttttaagcttgttaactgtctgacccgaccacgtgcagaacttgtcaaggcactcccaataggcttttgcttcacctaggtt

SEQ ID NO: 277160 - DNA, 735 bp, Cannabis indica
agatcgtctccacagggattgcaaacaaaggttgatgtaaaaccaactaattacaacttaaagtaagaggaaataacatgcaaatggttgagtaatgattcaaaattaaaaatgacatgaaataaacttgctaaaattaatactactgctgctagaaaaattgtttgcaagataaaaaatgtaatatgtcaaaaatggcttgaatagctaattccttctaatcaggttttttcccaggtgttacagcattggttcagcattactccagcattctgcacaaagataacaaaattcctctaggcttgtgagaattttccaacactcacaaatttaagtctaccacttagctcaatatattcccatatcaaaccagcaagcagaacactattcaaacatcaattttataagttatgcaaggtaaatgaaatattcctattccacttacatagaaacaacctaaatctaggttattcacttgctccattcaagttgaactactagatctagcccttccggtacaagatctagcttagcaaattgttattcatggccaagaaacaacaatcgaataaaatgaaactcacttgaatgaacaaaggcaaaaaatgctaaagtaagcttaaaaattaatcatacccaacatagaagttcatagccattcaagcctcaaaaatctagctcatagtcaagtaagaaaataaaatccaaactgaaaaaatactcatccatggctgc

SEQ ID NO: 277161 - DNA, 587 bp, Cannabis indica
ctagctcatagcaagtaagaaaataaaatccaaactgaaaaaatactcatccatggctgctgcccaagtttacaatctcacagagtttttactactaagtacaaataacaataaagaaagtaaaaaaaaaaagaaaactattaaagaagggtaaaagaaaaatcaaacactagagcttggtcccctctcctttcttctctgttgtaattctgatgtagttaaagctcctctcaaaagaaaatggcagctgccttacatgttagagaatgatggaggtgtacttcctctttctcttcttttaggtgttgggtatttagggtacaaacttcataccccaaaatagaagcccaaactttttcacttttgcccactaggtttagtcctttttcttccacaacagccagctggagtgtttttagtgactgggtcgaatttgctgaggtgtataagtgaaactcgtgtttccacgtcactgtcaggatgctgaattttcttcagcattgcttcagcaatctgcctcaattttagcttatgttccactcttccttgcttccttttctttttcctatcactttaattcttccttt

SEQ ID NO: 277162 - DNA, 453 bp, Cannabis indica
tcgactaacatattgttcctctttttgatcttaacatttacgtaattttcttccaatgtttctttcctggattaatctgatacctactcactactcccactcaacagcaagtgtctagtctaatgcatacgaaagcatatatgagacctctcactattgatcctaaggaattctttccttagcctttatcttttttggaatagttgaaacttttttccttagataaataaaatctatgtctagaagtttcgaagcttctatagattgccaatagaaaaatgcttcagcatcttactaaagtaagttgcttgtgcattagagtaagtaaatcaccaagtataccaaaagccacaggtttagataatctcaaacctataatattaggaacatgaaattttgttaagtcccttgaatagactgttgggttttgtgccctaaataaaacccatttca

SEQ ID NO: 277163 - DNA, 528 bp, Cannabis indica
ctgcgcggctacgtctcctcgggcttcggcccctggaattcttccctcgcggactgcgagagcgtgaccgcggtatgggcgatcgacgcttgtccttccccttctctaactctgctagagagttctcgattctcttgtgaggttcggccatggcgaagaactctactaaggactccggccttcgagcttgtagttccttccagaagtcggtcctcggcaagatacctgttatcaacatacaaacaagcgaagactcgggggccttctcgacctttgttacttctgcgttaaaacgcttgaaatagtcttgtaaagactcaccaggttcttgtttgatgttggccaaagtcgtatagggtggcctatacgtcattgtggcttggaaatgcgtgaggaataagtcgacgaaggtttcccacgtcgatatcgatgcctcaggtaattgggtaaaccaatcatgagcattttcctcgagtgttgccgcaagaatgcggcacttcgcaagttgcggtacctggtccacttcca

SEQ ID NO: 277164 - DNA, 471 bp, Cannabis indica
aggagacattattccgctgccatcaatgtaaggttttcttaactttatatgtgtttatctattgttttagaaagttcatatttagggtgttaaacaacatacttgtgagtagatctatgatcctggtaaaataaattccaataatctcaactctggggaactcccagataaccgaaatgaagctcggaaaatgagaagaaaggcatgacggtacatcatcgtagaagggatcatgtacagaagaggattctcaatgccattactcagctgcgtcacaccaaatgaagctacacggcttctatatgaagttcacgacagattctgtggaaatcatgcagccggacagagcttatcaaagaaaattctaaggcaaggctacttctggccgaagatgattgacgattcgaaagcttatgtcaagaagtgcgacaaatgtcagagattttcaaagataccaagagctctgcccaa

SEQ ID NO: 277165 - DNA, 549 bp, Cannabis indica
aaacaacaaagcttagctcaatctaactatcatgcttcaaaacaacctaaattaacttcaatctaacaagctttaaactcagaaattaacctcaaattacagcagcaagaatcacatagaaaaccaacatgcatttcacattttcacaccttttcttcaagaaaacaagtaagaattaaagccaagagttacctcaattaaaaattactatgatcttgctaagaacaacttgaatttgacaagaaactccagccctagctgctccccaagcttggccgaacaagagagaaaagagagagctttgtgtgtgtgtgagttttttggaaatttcttcaaaaatgactaagtgtggaaaataaatgaaactaaagccatataataccatttcatttcagccaaataatcacataaataattatttaatttccatttaaaaaatcacataagacaaaatatcattggggcaaaaagaccattttgcccctccatactaaaaccacataaaaatcactaaaggggtatttttgggacattctaaattcccggcca

SEQ ID NO: 277166 - DNA, 553 bp, Cannabis indica
tcaatggttgatcttaggtctatggatcttaatcctgatatggttaggttcaacttagttgtatcatttatgttcttcaagttattcatggaagctaacctatggttctagaagatatttaaatcttggaaacatggtaggtcaattgagtgggagcgctgatcatagatatggaatcaatatcttctataagtatttagaagtaaaacgatgatttccttcaagcttggctgaatagagataaatgattgagatctcatttcagtgattatattagtttactgaaatatcatttataagtaactaagtgttttaaggataaaatatattgaagggtagaacgataaatttgtccatattcaatgtagatcatctatagaggatctttgactattatgattgtaacaatggataatcataatgtatctatatcatggtacatatagagcattctatataattgagagtgctattcaattccaaatctatagtggggcaagacggaatttataagttagggaatttacttagtgaattctagatctacttattg

SEQ ID NO: 277167 - DNA, 586 bp, Cannabis indica
agccaacttcaaaccggaccaagcataaggaaaaagtcagcatatgaagctaagtatgaaaagctaaaagggaagtgtcgaaaagaaaagactaaccctggtaagctccttcaaaactccgcccaccaacacatccagagatgagtcgtcagcaccagccagttgctcaccgacctcaggaaccagccggttcatgtgatgagccatcacctccctgcccttcttgacctcaggcagcacgggcatgggtggagttggtgcctgcatccgctcaggaatcctcctgaccagttcggacccagatgttggtggcccagactccttagacttggcagatttgggagtggaaggatttgcagtagtcagctcctcagaaaggtcaatgacctctccagaaggcctcttctctgaagacccctctccgcccttagacttcttggccggaggggaggcgctagagcttccgctcatcctcttccttaaggcgtccatcatctgccgagacatgtctgcacagagcaaaaacagcgtggttggcaaaaaccaacaaaaatacaaagtatagaaagttaagaagctagaaaaa

SEQ ID NO: 277168 - DNA, 549 bp, Cannabis indica
acgtgtcctccaaacaggagtctggtctcgagtttctaggtgagagaaatctcactatatcagtgtgtacccccttagctaacttgagtccagcaattaatgtttcatactttgctttcattatcaaagcatggaatctaaatttaaccccatgaagccttttcccttatggggttattaaagcaattcctgcaccataaagttgctcggtggataacccatctacgtgtagtttctagatcagcccttgctcttcctttttctctagtttttgcttctgctcttactcttgtttcttctatggcttagcaatatcttcaatcttaagatcttgattgttcgttcattcagccataaaatttgctagagcttgtctttttattgctatcctggttgatatgtgatcatatattgccctagcttaattgcccattttaatagctgaccagatgcatctagtttttataaaacctgtcgaagtggttggttggtgtacaccttgatgggatgagcctagaaatatggtcgtaattgttggaaattatttta

SEQ ID NO: 277169 - DNA, 534 bp, Cannabis indica
gaccaaatctgctaccaattttttttttatgtttttgtacatacaaaagtagcatcaggtgaccatcggaccaccatcggactaccatcggaccccatcggactaccaattttttttttttttttatgtttttgcactaaaaaaatgtatggaaaatttgagaggggtatttttgggttttagataaagtggtcatatattttcaatgatgatatgtattagtttagaaataaaatattaggtatatgtaagtatagaaaatcaaatttcccctttccatattgttagaattgaggtagatttatcttaaatttaggtgccgtttgataatacttttgttttttaattttttaatcacaaaatgaaagtaaaatttttatttttaaaaaatttatttttgaaaaacaaaaatgcgttctgtaactacttttgtttttcaattttaaaaacagaaaacaaaagtgtgttctgtaaaattcatttttatttttattttttgtattttatttaagttgggtctaggtccgcggtcgg

SEQ ID NO: 277170 - DNA, 523 bp, Cannabis indica
gagagagaaatgagagagaaaaacaagagagaacgagagagagagagagagaaccagagaaagggagagaatgggggctgggtttttcagaaaatgaaaatggggaagaaagggggcttcgtgcctcctgatacatatcaatacttttaccggcgcatccaattgcgccggtaaaagtattaaaaaaaaattatttctgacctaaggcaaaacgcgcgtttcacttaacactgtatgcgccggcaaaagtggccccacctaccacataaaacccacgcgggaattttccctccaataaatttggttacttttaccggcgcaaatgtgcgccggcaaaagtataaatgcgccccaaaaatgaaatcaaaggcggcaaattctcgcgcctaatgttttcacgttttaccggcgcatttaacttgatagcgccggtatagatatgttttgccggcgcacatatgcgccggcaaaagtaaacccaaaaaaaattgggattccaaatatttgtttgtgtcgacaactt

SEQ ID NO: 277171 - DNA, 464 bp, Cannabis indica
ccccacacctcacgagcctcgtgttcagtaagccctctctctcgcccttgcgattttctttctccgttagttgcgattttatttctctttaatctgaagtctctttgatgtgtttagatctggatgtggggttttgtttggatctggaaaagaggtttcggtgatggttttggtgtgtagatgtggttttggtggtgtgggcagttcggttgaggtgggcagatgtggtggtctgggtggaggaagggtggtctgggcggagtaagggtggttgtggtgtgggcggtggtctgggcagagtgatagagcgagagtgatggctgagattgagagaggtggggatcgagtgctgagagagagggggatcgagaaagactgtttgcaagaaagaaaagaaaaaaagaaagaaaaagaaaaagaaagaaaggaaaaaaaaagaaagaaagaaaaattatttaattttt

SEQ ID NO: 277172 - DNA, 511 bp, Cannabis indica
ccctcaactccgttgatttcagaagtcgcccatttgctaaagcagtagaagccgttatgtagacctacgctttttatgtcgtagaaataactgaactcttctactgagggagccctatggacgtactccatgtacatcacagagaaggctaggacagtgcgataactgttgggagttagctgaaagggtgatacatcatatcgcctgagaatggctgcgacgaaggggtgaaaggggattgatacaccacatcgaaggatgggtattgagactaccacatcctctgtgggaataatcgcagggttagtaaatggaaggtgcgctctctgagacggtttaggatgttgaaacgcgagtcgcaacaaattcaacctcacaaaggtggtgaagtctgatttggcaaccctcaagattaaatcctcgcacgcgaagggctcgttcagttgggaatcgtcgaccgaatctgtcccactcccttccgcctcctcctcttccccacctgactcgcgag

SEQ ID NO: 277173 - DNA, 533 bp, Cannabis indica
tcctcccacttctcaggtaaagttaaaggctgtaacaacccttccgatctctgatgttcagccttgatctgctgacaggttaagcatctcgataccaattctaccacaatcttcttcatttcgctccactagaagtaagctttaagatcttgatatatcttggtggtgccgggatgtagggaatatggagtggtatgagctttcttaaaaatttcgattctaagttccacactatttggaacacaaaccctggcattaaacaacaacatcccactgtctgatactgtaaaatctttggcttgaccagctgaaatctcttctctaatctttactaactctggatcagtcatctgagcgactttaattcgttctagcaaatcagattgcagtgccaagttgtgaagtttgcctacaacaaactcaatgctagatctgaccatgtcttctactaactaaggtgaaatctgaatcatactagctacctacccgggaaccttcctgctcagggcatcggccactacattggccttccc

SEQ ID NO: 277174 - DNA, 593 bp, Cannabis indica
aaaataataatgccatcaaaacgtcagtccaatgtcatcttactctaaattatgccacataataaaaacataatgaaatcaaaaacaaagttggtctttttagcacgatgtgcatatgcatctaattgtggtgtggctagccgacaaaataactaaaagtagccccttctctaactacttgccttttcttttatttttcaattttattcttgggtgataaaatatgatcattgctttctaaaattatgtaatatttcaccttatgtgccccactataaagcataaaactttcttcatcaaaaaagggttatggagaaccatctcactacaaaaagtccacctttggaggtacttatgttatgcccttgtagagctttgtttaattaaattagacaattcctctcacaaacataatattttatttatattatactattcacagatttaattttcaccccaatttccaaagacaataaatcaagataaataggttttcacaacccaacaaggaatagtgctttattattattattattattatttgttttgtttctttcttttattttttttaataaataatagaattttattaa

SEQ ID NO: 277175 - DNA, 537 bp, Cannabis indica
ctctagtttcccttttatggtgtgcttgattattttattaatagcttcagtttgtccattactctgcgggtaagcaactgcggagaatgccttcttgattcccaaatcgtcgcatagttgtcgcatctctttgcagtcaaactgttttccattgtctgagatgagtttgtgcggaatgccaaagcgacaaatgatggaggtatagacaaactcgcgcaattttgttgctgtgatggttgcgagtgctttggcttcggcccacttcgtgaagtaatctactgcgactaccgcatatttgactccacctttccctttgggtaactcgccgattagatcaatcccccatattgcaaagggccatggacttgtgatagaatggaggttacttggaggttggtgggtatatgtggctattcgctgacacctgtcacacttcttcgcaaacgcgagagcatcttgtcgcaaggttggccagtaatacccttgccgcatgatttttaatgcaagggagttacctccggtatgattgccacaaat

SEQ ID NO: 277176 - DNA, 642 bp, Cannabis indica
aaaaatttcttctgaaacttgaggcgggctcttcctttagcttggaccgatactaactcgccatttccaactttgagcttcaactcctctggattcagataatcccaagtttcaagcagctgcaatgaagaacaaacatggttagtagatccagaatcaacaatccagaaggatttgtcattctctaaaacacatgattcaaaaacaaaagcattaccttcattcgaattgtttagaagtctgggacatcattcttcctgatgtcccttctcattacaatttgaacattgaagagtactaccatcaattgtacttgaagaagcagcattgttagaagcttcatccttaattcttttcctcttacacaagtttgcaaatctgggggccgacattgcaatcaagttccgttcataagctcgcaattctgcttctagcttatccatgtcggaagagttaaaattgttgatcatataagatacaacaaatccattatactcaggaggaagactattaagtatgaactgaacccattgttctcttgataattcaattccaagcaagtttgctttttggaatttccgattcatcattaacaagtgtgagttaatgctctttccaaggagcattttcacactatagagt

SEQ ID NO: 277177 - DNA, 524 bp, Cannabis indica
cctctgacatattctctgtcgtacgacagactttgctttgcccttctctctctctctcctcactgataccgctgtgctgcaaattgcagtgcaatgcaaagcaatgactgttctctctctctctctcactgtcacacacacacattgacccgcgcgcttcttccttttacgagaaaactccaaaacccaacaccatttttaactctctcatttcaaatctattaactttattaaagtgtattaaactaatcagtgttaatctcaagcttaccttcaatggagaataccataactaaaagtgattggttatttttttctttttgtttttttaaaaaataattgggaaagttgcgaactcaaaagatagtgaaaaataattgtttttcttaattgggttgtcacatttatggcgttttcgttttgcccaaataattcacaggttttttcttttaactttcttccactcttctttcttgggacgtttttaacagtgactccttagggtttctctctctctctctctc

SEQ ID NO: 277178 - DNA, 317 bp, Cannabis indica
cccaaaattcacaaacaacaatcaaacatcaatatgacacacaaagcaacatgactactctatcacttagaggatttcaaaaaaaacagagaaggtagagagagagagagtggcggcttcaagatgaattttgagtgaaagaaaataatgtcaaagtgtatgtaaaacctgaagcctttaccttctatttatagaagaccacatagggttatggttgaattacttggcattaaaaaatgaaaaataaatgggaaaagggaagcaaaggtggccggcctagcaattgtggaaacaagccttccacttttccaactttc

SEQ ID NO: 277179 - DNA, 610 bp, Cannabis indica
tcaaagagaaagaaaactaggtttttagctttttaagcatttgttggataatgagaccataactttccttttatactaatttctcttagggttagggttgatttatttagaataaaaaataataaaaatggagaaaaaatacccttaagtggtcggccattagtgggcctaacactagttagatttttgcaatttttctcaactatttatctttttttttcacaaataccactttttgcactttcaaccctataaatgccaaaactatttatttaataattaaaatattcatcaaataaaattatcacttaaaatatttattaattagactccacaaagtctcttaattaataaattaaccctaaaatcctatttcttcacaatcaagccatatcttagtgaaaattcataaactagagatagtctaattttagaattataattaattaactaaaatcaattaactgagtcttacaagtagtttgtctcaactagtatggggaccatgggcctatataaccgaactcccaataagcaggtctagaacttaccaagtaaattctctaatttattaattccttcttgcaccactatagaatttagaattgca

SEQ ID NO: 277180 - DNA, 937 bp, Cannabis indica
atttattatgagacctcaggagattatggtggagggtcagaattttacctgcctgaatccagattatggtgaaagtggtaggagctccatgattgagcggaagaggaaacctacgtcatcagtggtgggtttaagacagaacaagcggttccgaaggtttcaaggcaagggtggacgccagggttattcttaccctgagtgcccacgttgcatgaaacatcatcccggggaatgcaaccgaaaggtatgttttcaatgtggcaaggttgggcattttaagaaagattgcccacaggtggagaaagaagaacaagagcaggaagtggtatttgttcctactccggtgtatgctaatgctcaagctgatgatgcagcaagcccttctgtagtggcaggttagctccctgtaaacgacttcttttatatcgtgttgtttgattcgggagccgcacgtttatatgtagctatgagaataattcattttgggtaggccttggaatattttaggaagagggtttggaaccctagtgcctagtggggagttggtggtctctaataggcgtagtaggtctatgcccgttagaatcgaagatagggagttaagcgttgatcttatagagctgaaattaactgagtttgacattatactggaaatggattttctgtccaagtattcggccagtataggttgtaggcggaaaatggtgatttttcagccggaaggtgaagatccatttgtttatgttggatcaattcaggggtctcggatcccggttatttctgtactgagggctagagatttactatgcagtggctgtgtaggatttctagcagtggtaattgactccagcagacctgaaacatttgggcctgaggcagtcagggtggtgaaagattttcttgatgtgtttcccgaggagttgccgggattgccgcc

SEQ ID NO: 277181 - DNA, 830 bp, Cannabis indica
tgtacaatcatcatcagcagttagctcattctaccgttcagtaagcttttattactttagtagtttatttaattattacgaaataagaaaagcctgataggaagcatgttagtagcctgatagtagaataagcgcatgtttttaatttcaaaatttagcggcattagtaagctctctttgatcatgacctgatgtgccaactcttggtttcgtaggttgttcagactagatggacgccaggcagaacacaaggagtcagggcaactcggtagggtcaaatcagggtcagggagctcagtttcccccgaatgttaggggccgtggtagaggtcctaggggcagggcccatggtcggggtgacgataacccaccacaagctgtccaggctgctcaagccgattaggaagcccagaattgggaaaccaggtttgctgaaatgctagccagaatagaagagcaagataatgagattcagagattgaggcagcagggtgctcctgcagtgccgatgccagaagctcctgtggcacctgcccctgttgctcaggccgagatagtggtagtggcgaacacaatggaacccctgtatgaaaggtttcggaagcaggcacctctagtttttctatgaggtcctgatgtcgtgaaagctgagcagtggctaacggtgattacaaggatactgaactttatgggtgtcaccggtaatgacagggtggtgtgtgccaccttccagtttcaagaagacgccttagtctggtgggacatggtgtctcagattcatgatgtcaccactatgacctgggaaaggttccaagaactcttcaacgcga

SEQ ID NO: 277182 - DNA, 554 bp, Cannabis indica
ctctctcttttcggccaaggcttggctgctagggctgggatttttctgctcaaattcttgtgattttcatctccatctttgtgtaatctaatcaaggtttgatctcttagaacttcccctttgtgttttcttgagttttatgaaaatttgatgaaatgcatgcatgaattgtggctgttgttattgctgtgttttattattaatttctggggtgtaagcatgttaaattgaggtgaattaagctgttagaaatgcatgtaggctaccttgtttcaagtttggattttctagctcaaaaatgtaaattttgaagaaattgttgggaaactgttgctgtattgttgttaatgtttttgtttgttttcagagattatattatgctagtttaagaggatttaagctagtttgattgcatgttaggtggttttgctcaagtttgagtttagaactcaaagcttgagctttaatggcaaattttgtatctgtggtttctgggctattttaatgctttgaaaatgttgaattgggtttgatttggttgagttaggaatttt

SEQ ID NO: 277183 - DNA, 837 bp, Cannabis indica
ggcaatggggatttggttatatcccgaatacccatcaagaaagcaataataagcatggccagctaatcgttcaagcatttggtcaatgaagggtaatgggaagtggtctttcctagtgacactattcaactttctatagtctatacacactctccacccagtttggactctagtagggattaactcattttgttcatttttaacaacagtgatcccagacttttttggaacaacttgaacaggactaacccatggactgtcagaaatagggtaaatgatccctacatctaacattttaattacatcatctcttactacctctttcatgtttggatttaatcttctttgactttctcgggagggcttagcattttcttctaaatgaattctatgcatgcacacagctgggctaattcccttaatgtctcccatggtccaacctatggcctttttatgttttctaaggatatctaacaactttgtttcttgtttttcatctaaatcagatgcaatgataacaggataagtgttagactctcctagaaatgcatatttcaaagtgtcgggcaaaggtttgagatctaactttggtggttcaggagttgactcaacatgctctaatggaatacatggttcaattttggctttccatttttcagtatccattagtggggtagactcaagcaaagaattgacatcatgaataaaatcatcaacatttaagcacattccaaacatttttgcataagtttcaaaagattcattcatgtccatttcaaacatattttccgtgttaatcatgtttacttcatgtatttcctcacactcaacagattt

SEQ ID NO: 277184 - DNA, 723 bp, Cannabis indica
ttttttaatttaaaatcaaaatttcaaaaaacataattttgatgctttaaaaaattttaaaaacattttttttctctctcttgcttttctctcgccttctttgtacgtccggaatttcatgttgtggttgttaattttaacttcagatgttggtaacaaaagtttatagtttttgtttactaaatataaatctaaacaaataccacatgtaaaattacttggcaaattattatatttattattcaaaaccaacttataagctatattgtggtaattatattgtgacaaatcatgattctcatgagagaaccaaaattcatccccatgaagttgtagatgtttgtaatgagcaatctgaaagaaaatttaaagtgaacgagcagtgtctaaagcaatatatgggtggtgaggttgattgagaaaatacctcaatcactttagaggatgcatgaagccaatggtgattgggttgccttgtgattggattgtccattccttttttgaggtaacccaatattagaggaagaacaagtgttagtaaatatttgtgttaaaaaaatttaataaaatgttaaagttaaaattatatataatcatattagagttattttttttttatgtttatttcattttattttcatttttctttttagtttttagattggattttacacttttttggttgctttaggtatttttggagtcataatttggagttttaga

SEQ ID NO: 277185 - DNA, 632 bp, Cannabis indica
atccatctagcacgagatttttcgttcaggtcggccagcacacttgaatctggaaagaaggtaagaactgtatataatgtgtgatatcaatatctgagtgtatgtatatgttatgtgtatatgcatgcttaaagtgttagttgcactaccagcacttgtacagttaaggtatagagtgcattggtatagtgaatgttatttgagagtacattacaatgataccagcacaagttcgggaaagtactgagtgtgtgtgtggtatatcactcagtggtactcagggtatgaaacaaaccctaccaacacgcgtacagtgaggtacctagtgtatgtggtatagtggctataccctagtatggaatgttcttactcatctgttgagccttgtaaataggtgtatgggcgcctaaatacaagtcggaaattatatgatatgttatatgcttttcttactgagtctgtcgactcacagttctgcttccatgtgtaggtaaaggaaaggcgaagtctgaataggagtgaatctgagctggatgaggttgtacatgtcgagacagcgcaacttggagtgttcggtctcgggacatctggggttgtattatgtggtcgctgtgtcggaccctggagtatta

SEQ ID NO: 277186 - DNA, 582 bp, Cannabis indica
cataagagtttattaatttatgttcgacccatccaagattataaaaaataatctcttaattacaatcctttcatataaaggaaatactttttgattccaattacgatgatattaaataattaaaataatttgggaaaaatttggggtgaatttagaattgcagctgaactcagtcaatttaattaaccgagctgcctacataccttcttggtgaaggatcaagccacttgtagttcagattacggtaatttagaatttacatataaggattccggtagatgactattttcaggaatcctttgctatttaaaaatttagaaaaaagttcctaggtggatgaccttttatgaaattttaagatttgtatttttataccattttgcggtatcggcgactgcacttagtcttggcaactaagttgcctacgtatcctttaataggaatcaagtcaaacgtagttccgaattttaattttttatgaggtgaatgacctctcttttttggaccgccatttaatttgttatggttttgaactttagtgcactatttaattttttttaggtaaaattaccatttttgaga

SEQ ID NO: 277187 - DNA, 917 bp, Cannabis indica
acttgcaattttccgtttttttaactatttatcctattcttttcacaaatgccatattttccaattcaaccatttaaatgccaaaactatttatttaacaattaaaattaattatcaaataaaattgctattaatatatttagtaattagactcaacaaagtcttttcattaacaaataaacccttaaaccttttttcttcacaattaagccctagcttagtaaaaattcaaaaataagacatagtctaattttagaattataattgattaattaaaatcaattaactaagtcttacaagcagtattgtctaaactagcatggggactatgggcctatataactgagcttccaataagtagttctagaatttaccaattaaattctctaacttattaattcctccttgcaccactataaatttgaaattgcactctcaaagatcctctatggatgatttacaccgagtagggacaaatttaccatttcacccctcaatgtattttatccgtaaaacacttagcttcctataaatgatattttagtaaactaaaataatcactgaaataagagctcttccatttatctctattaagtcaagctcgaaggaaatcatcatttcacttttatgtccatatagaagttatagattccatatatatatatatttagtgctcccattcaattgcactatcatgttcccaaaatgtacgttcgacccgaaccaaatagtagcctttaactaacaaatcaaagaactcaaataacactcttgagatcgaacctaaccatgtcaggattaagatcttttgatctaagatcaaccagtgacattgatttagaagatacaacggtaagattataatacctttatcaagatcaatatcggtctcagtccaatgtatactccaatcaatt

SEQ ID NO: 277188 - DNA, 590 bp, Cannabis indica
tgccgccagatcttcaatgcaaaaactaccgcgaccaactctagatcatgagtcgggtatcgctgttcataattctttaactgacgggaggcataagcgataacccgatcggcttgcatcagcacacaccccagaccctgtctggatgcatcgcaataaactacgaatttctcgctgtccgagggcaaagctagcactggagctgtaatcaacctctgtttcaactcctggaaactagcttcgcacttatctgaccaaacaaaccgctgattcttctttgtaagttcggttaagggtgttgagatcttagaaaacccttccacgaacctacgataatacctggctaaacccaagaagcttctaatttctgtcactgtcttcggtcttggccaatccctgacggattctattttccctggatccaccttgatcccatctttgctaacaatgtgccctaaaaaggacacctgagatagccagaattcacatttcttgaattcgacataaagcttgtgttcacgaagccgttgcaaaatcatctgaagatgtaactcatgctctccttctgattgagagtacacaaggatgtc

SEQ ID NO: 277189 - DNA, 626 bp, Cannabis indica
gtacttttcctatcatctaagctcccagcccaatcggagtcactgtatccaacaatagacatgttggtatctctggagtaccacaagccaaactctgaagttccagataggtatttaaagatacgcttaacagcagacagatgagactgtttgggattagcttgataacgagcacacaagcctacactaaagcaaatgtcaggtctactggctgtcaaatatagaagactacctatcattcctctatatagggtgggatcaacagactcaccagactcatctcggctaagtttggtagtagtacttaaaggggtaggggcatgtttagtgtgatctaagccaaacttctcaagcatttttctaacatatttggactgtgagataaaaataccttgatcagtttgcttaatctgtagacctaaaaagaaactcagatcccctataagactcatttcaaattcactagtcatgagatcaacaaatttgacaacttccttttcacaagtagacccaaaaatgatgtcatcaacataaatttgagctacaaaaatacctggttgcaagagcttaataaaaagagtgttatcagcagtacctctggcaaacccatttgcaagaaggaagga

SEQ ID NO: 277190 - DNA, 1028 bp, Cannabis indica
tatatgtcaaaattaagggaaacaaatgctaattagccaagtaaaattggcaaagtgtcaagtaaaggtgaactaccactataactcgaagcggacagtctagaggtcgcctctcctttctcaatattcaacacctttttatggaacaaaacaaacactactcttagcaaaaaaaacatctgtccccacacacatttcactgaaagggcctctggtgttagttccatgtggcaaaagctggttttcaagatttggttagaacagtggacttggaaattggatttccaaatgatcatatttatgtaggttttaatgtattttgaaaattttataaaaatagaagtgctaatttttttttttctacaacaaagttgtttccttaccatttctacctcgtgggcttgttaatgttttaaattaatattgagtggtatagctgtgtcgattcggcaaatcaaaataggagtcattctctatgcttgattggataataatctataatttaattgcaagagaattttgttgtagcatgctatgatgctccacttccaatccttattagctaagtaagatatacttaaaaaatggaactgttgacacaattaaagcgtgttacgttaagtctccatcaagtgttatttgtgtaaactattactcaacaaatatgaaagagaactcaagagaaacattgtgacttcaaaagattaagtatgcaaagaatctcttaatattttaatccctcatacccctcacaagtaacaatttgaaatggtcaattgaggcaaacatatcagaaaaataataataataattgggtaaataccattttggaccatctgttttacaaaaattaccaattggaccctgtgttttattaaatgacaaaatggaccctgtatttctaaataagtacaataggacctgaattgatttttattcaaataaagttaattataatccatctaaagtagctatgacaaactagtttacatttttgttatctgttcgtattaagcattgtcttcaag

SEQ ID NO: 277191 - DNA, 603 bp, Cannabis indica
gtcttttcgccttttgagttctgccttttagtgaagatttaatattatgtttaaatctaatttttagttggatatatgctgattattaagcaagtaaattaactcttttattcttttattgaaaaatcaagaattagacaaaagttacattttctctcgtctctctctctctctttcgaacccacctaaaggcagctaggctttggttggttcttttgcatttaaagctggttttagcaaggaaatactgatctcaagttattggtaagattcttgtagttttctctttatttccttaagttgtaagaaatgaatttttgcatgctttgaagtgttgttgctgtagctgctgtagatagttgttgttgtgttctgaggtttagatatgggtttttatgttgatttatgcttgaattagaggttcttgaagggttagtcaagttttgagtttttgaactcaatcttgaagctttaatggtgaaattcgtttcagtgaatggatgattgttttatcacttggaatatgttctttgtggtctatatagcaggtctagagagtttggttttatttggggttgatttgcatgagatatgaaattttga

SEQ ID NO: 277192 - DNA, 1138 bp, Cannabis indica
atgatgactaagtggtatatgtgtaataaaataaactttgtaagtaaaaaagtaggtataagcgtgtatgagtaattttgtaataaattgtataaaattgatttttcatgtaaaaatttcttatatttatatatagatatatagattttttattttctatatatatattatttttttttcaatacaataaatttatatgtatttgataaaaatagtttattatatttaaatatttaattaaatcaaatgtagaaaaaaacaaaaaactgatgtgatttgttaataacatttattagaatcaagaatatattatgctaactttgaaaaaccgactcaaaactaaaatgtcaactcataatagctagaaaagatatttttaacttcaaatactaaccgaaaaattaaagatataaacccaaaaattctagatacatctaacgggtcaatagatgatacatcacataatttgctacataagaaatatgacactcacgaaagacaacccaacaaaaatacttattataattgtgtctaattatttacctattaggttcattaatttttacacaatttatgctatgttcaaaaatatgttgttaacatattgaaacctgatttgagttggtattgaaagaaattatgtaggcttcagttgatgtttaaccaaaatcaaattgaagttgctggcgctaaaagtaaatttaaagcttctattctttataacagtaccattacccaataacaagttctttatgacagagcggtttggagcaagtttagtctttcaaaacataagttcttattgtgacaagcagttaacactcagcttctcacaagggatccttttacaagattttgtattcaattggattcaactctttgtcctgtttgtggtctctttaatgaaagtcatggtcacaattttttcgaatgccacttatctcgaagggtggttgaacttgtgtttcattgggtgggattcaaagcttagcctttggactttgatggctaaattatttggttaattgtgagaagaacagggttcattgccaccatttcttacgctttcttgcattcacggtctttggtataagaatattttttatttaaggaaatatatttctatttaaagaaataa

SEQ ID NO: 277193 - DNA, 593 bp, Cannabis indica
ctctgttgttttgacacaggaagacaataccatttagtattcttaaacaaaaattcacagtaccttatcgtagtggcagggtttcaaggaactcaccctgttatgacttgggagacacttgtgattaaaatccattgttagtttaaacaagtaatggattgtcataataagaaactaagaagcaatgccaagagaactatggttaaaactattcatatggaacaaccaaaagttttctattacaaggataagaaaggaaacttttgtgagtaggtctattcaatagacttaacaaaacttccttttcctggtattataagtttgagattatctaaacctgtggcttgtggtatgcctggtattttacttactctagcgcaagcaatttactttagtaagttgcttgagcctttttctaatggcaatctatagaagcttctcaacttctagacatagattttatttatctaaggaaaagtttcaactattctagaaaagataaaggccaatgaaagaattccttaggatcaatagtgagaggtctcaaatatggtttcctatgcattagaccagacacctgttgttgagtggga

SEQ ID NO: 277194 - DNA, 758 bp, Cannabis indica
ccgaaattttggttcagaggggcgtgtagcaacaggaattccaattcgctcccaggaaaccccacagaatcgaaattcttgttgggaaccagtctaccggttggggcaattttgggaaccctagtacttcccatttttgagatatttagagtattgccatgttatttatcgataggaaaacttttagtttcaagtttaagtccccgaaaagtgatttagtgtgtcacttaccagtgttgtgattgatgtatttagaagcctgtaattcgccgagcagttgttccactcaggttggctggcacacctgaattcggaatcaaggtaagattagtataatattttgcatatgtttatacatttttagcgtgcatgttagttgccgttagtataggcaaatctatagccctcagattagcatattagggcatcggtgaggtgtacaaagagatgcaccgagatgccagcagatatatgctaggctatcagatagtatgaattaattgctatcacatcagtacgattagagtactgagtataggctggattgcggttagtcataccttgtcaagatcgatcctgattcagttagggttatggttaggtgtatgggcgccttattataacccgagatattagtatgtttattatgttatgcttttcttactgagtttgtcgactcacagtgctattgctatgtgtaggtaggggcaaagctaaagttgaggagccgtgaaagcgagcgagatgaagattgtaca

SEQ ID NO: 277195 - DNA, 518 bp, Cannabis indica
tcgtcatgagttgggtgaggcaaacaagaagctgtttgctgccgagaagaagatctccgtgctaacaaaggacctcgaggctgctgatcgctttgagaaaaccatcgagaccttatctgctgaagttgaccatcttcaggatgagaactctgcggcaagttcttcttcagctaaaagaggatcaggatgcccaggtgaccgaggcagaccgtttgaaggagaaggtcaatgctttggagactgacggcctcgatctcttctttgatttttggaaggctaatccccaggccaacttcgactacttgggccacgctaaggacatgtaccttgagtactacgcggccaaagttgcctatggtgggaaagaggtggctgcttcaacctccgaccaagcttctgaccaggctgctgatgcttctcctgctcaaacaacagatcctcctactccaattggctcagaagaaccgaaccgagaacctgggactcaagccgtttgaacacttctctttttatctcct

SEQ ID NO: 277196 - DNA, 566 bp, Cannabis indica
gtggcctatacgtcattgtggcctggaaatgtatgaggaataagtcgatgaaggtttcccacgtcgatatcgacgcctcaggtaattgggtaaaccaatcgtgggcattttcctcgagtgttgccgcaagaatgcggcactttgcgagctgtggtacctgatccacttccattatagtattgaatttttcaagataatctattgggttagaagtacctttatatttgagggattcggatagacgaaacccctttggaagttgagcttgtcgcacttctgtagtgaagggcgaggtaccatgcaacttgtatatgggcttccgttgctgctcgagcattttcaaagcctgcagaagcatgctctggtcaatccctccagtcgcaggagtcggggctgctacgactgcgggagtcgcaactactgcggcgagatttgctgggacattgatcccagtggtcgcgatcggcgcggtaggcgggttattataagtgttggcaccctgatcgtccgcatggggatcacagagtgtcttagtattacgtggggcgagagagcgtgccctaaaa

SEQ ID NO: 277197 - DNA, 500 bp, Cannabis indica
caaaacctgctcaaatcactctaaataaacatactttaactactgaaaacataacccaacaacaacaacatgaacaacaagcaaaacatcaaaaacatgcataattcactctctttaaaatcaagaaactaaaagggagttgcttgagatcttacctagagcttgagaccaccaatttcttacaaaaaccagcttgaatttcacaaagaaaccccaaccctagcttccctaggatttttcgagagagagaaagagagagtttgagagaaaaaacctctctcttgattttcttttctaaatttccaatttttgaataaatgaattaaaacttaacttttctaacgttaatctcagcttaaagtataaaaactaaatcagcttattaagttaaattaaaaaccactaaagacaaagcataaagggccaaaatgaccattttgcccttttcccacaaaacaacaaaaaagagcacttaggggtattttgggaaactctaaaat

SEQ ID NO: 277198 - DNA, 460 bp, Cannabis indica
gtgattgtatatgttttgggtgatatcatagcggcacaacaattgtgtcggttcgacagtataggcatcgtactggttaagagtgatattcaccccagagagtattaattggcgctatcatagcggcacaacaattgtgtcggttcagcagtacgggcacagtactggttaagagtgatatcatggccaattgtactcttgggtgctattgatgctatcatagcggtacgaacatagtgccggtcccgcagtgcgatcatagtgctggtagtgggtgatatcatggtcaatagcaccaaccattaagaacgttcttaatcatttgttaagccttgtaaataggtgtatgggcgcctagttacaagtcaaaagttatatgatatgttatatgcttttcttactgagtctgttgactcacagttctactttcatgtgtaggtaaaggaaaggcgaaagctga

SEQ ID NO: 277199 - DNA, 687 bp, Cannabis indica
gaaaaataatatatgacagggttttttacgtggttttgcagttaaaattctacatagtccacgagtcaatcttattccgatttctgattttttttaggaactctcttgtatgagtttttcatcccttttttcggtcttgtttgtcactatttataattacatagtggaaaattaactacaaagttgaccggaatatgtttacaacaattatccctaaaattgtgggattcgattactatcacgtagtgtaaatgcagtttacgatttgaaaaatgtttagctgtgattttcccgcttttactgggtcaaaataatcgtgtattaaacacatctttagctgtcgtatttggagatgtctcgacagaaacttggttatagtgatcccaatagcgagctggggccattcttctttccaaggttgacaatgtatgtctggtgtcgattgcggttcttatttacaaagaaccattctgactcgccagggttgtaagcctcgttaccgttagctggatgaagctataggaagtcttcccatagcgagatggtcacctcgcttacttgttcttgagccgatccgacttttacacttagtttgtttattgtacgctaagcatctccatgattgatacgagtcgctttctttggtgcctcgctattcgcatttagcaacatatggtttttcgctaa

SEQ ID NO: 277200 - DNA, 780 bp, Cannabis indica
taagttcatcaacgtatgcgtcttccgaatctgcgagttgactgttcatattccgatgttaaactcccaggttcatcattatgtttaggatgtctgcgtccttagatagtcgccttttgtggacatcgcatgacgagctgatagaagctagacatgagagtctatattggtttatcaaggctgcagggttcttaggaccaactcgcatttatagaaagtcggtctcttggtttatacacggacatggggaggatactcgcacataattcgatatatgcgagctactctcttctctcgaatgcgatcagcctttggtcatgctcgctacctctcgctgattctatcttaagcgaggtttgaaactttgaggagtccctcatggacatctcagctttcattggaaatctgagtatacgtgtcctctaaataggggtctggtctcgagtttctaggtgagagaaatctcactataacacatagtacattcagatatttatagaccactgaatgtcaaagctagaggtggttatgagtactttgtcactttaattgacgattactctagatatggtcacatttaccttatgcataggaaatctgaaacgtatgaaaagtttcaggaatttctagcattggctcaaaaccaattggctaaaaccttaaagatcttgtgaactgataggggtggagaatatgtggatatgatgttcaaagatcatttaactgaacttggcattgaatcccaattaactgccccagtactccacaacaaaatggagt

SEQ ID NO: 277201 - DNA, 617 bp, Cannabis indica
aataagcaaagataaaaggaaaaggggtaaaaatcgagaagacaaagtctactctaaacccttaagtgtcattacgtgagacaaagataggtcctcgacaaaaacacgatgaaaagaagcaattcaaaagcaaaaaaaggaagaatctaacgcgttgtacagaaactcaaaaaagaaattcccagaaactcaacatccaaccaagaaaaagaagatgaacagtaaagcatgatatgtaaacaaacaatgaactaaagtacaagatgcgaagaacttacataaagcttgggaactgggtgttggtgttgatcgatggtaaaaagttgattggcaacgacaaaggaaaatgagtaagaaatctatggtgtttgaggtttcttttctctctggaaaacttgagaaaatttggtgaaatgttgaaagtaaccaaatgaagtaagaaggttggcttttataggccaaagcatgcgtgagacagctgtgatcagccaccatcgaacggctgggaaagcaatcgattcgcattctatagatccaacggtcagattgaatcgtcatcaaggcggtagaaacgcttgagtacccgtctgacatccattaatgcgatgtatcaataa

SEQ ID NO: 277202 - DNA, 754 bp, Cannabis indica
aaatctggcctcggttttacccacgtaaaaccacacttcatcattctttacctcagtcactttcattttcctcaacagtagttgatgcacaatcaccccagagaatttcagatcattcgcattccaaaaaactccaaaaggagtttccttcaccctctcggtcaggttaaaggcttcaaactttgctttaattgaagcaaagtacccatttcctcggtaagtgatacgcccaggaaaatgctcagccaaggggagaatgagttctggagccatctgcaaatacaaacagaaagattataaatcgcatatacgtcgcatagaaatcgcacagaaatcgcataacagccaatgaataacatactatatcgcacaaactcgcacataaatcgcacattaatcgcactaccagaaataattacattctgtttcctgttggcaacatatttgaatataaatcgcacacaatcgcacaagacatcgacaaaaatcgcacaaatagaacaattgcagacacagtagtcataaatcgcacaaactcgcacaagacatcgagaaaaatcgcacaaattcaacaattgcagatacagcagtcaattatcgcacaaaatcgcacataatcgcacagaaatcgcacacacaacccacaacgaaacagatcttaaattgtatccctaatcgcacacatatcgcatacacatcgcacaatatcgcacaaaatcaaaaaaaacccccaaaatctatctccctaaactca

SEQ ID NO: 277203 - DNA, 700 bp, Cannabis indica
gaaggaaggacaagtgcaatgaacatacgactaaaggaaactaagaagcgagctcatactgagtggtggttgaatggatcattaaaattatataaggaattataaagggcctgagtgcttatttcccaatgttatgagaacaagtatctataactgatagagtaacaactatgaaactataggtgacactgtaactctatggtggaaattaataaatagaaagttaagcttttgtatgtagtaacattcaacggaagagcatgatagtaaagagaagtttgcataagctcttctaacctactctttgttgtttgttattttttttttttgtattgcataatgtgttctcaagtgacatgtaaggatgttcagaggagaataaatagttttactcttaatggcatgtaaggatgttcataagagaaggaaaacttttataatattacgagcatgcaattgtaggagcatgtttttttattaagtaaagtatagtagaataacaattcttaaataaaggagtatattaaatgtgttataattttaccgataagacaaacgttacatacatgactattgggttcatgtggtagaagaggaggtaatgtggtaggtagaagacacaataccctgagtgcttggaaagttaaatttcgaggacgaaatttcttttaaggaggtagaatgtaatatcaagattaaa

SEQ ID NO: 277204 - DNA, 2002 bp, Cannabis indica
agtgcttgaatatcttagtttttccaacatatatatatatatatatttattggataataacttgctctaaacttttaacatataggcatggaatttgtggaaagatggacaaagtattgagctactattagatgcagcattggctgaaacatgctcaacaactgaacttaagaggtgtgttcaaatagctctcttgtgtgtgcaagaaagtgcatctgacaggccagccatgtcagaaattgtgtctatgattggcaatgacgtgggaattctacctggtcctaaacaaccgggcttttatagtaattattcagacactacagaatccactattcttacttataactccatttcagccgatactacacttacaaacacatcgtagctttgaaataacaattaatatttgtgtaaattatttagtagggcgtggttgtcaagcattattgtaaaagattgacgataagggaattaatgtaataaaagataagctattttgttcggtgttattttggaattaataattattcagtatgaattattatgcataattgaaatggtattagtagcttttgattaaatttagaaaaaattactaattaaaacagaaacattaatctaaaacaaattgataagtactagacgttactttacatttaaatttcttattgcacatggacgcacttctcaaaacaacaacagtggaaattcatttagttcacttgatcctatgactagatgaatactttattaatccctatcatctttgacatattggagatattgttcagtcttagtttagtttcatatatctccttttggtatgggataatttgtaatttagttaattgcaaaaacaaagagcatggtgatgatgtcttggattttgctagtatagtgtatttgtacagagagagtaattttagtattatatatgtgaaatgatctatgacagagtttatgaacatcatctagtgtttcaaatgaagaggtttcttgttgatttgtctcacagttcatgggacaccagtagctacttcaatcaactcaagactctttggaatgagctcaaagactttggtctaattcgaacatgttagtgtggaggtaaaagctgggatgaacttatttcataagtggaaactaatgtcaaattggtttattatgtgaatgaatagagtaaatggctggcacacataatgttttttacacaaataaataactataaaatgcattacaagagtttaatacaaactttggtccatgattactcagtataaatataatatggtttacccgttgacatttgttgagtagctgttttataccaaacttattctaaagattttttatacatacttgtataaaattaaaattataccctccaataataaaagaataaaactagtcacttgagatttgagaaactcatatacaaagtcaaaacttcaatcctttttattcttaaatgttttgcaagtggttattttgtctctactgtaatctttctacgtggtgatacatcttactattataattaagtcaaacctaaatctgtgtttctataaggaaagaaagtacatttgaagtgcaaagaataacggagtaggacacacatacaatgatttggtcttacttgtttgttgctgataaacaagtttaagaacacttcatgaaaatgaataactttccctgttattgataacaaaatacatgtcaattgataacaaaaataaagcctagaaataaggaacgtacaaatttgtttttcttccttgcctggtttacctatatggtttcccatcatatgcggtacatatacttgatgttggtgaagtcatgaaagactaggatttcttagagtaaagttgtttcagctacatcacgagcaaggccgtcctaaatattttagagatcatattctaatttttaaatttaagcccgtacaaaaaaaatgatagtgtaaagtctttttttggcaagttaggtgtcaaaataattt

SEQ ID NO: 277205 - DNA, 538 bp, Cannabis indica
agcacctccccttaatttttctatatcccaaaatttcaaaatcactcaaacaatattctcaaatactcaacactacaatacaataataacaaacccaatatcaacaatattcttgcacaacacacaattataccacccaaatctagaaaaagttaatcaaattccttagagattgaaggaagtgatacttacaaacccgaagaagctttactccacctccattgttgaatgttattgaaagcttgaggttgaagatgaaaacaatggtgatttttgaatttggagtatttgggtgatttttggtatgggatttgatgatatgtgtagattgatgagtgaaattaggtttttgaattgattgggtttaagaaatttaagaaaaaatgaaaagattgaagattggtgatgaaaaattgaattttcgagaggaaaagggtagggttcggctgagaggatttgaaaatttgaaatttttggtgtagggttgaatgagggggaaaaatttgaatttatagaaaattcgcgagcaagtcgcgac

SEQ ID NO: 277206 - DNA, 522 bp, Cannabis indica
tgcccaccgagaccttgaaaaactatataaagaggttccgagaggaggcctcaaaaactaagaaagttgatgacggacaacagcttgcgcttctccaggcaggcatccgtacagggactcccttctggaatgaactacaacaagagggggctgctagccttcaggacttccagaagagagtccaaaaatatatcaaccttgaagaagcccaaatagtggcctatggaggatactatcccaccgggatagcagggtacatgcccggagtaccgccctcgggtactgccccgaccgcggctccaccgataagcggcatacagttctctgccacccccgggtatagtcagggccaggctttggcgcccgcatcatcccattttggaaacccctcagggatgaatggacaagctccctcgcactccgctccgaccgctagcctggcaggcccttcccagggctcgaggagtaagagatcctccaaaggcagcacccggacggggagaagcgccagaaagggggtac

SEQ ID NO: 277207 - DNA, 511 bp, Cannabis indica
aaaagatgaccaagaagaatcaaggacagtggtcccaaggacaacaatttagtgggggtagcactagtagtggttcatctggaaagactcgtagtggaccatacgggtgtttcagttgtggtcaacaaggtcataagaagaaagattgcccgcaacgacaacaaagatttcaagcatctcatggaggacccatagggagctatgtagagtctactccttttcatggacagcccaggacaaaccagtctcagtcttcatcctatggtttcacaccccaatcgggccagcagtctcagtatcaacatcagttcaggccacaaggttcagggttcaacatggggtactcacaaggtttccaaactcctgctcctagtgggagtcaaagagggtacaatcaaggtggagggtctggtgcaagtacaagctaccctagtcagggaaggggaaaggcaaaagcaaagtcatccgctcaagcctacgctcttggggttgatgatgtacagggcggtgc

SEQ ID NO: 277208 - DNA, 558 bp, Cannabis indica
tgaattttggtttgtgaagaaggctatggtatttcgaaaattcaaaaggaagaagaagaaggaagaggtctcatcaaacctagagagaaaaactaggtttttagctttagaggcattagttggataatgagaccatagctatccttttatactaatttccatagggttagggttgatttatttagaataaaatattgacaaaaaatggagcaaaataagcacatatgactggccacttaatgggccccatacaaatttggtttttgccatttttctcaactattttatctatttttcacaaataccactttttacaacttcaaccttataaatgccaaaactatttatttaataattaaaataatcatcaaataaaattgtcatttataatatttattaattagactccacaaagtctcttaactaataaattaaccctaaaataccatttcttcacaatcaagccatatcatagtgaaaatttataaactagacgtagtctaattttagaataaaaattgattaattaaaatcaattaattgagccttacaagcagt

SEQ ID NO: 277209 - DNA, 512 bp, Cannabis indica
gacccgaatcctgacatggacccgaacccacacccggacctgaacccagtccaaaacctaaaagtggacccgaacccgtaccctgtgacccaaaattggaaccaaaaccagaagttgaccgggactggaactaggacttggacttgcactcataactaaaatttgacctagatccagaaccgtaaccggaccaggacccggactctaaatcagacctagacccgaattgggagccagacccagatcccaaccaaaacctggactcaggttccgaacctgatgtcagacccaaacatggaacaagactagggacacagaaccagggtcgggacctagaaccgcaccccagtctcgatcccaaactcaaactcagaaatgggacctgggacctgaaccagaaccagaccgaaacccgtgacagtgatccagatcttgactcgggattcaggtaacggggcctggacagaccagtagtcggtgtctagatctgggactcagactaggaccagaac

SEQ ID NO: 277210 - DNA, 536 bp, Cannabis indica
ataaaaaaaaatctcacaaaaagatgatatataaaatagagaaaattatgcaagaaaataaagctgaaacttcatgcttaaattcaactatgttctgattagattttggaaaaagtcgaaacataaaagctctagatctctcttttatcttcactaagcatcttgaatcgtccaattcaaagtaatatagagagagttatggccaaaatactatcagtcaacgcagcagattactcacctcctcttctaatcctaagcagaataggttttctaatcctaagtgtgagaaattattttaccaggatctagatttactaacaagtatgtttgattaacaacctaatatgaattctaaaacaatgaaaataaacacatataaagtttacgaaaccttacagtgggtgcagcggaataatatgactccttccattcagatctctagcccttgattcctttctgtagcaaagcataatcaagatctgaatctggatcttcttttctccttctttgatgtagaatttccatagtcttacata

SEQ ID NO: 277211 - DNA, 546 bp, Cannabis indica
acatgagaaagagatgccccaggaaaactagacaataggactttaatatcagaaaagataacccccagttcatttaaatacacagtctggccctccaaagctgagaccaaagaaagtgaatcagaaaaaactttctccacgggaagtcccacatcttgagcccaacgcaatcctactagtaaagcaactgcttctgcctggaaaactgaaaaggaacctgcaaatgagataattaaaccaataagttcatttaaatttaaaactcaaattttagagtataattgttatagagtcaaaaccaaagggaaacccctttggtttgactctttccctaacttttaacatgataatataatagtataaatttaaataacccctatgcttaatataatagtagagacagccagttaatacttaatccaaataagcttgatgcttgaaaaaaatattaatcgtattaacataatatataatggttatatcaaatatttaaattatatttatttttagttattaaataactattaaatgattgtaattaattta

SEQ ID NO: 277212 - DNA, 620 bp, Cannabis indica
ttccccttgtcttgctggtcttggccaacttcttagaaaaatctgcggcaagagaagccaccacatcgctcttcctcttctgggtgaaaacgagcgaggtcgtcgttgctccacccttcggcttgatcttaaggacgggcgcggacttcaaaaaagtcatctctgcgaggataaatgaaagataagtgtaaataaaactcaagacatcagtttataacaagagataaattacctgagattggtcgagaagttttcttggagaggcgtttgtctatccgctcttgttgcctctcagacggttctttgtatactggctctctttgaagacttgcgttctctggaatcagctggtgttctcgcagcttggcagtcgtacacagtaatcgccagtcgcgatcttgtaccggaaggctcccaaggatttcggctgtttctctgcgagttgcgtcgagtgccggtcgagctggtctatctgcgagaacaagaaagagcgagttagcataagatctcaaagtaactcagaaaatgcctaagttaagaaacacgcgacatactaggtctgcgattaaagtcagttctaatcccagggactttaaagacgtagaaccacttcgatttcc

SEQ ID NO: 277213 - DNA, 846 bp, Cannabis indica
ctgtctgcttgagtcagtgagtagtgtgagtatcgaatgtgttctctccagcgtctatcgtatggttccttttatcgtgtgttctcagtgctgttgccctctgtccacgtcacccgttggactcgttcaaattggttacttccctaattattagggagtagtaaccgtcttcttgactggttccatattaacttgatttcacccgtttggctgactggccgggctcaaacccggttgcgggacgatccggcttgtggcccataggctcactcgttagtctatttcaaggcctagcgagtccgtctgactgtcttattgggcccaatattgttggatccattattgatgggctcgtctgacttgcatattggacttctcaaaaatatcataaatattaagcaaatttttacctctacagtttgtccctcactctctagctagaatttattttagctggagagttattaataccgaattaggtgttggccaagagttttgtctaagtaagcgttgtacgcttgtcttgctgtttgagacaagaaaatagtctgaacggttcgagcatggtggttgggtagtccttgtcgcatgcgtgtatgtggctaccttggccaataatttttgtgtgatcaattagttcttcaaagagattcttaactagaccaagtcgtcttgttgggtcaaataaaaaatatttggctgtctatctcaaaatatgagatgagagtagatagacgtacatgtgtatgaggtgtaagtaaatagacatttatatgcatatatattgtagggagatggatatatatttatatatatgaatgagaggaggtagacagacataatata

SEQ ID NO: 277214 - DNA, 504 bp, Cannabis indica
cggtgggcagttgcttgatattagtcaaggcactgacctccaagttgacctttcttgcggcgacaaactgtctccggaagttggtctgaagcttgttccaacagcccacggaccctggttccagttttttgaaccattcctccgcggacccacttagagtgagtgggaagcacagacacttggcgtcattgctgaccctcatgaccgtcatgacacggttgaaccgtgacaggtggtcgctgggatcggagttcccggtatatgccgccatttcgggcatcttgaagtttttagggagctccgcctccaggatgtgcttggcacatggctcccgatcctcgctgtctgaatcggagtcgtctcccttctgcctccgggagactcgagcaatgtcttttcggagtatggcgagttccgccataattccttcatttaacgtacccgaggaaaccacgggcccgtatcttttttggtcaaggtgatcccggaggtcaccttgattcc

SEQ ID NO: 277215 - DNA, 567 bp, Cannabis indica
agttttccagagagaaaaaaaaaattcctcagaccaagaaaaaaccttcgaacactttacaaatttctttgctatccttcgctcactactgtcagtctacacttctttgtttgatcaacagcacacccccagttctaacacttcattgtaagtttttcgcatccctcactttactgtttgtgtttatggcatgctttactatctgtttgtttttctgggtttgtgtttgaagtttctgggaatgtattcccttgagtttttcacgtaataggtctagtttcaccttctctggtgttagggttacgcttgttacgcactgttgttatattttgtaaagaaccatacactcttcgtgtggtggccttcaagggcatagagaagacttcgtttttctcgactttctgcccttctttctttttctttcatgcgcgatgtcaccatttgtgagatctttgcactcgacttttgtccagaaaatctttctaaggcttcttgttgacagatgtccggagggggcctctttccagcggttaggggacccccattcccttttctgatttagggttt

SEQ ID NO: 277216 - DNA, 606 bp, Cannabis indica
caaaatgtatgtcgatgattctcgacaaatttaataccatgatccttgctatctcatgttagtttattgctattgcccctgattttgcccaaaatacttggaccaaccggatgatgacacgtggatgggaagggtttagcaattaaataaaacagctaagtcttcttgaaagcaaaggattatctcagacatgcctcccaaagaaggcatgtaagtctcatgtgctcccagagagcaagatggccacaaagcacctccgagtggtgtcagattctatctgaacagccatctcgcatttaataccgcatgggaggaggcgtattggaactgccacacgcaataaagtctgacgacacaacccccgatctgtacctactaggctatgaccaataaagtctagtgacggctattctgtgaggaatcacatcagtcaaaagggattaaggactgccctcataaaatccctacaacacctacggattagaccatgcattacctatgataaattcattggtaatgtgtgactttactgatagttacagaaatgcatgtaccttaattctagggatcaccccacaaaaacactataaataccccccaaagctc

SEQ ID NO: 277217 - DNA, 479 bp, Cannabis indica
aataatcgggattcgagacccctgaactaatccaacataaacaaatggatcctcaccctccgactgaaaagttaccattttccgtttgcaatcaatgctggccgaacacttggacagaaaatccatcccaagtatgatgtcaaattctgttaattacagctctactatgtcagcactcaactccctatcttcgatcctaactagcatagacctaatttgcctattaaagataaccaactccccgctaggcaatagggtttcgaaccttcttttgataaaatcgcatggcctacccaaaagatcaattactgtgttgccacatatgagtgtgtagctcctaagtcaaataatacagtataaaaggagttgttgacaagaagctaacctgtcaccatagaaggactggttgtagcatcagcttgagtgatggtaaacacccgagcagggacgggttttgcctttgacttctgctcttcttt

SEQ ID NO: 277218 - DNA, 696 bp, Cannabis indica
gagcctctctctctctatacctagccgccactctctctctctcttcctccttgagatttcgaaacacttagtgattagagtagtgcccacacacagatcctcgtaaaataatttccaacacaatcaagataccaatcacgtactcctagcaaaatcacttgatgaaatcgaagaaagacgagccactgcaaacttaaagttgatggcccatcaacaaaaagtagatcgatatttcaacaaacaagtaaaggctcgtaaattcctcgttggagatatggtcctgagaagggtattcctaaacaccaaagacagtacggcaggtgtacttggacccaactgggaaggaccatataaagtggtcgaagttctcgaatccggagcacacaagttaggtaagtatgacgaaaaaatgcaactcattctagcaccacggtattggaatggggaacatttaagaaaatactaccaataaagtaccaggtcggatgaccacattaagtactgaatgaacatttacttttaagtgaatggcatgttgggcggactacgctcaaaggttttgataaaagaaacaaagtactcaggtcaggtgaccattttaaagtacagtttcttatttttgtaatttgttttatttcatgttaagctaaaagatcagattggatcaaatagctctgatgtaagttactacggtaa

SEQ ID NO: 277219 - DNA, 683 bp, Cannabis indica
aagtttcaatcccgatcagagtggggatttagttcgagtccaggtctggaccccgatctgggtttaggatttggtccaggtccaagttcgggtcccgagtgcgggtccaagtttgggtctaggtcaggatctcggtcctcatctaggtgacgcattttgatcctagtttgggtcttggtccgagtcaaggttcgtatccagatccctatctaggtctaagtctgtgtttgggatcgggtcccagatttaggtccgggtccgggtctcagttctggtctgggtacacgatcgtgtcctggtccgattccacactcagtttggctctaaggcttggtctgtgttcgattctaggtttgggtccgggtcctgatcacggtcctagtcttgttctaggttcatggttcggcgattcttttttaggttctaattttgggtccatggtctaggtctgggttcgggtttgcttcttcgtctaggttctggtcctaatctgagtcccagatctagacaccgactactggtctgttccaggccccgttacccgaatcccgtgtcaagatctggatcactgtcacgggtctcggtctgattctggttcagatcccaggtcccatttctgagtttgggttcgggaccaagactcgggtgcggttctaggccccgaccatggttctgtgtcccta

SEQ ID NO: 277220 - DNA, 117 bp, Cannabis indica
tcggaatggaccgatattgaactttgacatagatttaataaacttaccgtaatatccttatatgattaggttcaatctcaagagtgttattcatgttctttgatttgttagttaagc

SEQ ID NO: 277221 - DNA, 509 bp, Cannabis indica
tgaaacttttcaaacgtttcagatttcttatgcataaggtaaatatgaccatatctagagtaatcgtcaatgaaagtgacaaagtactcataaccacctctagcttcgacattcagtggtccacaaagatctaaatgtactatgcctagtggttgtttggcacgctctccctttacagagaaagaacgttttgtcattttgccttctaggcaagattcacaaactggtaattcacctaaggtgacatttttcaatggaccacctttgataaatctgtgaagtctatcacagcctatatgaccaagacgtaagtgccatagatatgtttcgtcttcattatcgatcttttgatttttgtggtttctaggtttagctaccttaaacagttcgttatgaagcgcaaatggttcgtctggtcttagaacataaagcccctgttccatagatgcaacacaaatttgaatgtcatttcgagaaatggtagaagtgcaaaccttgttttcaaggtg

SEQ ID NO: 277222 - DNA, 466 bp, Cannabis indica
cttcttgttgattagattcttcacaatcttccacactatgattgatataccacttgatgtgtgtgggcactaactcattcactcaaggtttgaaattgaagaggaaaagagaaggaaagtggtttggcctatagagaaaagaataggaggctcaaatttcatttgacaaagttaacaaagttaagtgtgatgtgagccataccaatctatttataggtagctacctaggtttaggttagaattatttggcattaaaataatgaaaaaataaatgataaaatccatttaagtgtggccagccatgggctttggataatgggccttactcatgcaattttgctgctttatcatttctgcatctcatttttaattagacatataaagtctcttaattaacaaataaaacctagaatctcttttcttacaatttcgcccttgcttagtgaaaattcataaagtagacata

SEQ ID NO: 277223 - DNA, 882 bp, Cannabis indica
gtgattatgtggcatttgtttggctgaaataaagatttatttatgcatttactttcattttattcaaaagtttgaaagttgagaaaaaccaaagttaaaagaaaaatctttttctctcaaattctctctctattttcggcccctttgagcagcaaggatttgctccttcttccttgagatttcaagctttgttgtgttcaatccaagctaggttagctcttactcttcctctctttaaaattcttgaaaattaagaaatgttggtagttgcatgtttaattttgaagatgttgttgctgctgtagttctaggttattttctgtgatttttatgcttgaattgaatggattaaagtaggtttcatgcatgcttgttgttcttgtgtaaagtttgggaattttggttcaaaagctatgattttcaaagtaattgttgattttcattgttgtggttgctgctattgttgagtagtgagtagtgttttctggtgtttaattatgttgaaataggttgagttatgtatgatttagtggctgtttggaggtttagtcaacttttgagtttttgaactcaatcttgaacctccaatggtgaaatgtgttcctgtgcttgaagcttggttctattgctttggtaatgttctttggggtatttagaacaggcctggaaggtttggtttggattggatttgatttgagggagttatgaatttttgaatgattcctgcaaggaaccggaattcctgatgtgcaaccggaattctggttgtgcaaccggtctgccagttgggaaatttttaggaaccctagtttttctcgtttttatgttatttagggtattgccatactttttatcgatagggaaacttttagtttctagttt

SEQ ID NO: 277224 - DNA, 345 bp, Cannabis indica
tccaaattaaactaagcggtctttacactagtgatgaggatgatgctactacaaacttcttttagaatatctattttaattttacgaactatcggtaaatttttgttaatattttatgaacactaatttatatttaggtatgcagtactataatgtttatgactcactttttattctaatattagtgactctaaatattttcttttagttaaatgatttcatatcttaattaattcaataattttatatattaattaattaattaaaaaatataaattcaaaataattatttaatttaataattttaatataatattatatattaataattaattagaataattt

SEQ ID NO: 277225 - DNA, 664 bp, Cannabis indica
gattcaaaactattattagcagagatgttatttttaaagaaaatgaatttccttgtttgcttaaggctaaccctgcaggtacagtagaaactaaccatgcaggtacaatacaatttgatcctactctatggaggctagatgatcaagaagaacctgatataaatcaggtggaaccagttgggaatgaacctgatcaggatcaggtggaacatacagaaaatcctaacagagaagggacacaagatgaagagcaacagggagatgaaactgaggttgttcaacccactgaagctctagatgactaccaattgaccagagacagagagaaaaggacacctaaacctaatcctaagtacagtttcaatatttggaatgaagacatagcctatgccttcatgacagccatgaaatctctaagtacagaacctcaaacctatgaagaagctatgacagggcctaatgctaagaagtggtttaaagctatggattcagagatggtctctttaaagaaaaacaagacctggataatggttctaagacctaaagggaaaagaataatagcctgcaaatgggtttacaagcataaagaaggggtaattgaaggagaacctataaggtttaaggctaggttagtagccaagggatttacacagaaagagggagt

SEQ ID NO: 277226 - DNA, 705 bp, Cannabis indica
gaaaaataattccaagtttaaagactgcttggccggtcatgatgtcttaaaggccttacggccatatataatatgtatataaacaggagagataaaaagatcaatggtcaaacagctggagtcccaggctctggatttggttcttctgagccgactggagcaggaggatctgttgttcgagcaggagaagcatcagcagcctggttagaagcttggccggaagttgaagcagccacctctttcccaccataggcaacttgggtgcagtactcgaggtacatgtccttggcgtcgcctaagtagtcgaagttgacctggggattagccttccaaaaatcaaagaagagctcgaggccggcagtctccaaagcatcgactttctccttcaagcggtccgcctcggtcgcctgagcgtccttatcttccttcagccgaagaaagacctgtcgcagagaagtcctctcatcatgaggacaatcaacctcagcagataaggtctcgatggtttcctcaaatttatcagcaaccttgaggtccttagttagcacagtgatcttcttctcagcgacgaacaacttcttgttggcctcacccaacttatggcggacagctgcagtctccgccctggcctcctcaacttccttcttggccaagtccacctccgccctcaaggtgtcgaacaaagccgtactcttcgaagcagca

SEQ ID NO: 277227 - DNA, 595 bp, Cannabis indica
ctttccttcatttcggttactttccattccttgccatttctgctcgaatttctcagagagaaaattcctcaaagtagcacaaactgctttaacacttaaacacttcttttaattttccagtgttcggttttgccagtgcctctcaactctcactcaaccatactcagtacccccagttcaacaatcaactgtaagtttcttgcatctttagataataacatgcttacatttactttgtttgttttctgggttcgcacttagagacttctgggtgtgtgagtgtttgagttcttcgagttctgctttatgtttactgtgttagttgtagagtcgccattgtcatgcctctgttgtaggcgtacagctttgtttgaagaaggccatgtgttcttcgtttagcaattgcttagggcataggaaggcttttctcttttcttttcctttttgcaaaaccacttttctgcgattttactgcacccgacacttgttcagggattctctcttgagtttcccaggtgacacgtgtccggagggggcctctttccagcggttaggggacccccactcccttttttctgatttagggtttggtatg

SEQ ID NO: 277228 - DNA, 521 bp, Cannabis indica
ctttaaaattcgtgaaattacaaaactgcccaaaaatcccgtctctgggtccccgtcacgactggcaatgcccccatcgcgacggggttaagctttgaaactttgagattttctctgccaatccccgtcgcgactaggatatttcccgtcgcgacgggattgggcagcgacaaaattttttggttttcttctcgattctttcaccgcgcgtcctcaattcttgtacatactttctttaaacaccctgaaagaaaagaatctagtgtaaaatagccctaaaactaaaaataaagagtgaaaactaaccgaaaatatgacccaaaacttagactaattttagcctaacatgttgttctctcggcaaggcgtgctcttgatcaatatcaaattgctcaatctacgaaaaatgattctttattattttttcgtggtgatgatagagttgttgagcattggaaacctcctaattttaaccagatcaaggtcaatgtcgatggtgcaattttttagcagtgggggcg

SEQ ID NO: 277229 - DNA, 658 bp, Cannabis indica
gttataccggacatgccggggttgaaccgaaaggttgctgtgcacaggttggcagtatcaaaagatgctacccctgttaaacaatctcaaagaaggattcgaccagaattacttcccaaagtcgaggcagaaatcgacaagttaagagactgtcagtttattcgggaagttcagtatcctacctggcttgcaaacatcgtcatagtgatgaagaaaaacgggcaactccgcatatgcgtggattatcgagatcttaatcgggcttgcccaaaagatgaattcccactccccatcactgagttattgatagacgctaccactggttttgatgccttatcattcatggatggattttctgggtacaaccaaatcaaaatggcacacgaggacgaagagctcactgcttttcggacaccaaaaggcatattttgttatacagttatgccatttggcctcaagaatgcaggggcaacctaccaaagagcaatgaccacaatttttgaagacatgatgcacaatactgtcgaatgttatgtcgacgatctagtggtcaaaacaaaagaaaggacaaaacatcttgacgatttaaaacgagtctttgacagactcaggcaacacaatctcaagatgaatcctttaaaatgtgcatttggggtaa

SEQ ID NO: 277230 - DNA, 656 bp, Cannabis indica
tcatcctttgctttgcttggccaaacccccacaatccttctcttgctttcctgctgcacccgattgacaattactgtggtttgccactgtttttggttccatagcacatcattgcgtgcaccccatatatgataaaccaaggcagctaacatagttaataacatgctcttcctggtggctgacacaccttttttcttgttgatgagatgcagcagctgctgcaaatccgtggctttggtgccccattgcagccgtgtcttccactctgtaagacatttcccactatactcacactggaaaaaaaggtggtgaattgattcattctccttcccacataacaaacaagttaagtccacctgtgtatcatatttgcttatcctatcttttgttttcaatctgtcccacaaaattaaccacagaataaacttgtgtttgggaataacaagcctatcccacacatgtttactccactccttcttctcgggcctattaaacaactcatgatagatgctggaaatactaaatttctgcataaggaaagttgctcgatccatcttacctttcacttgatctctaactcgaatcaattttttcaaaaccagctgcaatcagtgggaacttcataatcccaccagcacctatctttcaagtataca

SEQ ID NO: 277231 - DNA, 637 bp, Cannabis indica
tgtagaggattggctcttcccaataataatgtttcacctcagaaaagaacttcttcaattgttgacgtgaaaactcaggaggggttatttttgcagccaagaagttgacataattagcataccacggtaccatcaggttttccctcacactaaagagttgttcatcaggaaattgctcgtttatctgtaccgctttcgtattctgactctcttccagttctaatcttgacaggtgatctgctaccagattttcagtgccctttttgtcttttatctctaagtcaaactcttgaagtagaagtacccaccgaatcaatattggctttgcatccttcttggtcataaggtatttgatcgctgagtgatctgtatagacaataaccttattcccaattaggtagggtcggaacttatcacaagcaaacacaattgccaacatctctttctctgtagtggcataatttaattgagcatcattcagggttctgctagcatagtagattgtgtgaaacaccctgtcaaccctttgacccaagaccgctctgattgcataatcactcgcatcgcacatcaactcgaaaggcaactcccaatttggtgaagtgactatggtgctgaaatcaatttttcctttaga

SEQ ID NO: 277232 - DNA, 803 bp, Cannabis indica
gatctatatagacaataaccttactcccaattaggtagggtcggaacttatcacaagcaaacacaattgccaacatctctttctctgtagtggcataatttaattgagcatcattcagggttctgctagcatagtagattgtgtgaaacaccctgtcaaccctttgacccaagaccgctctgattgcataatcactcgcatcgcacatcaactcgaaaggcaactcccaatttggtgaagtgactattggtgctgaaatcaatttttcctttagaacctggaatgcctttaagcaatcttctccaaactcaaataaaacaccattaacaagtaaactggacaatggtttggagatctttgataagtccttgataaatcgtcggtagaaaccagcatgtcctaagaaactccttactcctttcacagaaactggaggtggcaaattctctattgttgaaactttagccttgtccacctcaattcctgcttttgaaattttgtgtcccagaacaattccttttgttaccataaagtggcacttctcccagtttagcaccaagttagacttctcgcatctaattagcacattttctaaattctctaagcaatgattgaaggaggagccaaagaccgagaaatcatccataaagatctcaatacaggattcaattaagtttgaaaagatagccatcatacacctttgaaaagtagcaggggcgttgcacaatccgaatggcattcttctcaaagcaaaggtaccgtagggacatgtgaaagtagtcttttcctgatcttcaggtgct

SEQ ID NO: 277233 - DNA, 611 bp, Cannabis indica
acgaaaacctatatcacataattgactaatactaagcaagttatgtttaagattatcaacaagaagcacatttttaatacatggagagtatatgttaccgatatcaccaatgcccaagatttttccttttgaattgtctccaaaagtgacaaagccactttccttgcttttaaagcttgaaaatcttgatggatcaccggtcatatgctttgaacatccactatccaagaaccataagctttggctctttcttgttgattcctacaaaaacaagttcatttgttggcttttggtacccatataactttgggtccattcatgttagttctagaaccctttggtacccatttagtcttgcctagatatgcaaatttctttacatgacaataggaaatagtatgaccatctcggttacaatatgtgcatgtaaagtgaggtagactagatgatttcacaaaaaagtttctcaaaaatttttgtttcttactaggatcataaccaataccattttttgaaaaaccacatgattggtttcccaccatgagatcatagccttccttacctctagtgaaggtatatatgtcattttttaggcttctcacatgggcttt

SEQ ID NO: 277234 - DNA, 581 bp, Cannabis indica
caagttgaagcagtcaacaaaacattgaaggacaccctgaagatgaaacttgaggacgctaaaggaaattgggtggaggaacttcctgaacttctatggtcgtaccgcacaactgagaaaatagcaaccggatagactccattttccatggcatatggatatgaagctatcctgcctgtagaactcaaaccaccatcccagagaagattaacatatagccaagaggccaatcatgtactccttgcagaatcacttgataaaattgaagaaaagaaaactgcagcaaacttaaaactcatagcccatcatcaaaaagtagctcggtattttaacaaacaagtgaaagcaagaaaattctttgtgggagatatcgtcttaagaagagtatttttaaacaccaaagatagtacggcaggtgtgctcgcaccaaactgggaaggaccttatcaagtggtcgaagttctagaatcagtggcatacaagtggggtaagtatgatgaaaaaatgcaactcattctggtaccaaggtattggaacggggaacatttaaaaaaatattaccaatagaagtaccaggtcag

SEQ ID NO: 277235 - DNA, 630 bp, Cannabis indica
cctatttaattctactcaaataagcatgaataagcttctgaaaacatataagaacaacagcaacaacatagtacagattacacactattttcatcaaaatcacacattttgcatagaaaatttccaagctttgcacaacctatctagcatgcattccaacctaactaaacataattaatccagtatttgaacataaaaataacaacaatcacaagcagcagcaacaacattcaaaattaacatgcatttactcataatttcatcaaaactcaagaattttaaggaaggaagaagatgagctaacctagcttgcaaaggatcttaagaatggatgaaagttgcttggaaaatcaaagagaaaatcagttcatgcactccaaatgcttcagccgaaagtagagaggaaaagagagtgtttcttttgaaatttttcttttaatttttctaagtgtgaaatgagagaaaaaaggaatataagccacattactcattttatttcagccatgtaataataaaataaacatttatttttccatttaataaatcacaaaagacaaaacactaatggggcaaaaagaccattttgcccctccaccataaaatcacataaatcatactaaaggggtattt

SEQ ID NO: 277236 - DNA, 465 bp, Cannabis indica
ttttatggtggaggggcaaaatggtctttttgccccattagtgttttgtcttatgtgacttgatgaattggaaaataatgtttattttaatgttatgtggctgaaagtgttatatgttaagtgtatttactttattccaaatttttacaaaattactaagtaaaggaaaaatagaattttcaaagcttcctctctctttctttcctctcattttcggccaagcttagggagcagctagggctggattttcttggtgaattcaagttattttagcaaaatctaagtaatcctagacaaggtaaactttgctctagcttccttacatgttctttgaaattttggatgagttctaatgtgatgcatgcttgattctttgattttgttgctgctgaaatattgttgttgttcctgagatttaagtgttgaattcagtaggtttaatgtgatggaattgcatgcttgaat

SEQ ID NO: 277237 - DNA, 680 bp, Cannabis indica
aatattaacaaaagcataaaactgaaaaaaaaacagtaaagaaactgaattttaccttgttcaacggcaaatcaaaaatcttgcccttcaagtctcgaagagttggatttttggtcacaatggtgttgctccaattcagaatccttggaatcgtagatgaaactcttttacagaaagtgttgaccatagcaggacaacattcataaaaccaaacagtaaaaacccacggacatcccaaagccctataccaaccatcatactggcctcccttctctgccttcttatttttcattataatcccatgctgaattctacctttgaatgaatcaatagtcaattcaaaggattccctaccccaacaatactcgtcccaccgaccgctatccacaacatctagatcaaacctagatacttctttatcaggagtattactaagaagaaaacactgaataaaatacaacacagccagtttcaatccaagggactcatccaaaccccacctactacccaaaaaagcatcctcaatagctttgtggtcaatggtttttacaccacgaaaacaaatttctaccaactgatttgattcctgtgaaaacaacaacttgttgcaatcaccgaaacaatcaattccagtaatcaaataaaattcctcagcactaaaccgtatgcaacgaccagca

SEQ ID NO: 277238 - DNA, 625 bp, Cannabis indica
ttgtatcaatcagatcaacaaagtacagttttcacttgcctttgggtaagtcatcgcctttaacacattaaaaaccacttcttctccttggactcacagctttaattcaaatttctaaacatcgatcaaagcttggccagttgccaagaatggtctcccaagtatgattgggacattgttatcctcttccatatccagaacaataaaatcagctggaaagatgaacttgtcaactttgactaacacatcctcaatgactcctctaggatgagctagtgatcgatccaccaattgtagagttaccgtggttggctttgtttctcccaactgcaatcttttaaaaacagacagaggcatcaagttaatgctgactcccaagtcacaaagcgcatttattccttcaattctccaatggtacaaggaatagtgaaactccctgaatctctgagtttgggaaggagtttcttttgcagaatggcgctatactcttcagttagagccactgtttcatagtcctccatttttctcttcttagacagaatctccttcatgaacttcacataactcggcatttgttctaaagcttcaacaaaaggaatgttatgtgtagtcttttaaagacctc

SEQ ID NO: 277239 - DNA, 841 bp, Cannabis indica
tgagggttggaggtgggaaggttccaattccaagtgagagagagattattggagcggtggaagaagagattggggtttagtagggaaggggaaagaggaaccctcgaccatgaacccaaactcagaagcgaagagagctccatggctaacagattaggagggaaccatacagaatataatcataagtgaaaattaaaaaagagaaaaaaaattatatattttcttcggacctagttaaaaacaatattttgcaatagaatttgtattttttaaaaatatttaataaaaatctaatctaaatctgttactacaaaattaattatattttatatatttattaaaatatgttggaattaattatattaaaattgagctaagttgagatttatattattttaaaaaatacataattaattttgttatttgataaaataaatatttcaaatgataatttttataaaacataaagtataaattagtattaacttattatgttcataattagtcaaataagacaaaataaatttatgagtaattattaaaataaatagttgtataagtattcaagttttaagtttgtaagtgacataaatttaatatttatttttaactatataaatacttaatatttatataactgtaatttttctctaatttcatcaatatagactctactgttatcttaaacagaacacatataagactcaaattcaagattgttgggtgtagacagaaacacacagtaacaatcactttcaaatattctttcaacaaattcaaaacagagtctatactcataaagctgaaaaaaaaattacaattttacaaatattaggtactt

SEQ ID NO: 277240 - DNA, 675 bp, Cannabis indica
aaataaaataagtagttgaatgcacttttaaaataaattcacaacatcccgctgagctcagaatactttactatatataaaaaaaaacaaaaaccaaggctccaccggcgttctagaccgtctgctcgtccatagcccctcgcagtatacataccagaactgacccagctcatcaaacttacattcaatattccctgtctattgcctgtagggggaaagtaagggggtgagctaaaagcccagtaaggaaatgcttatcatgcaataccatacaataacatatatcattataatatactaattaagttttaacaatatcatataccttagtttataaccattactaagtaattgcacacatgagacctttatcatatatgtccacgctaattattcataacatacataagttgaactcataactccaatatcatactcatagcgcataatcatatcaatactataaaatacgtcattaccatagcataggcatatcatagccattacatacataacttgggcctaacttggccctaaaataacctgggcacacttagccctaccattgctatagagaaaggtatctctacattcaacagcatcatcgatgtatcatacctcactacaacaatgtcacacacgaatcagacaaatgcagggtagggtatctctaca

SEQ ID NO: 277241 - DNA, 583 bp, Cannabis indica
gtgaaaagggtttcagatgaatatatacattatgtacatataatcatgaagtaaatcatgtgaaccatgcaacattaaattttatttctgatatatattaataagtaaatctgattatattgaaatgagttttatttagggcataaaacccaacactatattaataagtaaatctgattatattgaaatgagttttatttagggcataaaacccaacaatcaccatggactccacgagaatgtacgattcaatttggattgtggtagatcgatttacgaagtctggacattttctaccggtaaaaacaacctttatagtggatcaatatgtagatttgtatgtgaaagagatagtgaggttagatggcattccaaagttcattattttggatagagatccgaagtttacttagaagttctagcagagtcttcagcgggctatggttaccaaactgaaattcagtacaaccttccatcgtcagactgatggactgtccaaaggacaattcaaatactagaatacatgttacgagcctgtgtaatggatttcgagggcgtcttggagcaagtacctgccgctgat

SEQ ID NO: 277242 - DNA, 626 bp, Cannabis indica
taagatcataactaaacatgcaatcatatattgtaacacaatatttggttacaattggttaaagtcttgcatatacaagacccacaaggtagttacatatacaaattatataattgcttaacaatgcatattctaaaaggcatatcaaggcataaacatctaatgcaaatagttccataataaacatcttaagttgaggtaagaatcacacaataaatatttatttcaataagaaattatttctaactcataaagataatatctaagatcataactaaacatgcatatcatatattgtaacacaatatttggttacatttggttaatgtcttgcatatacaagacccacaaggtagttacatatacaaattatataattgcttaacaatgcatattctaaaaggcatatcaaggcataaacatctaatgcaaatagttccataataaacatctacagacaaaataaccaagtattcttccaattaaaaagtactcaaatgctactcattgtctccgaccaagtctctcatagtcagattactgccgctggacattctcttcctggacttagttgacgacgaaggcaccatgtttttcgctcgcgacttcttacttttaaaccttgg

SEQ ID NO: 277243 - DNA, 487 bp, Cannabis indica
ggacttaagcaagcttctcgttcttggaataaaaggtttgatgaaataatcaagacctacggctttcgccaaaatgaagatgaaccttgtgtttaccaatttaaggataatcaagtggtagtattcctggtcctttatgctgatgaaattttgattattggtaataatatcaagaaaatgactgacatcaaggaatggcttgacaatcaatttgaaatgaatgatttaggtgaagctgcttaagttcttggtattcagattatcagaaaccaaaagaacagatcccttgctctctctcaaacagcttacattgataaggttttagagagattctcaatgacaaataccaaaggggcacagatgccttctagatttgttatccgtctatctaaggaacagtttcccattgatcctcaagagatagaggacatgagaagggttccctatgcttcagcagttgggagtcgaatgtatgcaatgttatgca

SEQ ID NO: 277244 - DNA, 706 bp, Cannabis indica
gaggtatccgtcaaggtgatccgctctccccctatttgttcattttgtgtgcggaaggactgtcatctctcttgcgaaaatatgagcatcatggttatatccacggttgcaaagtagcgaatggggcaccccgagtttcacatatgttattcgccgacgacagctatttgtattgtaaagctacattggaagaatcaggccgcattcaggaattactccgtaaatttgagctggcatcggggcaacaagtcaacttggcaaaatcttccattttctttagtgctaatacagcaccattggtgagaagtcaagtctgtagttttttaaatgtctctgaggcggcagaaggtagtttctatttgggtctacctagtactatgtctcgtaataagacaattgttctaggattcctaaaagacaaggtgcgaaagcggatacaaggttgggaaggcaagtttttgtctagagcgagaaaagaaatccttgttaaaactgtactgcaatctttacccacctatgccatgagtgtctttcttcttccattggaagtaagcagagaaatagagcgaatgatgacaaagttctggtggcaaacatcgaaaagttcacataaaggtattcattggatggcttgggacaagttaactaagaacaagaaagggggcggtcttggttttcgggatttgcgagattttaatttggcaat

SEQ ID NO: 277245 - DNA, 490 bp, Cannabis indica
ttatatccataccactttttgaaaaagcacatttttgactaccaagcatcatttcaaaattctcttttccttttgtaaaattgtaaaccaccttgtttaaatcatcaattttagctttcaagtttacaagatctttttcaaataaggaacaattattgcattgggtttcaatcaaaaactcattttctttgactttcaaaagccacaacttcttcaagcaataaacttattttctttctttgagttgtagttcttagcaagcaatttttcaaaatcaacaaacaaatcattgaaggattttgataattcatcataagacatatcaagtgcatcatcatcactttcactttcaaaatcacttatatggttaggattacttaccttatacataaatggccataaatcaagtgtgggtatctcatgttgttcatcttcggcactttctttctcactttcactccagtagccatcattgcccttcttctactcc

SEQ ID NO: 277246 - DNA, 468 bp, Cannabis indica
tgagagctgaggaaagctgcttcacaacaagcatttaacttcacgataatggtggagacaagagctacacgtcatcctcgccctctagaagacgctcaagatcccaatgaggaagatgtagcctcaagggcagcagaggagtccgaggaagaagaagaaggaatagttcccgatgaaaaccacgaggaacacctcgacgagtatgcttatgatgatggaagctaccaagagctggtgctcctcagacaaaaagctatcgatcatgaagctgagatcgaagctcagaaagtgcaaaatcaaaaaatgcatgaagtgatgctagccatgcagaaagccatggaggcagctggtattcacgtgcatcccaaggcgatggccgctggactcgacggggagccagcgacgtcttcgcctaattcccagcagcaaaggcctagggaacctagccctataaggcaccctgctgag

SEQ ID NO: 277247 - DNA, 770 bp, Cannabis indica
tgcactacaaccgtgtgttgtaggtgcatcaagggaatttcagcaattcaatcaatcatctcataacaaatctgggtaataacccaactctttatgtctatttatttcaatagtatattattacaaattgattcttagaaattttatgtatgtactacatgtatattcaggtaatgttgacgaagggttcggatggtacatgtatattcaggtaatgttgacgaagggttcggatgggtggattaggctggacggaactacttgagacgccgccaaatatgccatccaaccgaacctcacccaacctcccgcagtccacaaggccatcgagggatgagtgttatcatatttgacacaaccgtcggtgcgccaaacactagaacaaaatcgagacgcggggaggaaaattaaagtcttaggtcagataaagcatcatgtaataacagtaccgatattatagtatatctcaataaagcatcctaattaaatttattttaggatacaactatgttatgtacaaattctgttctattgtgtatgtctttgtaactgtaaacttaaattttatttggaatggaactatgttgaccgaatatgtgccattgagtttcattatttccaataagctatgaataacacttgcaatgtcaaattttaaaacataattccataataaaataagtggatagacatatcacctaactttgtacccttcataactcaaaaaaataacttccatcttatagagaaagtgttcctaacaattaatt

SEQ ID NO: 277248 - DNA, 662 bp, Cannabis indica
ctctctctctctttcggtttgcttggggctgctagggctggggtttttgctttgtaattcttgctaattcaactagttggtagtgatcctaagctaaggtaaggttcttgaacttgttcttggtattttcttgagtttttaagaaaaaaaagatgatgatttgcatgcttaattttagagtgttgttgctgctgtgtttgtgtgttaatttcagaagtttaatcatgtttatttgagtagattagagttggttgtgatgcatgttagttgctttggttcaagcttgaaatttttactcaaaactatgatttttaaagtgaaatgatgattttcgttgttgtagttgttgttattgtttaaggttgttttctggggtttcattatgatgaaacatggtgaattggacaggttttaatgcatgttagaggggtttagccaagcttgagttttgaactcaaagcttggagctttaatggaattcttcgtatctgtgatttctgggttgttttgatgctttgaaaatgtttattaaggtatttagaacaagtctggaaggtttggtatgaattgggtttgatttgagtgagttatgaaattttgattgcttcctgcactgaaccggcattccagttcagtgaagcgtgcagcatccggtctaccgg

SEQ ID NO: 277249 - DNA, 473 bp, Cannabis indica
tagacaggaaagaaaaggtactgtggaacaagactattttgctagttaaagtgatgtggcagaacagcaaggttgaagacgaaattcctataaggggggatagttgtaatatctcgaaaaataaaataatatttaaatagacatattttatcaaatatgtaattattttggttatgaagtaagattatgatcttacttaggctaactactaagaaattattaaatgatatataattatatcgggatatatgggtatcaaggatactatttttgaaataaaaatattttatcgggcccaacgactgtggaaatttatcaatgtggtcagaaatgtcacaacattaatgggagaattattttggggatattctagactagtttagaattttagaatgtcggtttgatggattagcaaaataacgaaaaatgcccctaggttactgttgggttttatgccataaataaaactcatt

SEQ ID NO: 277250 - DNA, 521 bp, Cannabis indica
aattctaaggagttatcgggtatttagaccctcgatgtcatcatcgacaatgaaatcatctaattgttgaggctgtgaattcacacaatggatgtttgcaacttcagttgggtccacatcatggcgaacatagtcaacatcatccaactgtggaagttgaaaaacaaattcagtttcagctgaattgtttacttgtataaagggtgtctccccatcagtgtctgggaagtcccagacatttcgcaagatgtactcatttacaatcagccagtctttaccgttcttcagatcaggaatgtaatatatcaattttgcttgagatgcaagtatgaacggttcattttggtaccactctcggttgacgcaaatgctagtaataacaccgtcactatccattctactcccattaatgtcaaaccacttacacataaataagagaacacttcagtcttttaaataagtgaacaccataattttttcaagtgtgccataaaaattttgtccatcttcaccaggcacca

SEQ ID NO: 277251 - DNA, 546 bp, Cannabis indica
aaagccttattattataaccagacaatttttcatcttcaatagtccaattgagttcaggttttaccttagtattaccttcatcatcactttcagtaggttgtgtccaacctgtaagtatagctctccaagccttctcatcttgtgatttgataaatgctctcatcctgaccttccaataaggatagtttgattcattcaacaaaggtggtcaagagatagagcttctttctgcaaacaaagacatctcacacaaaacaaattaaacgaaataaattcgatatctcactaagaatttagtgacccgctctgataccaattgaaattctgtattttaatattctcagttttattattagttgaatgttcaattaaatgtggaataatgaaactggtattgaaaaatagtttttccgtagttacagaaaacaactctactctagaagaaaccagaaaaacaaacagtgcagaaaagtaaaaacacgcaaggtttttgtatgtggtttcaacaatcctctcagattgttactagtccacggggccacgcc

SEQ ID NO: 277252 - DNA, 904 bp, Cannabis indica
actttccaggagccaacttgaaataccattgctgtgcggcttccaacagagcggcggggaagattctgcaacatacacccccccacccccgtactccttgtaaatccatttgcatctcaaagtacttgagatgggaaagaggatcttctctcccagtatacatcttccacgttggcattttgaacttgtgaggtagtggcaggagattgatctctggtgagaagggagtttcgcgagctcggtctaattcaagatcattgttacgctgtccagccatgccatgaaacatatttttcaattcgtcaagttgggcctgtacggctgggctgacctgctcggcattctggttgacttggattacgtcagcgtctttctgagcggggatttgagtatgggctccaggctgcacgatcattgtagtattctgctcgtctgttccccttcatctgtttagatcgttccttaggccgtgggttgctcccaacctatcgaacacagaagagcctggttgccttagcgattgattccattggttcacaggtggaatggcgccattagcctggttggagccgtcaggtatggctcctcctgatgaattaccggacaaggtctgctcgcctaccgcttggcccacgagcagaacagtcggttgcgtctccgatggtcgtctgggcgttggtgccagatggaacagtcgcattatggatgccctggttgggtgtggaactgttattcccagtctcttgcacaccaggcgcaattctagtaacaggagctatttcaccattcaccacacttcccatctgtccgggattaatagcaggcagaacccttgaactccctgggttctgtaatgccggatccagcgtctgtgaattttctgggtcaggcaggcctctacgag

SEQ ID NO: 277253 - DNA, 505 bp, Cannabis indica
gtgactttttccaatagttataaacaatcatttaaagtgatttttccaacagttgtaaactgtcatttaaagtaactttttccaacagttataaactgtcttttaaagttccgtatttttatgacacccacatagccaacggttttaggaaccgttgggaaatagtataaaagacagttataaaccgttgggaatagtcctttttgtagtagtgattattgtgttacgattatataatttacaaaattaaacaacaaaaaatttaaattattttattgaaattgttatctatcccattaaaactgtaagctaacatcaaccttctttttaaaaaggatcatccttcatttatcaattatcatcttttctttgagactttgggagctaggagaagagagccaacaaaaaagaaaaagctcattcacccactgttgttttttatgtgcaaaagaatagcctaattattttcttattcataatttttttctcttaatttttaactttt

SEQ ID NO: 277254 - DNA, 865 bp, Cannabis indica
atgtcgaacgagttcaaattattgatcatataagatacaacaaatttattatactcatgtgataagttgttgagaacaaactgaactcattgctctttcgataatacaattctcaacatagttgttttctgaaatttcatgttcatcaatagcaagtgtgaagtgatactttgaatgtcaagtggtaattacatgtgaatttctattgccatatttgacaagacaattagtaattaaacaataaattaatattatgtaatatataatataataattattatcattttgtaacaaatatttaaaataaatttatctattaataatatttaaaataataaaatttcttcataaaataaactcaaatatttaaaataatttttatctattaagactatcaagttgctcttgcattccatatattttgagctattttatttggtgtatagattttcagtcttacatgtttgtgtatttataatttctatgttgattaaaaattaatagtaaaaaatttaattatttcatcaattaaaatttatactaaatcataaataaatctattaaatacttaacacaaaagagaccttaaaaaatagtgttaaatgaaaaaaaaaatagaatttcatatatccatatatttaaaaaaatattataaaatagcatcatacatagaataaaaaataaattatgtatatgagaaaagaaaataaaaaaagaactaaatcatattgaataagtattatattaatttaataaaactaattacttttggtacataatacactgaatttgtatggaggtatgagaattagaaagaagtaattgaggcctcccaattacctccaattacacagttactatgtaa

SEQ ID NO: 277255 - DNA, 196 bp, Cannabis indica
aaaataatttccaacaggtggattatggtttggctttacaagatagatatttagtttgtgataagcttagggtgcgtttgacaacatttttttaatcagcttcatgttttcaaaattaaaaaagtgaaaatattttctaaaatcatgctctataaaactgttttttatttttaattttttaatttttaattaagaa

SEQ ID NO: 277256 - DNA, 617 bp, Cannabis indica
gagcaaatgctccaagtggagtccacgtgtcaccattctcgtgatgctacatcagagtgccaaatttgggataacatttgaccctcaagtctgtacgagacctctgaggttgtgtgtagacttattctaagctagctctgcctttggatggggacacgtgtcgagcatgatcgttcgagactcgatgtgaagctgactgggcgtcctttcgattttcggctaattaatgctctgacggttgacggttgcacttgattacttttgatttccgatattcgcttttgaggcgggaagtcgaggcgtctaaggttcctttcgatgcagttcctcctttgcctataaatactcatcgtactagcacataacccattttatcacccttcgttgttaagtaaactccaaagcgaaaagagagttttctggcttcaaagttgtcgaagtgccttcagacgattgctggtttgcttgaactcaaacattcaaatctttgagtaagtttctgattccctttatgcttttctttgcatgtttacgctttgaatgcaactatgctgtagaaagaatgcttaggaaccctagggttagaaacttcttcgactcttctttaccatgtcttc

SEQ ID NO: 277257 - DNA, 201 bp, Cannabis indica
aaaataatttccaacagtagcagcagcttttatgaacagggtcatcgactgcgcggccaactcagcagagcgcgcaacaagctcctcataaggaatctcggccaggaacttctcttgcatggctaagaagtcgcgagctcgaacaggcggatcgattacgactttcttccccttgtcatgtgcggtcttggccagcttctt

SEQ ID NO: 277258 - DNA, 639 bp, Cannabis indica
gtggatgcaataaggaattaataagtcagggattttacttggtaaattctagttctgcttattgggagctcggttgtttaggcccatggtccccatactagttgagaccatactgcttgtcagactcagttaattgattttaattaatcaattataattctaaaattagactatgtctagtttatgaatttttattaagcaagggcttaaatgtgaagaaaagagattgtagggtttatttattaatgaagagactttattaagtctaattaataaatatattaaatgtcaattttatttgataattaattttaataattaaataaatagtttttgcatttaagtgtttaaaatttgaaaaattgtattttgagaaaataaggaaaaattgttgaaaaatggcaaaattttaaagtggggcccacatcctatggccgaccacttatgagggaatttccatttaattttttcaatattttaatgcctaataaattctaacctaaacctaggtggttgcctataaatagatagtgatggctcaaacttaaagatggtgaaattcaagccttcagtcaaaatttcctgagccatcactcttgctattttcgaaccacattcctctcttcctctcttcatatt

SEQ ID NO: 277259 - DNA, 556 bp, Cannabis indica
tataagcttgataataagcttgataataaaatatatatatatttataaaggctatagtaatagatgaatagagagagggtcacgtgagagtgagagaagaatgaggaagttagtttaggatatttgacttagttgaatttaaatttaaattatgaggaattttatattagtaattaatcaatattttattccttaaaaaaataaaaggtatagctgagtttaaattttaaattcctagattttctctaatcagttgaatatatacgatatggttttaccattcaatgaaacgatgaacacaaacttcattctctacttctttctctccacttagataattcctaaatctctcatagcctctatcacaccaaattacagcatagcataaattgaagcctctatcacaatattcaatttctaaggtaaaaacttttactgtctcttaggaggcgtttggttgggaggaaagaaaatataggaataggaatgggaatgggaatgggaatgggaatggaatggaataaatttaaaatggataaaaaaaattgataaaaaa

SEQ ID NO: 277260 - DNA, 758 bp, Cannabis indica
aaattctaaaggtcaccctgaagaagaagctggtggcctgcaaaaacaactggcccgaagagatgccaagagtgttatgggcctactggacgacccccagaaccacgaccggccactcgcccttctcaatggcgtacggttgcgaagcaatggtcccggtagaaacgttattaccgtcacaccggagaacaacttatgatccagctacaaaccaagctctgttacaggaagcgctggatcaggttgaagagctccgggacgagtcgcaaatacgaatggcagcttatcaaaagaaggtgaccaaatattttaactccaaagtttaaaacataaaattcactattggggatatagtcttaagaagagtcttcccagccacccaagaacccggagtaggggtacttgggccaaattgggaagggccatatgaaatcgagaacgaaatcggctccggaacctataagctaaaaaggatggatggaaccattgtgccaagggcctggaacgccgatcacctccgaaaatattaccaatagtccaaatatgtaacttaggctttgtttaaaggatttgtaccgtctaagtgtatgcaacctctgaattttaaataaaactgagtgccttaaaaacaaagttttcatgccactcaggggggtactaaagcataccacacggacagatgaaaaacaagccgaaagtaaaatatcctgacccaaagggcaggtccaaaaagaaaaattatgaatcaaaaaagatca

SEQ ID NO: 277261 - DNA, 575 bp, Cannabis indica
tgcaatataaaacttataaaaaatacagtaaaaaatatcgtctgatagtatttttgtaaaaaaatagcaaaaattagcatgtaaatttccctattaaaatcataaataaaaagtaagccaaaaataataaaatcatattaaagaatataacctccctcccatagattaaccaaaccatcaaaagcctcttaaaaccactggatcaacattcgtgcataccccaacactaggactagccatcctgatcacccaaaccccaccgcctcctgcaacctccacagaacaaggcatcgccaccaccacaacacctagatctcggcccacaccccataaatatgcaatcgaaccaatagagacgaaagaaccaaaacccatccccaccccacaacagacctccaccagatatagaacctaagataaacctacaacaaccatgcccccaaagcagtcggagaagacgagactagattgaaccccaacttccgacatcttaaacctccacgcacaaaacaaaagccatcagggaggagaacatcagggccaaccctgagttgaaatgggccatagacaaaaaa

SEQ ID NO: 277262 - DNA, 1114 bp, Cannabis indica
tacgaaagaaatggtaaacttgcaaagtttcattgtttgatgtgaactcattcttcattgaatctaactaattgtatacgtttgcagttgtcgacgttggaccttttgtttgaggagaataggtcgaagaatgtgactttcgtggatttcagaattgacaggaaagatcgcgggcttcctcaacaagacaatgaccgagattgcggagtatacgtcatgaagtacatggacgctgtggccaatgaggaagaagtagttgatgaggtataccactttttaaatatttcagaatgtactacgcaagtttgattgagattaacgttgtgtaatttaaattttattcggtgttttactgtgaagttgattagagttaattacattttctaagtttttgtttttgtttctgtattgtggcacagtttcacccggttgaggcacgtttggaaatcgctgcgaggatcataactgatgaacaaaatgaaattcgtaccaaagtggttgaagatcgtagggctgcacaaggcagctcatttgcatcatcctcggcccctttgcgtagtccgtcaaagtctccacgcgatcctcggttcagtacagcgaagtctcgcaatgcaaacatgtttcccccgtcaagagcctcccctaggtttcagtctagcaagactaagatttcatatggtgaatagtgtgtaaaaaacacttgtgttattaataggttgtgttattagtgtgttgtgtagtttggatttgggagcataggttgtgttatttgtgtgttgtttagtttggatttgggagcatttggatttagacatctgtttttattagttgacgtttggaactggttattatgttcacagacttgtgtttattttagttttgagaatatattaaaccatacttagcaaatctttgtactcacaccataacaactcttacaatgtacccatacttcagaagtagttgattgtacttcacagaaattatttaacccgaaaactttatgatttgtactataccattagaaatcacgacaaaggtgacttcttaattttctttatttgtttttttggttaaaaggtgacttcttcttaattatttgaaggaaatcatg

SEQ ID NO: 277263 - DNA, 672 bp, Cannabis indica
agggcacaaaatccaacagaaatgtccttgaacaaatcctccttagttttgagctaccaagttgggtaatagaagtttgagtctcgagcagattaatttagtggctgcattgtagatcacattgtaacacgctattggtctgtaatccttcactgtattgagacattttgttttgggcacaagagtgaggacagtgttattaatttccttcaataactggcctgtcttgaggaaggaaattatggcatcaactacttcttctctaattatctcccaattttcctgataaaaggaactaccaaacccatctggccctggtgctttgacacctggaatagctgagaacacttttctttacctcctctctagtaaaatctactattacaaactctacttgatcctctgttacaaaatttccttcattgagtatatttttctgcactttctttctttcatgcatacaaatacccaagagaccaagataatattgaatgaaggcatatataatatcttttggctcatcaactcttttcccttctacattgacaattgagaggacctaattgtgtcttcttctttctcggatgttgatgtgaaatagtgcagaattctcatcaccatctcttgcccaagtcagtttagctttttgttgtaaaaaggataagtaatttt

SEQ ID NO: 277264 - DNA, 501 bp, Cannabis indica
ccgaacctgaactcagacccaaacatggaaccaaactagggacacaaactagggtcgggacctagaaccgcaccacagtctcgatcccgaacccaaactaaaaaattccacctgggacgtgaaccagaaccagattgagacccgtgacagtgatccggatattgggattcgggtaacggggcctggaacagactagcagtcggtgcctagatctggtacttagattaggaccaaaacaaagacaaaaaaccaaacccgaacccagacgtagacctgggacttaagattagaacctgaacaagaatctctcaacaaggacatttgaacaagactaggaccgtgaccaagaccaagaccccgacgtagaacagaacacagacctagcctcagacccaaactgagactggaactcgggcccagacacggtcatgtacgtagagcggaactgagacccggtcctagacctaaatctgggacccgatcccaaacacagacttggac

SEQ ID NO: 277265 - DNA, 564 bp, Cannabis indica
gggcacaaaacccaacaacgacgccatcagactaaggctgttcccattctcattaagggaacgagccaaaagttggtttatttctttaccaactcattctatcaacacttgggaggaattggccctgaaattcctatccaagttcttccctcctgcaaagattgccaagctgagagctgatatcaacaacttcacccagcaggacagtgaatctctttatgaagcatgggagagattcaaggacttacatagaaagtgccctaatcatgggattgagaagttgctgcaagtgcacaacttttacaatggattgatgaatgaaacccgaacactcataaatgtcgttaccgatggagctttcatgaggaaaagtgctaatgaggcctttgaattacttgaagagatggccatgactaaccacaatggtcaacagaaagaggtccaatctaaaaaagttgacaggtatgtatgaagtgggatgctattaccgaagttgacagctcaggtagaggcccgtaacaaaattgatggctattcaagtaaacaagctcaagtggtctgtga

SEQ ID NO: 277266 - DNA, 569 bp, Cannabis indica
ttggccccttttgcctccgagatgacaagtgagtacgctcccagctgactcggtgcgcgcgtaagcagtatgctgcttgtgcatccttgaactctgtctatcaggttcaggacatcagccatgccttggctgcggtaagtactttgtgatttatttctttcctcattattttacttagggccttcactcactcttacttccttttccagattactgcagaggtcggcctcctttccaaaaccataattaataatggcttcgtcttgtccgaatttgggggcatagaggaggtcgtgaagatcctgcaggacttgtctgctgaaaggcggtcgttccaggaggaggctgagcgaaaggaggctcttgctaaggcaaagttcgaggaggaggcttaacaaagggaagcccaggcagaggcgatgctctgagaggaggtccttcgaagggataggctggaggcgaggcaccgagaggcgctgagggcggagggcgaggctactgccaaggcgaagcacgagcttcgggaggccaaggaggcctagcgaaatggtcgccaaggtgaggtcctt

SEQ ID NO: 277267 - DNA, 526 bp, Cannabis indica
tggtcctagtcctagtttgattcagttcaagttgcgattccgagttcgagtttgggttcaagtttgggtcggggtttgagttcgggtcagggttcgagtcctggtctgagttcgggttcgggtctaggtcggaatcgggctccgagttgtggttagggccctgggtctagttctaggttcgattctgagtcccaagtttcgatctcgatctgagtctgggtttagttctgggtctacgtcctgggatccgatcccagtctgggttcgagttcgggtccgggtgcaggtctaggtttgggtctgatttttggtctgggtcccaggttcgggattgattttgggttcggttcctggttcgggttttgtcctgatatgggttcgtgtccaggttcctatcctagtttgggtcgggggcaggtttcaggtctgggtctgggtccaacttcagattcgtgggtccaggtcaggtcctggttcaggtttgagtcccagatttagatcttggtctgggttccggggcataggt

SEQ ID NO: 277268 - DNA, 564 bp, Cannabis indica
tactgatgcactatcaaataacaaggaagatgtttcgatttttggagatcttatttgtcaaattaaggaagccttatctcttatccctaacgctcggctctctcgtgtcaatcgtgatgccaacgctcttgctgataagctggcacatcgagccttggggttagatgaggttgcgatatggataggcgatgacccctatgaccttcttgagttcctttctctttagtgggctccctttctctaacaaaaaaaaaaaaaaaaaaagagttggcggagcaaagagcggagtgagtgacgaataatttgttgagaaatttggtgcgatttggtgaacaaagagatagagaggacgtggaagcctagtggcaaatctttcgttctttgaaggctttttttaatttatgttgggtgtattaaataatgtttaaaaataaataaattaaagaaagaagtaaaagtatagcactcacattttctttactctaactttaaaatacatcactaaaatataaattttttttatatatatatttacctcaaatttttatattacaccatacatca

SEQ ID NO: 277269 - DNA, 464 bp, Cannabis indica
gatgtgttacagtatcagcctatactcggttcactggtcatactccagctgctagtcatactctagcctaaccgatgtgatacggtcaaatagcacagtaccaccaaccctagaatcagcctatactcggttcactggttactgttatactaatcttacctcaattccgaattcaggtgtgccggtcaacctgactggaacgaactgcgcggcggtttacaggctcctaaaccataacaatcacaacactaataagtgatacgctaaatcacttcccggggacttaaactagaaactaaaagtttccctatcgataaaaagcatggcaataccccaaataacataaaaacgagaaaatctagggttcctgaaaatcccccaaccggcagaccggttctgcaaccggaattccggttctgggaatcctgaaccccatccggaattccggatgcacaaccggaatt

SEQ ID NO: 277270 - DNA, 941 bp, Cannabis indica
attttttaaaaactttattattataatatacataagataataatatttatatatatttatgtagtgcagaaagaatcaggagtgtttggcaatgaaagtaataatataggaatgaaagaggaggtgatcacatacattcttgaatgagatggagaaagtgtttaatgaaaaattgaagcacactttcaacattgtcaaacaggagtagtacaagtacaaattagctacaactactctataatgatattttcattacataatatttttgtttatagattttgtttggttacttttggttttatttgttttatggttaaataacttaaatggttatgtctatggttattaaattaatcagttttttttgttttttttttttttttttttttatattatgtgtattttttttttcattcaaattggttgcaacgtacagagtcaaatttctcttatatatatggatgaagtttttatttttatttttttaaaccggtatactctcttcaataatttttgaacttatgtttagaatatttactttgtatagaatgcgatctttaaatgagatattactaaggtagtattttttttgttaaaaaaattatattttacgtttaaatatttttttttacatatttacagttttccataaaaataacacgaaaataataagaaaactacataaatataacatgaaaataacatctaaataacatcaaaacaacaacaaaaaataacatacagataacaaaaaatcgacaacaaattaacatcagggccggccctgaaatgtagtgggctatagggtaaaaattattttttgggcccttatttagaaaaaaaaatggtatttttcaaaatcagcaaaaaaattgtataattttaaaagggaaattttttttttgggcccctggactaggtgggccctaggcacaggccta

SEQ ID NO: 277271 - DNA, 663 bp, Cannabis indica
gaagcccaggcggaggccatgatccgggatgaggcccagcggagggacaggctggaggcccagcatcaagaggagctgagggcggaaagtgaggccgctgcaaaggccaagcgggagctccgggaggccagggaagccttggacgagatggttgccaaggtgagatccttagaggaaactcaccaagcaaacttagagtccagggccgctctagccgcggagctgaaggagctcagggacttcaaggaacaaagaaggcaaaaagagccgagcttctctctcccgtttcctgcggccggtgccctaagcgcttcgatgatggagtcttcatggcttggtctaccaacgaccaaaatatcaagcttaccttctaccccaaacctgaggaaatgattgccaaatttcgggagaagaagaagaagcttgatgccatggtagaggcgcgtatcggacctcgccttcctccgcgtattgactgagccgcttgagattaacccagtacaaccaggattccacccacttctcttattatttatttttttctttttatatatatttgctgctaccttgggacaatatatttaggtagctgttttttatttgaaggggagacaattttttaaggcctgtcccgggccacttgtatatatttgacctgccctg

SEQ ID NO: 277272 - DNA, 581 bp, Cannabis indica
gggacgggctccggaggaccagaacccatccgggaccgacctaggaaatctcctaagttggaaaaataaaactccttcaaatggtctccccaccgggtcgagggcatcctaaacctataaagacgctcatcgaaccctacaggcctaagactggcatactcgccaacagaagggacgtaatgaactgctaaaggagacttaccaccggagccggaagtgctggcaccaggagccccagtgttcggctcctgagccgaaggctgtggcctgggagcccttctctccgctgagtccccaatatgaaggggcttcccggcgatcgcctggcttcttctctcgaccgggctccccacgcgaagtggcctcccggaagctgcctgggccttagagtatgccttctcctgagccttccggtagagatagtcctggtacttcttctcggcagtggcgatgatctcatcccggaaggtcttctccgcggcaggcaccctcacgttgggacagataacccgggaaaggttagagtcctccacggattggtgcggcaggatgagttttgccttcctgcagttctccgtcgt

SEQ ID NO: 277273 - DNA, 614 bp, Cannabis indica
tctctcttatggacctccttaattgctcttgttctgagggttttgaatttgttcttctggaagaatagcctcatcttgatttgggagttgttcaacattgtcttgttgaggttccaaattcatttctcgatcaatgaaaggtgtggaagccagaacattgtctaaaatgatagtaggaactgagtttgaattcaattcctcctcaaaagcaatgtctctaaccttatttctcccccccaaattcaacatcctcaaaaaatgttgcagttcacgtctcaaaaatatttctcacagtggaatcataaaacttatagcccatagatcgctcagaataaccaataaactactaactgtttttgagtccaattaattttcatgtggcctgtaaggccttgcctcagctagacatccccaaatgtggaaatgctttagactaggctttcgacctgtccaaaattcataaggtgtttttgcaacttctttagttggtactctattcagaatgtaagctgctgtctttaatgcttctccccagagggactcaggtaaggtagaatgagtgatcatgctccttaccatatccttaagagtcctatttcgtctctcagtaacac

SEQ ID NO: 277274 - DNA, 729 bp, Cannabis indica
tttttaaaataatttttttttgcacattttttgtaattatgttgtttttgttgtacatttatgaaaaagccctttattttttttaattattttggaaaactagattgttgtaattcttccctataaataatggagcattttacttttcaggatcctaattcattaattctatagagtacttacgctgctaaaaatgcttttttcatgaatatttgatctttaataaggatttgcttttcaaattaatatttgttttttcataaatatttctaggggtgagacaaaaaatccaagaaaccgaccgtccgaacaccgaaaaaccaacaccgaaaaatcgaaaaccaaaaaactacctttggttaaaaccggcttaacatggtcaattttagtgtcattcgcaaaccgatcgattaaactgataaccgaccgaacatatatattatatgtaatatatactatttattgacatatttagtattcaattttattaatctaagtttacttataacttttttatttaaagtctcaattattcattattttattttattataatttgatgcatttacgtattatatacacacactcataaaataatactagttttttaatataactcattatcatattagcagcacaaataatttgaacaaattgaaaaatgtttattttacattatttatataactaagaaagtttatttttaaattatatgatatttgatacaat

SEQ ID NO: 277275 - DNA, 518 bp, Cannabis indica
gcaagtatgccagcgtaagctggtggagaagttgtagtgggcctaggcatttaaattctcatgtgaaaacgtgtcctgtaagaaaggcccaacttgctgccaatcctagtgcaactgcaagcccttcagtttcttttaattttgatcctgatttagcaaggatcaaattggctcaaatgatcgttaagcacgaatatcccttgtctatggttgagcatagcgggtttatggaatattcaagcactttatgtcccatgtttcaaatggtgttaaggaatacaattaggttagacattatgaaaatgtataaaactgagaaagaaaagtgcaggcaaaatttggaaaaaagtaggagcaaaatagccataaccagtgacatgtggactgcaaatcatctgaagaggggatatatggctgtaacagctcattttattgatgattcttggaacttacacagtcagatattgagttttaagtatgttccgtgtcctcacgatgctccagcactacttgatgcc

SEQ ID NO: 277276 - DNA, 502 bp, Cannabis indica
gaacaacaccaggattttttcaaaacttcattatctatataatttatttgaaataactttatacatatacaattatgagttccatgaaggttgatatagataagtttgatggttcaggtgattatcgtatttggaggaagaagattagggctctattggctcaacacaagctgttgaaggttcttaaagatccggtggaatggtcaagtgatacgaccaaagaccagcaagaagagttgctggaaacagcaaccggattgatcattttcaacctctctgatgctataatcagattggttgacaaggaagatacacccgccaagatttggaacaagttggaagagcaatttcaaaagaaatctttgatcaacaagatttacttgaaggagagaatctttggttttaaaatgagtccatctaaatctctagaacaaaacttggatgagtttttgagattacacattgagttagcaaactcgggggaaaatgaggccttaagtga

SEQ ID NO: 277277 - DNA, 268 bp, Cannabis indica
cttctattgataacaaattagattgtattgtaatgtgttttatttagggcataaaatcccaaaagatatctcacatttttctcgtcttacttcgtgaatatgattggaggttcttcagttttcaccttcttggaaggtttcggggcaaatactgactgctcgttctttatctctttcacatatctcttttgggcgttattgctctcctctacaatatgcagccctcccaaaataaccaggatgtcctctccttcaacaggaagaggtt

SEQ ID NO: 277278 - DNA, 870 bp, Cannabis indica
caaggagcatatggtttgcaagatcaataagtctatttatggacttaaacaagcatcaagacagtggtatctcaagtttgatgcagttgtcactgcaaatggtttcatggaaaacaaagttgatcaatgtatatatatgaaggtcagtgggagcagcttcatcttcctggtactgtatgttgatgatattttgcttgcttctaatgataaaaatctattgtctgagacaaagcaattgttatctgaccattttgatatgaaagatcttggtgaggcttcatatgtacttgggatacagatccttcgggatagatctaaaggtattcttcggttgtctcaaagaacttatattgatcggattttgaaaagattcaatatgcatacttgttcacctggaaaggcaccaatagtgaaaggtgacaaattctcaaagggccaatgtccacaaaatgacaaagagagagatgaaatgaaagtggttccttatgcgtcagttgtgggtagcctgatgtacgctcaagtatgcacacgccctgatattgcttttgttgttggcgtgttgggtagatacttgagtgatcctggacttagccattggaaagcggctaagaaggtcatgcggtatcttcagggtaccaaggatcatatgttgacttatcggcgagctgacactcttgatatagttgggtttagtgacgccgattatgcaggatgcgtggatgataagaaatccacatcaggctacatttttatgatggctggaggagctgtttcgtggaaaagtgtcaaacagacactcacagcatcctcaacaatggaggcagagtatatggcgtgttatgaggctacttgtcaggcaatatggctgcg

SEQ ID NO: 277279 - DNA, 697 bp, Cannabis indica
ttacaatccatatgcttgctttttgaactgcgtaatgtctgtctttcatcttgcttattctaagcttcatgaaattttttgccctaacttgagaaaatttcaaactttttgagttttgacttttctttgaaattcttgttcttgaatctgttgagtactcctggtcggcatatttgtttgtttatcgtttgatattccgaccaaacactcatcttgtgtgttgtcttttgtagatgaaccaaggtgagttttgggagagcgaacatcggatcgaccaggacctgcttcaacttttgcacgaggatcatcctcgtcttccttctagcccaccttcttccagtgaaggacagtctcccccaaaccttatacctagccatagaatgatggctcgtacaacgaaaaacaacgcgtctggctgacacatctgatccccaggtggctcggcactccactttgcccagtgccgaacatgatccagcatcccaggtggagggggattaagaaggggacgctgaggtctagcaaattgaggagcaggatgatgtacgtcctagcagttcctccgaggcggtggaagaggcagaggttgaacccccaaactatggggagtacaacgaggctggggagccagtcgatgctgacggagatgtcctggttgagggcgtggactacatcagtgaggaacttactgccgcag

SEQ ID NO: 277280 - DNA, 578 bp, Cannabis indica
aggaaaactagggtttctaaaaatcacccaaccggcagactggttgtccaaccggaattccggttctgggaattttcaaaacccatccggaattccggatgcacaaccggaattccggttcctcgtaggtagaatttcaaaaattcacacaatgctcaaatccaatccaaacaataccaaaacatccagatctgttctaaatgactcaaataacaattctaaagcaacaaaatcacccagaatgcacagcatcaaaaagtgccatgtgagctccaagctttgagtttcaaactcaaacttggctaaagctcaccaacaaacatcaaaccaagattaaaactacctaaacatgcatactaaagctgcagaaaactaaaacaaactcatgcaataatcacagccaccaattctcaattttcactttgaaaactaaacatttgcatagaaaaaaccataacactaatcaacttaactatcatcaacccaatcattcttgaatcaacattctaaaatcatgctcaaccacagaaatcaacaacaacatacagcagcaagaatccattcaaaactaagcatgc

SEQ ID NO: 277281 - DNA, 563 bp, Cannabis indica
tagccaaatgacatagatcaatcaagataatgtggtatgaaaattacatgcatggtgatctattcatgttaattttcaattggtcctactttactttatggagatcaaaactttagcttaaatgtacaaagtgaaataaattgaataaaataattttcgatcagaaaaatatccaaaatacacatgtttcatgaaacaaattaaacacactaaggataataaagacaaactcccactgaatctatatatcctcataatctaaaacatccatacgagcagtgtgctcatgaaagaccttgggtggcaaacccttagtaagggggtctacaatcatggagtttgtacctaagtgttctatacaaatctgtccactttgtgccctttcttttacaacaaggaacttgatgtcaatgtgttttgacttcgttgagctcttattgttgttggaatacaattgtaatgaccgctttagtaatttggattagtaaagacaattagcactaatttctgttattttattattatttatgaatttatttaattgtggaccccaatatttagaa

SEQ ID NO: 277282 - DNA, 629 bp, Cannabis indica
atcactatagggttcgaaattgaagagagaaagagagattgaaggatttgaaattggtagagaagatggctcaatttttttaatgaaggaaagtgtttgcatcatcttttcctctgaggccatcactacctatttataggaatccacctagagttaggttagaattatttggcattaaaataatgaaaaaataaacggtaaattgtccattaactggccagccatggatatcggcctcactttgtaatttttaccatttttttttaactatttatcttattttctcaaagatgtcatttttccaattcaaccacttaaatgccaaaactaattacttaataattaaaattgccatttaatatatttattaattagacttaataaagtatcttaattaacaaataaacctgagaatctctttacttcacaattaagccatagcttagtaaaaattcataaactagacatagtttaattttagaattataattgattcactaaaatcatttaactgagtctaacaagcagtattgtctcaactagtatggggaccatgggcctatataaccgagcttccaataatcagatctagaatttaccaagtacattcactaacttattaattcctc

SEQ ID NO: 277283 - DNA, 510 bp, Cannabis indica
agtttcaagtttaagtccccgggcgccgagcagttcgttccactcagattgaccagcacacctgaattcggaatcgaggtaagattagtataacagtatgcatatgtatttacatgtttagcgtgcatgttaggaagccagttagattacattagatatgtatgttggtttcgtaccatccgatagtatcaaatcggtacggctagagtatgactagcgtaccgagtgtaggctgatattatggtcaatggtactgtactgtttgaccgtatcacatcggtatgctcagagtatgactgacataccgggtataggctgatacttacacatcggtacggctagagtatgactagcgtaccgagtataggctattactctgtcaaaagtaccgtcgtacgaacgttcgagactcagtaccgtgtgggacagggggattagggttgtggttaggggtatggacgtctgatcatgacccgggatatatatatgttattgttggattttatgccc

SEQ ID NO: 277284 - DNA, 88 bp, Cannabis indica
ttggtcaagctcgaaagagatcatcctttacttactaatctaggatcaactaggcgatattgacttgaatagatgttacggtaagttt

SEQ ID NO: 277285 - DNA, 547 bp, Cannabis indica
actggaactaggacttggacttggaatcataactgaaattggacatagatctagaaccgtaaccggaccaagaccctaactccaaatcagacctatacccaaattgggagccatacccggatccaaacccaaacctgtactcgggacccgaacctgaacctaaactcagacccaaacttggaaccagactagggacacagaaccatggtcgggacatagaaccgcacccgagtctcgatctcgaacccaaactcagaaatgggacctgggacctgaaccggaaccagaccgagacccgtgacagtgatccagatcttgactcgggattcgggtaacggggcctagaacatacccgtagtcggtgtctagatctaggagtcagactagggccagaacccagacgaagaaccaaactcgaacccagacctagacctaggacccaaaattagaacctaaacaagaatcgtcgaaccacgaccctagaacaagactaggaccgtagaccaagacccaggacgcgtacccacacccgtagcctgatctggac

SEQ ID NO: 277286 - DNA, 535 bp, Cannabis indica
accttgtttattattcttcttatagctcaagcttcttaaactcggatgctgtcttagcgagttggatctgaaagctggattgtagatggaggtcgtctatgataaagaaggagctcatttattttatttttttgaattaattgtttaatttttcaaacaatttggatttcaagtttgggattttattccctgttcgtttatcataatattgcaaacaattttttttggtttataataaaatttatttttaattgcaatcaatgagttgagcttcagtactttatcttataaatcaattaccaattgttatatttattatgtttgtatatgtgtttttattattgatacaaattctatagttatttaaactccttacagagttattactacataaacactagaaattatttctatgtttatgaataattgttaactctaaaacaattattgagaatttgtttaataaaaagatcttttgatctgataggggtggagaaaagttaagaatgatatgcagttcaacgatcttttatat

SEQ ID NO: 277287 - DNA, 737 bp, Cannabis indica
aaatgcccctaagggttttttttttaaaaaaaaattatgtgagaggggtagattaggaaattcaatggtatttttgacttttcttcttttatttttttctgctgcctattacttatttaaggaaagaaatgaataggaaaaaaatggaaaaacctcattttctttagaaagaaaacttccaaggcaaggaagcctcatttcttcttctccctctctctttcgtgacctagagcttgctaaaaccaggggattcattttgatttctctcagtttttgagcaaattggatacccaagatcatcctagaagctttgaaggtaagttcttttccttggggattgaaaacttcactaattttggttggttttggatgagggttttgggatttcgtggctgtaggtttagtttgagttgtgatggtgtttttaggtctcttttggggtgtgttgaagtttgcatcatgtgattttaatggctgtttagattgaatgtatttgattaagcaatttgagcttaattttcatgtgagatggtgattttgagttaagtggtgaattgtgattgaatgatgtgttgaatatgttgtacttggtatattgaactgttctggaaatgcaatttaggtctgaaatggttttggttcgagctggggaagaaaacccagaaattttctagtctggcagcaaccggtcgaccggttggttctgatgtaccagaaccggtcgaccggttacagca

SEQ ID NO: 277288 - DNA, 618 bp, Cannabis indica
atggcatctgataagttgaatatcatgattccagttgcagtttccaagtattcttcttgttgaatcttggtagtcccttatggccattctataggatcattaagtactctcaacagtttctgttgagccaagagtgacttaattttccttctccaaatcctgtaatcaccagaaccatcaaatttgtcaatgtcaacctttaaattgctcataattaatgaatttaaataatatcaaataaagataagtaataataggcaatttagttataaagattattataagtatcccagaaatcctctgttatagattttaagttgatctggttgagttcttgaatttcttgtttgtgtttcttgatttcttgcttgagttttcttccttcttgattagtttgaatgttgatctttctctagctttaaccaagctctgataccattgtaggaaatataagatagaaatttactatcctgcccctacaccaacaaacacaaacaaatcaatttctaaggtcaatttcgacctttaactgttccctttgacttttcaaagtcagatccaaaacggcctcgttttgtctttgaacaaaaccaaggaaggaatcgagaaccttctcat

SEQ ID NO: 277289 - DNA, 687 bp, Cannabis indica
accgttttgccctgaagttgatcaaacaaatcgtcaattctaggcagaggatatttattcttaatggttaacttattcagctcccgataatcgatacacatccgaagagttccatctttcttcttcacaaatagcacaggggctccccaaggtgacacactaggccgagtgaaccctagatccaacatcccttggagttgtatctttagttcttttagttcagcaggtgccattcggtagggtgcttttgaaacaggttctgctccaggaattaaatcaatgatgaaatctatctcccgctgaggtggtaatccaggcaactcctctggaaacacatccaggaattccttaaccactttaacctcttctggtccaagcaacacgggtttactggaatccaccaccactgctaggaatccaacacatccactacataacagatccctagctttcaatgcagagattcttggaacacgagaaccttgaaccgaaccaacaaaaacaaaaggttcctcattctctggttcaaaagttaccattttccgtttacaatcaatattagcagaatatttggacaaaagtccataccaagtataatatcaaattcggccaatggtaactccacaagatcagcattcaattctctatcttcaattctaattaacacagatctaatccactttcttg

SEQ ID NO: 277290 - DNA, 710 bp, Cannabis indica
aatacatcatacaacatacaacctgaaacatacaaatacaacatacaacatatacaagtcatacaaccataatctatgtatcaattcacaaactcatattgtgtccataccacacattctcagtaccatatacatattcataataacaaatcataaatcatatttcaatacataaagaatttaaatttatgcagataaacacatacaaaactatctaatttccttacctcaaatcccgctgcttaagagttgttatctcgtcactactacctataataagacatgggtcaaggccctaatattaaaattcgtactcttacagtacagcagaaagattactatttttgaccaacaactacactaattcagtaaaagttgtcttcataaaaattataggaaattccattatctttccaacgatataaagatcattaaaaatggattaaaactgagagagttatgattgttttactgaaactatttctgagaaggaatatggagtaacgaattatacgacttagcaaaaatacaaactttttgtattgaaaggttcagaactagaagataacatcttcatgaaagttttaggaaattaaattccctttccaatgataccaaaatctctgaaattggaattatattcaaagagatattacaattttaccaaaacagttttggaagaacaagattcaagaaacgaattacatgat

SEQ ID NO: 277291 - DNA, 469 bp, Cannabis indica
gaacattgatctttttatctctcctgtttatatatatatatattagatatggtcgtaaggcctttaagacatcatgaccgaccaagcggtctttaaacttggaattaattttcattttttggacaacgggctgaccgggcagcttttaatcctggtacatttttctcttgttatccttaatgaatttcattctctgtttataattgcagtgcaattgtttttgttttatgtttaccagatgctttgtacaggtataggtgccccccaagtgaccgagcagacgtatgactcttggtcacttgtctttgcaaatatattgcttttttgttcagtgttttgggttcgactgaaccttttgtacgcactctaggtaaattataatcatgctgattttttcgactcaatagcattggaaatactatctttattcttttattgatcgaaaatgtatttcttaccgtagtaactt

SEQ ID NO: 277292 - DNA, 938 bp, Cannabis indica
atatatttttgtgtatgttatacatgagatattgttagtaacatacatattatattaatttaggataaaattagttatttgggagttataattttatgtatgggaattatacattaatattatattgatatatgagttatgtagtatgataataatgttgatagtaatataatattgtatatattacagatgtaaagattattattatcattgaataaagagaatttgaaattctttttttcattagtgatttttagaaaagaaattataatttgtgagaagttacattctttaatattaaaactgataattatctcattttatgagattaaaaaaagtgaactatgagagttacatttatgagaattgtcttgtcataacaagaacaaatggataaaaagtggatctacacttgtgaattgagtcataaattggaagagcagttttagactcaaataaagtaaattaatgtggattcaaaaattatgcaaagataacaaaattggagaagcaattataaatcttaaataatcaaagttgtgaacaaaattcatgagaatttttttaactttagtgtaatatttgagttaatctaattgaggagaaaactttaaaataatgggtaaaataatcacattattttgtaagtgatgaggtaagtttgatattttaattttgttgagaaaactaagaatgtcaaatgatatttttctaataatgatctctaagaggcattttgaaaaaataattaaattaaagctgtttaaataatgttgagattatttagataactaatatcggttaaaagtgattcttataaaaatttcactttatgttagtaatgtgggggtgagcaacaaatttaatcaaagtgtgttgaaatattgttaattaatttatttgattttgaattcaaattctaaatcaagtttggctat

SEQ ID NO: 277293 - DNA, 601 bp, Cannabis indica
tggaatatttcagtatcaaaactttgtatttccgatgtctcctatgatttgttactccatattcctctcagaaatagtttcagtaaaactatcacaactccctcaattttaatccatttttaatgatctatatgtcattggaaagataattgaattttctataatttttatgaaggaaactttcactgaattcgtgtagttattagtcaaaaatagtattctttctactgtactgtaagagtgcgaattttaatattagggccttgacctgtgtgttgttataggtagtagtgacgtgataacaaggtcttaaataacaggatttgaggtaagaaaattagatagttttgtatgtatttatctgcataaatttaaattctttatgtattgaaatatgatttatgaatatgtatatggtactgagaatgtgtggtgtggagacaatatgagtttgtgaattgatacgtaaattatggttgtatgacttgtatatgttgtatgttgtatttgtatgttccatgttgtatgctaacgtctcaggtaaagtgagggaccatggtggggtatgatacggaataaggccgttgaatgtagagatacc

SEQ ID NO: 277294 - DNA, 657 bp, Cannabis indica
ctttgagttagcaaggctgagatacaattaattacatcacttaaaatagaattattacaaaaaccattgttaattttatccaccactactttacaatccgagaaaaggatcgaaactggcagtttagtagcttgtaaccattgaaccgcagtcaaaatggctttagcctcagcaacatccggaggaaggactccctgcaatggtagcataaatccagctttaatgatcccacactcatccgtgactatggaagctaaactggtcttttgagtagccacatcaatagctgcatcagtatggacctgccaggttcctacaatcgggataggaactagatcttgagcctctgaagctacattcccctgttggagattcttgacacgagctaactgaaattcatcccaaaaattacaagcagattgaaaaatatcttgaggccaaggccttttatgttgatgaaacactttgtttctatagttccaaatagcccaaacaaaacaaaaaaatatagcaatctgatgagaatcaaaagtttcaaaagcaacagcaaaaaaagtatctaaagaactagacagattattagtataaaagccaatgaagattgaatttttcccaggctttcctagcatatttgcactccaagatggcatgtttcac

SEQ ID NO: 277295 - DNA, 729 bp, Cannabis indica
taaggcatgcgtctccgaaaggggatgatgatcttgagagaaccaacatcccaacaccaccaaatccatcaacatccaacacaatactcaacaacaacaacaacaacaaaaccaacaaaacaacaacaacaacaacaacaacaacaacaacaacaacaacaacaacaacaacaacaacaacaacaacaacaacaacaccaacaacaaccccaatctagagccattactcctttgaggggtcaaaaatccacttccaaccagcagctcagactggtcacttccctgcccaagatcccatctgtggctttacgtttcctttaaagcccactccctcgatcatgccaccatgaaaagagcaggggaggttgaaagcgtcttgaagaagtgtcatgagaatgagaagaatgtcatttaaaagagggcaaacagtctctcagtagtgaagagggctaagattttttagggtcttcgtaccaccatcctaacaaggccaataattgatactgaggtcgtagagtagaagttggtaccaagtcatgagggatgtggctccttttgctacagaaattttagatcaagtggctggtagtgcaactgggctatcttctaagaagtgggcaacttaaaaaactcaagtctaagacatttttcatgagactcaagacaagacttcatgaaggtttatttacattttctagtcgtgtacagtgattttcaagtccatactta

SEQ ID NO: 277296 - DNA, 1120 bp, Cannabis indica
ctcagtcccgggtcccagtctcggtcggggtccgagtcttgagtctgggtctggctcctaggtcttgggtccgggtcggggtcccgatcccaggtcccgagtctcgtcccgaacccgaactcgggtctgggtctggttctggttctaggttcggatttgggtccgggttcaggtttgggtcccgtgtcccaggtcagggtttgggtcccgatctagctcccgagtcgaggtctgcgttcgggtttggattcgggttcgggtcccgagtctgggcctgggttggagattggggttaaccctgaatcatttgtaaatattataatacaagctaagacggactatttgttatgtattaaataatacaacataaattgtattaaaaattttggtcggaataattaatataatacattgttttattcaaacatatagtattatttattatttaatacaatacgacccttatacaacgtaccaaacgagccccaaatcaactggttttataaatttataaatttcatattatcacaaacactaattctctaaaatctcaaatgacaaagttaaaacaaaaaattaatacaattaacaaaaccaattccttagacaaaatgattctagagaaaagttagaactaaatatttcaaaaacaaaaaagatatagttaccgtgcatacaacatgtaaatatgtgtggattcttttaacataggttattttttcatttatattttttggtcatctaagtaataaggtagtaaagtaacataataataataataataataataataataataataataataatatttaaccaattattaagtaaaaataagtattgtttatataaaatctttttaccacttttttttttataaagtattgctattagagtacatccgtgattttatattgttgaatgattattgatacttatataattattaaatttatatatagggcttgcactttaattatactaattattacaaaattttttacttttagtcacaacaaaacttgtgactaaaaataaaaaattgtaacttattataaattattattcatatattgtgactaaatgtcacgactcaagccctaagccgtagcagatatgt

SEQ ID NO: 277297 - DNA, 513 bp, Cannabis indica
ccagggatgagcgtcatctttttggtcgttcctcgatcagcgtcctccccttagtgtatcacttagagagttgatattcttgctctgctatgctagggaagatcgctattttcgtgggttagttgggaaacttaacgttcttcttcccccacgcgtcaaccctaacattacactttagaatcaagctttatcgtggattggacattcgaatatgggtatgacccaaaaggcatggattgggtgtggcccatgtgagccattgggcttacgggttccgtgtttctgacttataagtgggcttcgtaagtacttcgatcgttgggcctttttcgttgggcttagagcaatttttggccactacagataatatattaaaaataacaatatataatatattatatatagtttggaacttgacttttgtgttttagatttgaaattaatgcattttttattttattttaatctaacgaatatagattagggcttttttttttttcagttttaactaaa

SEQ ID NO: 277298 - DNA, 655 bp, Cannabis indica
tcccaagactcacctgggttcatctacaaaagacaacacgcaagatgagtgttggacggagtatcaagcgaaaaaacaagcaaatatgccgaccaggagtacccaacagattaaagaacgatcatgttcaaagaaaagtctaaactcaagaagtcagaaagtttttcttgagttagggcaaaaaagttcatgaagcttgaaaaaagcagaatggaaaacagacgcaatgcagttctaaaacaagccttacggctgaaagctaacgcaaggacatggaaaagaagagtcgcagaagtttcaaaccctagggtttcctacagtgttctttctacagcaaagttacattcaaagcacaagcatgcaaaggaaaaacataaagggaatcagaaacttactcaaagattcaagtgtccggattcaagcaagcctgaaatcgtctgtaaactcttcagcaactttgaagcctgaaaactctctctttttgctctgaagtttgcttaacaacgaagggtgatgaaatgaggtaatgtgccagtactccaagtatttataggcaaaagggtaactgtacgtaaaggaaccttagacgcctcgacttcccgccttgaaagcaaatatgggaaatcaaaataatcgagtgcaaccgtcagccgtg

SEQ ID NO: 277299 - DNA, 490 bp, Cannabis indica
tgattgcagtggaatataatgactctttccgttcaagatctctagcccttgattcctttctgtagtagagcattaccaagatctgaacctggatctctttcactccttcgagtttggttaccaccgtcttacacactatgattgagtacttgacttgctatgtgtgggcatgtcactcataactaagggtacgaatatggtgaagaacaatgaaggtggtttgaatcactaaggaaggaactctctcatctaggttgaaggtaatagtcaagatgacaataatgtgacaaagtgttaagtggattgagatgagaacatcatgttccttttatatatagtgtttcaactagggcttaaggttgaattacataaattaaaaaagaataaatattgggcaaaaaatacttcatggtcgtacacaataactggacaaatttctagttacaattttgccactttttttcaaccacttattcttcttttcaataat

SEQ ID NO: 277300 - DNA, 370 bp, Cannabis indica
catttccggtgcccgacaacatgaaactcggtgtttggctcagtaaaatcacaacttagtatgttagtattgtgggacggttatttagacattgggaatgtcgagagtggtcgggaatttaaaatttcccaaaataccctttagtgcccctttgtgttattttagtgtggaggggcaaaatggtcattttgccccaatgatattttttcctttagtggactttttattattgtgttatgtgattttaatttatgtgtgttggctgaataatatgatttaaagttgcattgcttttatttttattcaaaggtttcaaaacttagaaaaattagaaagaaaagcaaaacaaatttttcctctctctctctct

SEQ ID NO: 277301 - DNA, 513 bp, Cannabis indica
gaatgatcttgtcaaaaccactatgaacaagatacaaatcccatagatttataaaatatggttgtgtgtttttgtaacgcccgtacttttcataacttactaatttagttacaagcgttaaaatgcggaaaaactgtaatgtcgcttttatttataaacataaaatatttcacatttgtgctcagtttagacttaaaagacataataattaataaataaaaataactgcgacattaatttaataacacttaataaaataaatggagcgtgccctagaccaccctcagttatatggtcctcagcgagtacacacacaagcctccaaggtctcacttgccactggctttctaagttttataaccttaatctgcacatggtaagtttgataagggtgagctactaaactcagtaagaaaatgcttgtcacgtagtcacataaaataaaacaaaaacatataactaaaacttagatgcacatgcacacattaagacagatagcaaaatataaactta

SEQ ID NO: 277302 - DNA, 526 bp, Cannabis indica
tatataaatatatatattcctatgtatctatatataatattagtaataattctcggacgttttttatcatcatatacgtattcaaatcagtttgctaagatcatgataggttatgattcatatatataatatacgagatgttaatatattagacaacaattcatagccatatgttttacttttcttttttatcatttatgaataaatatagtatatttataaggctaaaaaaatgagcaccataaactacgctatcttttttcacattttttcaatatatactagctagaaatatatgtgttgcttgtttgctctgctcttgtgtgtacagcttgtagttggtattccttcattaaagagaatctttttcttcttgattgaaaaaaaaaattattaattgttttttttttggttacatatggttacggccagggacggagggactttagcccatgtgtgggttaaagccctcactcaaatatatacatcaaattttttaaatgtagatatatacatatattaattc

SEQ ID NO: 277303 - DNA, 753 bp, Cannabis indica
aaaccctaggtgcccaggttgactttcggggtacatgtacgtgtaaatttagctcccaaggcctcgatttcattgctccatgtcttcatggtacagaataatgaaagatagcgagttggaaatgagttactgaagtctgaacttccattccggagttcccgaagtcattctgggcatagggctagggacccctcccagatcgacttgctatgacttaggactactcaactctgagatgtcatctttcttgccacatgtccaacattgatgtccacatcatcagggctactcttggtgtaaatatttgccccccaagttaactttacacttgtgtgagattgacttaatgatgtgaaccaagcccgtttctctaaaaactactaggtgggcatcaattttgacaatcttagataattatttatgttcttcaagcattcccattaagagtaggatttcaaatttccattccctcttgaatagtggaattcagattttaagtataaaaggaaaagaggaagatggtcatcttttcttatcatttatcttttccttttaacttaaaatatagatgaccccttgagtgatttcctttgatttgagatacttctgaaatgtgtcacattggaatgccaacacttactctgatctttagctgttgtcttaacattgactctcttatgacacttgtggtttttatgtgaatatagatgtagtctttgtcttctcttggttgtagccttgaagttctttagc

SEQ ID NO: 277304 - DNA, 931 bp, Cannabis indica
agaaataagattaggtgatggaacaagaggaatatgtctagggatcagggatctatcggtagcgagaagggggatcacacttcttttttgagcagttctttcaaaaaaaatcagatagagaattgatgaataataagacaattcatggttcaaatgcttattaagaataggaaaggataaccgaattgagttaacttggtcgggttacagaccaataattttttttatattagaaacccattcgaaaaaaaatatcatacaaaaataatagaagcctcaaccactctgaaaacgaaatcgagtgttcgaaactgaaatggttgaagtagttaaataggaggatcactatgactatagctcttggtaaatttaccaaagacgaaaatgatttatttgatattatggatgactggttacggagggaccgtttcgtttttgtaggttggtccggtctattgctctttccttgtgcctatttctctttagggggttggttcacgggtacaacctttgtaacttcatggtatacccatggattagcaagttcctatttggaaggatgcaacttcttaactgccgcagtttctactcctgctaatagtttagcacactctttgttgttactttggggtcctgaagcacagggagattttactcgttggtgtcaattaggcggtctgtggacttttgttgctctccacggcgctttcgcactaataggtttcatgttacgtcaatttgaacttgctcgatctgttcaattgcgaccttataatgcaatcgcattctccggtccaattgctgtttttgtttctgtattcctgatttatccgctaggtcagtctggttggttctttgcgcctagttttggtgtagcagctatatttcgattcatcctctttttccaagggtttcataattggacattgaa

SEQ ID NO: 277305 - DNA, 687 bp, Cannabis indica
ggtggagttcggcttggtcaccgggttaaacttgttgcccggccctactgaggaagacatcaaagaaaaaggaagttctgaccggttgattatggaatatttcaacggtagtgcttcgatcagcttcggccaactgcgcagagtttttgagagctgcacagaagctgatgatgtctacaagttggggatggccttgtttgttatgggcgtcctcactggtaaggaggagaagactgtcgttcctccttttgtgataagaatggttgataaccttccattcttctacgagtacccctggggaaagatttcttacaccaagctgatggaaacttgtaacaaggattacttggatgtgaagaataagatgttgaaaaagattgagaagggagtcactcagaaggaggcaaaatactcagcctacggctatactgcagcgttgcagtattgggcatacgaggccatattacagctgggcaacgagtatgcagtgaggaggtcgcatcgctttccgagaatggtcaactgggagagtaagccgaacactacactcgggaaggatgaagtgaccagattatttgctaaaaatgtaagtttgttacgctttatgttgaattcatgttaatttccatatattatattaatatatttgttatatttttcagttgacagtgtactccatgttatgtc

SEQ ID NO: 277306 - DNA, 561 bp, Cannabis indica
tagttttggcatttaaatgattagaattggcaaaaggcatttttggagaaacagaaataaaattgaggaaactgcaaaatccaatgcgaatggatctctcggcagccgtctggctcctcctctcaaccgagctcccagcgcgaaggggcctccttgattttgcccaatatacgtggaccaaccggacagggacacgtggaccaaaagatcttaacatttgaattaattgctaagtctttatgaagaaaggcagcatccgggacctgcctcccggagaaggcatacgaagtcccctatgctcccggaggcctaagtaacatcaaagcatctccgcgaggtgtcaggcttcccctgagcagtcatctcacatttaatgccgcatgggaggaaacgtgttgggactgccacacgcaataaagtctgacgacacaactcccgatctgcacctacgaggctatgatcacttaagtctattgacggctacactgcgaagagtcacgtcagtcaaaagacaataaggacattccacataaaagcactacagcacctagggatttggcc

SEQ ID NO: 277307 - DNA, 495 bp, Cannabis indica
ttaaacaaacaaaatagtgttagatctcgacagataagtatttgtaaacgcgacatctagttgtacatccaaagatgataacttcaactagtgtttacaatatgaaacaatgaagaattttataaaataagaataactttgactctcgcctaacgggacatcgttggactcttattttaatcaaaattgtcctttagttttttctcttagatttttcatttagaaattgcttagaaagtatatcatggatagaaggtttatacatcatttgtttatgatgtcatcctattttcttttatgaaattgaatggtacaaatgactatattctagatattctatcccgaaatgatataaattctcaatcttatagaatctcctacttgtatatgcttactaaagacaacctaaacttagagttagattagtagtggtggtccaagctagaataattactcatttggtataaatttaagtctttgactttaaattttaga

SEQ ID NO: 277308 - DNA, 508 bp, Cannabis indica
gtactctcctgatatctgatttacgacaagctactcttttggcccctacgactttcgctagcctcagccctactatcaaggcctcatactcggcctcgttgtttgaagctgagaagtcgaaccgtagggctgcctggagttgcagtccggtcggggatatcattgcaacccctgctccggatccatttttattggaggctccgtccacaaatactctccatgtggggatccatggtgttggcgaattcgcggttgcctctgcttcattacattcggtaatgaagtctgccaaggcttggccttttatggagattcggggaatgtagtgtaagtcgaactgacttaactccattgcccacttgaggagcctaccggatgcttttggtttttgtaggacttgccggagtgggtggttggtcagtaccttgatcggatgtgcctggaaatatggccttaattttcttgaggccatcaggaggcagaaaaccagtttctcgatgatggggta

SEQ ID NO: 277309 - DNA, 760 bp, Cannabis indica
ctctttcccaccataggcaacttgggccgcgcagtactcaaggtacatgtccttagcgtcgcccaagtagtcaaaattggcctggggattaaccttccaaaaattaaagaagagctcgaggccggcagtctccaaagcattgaccttctccttcaattggtccgcctcggtcaccttggcgtccctctcctcctttagccgaagaagaacttgccgcagagaactcctctcatcctgaagactgttaacttcagcagacaagatctcgatggtctcctcaaagcgatcaacagcctcgaggtcctttgttaacacagagatcttcttctcggcagcaaacaacttcttgttggcttcacccagctcatgccggaaagctccagtttccgccctggcctcctcagcttccttcttggccaagtccgcctccgccctcaaggtgtcggacagagccgcactcttggaagtagcagatttagcccgggagtaagtgtaagccaacttcaaaccggcctgcacaaagaaaaaagtcagcatatggagctaagtgtgaaaagttaaaagggaagtatcaaaaaagactaaccctggtgagctcctttaagactccacccaccaacacatccagagatgagtcgttatcagcaccagccagttgctcactgacctcaggaaccagacggttcatgtagtgggccgaacatctccttgcccttcttggcctctggcagcacgggcacgggtggagttggtgcctgca

SEQ ID NO: 277310 - DNA, 601 bp, Cannabis indica
cattcatatgtatcgagtagagtgatagaaagtttacataagccatgtgatatttatgcttcggggtttggaaccctgttaccctcgggagacctgatagtatccacaaggtggattcggtccttgtctttttggattgacggttgtgagttgaccgccaatctaattgagctgcaattatctgattttgacataatcctgggaatggattttctgtctaaatatggagcgatgattgactgcaaacggaagatggtggtgtttgagcccgacagtgctaacccagcggtgttcgtgggtaaagttcagggagcacgcataccgagaatatcgttgttgaaagctaaagacctgatgggtaggggttgtctagggttcatagttactacagtggacactagccaacctgtgacatcagggcctgagaatacgagattggtatgtgagttccttgatgtctttccagaagatttgccgggattgccacctgttcgggaaattgaatttgttattgaactggctccgggagtggatccagtgtctaaggcaccgtaccgaatggctccagcagagttgaaggaattgaagatacaattgcaag

SEQ ID NO: 277311 - DNA, 572 bp, Cannabis indica
cgtgtagcagtcccaacacgcttcctcccatgcggcatttaatgcgacttgattgctcaggagaaacctgacacctcgcggagatgccttagcgttactcgagcttctgggagcatatggagttccatatgccttctccgggagctacgtcctggacgctaccttatggcataaagacttagcaaatattgtaaattgcttgatccacgtgtccttatctggttggtccacgtatattgggcaaaatcaggggcaacatttataaaactaactctactaataccgttaaatttaacggaatgtttttatattcttaaaatattccgttaaaccaacaaaaatcgttaaatagccacatttaatgtataaagataagggtaaatggcggcaaaacctccaatactttcgttttggtttcattaaacccccacaacccaaatttctgcgggtaaacccccaaaaccactattctgttagcaatttacccttcccgtccaaatttagctgttaaatgccaggttgacttgtccacgtggacacaatatacacgtggcacaattttattggtccac

SEQ ID NO: 277312 - DNA, 755 bp, Cannabis indica
tgattgttttgagtagtgggttgatggtcgagtcttggagtttctcgaaaacttgtaactgattttaaatttggtcttgtattagagcttctaagaaacatttaaaatttatatatgacttttggtatttgtaactaggttttcactacaagaattttggttattagcagcggaagaattagcagcggagcaaatccgccgctactaataggactaataccggcggacttctgctattaaatgttatttattttttttttgtataaaaatgtattagcggcggacccatgtactattagcggcggccgtccgccgctaatactaaaataaaaaagtactgggaaatttcccactcaaatattttcaaaattttttagcagcgaacttttttgtgatataaccgccgaaaaccccccccaaataataagaaatctaacaattttattattaggcggcggaatcctattattaccagcggaatagtccgccgctaataatatcgtataaaaaaatagctatcagattcattttccttcattatcctttccttcatttttctttctcttctctctcaaaaatttctcctctacacccaccttcctcagcccttattccccgcctccctccgcccaccttaaacccctcctgcccggacgcaacaccaccacccttaacgatttaccaccacgtgcaagtttttttaactagtaagttttctatttaactatttattatttattatatataaaaatata

SEQ ID NO: 277313 - DNA, 697 bp, Cannabis indica
cgaaatacattccgtgaaagtatttcatgggacaaaatcgtatcccattcttttttaattttctttaattttgttggaagaaaattatatatatatatatatatattctatataaagtgtgcctatataacagaattcttggtttatgagaaattcacgggtgactttttatttatattaaaaataaaatggtttattaataaaaataaaataatttatgagaaattcatgggtcactttttatttatatataataaaataaatctcattaaatctaaaaaaatacaattgggtttttactttgtacatctactattggcttttctaaatatacttatgttatttaattggattttattctaaataagaatttactactatttatatattatatatatattgctaaataatttttctatttgttttttgggctcgatgaggttataattgtttgcctccacatctgaatctgaatatataaaatgtggctagataaacgaattcttggtttatgagaaattattgaatgactttttttaaaaatattttctttttttatatataaaatgtggctatgtaacagaattcttggtttaatgtcattatttatttttctgtcaaaatgttaacagaatattctaatatttgacagaatattctgattagaaaacgttaattataattgattaattttagc

SEQ ID NO: 277314 - DNA, 505 bp, Cannabis indica
aaatacaaccttaacagcaattagtaatgaattaccaacaacaatcaagaatcctgattgttagtgcacaatcccttgtgcagcaactgagttcttcttcaacatttcttcaacctgaaatcccttcagatctgatgatgaagatgacactgaactcccttcagttagaactcagcaactccaggctcagatcattccgccattgatgaccatcttcaagctaacgatctgacctgtagacacaacaacaagaagcaagatacgacactatctccacgaacaactgaattaacaaactatacgatttaatggataaactttttactaactgaaaccgactatttatatatccacaaactagtccacctggcactaactaacacttaacagaaactgacttaacagaacgctagtgcagatataacagactaaaaacaccagacacgactagacattgaacagaacaaaactgtcacaaaataatgacactaacattctccccctt

SEQ ID NO: 277315 - DNA, 583 bp, Cannabis indica
atgtgagttggtcattttattaaaaaaaattactaagttaaaaattagaaaaaattggaaaagctttctctctcttttccctctctctcttttcggctggttgtggctgtgcaaagggctgggttttgcttggttgattctagtggtttagcaagatcaaagtgattttcattgaggtatttctttgttttagtttcttaccttgtttttcttgaaatttatgatgaaaatagttgatgcatgcttgaatctttgatattgttgctgctgaaatcttgttgttgtttctgagatttaagcatgttaatttgtggttatttaggttgttagtaatgaatgttaattgctttgctcaagtttggaatttttagctcaaaatatggttttcaaagagaattggttagattctgttgctgtgatgttgatgatatttttagttgttttcagaagcttaatcatgcatatttaagtagaattaaccaggtttgaatgcatgttagagggatttaaccaagtttgagttttgaactcaaagcttggagctttaatggtggattttgattttgtgcatgaagctttgttt

SEQ ID NO: 277316 - DNA, 893 bp, Cannabis indica
ctgtgccgatgtgatacagtgtcagcctatactcagtacactggtcatattccagctgctagtcatactctagcctgtactgatgtgacacagttggatggttcggagccaacatacatatctaatgtaatctaacaggcttcctaacatgtacgctaaacatgtaatctatatatgcatactgttatactaatcttaccttagtttcgaattcaggtgtgccggtcaacctgactggaacgaactgcgcggcggattacaggctcctaagccataacaatcacaacactataagtgatacgctaaatcaattctcgtggacctaaactaggagctaaaagtttccttatcgataaaaagcatggcaataccccaaacaacataaaaacgaggaaatctagggttccagaaaattccccaaccggaattcaggttctggaaattcttgaaccccatccggaattccggatgcacaaccggaattccggatgcacaaccggaatttcggatgcacaaccagaattccggttcctcgcaagcagaactcaaaaattcataactctttcaaaacaaatccaaatcacacaaaaccttccagacctgttctaaacatcccatagaaaatttctaaagcaactacacagtccagaacacacatatatcaaaaatgccattaaagctccaaactttgagttcaaaactcaaacttggttaaatctaactaacatgcatccaaatcagttcaaacctacttaaacatgcatataataacctctgaaaacacaagaaatcgacctcaactaacacagcaataaaactcacaatttcactttgaaaaaccatagcttttgaactaaaatttcttaacttgaacaaggataactagcatgcat

SEQ ID NO: 277317 - DNA, 642 bp, Cannabis indica
caattgtttttgcaggccaacaactttttctttagagtgacctttaggattttattgacggcttctgcttgtccatatatttgtggccttgccaccgcggagaagcttttaatgactccgtgttgattgcagaagtcggtgaattcttcgcagtcaaactgcttcccgttgtctgagactatcttgtgaggcaagccatatctacacactatgtttttgataacaaagtctagtgcttttttagcagttatagtcttcattggctcaccctctgtccactttgtgaagtagtctagtactactatcgcatactttacctctccctttcctagttgtagggacccaataagatctatcccccaaaccgcaaagggccaggggctagtcatcagggtgatctcgttgggcggggctcttggtatgttcgcgaatctttggcacgaatcacattttcggttatagtctatacagtctttcttcattgttggttaaaagtatccttgtctcaatattttttttgagagactcgggcctcctgtatgatctccgtagaacccctcatggacctctagcataatttgcctagcttcagggtccgatacacaccttaggtatggcatgctgagtcctcttcggtagaga

SEQ ID NO: 277318 - DNA, 687 bp, Cannabis indica
atgtttactgtttttaggaaaaatggcaccacaagtcacggtttacttccacaagttaccaacaacctcttctgcccaaggagggaaaaagagccgctttttggcagcattctctattgatcgagcacccatttcatgcagggtgcccgaaccaataaagaatgtgaagacacctacaccagctaaaaaggctggcagagggaaaggtgtgaaaaacatcactaagactgcacaggccttaagaggcaaggcagcaaagggctttaaaaagaggcaagcccgggcagtgaaaaggtctgcagcgaaggttgccaagaccgaagggaggccaacgaagactggctcccccgtaatgatccaggaatgggagcgtatcttgattggttctgttcctattttcttgcccactaccgtctcagtgatggttacctctgcggaggaaactgaggcaacaccgacttctcaacctcggagaggtaggaaggcgacaaaagggaggagggggacaaacacttcaccttcaccaaaccctcttgaaatgagggaattagtaggaggcaccccgattaggcctccgatcgtaatctctgtcaaccgccaaggtcaacagggggcatctgctgagatcaatgaacgccctttattagatgaagggtgtaggacgcctttctccttcccaaagaaggc

SEQ ID NO: 277319 - DNA, 874 bp, Cannabis indica
tatgcgtgccacttggggggggtaatttgacgcctgaacaacgtgctcatatatttaacccacgatttgagaactttattcaaacgtatagtcagtcgcagtcgcctggtggttcgtcttctcagagttatgccgctcctccagaacagcaacaacaacctcctcaaccacaacagccgtcttcgcaacaacaattccaaaatttgtcacagcagcaatttgaaaattttttgcagcagcaaccccaatcttttcctcagcagcaacaacagtctggtccgccattgggaaatcagttcttataccgaacaccatcagagtctcctccgctcggctcaaactttgctgattttggattatttgggagttcatcgcaggagaaccaattttattcaactcccatttttaaccaagctgagctcggtaatttaacactgggtttatcatcagaccaagcatatgtgccttctccgccacgggcttcggggactcgtaacgataataatccggatcaagactttataattggagaccttaatgaagatgttaatgaataatttatttatgttttttaataatttagtttaattttgagacaatattgtattaggattaatatgttaaagttaattaccttggagacatttttaaattattaataaattttattaaattattataattatattaattggaattttatttattaaatatttatataaataattatttatttatatataggattaatatataaataattatttataaatatttattaaatattttttttttaattttatgggtattagcggcggagcattagcggcgggaccccgccgctaatgctttgccgctattaatagtattagcg

SEQ ID NO: 277320 - DNA, 185 bp, Cannabis indica
aatatcagatgataaaccctattaaagtggccggccatggcgatttgggcctcacttttgcaaattttgcagttttatcatttatgcatcttatcatatttattaattgaaccatacaaagtatcttaattaacaaatatgccctaaaaactctttctttacaatttcacccttacttagtgaaa

SEQ ID NO: 277321 - DNA, 587 bp, Cannabis indica
gtaaaataattccaacagattttcgatgccattgctcagatgtgtcactcaagacgaagctgcacgactcctatctgaagttcacgacggattctgtggaaatcatgctgccggacagagcttatccaagaaaattctaagacaaggttacttctggccaacgatgattgaagattcgaaagcctatgttaagaagtgcgacaaatgccagagattttcaaagataccaagagctccgcccaacgagttagcacagatgcaaagtctgtggccctttgccatttggggaattgacttgatcggacaattacctaaaggtaaaggtggagtgcagtatgcagtggtagcggttgattactttactaaatggactaaagccaaaccacttgcaaccattacatcaaagaaagttcaagactttattgtaaagaacatcatatgtcgattctgactactgtacaaaatagtctcagacaatggcaagcagttcgacaaccaatccttcactaatttctatgcgaaccatggtatcatcaaaagtttctctgcaatggcgaatcctcaggcaaatggtcaagttgaagcag

SEQ ID NO: 277322 - DNA, 398 bp, Cannabis indica
ggacggtactattgacaagtaacagcctgatcggtcgaaccggtcatactccggctgctggtcatactccagcctgtaccgacgtgttacagtatcagcctgatcggtcgaaccggtcatactccggctgctggtcatactccagcctgtaccgacgtgatacgtcaaatagtacggaaccaccaacctaagtgtcagcctaatcggtcgaaccggtcatactctggctgctggttcaacctgagtggaactaacagctcggcggattacaggctcctaaaccgtaaaaatcacaacaccgataagtgacacgctaaatcacaacggggacaaaggttttaaaaccaaacttaacctactgtaacttaatacaaaaatacccccaaactagcagagaa

SEQ ID NO: 277323 - DNA, 449 bp, Cannabis indica
taggggtaaaatggtcaaatcccataaccccgatcaatcccgataatttgttttccctaaaatattccccgctaagaaataaaatcctaaacttaccaatgtgatcaatctaaccatccatcgcattttccgttatcgccgagcaaaaattaacaaaaataacatatttcacatataagctaaataatacccctagagtttaataaaatcttcgaaatcttcgaaattataactctaatatttatttctaaatattggggtccaaaattaaataaattcacaaataataataaaataataaaaattagtgctaattgcctttactaatcaaaaattactagagcggtcattaaattatcccccccgttaataggatttcgtcctcgaaatctaacctgaatagctctggatgttgagtcctcatatccgactccaattcccaggtggct

SEQ ID NO: 277324 - DNA, 679 bp, Cannabis indica
tcaaacacccacacctagaatcagaccaaaagctagacccggacccggacccaactcgaacccagactaggatcagaaccaaggacttagacccaaaactgaatccagactcagatcgggattggaacttgggactagaacccaacctagacgagaacacaggacgtgaaccaacacctggagcctgatctggacccgaaccaaaactcaggccaggactcgagcttcgacccgaactcaaacccaaactcaaactgagaatcgcaaatggaactaaaactaaactaggactaggacctggaccaggacctaaacccgaacccgaaccaagatcaaaacccagacaaagacctaaacccgaactgagactaggactcgaacctgaacctagaccaggacccaaacccacacaatatccgggacctggacccagaattaggataggaacttgggaaaaagaactaggaccgggacctagtaccctacccagacccgaacttgaacctaggacccagcttgtgacccggcaccagaaatggaacgagactaggtccagagattgggatccggatctggacccagggcttggacaaaactcgtagtcggtgtctggatttgggacctagcattggactcgtagtcggtgtctggatttgggaaccttgacaaggacccgaac

SEQ ID NO: 277325 - DNA, 569 bp, Cannabis indica
ttagtgggaaatattttagaaaaaaataaattatcgggattgagcggggttatggaatttgaccattttacccctagctttagaaaaaccttagtattgggttaaagggcattttagtcttttggttaaggggagagtgaggtggctgcccaattatttgacacttggcaagttaactttcagcaaggattaattaaaatcttttttttctcatttgggaaaaaatcaagaaaagaggaaaattagaaattagagtttttcttgaactctctctctctttctttcggctggggcaaagcaagggcaaggatcaatttttcccttccatttttctgggatttagctagaattcaaggaggattcaactaaggtaaagccctagaactcttaaagatgtgattttaagctttttctttggtttgagcttgtgtttttgagtaataggggctgttaggtttagttaggtttagggttcgaattttagggtttatttgagctggttttggtcccttgtagcaggttttgatgaatggtttaagatttatgcaactttgaacattgagttcaaa

SEQ ID NO: 277326 - DNA, 502 bp, Cannabis indica
cagcttcaagtacttgtttgtcgcactggatgcatccaataaaaggatggaagaaatgcaaacctataatagttgttgacggaactttccttaaatcaacatatggaggtacattgctctctgcttgtacacaagatgcaaatgggcacatttttccactagctttttctgttgtggattcagaaaacaacaactcatggcaatggtttttcacaaaagtgagagaaacatatgggattagagaggaacagtgcttgatctcagatagacatgagagcataagtaaggcagcttgtcaagtatttccagaaatcacacattgctattgtgtataccacctgttaagcaacctaaaagcaaccttcaagaagaatgcaagcaagctggataaaccattcttcgctgcagccagagcatacacagagaggaaatttgaataccatatgagcgagttggacagcttggacatccgtgtaagaccatatttacaacaagttggata

SEQ ID NO: 277327 - DNA, 688 bp, Cannabis indica
atggtgatcaaagatgagagtgaagagtggtatagatttggctaaggatgtaatggaaagatgatttgaaaattttagggttagtcttgctcagataggtgggaagaatagaacgatataattttagggttaatgaaacctatactattctgactcttattaggtttagttttatgaataataataatattaacataataacaataataatatgataaattattaaataaacaaatatcttacttttaaatttaaattgtaagctctaaatctcgtaactttagggcttagttttgacctagaaaaattacgaattatgatatagttatttctacaaaatttatagatctttgaattatctttccaacgccactggaatcacctcaatcggagttataaaactccagatatggtcattttagtaaaacagtttctaaacctgcgaatttctctaaacttacgatttttctaacattaatcaaataataatattatttaataccacttatatatacaattaattaaatctaataaatatattataaaaacctaatggactttcatatcgggctttaattaaacattacctacttatgaaaatatcataatattttactttcgtagttaatacaactttaactttctttagaaaattggtacaactactctaagcaataatatcaactca

SEQ ID NO: 277328 - DNA, 648 bp, Cannabis indica
attaattttataatattattatatatatttaaatatgaaaattatataaatattttatataaaatacttaaaatattattgatatttttaactatattttaaaatttattggcttaaactttaaattaaaataaaaaaaaattatcttctatacaataaaggtacctgctaaaaaatgtaactgtttgttttctatacaataggatcgtctgtcttttcactacaaaaaatcttacttttagtcacaacaaaatttgtaacaaagtgaaaaaattgtgactaattataaatcatgatttctatgttgagtccaaaaagtccgtggctaaaagtatatattagtcacaaaaattacaatttgtaattatgactaaatgtacttttagtcacaatacttgttgtgactaaaactaaattagtgacaaattgtaactaaatactttgttttagtcgcaagtaacatttagttgtgactaaaagtcacatttagtcacaaaaaaattatattgtgactaaaaaattgtcactaaaagtaaaaaatttaattttggtagtgactatatatatgacaaacttttttatgccctaacttaaacatgtctttcaccaataatttagcatatatataattacattcaaatgacacac

SEQ ID NO: 277329 - DNA, 474 bp, Cannabis indica
tgtacaaccggaattccggttcctcgcaggcagcaacttcaaaaattcacacaatgctcaaatcaactccaaaccaaaacaaaactttcagacctgttctatataacccctagaacaattctaaagcatcaaactcacccagatctcatagaatcaaaaatcaccattggaggttcaagattgagttcaaaactcaaaacttgactaatccctccaaacagccaccaaaacatgcataactcaacataattcaacttcaattaacaccagaaaacacaacataacaacagcagcaaccacagcaacgaaaatcaaaactttcctttgaaaaccatagcttttgaacaaaaattcacaaacttgaaccaagtaactagcatacatgaaacctacttaattccattcaattcaagcatagaaaatcacagaaaacaacctaaaactacagcagcaacaacatcaaaattgaacatg

SEQ ID NO: 277330 - DNA, 299 bp, Cannabis indica
acaaccggaattccggttcctcgcaggcagcaaacccaaaatttcataacttgcacaaatcaaccccaaattgattcaatctaaggcatcaaaacaacccagaaatcacacatacgaaaaatgccattggagctcaagctttgagttctaaactcaaacttgagcaaaaccacctaacatgcattcaaactagcttgaatctacttaaacaagcatatctaaacctctgaaaacaactaaaaacatcaagcaacatcacagcaacagattatacaatttctttcaaaaatcacattttt

SEQ ID NO: 277331 - DNA, 776 bp, Cannabis indica
taggtgatgcgattttcctggtgacgtatcaagcataggtatgggcctcagtgatatatgatgagtatcgggcgtaggtacgagctcacctgatcaggtgatgagattttcctggcgacgtatcgagtgtaggtacatgcgtcagtgatatgaaaatgcctggttatggcatagatcaaaaccattgttgggtttcttcctggcaacgtatcaggcgtaagtatggacgccaatgacatatgataagtaccgggcgtaggtacaagctcgtctggttagacgatgtgatatatcagtactatgttgtggcacgggctcacctgattaggtgatgcaattatgtgatatatgggtgcaagtttttagcacgggctcacctaattaagtgacgtagttatgcaatatatgggtgtcaagctatggcacgggcttgtctgattagtcaatacaatacatgattatcagattaaagcatcgacttgcctaattaggcaacattatgtaatactttatgaggtaacacatacatatatataatttatattattaaatgaatattaattctattattggtataatggttttgtattaccaaatattttatactgatgtttattcgtggcagatgccaatagtgattcggattttatcttatgaacaatgtgtgatggtttcattctgattatgtataaatgacagtatttgaataataaactatatgattattattacttttcttgttgagtccttatgactcacgggtgctatgtggtgca

SEQ ID NO: 277332 - DNA, 664 bp, Cannabis indica
acttcattgtaagttccttgcaccctttgctttattgttaatatgcatggcatgctgttacttaactgtttgctcttttctgggttttgtattcgaagttttcgggaatgcaaatgtttagattcctcatataatcggtttgagttcactgctctagtgataggattactcttgtcacgcgtttgttgttattttttgtagaagaccatacgttattcgtataatggtcgcttagggcacaggatagattgttttctttccactttctgccctttctttttctttagtgcgcaatgccgtcttctgtgaatttattacacccgactcttgtccagggaatccttctagggtttcctgtatgacaggtgtccggagggggcctcttttcagcggttaggggacccccattccctttttcttggtttaggatttggtatggggcctaactgctggaatcttaactctttttacagaatcgaaacatgtctgcttctggctcaaaatcatctaaaaagagcggtaagcgcctggctaccctcgaggaggtctccctgggtcctgtcgccaaggaggggtacaagtctcgggcgaccggatgggaggcggccaagcttcactccactctaacttgtccccatcagctggaaaacatcgtggaggtagc

SEQ ID NO: 277333 - DNA, 542 bp, Cannabis indica
aggcgcgtgcgcagatggtatgcactgcataccatccgcaccaactgctaatttttttcattttttcattgcttttttcaagtggtaattaattttgaatttttttatgtcagttttgtacttttgtatttttacttctcaaatttcaaatataatatcagtaattaaattattaatttttaaaaatcaatttaagatatagtgaaattttaatttaaaataggtaaaatctatctttttgcttaatttgttatcttatttttaaaatttgtattattttatcttatttttaaatttaaggtcagatatttaatatttattttttttaattaattgaccttatttgaaatttaaaataagattattttaatcataatattttaaatagaaataggatattatgctaacttttaaattttgttattttttatttaaacaaaattataaaatcagaacaatgatattaaattatcattttattttattgaatatttaattttttaaaataacatgaaatttaaaagtggttagcatttttttaa

SEQ ID NO: 277334 - DNA, 565 bp, Cannabis indica
gcaaaatacctgttatcaacatgcaaacaagcgaagactcgggggccttctcgacctttgttacttctgcgttaaaacgtttgaaatagtcttgtaaagactcaccaggttcttgtttgatgttggccaaagtcgtataaggtggcctatacgtcattgtggcctggaaatgtgtgaggaataggtcgacgaaggtttcccacgtcgatatcgatgcctcgggtaattgggtgaaccaatcatgggcattttcctcgagtgttgccgcaagaatgcggcactttgcgagctgcggtacctggtccacttccattatagtattaaatttttcaagatagtctatcgggttagaagtacctttatatttgagggactcagatagacgaaacccttttggaagttgagcttgtcgcacttctgtagtaaaaggcgaggtgccatgcaacttatatataggcttacgttgctgctcgagcattttcaaagcctgcagaagcatgctttggtcaattcctcctgtcgcaggagccggagtcgctgcaactgcggggctcgcaactactgc

SEQ ID NO: 277335 - DNA, 565 bp, Cannabis indica
aaaagcatttttaatatcaagctgatgcaaaggccaatggtgagtagctgccatggaaaggaatagtcgaacagatgtgagtttagcaacaggagaaaaagtatcacaatagtccactccataggtttgagcataacccttggcaacaagacgagcctttaagcgagcaactgtgccgtctggattgaatttaaccgtgaacacccatttacacccgatggcctgttttccggaaggtaaatcaaccaagacccaagtaccatttgcaaccaaagcattcatctcttctatcattgtagcaagccaaccaggatgagacatcgcttctcaaaaaattttaggaatagtgatagaatcaagagaagctacaaaagaacaagaagaagaggagagatgattataagacacaaaagaagcaataggaaaagtacattgatgtttacctttacgtagtgcaatgggaagatcatctgagatttccggatctgatgacgaagatgcaggtgcaggacatgaaacaagaggtggaggaggggggcgcctggtgtacactataggaggccga

SEQ ID NO: 277336 - DNA, 497 bp, Cannabis indica
aaagaataagaattgatcgattacttctagctaaaattctttctcctgttgatgtttctggttgtgatacttgtgctgattgtactggtgaaaaattgactaaaataagaaagcagactgctcactatagtcactctttataagagattatccacactaacatcagtaaaccttattccaacacgttgtgcagcaacaagtattttataacttttatcgatgttttttcttcttatggcctcacctacctgatcagagacaatccaacgcttttgataaagtcaaaatctttcgaaatgttcttgagaaatcattgggaagagtcataaaatttgttcattttgatgcggaggagaatattctggttgttatatagaatctaaacaacacatgaggccttttgctgaatattttccagaaaattgtgtagtttctcaatacaatatgtcaggttcactgagaaaaatggcgttgctgaaagcactctcatggatatg

SEQ ID NO: 277337 - DNA, 575 bp, Cannabis indica
tgttcttactcttgtcttctttttttcttgaatttttgatgaaaaatggtgtaatgcatgcttagtttaggttgttgttgttgctggatttttgttgttgtttcagaagtttaagcatgattaattgaggttaattaagctgcttgtgatgcatgataattaggttgcttaaagttatggtttttctattcaaaagcttaagttttcaaagagaaaattggaaatttggtggctgtagttgttgcatgagttagggtttggtttctgcagtttttaaatgcttgaatatgagattttaatcagggtttgatgcatgatatgttgtttagacaagttttgagttttagaactcaatcttgaacctttaatggtgaattgagtttctgtggttgaagctcggttttgttgctttagaattgttccttagggtctaaatagcaggtctggaagttttggtattgtttggatttgatttgatgaagttatgaatttttgagttctgcctgcgaggaaccggaattccggttgtgcatccggaattccagatggggttcaggaatttccagaaccggaat

SEQ ID NO: 277338 - DNA, 604 bp, Cannabis indica
attctttctactttataattcgtgaactcgtggagcagttcccgaactatcaccacatacgcggccattcttttgtcgcgcgtctgatactctcctgacacctagttcacgaccagttgggagtcgctgtagacttctactcttttggctctgacaacctttgctaatctcagccctgctatcaaggcttcacactcggcctcgttatttgaagctgaaaagtcgaaccatagggctgcctggagtcaaagtccactcggagatatcactgcaacccccgctccggatccatttttgttggaagctccgtccacaaatactttccatgctgggaccgacggtgccggtatgttcgcggttgcttcggcttcattatgaagtctgctagcgcttgcccctttatggaaatacggggtacgtagtgtaagtcgaattgacttaactccattgcccatttgatgagccttccggacgcctctggcttttgttggacttgtcggagtgggtgattggtcaacaccttgattggttgatcttggaaataaggcctcaacgttcttaagtccattaggaggcaaaaaaccagtttttcaatgacggggta

SEQ ID NO: 277339 - DNA, 654 bp, Cannabis indica
gatcaaatgtatattctattcttatatataaattttttctacatacaatttaaaataaaagtataacatttttttatacatacaatttttttcttcctttgaatatgttattttattttgttactagttatgtgtaaaaaaaaatcataaatattaaataatttaatattaaaaaataataaaattaaaataatcgatccaatccgcacttttgcggattggatttgagctattgtgcgaatcggattggatccaaaaaaatgaaatacgcacttagtgcggatcagatgcactatgaacaaaatagtgcggattggattaaataaacacccactcattatataaaaataaaagtattttgatatccttctttcatcaaaagatttggggggtatataatcttaaaacatatattaatcggttttttttttctttttgccttaaattggattatataatatgtttgattgtgattatttttttaatggcttatagtaagttggtattttattttccatgatgtttatatttattttggataatgattagttacctaataatgacaatgtcatttctaatatctgacttgtactactattacagtagaacttctatttaagaatactctattcaagaataacctctaatttgtta

SEQ ID NO: 277340 - DNA, 470 bp, Cannabis indica
gtgtttcgaattgaagaagaaagaagaaggaagaggtctcatctaggtttttagctttggaggcattagttggataatgagaccatagccttccttttatactattcttcaatagggttagggttgaattaaatggattaaaaagagaataaaatattgggcaaaaataacatatggccgtacactttaatgagaccaattactagttacaattttgccactttttccaatcacttattcttcttttcaataataccatatattccaattcaaccttataaatgccaaaactatttatttaataattaaattaattatcatgtaaaattgtcatttatgattaattagactccataaagtctcttaattaacaaataaaccctaaaacactattccttcacaatcaagccataacatagtgaaaaattcataaactagacacagtctaattttagaattgtaattgatta

SEQ ID NO: 277341 - DNA, 604 bp, Cannabis indica
tcactcatctgtgttacaattaatgtgattagggcatccatctagcgcgagcatttccgttcaggtcggccagcacacttgaattcggaaagaaggtaagaattgtatatagcgtgatatatgagatatatgcatgttgtatgtatgattgtatatgttttaggtgatatcatagcggcacaacaattgtgtcagttcggcagtacatgcatcgtactggttaagagtgatattcaccccagagagtattaattggcgctatcatagcggcacaataattgtgtcggttcggcagtacgggcacaatactggttaagagtgatatcatggccaatagtactcttgggtgctattgatgctatcatagcggtacgaacatagtgccggtcccgcagtgcgatcatagtgctgatagtgggtgatatcatggtcaatagcacagctagttagaacgttcttgctcatctgttaagccttgtaaataggtgtatgggcacctagttacaggtcggaagttatatgatatgttatattcttttcttactgagtctgtcgactcacagttctactttcatgtgtaggtaaaggaaaggtgaaggctgaa

SEQ ID NO: 277342 - DNA, 432 bp, Cannabis indica
atattcatgctatcttacctcgctccgtgctccggtcagcctgagtggaagtgcaactcaacgctttacagggccctaaaccataatattcaaaactcggtgagagacactctaaaacatctatcggggatttaaaattgaaactaaggataaccctatcgataaatagggtgctaacaccctaaattacacaaaaatgagaaaaactagggttcgggaaaaaaaccccaaccggaagatcggttcccaaccggaagtctggttctaggtaccaactggtcgaccggttgcaacaggtcccccagaaccggaatttcggttcatgtgctgggaacccgaaaattgctcccctcaacccaaaattcacccaaacattccaataacctccagtatacctgaacacatcaaaaccaacctattccaagcaagaaa

SEQ ID NO: 277343 - DNA, 518 bp, Cannabis indica
ttttaaattttaaaagtaagccctttatttcgtaactttaggctcagttttcacctagaaaaattccgaattatgatataactatttctacaaaatttatagatctttgaattatctttccaacgccactggaatcacctcaatcggagctctaaaactctagatatgatcattttagtaaaacagtttttaatcctgcgaatttatcaaaacctacgaattttttgaaaattccattataatgttatttaatgcactcatacaataaattaaacccactaaataatctataaaactctaatagactttcatattgggctttaattgagtaattatcctaattcgtaaaaacaccataattttaccttgacacttactataatttcaactatgtttagaaatctatcaatactattctaagcaatagtctctattcactattagtagaaataaatgaatatttattctcacacaaattgtataacaaataaaatttaaaatatatgtatatttttacc

SEQ ID NO: 277344 - DNA, 915 bp, Cannabis indica
aagaatctaaatttatgcagataaacacatataaaactatctaatttccttacctcaaatcccgctgcttaagacttgttatctcgtcactactacctataacaacacatgggtcaaggccctaacattaaaattcgtactcttacaatacagcggaaagatcactatttttgaccaacaactacactaattcagtgaaagttgtcttcatacaaattataggaaattaaattatctttccaatgatacaaagatcactaaaaatggattaaaactgagggagttatcatagttttaccgaaacagttttttagaaatcctaaagcaaacgaactttagactacagcaacaaaacgataattttcgaccaaggaaaactccaaattagagaaaactctctgaagggaaaatgtagataactttctaagctttaaaatgatatatagattattaaaaacgggctagaattgaaaaagatattccaattttactgagacaactttttcaggaaatatgagaaaaataattcacgacaaactgtatacaaatactgattttggacatagaaagattccgaatttgtaagaggtttcttcataaaaattataggtcattgaatcagcttttcaatgatatcaagaccgctggaatcggataagtattcaatattcaagttttactgagacaacttatatagaatattataaaaaataatttataagaaacagcgtagaaatattaatttttgacatagataagtttcgattcagcaaaacctttcttcatacgaattatgggaaatttaataagctttctataggcaccaagattgcgagaatcggatgagtatttaaagagttatgacagttttactgagacatgtttcattctgaaaaataagaaaaggagacctac

SEQ ID NO: 277345 - DNA, 725 bp, Cannabis indica
aacaacaggtaattgaagccaccaccatgttttgaatttattaaaacagcatttggaaataactgatattacatatttttatgtagacctaatgatcaagaatttaggcattatatatcccctgtttaagacaatagagtctatactgacaaattagtgaaaaattacagttttacaaacattgggtactgctaaaaataaacattgagtttatgacgcttacaaacataaaactttgagtacttatggtgctgtttattcttaaacaaaacatgtctacaactaaacttttaagagcgcaaactaaaaggtaaattcagtaaattaataatgatgcttggtatgaaaaagaacacattctcaaaattaaagaccgttaaaaaatctcatgagcccccttaatttccttaattagttttgttcatcaatctaaacacttttgatggaagacattgttttggtataggggagccaaaggcaattccatggactcaagcaactcctttaaaagcagctgcagatgggtggagccatttggacattaggaaaggtgatgtcattgtttggcccactaatcttggttggatgatgggtccttggctggtctatgcttcactccttaatggggcttctattgccttgtataatggatcaccacttgtttctggctttgccaaatttgtgcaggtaaactaaacttccattaactaataaactttttaatt

SEQ ID NO: 277346 - DNA, 582 bp, Cannabis indica
tgacttccttagcttcctttttcaatgttgtgaatattgtggataagaaatcttatattaagataacatccttattattatggcacgatagatcgggtcatatttctaaagaaagaattgatcgattacttctagctaaaattcttcctcctgttgatgtttctggttgggatacttgtgctgattgtacttgtgaaaaattgactaaaataagaaagcagactgctaactatagtcactctttataagagattatccacactgacatcagtggaccttattccaccacgttgtgcagaaacaagtattttataacttttatcgatgttttttcttcttatggcctcacctacctgatcaaagacaatccaacgcttttgataaagtcaaaatctttcgaaatgttcttgagaaataattgggaagagtcataaaatttgttcattttgatcgcggaggagaatattctggttgttataaagaatctaaacaacacatgaggccttttgctgaatattttccagaaaattgtgtagtttctcaatacaatatgtcaggttcactgagaaaaatggcgttgct

SEQ ID NO: 277347 - DNA, 588 bp, Cannabis indica
atacatacatacagaagactgaaaaagatccctctcagtattatgtaagtgttagttttaattttcttggtattgccattaatagtcttatatgtgatacatagatttttttttattattaaatatgtttcttagaattagagcctcatctgaggtggtgcttagagacatcaatagtaccctctatctcttatgattgattacactttttaggaagaagatgtataggtttatatttctttattgtcttgaattgaactaggaaggaccgtgttcctttcttgaaaatttagaataaattatattaggagttcataagactttatttgataaatagaatattactagttaagcttgacaacattaagtttagatatgtacatagaatcttctcttccaataattgaactcttttgtttcttttaaatcaacctttcttgtaagagctcacacatgaaactagaagatcagttagaatcaatgtgaaaggaacgaccaatagaggtgggggctaaggatgtgtgttccgctgacccacagatggttgatgttccagagaacccaataatagttaaggctaacgatcta

SEQ ID NO: 277348 - DNA, 505 bp, Cannabis indica
gtttttttgattcactcgttaaagtttctcagagaagatgattcttacaacttcagttttgggaatctaataatgtggatgattgggaacatgatctataattacctgactttcctaactaatcgaatgttggttctcttgctaattttggaattgaaaagttgtgcagaaatttagattggatctaaattataattttaatagtgaattaacgatactaaatgataaagaagtaattagaaagttgaaacggtaatttgatcaaaactaattacgaactgacactaggagggctaatcactggaattgattatatcaatggatattgcagtataaactcggtaaatataattctataattactaaaagttcaattccgtatttatagtgaagtaattatggaattaataaatagaattattgttgggttttatgccctaaataaagctcatttcatataatcagatttacttattaataaagatcagaaataacattttatgtt

SEQ ID NO: 277349 - DNA, 642 bp, Cannabis indica
taacgaattacacaacttagcaaaaatacaaacttttgacattgaatggttcagaactagaagataacatcttcatcaaagttttaggaaattaaattccctttccaatgataccaaaatctttgaaattggaattatattcaaagagatattacaattttaccaaaacagttttgcaagaacaagattcaagaaacgaatcacatgatattgaataaaactaactttttgacatagtatgacttcgaattaacaaaaagtttcttcataaaacttatgggaaatcgaataagctttccaacgatataaaaatctctaaaaacggatcaatatcaagagagatatcatcactttactgaaacttgtttttctgaaaacgaaaaaatataatagatccgaaccctagataacatttagcattattgagcaagaaaatatttcatacctcttcacatatttctattcgatgtctcaagcccgcaagccttgattataaatccaaaactttaagaatgaaggtagaaaataagaagaattgtggaaggtttgagaggagcaaacatgaagaagaatgaggctttgactaattggtttggagaggaaaaataaaactatgatagtttagggtttgataaaaagatt

SEQ ID NO: 277350 - DNA, 554 bp, Cannabis indica
ctaaaattaatactaaaaataacctaataatactctcggtcagaagcagagcatgagcaacatcttcgaatggtcctgcagcgacttagagatcataaactctatgcaaagttcaaaaagtgtgagttctggctgtcacaagtgtcctttctggggcatattgttggaaaagacggaattatggctgatccagcgaaaattgaagcggtgaagaattggcctagacctaaaacaatcactgaaattcaaagttttctcggtttagcgggttattttcggcgttttgtggaaggattttccaaaattgcaatgccattatccgagttaactaggaagaaccagcgatttatatggtcagataagtgtgaaaagagttttcaagagctgaagcaacggttgattacagctcctgttctagcattgccatctgatcaagaaaagtttgtggtgtattgtgatgcatcaaggcagggtttaggctgtgtgttaatgcaagcagataaagtcatagcctacgcttctcgacaattgaaagattatgagcagcgttaccc

SEQ ID NO: 277351 - DNA, 547 bp, Cannabis indica
acctgtacaaagcattttgtaaaaataaaacaatcacaattgcacgatgattataaatagagaatgaaattcattaaggataacaaaagcaagtaataccgggattaaaagttgctcggtcagcctgttgtccaaaaaatgaaaaataattcgaagtttaaaaaccgcttggtcggtcatgatgtcttacaaaaggccttatggccgaataagatatataaaaaataaaagatagaaggaaaagtgtttaaacagctggagtcccaagctcttggtttggttcttctaggacagtaggaggtggaggatctgttgtttgaacgggaggtacatcagcaatctagccagaggtagaagcagtcgcctctgtttcaccataggcctcttgggaagcgcaaaactcaaaatacacgtccttagtatcacccaagtagtcaaagttggcctgagatttagccttccaaaagtcaaagaagagctcaagactggctgtcactagagcattaaccttctctttcagccttgccacctcggccgaaagctcctc

SEQ ID NO: 277352 - DNA, 593 bp, Cannabis indica
ctattttgaaaagtttaaatatattacaagtttattttcagtctgtttaatataaaagtttaaattctgcgctattttaattagtaatcctggttaggggattagggccttataagtattttgggtagcgtgcctaattgtttagggcgttacaatccatctccactattttgactttacgcttgcggtccaagggaggggtgatctctccttcttccacttcctcgtcaatgagaacgacttggtcctcaagaacaccaatagaagatctcttcggagtcaccactatatcacgtgactcggacaggccagcctcaggactgtacgtacaggcaagggtttcaaggaggtcttccatcatcttcgctgcttaagaaaataaacaaaggggtttgaacattgccaaaaaatcaggcatgcaagaattgttggaaatattttaccacgatctagatttattaccatgtatgtttcattaacatccaaatatgaattctaaaacaatgaaatcaacacatataaagtttaagaaaccttacattgggtgcagcggaatataatgactcttccgttcagatctctagcccatgatt

SEQ ID NO: 277353 - DNA, 571 bp, Cannabis indica
aaaatggtctttttgccccaataatattttgtcctttagtggactttatttagttgatttatgggttttatttctttaaatgttggctgaaatataagggaattatattaattcttttctttattcaaaaatcaaagttagaaaaaatagaaaatttctcaaaactctctctcttttcctctctcttttggccctctttcagcagcaagaaaagaggattttcctcttggatttcaagccctccttagcaagtttaagtgttcatagttgttggtatgttttctacacctttcttgtatgttttcttgaatttttgaagagatatggtaggttgcatgcttagttttaagttgttcttgctgctggtttttgatgattaattctgtagttaaagcatgataatttaaagttatttaagctgctagtaatgcatgatatttgctttgtttcaagcttggactttttagctcaaaactatggttttcaaagagaattggtcaaaatctgttgctgtgattttgttgatgtttgtagtagttttcagagatttattttatgcatgtttaagtag

SEQ ID NO: 277354 - DNA, 572 bp, Cannabis indica
gttgttactgatatttcgcaacaccaaaaagtacaatttaactggaaaaagagagaattatttgagagatgacaaatgcgagtattcgacctagaatggcgagtactcgaattaggaatgcgagagtaaacaacaaagctggaaaaatagatgagacggtgaattatagtggttcagtcagatttcgttctgcttagtccactgtagcaagggattcgtaggtgcattttcacggtggatcacccctttatatacaaagcaggtgcccaatcggttacatgaggatcacatttattgttaatccattatttacacattaaattgtcatgattaaactcagacaacgttaacattaataaatatatgacagttactgaactcatcaacgtatgcgtccttcgcatctgcgagttgaccgttcatgttccgtctgttgagttcgtagggtcgcacgtacgtttggaacgtctgcgtccttaggtgatcgctcgttacagacgtcgcatgctgaagctggtaacatctggacatgcgaacttatattggtccgttagggctgttgggtcattggg

SEQ ID NO: 277355 - DNA, 438 bp, Cannabis indica
tattttcatggttttaattgtaaaattattttaattgaaatatttaatttattttaattttgtgttaattctgagattttgagcaaataatgataataatatatatgtgaatggaaatgttagaacccaaatgagtccaagcccaagttcccagcccaacatatcaacgttaatcaccatgggctccatttatctatcaatacacttctcctcaatctatctattaatggccctttgtagttgggtcgatattcattaattaaggggcgttgtccacctggtccactcacaagccatcaactaaaacgtgttcttggttttcccacgcctcaagtatatcatatagtaacagggaaattgatacatgggcttatccaactgaagcagtgaagccacttactcagcttttcatgccactttctccattttttttcatgc

SEQ ID NO: 277356 - DNA, 530 bp, Cannabis indica
taaagtgggaaaattgtaactagtaaaaaaggcccttaagtgaccgggcactctagtgaatttttgcccaatattttattcttttttaattcatataatttaatcataagccctagttgaaacgctataaaaagaatatgatgctctcatctcatccaacacttttcaacctgccaaatctagtttctaactctctaagacaattagtagatgagagacacattctatagtatttcaaaacctccttcattgctcttcatcaaattttcccatagtgatacagtgtcatgcccacacatagcaagtcaagtactcaatcatagtgccgaagacggtggtaaccaacccgaaggagagaaagatattcaggctcagatcttgataatattctacgacagaaaggaacaagggttagagatctgagcggaaggagtcatattagtccgctgcaaccgatgttaggttttataaactcttatgtgtttaattttattgtattagagatattcatatttaggatgttaattcaa

SEQ ID NO: 277357 - DNA, 771 bp, Cannabis indica
atattattatttacctaggtaggtatgtatatatatatattatttttttgtttttaaatttttgacttgttaatctagggttatattagggttaggattatatataagatgtttatatgattgtttagggtttggatggtttagaaacggggtgagaggcagagacggagagagagaacgaaaccgagccgtgaagaaaaagtgagatttcgggtttgtcgtttgagagtttgttggctgctctaaatcgtttctttgattctaaatcctctcataaggcttttagaatgtgattaataggtctagaatcaaaccgttcgaagtcaccattgtttacgttcgaaaataccattttgaaacggacccggatttgaacgtgtttaaattattttgaggatcaaaggaggttgtatttgagtttttgggatgctaaggctcggtttggacgaaaaataatggagctttgatgtcaaaaacacaaaactaatattttgacaccataaacggcagtgcaccggagctaaagaagacaactcttttaggacgtgatttagttatttctttggacaagattggatcggtttgagtttctaggcattgtggggatcattcgtaattgaaaggaggcgtcgaaagcaagaaaaacgggagtttagaactcactgtggccggagaagacgacccaccggcgaaactccggcgaagctccgttcaggggttttaaaggttttatttcagattttttttctatacttgacttgttttagctat

SEQ ID NO: 277358 - DNA, 1241 bp, Cannabis indica
gtactagcttaccgagtctagtttaattatgccttaagcacataattcataatctcaatatatacatatatccgacatggcatagtatttacacaacatatatcactagagtaataaccctaggctattaaaccactcatattagggtaataaccctaatcccggttacaactactcacatatatgatattcaacataagcaccactgtgcatactctacgtgcaaactactgtcttacctgttgtcccgtaataacagagattccaaacccctgggtgctccggatcaagtgccggtaatcctagtcacacaacccgagatttcacaaatagggttaatccctaatttcactttcacttagtataaacatggcattcaaaacacagataatcaaatagagctcggaacgagctttccaatgatataaagaacgttcacaacggagtcccgagtcaaaagttatggccaaaacaaaacgggaaaaacagacattcccactgccaaacccagtcgcgacggccgaaaatcccgtcgcgacgactgggttctgaacacccaaaaactccatttttaaggcctaaacatgccaaaaaacccaactctcaaaattcaaattgcacaaaaaacccaaaatcatgcttaacacacaactcttcaagctctaagacttgagctttaaatccttcaacctcataatttttccagcagcataacactacttaaaacatcatttccaacctagaaaatactcaaaacatctcatccaaacccaacaatctaacccacaacaataactatcaatttcacacctaaactcatcaaaacaacaccaattcattgaacatgcaaactcaagaacaataaaaccaaaaacatgcttttaccacaattaaaattcaacaagaacttcaatcaaactcagtaaaggaaactacctcaattccaatcaaagcaaatctcaaaaatcttcaaatatcgagctcccaatcaagcaacttccaccaaatcaaaaaattgaatatcaaagagggtgagagagagagagggttcaagtttaaggggaacacaccaaaaaataaattttctttcctcaaaaattccttcttttatctaatataaatcaataggtcaaaagaccattttgcccctaaggctaaaaatcaagctcacatatgcacaacggcaatttagtcaatctcatcacaaatattctcaaattaatttcagattaatcacatat

SEQ ID NO: 277359 - DNA, 789 bp, Cannabis indica
atttacatattgaattgcaataattaactaagcaacgttaacattaataaatgaatggcagttactaagttcatcaacacatgcgtcttccgtacctgcgagttgactgttcatattctgatgtacaactcgcagggttatcattatgtctgcgtctttaggtagtcacttcttctagacatcatgtgttgagctgatagaacctagacatgcgagtctatatcgctttataaaggttgtagggttcctaagatcaactcgtacttacagagaatcattctcctcgttgatacgaggacaaggggaggatgatcgcatatattcgatatatgcgatctactctcttgtcttggatgcgattagacttcggtcatgctcgccacttctcgctggttatacctttaagcgaggtttaagacttcaaggagtccctcagggacatctcagctttctgtggaaaatctgagtatacgtgtccttttagtgggggtctggtctcgagtttctaggtgagagaaatctcactataacaataaccaatttaaaaaatatctacctaatgtttctatatatatttattcataatacataccacacacaccacacgaccactctcacttatatgttagaaatttttacaccaaaaatacaaaataccaactttattacatatatacaacaacacggttacattaacatttttaccttctctcttaaatttattacacatataccacttgcacatcaaattcatgcacctatcaaccatcaatcaactctcaatcactt

SEQ ID NO: 277360 - DNA, 1071 bp, Cannabis indica
atatacatatatatgtacataatatgtcaattattaatttgctattcctaataatatatattagagaaaatcagtactttttagctaggtacatatttacactggttcttatttgatcgattataagtgactaaaatgtttatccttataaatgattggaaggtgaggaacaatataaatatatatgatcaatcatataaactcaagtatataaataataatttcatgataaactataatttttttggtcagaaatataaacatatacataaacaagatgtcgtgacaaaaatatgaggtactttgtacttggaatataattacttataaaattgtgatcacacttcacaaccttgctgaaataatatctaaattaatacatctaattaatttacaaccgcaaaatatcaaaaaataccattttatataaagttctattttcagcctaaaactgaattagtggatggaatattatagatcagtggtattggggtaattaattaattaaactgagattaacatggctgatgacattacaatttggactgtaatgcaatagcaaattaaagagagaggagaaaggagggttttcaattatcaaagacccacatgcaccacttgctaggtctgcaaattctatctttatctatacaagttcaaaacctcatagctttgaggtccacttgctttaaaagcgtgacacgtgtctcctcccccgctttcttcgggtctaagtcaaaaatcaatcttggattacaattggactagtcttgaattacttttaattaatcattcgcctttatcactagtttactttaaggttgttaatgcctttgctctaatttgttcaaaagcaaacatcaaataattatatatagaagaattagtaaatttgctcctgaactcatctcactaccgacttgtgcctctaaattaaatatacatgatgttaaaatatctcctcaatatattatcagtataataatgtcctacatttaggtttttaacaatatccatttgatatggcataacagaatttgatggtagttaattttttttttgaaatattaa

SEQ ID NO: 277361 - DNA, 1070 bp, Cannabis indica
ctgttgtgctcacagacacagattcctcaatagtggccatcctatgccacattaatcctagaatgttgagtagtccagcttcggtagtgtacgacttaagcaatccatacttacagaagtagttctctatttgatccatctctcaaacaaaatcatttacttcctgagcggcaggtgtggccttagcttttagcttttttttttttttattcttggggtcccagatggatcctcctccgggatagcttccaaggcctctcttgaaataatctctgaaacgacttctggatagcaacaactgaagtttccctcgaggaactccctcctcagttccgtcagtggtaattccttcaaaaggtattacggcagagttgtttttgatctccaccgtgtgaaggtggaactcttcctcagatccatcactggcgaaagaagaaaagaaaagtaccaaacaattaaatacccactatcacttatcatcgtggttaaatactataaatcaacttggacaatattattttatcatggaacaaagagttacaccttatttagctttcactataatattttattttatattaaataacattattatttttttagcaaacattggaggttgatcatagctatatatgatattgggaacaattgtattcctaaaccgcttaagagactacccccgccaaaaattgtttcaatagtagaaatataggtttagaactttaagctaatttttttaaataatgattactaaatttcagtagcttcactcataataacttcaatagtgcatacaagaatattagctcaaatactattgtatgtgtcacaaagggaccatagatacatagttttcgtgatatccttctatattaaactcctattttagtcataaaacaaaaagtaagtgcatgtatatgttggaagttattttaccaggaacttagatctactcacaagtatgttgatttaacaacctaaatatgaacttctaaaacgatatgaaattaaacacataagagtatcagaaatcttacagtgattgcagcggaatatatatgtctcctccc

SEQ ID NO: 277362 - DNA, 531 bp, Cannabis indica
tactaaaatgagctcctatttatagagccataaaaggactaaaaataaataaataaaaatttgggattataaaataaatattaagattaaatttgacatttcaaatcaaaaataaaattaatattatttttgttatcattgtgattttgacttctactctttggatgaaggttgagtgtggaagaggaaaatagggttgatgatgacctagacttatcatcattgcatcacatgctttggaagagacaaaattgatgatgagcttcatgggctggcttaacctttttgggttgggttgctttggacttcaacaaaaatgccatttttttcttcatttcttttcaactttgctccttcctctttctttcaacaaaaatacactttaattcctacaagaaagacataaattgaatcaaaatcaaatattttcatttataaaatatattacaataatttcatgaaaatatcaattaaaactcaatttattttatcatttaaaataaataaaagtgtatttttaaccactaatca

SEQ ID NO: 277363 - DNA, 640 bp, Cannabis indica
ccgaaaatagagagagagagtttcagagaaaatgatttttcttaatccttgattttcctcaattttttctaacttttaataaatgataaaaatacataaagttaatctttacttcagccaacaaataacaaatacaatattaaactcaattactaagtccactaaaggacaaaatatcaatggggaaaaatgaccattttgcccccaccacactaaaataacataaaaggggtactaaagggtattttgggaaattcaaaattcccgaccaatcccgacatttccaatgtctaataaactgccccaatatactaacatgctaagttgtgattttactgagccaaacaccgagttccatgttgccgggcaccgaaaatgcaaaactatgaaatttcactatatgacataaaatgtatttcagaattcaataataacagcataaataattatttaaatatctataaataattttccataattaaatcataattaactgctaatttctaaattaaactaagcggtctttacagttatgcactagacctgacatatgctatgtagtaggaattgtgaagaggcattagacaaatccaagagaggaacattggactacagttaagcatattctgaaatatttgaa

SEQ ID NO: 277364 - DNA, 1052 bp, Cannabis indica
cacggacagacaaaaaaaaaacataagtataaaaatcctgaatccaaaaggacaggtcaaaaaagagaaatatgtgcatcaaaaaagatacacatataaatatcctagccctaaagggcaggtcgaaatatatacaaatggcccggggacaggccttagaaattgtctccccttcaaaaataaaaacagctatataaatgtattgtctcaaagtagctgtatataaacaaatatatatataaagaaaaaataataataaaaagagaagtgggtgaaatcctggttgtactgggttaatctcgagcggcctaatcaatgcgcggagggagacgaggtccgatgcgtgcctccaccatggcatcaagcttcttcttcttctcccgaaatttggcgatcatctcctcaggtttggggtagaaggtaagcttgatattttggtcattggtagaccaagccatgaagacgccatcatcaaagcgcttagggcaccggccgcaggaaacgggagaaagaagctcagctctttttgccttctttgaggcttgttccttgaagtccctgagctccttcagctccgcggccagagcggcccgggactctaagtttgcctggtgagtttcctctaaggatctcaccttggcaaccatctcgtccaaggcttccctggcctcccggagctcccgcctggcctttgcagtggcctcaccttccgccctcagctcctcttggtgcttggcctccagcctgtctctccgcagggcctcatcccggatcatcgcctccgcctgggcttccctccgcttagcctcctcctcattggctttggcagcggcctcccggcgctcagcagcctcttggtaaagctgcctctccgcagtaagatcctgaagaaccttcctgacttcgttcatgtccccaaaatcagacaggacgaagccatggttaattatgttcttggagaggcggccagcttcagcagcaagctaaacaacaatacaagtataagaaagaatctccaaaaaagaaaacaataaggggaaaagcaaaattac

SEQ ID NO: 277365 - DNA, 539 bp, Cannabis indica
acatgctctttgtttttagaaaactattttcaaaaaataaggccaaacaagcttagttgtttgcaaaaagtaattttctgtttttcaaaacaaaaattaaaaccatttttaattatgatgtcaaatatgtactaattttttttttcttaaattttacatttatatttaacaagaaattttatatttataatttcctaactattttttttacttgttttttacttattaaagtctcaaaaatattttttttcctttcattatatattttttagtttcactttggtctgattttttttaaacttcagttgctaacatttttctttttcttctctttctatttgtcttttttatttctattttttttttcaattatctctctttgttttttattttttcttctcaaactagtttttttaagctttgtatatatatatatatataaatatatatatatatataattagtgtacaattttgtatctctatttttaacagttctttctctcttaaacaaaaaattaagagcactcctcatatata

SEQ ID NO: 277366 - DNA, 662 bp, Cannabis indica
aaacaaaaaccacatggacagggagattctaaatactcaaattctaaacctaaatctgatatgcatgatgctaatgttactgctggatatgaaagtggtgaagtgtaccaagttggaccatccatcaaagatgaatggatccttgactctggttgcactttccacatgactaataataaagctttcatgtttgatttcaggaaaacaaatgggggcagagttatacttggaaacaaccaaacttgtgatatacaaggttctggatctatcagttttaaaatgcatgatggaatggtcagaactctaagtgaaattagatatgttcctaatctagccaggaatctaatttcactaagtgttctagatgaccaaggcattgttagcaagattgaatctggccaaatgaaaataagtaaaggggctctaactatcatgaaaggacacaaagatggaggcttatactacttaaaaggacaaccagttgtaccttgtaattatactgctcacagcaacagtgatgactcaaatgcaatgctatggcacaagaggctaggacacataagtgagaaaggactgcaactaatgagtgaacagaacctactaggtaaagacaaggtatgcaaacttgatttttgtgagtgttgtgtgcttggaaaacatca

SEQ ID NO: 277367 - DNA, 523 bp, Cannabis indica
ttgtttaaagttatggattttctattcagaagcttaagttttcaaagagaaattttgaaattagttgctgtgattgttgcatgagtttgtgtatgttttctgcaatttctaaatgcatgtttatgtagtttaaataaatttaaatggttgtttgtgagctttagccaagttttagttttgaactcaaagcttggagctcgcatggcatttttggtatctgagatttctggattgctttagacttgttctttagggtatttagaacaggtctggaagttttggtatgatttggaattgatttgagcaaattatgaatttttgaaagtttcctgcgaggaacgagaattccggttgtgcatccggaattccggatggggttctgaaatttcaagaacttgaatttcggttgggcaaccggtctgccggttgggtgattttcaagaaccctagattttctcgtttctatgttatttggggtattgccatgctttttatcgatagggaaacttttagtttctagttt

SEQ ID NO: 277368 - DNA, 565 bp, Cannabis indica
ttctaactctggaaatggggaaacacctaaccgagtcaccgcaaagatgaaaattgagaaaatgaaaggcctggggaaccctaccaaaaccggctagccggtttgcaccaggtttcccaaagtctttcatttgttgctcaattctccaccaaatgcaatgaaaccttccagagtacctaataagggcatacacaacatttccaaccaacaaatcacagaacaaaccattaacactcaagttgccattaaagctcaaagctttgaactcaaagctcaaagttgcataaaacttacaacaaacctcaaaaccagctgctaggatcctaaaacaactcaaattaaacataaaattcgaactccaaacaaccctaatcctaacagctcctaaaactcaaaatcaactcttgaaaccaaataaaacttgagaaaaatcataactagagagcaattagggtttaccttgattaattcctccttcaatccctgtgaaaacacaaaatccagcaatgaattcccccttggttggctggtacaaaaaagagagaagagaaagaaagggttttct

SEQ ID NO: 277369 - DNA, 237 bp, Cannabis indica
accatgggcctatatatacgagattccaataagcagatcaagaacttaccacgtaaattcgctgacttattaattctttgttgcatccacgcatagaactcagaattgcactctcagctattctatatgtccaccatatagacacgctattaatacattgaatagggataaaattaccgtaacacccttcaatgtattttatccttaaaacacttagccccgtatagatgatatttc

SEQ ID NO: 277370 - DNA, 648 bp, Cannabis indica
tgtgttatctcctattccaattttggatagaattagagacatgtcttctgtataatcagatgcactttataaacagtaaagaattcagtatccctagaggagtaatgcatatagaatatgatgttgcataatgttttatgaacacaaaggaagtaatggtggagaaagcagtagcttacaacagacttacagttccagtaatttgggtttagtcaaatacactacacttgatctggatatcaagacaatagattgattgaaatgcactacttgttttatgttagtgcaggtgggagttttttggaattttatgccctaaataaaactcatttcaatataatctgatttgttatcaataagagattagaagtcatttgtgtttacatgtagttttcatgtttaaagtttaaagtataaaatttcttttaagtccagaacatatagttattcacaattacaatgttgtcaacacagtggaaggtgattgtgattatatgcttcaaaagttaatgtcccatgattcatcagtacactggatttacattgatgtgatagtcagtgataaagcttacttacaccttggataagtgttatgttctttccagaacattgacaaagtatgcttgtatcgaatgtatagagtataca

SEQ ID NO: 277371 - DNA, 529 bp, Cannabis indica
gcagcggtcaaatttggattcaaagcctccaacaatgaggccgaatacgaagccctaatcgctggacttaaactagcgaaggaaatgaaagtcgagcacatcgagatctgtagtgactcacagctagtggttaatcatgtatctggcgagtacgaggctcggggagaaaaaatgatagcatatctgagcaaaatacatgatctgcttgcacaattcaaaagctacagcctcaagcagattctaagagaggaaaatacaactgcagatgcgctagcccgtttggcgagcagcaatataagtgacaaggcgaactaaggcgaaccaggtcccgatccagtttctcgaagagcctagcatcaccggcacggaagaaatcgaaatgatcgacacgtctctgaactggatgacgccaatagcagtctatctcaactctggggaactcccagataaccgaaatgaagctcaaaaaatgagaagaaaggcaacacggtacatcatcgtagacaggatcatgtacaaaagaggattc

SEQ ID NO: 277372 - DNA, 544 bp, Cannabis indica
aacttttttttttttttgttaatggcatatatgtaaaactaagtaatcttcttcttcttcttctcttttctcttctcttctgaactccatgattcctctgaaagttcaaccgcaccacctgtctttcttcctttcccaaaatatccctctcccttcctttatctattcagtctcccacagacccagcaggtgtcatttcaaacccaatcgtcactgcttttcacattcaccctctcctatcccaatccctcgctcctccaacctcaccttcaaccccccgagggtcctcaaaattgaaccattgtttttccaaaatgatgatgataaagacaaaccttcgcctcaggttgacgatttgtcttcaaggggagtggtgtatcagaaaactttggcattggtggagtgttccatgtttgctgctctcaccggcttagtctattttttgagtaattctttagcgattgaggttcgatagtatgaattcaaaagtgggttcttttatttcagctgatgaaaccaaaatctattagtttttttttttttt

SEQ ID NO: 277373 - DNA, 590 bp, Cannabis indica
accccaatagaaattggaattgtaaagctgccctgatctttcaatttgggtgggattttacttttcaacatagcactacagccctctgttaaagcgacagtttcaaactcgccaagcctccttttctttgtcaaaatgtcctttaaaaacttcacataggttggcatttgctccaaagcttccactaatggtatattgatgtggagctgctttaaaacatcaagaaatctccggaattgaccatcgtcttgctgcttcttgaatcgttgaggaaatggtggaggtggcttttgcaaagatttttctgtagcagaatgctgacctgatgctgtaacatctgggggaatttcagcaactgaaattgctaggattttcttcatttccccctctttttggattgaagagggctccgtactgcctgttgcagccatatttgactgaagaatttttccacttctcaagattaccgctttgcaatgttcttcgccatctctttgtgggttttcggtgtcactaggaaaagtgccttgtggtctattcttcaaatcattggctaattgtcccaattgaatttcaagattccgaagaga

SEQ ID NO: 277374 - DNA, 713 bp, Cannabis indica
attttaaatatagtcatattatatgtcgttggacttgattttgaatgtagaatgcgatgatgctaattatttaaccatttgatggtataggtgagagtaatatctaagattggactaaacaataggagctcgagacttgagagcttaagatcgtcttttggacaaagtttaacgacttgggagaggtagagactcaatttgattattggacttgatttttatatgtgttgtataacattaggcatatatattctaaaattttatgatttgctaattgtttgaaaaattgaaaacataacctgcacatttttctggattgttctggggcactgagtgccaaacatatttttgtgtacaaatatttatgcaagttataattttgggtatatccaaaatatacctgttatgctgtcgaattttctagaaaataaaaaggaatatgttcttttgttattcttattaattgtatgctttggttatactgatgagagtcatgttgatcatgtttggtgcatattgttgtttcacgactccgtgtcatcataggtagattaggtacgcactcacctgtaggtgaaagacctagaatctgtacagggagtgataaaatctgagccccgttattatggtggatatcaggtgcgactacccaattttggatgtcatattctatgattggtattgagagctaggggtctagtggacggtgtgat

SEQ ID NO: 277375 - DNA, 564 bp, Cannabis indica
ctctccataaagatgatgtcgtcgcattctttcttaaagagcttctcaggccgttcaccaagattattcacattggtaagcggcttctccttggcttctctggcataccgttcttgtgatttgcgagagtcgcccgcgatgtgtggtcctccgattatagtcaggatattgcgaggtgttttggagccactcgcgttctgggtttctcctttgccatccgcttggggatgactttcctcgctccttttatacttgtcgaacttccctctccggatcagctcctctatttcatcctgcaagacccaacattctagagtagtgtgaccaatgtccttgtggtacttacagaattttttaggatccctccggtcgcgattccccctgatggggggcggcttcttgaagactccgttcctttcttcaatcgcatagatatggtctcgagggactgcgagttcagtataattgacgaagcgaggtcctcccttcctttttggcgaggactccttctttgggggtgacttagccagcttcggacttcgctgtctgcgcgggctgcgtctt

SEQ ID NO: 277376 - DNA, 993 bp, Cannabis indica
ttagtagtttgggacggtttattagacattgggaatgtcgggaatggccgggaatttagaatttcccaaaaatacccctttagtgtgttttatgtggttttagtgtggaggggcaaattggtctttttgccccaatgatgttttgtcttttagtgagtttattaaatggaaaataaaggtttattttattaataaatggctgaaatgaatgatatatgtttattttatttcattttttcattttacaaaaaaatcacaaagttagaaattcaaaactctctctctcttttcctctctctctcggctgagtgtgtgggtgcaaggagctgggtttttgctctgattttcaagtaatttctcatccaatctaagcattcttcaagctaggttagcttctcttcattgtttctttaaaaattgttgtgttttgatgatttaagttgagtaatgcatgatgattttggtgatgttgctgctggttattgttgttgttgtttctttgattaaaatgttgaattaagtaggtttaattagattgaattgcatgcttgagttccttgttctagttggatagatttttatgtaaaaagcttgggttttcaaagaaaaatggaggttttggtggctgttatgtttgcatgagtttgattctagtttctgaggttgtaattagcttgattatgagtttgaagcatagtttgaatgcatgttaggtgattttactcaagtttgagttagaactcaaagcttgagctttaatggtgttttttgtatctgtgagttctgggttgttttgttgccttagaattgttctaggggtcgtatagaacaggtctggaaggtcttgtgtgatttgggttggaattgatcgagttatgaatttttgaaaaattcctgcgaggaaccggaattccggttgtgcggaattaaatgactccttccgttcagatatctagcccttgattcctttatgtagcagagcattatcaatat

SEQ ID NO: 277377 - DNA, 915 bp, Cannabis indica
ggagagattcaaggattattgaggaagtgcccaaaccatgggattgaaaagtggttacaagtgcataacttctatactggattactgaacaacacccgaacactgatagatgctgccgctggtggagctttcatgaggaaaagtgctaatgaggcctttgaattacttgaagaaatggccataactaatcaacaatggtcaacagagagaggcccaactaaaaaggttgcaggtatgcaagaagttgatgcaataaccaagttgacagcccaggtggaggcattaacaaagttggtgactgcacaagccaaacaagctcaagttgtctgcaagttgtgtggaggacctcatactactgacacctgccctatagatgtcgacagtttgccaatggagcaagcccacgccattggaaactatcagaataattatggtcgtcagcagaacttccagaagcagtttcctaatcagcaacaacaagggttttatcctcagcaaagccaacatcaacaacaacaggactctagtgtagggtctaatcctcaattagacatgttgctacaattcatgacagagattaagtcatccattaaggtcttggaaaacaaagtggagcagttggcttctcaaaacactaacaggactcaaggtaacttgcctagcactactgaagtcaatccaaaggagaattgtaatgcaattaccttgagaagtggtaagacctatgatgggccaaacaaaacaagccaaaggaggaagatgatgtagagacaacacctacacagagaaagagaagactactgatggtcttccacaaaaagaaacaccacctccaatcagcattgaccatcacatcaaaattccttatcctcaaagacttcacaaaacaagatggataagcagttttcaaaattc

SEQ ID NO: 277378 - DNA, 936 bp, Cannabis indica
agcaaggtaaaaataattttgattcaaaatttttgtaaaataataataataaaactttagatgtgtttgtgcaataaatattagtagtttatttatttttttaattaaaagagtaataagtatttttaaaatatgtgtggtaaaattattttattttttatttttaaaatatgaattaaaatttaaaaattgtcaatattattttaagttttgtgttttataaaagttaccaatcagtttatctattttgttaaatgataattgttgaccgagatttttgataactaattaaataaataaagatttagagctagaaaagaaaaataatatggagactatagattttaagtggttgtgcgttaatgaatgttagttcacgagtcagaaatagagaagatgaaattctctatctaaaatttagcagttttttggcttaataccgagagaaaaagagaagagctcctttacatgtgacatcattgctgtatttataagcagtcatagagtttcttttttattcgtctaaatgtttcatttgagagacataaatacatatatattataattataatattaaatattatatttaagttatattattattttaacttattataatatataaatacacatctattattatttttattgataaattataaggtttattaatatgcagtgtcgtattttttgggttttcgtgtgccgagcttttcaagttagtttattcgtgcttacgtccgtgtctttcatcttctcgttccgtgtggtgctaaagcacatattttttatattttgtcatggaatttgtgcatcgtactgtatcgtgccaaagtttatattttgttgtgcttaatcgtgctcgtaccaattttatgtcgtgttaaaatgcacgagcaacactaactgaagaggtaatacacactataatatact

SEQ ID NO: 277379 - DNA, 386 bp, Cannabis indica
attcatgaaaaatacataatcgcctgaaaattcaatctactaattttataacagtttacatatcatagcccatcatataaaataaaaaatcaaaaaatacaaaaatatctaagaaaaacaccacagaaacagtcagaacgtggtcgccggcgttctcgtcggtttcgtcgccggtaaagtgtaactttgtctccgattgctcttgaagcgtcctttcgattggggaagctctccacagtgctcaggacctcaaaacgatcaagaaaagtggtccgagaaggcagatcggggtcgtctccttcgttggcggtgtaccgtctttaatggagtcaaaatattagtttttcgttttgcacgttaaagcttcgttttcttacgtcaaaaac

SEQ ID NO: 277380 - DNA, 488 bp, Cannabis indica
cccgctatactaaaaatactaggatgtgattctaatggccaaacattgcgttccaatgttgccggatacaaatcatgcacaaattatgaaatttctatatgtgacataaaaatacattccgaattcaaataaatcatcataaataattaattcaatactaataaataaatttcataattaaaccctaattatctgctaattccaaattaaagtaaggcggtctttacatagagtatatatcgtaagtgactgatattaaacttggataagatataataaacttaccgtaatatgtattcaattcaatatcacctagttgatcttagatcaaattatctcaatcctgagatggttagcttctagttcagttgtattatttatgttcttcaatctgttcgttaaagtcgaccaatggatcttctcgtgaaatatttattaagcacatgatagtttaattgagtgggagtgttaatcatagatatgaaatc

SEQ ID NO: 277381 - DNA, 688 bp, Cannabis indica
tgtccaaaaaatgaaaaataattccaagtttaaagaccgcttggccggtcatgatgttgaggccatataatatatatatatgtataaacaggagagataaaaagatcagtgttcaaacagctggagtccctggctttgggttcggttcttttgagccaactagagcaggaggatctgttgttcgagtaggagaagcatgagcaacctggtcagaagcttggccggaagttgaagcagccacctctttcctaccataggcaacttgggtcgcgcagtactcgaggtacatgtccttggcgtcgcccaagtagtcgaagttggcctgggaattagccttccaaaaatcaaagaagagctcaaggacgacagtctccaaagcattgaccttctccttcaaacggtccgcctcggccacctaagcgaccttatcttccttcaaccgaagaaggacctgtcgcagagaactcctctcatcctgaagacgatcaacttcagcagataaggtctcgatggtttcctcaaagcgatcagcagcctcgaggtcctttgtcagcacggtgatcttcttctcggcggcaaacagcttcttgttggcctcacccaactcatgacgaacagctgcagtctccgccctggcctcctcagcttccttcttggccaagtctgcctccaccctcaagatgtcgga

SEQ ID NO: 277382 - DNA, 672 bp, Cannabis indica
taaaattagacaatgtctagtttatgaattttcactaagcaagggcaaaattgtaagaaaatatattccaggttttatttattaattaagagactttatatgtctaattaatagatatattaaatgacaatattatttaataattaatttttagttattaaataattggaattggcatttaagtagttaaattagaaaattggtgtttttgagaatatgagatagaaaaattacaaaatggcaaaagtacaaagtggggcccaatccacatcctatggccggccacttagtgtgaattttaccaattatttttctattattttaatgccaaataaatctaacctaaacctaggtggttacttataaatagatagtgatggcttaagagaaagagattgatgatacatcacaccccttcagtaaaattttaagccttctttctctatagttgaaaccattccatcttcttttcttcttcaacaatttcgaaccttgagtgaatcagtgagtgcccacacacatcaagtggtatctcaatcatagtgtggaagattgtgaagaatccaatcaacaagaaggagaattagcatcaaggaaggagagaaagagatctaggttcagatctggtgatgctctgctaatgaaaagggatcaaagggctagagatctgaa

SEQ ID NO: 277383 - DNA, 915 bp, Cannabis indica
gtaattaatgtattaatgtgtaactttttgcagaccaagtttgtcctcccacgagataaccctacattcgtagactacggtgagtacgagatgtcaaagggtttacgtgactggagggcagactgcaagaagaagtggatacaaaacattgaggagcttggacaggagagggccgacatgtcacctcctgagggagtaactcaagaggtgtggagtgactgcatcgcttattggagcacagacaaacaaaaggtacattttttaaaatttctaattttggtaatgtttaatttatatagtcaataataaataattaattgttagaaaaattattaatttcaggcgagagcagcgaaaaataaagaaagtcggggtaagatgaaatttctaggaggctggggctccaagcctattgtttcacatgttgtcgagggggtaagtttatatttaactatcattcatttaaatttttctagtaaaataacaatactaatatattttctcttgaaaataggctaaccccgacacaggagaactgccaactgcggtggaaacttttcaaaagtttcaccataaaggcaacgattggcgcaacgagttcgcgcaacaagcttacgtaagtttacgttttaattcaatttttatttatttctttcaatttattttgtgttaaaattaaccatttaacttatttgtttaattgttttaggagcaaatggttgaaatagcggcaactcaaccagcgcccactgaagatgagcccgaagagcctgctgtcgatcctacacagtacccccgagacttacctgttatgacgcaagtactcggggaacgatctcggcatcttagaggctttggccatctccccagactgaagggagttggggccaaaagagcacctgccacgcatccttc

SEQ ID NO: 277384 - DNA, 46 bp, Cannabis indica
tagcgcaattgagtgggagcgctaacatgaacatggaatctatagc

SEQ ID NO: 277385 - DNA, 537 bp, Cannabis indica
ttttgaaggcgaaccaggatcagttcacctggagccatagagatatgatagggatcgaccgtaatattatctgccatcatttaaaagttgatccaagctacccagcgaagagacagaaaaagagacccttggattccgagaggcaaggggcactaaaataggaagtggacaagttgttaattaacgactttatacgcgaggtgttttattccttctggatagctaatcttgttcttgtcccgaagcctaacggaacagggagaacttgtattgacttctctgatctaaataaggcgtgtccaaaagattattttccacttcccaagattgaccagttggtggatgtaactgctgggcacgagcttatgtcatttatggacgcatattcttgatataaccagataaaaatgtatgtcccagatcaagaacatacaagcttcgtaaccaacatgggactctactgttataaaatcatgccgttcggactgaagaacggtatagcaacgtatcagcgattggtaaacaaaatgtttgcaa

SEQ ID NO: 277386 - DNA, 541 bp, Cannabis indica
attgttcgaggaaccctagatgctgtcggagtaaaggatcgtcaacaagggcgttctagtgcgttgtagattcttatccaagacttgtatcatttgatgatgccatgtgaatcgctagaaacatgtgaagtgtatggctaacccaataacgaaagtttcgtaagggaaccggagcaggctaccatgagacaaaagattttctttctaaagagattctattcggaactattatatgtccaaggtccaatattgaaataatttcagaggttttccttgactttgtccgtgtcaacaaacaattcgaaatgcctcgacttttttagtaacaggtccgagtcaaatagcaatgatttgaagcacttcttttttactactatttcggaaacccaacggactcaatcgtatggatatgtaaaataacaggagtttcctaactaccttacgcaggaaaaagggaagggaaacgggaagtactcaatttaaaagttagagtaaacaagaattaccatacccgactctcatagatacatagagaattctg

SEQ ID NO: 277387 - DNA, 619 bp, Cannabis indica
cttactgcggagaggcagctttaccaggaggctgctgagcgacgggaggctgctgccaaagccaatgaggaggaggctaagcgaagggaagcccaggcggaggcgatgatccgggatgaggccatgcggagagacaggctggaggccaagcaccaagaggagctgagggcggaaggtgaggccactgcaaaggccaagcgggagctccgggaggccagggaagccttggacgagatggttgccaaggtgagatccttagaggaaactcaccaggcaaacttagagtccagggccgctctagccgcggagctgaaggagctcagggacttcaaggaacaagcctcaaagaaggcaaaaagagctgagcttctttctcccgtttcctgcggccggtgccctaagcgcttcgatgatggagtcttcatggcttggtctaccaatgaccaaaatatcaagcttaccttctaccccaaacctgaggagatgatcgccaaatttcgggagaagaagaagaagcttgatgccatggtggaggcacgcatcggacctcgtcttcctccgcgcattgactaagccgctcgagattaacccagtacaaccaggattccacccacttctc

SEQ ID NO: 277388 - DNA, 502 bp, Cannabis indica
tcattttgatcgaataaaggttgactaaaatggtatccattttagatgagttgactactctattcaactaatgttatctttgtctctcgcctaccgggacactgtattttattatgttgaaaaccttggaaaataatacatatgtctagtttttgatatttttgcaaacatatttgattacttgttatttcctgaacttgtgtatgaatttattgaaccaaataatttacttctgtttattgatatttgtagtgccaaaatgtacaacccacatcccaacactcatctacaatatgcctttaggaatgaacttgaaggtgtgaataagactcttggtcagagtaatactgcacacttcctcatgatgaacatgaaattccagaaagcagctaatgtaaagaccgctgagtttaattccttgtttaattatttcttatcctgagtgccccaattgcaaacggcaccatcagggtgagtgcaaaggtcagggatgctttcagtg

SEQ ID NO: 277389 - DNA, 589 bp, Cannabis indica
gtatttctttggtcaacgggaatcccggaggtcaccttggttcccattgatctgattcctcaaatcaatgggaggacatttctgtcctcttcttcctcttccttcgggctcctggtgcacggaaacgcttttttggtcctctcgatcctgagggccaagactccctttttcgagtttgcccctctgtggacctttccctttcgggaaatctgagcagacctttcgcggatcctgcacctttttctttttcccgggggtagaagtagggtttttcttttggttcccttcagcgggataccttatagggcttggttccctagatttttgcttttgggtacttggcgaggattcctctggttcctttccaagtccagcagaaatggctttaggatgcacgtggattccaactgcctccatggctttttgcatggccagcattacctcttgcatcttttggttttgtgctttttgggctgcgatctcagcttcatgatcgacagccttttgtcttaagagcacaaattccgagtagctaccttcatcataggcgtactcatcgaggtttccctcgtaatcatcgtcaggaatt

SEQ ID NO: 277390 - DNA, 666 bp, Cannabis indica
taataataaacataaatataacataccccaatcttcaaattacaatagttcaatctctaactcaaattcatatactcaagtgaaagaaaatcaatttctttagcttcttcaaacacaacacaatctcaacagccatgaaatcaaataaaacatgcacaaacaaacctaattcaactaagaaatcatgcttagaactcatctaagcctacagccatgaacacccataaagaactaataaaaacctagcttaaaacctaggaaatcaccaagaacataaggaggaacttacctcaaggttctaggttggcttgggggttgaattcaactctgaaatggtggatttgctgaggaaaagaagtctcctaatggctggctcaagcttgctcgagagagggaatgagaggagttgaagatgatgaagttacttagcctccaagtaacttaaataataagattttctcttctttttctttcttttctatttctatttatttttttaaaaaaaagtctcagcccctaaataaaaaataaaaaggaataaaagtataattatttaaagaataattaaattacccacaaagctaaaaaaatctctaaaataacctaagggcattttggtaatttcactaagccctcaacccgacattctaataaaattctaaccta

SEQ ID NO: 277391 - DNA, 516 bp, Cannabis indica
gcaaccaaaaaaactctcttaaaaccacgaattaagaatagcactttcactctcaattagggaagaccaaaactaaaaaaagtgacaaaactatacatgtaatattatcaaccaatctctatctgtgtgagtaacttttttattatatgaaagctcctaactcaaactctaaggaccttatgttcccaaagtgctacaatctggactctccaaatcttatacacgataggtgccaaacttatcagcaaaataattctttcccataatcattggccaccaccacattctaactcagtcaagctttgatttgattttttttttttttatttaagcgtttatatattacaaccatgttttacatgaaactcgaacacaggacctccaagacacacacatccacctatggccacttgagctagcctcaagtggttagctttgatttgatttaaacaataataacaagagataacaagaaggaaatttaggagttagatgaaaaatgtctctttttaatca

SEQ ID NO: 277392 - DNA, 272 bp, Cannabis indica
tatcacataatgcataggtaagaaggcttgacctcgcccctggccatgtatggctgaatcatacaaagctcgataaatgtatcccaaaacagagggtgcaagtgaaactttgtgtccgtgagccatcattgaagccatataaaaagtgtcaagtctaatgttgaagccctcagtaggaaaaacaaaacgacttagccataaagacaaaaaggctgcaagactaccctcttttgaaatgttcaatggaatagagtgaagattaacttttgatt

SEQ ID NO: 277393 - DNA, 713 bp, Cannabis indica
gtttgtagggtcagtcatcagtccaggaagcagccagagtaacgtactcgtgtataagagccattatccgtgggtggaaggacccaatagaggtttgaagcagggacgttacatacaatgatacattttatgagtaatcttattgtgtttaacctaaattatcactccctactttatatagtaattttttttccttttttcaaatgcgtactagtgacaattgacacctatgatgagcaacggtagtactacataatacaatatgtggcaacaatttaatgcttatttacttgaaccaaaaaagacattaaatgcttatttaattgtcccaacgtactctctttttcattattcactgtacgatattaggtttgcctcgtcggtgttgggaaagcttcgaggtttactgggtgtcctctctttggtttatgttttgtttcttactaataagatatcctcccatattgagaaatgttaacctttgccaaactctatatggagtcacttatcagtaatttgcggtataaatactaagtttaactcccaattatatataaatacttaagtttaatttttagcggtaataatatacttaagttataattttgaaacttctgtaagtacttggttaaataaaattgccacgtggctaatcgttgattagtccaaatcattaaatttttattattttaaaaaaataattcaaatatacc

SEQ ID NO: 277394 - DNA, 995 bp, Cannabis indica
atccaaaattaattaaaaaaaattaattttcaactttaatttaatttccaaaaattaattttcgaaaatccatttataaataattataaaatttcgaaaatataataaaataaaaacctgaaaaaatatttaatttaagttgttctaaaatagcaaaattttcaacttaaataattttctagaatttaattaaataacaaattaactatcttgaactaatcaacttaatttgtaaaatattcctaactaagttgatctgaaattaacaaattttcaacttaaaaaatattttaaagaatatctgaataactaattttctagaaaattctacttaattattaatttcaaaatattctaatttaagttgatccaaaaattagttagaataactgattttcaacttaaatatattttctatgaaaattcgaataattaagtatctagaaaaatttaattagttataactttttaatttaattaaatgcaaaaaatacatatagtttatcctgaatatatttcattaaactaagtgtgtttttcttaaattaatttcaaaataatctgatgaaaaattaatttatatatttcaaaattaattatgttgctaatcaattttattaggttatactagtgtaattaacctactacagttattcaaacaaggcaaatgggccttcacaattgaggttgttcatgtgagggagggctgagttcagtatgtcgtacccactactaatagccccctaactctcacacaaggcccataggagaggaatttaaccttaattaataattgttattcattgaataagcttaatactaattggagctaaataaaatctatcaatagtgatcattttattttaagcaacctagtccattttaattacaaaatattaaatgggctccctatatgcatctcagcccaaagcaaacatataggctcacagaggcacacactgatttggatagatcctatcatgatactaggttta

SEQ ID NO: 277395 - DNA, 539 bp, Cannabis indica
tgcgtgagatactacttgattgcgtatacttgcttagtaatcataaaattcgtaacaagtttttggcgctgtttccggggaattgtttaaagattaatattacacaaaattatactaacttctactttggtatattttctcttgctgaatttctaacctttctcttgcaaaactgttcttatctatttcaggtattttgagtgcatgcgccgccaagggcaagcagttatactacccatcgaccctgaaattgagaaaacttgtaggagaaaccgaaggaacaagaggcaagaaggagtttcagcaactgctgaaacaacagaaatcatggctgctaatgtgaatgcgaatgctgcaaataacggcaataatggtggtgccgtggaagatcaagctaatggccgtagcttgagagattacattctccctactctgacgggagtgcagtcatgtatcaggccaccggcagtggatgcgaataactttgagatcaaacctgccatacttcaaatggtgcagtcttcagttcagtttggtgg

SEQ ID NO: 277396 - DNA, 620 bp, Cannabis indica
taatcttaatatgttaaaatattaagtcacattatttaattaaattattattattactatcgtaagtttgttatataaattacacgtataattatttgttaaaatatgtgaaagattaatattgtttaaaagaaattactacaaactaaatcaaccacaaaataaataatctaaaaaaaaaaatagagagtcagctcattatctttatagcttgcactaataatgagcattaaaaaaagagaaaacacaaaatctaataagaaaaaattagcgaataagcatatctttttattattattattatattttttttaagataccaagtttagaatgttataaaattaagggtaaatagcagcataagtacccaaagttttaagtttgtaagcggcataaacccaatgtttatttttagtggcataagtacccaatgtttataaaactgtaatttttcttcagtttcgtcaggatagactccgttttaaatttactaaaggaacatttagaagtaactgatactacatgtttctgtctagacctattgatcaagaatctagaccttatatgtggactgtttaagaaaataacagggtttgtacggacgaaattagagaaaaatt

SEQ ID NO: 277397 - DNA, 561 bp, Cannabis indica
ggcatttaaatggttgaatttcagaattggcatttttgagaaactaagatgcagaattgataaaactacaaaatttgcaaaagtgaggcccaaatccatatagccttggccggccacttttataggaaatatcatctgatattttcattattttaatgccaaataattcaagcctaaccctatgtggtatgctataaatagagagtgaaggattcaggaaatttacacattcacatcatgtttccttcaagtaaaaaacctgagccttctctctttaaacctagccgccacctttaccctcttcttcttcattgtaaattttgaacgaaagagacatattattccgctgcacccaacgtaaggtttctcatactttatatgtgtttaattttataatcgttttagaagttcatatttagggtgttaatcaacatactagtgagtagatctaagatcctggtaaactaatttccaacaactagtattagagccatggtaattgatttgcttgcaagaaatttggagtttaaacgatttgtttgtgttttggatggtatcatg

SEQ ID NO: 277398 - DNA, 523 bp, Cannabis indica
agaggtctgatattgcttcttcctactccgccgttaatgacatccacatgtggcacttcagctccagataatggtacgttcatcatcccaatgttgatggacccgttgttagctcctccgttggtgtgatttccagccatgatgatatttttctttgaaatgaatgaaatcttaatcggttcccacagacggcgccaaatgttgtcgagtgaatttcgcaacaccaaattatattgttttattcatatcaaggagaattttatgtgtaaagacaagtgcgagtattcaacctagaatggcgagtactcgactgggaatgggaaaataatcaatgacagctgaaaaataacaataagacagagaattatagtggttcagtcagatcatgatctgcttagtccactgtagcaagagattcgtaggtgccatttcatggtggatcacctccttatatacaaaccaggtgtccaatcggttacacaacgatcacattcattgttaatccattatttacatattgaat

SEQ ID NO: 277399 - DNA, 640 bp, Cannabis indica
cctgatcatgatgtagggtatttgcatgaccctgcacgagcccaagagcaacacggaggttttgtaactcagtatcatctccaatggtcatttgagtgttagtaacaggcagaacgactgtgttatgaatgccctggttgggtgctgaactattattcctagtctcttgcatgccaggcgcgatttcatctataccagtcgttacaccgtgacccacatttgttggctattttggattaatagctcgcagaacccttgcctttcctgggttctgcaatgcaggatccaccgcatgtggattggctggatcaaccagacccctacgagtctgcaccaccatcgtacttgtggttagattttgaatgaagagtgattcttgattctagctctcaatgaaaacaccaaaatgttgacctcacttttagccaacgacagtgagtcttatttagtaagcgataagtaattgatagcaatcgatatatggtaaaccaatgtaaagacacgagaattttatagaggttcagccccgagcaattcggtaatagcctaatcctcgttatttgtattgacacaagaacaaggagaaatgttccttttcttatagctcttacaataatatctctgaatatgaattcttaaa

SEQ ID NO: 277400 - DNA, 438 bp, Cannabis indica
gtgtaatccaacaaaagattttggagaagattcatatgtcaagcagtttgctattgcgtttttaacttctgtttcgttactctccgctcttaaaatagagtaagtatgataattattataaatatagtatacaaaaatttaatttttttgtaaaatagtgtagctataatagtatgtgtatttgattttatgagtattaccattccttcagtgcttctgcctcggggagttgaagattgattttgaaggtactcgtgtcgcgtgacgataaagacagccctaaatcaaaatgtatgtgttaattgaatttttgaatttccacttttaaatatcagtagtttaattaatgcaataacctctcttggtttgaacaatcagttttgatcccaatattatgggtctgtcttcgattacttctgctatttgtaagcattcatc

SEQ ID NO: 277401 - DNA, 625 bp, Cannabis indica
ttgagcaagatcttcattcagttgccttttgcaaaacattattcctgagagctatttcccctaggtgtgtgcattgacaagacaagttgcatcctgtttttgttgaatatctttgttcagttcagtgacgtttgttttgaaattctgtgagctgtttgttgttctagtttgtgtggttttgttctcatcactcgaggacgagcaatgtcataagtttgggggtatttgataactcttgagtaaagagttatttgatatcactttaagcatttttttatgtaattgtgtgtcatttaaattatgtttgtctcttaatttgtgaaagtttcagtgttttatgtctttgtgtgtattttgaagttgttagttaaaatcaataactcttgtgcataaattggcaaagaaaatagcaagttagtcatgttcttaattttgctgaaattctgtgaagtttttgctgcagcaaacagatttgtggctgatgtgttttattttcttagaaaaagggtgagttggcatttcattaaaagaggtggcatttgtggagatgatgtggcaatataagagtggtggctggagctattacatggagaggctatctacatgacatgtgtagggtttattt

SEQ ID NO: 277402 - DNA, 501 bp, Cannabis indica
gatgcctcataacacggtacgaattctgctgccatagtggaagaagtttataagttgtttgtgtttgacactttttctaagatatagctcctccaagcaaacagaaaaatgtagcctgatgtagaccttctgctatcttggcatccaacgaaaccagaatcagaataccctacgacctctaaatgatctgacttcctgtatgtgagcatgtaatcttttattctctgaagatacctcataaccctcttggctactatccaatggtccatactagggttgcttaaatatctacctaacatcctaataatgtacgcattatctggatgcgtacatacctgaagatacattagactcccaacagctgatgcatagggaatctttttcatttcttgaattttaaggttgcttttagggcattgactaagatttaatttgtctcctttagcaacagaggtatcacctggtctacaaaatcttttgagtactttatcgatatagctc

SEQ ID NO: 277403 - DNA, 127 bp, Cannabis indica
aattggcgtttttgagaaaatcaaatacagaaaagataaaactacaaaattgcaaaaagtgaggcccaaatccacattgcatggccggccacttttataggaattatcctatgatattttcattatt

SEQ ID NO: 277404 - DNA, 542 bp, Cannabis indica
ggacgaggagggcctataggttttgagggagactggtgactcgacgaagaacgagtgacacgtttggacacaggtggggaaggagataaaagagaaggacgaacctttttagagataggaggagccttaccttgaaatgtacgaggtttctgattgaccggaggtgagggaggagatggagttgactctgaactcgggaaaggtgcagaaccaccagcctccgactggtaaaggacaatgtcacgacagggattaggcaatgcagacgcgacagtaggaggcactggaggatcatcagtcgactccatggatggaacaaccatagcaacaggggttactgcaatgggtgtgatattctccatgacagagagaaaggaatttggatgaagcagagcttagggtttcggagaggaaagtgaagaagtgagactgatcactttccgtaggccttaagtataggcaccctgacacaactgaccaggcaaaaaaatgatgatgaatttttttaaaatttgatttttgacctaaataaaccgtacgcg

SEQ ID NO: 277405 - DNA, 422 bp, Cannabis indica
actgcgaagtcgagtccattgatttggctgttactggggcggttcccgaaggtgattgggagtttgatcatcccttttaatgcaatgacatcgccagtaaaaccgtatatgatccacgtcacaggtcgcaggtccttctcctacaatcccatttgtttgaaggcttggaagttcaaaaaattcactgaacttccattgtccacgagtatgcggtggacattatctccgccaatattggcgatgataactagtgcatcggaatgtgggtgatggacccatctcgcatcactctccataaaggtgatgtcgtcgcattccttcttaaacagatttctccggccgctcacttaagattgtttacattggtgagcggcttctctttggcttctttggcgtatcgctcttgcgacttgcggagtctc

SEQ ID NO: 277406 - DNA, 636 bp, Cannabis indica
ttaaggtggaggggcaaaatggtctttttgccccattagtgttttgtctttagtgactttattaattgaagattaaatatttattttaatgttacttggctgaaataatgtgataaatgctttataaactcctttttctcttaatttccacacttagtcaaaattagaaagaaaatttcaaaactcacacactcaaagctctctctctcttttcggccaaagcttgggctgctagggctgggatttttctgctcaaagcttgtgattttcatctcctctttgtgtaatcctagtcaaggtttgatcacttgtaacttcccctttatgtttcttgagttttgagaaaatttgatgaaatgcatgcatgtattgtggctgttgttattgctgtgttttagtattaatttctgggatgtaagcatgttaaattgaggtgatttaagctgttagaaatgcatgtaggctaccttgtttcaagtttggattttctagctcaaaaatgtaaattttgaagaaattgttgggaatctgttgctgtattgttgttaatgtttttgtttgttttcagagattatattatgctagtttaagaggttttaagctagtttgattgcttgttaggtggttttgctcaag

SEQ ID NO: 277407 - DNA, 561 bp, Cannabis indica
ttataccatttgattgtttgtagacttgatgtagatgagcttcctagcttgatttgcatgttttgatccaaagttgacttttcccgagagttgactttgactttgactttgactttgacttcaagttgacttttgactttggacttttgaagacctcttttgaatagggtcttgggttgttgatcccttgatgaatcttttgctcttatgaagtatgaagtagttgatatacttgttgaatctacttctttgattatgtttgactttaccgagcaaatattgatactttgtgaacttgcttgcaaaatgatcaagaaaggattagtaacaaataataatcatatatttttttatcatcaaaataaatgagtgattgacttttggtcaacagataaatttgagaccaactatatatattggtgccgtttagcaacacttttttaatcagttttctgtttttaaaattgagaaagtgaaaatatttttcaaaaacatgttttataaaactgtttttacttttcaattttttaattgagaattaaaatttcaaaaacaaaaaaa

SEQ ID NO: 277408 - DNA, 561 bp, Cannabis indica
ataaattactaaaaatgatatagtgtgattatttatgagccaacatgattcatgtgaatgaaaaagacagccactttactttttaacaaactttgcactttcttatcatattccttaattgggtgacataataagtaactatttaggaaagacaaattgttttattattcaaccattaaaaaaattttatcctatatactatttttcttaactttttttttttttaatttacagtttgagtttttaaagtggttgtagcgctagttgcaataggagtttctatacgattttttgttgcaatttaggttgcagctctagttgcaatagagacttctgtgtagaattccgtaaaaataaacaaaaaaaaaaaaaactgttttgaaatgtaaaaataaaaaaagagaaaaaaaaaaaaaaaataacactctaaagaaccccaattgttgtagttttatctttcactcttaacagaccgagtaaatatttaatatatatatatatatactaggttcatgtttttagttatatttttaatttttattttagttatatatattttta

SEQ ID NO: 277409 - DNA, 651 bp, Cannabis indica
ttagcgtagctcctattacttattttgtaagtgaatagttgggttgagcgtaactcctattacttactttgtaagtgaatagtttgattgagcgtagctcatatcacttatttcataagtgaatagttgggttgagcgtagctcctattaattactttgtaagtgaatagttgagttgagtgtagctcctattatttacttttttgggttgagcgtagctcctattacttattttgtaagtgaatagttgggttgagcatagctcttattacttactttgttgcagggccggccagagagtggggcagccggggcataggccccaggccctacaatttttgaggccccgaaaaattaaaattaatatacgtaaattaaaatatataatatataaatatttgattgaataaaatgcataatagtgttatagcacaaatggtaagcggttgagaatatcaatgttgtggtggttggttcgatccttcactccctcattttgtggttattttacaatttaaatggttttacacatatttaatgtaaaaaattagtgaaatattacttgaaaatccttcatttgtggttattttacaatttaaatagttttacatatatttaattttcttagtggccttatagtatttcaaggta

SEQ ID NO: 277410 - DNA, 663 bp, Cannabis indica
aggaatttttcaaaaattcctaactcaaccaaatcaaacccaatttataccaaaccttccagacctgctctaaataccccaaagaacatatccaaggcatcaaactaacccagaaatcacagatacacaaattgccattaaagctcaagctttgagttctaaactcaaacttgagcaaatcccacaaacatgcaatcaaacctggttaattctacttaaatatgcatgattaagcttctgaaaacaaacaagaacaacagcaacaacatagtaacagattacacaacatttcttcaaaatcacatattttacatagaaaacttaaagctttgcacaacctatctaacatgctttcaaaaccacttaaacaaccctaatctaacaagctttaaactataaaaatcaagacaacttacagcagcaacatcaacagaattcatcatgcattacccatcttttacatcaaaatttaaagaaaacaaagaaagaaagctagataagaattacctcaattaagaacactctaactagctgaaaatcacttgaaaatgaagaggaaaaatcacccttcttgctgcctcaaatggccgaaaagagagagagagttttgagagagttttctttgagaaaatgtaatttttttctaagtttgggaaaaatgaa

SEQ ID NO: 277411 - DNA, 561 bp, Cannabis indica
aatttcttgcattggctcaaaactaattggtaaaagcttaaagatcttgcgaactgataggggtggagaatatattgatatgcagttcaaagatcttttgattgaacttggtattgaatcccaattaactgcccctagcactccacaacaaaatggagttgcagaaagaagaaatcgcacgcttttagaaatggttaggtccatgcttagctacttaactctacctacgtccttatggggatatgcaattcagatggcaaccgacattttaaatgttgttccatctaaatcaatccctaagacacctttagaactatggaatggtcgtacacctagtttacgccattacaaaatctgggggtgccctgctcatgtcttaagaaagaaagatggcaaacttgaaaagcgaactgaagtttgcatgtttgttggaaattctaacgagactaggggtggactattttattgtcgcaaggatgataaagtgtttgtttccacaaatgcaactttccttgaagatgactatattaagaatttcaaaccacaaagtaaagtagtatt

SEQ ID NO: 277412 - DNA, 690 bp, Cannabis indica
tcaaattaaattttttatattaaatattaaactttatatagtatcaaaatatttacaagtgccgggatccagtttcaaacttttaaacatattacaccaaaatacatattaaccaggtcgcacatcgactacaaaatacaatccccagatgtcccgagaccgaacactccatgtcgcgctgcttcgacatgtacaatctcatcctagctcaggttcactcgtgttcagctttcgcctttcctttacctacacatggaagcagaactggtctacagactcagtaagaaaagcatataacatatcatataatatctgacttgtatctaggtgcccatacacctatttacaaggctcaacagatgagtaagaatgttcaatactagggtacagccactataccacatacactacgtaccactctatacgagtgttggtagggcttatttcataccctgagtacctctgagtgatgtaccacacacactcagtacctctccgtacttatgttggtatcacgttactctcagacaacaatcactataccaatacactctataccttaaccgtataagtgttggtagtgcaactaacattttaagcatgcatatacacataacatatacatacattcagttattgatatcacacattatattaatttcttacattctttctgaattcaagtgtgct

SEQ ID NO: 277413 - DNA, 846 bp, Cannabis indica
cccctaaaacattaaaacgaggaaaacaagggtttctgaaacttccccaaccggtagaccggttgcccaaccggaattccggttctgggaattttcgaagcccatccggaattccggatgcacaaccggaattccggttcctcgcagacagaatttcaaaaattcatatctcaaccaaatcaactccaaattgattcaaaccttccagacctactccatataacccaaataacatttctaaagcatcaaatctacccagaatgcacagaaatgaaaaacaccattggagctcaagctttgagttctaaactcaaacttgagcaaatctaaacaacatgcaatcaaactagcttaattctacttaatcaagcttagaataacctcagaaaacaataacaaacatcaacaatattccagcaacagattcaaatcatttctctcaaaaatcatatgttttgcatagaaaacccaaagctttaaacaagatagcaagcatgcattacaacctagataatccattcattttagacctaattaagcttctgtaaacaacataaaaacacagcaacaacagccacaaattcatgcatgcatcataccattttcatcaattttttccaagaaataaaggggaaaaagctagagagacataccacaacaaaagattacttgaatttaggttgaagctagctgaaaatcaaaggaaaatccagcttcaagcacacacaaacccagccgaaaagagagagagcttgagagcttttctttgaaaattttctaactttttctaacttgtgatttttttgataaaatgaataaaaagctaagtaacataaatcaactcca

SEQ ID NO: 277414 - DNA, 406 bp, Cannabis indica
actagggtacagccactataccacatacactacgtaccactctatacgagtgttggtagggcttatttcataccctgagtacctctgagtgatgtaccacacacactcagtacctctccgtacttatgttggtatcacgttactctcagacaacaatcactataccaatacactctataccttaaccgtataagtgttggtagtgcaactaacattttaagcatgcatatacacataacatatacatacattcagttattgatatcacacattatattaatttcttacattctttctgaattcaagtgtgctggccaacctgaacggaatgtctctcgctagatggatgccataatcacattatgaaaccgggtaagttatatgaaaaaaatgttggaaattattt

SEQ ID NO: 277415 - DNA, 571 bp, Cannabis indica
gtgaaaaagtacttgaggcttttgtgatcagtataaatgtcacacttctcactataaagatagtgacgccaaactttcaattcaaaaacaactgctgccaattcaatatcatcagtaggataccgctgttcatactctttcaattgcctggatgcataagcaatcactttccctgactgcataagaacacaacctaacccctgtttggatacaacacagtatatcacaaacttttcatcactttttggtaaggttaacacaggagcagtaatcaacctttgtttcagttcctggaaactactttcacacttatcagtccaaacgaacttgcagttatttgagtcaactctgttaagggcgtagaaatcttggcaaaaccctcaacaaaccttctataataccatgccaatccaaggaaacttctaacttcagttgctgacttaggtcgaggccaatctcgtaccgcttcaatcttcactagatccactaaaataccatctttacttaccacgtgtcccaaaaaaactcacctgaggtaaccaaaattcacatttcttaaacttggcataca

SEQ ID NO: 277416 - DNA, 528 bp, Cannabis indica
gaaccaggggatttcttgctgaagtttgtgatttctaccaagatttcaaggagaatcaagctaaggtaaaccctagaacccttgattatatgtattttcaagttttgagttagtttgaaatagtgaatttgggttttagtggctgtaagggttagagatgtttagggttcaaattatagggttcatttgagttgaatttagttcctagcaactggttttgaggtttggattgggttttgtgcaagtttgagctttgagttcaaagctttgatctctaatggcatgttgagtttcaatgagtttttttgtgaaatactggctggaatatgttgtatatgcattgtttaggtactctggaaggtttggttgcatttggtggaaaatttagcaagaaatggaaagtttggggtgaactggtgcaaactggctagccgaatttaccagtacctctaaaaccttctagctggttttggcagggtccccaaacgctttattttctcgatttttgtccatttcagtgccgtagtt

SEQ ID NO: 277417 - DNA, 567 bp, Cannabis indica
aaatgctttgtacaggtataggtgccctccaagtgactgagcagacgtatgactcttggtcacttgtctttcgcaaatatattgcttatctgtttggtgttttgggtttgaccaaaccttttgtacgcactttaggtaaattataatcatgctgattttttcgactcaattgaattttgaaatactatctttattcatttattgatcgaaagtttatttgttaccgtagtaacttacatcagagctatttgatctaatctgatcttttagcttaacatgaaataaaacaaattgcagacataagaaactgtactttaaagtggttagcccgacctgagtactttgtttttgaaacctttgcgcgtagtccgcccagaaggccattcacttagaagcgtatgttcatttagtactttaaaatggtcaacccgacttcagtactttgaaatggtcaacccgacctgtgtagttaaaatggtcaacccagcctggtactttattggtagtatttccttaaatgttttccattccagtaccgtggtactaaaatgagttttattttttcgt

SEQ ID NO: 277418 - DNA, 669 bp, Cannabis indica
tttggcttgatttggagctagagtttggaggaagattattgttcttgctttggtgtgaaatgaggtagttcttacaaatttttctaattgagtttcttgctgaattttatggtgataagagcatgtcttgagttgtgttcttcttgtgattgcatgttcttaggtgttattgtgattttgatgaattgagtgtatgattgcatgatttggttgagaattttattgttgagcgtggattttgattatagggtattttctagaattgattcatgtgtttttggggtatttccatggctgaaaatgggttgaattattggaaatgaactcttgttcaagagcttaatatagccatgattgtgcatgaattcttgagggtttgttgttggattttgatgcttgatgttgtgttttaaattcttagtgtttgctagctgctgtaagaggtaaattgagaatttggttgtgaaaagcaagcttgagttcatggtgctttaatggcactttttgattcttagtgaaattattgtgtttaagttgtggaatatgtatattatgacatataatgatgctctggaaagtttggtagtgtttggggaagatttgagtgtgttttgggggtttaaagattgaaaaatttcgtgttctctgcccagacaaccggaattccgg

SEQ ID NO: 277419 - DNA, 852 bp, Cannabis indica
taagaaaattctaaggctaggttatttctggcctacgatgattgaagattcaaaggactatgttatgaaatgtgaaaaatgccagagattttcaaagatacctcgagctccacctaacgagttaactcagatgcagagtccgtggccctttgccatttgggtaattgatctgatcgaacaattacccaagggcaaaggaggagtgtagtatgcagtggtagcggttgattacttcattaaatggacagaagccgaaccactagcaaccattaggtcaaagaaagttcaagacttcattgtgaagaacataatctgccggtttggattgccgtacaaaatagtttcaaataatggcaagcagtttgacagccaatccttcactgacttttgtgcaaaccacggtatcctcaaaagtttctccccagtggcacatcctcaagaaaatggtaaagttgaagcagtcaacaagaccttgaaggatacactgaagaaaaaacttgaagatgccaaaggaaattagtcagaagaacttcctgaagttctatggtcatatcagacaactgaaaaacggcaaccggacaaactccatttcctatggcgtatggatatgaagctatgctgcctgtagaactcgagccaccatcccatagaagattaacatacaaccaagataccaatcacatactcctggccaaatcacttgatgaaatcgaagagaaatgagccacaacaaacctaaagtgatagcccatcaacaaaaagtagctcgatatttcaacaaacaagggaaggctcagaaattcttcgtggagatattgtcctaagaagggtatttctaaaacaccaaagaca

SEQ ID NO: 277420 - DNA, 547 bp, Cannabis indica
agttctctattagtctacgcatccagttgaagataatcttttggtacttcaatggatgaccatgtgagaactcatatagaatgacaaatgtccattacttcattaacaaaaaaaaacataataagttcaaaatataaatgcttaaataataaaagttcattacatgccaaataaaataaacaccttaaagtaaataaatgataataataaaaaaaaacataacaaagaaaagtgactaattgtggacattcccatctccattatcgatattcatgttgttattaatgagatcttcattaaaaaaatctgcaacatctaagtgcgtaatatccaaaggctctttgagaaaaccatcatcttgataggcaaaatttgcttctattttctcctttcctttcacagatgcttgataaagatcagcaaggtgttttgccgtacgacaggcacgtgcccagtgtccttttattccacatctggaacataaattttcagaatttctatgattattattttgaggaccttttcccttgttctcagtagttgtgct

SEQ ID NO: 277421 - DNA, 640 bp, Cannabis indica
ataatgtcatataccacaacgaattaatcagatagaacacataaaaaaacttcccaagttgcacacattaatatgagaattcaaggctttattaaacaaaaatccaagagagcatcaagaataatatgtgattatccaatgtatttttactcaaccaattctaaaaaaatgatatccgttatctatatattttgagtcaacgtgcattttgagaaatgtttgtggaactttcattatcacacatgaagacacataaacaagcaatgaggaacactagacaacatatcatgtgtgtatcatatttcttttgaagcaagggagtacgatgtacaacatgatcaaaaccagcatataggacaaaaacatcatcatttctttgtttaaacccaagattcaacagtataaggtttagaagaccataccatagcactaataatagtgaatgagctcttgaaagacgaggtgatgatttaacactcttatttcttttggttaaaacttttggaatagcagtaaagtctccaatatctgatttatccaatgatgcactattacataggacaacattgtccaacaaataactaccatcactagatctcttccctgttaagactgagcacccatcaaatgaaactaaaca

SEQ ID NO: 277422 - DNA, 604 bp, Cannabis indica
aaccacttaccttaatggtatttgttgtgtaccggaatggtacgttttacatttatcaactcgcaagtgcacgaatctttattgtaatatggagattgtgaagaacgaggtagaacccatgggaattgtgtgagaccgaagaaaatacttatttaatctaagctattataactctaacctagtcccgaaaatggtgaggtttttggtaataaaataaaataaaatatttaaacagtaaaaatgacagtaacagatattttcagtaatatttgggatattattaagggttcagaatccacttaagtgtatataaaaatatttatattcatattgattctcatcatttaaccagtaatcaaaccaattattttctaataaaaaatagattttccttcgctttaaaattataacttctaagcattaaatgtgaaacaatttaatgtaaatacaaaaaatcaaagaatattatttttaataaaatgtagaaccaagcattaataatttctaactatcaaaaatacgtgatattaaagatgaaagaaaattattttaagaagcgaaaatcataagcatatattgtactgagaatcaaaataaaaataaa

SEQ ID NO: 277423 - DNA, 399 bp, Cannabis indica
tttgatgtccagggtcaatccctaacattctcccacaaatcgtttcaatattcagggtcaatccttgacatataccggagttccaggtggagtaatggcaatcataacgagccagtatatactcaggtcgcaatttctttttactaagttttgctttttaccggagtaactgcctttttgttactcttgcgaccctctccctctcgagataattaaagtgtccttcttctcgtggaagagggttataatctttagtcgctcgagttattgggcagattgaactgatcataggcatcttcctgcccctttatatatcgatgaaggtgtccttacgatatgagactttctatctcatccttcaactgacaatactcttctgtggtatgaccaatatcacca

SEQ ID NO: 277424 - DNA, 606 bp, Cannabis indica
attttagatgagttgaccactctattcaatggatgatgctttgactctcgcctaaacgggacactgtataagtttgttgaaaatcttggaaaataaaaatatgtttgaatttttttggtatttttataaacatatttgttatacttgttattttctgaatttgtttatgaatttattgaaccaaatgatttacttctgtttattgatatttgtagtgccaaaatgaataacccacaccccgacccactcctagtcaatgcctttgcaaaagaactctatagtgtgaaaatgcaccctggtagttgcattaactcgcacctgttggtgatgaatcttaagttccaaaaagcaaacctacatggaattgaattatcaaaagaacaatgggttcagttcatacttaatagtcttcctccagagtataatggatttttcatatcttatatgatcaacaattttaacttttccgacacggataagctagaagcagaattgtgagtcatgaacgaaatttaattgcaatgtcgcatcctggttttgcaaacttttctcagaggaaaataattaaaaatgaagcttctaacaatgctgcttcttcatgtacaa

SEQ ID NO: 277425 - DNA, 821 bp, Cannabis indica
gattgagatctcatttcagtaattatattagtttactaaaatattatttataggtagctaagtattttaaggataaaatccattgaagggtagaacggtaaatttgtccctatttagtgtagataatctataaaggatcttagactattaggataggaacaatggataatcataacgtatctatatcgtgatacatatagagcgttctatataaattagagtgtattcaattccaaatctatagtggcgcaaggcggaattataagttgagaatttacttggtgaattctagatttacttattgaaagctcggttatttaggtccatggtcccctcactagttgaaataatactgcttgtagactcagtttattggttttaattaatcaattataactctaaaattagactatctcttatttaagaattttcactaagcaagggcttaattgtggtcaatttattaattaagagactttgtatgatctaattaataaattacataaatgataattttatttagtaattaattatatttattaaataaatagttttagcatttctaggattgaattggaaaatacagtattattgaaagaggaataagtggttgaaataaagtggcaaaattgtaactagaaagtggtcacattattgtgtacgaccctgatgttatttttgcccaatattttattcttttttaatccatataattcagccctaagccctagttgaaacactataaaaagaacatgatactctctctcatccaactattgtcaacttgatgcgttcaaccaaatcaaacctagttttctatg

SEQ ID NO: 277426 - DNA, 707 bp, Cannabis indica
aaagtaaatctaaccattcatatagatagaaataacttatcaaaattatgagaataagataggtaagttcttgcatagtctattcgaatgacttgggcaaaaattcctaatcctcataaaattttatggtatctcaatttgattacttaatctctagcaagtattttacacttcatttaaaatactagattgctatgttgatgacttagtctagaaggaacttacagtttcagactaagataatatgtcacaactagatatccctcaaaacaatagtaagaggttaaatgtacttttatgtataatttaaccagacacctactgttgagtgggagctatctgagatgtaatcaaacaaggaacattaagggacagtcaagaaagatttatgaaagtgacctatgtgttagataataaggatgtatatattagtagtccttatatctacaccaactcataaagaattcgagatggtggttactctggggtggaggagttattctagaagagtgtaaaaacccatctataataattcaagctccatcagtgaagatatataactttgtaaattcgaaattaccagaaagttattcaactgaagaaaattctacactgtattatctctatttcattctttaaaagaatgagagatagtcttctgtttattcagatgtacttaataagcagtaaggatttcagtatccctt

SEQ ID NO: 277427 - DNA, 1016 bp, Cannabis indica
catctggaacaacaggagcagtctcatccgcgactttgctgatgacctcgttctcagcttcctcagcatccgcaccctcgacctcttcaggaaggttccctccaccaccttgggtttgagtaggcaacatagcacgaaaagcctcggccatctcagcggcttctgctccgaggatcgagaagtcgaagtctgggactttggaaagaatggtgtaaatataatcagatactgcctgatcatattgtttcttcccattctctttctctgcctccaagtcgcgagtcatctcctcgaccttcgcccgtgagttcttggcctcgagctcggcctgctccttagccttgcagagttcttcaagctctttatcctttctagccgcctcttgcttcagcctcttcatgttctcctgaagctgggcattgtgcctcttcagcgagtcagcttccttcgaaccagcggcagcagcttttaggaacagggtcatcgactgtgaagccaactccacagagcgcgggacaagctcctcagaagggatcttctccgccttggacatgaactcctcgcccacgaacttctcctgcatggccaagaagtcgcgagctcggacagttggctcgatcaggactttcttccccttgtcctgcgtggtcttggccagcttcttggaaggatcggtggcaagagtagccaccacatcgctcttcctcttctgggcgacaacgggcgaggtcgtcgttgctccacccttcggcttgatcttaaggatgggcgcggacttcaaaaaagtcatctctgcgaggataaatgaaagataagtataaataaaactcaagacatcagtttataacaagagataaattacctgagattggtcgtgaagtttgcttggagagacgtttgtctatccgctcttgttgcctctcagacggttctttgtatactggctctctttgaagacttgcgttctctggaatcagctagtgttctcgcagcttggcagtcgtacacagtaatcg

SEQ ID NO: 277428 - DNA, 659 bp, Cannabis indica
aaactctaccagtacacctatacaatgcatacacaatagaatccaagcagtatttcacagaacaaaccaataaatccaattatgccattaaagctcaaagcttgagtttcaaaactcaagcttgcttagaaccaatatcaagcatcaaaaccagaagctagggacttaaatcaactcaaaataactctagaattcgaaccctaaacattttaaaacctaacagccccagaaattccattcacacattcaacctaagcttaaaacttgaaaactaagaagggtttcattagggcttaccttaatttgaatctcccaagctttctttgctgaaaacaccaagaatcaacagcccttcccccctggttttgccccagccgaaagagaaaagagagaaagagagagagttctcttgatttttgatttttctttgttttttctcaaatgaaaatggtttttccccaattaattctttgctgaaaaataatgtgctaggtgtcactaaaataaccagccacctaacctcaaataaaccaaatgactaaattgccctttagacttaaaactagggtatttccaaagctaggggtaaaatggtcaaaatccataaccccgctcaatcccgataatttaatttctctaaaatatttcccactatgaaa

SEQ ID NO: 277429 - DNA, 700 bp, Cannabis indica
tcttacaagtagtattgtctcaactagtaaggggaccatgagcctatataatcgagcttccaataagcagatctagaatttaccaagtaaatttcatcttattaattcctccttgcactactatagatttggaattgcactctcaattatatagaacgataaagatacgctatgaaaatttaaccatcattctaatccaaataagcaaagatcctctatagatgatttacaccgagtagagataaaattactatttcacccctcaaacgattatacttgcattcctagtcctatgaagacagcataaaaaaactacaaaaaaaaaactaaaagaacataaatacaaaagactaacaaatcgaacatacataaacactaaaacgaaattaaagaaagcacatacctcattaaccccttacctcgtgatctcctcgtacagatcatcagattcaacattctttgatgaggatttacctttctcctacgagttaacaaaataatagaaaacaacaacaagataactgttaaacaaacacaaaaccacaacaaagaatagaaaaaaaaataacatggaaaataaagaaatcacagacagatatatttgtaataaaacaaaattgtaacaaaaaccctaaaacaacacaaaaataataaaaaattaccttatcagctttgggcgactgtaacgactactcgcgtc

SEQ ID NO: 277430 - DNA, 816 bp, Cannabis indica
agcataagtgtcatcatctgtcagttttgtagcctatcactatctatttataaatataccttcgtaggttttaggttgtaatattttggacatttaaaaaatgataaataaattggaaaagttagcacatgtggctgtccataggatgtgagcccaccaattgcaatttttaccattttttaactatttatcctattctctcaaaaataccatatttcaaatttaaccacttaaatgtccaaactatttatttaataataattatcaaataaaattgtcatttaatatatttattaattagacttaataaagtctcttaattaacaaataaaccctagaatctcttttcttcacaattaagccctagcttagtgaaaattcataaattagacatagtctaattttagaattataattgattaattaaaatcaattaactgagtcttacaagcagtattgtctcaactagtatggggaccatgggcctatataaccgagcttccaataagcagatctagaatttaccaagtaaattccctaacttattaattcctcattgcaccactatagatttggaattgcactctcagttatatagaacgtctctatatgttccacgatatagatacgctatgaaaatttaaccatcgttctaatcccaataatcaaagatcctctatagatgatttacaccaaatttaccgtttcacccctcaaacgattatacttgcattcctaagtcctatgaagacaacataaaaaaactacaaaaacaaaactaaaagaacataaatacaaaatgttggaaattatttt

SEQ ID NO: 277431 - DNA, 528 bp, Cannabis indica
acttgaaaaccaaacttttgcataagaaaattctagcatgctcaacctaggaatcatacaccacaagtagcttaattaacatctaaaaatcatgatttaacctcagaaatcaacaatcaaactcagcagcaacaacattcaaattaacatgcattaactcatttttttatcaaaaattccaagaagaccaagaagaacaagtaagagatacataccacaatcaagagtttctaaaatgtgatgaatcaagcttgaaaaacccagcctttgaatccccaatacccagccgaaaatggagaggaaagagagcttttctttgaaaattctatctttctaacttagtgttttttgagaaaaaggaataaaatgaaacaagtcacaaatactcattcttttcagccataataaaccattaaattaaacattaattccatttaataactcacataagacaaaacactaatggggcaaaaagaccattttgcccctccaccataaaatcacataaatcatactaaaggggtattt

SEQ ID NO: 277432 - DNA, 607 bp, Cannabis indica
aggacccaaataacatatctaaagcaacaaaaccgagcttcacacacagaaactcatttcaccattaaaggtcaaagattgagttctaaactcaaaacttgactaaacaacataacaagcatcaaacctagattaaaactacctaaacatgcatactaaagctgcagaaaaccaaaacaaactcatgcaataatcacagccaccaaaatctcaatttcactttgaaaaaccaaacctttgcatagaaaaaccataactataatcaatctaactatcaagcaccacaagtagcttaattaacctcaaattatcatgctttaactacagaattaatcatcaaaatccagcagcaagaacaacttaaaactaagcatgcaacctaccataactcttcaaaaattcaagaaaacatacaagaaaggtgtagaaaacataccaacaactatgaacacttaaacttgctaaggagggcttgaaatccaagaggaaaatcctcttttcttgctgctcaaagggggccgaaagagagaggaaaagagagagagttttgagaaattttctattttttctaactttgatttttgaataaagaaaagaattaatatta

SEQ ID NO: 277433 - DNA, 688 bp, Cannabis indica
ccaaaataatacctagcatccatcattcctctatttctaagtagtacatagctaatttaagtcatccagaccatccattttagcttaaatacaaaattagtttcattagaagatttaagagtagaataagactaaattaataaagacttcttttcccaacggtaccatcctcatccactagcatcaaactgagttcctggaataggagaaaatagggggtgagcttataaagcctagtaggaaaataactaatatcaaaggacccttggtttaataaaattcctacatggttagctttgtaaaaataaaatatctcatcaccagtatcaaaatgtataaacaaagtagagagaccacaaataaaacgtcaaatacatatcacactgtcaaccagacccctagctctcaataccaatcatagaaaacgacatctaaaacttggtagtcgcatgtgatacccaccataataccggggctcagatttaattcactccttgtacagattctaggtctttcacctacaggtgagtacacgcctgatctacctatgatgacacagacactaggtcatgaaacaacaatatgcaccgaacatgatcaacatggctctcatcagtataaccaaagcaggcaaatgataatcataacaaagaacatattcctttttattttctagaaaatttggcag

SEQ ID NO: 277434 - DNA, 571 bp, Cannabis indica
ctcgaatgttgaactggagcacccccgacacagtcacgaaacatgatgtgaagcaagctgatgtggctgcactctttgagaaaagggtatgtgaatctttctctattttagcgcaattattttttgctttaagtgtaatttgtgttatatgcgatatttgatgcgatattgtgcgatatttgtgcgatttactttacagtgcattataaatgttcagtgattaataagttttttggcgactttgtgcgatcattgagcgattttgtgcgattttacttgcactccttataaatttttacttgtattgttttatttatttgtttagcgactttatgcgattcttgtgcgattgttgtgcgatttgttagaagtctcatcacttgtattgttttaatattttttggcggctgtatgcgatgactgtgcgattttgtgcgatttttgatgacagtagctaatatacttttctatgtatatgtaatagatttttggcgatatagtgcgatttttgtgcgatatgtatgcgtattttttttgtttttgcgatttatttgcgatttttgtgcgacat

SEQ ID NO: 277435 - DNA, 531 bp, Cannabis indica
aaattggataaactaggttttgatgtgaaacgaaagtatttgcatagcctttgtgacatttagattattgcttaatgctgattatatgttaatctatcccagagatgattagataacatgtgatttaggacctaaaagatctgaaaagagttaggttaatttttataatctgtcattcacattgagaaagagaatagtaattagcattaacaattgggtaattaaatcaacaggattcttttccctaaatattcatccataattaattacacttttttattattattatcctgctttttaatttttagttatttaattattcaaccttattattgattctgccaaatagaaacaagaattcaattgattggtacttagctacagtcctcgtgggaacgatctcacttacctgagtattacttgttaaaacgatacgtatacttgcgtgttggatttatcacaacagctcccaccacaccttattcactgcatccgagaaccaccaaaatgtatcaggatttgaaaccctac

SEQ ID NO: 277436 - DNA, 594 bp, Cannabis indica
tatacatatctttcttgtattttttcctttttttttggaaatgaatgttgttttgttccatttttattgatctaaaagtacacataaatattcgtggcactttactttctcatatcattatatgtatataagcacttacaaatagatcgattagtgagttgattaaactaacattaatttttattatgtgtagggaacccttaatacaattttgatccatgtcgatactcaaaatattgcatacctcaacttgacaaataatcttatttcgaatgatatatgaatacttttaatgtaataattaatgtttttttaatctttcttctacagtttatgtcagaggctccctacagtatcaaggagatcaatacagtacgggatgagtgggccgaatttgagaagcctttgattattgattaagtacaaggttactactttttattatagtatattttatgattgttgctattaacttttccgttatgtaattagtttatagttagtttttacgatacatggaatataaatttaaggatcgtttcttttaacaattttggtattatgtaattagttaatagaatcaattactaattt

SEQ ID NO: 277437 - DNA, 481 bp, Cannabis indica
ttctttgtgaatgaacgcaatattgttgtcccctttttctttgttcacatccatcttctttttttctttcttccaccttgttaatgacatttcataattctgcaaggatccaatcagttcatcaagatccagttcctccacgtttctcatttcttcaatggaggttactttagacataaatctcctaggtagaactccaaggactttacgaaccagctttgcattagaataagtctttcccaaagcataagattcatttgatatgtcacgcaatttagcatggaactcagccaccgtttcttcttcctccattgataaatcttcaaacgcttttgccaaagcacgaagacgggatttctttcccaagcctagccatctcatagtttgcaatgaccttcaattgatttgtgggcactgcattgaacaaagcatgcatggccttcgaattaaaattggccctctccatctcatctggagtcca

SEQ ID NO: 277438 - DNA, 644 bp, Cannabis indica
aggttttaagcacgaatctactattattctttttacgaattattgttactatattttataaaaatacggaccgttatttttagttgttttgaaaaaatattgtaacaacattatatataatgtttttgcaatttgaaattaacgttatttaaaaataaatagtaactgaaaaaaataaacgtccgtaaaaaagtaaaaaaattcataaataaattttttcaaaaatacaattttagatactttgtgcaaattgacaactttcttttttctgataaataagattaccatatcttagttacaaacaaacagttgtattttgtaacttattagtgctatatgattttgtactaagattattgtctaggacaacccaaataaccaataaatcttaatgttccattaagtaattactttgagatatcaatggctactgagtagtcgatgatcatgaaatataagaattagggtataacatatttgaatggcaaactaatattaattaataacatagacccatttttcaatataaaaagattgatgtatttttttttcagcattaattatctttttttattaaaatattttcttttattagatttatatatgtaaatatatctaacttttacaatgctcgtgcaaaccag

SEQ ID NO: 277439 - DNA, 772 bp, Cannabis indica
tgaatacatatggcaaaaacatgtttaattacttttcatccacactcctttaaatctcatctgatgagcttcgtttgaagaaggcttgcacggctcggcaagaaagacagcgtcgtcatctccatttgtctagatctagggtttccattccctcccataaggacataccgtaagaaacgaatcgtgggagacccaattcggacgccaaatctaaggtccaccataagaacccatcagagacgatgaagctcggagaaggataatttttccgggaaagattgatgaaacatgcttcgccttgccttgctttggtttcattacaaaacatggggaaaatgttaaattaaaacattaggcaatttcgagcaccaccagaagtgatagtcaagccatattccattatgtcttataattaaatattaataatgggcaatctatcatggagatataatatcatggtcgtcttaaatattttggaggccctgttctaatttaaaatttgggccctacaaaataatgtaatttataaataatatttttaaatattatcattcatttatatattttacaaacaccaacaaattccaactatttataaaattgttattgattccaatagaacaaaaaaatataaaaaaaagaatataaaaaatttgaaaaaataataaatagcagtaatagattttttttttacttaaagtcattaatagaattgaaaatgagctttgagtattgggatagaaatgactaatgacaaattgttagctctttc

SEQ ID NO: 277440 - DNA, 706 bp, Cannabis indica
aaagggcccggggacaggccttactcattgtctccccttagaaaataaaacagctattaaataaagattgtcttaaataaaagcaaaatagctgtaaataataaaaaaaaaaaaaagagataagaaaaatcttggttgaaatgggctggattcggaacggcctaatcaatgcgaggaggaaggcgaggaccaatgcgtgcctcaagcatggcgtcaagcttcttcttcttctcccggaatttggcaatcatctccgcaggttttgggtagaagtcaagcttgatactctggccatttgtcgaccaggccatgtagacgccatcatcgaaacgcttgatgcaacggctgcaggagataggggagacgagctcatctttcttagccttcttcaaggcttggtctttaagtccttgagctccttcagctccacggccaagttagccctggactccaagtccgcctggtgcagttcctctaaagacctcaccttggcggccatctcgtctaaggcctccttggcctcccgaagctcgcgtttggccttggcgacagcctcgccctccgccctcaacgcatcccggtgcttcgcctccagcctatccctccgaaggacctcctctcggatcatcgcctccgcttgggcctccctttgcttagcctcttcctcgaacttggccttagaaagagcctcctgccgcgcatcctc

SEQ ID NO: 277441 - DNA, 559 bp, Cannabis indica
gctataaaaacataaaataacaagaaaacatacattaaaataatataaaaaattaacaataaaataacaagagtacaatataaaaatacataaaaaattatattttatgaaaataaaatactaaaaaaccgtaaaaatatttaaaattccgaatagacgaccgtatttttataattttttttgttgtttttgtattttttttaaaattatcttttgtaattagttatatattctctaggtcttgtattaaaaaaaatatacctctatataagaataattatatattaacaatttaaaaacatatatagtttataaatttatttatgtgaaattaataattttatactaattgtaatataagtacaaatattatataagctaaaaaataatttaattatgatatagtattaaggattatttattcttatttttgttacatttatatttttttgtgttttgattttttttttctagtgtaactttatttagttatattctcccaattgaatataatatttgatcccaagcaggcacagtcctgggtataggcgggtagatt

SEQ ID NO: 277442 - DNA, 512 bp, Cannabis indica
aaagattttcaaagataccaagagctccgcccaacgagctgacacaggtgcaaagtccatagccctttgccatttggggaattgatctaatcgggcagttgcctaaaggtaaagtcggatgcagtacgcagtggtggcagtcgagtattttactaagtggactgaagccgaaccacttgcaactatcacatcaaagaaggttcaagattttatagtgaagaacatcatatgtcggttcagactaccgtacaaaatattctcggacaatggcaaacagttcgacaactaatctttcactgatttcagtgcgaaccatggtatcatcaaaattttctcagcagtggcgcatcctcaagcaaacgatcaagttgaagcagtcaacaaaaccttgaaggatacactaaagaagaaactcgaagatgccaaaggaaactggccagaagaactccccaaagttctatggtcatactgtacaacagaaaaaacagtaaccggtcaaacaccatttgcaa

SEQ ID NO: 277443 - DNA, 570 bp, Cannabis indica
caacctagaagatattgtaacaaccccaacattattacagaccctgaagttgtgagaacaaagggtacgggaaatctaagggaaggaccgaacggggagcagatctcaagaaactcaagacattgtcacatttgtcgctcatcaagccatgattatcgacggtgcccaaaccgtcaacagaatactggatctcaggggcaacagtctgcacacaatcaaccaacaactgactcattcaatgagcactccaacgcatatttcccagaactgccttcctccacacaagaatcatactatggtcattcatatatatataactagctatttttaaccattgatgttttaaggtttatgactctaattattgcttcaaaaactctagatttatatacttcatgttatgtttgccatgtttaaggtatttatctcaacaaatctcaaaattataattaatgaacaaataaattattttacccaacaaaattcaatcttataaggtcaaaatttccatagtaattaatttttatacacaataataaaataaaataatacaccaacgtaaaactcaat

SEQ ID NO: 277444 - DNA, 676 bp, Cannabis indica
aggaagtatagacacaagaaggtctataactggttatgctttcactgttctaggtggatgcatcagttggaaatcgaatttgcaaaaggttgtggccttgtcttcaactgaagcagaatacatggctgctactgaagccattaaggaagctatttggctcaaaggattcacacatgaactggggttcaaatctgaaagcataacactgtgacaatcaaagtgcactgcatttgatgaaaaaccccatgttccatgaaagatcgaagcacatagatatcaagctgcatttcatcagagatatcattgctgaaaaggaggtttgtgtgaagaaaattggaaccaaggagaaccctgctgacatgatgacaaaatatgttagtttagccaagtttaggctttgcctagatttgctaaacatcctcaattgctaagtgaggattcaagcccagttcagtccctgttcatcatcatgctctctattaatgaccaaggtggataattgtggagtttggtcactaatagaggtctatttgtttggccaagaagttagcaactaactctaactaacttacctaactgtcagttatgacagttaggatcaagactaaaggccaaaggctatataaagccatgagttacaatcttttgggacaaggaagagagatagatttttgag

SEQ ID NO: 277445 - DNA, 1216 bp, Cannabis indica
tcagttacccccaggatcgataactacttgggatgacatgcaaaaagctttcctggcacaattcgtgagctcaaagaagaccataagtctccatgacctggtggaaacaaagcaacgaattagtgaaagcgctaatgagttcataaccaggtggagaaacctcaatctccaatgtccagaaaggatatcggaacaagcggcggtttcaatgtgcgccaaaaacctcaaccctgaggtggcaacttttgtgggcacagcagaacccaaaacttttaatgagctcgtctcgaaggcctgcaacgttgagatacaaatttctcggcaaaggggtggcaaaccctcaccgagattcgaaaataaaaagccattcaagaagggagaatcaatggcaacttttgtcaataccggcaacaaagataaagggaaggcacgggagccgcaaaagaaattaactctcaaagaaaggaaagaagttaagtattcattcgacgatgatgatgtcgaccaaattttcgatgagttgttaaaagctaaggcaatacgactccccgagccgaaacgacccaacgaggttggtatgacaaatgatccaaattattgtcggtaccaccaaattgtgagtcacccattgtcggattgctacatcctcaaaaacattatcgaaggcatgatcaagagaaaagagattgagattgactcttctctcgggaaagcgacaacaaatacaacttccctaaccgagaatgaccaaataccaaatgatcccacacaaagggacataatttctgtggcatttgaagtcgacaaggaagttacaatagtccaagcccactcagacatgccaaggccaggaaacccaaatattcctacattatatgagctcatgacagagcctaatctagaaatttgggaggattggtatgatagtgaagaggatttagaaagtacatggcaaacatgtcctcggaaaaaaatcggcaaaaattccatctcggaagccatctggaaactccggagttaaatttcggagtagaccagatataaaggatcaaaagagtaagaaaaggatcggcaagcaaaaggccgtttccaaaagaaacgaactcgaacaaccaaaacgaaatctagtaactctggaggagtttttaccaaaagagttacgggacaaggcagctagttgtaatgacagtgtgtcggattgctgcatgactttaac

SEQ ID NO: 277446 - DNA, 754 bp, Cannabis indica
caatgtagtttacttgcaccatggataagtgccatgtcctttccagggcattggttaaagtaagcttaggttggatgaatggagtatgcatcagaagggaccgatattgaacttgaatcagatataataaacttaccgtaatatctattcaattcaatatcatctagttgatcttagatcaagtgatctcaatcctgagatggttaggttctagttcagttgcattatttgtgttcttaaatcggttcgttaaagttgaccaaatggttcttctcgtgacatatagattaagaacatggtagtttaattgagtgggagcgctaatcatagatacgaaatctatagtttctatctagacataaaagtgaaacaatgatttcctttgagcttggcttaatagagataagtggttgagtactcatttcagtgattatattatttcactagaatatcatttataggtagctaagtgttttaaggataaaatacattgaagggtgtaacagtaaatttgtccctactcaatatagatcatctatagaggatcattgattactaggattataacaaatatataatctcatagcgtatctatttcgtggaacatatagagcgttctatataattgagagtgcaattccaaatctatagtggtgcaaggaggaattaataagttaaagaatttatttggtaaatttctagatctgcttattggaagctcggttatatatagttgagacaaactgcttgtaag

SEQ ID NO: 277447 - DNA, 738 bp, Cannabis indica
aaagaaagaggggttcagtggaagaagatagggttttaattggctaggttatacccgacggtttaaaccatcacacgcgtttactataacaaatggtttaaaactgtcggctatagtatacccgacaattctatagccaacaattttaaatcgtcgggtataaccccgtaaaaattctgcatttttaccttaacccgtcgcggattcccataacgagtgttctaaaccgtcaggaaaactcaatttttcccgacggtttaaaacactcacttaacaagagcgatgattctcggaaaaaattattttgaggaccgacaggcccgggaatgctcaattttgtagtagtgactacaaatctgtattctgcagcaacaagtttctaatcagatttagtagatctttacaatcaactattattaaacaaatttattgccatatgaaaaaaaaacaaattttcaattacatagtattttttggagcatgtaaaggaataagtttgaaagcttgaggtatatctcagctttgtaattcttctaaaaacaatgacttattaaaaagagaaaacattaaaagaagaaatatattatttttacagagtacactctatatgaagaaatgaaaaacgtgtaatatttaaggactgtgcatatgtatatataaataaatatagggacacgattttgtcccgttaatgtattttcacagaatgtattccgtgatgtacgttagccgttagat

SEQ ID NO: 277448 - DNA, 698 bp, Cannabis indica
ataattaatcataattaactgataatttccaaattaactaagcggactttacactgtatgttgttgttgatttctgtggttgagcatgattttggaatgttgattcaagcatgattgggttgttgattagttggttttgtcaatatatggaattttaactcaaagctatggttttcaagagaaatggttaaaatctgttgctgtggttttgttgatgtttgtagtaattttcagagattatattatgcatgattaagtaggtttggactggtttgaatgcatgttagtagtgtttgatcaagtttgagtttagaactcaaagcttgatgcttgaatggtgatttttgattctgtgagttctgggtggttttgttgctttagaactgttatttgggtcatttagagcaggtctggatgttttggtaatgtttggattggatttgtgcattgtgtgaatttttgaaaaattcctgcgaggaaccggaattccggttgtgcatccggaattccggatgggttttgaaaatttccagaaccggaattccggttggacaaccggtctgccggttgggtgattttcagaaaccctagttttcctcatttttatgttatttggggtattgccatgttttttatcgatagggaaacttttagttcctagtttaagtccccgggaagtgatttagcgtatcagttat

SEQ ID NO: 277449 - DNA, 402 bp, Cannabis indica
gtgatccttctagtgattctcccaaaaaacactataaataccccaaaaatagaacgtaaaatgggtcgatcgatcaattaaggaattgaagggagtaaagaagagagagagattcaccaagaacattctctgtataaacactctcataaataacaaagactcgttgactaatgcccgaaccacgtaaaaattacctgcattaaagcttccatagctcttctcattctttcatttaattggttgccgaaaacctcggtcaacagtatcatatcactaggggtgttcagaaagtatccgatccaatccaatccgcacgatccaatccaatccaatccgcaaaatgcggatatccgcacttgtgcggattggattggattgaaaaatctaaaatccgcacttgtg

SEQ ID NO: 277450 - DNA, 759 bp, Cannabis indica
atcaaggaatggcttgacactcaatttgaaatgaaagatttgggtgaagatgctaatgttcttggtattcagattatcagaaactgaaagaacagatcccttgctctctctcaaacaacttacattgataaggtgttagaaagattctcagtgacaaataccaaaggggcagttatgccttctagatttggtatccgtctatctacagaacagtctcctactgatcctcaagagatagaggacatgagaagggttccttatgcttcagcagttggaagtctaatgtatgcaatgttatgcactagacttgacatttgctgtgcagtaggaattgtgagcaggtatcagacaaatccaagagaggaacattggactgcagttaagcatattctgaagtacttgaagagtacaaggcattatgtgttagtctaaaagggtggtgctttaaatttcgtaggctataccgactcagatttccaagcttgtcttgatgactgaaagtttacatcttggatggtatttactcttgggggtgaagcagtggtttggagaagtactaaacaaactgcaacgtcagactctaccatggaggccaagtacatagctgctgccgaggctactaaggaacttgtatggcttagaaagttcttctcaggactcggtgttgttcctggaatggaaaaaccactggttttactttgtgataacactgcgccatagccaacagtgaagagcctcgaagccacaagagaagcaaac

SEQ ID NO: 277451 - DNA, 438 bp, Cannabis indica
aaatattaaagaacttaacaaattttttaaatctgaccataataggaaatattaaatggaaatattccaaatcagaatatttgaaaaaaggaatatttaaattgaaaatatttcaaattggaaaaatctaaaattggaaaatctagattttgggaaacaatcccataaaaaattggatttttggggaaaaaacccaaaaaatcgcaatttgtgggggacaccattgaactccgattttccaaaaatcataactctttctatttttatcggaattgagttccgtaaaaaatgaaaattgctcaattttttacaaggaattcaaataaaatattttccaaatttgaaaaaatatttgttatggaaaaaattcgtacaacacaaactttcatcacataaacacataaaccaacacgaaaccatcaaaatcaacacaaaaca

SEQ ID NO: 277452 - DNA, 438 bp, Cannabis indica
ctaattgcctttactaatcaaaattactagagcggtcattacagaggatatatacctttgttaattcgaaattaccagaaagttattcaattgaagaaaattatacactgtgttatctctattccattttggatagaattagagatacgtcttctgtttattcagatgcactttataagtagtaaggaattcagtatcccttaatgagtaatgcatatagcaaataattttgcataatgttttatgaacatagttccaaaaatttgggttgactcatgttatcccaatttttacactttgacgtggcaccgcatgaatggtgacacgtggaatccacttgtaacatctgctcgggaagcatagtccgagcaggatgcctcgctggcatgcctagagcaaagcagtcagcaatccacgcagagaaaccagcacttagcg

SEQ ID NO: 277453 - DNA, 753 bp, Cannabis indica
ttgctattttcgtgggttagctaggaaacttaacgttcttcctcctccacgtgtcaaccctaatattacactttaagatcaagcttcattgtgggttggacattcgaatatgggtatgacccaaaagacatggattgggcgtggcccatatgagccatcggacttacgggttccttgtttctgacttataaatggactttgtaagtacttcgatcgttgggccttttcgttgggcttagagcaatttttggccactacagtttgtcccttgctttttgagttgagttatactcaagttaaaaagcatcactcgttggtgtgattgactcggagtgcctgtagcatgatttacaatttgaaatggttggaccgacataaggtggagtagttagtttaaattgaattgtgaagggttgagccctcaggaataattaaaggccaaatttcgtgtatgaatattttttaatatatcttgttgtaaacaagttatatgtaattttatcttgaggacctactcaactttaatctgtttaaggatgcctcaatttataaatattagtttttagaagtcatgtctagcttctaaaatgtatgatgaggcctagtagttagcttagtgatattttgtacattgatgggtgatccaaatctagtaggtgagcccatagatgtgattttaccttttgtcatattggatttaatggaaaagaaaaagtctttaatgtgagtggagagtacgttgtcaactttgat

SEQ ID NO: 277454 - DNA, 777 bp, Cannabis indica
ggagagaaacagatccagattcagatcttgattatgttctgttacagaaacgaatcaagggctaaagatctgaatggaatgagtcattatattccgctgcacccaatgtaaggttttcttgaacccttatgtgtttatttcattgttttagaattcatattaggatgttaatgaaacatacacggtagtaaatctagatcctggtaaaatatttccaacaactggcaccaaggggtcatcccgattgttgcctgatagctgttattacaagagaactcgatcaggggaaggtactttacccatgatccttcaaagtcaagcacacatgctcgtagcatgtcttctaaaatctgtatagtcctctcggattgcccatccgtctgaaaatgaaaagttgtgctgaactttaactgagtacacatagctcgatggagactctccagaatctcgatgtaaacttcggatctctatctgaaacaatggactttgggacaccacgaagacgtacaatttctctgacataaaacttagtatactggtcaacggagaaattcgtccgaacaagtaaaaagtgcactgactttgtaaatcttttcactatgacccacacagagtcaaactatctcgtggttctaggtaaacctaccacgaagtccatagcaatgtcttcccatttccactctggtatgttcaatcgctgcagcaaccctgcaggcctctgatgctcaacctttacttactaacagataagacacttagcaacatactcagcaatgt

SEQ ID NO: 277455 - DNA, 694 bp, Cannabis indica
gttaatggtggttcaccatgggaatcgagtcacacgccgctgaaagatcggaagaggatctttgatcggggacgtcaatggatcttgaatcgaagacgctgaacaaactttaacgaagatgaacggagcgaaaaggtcactggaagacgatcggaagcttggtcctgccggattggagaatgctatcgaagcagagacgatgaccttggcttttatctcctatcgtttgcagaaatatatcaatatatatatatatatatatatttccttacttttgtaaaggtaatatatatacatatacagtgttatttccaaccatcgaaatgaagagagacataaacagaattgaaagagatcatatcgtcagctgcttccaagcattacaaaaaaaaaaactagaagagaagaagatgaagaaataggggcgtaacttgtagcgggtgaagaagatgttgctgccctaagaatttggggcctgggcttgaagctaatctttaaaaataaataaatgtgggcttgagatgttttatattttgtatgtttttgctgtgtttgtatttttagttttctttttatttttactaaccttgaggacaaagtgattttgaaggtgggaaagtgttacactatgaaatagtacaggggcttattagtaatttccaaaatgtgtgaatcactataaatatataattgt

SEQ ID NO: 277456 - DNA, 443 bp, Cannabis indica
atatatatatatatatatatatgggtgcaactacttaataggtattacctattaatgagtaaaataaaaaaatttaagtttttatacttaatttttttaactaatttaaaaaaaaatctctcattttttatatcatatgggctgagattgttccattggtaaaaaataattaaaaaaaaagtttttagcaaaaaaaataagaaaagaaaaagttgagtttgagttaaatatttttgtatgaacatatttttgatataatacaaaaagagacattttcttatatttttttttaattaagtagttaaatttagcatagaaatgcaaatttgtgatttaattattcgttattagatccaaattcgatggtttgatatttttaaaattaatatttatagtcaaattttttttgtaaccattcatgggtaataccaattaagaagtgc

SEQ ID NO: 277457 - DNA, 659 bp, Cannabis indica
tccatacaacgtatttttgagttttttttttttgtgttttttgatttttttttgaaacaatcccaactttaattgctttttacacttgtaagcagatgggcctaaactatatcacttgatttgttgggctattgggttattgggccttgaccttgattgagctgggtatcaatgtattttttttgggcaaatttcttctcatatacattgcactatgtttggtttaaaattcttgtaatatttattttatattttatttatgaacctctaatagtacatgatttatttatcttaggccataattactctaatttttgaaccactaaattaaatttattcattaggcactttcatcataaaagacaaaattaaattaattttcaatggaagatggattacgtttttgaattctttataatttgttttggtcaactttacaactgtatttgatcttatgtagtatttgcatttgttgagaacatacacaaaataagggcttgagagagaaagagagcattattggttaatcggagtagagtggatgatagttgactaagagtagggccgacctaagcatgaggtagcttgggacattatattaaaaaacccattttttttttaatcatctcattatatatataatataataaatattattt

SEQ ID NO: 277458 - DNA, 538 bp, Cannabis indica
ttttatagtctccattacaaaataaaaggacatcatcggcgaaactgagatggttaagtttcagcgaagcacacctttcatggaatgagaaatcttgcttgcatcctatctctttcattatccgagacaagtattccattccaatgacgaacaataaaggggagagagggtctccttctcgtaatcctctcttagattcaaagaaaccatgtatggttccattgaaaaaaagagagaattttggagttttgacacaattcatcaccaaagagatgaatttatcagggaagagcaatcccttgagaacctccactatgaagtcccattatattgtgtcataagccttttggagatcgagtttgatcatgcaattggcctttttggatatccttccatagtgccgaaccaagtcttggcatatcattatattgtagccaatgaatcttccttgaacgaatcccccttggttttgtgctatgagttctgacagtatgtgtttaagtctcgagcaaagtatctttgtggctgccttgtatat

SEQ ID NO: 277459 - DNA, 696 bp, Cannabis indica
ctgcagcaaagattaatcaagaaagcataaagaaatcatcaagaaagcatcaagattcacattcataccagcaagaattcaaacacacaaaaccaagattgcaaagaacaacaccaggatttttctaaactcattatctatataatttctttgaaataactttatacatatacaattatgagttccatgaaggttgatatagataagtttgatggttcaggtgattatcgtatttggaggaagaagattagggctctattggctcaacacaagctgttgaaggttcttaaagatccggtggaatggtcagctgatacaaccaaagaccagcaagaagagttgctggaaacagcaaccggattgatcattttcaacctctctgatgctataatcagattggttgacaaggaagatacacccgccaagatttggaacaagttggaagagcaatttcaaaagaaatctttgatcaacaagatttacttgaaagagagaatctttggttttaaaatgagtccatctaaatctctagaacaaaacttggatgagtttttgagattacacattgagttagcaaactcgggggaaaatgaggccttaagtgatgagaatcaagcaattataattctcaattcactaccggaatcctacagggaggttaagacagccattaagtatgggagaactgagatcact

SEQ ID NO: 277460 - DNA, 580 bp, Cannabis indica
gtttggttcttcgtctgtgttctcgtcttagtcttagtctgagtcccaaatctagacaccgacaactggtctgttccaggccccattacccgaatcctgagtcaagatctggatcactgtcacgggtctcggtctggttctagttcaggtcccaggtcaaatttttatgtttgggttcgagatcgagactggggtgcggttctatgtccctaccctggttctgtgtcgctagtctggttccatgttggtgtttgagttcaggttcaagttcgggtaccgagtccaggtttggcttgggatacgagtccggctcccaattcgggtctaggtcttatttggagtttgggtccttgtccggttacggtgctggatctatgtccaatttaagctatgattccaagtccaagtcgtagttctagtccgggtaaccttgcggttttagttctaattttgggtcacaaggtacgggttagagtccacttttgggtttgggactgggttccggtccgggtgtgggttggggtccttgtaagggttcgggtctagggctgggttcaaaatctggacaccgactacgggt

SEQ ID NO: 277461 - DNA, 587 bp, Cannabis indica
aaaatattttttatttcaaaaatggtatcctcgatacacacataacctaatataatctctgtaattaataaattacgttttatgatcattcaatgaacccttattaattaccctaagtaagtgtcctatcatttacacaaggattgaattcattataaatccattcatacattgaattacaataattaaactaaaaaacgtaaacataataaatgaagaatagtttccagtttaattcaacgtatgcgacttttatagtgtgagttgactgttcatattcttccataagctcgcaggcttatgatgcattcgagattagtcgagtctaggatgtctgcgtcctcttggagtcccttatatggacatcttataacaagctgatagaactaaaacatgaactaaaacatgcgagtctatatcggtttatcagggtagttgggtcaatgggaccagctcgtaatatggagaattgatctctatgttttcgcaggaggatcacggtgatactcgcatatatcctgatgcatgcgagtttagaaacgttccttggtcctacataacgtgagccatatgaatgcgattagact

SEQ ID NO: 277462 - DNA, 541 bp, Cannabis indica
tttcctgatttgaccccaaaggtgcatttcttttgggttgagcttcatgccgtatctccggactacctcaaaacactcttctaagtcgtccgcatggctattacatgcttttgacttgacgagcatatcgtccatgtacacttccatgttttcgccctaagaggcctttgaacatccggttgaccattctttggtaggtcgctccggcgttcttcagtccgaaaggcatgaccaggtagcagtatacccccttatcagtcctgaagctagtgcactcttggtctgcagtgtgcatctttatttggttgtattcggcgtaggcgtccatgaaggacagtagtttgaatctgaaagtggcatctaccatctggtcgatcctgggcagcgggaagcagtccttcgaacaagctttgtttagatcggtgaaatctaaacaaactcgccaattcccgttcggcttgggcaccaggaccggattggctagccactcttggtagtaacgtcgcggatcatgctgtttgtcaaaagcttgtccacctct

SEQ ID NO: 277463 - DNA, 977 bp, Cannabis indica
ttggatgaatttataaattaaatgaacaaataagtgatcacatgaaccaaataacacactaaataagtaataaaaataaatctgtttctttattgataattgaatagaaaagattatattataatataattttatttaagcacaaaacccaacattaagtcccggtgcctgagcacgagtattattgccttgtgggatcctcctttacgaattggttgggtgaccttgctctggggtttggtcaacccttctcttccgaaggataacattttctctccttctgttacttacgaaggtaaaccccgtaggttgtgatggattggtcttcttctagggatcgtcagctatggctttccccttctcattcattggtattgacagtccaactcccagatgattgtactttctagtagccactgacagattggtattgatttgaacgccaggggtaagttttgattgtttggaggaacctctgggttgagacctcatgttgcaatcaaggtttgcaaataaatgagggtttcttgtatttggcaagtgcctctttttactttgccatcttatcctcatggtttaggaccaatttctttaagcgtgttacttatgggtctttagagagatcctctatgttttctaggtcatagtcctcctcctcttcctcgtcataatcaccttctttttcattttcatagtattagtctagcgccttctccgttaggattttctccatgaagttcttcaagctagttgatgtttttgaaggggtcaccacccaccactgacgcctctactccccgcatggccgtcggctaaaaatagaggattcagagcatcaacaatgggattttcattgacattctgagtggtttggctattcgactgcacaatcgtatttcttgtgccaaccattattgtagatgacaaacaatggtgagaagttttcttcagctatcaatgaaagcaccaaatttttt

SEQ ID NO: 277464 - DNA, 538 bp, Cannabis indica
gggaagagttctgttcagttggactcccttatgctccaacttgagaggtgcgaagataaagatgatgcctacaagcttggactgatcgctttcattgaaggtgtattagtatcaaaggagggcaatgtccaagtttggcctgagatgttgaagtttgttaacgatctcgaattcttctttaagtatccgtggggcgagcgcgcttttcgtaagctgatggagacattaggaaagaatatgcaacattacaaggataatgttgacaagaagaaggggaagaagattgctcaggaggcaaagtacactgttagtggctatgtacctgcctttcagtactgggcatacgaagcaattgagaagttggggaagaagtatgcccgctgcaacgggacgaagttccctagaatgttgagctggaaaacaccggagggccagcggaaacaagatgtcaaggcaaccgacattgcactgttattcaacagtcgagtatgtttctttactattctgtattttttttgaatttattgaaaatgaacat

SEQ ID NO: 277465 - DNA, 437 bp, Cannabis indica
cgatgggtctgacacatatttccggagttgagatacatgaaatacattgtgcaccccagataatgatggcggtaaagctattctataagctacactgcccactctatccaatatctgaaatggaccaacatatctgggacttagtttccctctcttgccaaatctcttcaccgagagtccttttcgtggtgtcactcgaagaaacacatgatcacccacttcgaactcaatgtccctccgcttcaggtctgcataagatttctgtctgctctgagctgtgatcattctagccctgatcttctgaatagcttcgttggtgtgctgaactgcatctggccctaggagtttgttctctcccaactcatcccaatgcagtggagacctgcactttcttccatacaacatctcatagggcgctaccctgatagtagactcat

SEQ ID NO: 277466 - DNA, 633 bp, Cannabis indica
attatttgtgcatatagctagaatatggaaagagtaaggtatcaggcctcctgacggtgtcacaaagacaattcccgcacctgccccactacttcttgctgccccatcaaaatataattgccacgatgaagtatcaattgcgaagacttcttcatctggaagatcctctcgcaactccatatcatctggaattgggtgtgctgccagaaaatcagccaaagcttgtccttttattgctttttgcgggacaaagttgatttcaaattctgatagcatcatggaccatttggcaagtcgtccagacaacacgggcttggataggatatatcttagagggtcagcttttgacactaaagtcacaggatgtgagagcaaatagtgtcgtagttttgtgacagcaaagattaaagccaaacacactttctcaattggagggtagttttgttctgcccctactaaagttctacttaggtagtaaagagcaacttcttttccctcctcattgttttgtgccagcatggctcccaaggagcggtcgagtgaagtgatatataatatcaatggctttcctaagattggagctctcaacactggtgggtgcaacaggtacttcttaatgctttcaaaagcatt

SEQ ID NO: 277467 - DNA, 683 bp, Cannabis indica
ttgaatgagctcatcctccttattagctcgttcgggctgggcaatatcatatttccccttcttccccaccacggacttaggagaaaagtcctccgggtaaagcccgtattgcaccagattctcattggaggtcaactggatgatattcctgtcttcctccggcaactgggcaagtttttgagctctatccctaagagcaagagtgaggggaggacggtgatatgtcagaatctgctaaaactgaggacgggtgatgctcggatccttcacgatgaagtactcatcaacaaaatgccctattttgctgatggccttgtcgtctgtcccgctcaaccacttgaagcctggctgagagaagtaaaaataccccgacctgccttgcttgggggtagacttcaggtcgaagaaccaagtgacctcgtggggagaaggagcatcccatccctgggaagcatagagaacgaagagagcggacaaatacttaatgccctttggagtaatctgggccgggcagaggccgaagaagtccgccacatccctgaagtacttatgcaagggcatcagcgccccttgctggccatgagcccccgaccaggcacacactccccttatcgagggtttgtggaacaattgtcgtgggcgggaatgtagcagtccagctcgcccaggtatccgtcctggtc

SEQ ID NO: 277468 - DNA, 639 bp, Cannabis indica
gatatttattcttaatggttacttattcagctcccgataatcaaataaaacagtataagcaaaaccattgattagaagctgacctgtaactactgaaggactggcagcagcatcagcctgagttatagcaaagacacgagcaggtgcaggcacaggtttgacctcgggcttcggttcctctttcttcaactgaggacagtccttcctgagatgtcccactgaaccacactgaaagcaggctctccggttacaagtcccgggatgatgcttcttgcaacgcgggcactcaggataagaataagtctgacgtcctcctctgttctggtttcctcgaaacctttttccttgccctgaacttcccgaagatggaaaagttcttttcttctgttcaaaggtagaacccccactctctttttcaggaccagacatagggagaatagtgatcccaccaacaccagaagactctcgggtttcttgcaaaaatttaactgctccttcagctcgaagagccttatcaaccatttctgcataagttgtggtatcatttgttgtaataaccaggtcatgcctgatcttggcattcagcccagccaaatacttttctttcttactgaagtctgttggtacgattccggaggc

SEQ ID NO: 277469 - DNA, 506 bp, Cannabis indica
ataattggaattgacatttaaatggttaaattggaaaattggcatttttgagaaaataagattgaaaaatgacaaaatggcaaaattgcaaagtgaggcccattatccatatcatggtcggccactatgcaagagttttaccatttatattttcattattttaatgccatacaattctaaccctaaacctaaatggctttctataaatagaaagtgatggcttcaggaaactgtgagaatgcatcttattttctcccagagaaaaacctgagcctcctattctattcatggccgctcctcttcttctcttttcttctcttcaattttgaaataccctagtgatagagtagtgcccacacacagcaagtggtacctcaatcacagtgtggaagatcgtgaagaatcctgattcaacaaagaaggacattcaggctcaaatcttgataatactctgcgacagaaaggatagaagggttagagatttgagcggaaggagacatattatt

SEQ ID NO: 277470 - DNA, 930 bp, Cannabis indica
gtattctatgaatagaaagtgttggcttcaggaaacaaacaacttacacacaacattgaacattagtttcctctcagaaaaggccacacaccaccctctctcttttcttctctctaaattttgaaattccttgagtgatgagtagtgcccacacacatcaagtggtatctcaatcatagtatgtaagactatggaaaatctgcatcaaagactgagaaaagaagatccagattcagatcttgattattaaatctagatcctggtaaattaattccaacagatgatgtcctcccagagtaccttctccgcggccggaacccttacgtttgggcagatgagcttggaaaggttggaatcatccaccaactaatgccccaggatcagcttggccttccgacagttctccgccgtgagcaaccccccgacgtcaagggccttcttgtcatatgtggcgaaggtcttagcccattgaaggaagagctgagtaggttcagtctgcgcataaggagggatcctaacccactccgtgagaagctccaaatgttccacaacctggaacccgaaggagaagaagaagcgatgacgatactccttgacgtgtttttgctggttgaaggggaccgggccctcattcaaaggatgggcccggaaaccgtaaaatgttgggttttgtgccctaaataaaacccattacaatctgattagttatcaatataagaaatttgaagtaatttatgtttgcatgaattttacatgcttatggtttaatatgattattacatttacacacaaaatcaattaaatctagatcatatgtttattcacaattacaatatcgtcaacacagtggaatgtgattgtgatcatatgaatcaaaagactaagtccctgtttcatcagtgttttggatttacactaataagataatca

SEQ ID NO: 277471 - DNA, 363 bp, Cannabis indica
gtgtgtaagtatctcttcaacttgccctgtttgtctacaacatgccgaaacaccttctcatattctcctcaactgcccgcttgctttaagttgctggcaacaaagttgatctgattcctcttgctgattcgcaaggcactattggtcattggctttatagtgtgtttaataattatgatgatgatgttatttgtcgtgtggttatgatttgctgggctctttggaaagcaagaaacaccttagtttgggacaaaaaagcttattcctgctactcaaattctcacttcggcttgggttactcttgatcattggcgtaaagctccagacaaaacatgtttattatcatcctctcttttgcatgat

SEQ ID NO: 277472 - DNA, 859 bp, Cannabis indica
agtagtttccacaccgttttagtttttggacatttccacaaagcatgagttagtgtttcagcatcgttttcacaagcctcacaaaccggatttacctccattcctctatatagaagatttgtttttgctggcagccagttgtgacaaactttccagctaaacaatttcattcggggggccagcttcatgttccatatcatcttccaccatttatgaatttcttccatgtttgagcacctcggaggatgtaaattcatttctctacccactctatacccacttttgaccaagtattggccatttggagtataaggccaatgaagtgagtcttccacatacatgtcaatgggagttccttgaatccaaggaatgtcatttggatgaaaatgttgagtaatttttgccatgttccactgcccatctattgtgataaattggtgtagtgttgtgttggcttctacgccgggattttgggttagcatagctccttccattcggggtagccatttgtcttcccaaactcttatcttccttccatttccaaccttccatctagccccttccgtcaaaatctttctcccccaacaatgcctttccaaatacaagaagagttcgagggcaaccagcttccataaatgaagtgttgggatagtagctgttttttaggacccaagctagaagtgagtaaggattttgggtaagtctccaaccttgtttggccaaaagtgcttgattaaactccgttagacttctaaaaccgagacccccttcttctttaggcttgcaaagtttagcccaagatccccttcttcttcgttagacacatggttttattgatatgataatctacaatagagtt

SEQ ID NO: 277473 - DNA, 528 bp, Cannabis indica
attttacttcatcattatcttaggattactatcccttactaagaccctaaaacctaaagattttgatatgtaatctagtaataacaaaatcctgcaatgctcccatccatagaatatcaaaaatttactttgaaaattatcgcaataataaagtaagcaacgaataatgtacttcaataacctttattatcaatgattagtgtaattcaatacaatgaaacaaaataaccttgattattaagcattaatgacccattaattccataatctttccctaaataaacaaaatcaaccatattaattcattattaatgtccccattttaaaatattacaaattcctttattgtacttatcccaaaaaagtaatttttatacatatttatttatggtaaaactttattataatcaaatcaatctatattgaattgaaattacttaaaataatccaatttaattattatgacataattattcctattttaatttccaatagaaaagttgtaaaacttccaaaaattgtatcctt

SEQ ID NO: 277474 - DNA, 508 bp, Cannabis indica
ggatggattttttgtccaagtattcgatcagtatagattgtaagcggaaaatggtgattttttagccagaaggtgaagatccatttgtttatgttggatccgttcaggggtctcggcatctggttatctctgtattaagagctagggatctactacaccgtggatgtgtaggatttttagcagtggtgattgactccagcaaacccgaaacatttgggcctgaggtagtcagagtggtaaaagactttctcgacatgtttcccgaggagttgccgggattaccgccgcaacaagaaattgatatcgtaattgatctgacacctggagccgaacctgtctctaaagctccatatagaagggctccagccgaactcaaggagcttaagttacaacttcaggcgatgcttgatattgggtttacccgatctagtgtatcgccctggggagctccggttctatttgtgaaaaagaaagatggttatctcagaatgtgtattgattatcggga

SEQ ID NO: 277475 - DNA, 773 bp, Cannabis indica
agccaacttcaaaccggcctgcataaaggaaaaagtcagcatatggagctaagtatgaaaagttataagggaagtgtcaaaaagaaaagactaaccctggtaagctctttcaaaactccacccaccaacacatccagagatgagtcgtcagcacaagccagttgctcaagaatcctcctgaccagctcagacccagactccttagacttggcagatttgggagtggaaggatttgcagtagtcagctcctcagaaaggtcaatgacctctccaaaaggcctcttccctgaagacccctctccgcccttagacttcttggtcggaggggaggcgctagagcttccgctcatcctcttccttaaggcctcgatcatctgctgagacatgtctgcacaaaacaaaaatagcgtggttagccaaaaccagcaaaaaatacaaagtatgaaaatctagaagctgaaaaagaagtaaagcgcagagtgactgcccgcccagaaagtcagaagtccgtcatcacctgatatctcagccataacggccttcccttttccagcataggggtgagatggccgaacaggtgaaatgggctcccttatgcgaatggcatgttcaacggtcctaggcatggccgggagtttcttcttccccttcaagggagtcacctgctcagcctcagcctcgcttcatctttagcattcatgactcctgagcatactgctttgcccgagcacctcccttcaacttagcttcacacttcagttgaatcaactcat

SEQ ID NO: 277476 - DNA, 975 bp, Cannabis indica
tagagaggtggttactgagtggggactataaaaataagagggacaaacgacgacgagaccaaattaggagagaagagaatgttgttattaattaactaattaaattaaaaaaactgaaggaagttatgttaattaattgttatttacctgataataatgcgggtaaaattgaacattttgtaataactaacggtgtttgtaaacgggtgacggttgaaatttgttaccgtgtattctgagacaaatatctgtccaaaatattttagatgtgttacccacggaaaagagctaagtgattacgtggctctcatttaggtgctagaacattgctattagggactagtggtacctagcaccttctcgacatgttgcgttgtaattgactagcgatacttcttaaaagttattatattaaattatataggatccgatatttagttggaccaatagcgatactcacgtatagaaccactggtgccctgtatgctataatatatataagctgtccaatcctaattgctttaaggtcaaataaaacttgcagtgacagtcatagtgagaataaacctgtgttaagtttctttctgggtttggattgacattgagagagagatggattggagttttgagtatctactgtcaataatattagccaattgtctttgtgaatagttgatatattattataaaaatacttgaaagaacccattttatgtagacaatatggatttttgcgtttatacattgtaaggtgcacatggaataattttctacatttgacatgtttacagtgacatactaatagtaataaaagcatttcaaaagaaaaaaactaataataataaaagaaataacgtgtgtaaatcacgaaacgtagtagcaataatgtaagaggcctcataatgtaatgggttgtatttacattgtgttggttgacctcatttctgttaagggggttctctttttttttttttt

SEQ ID NO: 277477 - DNA, 507 bp, Cannabis indica
aatcatgtgaaccgtgcaacattaaatgttatttttgatctatattaataagtaaatcttattatattgaaatgagttttatttagggcataaaacccaacatcaaaagtgtcatacttttctcttaaaaaatctacccaagtgaaacgagagaaatcatcaacataaataaaaatatatcgtttaccatttaaactttcaatttgaattggacccataagatccatgtgaagcaattccaatacttttgaggtattgatatcagacacaggtttgtgagtgatttttaattgcttaccaagttgacatggttccacttaccagcagttttcattaccaagcttgggtagtcctcgaacaatacctgtatttgacaattttttcagatttttataattaatatgtccaagcttggcatgccacaaatccgtggtgttgttgatggctgaatgacaagtaaacacgggagttagggtataacaattatcattggatcgaaatccttgc

SEQ ID NO: 277478 - DNA, 621 bp, Cannabis indica
tccaggaggaggctgagcgaaaggaggctcttgctaagcgaagctcgaggaggaggctaaacaaagggaagcccaggcggaggcgatgctccgagaggaggtccttcggagggataggctgaggcgaggcaccgggaggcgctgagggcggagggcgaggctactgccaaggccaaacgcgagcttcgggaggccagggaggccctagacgagatggccgccaaggtgaggtccttagaggaattgcaccaggcggacttggagtccagggctaacttagccgtggagatgaaggagctcaaggactttagagatcaagccttaaagaaggctaagagagatgagctcctctcccctgtttcctgcaagcgttgtatcaagcgctttgatgatggcgtctacatggcctggtcggtaaatggccagagcatcaagcttgacttctaccccaaacctgaggagatgattgccaaatttcgggagaagaagaagaaacttgacgccatgcttgaggcgcgtattggtcctcgccttcctcctcgcattgattaggccgtttgaatccagctcacttcaccaagctttttcttatccttttttttttttacagctattttcttt

SEQ ID NO: 277479 - DNA, 902 bp, Cannabis indica
cggctcaaattactcccaaaggcattaagtatttgtccgctctcttcgtcctctacgtttcctagggatggggtgctccttctccccatgaggttgcttggttcttcgacctgaagtctacccccaagcaaggcaggtcagggtatttttacttctctcagccaggcttccagtggttgagcgggacggaccacaaggccatcagcaaaatagggcattttgttgatgagtacttcatggtgaaggatccgaacatcacccggactcagtttcagcagattctgacatatcaccgtcctcccctcacctttactcttagggatagggctcaaaagcttgcccggttgccggcggaagacagagatatcatccagttgaccttcgatgcaaatctggtgcagtatgggctttatccagaggacttttcttctaagtccgtgacggggaagaaggggaaatctgctgctgcccggcctgaacgagctaataaggaggatgaggtcattcaacttaagcgtgaagctaagttgaagggaggtgcccaggcaaagcagtatgctcaagagcctatgaatcctgaagctgaagctgaggctgaggctgagcaggtggctcctgtgcagacatgtctcggcaaatgatggacgccttaagggagaggatgagcggaagctctagcacctcccctccggcaaagaagtctaagggcggagaggggtcttcagaaaagaggccttctggagaggttattgacctttctgaggagctgactactgcaaatccttccactcgcaaatctgccaagtctaaggagtctgggccaccaacatctgggtccgaactagtcaggaggattcctgagcgggtgcaggcaccaactccacccgtgcccgtgctgcctg

SEQ ID NO: 277480 - DNA, 462 bp, Cannabis indica
ttccaaaggaagattggcatggtctgagtggatctgggaaggaagttggcgtggtttctatcagagaattcagtcaacccaagaccctaacctgtgccaggagatctttgcgtcaacctctctctagtgtagagaaatttcctaaggctgggaaaaggatctcggcttcaagaaatgggatcttctgatgatgaggggaatgaggtctgtgtagagatcaaggctctctacgtgtagccggtctttctcaagatatgtgtagtcggtctttattcgagctatgtgtagacgatctttttcaagctatatgcagacgatctttctcaagttcatcggcttcccctctcatcctttgtttaggagaatgacttaatggttttcccctagtggcatttttgtaaagacgagtttataaccaatcttaggtttttcttatcttaaatgccttgtattgttttcatt

SEQ ID NO: 277481 - DNA, 626 bp, Cannabis indica
ttggaagacattttccttaccttcagaacactgtttcttgtacttctttttcaagaattttgcatagttcttggtcagcaaatctacagcttcatctgagaaaccagcagacaaatctgggatagacttattttcttctttgtgaatgaacgcaatattgttgtcccctttttctttgttcacatccatcttctttttttctttcttccaccttgttaatgacatttcataattctgcaaggatccaatcagttcatcaagatccagttcctccacgtttctcatttcttcaatggaggttactttagacataaatctcctaggtagaactccaaggactttacgaaccagctttgcattagaataagtctttcccaaagcataagattcatttgatatgtcacacaatttagcatggaactcagccaccgtttcttcttcctccattgataaatcttcaaacgcttttgccaaagcacgaagacgggatttctttacagcatccgttccttcatttttaattcgtagtttttcccaagcctctttggccatctcacagtttgcaatgaccttcaattgatttgtggacactgcattgaacaaagcatgcatggccttcgaattaa

SEQ ID NO: 277482 - DNA, 687 bp, Cannabis indica
cgaccttgacgtcgggggtttggtcactacggaaaactgcaggaaggccaaacttatccttccgcatcaatccgtggaggactcaaacctctcccgggtcatctgtcccaatgtaagggcgccggtcgcggagaagaccttccgggacgagattatcgccacggcagagaaaaaataccaggactatctctaccggaaggcccaggagaaggcatactctcaggcccaggcggcctccgggaggggacttcgtgtggggagtccggtggtaagaagaagccaggcgattgccgggaagtccgaggctaaattttttgacaagattcttcaagaagagattggagatcgtcccgccgggaggccccttcgcattgaggattcttcggagagaagggctcccaggccacagccttcggttccagagccaaactcaggggctcctggtgccagcacttccggtgccggcggtaagtctcctttgataattcattatgttccttccgttggcgaatatgccagtcgtaggcccgtagggttcgacgagcgtctatataggtttaggatgccctcgacccggtggggggatcgtttgaaggagttctatttttcaaacttaggagattttctaggtcggtcccggatgggttctggtcctccggaacctgttcccttaggtccttcagctta

SEQ ID NO: 277483 - DNA, 501 bp, Cannabis indica
tttttatttctcacctgggtcaccacgaaaattttggtcaaaacccagaaatcaagtcttcccacatagggattttcgcttcctcaaattcttatctgtttccttcttcttcttcttattctctctctatatctatatatgtttgttcaaatctacatgagcatcccacttgtgaagaaggcaaagaatatttttttattattataattattacaaaaacctgaactttaacaataaaaaaaaaaataaactttttacaaaaattaaaaaaaaaaaaaaaaataacctggattatggtgtcacaagaagaagagaagagagtgaaaagtggtacttaggttattatgttgttgtgttgtgttgtgtctttgtttctgtcttggagtttgtaactcattttcctatggtgtttgatttcggaccatctaccggttggtactacatgtttggtttttcttaatttgttattattttttattttattatcactcattttgttac

SEQ ID NO: 277484 - DNA, 678 bp, Cannabis indica
aggagacatatattccgctgcacccaatgtaagatttctgatacttttatgtgtttaattttccatcgttttagaagttcatatttaggttgttaaatcaacatacttgtgagtagatctaagttcctggtaaaataacttccaacaaaaaggggttgcggcaagttcctttgggccattgctagaaaacaagatagcctttgggtgaagtggataaactctatatacataaaggatcaaaatgtgtggagccttcctatcaaacaagatatgagctggtacctcaaaaggcttatgaaactccggtcaagtacaaatgaggcatccttactacttgctgaaaaaggaggtaagttccgagccaaactcttttataacatgcatgtggaagctcaggaagagaaacatagtagaactgtctggaataagctcattgttccaaaacacaggtttattctttggcaggctagcaaggctcaactccttacccaagatcaattgagcaagtttctgagtttactctcgaacctttgcccagtttgtgagagtgacatagaaacacactcccatctcttcttggactgtgtgttagccaggaaaacttttgctgaaaaggaagatggttgggttctgtggattggccgattgatgcagagcacattcaacaatggtgtatcc

SEQ ID NO: 277485 - DNA, 849 bp, Cannabis indica
tgatattatgaaatgtatccaaaagttataattttttaaatttagattatgttacaaatcaattcattaattaatttcttttttgtttagtgctgtggacatgtacaggatcgaaaaaaatatacgaaacaagggtccagtaaaaatcaaccaatacacgtgtcgacagcagccggatggagtacaatgtggttattatgttatgaagattattcagagtttcatgacggttgttaatcctgcaagttttttgaaaaatcatgtaaacatgaataactactcttctctatttagtttgtattttaattatatatacttttaatatgttgattaatgttttttgatcttttattttacagttcaagttagacgctccctatagtaacgaggagatcaatgccgtacgggatgagttggccgaatttgtgaagccattgattatagattaagtacttaaggttactacacttttgatataatacatgagtaacaagttttatgattattgttatcttttgcatatattattagtttatatttagtttacgatatacatggaatttaagttttagaatcgattttattaacaattttggtattgtgtgattagttaatagaatcgattactaatttaatataagttttaaaaatgttattttaattttttttgtattatgtatttactattatatagagttattctaaaatttgataatgcaggtggggaaaattgcatgaaaagtttgcaattttcccttacttatatttgtgcttcattttataagtgacgcaataggtaaaaaaaaaaagttttttcgtaatagatatgacatttttaaaccgacggaa

SEQ ID NO: 277486 - DNA, 683 bp, Cannabis indica
aatgaagggcaaaggaaagtgatcttttcgtgttgctttgttgagtttcctgtagtcgatgcagatcctccaaccggtgactgttcttgtaggaatcaactcattcttttcattcttaatcacagtcattccacctttctttggaaccacttgcaccgggctaacccacttactatctgaaatgggataagcgactccagcatccaaccacttgactacttcctttctgacaacttccttcatgggtggattgagtcttcgttgagcatcgattgtcggcttggcattatcttccattagaattcggtgcatcactgttgaaggactgattcctttgacgtcacccagtgtccaagcgatggccttgttgtgagctcggagtaccctcagtagtctatcagtttccacatcagaaagagaagctgacacaataactggcagctttttatctttacccaaaaactcatacctcaagtgactaggaagcaccttcaattcaagttctggaggcttttcagtagatggcattagctcttttggaactgctcccaattcctcaaaatattttctattcaagggcccataggaatcaagccatttcacataacccatgacctcttgtccctcttgctccgtcaattcatcttcagttaaacttagttcaagaggatcatctagcagct

SEQ ID NO: 277487 - DNA, 697 bp, Cannabis indica
aggtgttttgccacgtttttttttttttaaaaaaagaaatcattttttattttttgatttgacggttttctacacttatcaaaaaggtggtgtacttttatatatttcttttatttttttttatttttttcgaatataaaattttttactataacccactctctcctcaactgttcatcttcttcccccattttcagttttcctttacagtttcgagtagtgggtggtttatgcatttgaaaaaatttcaaatctcatcccactttcttaaacttccctctcattttcccccccatttttcttatttttgtctataaataccttcatcattgcttataatggtcgttactcgttcatctccttctccggctaaagctacaaaacccacaaaacaatcccagaaaaccagacccaaatcaaaaatgggtaaaaaaaatattaaagacaaccctcctagccccacttccccttctgctaaaagaaaaactcatggtggaccttcgaagaacactcgagggaaaagacctcgaactgtggttgaaaactcagactcagattttgagttggaatctgaatttcttaagtcgcctgtctctgtgaaggtattttactatttatcttttgttgtttttgattttttttttttgttaaattcgatttttcaagttcatataactgggtatatgtttgtttttgt

SEQ ID NO: 277488 - DNA, 507 bp, Cannabis indica
agatcctggtaaaataaatttcctacagatccaacactatattaattcgagaaccatcaccaactctgcatctcgccccttttcaaacaatctcttgagtttcataaatacttcgccacacgaaacttggattgctccccaactccgcatttaagaaggtaccattacggtagtacctagctttaaaaatcttgctgacaagtgagtccggacgactaaacaatctgcatccttgtttacaaagtaaactcaatttaagtcatgcaagttacgaaatcccataccacctttagacttatgtaccatcaatctatcccactttttccaatggattcctttgttgttcttcgacgatcgccaccaaaacttacacatcaattgctccatctcattgcaagtttccacaggtagaaaaaacacattcattgcataactaggaagagattgagccacaatttttattagcaactccttcactgctctagaaagcaatcttccttcccaacc

SEQ ID NO: 277489 - DNA, 462 bp, Cannabis indica
attataattctaaatttagactatgtctagtttatgaattttcactaagcaaggacttaaatgtgaagaaaagagattctagggtttatttattaattaggagactatattaagtctaattaataaatatgttaaatgataattttatttgataattaattttaattattaaataaataattttggcatttaagttgttagaattggaaaaatggcatttttgagaaaataaggaaaaattgttaaaagtggctaaattcaaagtgggggcccacatatccatgtccggccacttgtagggtattctctattattttaatgcctaataaatcctaacctaaacctagggggttgcctataaatagatagtgatgactcacacttaaagatgatgaaaattcaccttcagtcaaattttcctgaaccttcacttctattaatttcgaaccagtccttctcttt

SEQ ID NO: 277490 - DNA, 418 bp, Cannabis indica
ggcccgaaatgcaattggatggaatgaattggcattttatttgatatttgataatctgaattttatttggtattaaatatgcatggaatgacaaaaatacccttgtgagggtgaatatgtgtgctttggccctaagggcattttggtcttttgaccttatttaatttattctagtaaaagctgaattttgagttaatgagatgaaaattctggtattcccttccccataaccctctctctctcaaaccctctccttattctagctttgattttgatgggaattgcttgttttggagcttggagtttgtggattagtgagcttgaaagtgaaggaagttttagctaaacttgaggtagctttttcagattttaattttgacttccttgctgaattttcttgatgatggaacatgatttt

SEQ ID NO: 277491 - DNA, 517 bp, Cannabis indica
ctttaatctgttgggtattcctcgtcgacatatttgcttgttttttcgcttgatactccgtccaacactcatctttcgtgttgtcttttgtagatgaaccctggtgagtcttgggagcccgagcatcaaatcgaccaggaactgcttcaacttctgcacgaagtccaccctcgtcttcgtgctaatccttcttctgattctgtaccgagccatagaatgatggctcgtacgaagaaaactatgcgtttggctgacgcttctgatccccaggtggctcggcttgccaccctgctcgacgccgaacaggatttggcggtcccaatagaggaggcacgtccgggcagctctcccgctgctaagggagaggaggagattgaaccccctaactatggggagtacaatgaggctgggcaaccagttgatgctgatggggacgtcctggttgcaggcgtcgactacgtcaccgatgagcttgctgaggtggttcctcaaggaggcagggtgccttgggcaccag

SEQ ID NO: 277492 - DNA, 576 bp, Cannabis indica
actttttagagttactcaatgtgtgtcactaaaacccaattttctagtagtgtatcaatgtattctaacaggcataaacaacatgtatgataaacatgtaattacatatgcataacattatactaatcttaccttgtttccgaattcgggtgtgccagccaacctgagtggaacaactgctcggcgaattacaggcccttaaatcacatcgatcataacatggataagtgacacactaaatcacaaccggggacttaggttttaaaccaaaaacctacctactccaagttaacatggcaataccctaaactaataaggaattaactaaccaaagctctaaaactaacacgaatcgataacacaaaattttcagggagcccagcatcaaatccggttaaccagttttacaggtcctgtaaaatcggttaatcggtttacaccagaaaactcaaacaattcgaaaacctaagcaaatcgattccaaaccttaccaaaccttccagacctgcacatcataccccaattgacatattccaagcaataaaacaactacacaagctcagaatcaaaaatcac

SEQ ID NO: 277493 - DNA, 561 bp, Cannabis indica
tatcaagctactttttgttgatgggccatcaatttctagtttgcagtggctcgtatttcttcgatttcatcaagtgattcggccaggagtacgtgattggtatcttggttgtaaatcaatcttctgtgggatggtgactcgagttctacaggcagcataacttcatatccgtacgccatagcgaatggtgtctgtccggttgtcgttttctctgttgtccgatatgaccatagaacttcatgaagctcttctggccaatttcctttggcatcttcgagttttttattcagtgtatccttcaaggtcttgttgtctgcttcaacttgaccattagcttgaggatgtgctactgcggagaaacttttgatgataccatggttcgcacaaaagttagtgaaggactggctgtcgaactgcttcccattatctgaaactatcttgtacggtagtcctaactggcatattatgttcttcacaataaagtcttgaactttctttgatgtaatggttgcaagtggttcggctttcgtccacttagtgaagtaatcaaccgcaaccact

SEQ ID NO: 277494 - DNA, 562 bp, Cannabis indica
gaatggttctgcagcgacttagagatcataaactctatgcaaagttcaaaaagtgtgagttctggctgtcacaagtgtcctttctggggcatattgttgggaaagatggaattatggttgatccagggaagattgaagcggtgaagaattggcctagacctaaaacagtcactgaaatccgaagttttctcggtttagcaggttattatcggcgttttgtggaaggtttttcaaagattgcaatgccgttatccgagttaactaggaagaaccagcgatttatatggtcagataagtgtgaaaagagttttcaagagctgaagcaacgattgattacagctcctgttctagccttgccatctgatcaagaaaagtttgtggtgtattgtgacgcatcaaggcagggtttaggctgtgtcttaatgcaagcagataaagtcatagcctatgcttctcagcaattgaaagattatgagcagcgttacccaactcacgacctagaacttgcagcagtggtgttcgccttgaaaatttggcgacattacttatatggtgaaaggtg

SEQ ID NO: 277495 - DNA, 792 bp, Cannabis indica
accctaaaaccgatccccttaactccaatcaaccccaaacttctcaataacttccagaacgcctgtacacatcatattagaccaatcccaatcaataaaactcagcaattcacacagattttcaatccaccattagagagctaagtttgagttcacaaactctaactttgctcaaacctcaattcaacccataattttagttcaaaatagctcaaacaacatcaaacaatctccagaatactagattaaaccaccatagatcatacagcaacataacacccaaatttcttcaaaaaaacctaacttaggctaaggaaagcttaaggaagaagagtaagggaaattaccttgaattggaaccttagaactcaactagaattcttgatattcagctgaaaattcacagcccttgctgcctaggaaaaaatcgagagagagagagagagaagaaaaactattttccttttgtttttcaattttccttctttttccttcaagcttaagcaacctttttcttttgtttttcctttattatttacttaatagtaatccattcccagccaagaattaaccacataagtcaaaagaaaagtcttactaaaagaccttcttgcccctccattaataaaaataattaaaacaactcaagggtaatttagtcatttaccaaaccccgaaaataccaacaccgctaaaacttaacaatgataccccgaaaaatattctaaaccatataatacaattctctaaaggccccaacgccgctttccaccgcttccgaacacaaacaca

SEQ ID NO: 277496 - DNA, 605 bp, Cannabis indica
agtgggagaattttaaaattttttagccatattaatttggttgtcacttgtgataggaacttaagaacaatactgagaaagcaaatcaaaccattcacgtggatagaaataacttatcagaattatgagaataagatagaagaattcttgcatagtccattcgaatgacttgagtcaagatttctaatcctcataacattttatggtatcttaatttgattgcttaatctctagcaagtattttacacttcaaatactagactgctatgttgatgacttagtcttaaagaaacttacagtttcagactaagataataagtcacaactagatacccctcaaaacaatagtaagaggttaaaagtattatctaaccagacacctattattgagtcggagctatctgagatgtaatcaaatgaggaacattaggggacagtcaagaaggatttatgaaagtgacctatatgttagatattaaggaactatatattagtaatcctaatatccacaccaactcattaagattttgagatggtggttaccctgggggtggaggagttattctagaagagtgtaaaaatacatttataatagttcaagctcc

SEQ ID NO: 277497 - DNA, 669 bp, Cannabis indica
tatagatacgctattaattttccattgttataatcccaataatcaatgatcctctatagatgatttacattgcatagggattaatttaccgttacacccttcaatgtattttatccttaaaacacttagccacctataaatgatatttcagtgaactaacataatctctgaaatgagtacccaaccatttatctctatttatccaagctcgaaggaaatcatcgtttcacttctctgtctagatagaagctatagattccatatctatgattagcgctcccactcaattgtactaccatattcccaaaatgtacgtatcaccctgaacaaatagtaggcttaactaacaaatcaaagaacataaataatactcttgatatcgaacctaaccatgttaggattaagatcatttcatataggatcaactagttgatattaaattgaatagatattacggtaaatttctcatatctaatccaagttcaatatcagtcccttctaatgcatactccatgcatccaacccaagctttactttgactaatgccctggaaaagacatagcacttatccacggtgtaagtaaactatcttgtagattatcatattagttaaaccctatgtactgataaatgtaggaatacatttaatcacataatcttgattacttt

SEQ ID NO: 277498 - DNA, 832 bp, Cannabis indica
ataaagtgacacaaggtgaaattgatattgagaaggtgcctactgaggataacccagcagacatgggaactaaaattgtgactcttaacaagttcacacattgtatgaacttgttaagaatcgactcaggagactgaaagtaggacctatcaagctaagactctcagagataaacaaatcaacatcaggactggttataagaggaattcaagtggaaattgttgaataaattccacttataaccagtcccttatacacataaatatccacatcatcaacatacaacagaaacaaaacaagttgactcgatcctaggtggcttcgcctctagtggatcaagatttagtagttagttataaccgaaattgtaactaactcctaaaacctttgatcaaccgactctacaacattataaaaactggaaactaaagcaaataacctaagatctaacacagaacacagatcagaaaggaagagagaagagaagagtggctataccttagccttgagctcccaaatccaagatccagagagaactggtccagatctgagagtaaaactctcgtggtgaggattttagaagaagtacatgcacaaaggaaaagcacaaagttagatccagaagataaaagagagagaaagaaagaaacaaacttgtaaataccaaaatcgagtcttacctgatcgattttgtgacaggaagctccaaatagttgtatctcaccattgttgatagtggatatgaagctagatctctgagatgagcttgacagagacgtagcccaatttttgggtgaactctgaaacaaattctctggtgttttctctccct

SEQ ID NO: 277499 - DNA, 906 bp, Cannabis indica
agcagaaggtgagcaaaagtccaaaacgaaggctccttccattggaacatccgcccaacttcctcattattccagcaattcaagtggcaagcgtttaggcgacaaccacaagcaaggaaacggaaagaagggaaagttcgtcgaaaagaccggacagaatccccatgatcatgccaaacacactgcattcactctcctaactgaagatatagagagtgtgtatatggcaactcagtcattaattccgtacaagaagcccgggcccatgaagaaagataccaacaaaagggacatgacgaaattttgtcggttccacggagactacggccacgacaccaatgaatgctacaacttgaagcgggaaatagaacatctgatcaagaaaaacaacccgcacttacagaagtatgtcaaggccaaccaaggtcagaacaaccagggtctgttgcctccaccaatagatggacacttgcaagtcattattggaggcccacacatcgctggagatacgggcaaagctcgagagagatatgcccgaacagctcagtacgagcaagaagaagttatcctggccgtggaagagaggaagcccaaagttccacgagcaggagagccaaccataactttcaacgatgaagatgctgtccagatcagattcccccacaacgacccgctagtcgtggaagtccaaatagcaaacacaatggtggctagaaccatgattgataatggagcttcttcaaatattttgttcaagactgcttacgagaaaagggggctcaagctcaaggatctaactccatgcctccagcctacctatggtttctccggtcaaggagttgcatctctaggacaaatccggctacccctcacagttggacaagctccgacgagcataactatcat

SEQ ID NO: 277500 - DNA, 512 bp, Cannabis indica
tggacccagccctggacccgaaccttgacaaggacccgaacccactcccggacctaaacccagtcccaaacccaaaagttgacctgaacccgtaccctgtgacccaaaattggaaccaaaatgggaagttgaccgtgactggaactaggattttgtcttggaatcataactgaaatttgacctagatctagaaccgtaaccggacaaggacccagactccaaataagacctagacctaaacctggacttggtacccgaacccaacctgaactcagagccaaacatggaaccagactaggaacacagaaccagggtcgggaactcgaaccgcacccacgtctcgatcccaaacccaaactcagaaatggaacctgggacctgaaccagaacaagaccgagacccgtgacagtgatctagatcttcactcgggattcgggttacggggcttggaagagaccagtattcgatgtctagatctacgactcaaactaggaccagaacccagacgaag

SEQ ID NO: 277501 - DNA, 443 bp, Cannabis indica
gaaggagttattatattccgctagacctaatgtatggtttcctaaactttatatgtgtttatttcattgttttagaattcatattaagatgttaatgaaacatacatggtagtaaatctagattctgctaaaatatttccaacatttacatgggcactcagtcgctagccccgtacaacaagcccgtgcccatgaagaaagatgtcagcaagagagacatgacaaagttttgtcgtttccacgcagactacgaccacgacactaacgaatgcaacaacctgaagcaggaaattgaattcctgataaggaaaaacaacccacacttacagaagtatgtcaagaccgatcagaattagaggaacgacaataaccaagacttgctacctccaccgatagatggacatctaaaactcactattgggggcccacacatagctggagat

SEQ ID NO: 277502 - DNA, 674 bp, Cannabis indica
aaatgaacagtaaagcatgctatatgaacaaacagtgaactagtgtataaggtacgaggaacttacataaagtgtggaagctggacgttggtgttgatcgccggtaaaaggttaactggcaacggcgaaggaatacgagcaggaaatctatggtgtttgaggtttcttttccctctgggaaactctgagaaaattttggcaaaatgctgaaagtaaccaaatgaagtaagaaggttggcttttataggccagaacatgcgtgagacagctgtgatcagccatcatcgaacggctgggatggcaatcgattcgaattctatagatccaacggttggattgaatcgtcatcaaggcggtggaaaatgtttgagtacccgtttgacacccatttaatgcgccgtatcaataaatggacaagaaacaaatcgacgcctgcaaaaagcgaataactgcagtaatgatggtcattaatacaccatcacgcgcccaaagcacgtgccaggaagctgataaggcaaccggagccatctaagcaagcgttgttcacttcacaactaaacaaggcttagggggtaaatgttacccctgattttgcccaaaatacgtggaccaatcggatgatgacacatggatggaaaaggtttagcatttgaataaatcagctaagtctcctt

SEQ ID NO: 277503 - DNA, 602 bp, Cannabis indica
agacctggtcgaagtcaagcaaaagactaggcgagcctctccgagcctacatcagtagagtcatgacggaggcgactaaggtttcacgagtaacccaagacggaaagttgtccgcgattctcgggggcattgaagtccttggtgaactctagaaagacataaggaagaatggtctgatatacacaatgagcgattttctcgaccgtgctgaaggcttcatcaaacttaaagaggctattcagcaagcagaaggtgagcaaaaacttggcaagtcaaaagctccttccactgggacgcgttagctcgattgacaagcaacaatgtaaattataaagcgaacttggttcctatccagttcctcgaagagcctagcatcactggcacgaaagagatcgaaatgattgatacttctccaaactggatgacagcaataacaacctacctcaacactggggaactcccagataatcgaaatgaagcttgaaagatgaggaggaaggcagtacggtatatcatagtagagggaattatgtacagaagagggttctccatgccattgctcagatgtgttactcaagaagaacctactgttgggttttatg

SEQ ID NO: 277504 - DNA, 714 bp, Cannabis indica
atgattctaattctcaaattgctacttctatcttgctgtttttttttatagtactttcttaactagtagaattgtcccatcattctagtccaaaacctggacgagatatttttctcatataataaatttgtctgaagtttaacatcgtcacaactaagaacatgggtcgagtctgattcatattttctcaacatggagacatgaaacacattatatactccggacaacgcagaagttaaggctagctaataggctatctagcctatttaatccagtgaacatgtatataatatttctcttgtaccacacttattaaggtacctaaccagtggtacatttaattatcactttttaaataaacacctcataagggaagatattattctaagatattctaacctttatcaaatatgctcacagtatacttctaatattctattgatcttcgcaggttacccacctttcaagaataaagcattatactattttcgctttaacttccatggttctcaataaccttctttaattcttaacatcatagccaaaaatatcaaccttggaattttacaagattagactattccttcgtatgaattctgtattctcatttatagtataaattgtctacactgatagacaacatattaactctgtatgtccaatcgttactactcggtcaaaatcataagatcccatagtacataattcgtaatt

SEQ ID NO: 277505 - DNA, 731 bp, Cannabis indica
aggacatggtagttcaatttagttggagcactaatcatagatacggaatttatagcttctatccagacatagaagtgaaacgatgatttccttcgagcttggctaaatagataaatgatagagcgctcattttagtgattatattagttcactggaatatcatttataggtagctaattgttttaaggatacaatacattgaagggtgtaacggtaaattaatccctattcaatgtaaatcatctatagaggatcattgattattgagataataacaagtggataatcttatattgtatttatattgtggaatatatagagcgttctatataattgagagtacaattccaaattctatagtggtgcaaggagaaattaataagtaagagaatttacttactaaattctagatctgcttattgcaagctcggttatataggtccatagtccccatactagttgagacaaactgcttgtaagactcagtgaattgattttaattaatcaattataattctaaaattagactatgtctagtttatgaattttcactaagttatggcttgattgtgaagaaataggattttagggtttatttattaattaagagacattatggagtctaattaataagtaatataaatgacaattttatatgataattattttaattattaaataaatagttttggcatttatagggttgaaagtgcaaaaagtggtatttgtga

SEQ ID NO: 277506 - DNA, 557 bp, Cannabis indica
agaggcggccagcctcagcagcaagcagaacaacaacacaagtgtaagaaagaatccccaagaagaaaaatgaagggaaaagcaaaactataaagcacttaccacggtgagggagtggctgaggtcctggacctggaagatagagttcagggaggcgcaagttgcgaaccgcttaggtgcacaccgggtaagctgagaagcaaactcgccagtcatctccgcgacgaagggagccaaggtgggccctaagaagcgacggaaccagtccgacagggggtccaagttaacgtcccacggatcctggtactccgggttgttgatggtttcctgcacctcaacccgcaaaaccctcctaagggcttccacctcggcataccgctgcgagtattcgtccatgggatagttatgcttggctatccagagctcttgcctcacctcatctccaggaactggagtcagcacaatgttgggaggagcaggatgctcttccatgggggagaccccaccgtcaagaccatgggcaggagtgtcagctgtccgaggccgcttgggctcgt

SEQ ID NO: 277507 - DNA, 508 bp, Cannabis indica
aaaacaaaaactaaaacagaaaattaaaatgcagaaattaaagtgcagaatttaaaaattttaagtctctcccccaaactaaatatgacattgtccccaatgtatacaataaaatgcagagagaagagacttacctgagaccctctcagaaagggttgggtggtggcggctgatcatatgggtagaaccgaggaggttgcaccagataattcgggtcatcaatcccgatgttcattctgttgatgagagagttaagttgctgaacttgtccctcatcatggatactcctctgcaccatgtattgttgcatgtggttgttctgctgaattatataactcagctgtgcatgagtgtattgcgtcgtgggatcgataggcccaggcaattgtaggggctgctcctcttcttcttcaacactaggctctcgttgccgcctacgtccttgcggtgcatcaggtggaggctggccatagggatgtggctctttcagcctgttgacaaaggcgat

SEQ ID NO: 277508 - DNA, 476 bp, Cannabis indica
tttgcctaatttgaataactgtactaggttaattaaactagtttgacctaataaaattgattagcaacataattaatttcgaaatatatgaaattaatttttcattttattattttgaaattaatttagaaaaacacccttagtttaatgaaatttaaactcaagataaactaaatgtatttttctatatttaattaaataaagaattaataactaattagattcttctagatacttaattatttaatatttcataaaatatatttaagttgaaaatcaattatttatcattaattttggatcaacttgaatttgaatattttttaaattcataattaagttgagacattctaggtaattagttattgaaagattcttaaatattattttaatttgaaagtttgttaattttagatcaacttaaaatggaatatttttcaaattaagtggttagtaacttaatttgttatttaatt

SEQ ID NO: 277509 - DNA, 530 bp, Cannabis indica
ctaaaagatctagctaacagtcaaatggaagtaaatcttagcaatacgcgagtattcaagctgttcatctgaacaccagcgaatattcaatttgttcattcgaatatccacgagtattcaagacgtgaaacagtgcctatgaattgtgtgcggttatgtcagtttacgggtcatattctatgaatttacccaggtttacttacctaaaacacatagcctcataaacacccactagcatacattcctaaaaaagcctttagaatacccgaacccagaaagtaaagcatatattctccaaacagaaaacgaaaatgcaatgacttgaaaactaacctttagttctgatttctgcgattgctcttgatcacttctgagattgagaatattgtggaaaaatggtagaaaatctggaaatggatttttgaagtttctgtgatggagggaaagaagaagttaagagcaagaggaaaaaatgggagtttttgattcgtatcaagggatttaaatacccatatcccttattaattggg

SEQ ID NO: 277510 - DNA, 645 bp, Cannabis indica
tggagttttgtccttattatgttctatatacaccttattactttgaactttattttaataacaattagctcaaagtcaatgtgcctttgacctaatatagttcatgttgtcacttaaaatagcaacctaattgatttattgtcacaacatatatctttaatagctttcaataccatttctaattttgcagccatatgtgacaaaaatctcacaattatataagatcagaatcagaaatcttaatgatctccaaaattttctgttttctgatttttgataagtgaacatatattattttgttctcattaaattccttatagcccatttggctgcataccgaaagttccttatatggttacttaaatatctacccaacattcttaatatgtatattaagtataaatatatacatgcttgagcataaattagattccaatatgaattaagaatcttctatatttcttgaattctaaggtttcttttaggacaatgacttagacaacttattttctttagttacaagtctttcgccttctatagtatctttcatgccaaaagttttaaatactttattgatacacttcttttgttatacttcaagaacatatcttgaattcctaatacaaaatgggtatatcatctagt

SEQ ID NO: 277511 - DNA, 809 bp, Cannabis indica
agcatggttcttgcttttccacttttgcagccatctggagtgctttaccttcttgagttttgaaagcctcaaattgttttttcaaagcttcaagttgagctttcacactgtcctcctccttctggtagactccggctgttcgtggcttgtctgtaggacttggcgcactccatgtgtatgatttttcagaaatttcttcaagatattccaaagcttcttcgggatctttctgtaggaagtcgccattgcacatcatttgtacgaattgtcttttgtcggctgtgagaccgtcgtagaaatagctgacaagacgccaactttcgtatccatgatgtgggcactggcccatcaaatctttaaacctctcccagacctgatgaaacgtttcatggtccttttgggtgaaggtagagatttgcctcttaaggctgctggtcttatggggtggaaaaaatttagagaaaaatacttttgtcatttcatcccatgtcccaatagaccttggccttaaggaatacaaccagcttttggctttatccttgagtgagaaaggaaagaacttcaatctcaccaagttaatgatgtcagcttggttgttgaatgtggccaccacctcttcgaaggcctgaatatgcacatatggactctcattttccataccatgaaaggttggtaaaagttgaatcatgccaggtttgaaatcgaagttgggcatattcatgggatacattatgcatgaaggtgtggccgtacgcgtaggatgtagataatcctgtagcgttcttggttggatttcctgttgttgagcc

SEQ ID NO: 277512 - DNA, 585 bp, Cannabis indica
tcccagaaggcgatcccgagccaacaccacagccgaccagcactgaaagcaagccgacctggaagcttcacgtggatggatcggccacagatcagctatccggcgcaggaattgcccttgtcacacctggggggcaacacctgcatgcagcggtcaaattcggattcaaagcctccaacaatgaggccgaatacgaagccctaatcgctggactcaaactagcgaaggaaatgaaagccgagcacatcgagatctgcagtgactcacagctagtggttaatcatgtatctggcgaatacgaggctcggggagaaaaaatgatagcatatctgagcaaaatacatgatctgctcgcacaattcaaaagctacagcctcaagcagattccaagagaggaaaatacaactgcagatgcgctagcccgtttggcgagcagcaatataagtgacaaggcgaacctggtcccgatccagtttcttgaagagcctagcatcacaggcacggaagaaatcgaaatgatcgatacatctccgaactggatgacgccaatagcagcctatctcaactctggggaactcccagata

SEQ ID NO: 277513 - DNA, 844 bp, Cannabis indica
tactaatcttacctcgattccgaattctggtgtgccggtcaacctaagtggaatgaactgctctgcgatttacaggctcctaaaccataacaaccacaacactacataagtgatacgctaaatcacttcccggtgacttaaactagaaactaaaagtttccctatcgataaaaagcatggcaataccctaaacaacataaaaacgggaaaaactagggttcccaaaaatcccccaaccggcagaccggttctgcaaccgaaattccggttctgggactccctgaacaccatctgaaattctggttgcacaaccgaaattccggttcctcgcaggaaacacacaaaattccataactcattcaaatcaaacccaattcataccaaaccttccagacctgttctaaataccccaaagaacattttcaaagcattaaaacaacccagaaatcacagatacgaaaaatgccattaaagctccaagctttgagttcaaaactcaagcttggctaaacccctctaacatgcattcaaacctgtttaaatctacttaaatatgcataactaagcttctgtaaacaacagaaaacaaccaccacaaacacagcaaccaaattcttcattttaccataaaaaccaagtttttgagctaaaattcaaaactttgaacaacacaactagcatgcatcataaccagctctattctactcaattaaacaagattaaacctctgaaattatatcacaaacacagcagcaacaacacttcaagtaagcatgcaattcatcatcatttttcttcaaaattcaagaaaacaaacaagaacaagttcaagaaccttaccaac

SEQ ID NO: 277514 - DNA, 582 bp, Cannabis indica
ttatacaataatagaatcaaagcattccgaaaagatcaaatattagttcttttatagtattaattctaggagtgctaatagttggatccaaatctgtaattggattatagattaattgttcacaattgaattaatagtacataaggaatttaagagataattagaagggtaaaataataattttgaccaactctaattatgaactaataactagattctgaagtacttatattgattatatcaatagactactaaaaagaattctataaataaaattctttattgtcaaatagtgcatttcatatttatagtagagtaataatggaataaataaatctgattattttagggcattttacaaaaatactgcatttggggtaattgttttcaattttactgccacacggcagaattaacatttatactgtcctcccttttttttttcttttatactgtcaacaacaaaacaaaagtatgaggcctccatctttgacaatcacagacataaccaccacaacaacaccaggacaccggaaaataaccattaattccgacaagaataaacaaaagcagtaaaatcga

SEQ ID NO: 277515 - DNA, 687 bp, Cannabis indica
gcgatgacgaagaggctgactctgcgtcattgtctctcgatggacgactgcgaggattacggcgctcaggatcttcgtcaatttgtgcgctctggttaggaaaccttgcggattgatctcttgacatcgggtgattcaagtccagagcttcagggtcagttcttcgttccctgcgtacacggttagtatgacgtctagaaactgttacctgagggttatcgttgcgaatggcaggaactcgaggagggcgtcgagctcgactctgtccgtctacctcggcttgtagtgcccgcagttgatcctgaattgcagcatattgatcggtggtgagctggaccattccctcagatactaccgccggagtgacggggggaaaatgcatggttgctggtggtgtggacgtgtccccgacttgagggccagtcgtttctgggaataggttgagaggtctaatattgctcctccctactccgccgttgatgacgtccacaggtggcactccagctccgggcagtggtacactcatcattccaatattgatggacccgttgttagctccgttaacgtgatttccagccatgatgaaatagtgttctttgaagtgaatgaaatcttttagtcgaattcccacagacggcgccaaatgttgtcgagtgaatttcgcaacaccaaaatgtattatttaat

SEQ ID NO: 277516 - DNA, 744 bp, Cannabis indica
gtcgaggtggatcctacaaagatcgaagcggtcaagagctggccaacacctaagactgcaagtgaagtaagaagcttcttgggtctagctggttactatagacgcttcgttgaaggattttccaagatcgcaactcctctaaccaacttgactcgaaagacgcagaagtttgtctggtcagaaaagtgtgagggtagcttccaaacacttaaggacaaactaataacagcccctgtattatgtgttcccaataacaaggataagtttgtggtgtactgcgatgcatcaaaacaagggctgggatgcgtgctgatgcaaaatgacaaagtagtagcgtatgcctcaagacaacttaaggagtatgaacaaaggtacccaacacacgatctggagttggcagcagtagtttttgcgctaaaaatatggaggcactatctctacggggagaaatgtgaaatttataccgaccacaagagcctgaagtacttctttacgcaaaaggaactcaacatgaggcagaggcgatggctagagcttgttaaggactatgattgtgaaatccactaccatccggggaaggccaacgtagtagcagacgcgctaagtagacgcagttatgccagcttggcaatactggcacaaatggaaatgccactacaacaagaactccaaagaagtggtatagagatcattacacaaaagctagctaacctaaccattgtctcgacgctgctacaagaactt

SEQ ID NO: 277517 - DNA, 555 bp, Cannabis indica
acaaaacccgtagtcggtgtctggattagggacccagccgtggacccgaaccctgacaaggacccgaacccacacccggacctgaacccagtcccaaacgcaaaagtggacccgaaccaataccctgcgacccaaaattggaaccaaaactggaagttgaccgtgactggaactaggacttggacttcgaatcaaaattgaaattggaccttgatcaagaaccgtaaccggaccaggacccggactccaaattcatcctagacctgaattaggagccggacgtggatcccaacccatacctagactggggacccgaacccgaacccgagctcaaacccaaacatggaaccagactagggaaaaagaactagggtcaggacctagaaccgcaccctagtctcgatccagaacccaaacgcagaaatgggacctgggacctaaactagaactagactgagacgcgtgacagtgatccagataaagactcgggattcgggtaacgaggcctggaacagaccagtagttggtgtctagatctgggactcagactaggac

SEQ ID NO: 277518 - DNA, 606 bp, Cannabis indica
aaagaacaaatccaaagcactaaaacagcccagaacacacagatattaaaaatgccatgtgagctccaagttttgagtttcaaactcaaacttggctaaatctcacctacaagcatcaaaccttgattaaagttacatattcatgcataacaaagctgcagaaaacaatctctaactcatgcaacaactacagccactaatttcaaaaatttctctttgaaacttaagcttttgaatagaaaatccataactttaaacaacaccactaatcatgcactacgagtagctcaattcaacacaaataatcatgctttaaacttcagaaacaacatcaaaaacacagcagcaatatcaactcaactaagcatgaaaaacatcatctttttcatcaaaaattcaagaaaacttaaaataaagctagaggaacataccaacaacaagagatcataaattcttgataaaagagcttgaaatccaagaagaattccccccaaacccagctgctcaaaaccgaaagagagaaggaaagagagaaagagatgttttgtttttcttttaaattttctaagtttttaattttgaaataaaggaaaaatcatgcaaatc

SEQ ID NO: 277519 - DNA, 842 bp, Cannabis indica
catcctggttggcttgctgcaatgatagaagagatgaatgctttggttgcgaatggtacttgggtcttggttgatttaccttccggaaaacaggccatcgggtgtaaatgggtgttcacggttaaattcaatccagacggcacagttgctcgcttaaaggcccgtcttgttgccaagggttatgctcaaacctatggagtggactattgtgatactttttctcctgttgctaaactcacatctgttcgactgttcatttccatggcggctactcatcattggcctttgcatcagcttgatattaaaaatgcttttcttcatggagatcttgaggaagaagtatatatggagcaacctcctgggtttgttgctcagggggagttagggcgagtttgtcatcttcgcaaatctttatatggattgaaacaaagccctcgtgcttggtttggtaaatttagtcaggctgttgagaagtttggtttgttgaaaagtaagtcagatcattctgtgttttataaaagatcaactgttggtatcattttgttagtggtgtatgttgatgacatcgttattactggaaatgatactgaaggcatctcatcccttaagtctttcattcacacccagtttaacacgaaagatttagaggagctcaagtatttcttggggattgaagttactcggagtaacaaggtatttttctgtctcaaagaagtatgtacttgatttgctaactgagacaggaaaaattaggagcaaaaaccttgtaaatgctccaatgaatccagctgtgcatcttacacgtgatgggaaaccatttgaagatcctgagaaatatcgca

SEQ ID NO: 277520 - DNA, 543 bp, Cannabis indica
tttttaatccatataattcaaccctaaaccctagttgaaaaggaacatgatgctctcatctcatccacttgacactttgtcaaatttttgtcatcgtgacaattcaaccaacttagattagagagttccttccttagtgatttcaaacctccttcattgttcttcaccattcgaaccttgagtgatgagtgccatgcccatacatagaaaatcaagtactcaatcatagagagtaagatggtggtaaccaaacgcgaaggatagaaagagatccaagttcagatcttgataatgcgctgctacagaaaggaatcaagggctagagatcttgaacgaaagcagtcattattttccgctgcaatcaatgtaaggttttcttaaacccttatgtctttatgtcattgttttagagaattcatagttaggctgttaatcaacatacttgttagtaaatctagttcctggtaaaatattcctaacacaaacatgttccttccttggcctaaatacctaattgcaccacccgaggtaacttttgttata

SEQ ID NO: 277521 - DNA, 611 bp, Cannabis indica
aacaaatacccccaaactaaatccttactcgccctcgagtaagactaaaatctaagacaaagaaaaaaaatacaaactaacacatagttaactaagcctttagacaatcaaactgttgctgcaacctgtgaaactttaatcaattatcaaaactctaaaattaattcggatgcttactttgaaaaataatgtatagatgcaaattaacttcaatatttgaaaaacatcatatcaattctactctttctaactttccacaatctaatgatcaatatgcttgcatgacttacctttctccactaatgtcaacaaatccttgttcggaatcaaaaggactttcaaggttgtaatgtattggcttaggtaataggtagatgaaaagttatttaggctatattataccataagcacactataaaccatcaagcacccacaataaattacatatctcaaattgtgcccaaaaatttcaatgattgagaattttacaacaactcttagttccaacatcactttatttattcaacatttttttttcttttctttttttttctttttttttttttttttttaatcatttttttttctagaacgtaaataacattagtgat

SEQ ID NO: 277522 - DNA, 668 bp, Cannabis indica
gtagcagtatacccccttatcggtcatgaagctagtgcactcttggtctgccgtgtgcatctttatttggttgtaaccgacgtacgcgtccatgaaggacagtagcttgaatccggaggtggggtctaccatctgatcgatcctggacagagggaaacaatcctttggacaagccttgtttagatcagtgaagtctatacaaaatcgccaggtttcgttaggcttcggcaccaggaccggattggctagccattccgggtagcaaacgtcgtggatcatgctgtttgctaagagcttatccacctccttctctaaggcttcggccttcactgagtcgaggggacgtcgcttttgttggaccggcggcatgtccaggttgacgttgaggacatgggtgatgacgtggggacttatgccagtgatgtcctcctggcaccacgcaaaaacgtcaatgacacccttcagtgtctttattattttctccttctcctccgggtctaggctctttcctagccggagcactttggtggagtcgaggtcacacactgatatctccttgacgtcctccattggttctacgattttttcggaccccacgcggggatccaactcgccttcttcagccatttctggctcaatagtttcccggaccatcagtacgggtaggt

SEQ ID NO: 277523 - DNA, 488 bp, Cannabis indica
cggtctttacaactatcccccttaaaaggatttcgtcctcaaaatctaacctgaataactctggatattgggctctcatgtaagattctaattcccaggtggctagcttcctccaccttgctattcctccgaagtactttgaccaaagctatggtcttattccgaaggactttatcctttttgtgaaggatctgcactggctgttcttcatatgacatgtctggctgcagctcaagattttcatagctaagtacatgagcagggtctgaaatgtattttctcaacatagagacgtgaaatacgttgtgaactgctgaaagagttggaggcaaagctggccgatatgccacttatccaaccttctcgagaatctcgaaaggttctataaatctagggcataacttgcctcttttcccaaaatggttgatccccttcattagagatactcgtaaaaacacgtgatcccctacttggaactcaacatccct

SEQ ID NO: 277524 - DNA, 264 bp, Cannabis indica
catggaatcctattgatgatttccccaaaagaagtcacaaatgtcccaaccagcattcaactaaagggcctggacattaaatactggggagagtcttctttgttcaaaattgtggcatagctgggagatcatttataggtcgatgaaatcactaaaaatagagattgcctccagtatcccaggattctaattcaggtatgtttatgttggaaattatgaatgtctttcttcacgatcttcctcactatgatataggtatcactt

SEQ ID NO: 277525 - DNA, 511 bp, Cannabis indica
ttgttgcaaacgacatgtcgtttttagtcttgtgaggcagccatttaggagaaaaacgacgtgtcgtttttccccttgtggaaaaacgacgtgtcgtttttgcatacataattcagccccttcggaattgataaaacgacgtgtcgttttgcgttttgcaaaaaacgacatgtcgtttataggcagtgcatttttcaaaaaaaaaaaaagggaaaaattcctattttgtgttaatttagtccataaattgcattttgtcaattttttatttttatttaatacatatatctagtataaattgaaaatagaaatttgttttaatttggtaattaattacatgatttatttaggcatgtaataattgtgcaatttgtataattgtgcatctaattatttattaccaaatttatgtaatttattgcttaaattaataaaatttgaaaaatctgtcattaagtatagtctttaattttgcatttaattcattccatataattaattgtactaattt

SEQ ID NO: 277526 - DNA, 716 bp, Cannabis indica
catgatagtttagaaatcgcaatacatgttactgatttctttttttatttcgatctggaattattttttctagaaattagacaaaaaaaaataataaatttaggcttttacagaacctaatttggattttttatgaattagttatgattttttgaagttgaacgaaaatatcagggtttgaaagcacactcgcgcgcgcatgggacaaaatcccttcagacaatagatctaaattttttattaattattatgtattcaaaaaaatttttacaaacctattatttatttgatctaaattgctatgattaacttgttgacagatccaatgatctgattttaatcatagtccaattgtcaatagatcttataaataatttgtaacaggtaaattttgtacttctttcatctgtgtaaacctagtaacatgatagggcccatccaaatcatttgacctgtgtgagcctatatgtttgctattgggcttagatgcatataggaagcccatttaagttttactaagtaaatggactaggttgctaaaataaattttgacataagtaaatttatttaggcccaattagatttgggcttattcaatgaataacaattgtttatttaaaggttaaattcctctcttttgggccttgtgtgagagttgggggccaatagaagtgggtacgacatactgaacccagctccccctcacatgaactacc

SEQ ID NO: 277527 - DNA, 611 bp, Cannabis indica
gaattttagctcaaaattatgatttttatggaaaattgaggaattggttgctgtagagattgtttgtgtgggtgtttggtttctgcagttattttatacttgtttaagtagatttaatcaagttttgatgcttgtaggtgagctttagccaagtttgagttttaaactcaaagcttggagctcaactggaattccggatggtgttccaggaattcccagaatcggaattctggttgtagaaccggtcttccggttgggggatttttggaaaccctagtttttcccatttttatggtgtttagggtattgccatgtgatttatcgatagggaaacttctagtttctagtttaagtccccgggaagtgatttagcgtatcacttatcagtgttgtgattgttatggtttaggagcctgtaaatcgtcgtgcagttcattccagtcaggttgaccggcacacctgaattcagaatcgaggtaagattagtataacagtatgcatatgtattacatgtttagcatgcatgttaggaagcctgttagattacattagatatgtatgttggcttcgtaccatccgactgtatcacatcggtaaggctagagtatgac

SEQ ID NO: 277528 - DNA, 846 bp, Cannabis indica
ttttttgggtgggtttctggtgtaaaccggttaaccggttttacaggacctgtaaaaccggttaaccagatttgttgttgggttccccaaaaaattcgtgttgtcgattcgtgttagtttcagagctttggctggttaattccctattagtttagggtatttccatgttaagttgcagtagatagggttttggtttaaaacctaagtccccggttgtgatttagcgtgtcacttattcgtgttgttatcaatgtgatttaggagcctgtaattcgccgagcagttgttccacttaggttggctggcacacctgaatttggaattaagttaagattagtataatgccatgcatatgctattacatgtttagcatacatgttatttatgtatgttagaatacattgatagcagtaatactatacttagagttgtactaattactgatcgatgctgtcacatcaatatggctagagtatgactagcatattgagtataggctaacattatgatcgatagtattgtcgtatgaacgttttagactcagtaccgtgtgggacacggggatagggttatgatcgggtgtatgggcgcctggttataacccgagatattactatattttatgttatgtttttcttactgagtctgtcgactcacggtgctatttccatttgtaggtaagggcaagactaaggctgagcaactgtgagagcgagcagatgaagattgtatatgtcggggcggttaggcctggagcgtacgatctttggacatgagggcttttgctgtatagtcgctaggcgacaaaacttttgtatatgaatatcaaacttttgtaaatgtatt

SEQ ID NO: 277529 - DNA, 782 bp, Cannabis indica
tacgatgataggctatacgaaaaatttaaacagaataaatttgtttcaatatgccaaaataaactaataagtttatttgacatatatgagtatagacatacctgattatagaatttttggtttgatcatcatctttttatttaaaattgatgattttatcaaaagtagccaattggtatcttattgaaatcataactaattggtccaaaaaaaaatcatatttgtaatgatttaaaagttatttgtaactttattctttatttaactaatcaaaatgcatatattaatttacattttaaaaatatgggtgacataaatatttatgataaatatttttttaaaatacaatttactaaaatgatagcttactggatgacaatttagtgtttttaaaaataaactttaaagttactcaaatatattaatataccctaaataattaattgattattaaagtgcatacatataagttttagaggtaaccaaaatgtatctcaaatcatataatataaaagtaatatttgtttatgaaaaagttacgtattggtttattatcaacatcataagtaaccaaaaggttaattttaaaacgcaggaaaaaaaaaacagaatttcgggatttgttttatccaggcatattatttagaaattaaggtattttttaatgacgtggtaagacattattgtaattgagatatattaagttatttttgtaattattttatattacatgtatatttttgaaaaaatccctaatatttatcctaattatatgtcaaaat

SEQ ID NO: 277530 - DNA, 846 bp, Cannabis indica
ttgtttaacaaaaagaaaaatgagtatatatttatttttttaatgtgtagatatatttttaagttggtgtacaagtgttatgtagttgtttttaaatttattttatagattatttgtgtatttttttcttagatctaatgtaatttatgaagttgttttcatgcctatttaacttgcatattatagtaagttgttatgcagttatttatttgttgttatttagttattcaaccaaataaaaatgaatatatatatacatgtttattttattttatacattagtggtattttttttacttttttagagttatttttatgcctatgtaatttgcatattgtagtggagtttatgcagttgtttttttgttgttatttagttgtttaactaagagaaataaatgtatatatattttttatttgtgtgttgtttttattttattttttaagttggcgtaagtgttgatgctcaattaatttttatattaaaataaaattgttatcgtgttgtttattcgttgctattaagttatttcagtattgtattttttgaagtttttgtcttataaatttatttttgtttgcataatatgataaactttaattgatttatatgctatggttaagttgttttctagttgtttttgtgttgttgtttagttgttttgcactgagaaaagaagccttatacgttaaaattcattttgtccgaattcgccacgtggcaaccactgctgcgttctgacgctacagtttgtgagcgtcaggcaagtctgaatgctttgtccctcactcgcgtgtgagtctcactcgcccacatagccacatgtgtgccacacatctccttgc

SEQ ID NO: 277531 - DNA, 698 bp, Cannabis indica
atattccatcccaaaattaattggtaatcagaggagtagctcatttaacttatatatcacaatttatttccacacaataagcaatgtgggactaacgctttcggcattcaccaaaactaaaatgtattacagattaattgttgaggttaaagcagcctgttcctagttcagagttttaaaactttagttcagagttttaaaacttattactatatataatattatgaatgacacaacggtaacaatctccaaaattatgaaatattatgtggcaaaagtggtgcaagtgcttttgtttttcaggggaggctgtgtgttggagtctctccctcttgaactcttttaatggccaggaatggtctaattttttaacttatggtagcttctcacgtttcgacaacaaaaaagaaaaaaaattatgatttgggtaatatataatgtagttccatatatttgttttagatgaaaaataggtgtttgctaaagggttcatttttgggctaggtagcttgtgtgtttttgttctcccagacccattaaagaaaccttgaaaattttatgattatgggtgcctctaaaagtggtcattagtaatagttttattggctttagatgaaaaatatgtattaaagctaaagggttcatttggggtagctaaattatatacatatatatatatatagggatatgatttgttc

SEQ ID NO: 277532 - DNA, 588 bp, Cannabis indica
atatcaaatttagatatttgtatcctgtcgaagtaaggaaccatggcatatatgtttggaatatattccattttgagagagttgaaaaagcactatctcgttgaaaggttctatacatctgccctttctcaaggcatttctttagacaaagaccccgttttttcctcttttcggatggtaaatatttctcagaacatggagtgtgaatcaaacccatgtttgaattgaaattgagatactgatgcaagttcttctcttctgaatcagacagattaatatctgaaagaggttgacaataagttctttcaaaattgactatttgtccccctgttagaagtattccagaaatgtctgcgatcgagtaaatagctctacgaacgaatggatcggatcgaattggaaaatggaaagatttgtacaagttatacctttcgtcaccattttgtggaaaatcgttaggtatgaatatgttagacacctgtaactcgattggtgaaatagtatctctctccaaaaaagcatatttttttttaccgccgcgcaagaaaatatttgttgcgaatgaacaagatattgaggaattgtcca

SEQ ID NO: 277533 - DNA, 627 bp, Cannabis indica
cagataacggaatgttcatcattccgatgttgatggattcgttgttaacacctccgtttgcttggtttccagccatgatgattttccttcttgaatttagtaagaatgtacttctcgtttcccacagacggcgccaaatattgtcgagaaaaattcgcaacaccaaaagtatatgataattctaataataagtaaaaattgtttgaagagcaaatgcgagtattcaacctaaaatggcgagtactcgagctgggaatgtaaatacttaacagaaaattggaaataacaagaagacaaaggattatagtggtccaatcagatcacggtctgcttagtccactgtagcaagagtttcgtaggtctcatttcgtggtggatcacccctttatatacaaagcaggtgtccagttaattacaccaggattgttattctttgtcaatccatttgtacattgattcataataattaaactaaaaacgtaaacattaataaatgaataagagtttcgattcactgaatacagcaacgtatgcgacttttaatatgcgagttgagtgttcatattctggtataagctcgcgggcttaggatagacctatcatctgattagcctaagatgtttgcgt

SEQ ID NO: 277534 - DNA, 333 bp, Cannabis indica
ttttctattaacggatatcggccctcggcctcaatgagtctattactgatgtaatagactgggtcatgtatatcattctcttctctgattagcatagcactcacggcatgttccgtaacagctaagtatattcccagttcctcgccgtccagaggttttgagagtacaggaggttttgcaagttgtgcctttagcccttggaaagctttttcacactcctctgtccactcgaactgcttgtttcctcgtagaatgtagaagaatgggacacacttatctgttgattttgaaacaaatctgctgagcgcggcgatctgaccagttaggctttgc

SEQ ID NO: 277535 - DNA, 624 bp, Cannabis indica
ctatcaatttactaaagattttggctgccacactaaaagtatccttgaccttagcactcacccggaggatgcctcttactaatgagacactccgtataggaataacgggtctcaacactaccctgacgaccgcctcgattctggttccctcggaacctcttgctctgccccgagccaccagatgcagtggatgatttcctcctctggtccatggccgaacaactacctcccctgctgaaacctgatgcaggaggggtagaagccccgccacttactagagtcctaactgactccaacatacatccaactgcgccctcagctcgcagtgctttctccaccatctcagcataggtggtcttgtcgtcagtggtgatcatcaagtcgtgtttgatcctcacatttaacccgtccaaatacttctcctttttgctgaagtcggttggcactatacccgaggctaacctcgccaaccggtcgaactgagtggtatactctgtcacgctcatattctcccgctgggtcaggtgggtgaactctttcctcttggcacttctgactgcctcgttaatattttgtgttgaagagttcctagaacctttcccaggtcatggtggtgacgtcatg

SEQ ID NO: 277536 - DNA, 520 bp, Cannabis indica
tatgcgacgatttggggattaaaaaagcattttccgcagttgcttacccgcagagtaatggacaaactgaagccgttaataaaataattaaacacaccataaagggaaaattagaagatcgcaaaggggcttggccagacgagttatcgcaagtcctatggtcctataatacaacccctcgatctacaactggcgaaacacccttctcactttcttacgggtgcgaggccatgttgccagttgaagttggggcaggttcccttcgcagagatattttcaacatctcgcagaacaacgagaaccagctattctgccttgaccttttggaggaaaagcgtgataaagcgcacctacaaaatgcggcttaccaacagcgaactgcaagatactttaactccaaagtgaaggtaaaagccctgcgagcaggagacttggtccttagaagagtaatgccaaacaccaaaatcccgtcgcacggggttttcggagataattgggaaggaccatacctcatcgcaga

SEQ ID NO: 277537 - DNA, 579 bp, Cannabis indica
ctgttccatataacccaaataacatttccaaagcattaaattcacccagaatgcacagaatcaaaaaacaccattaaagcccaagctttgagtttcaaaactcaaacttggttagaatcaactaacatgcaatcaaaccagattaaacctacataatcatgcataattaaacctctgaaaatgaaagcaaccaactacagcaagcaattaacagattcaacacatttctttaaaaattcatattcttgagctaaaaacttcaaagcttgaatccaagcaaccatcatgcattcactaactctaaactacttaaaataacaagattaatcctttgaaaacaacaataaaacacagcagcaagtatcacaacaattcacatgcaacatcatcttttaaacattttcttcataaaatacaagaggaagaggttaggaaccttaccaaagcttgaagaacacttagattgaaagggaaagggcttgaaaatcaaaggaaaattccaggttcttgctgcttcaaagaggccgaacaagagagagaggttgagaggaaaagcttgtttttcttttaaattttcta

SEQ ID NO: 277538 - DNA, 715 bp, Cannabis indica
ttcgtatttcacagtttatagaaatttaagagatcagaaatcttatttttgtcataacttttgactcaggtgttcgtttttcacattctatataacgtttcgaagattgcgacgagctctacaacatggtgtatgttttagagccaaaatataagttttatttcagtgtacttatactgtggggttcggtaaaaaaccctcgattgtcttatgtgaatataagcagtgttttgggataaacacttattggtttatcgttgttgtgacatagggctgagatcatcggggatagttctccacttgggttggctgaaatatatgaatctggattaaaggtaagaaaagtatattgtactgcatattattaatatattattatattattattattatattattataatattatttatatatataaaagttaacgtaagttaacttttctatatatatatatatattaagttatcagtgaaacagaacagaacgaacgacgaacgaaaccctcgttttccctccttcgataaaaccttctccccttatatctattttcttcaattttcaatccaaaacttagcgatctaagctctggtagtagcaggatagcaaatctttgaagagggaaagcttaaggtatggtttaatttcgttttaagtttaaaaacaattggtttcctatagggattttgtgaattagaatagttatgaaggttct

SEQ ID NO: 277539 - DNA, 920 bp, Cannabis indica
atgtcttctctaggtccccatgtagaaaagccgtggtcacatccatttggtcaatctccatgtcaaactgagtagctagtgcgagcatcaaccttatagtcttatatttcaccactggtgagaatatttctgtgaagtctatcccttctttctgtgtgaacccctttgccaccaatctcgctttgaaccttaccggttcatcctcggttctcccttccttgactttgaaaagccatttgcaagataccacactcttgccatcgggtctaagtacaactctccaagtcttattctttatgagagagtacatttcctccttcattgctttcaaccaagccttgtagtttcggtctttgagtgcttcttcataagattgtggctcatagatctcagctttaagcttgcacatataggcataggcaatactctcatcccacacattgtaactgtacttctggttcggtttagggactcttttagctctatctcttgtaagctgatattctgtgaggtcttcctgattcccgtcttcttcatcttgaacttcatgttccacctgatttggtgcttcttgaggttccatttgaattggttccacctgatctggattcggctccacttcagttgggccggtttgagagactccaatagatgtacctgcagggttagtttctgtggaacctgcatcaagctcattagtatttttacaaggaaaatcattttcttgaaaaatcacatctctactaatgagagttttgaaacctcctttcccttttacccacaatctatagccctttacaccctcggggtaacccagaaacacacattttagagccctaggctctaacttgcctacactttgatgtgcataagctgcacatccaaaaactttcaaattagacaagtcaggtggtttacca

SEQ ID NO: 277540 - DNA, 285 bp, Cannabis indica
aaaataatttccaacagttgttacacaagtctttattatctttaaccagggaacaattttcagcacgtatttccaaccacttaccaaacattaccttgtaagattcagccatagagttctcatcaatttctgactcatctaattcgaatccagcttcttccttgttgtcatcgatcaagatattattcatgcaaatgggatttcctttttcttgcaaatttcttgacaaaacacttgttagagcaaccttttctttttcatcttcactactttcagaatcatcac

SEQ ID NO: 277541 - DNA, 448 bp, Cannabis indica
agttctatgagtggatgcaacaatgaattaataagttagggagtttacttggtaaattctagttcgccttattggaagctcggttgtataagcccatggtcgtgtactagttgagaccatactacctgtaagactcagataattgattttaattaatcaattataattttaaaattagactatgtatagtttatgaattttcactaagcaagggctaaattgtgaagaaaagagattctaggtcttatttattaattgttaatattttcattattttaatgcctaataattccaaacctaaacctagtggttacctataaatagatagtgatggctcacactaaaagatgatgaaatttctcaccttcaggaaaattgagccatccattctacacccatagccgaaccaccttcctctctttttctcttaaaattttctaaccttgag

SEQ ID NO: 277542 - DNA, 689 bp, Cannabis indica
cggggttatggaatttgaccattttacccctagttttggttaataccctaagtttgagtcaaagggcaatttggactttttattaagtcatggataggtggcttattggttagttgacacctagctaagtaaatttcagcaagggaaaatggattttccttaatcttatttcatttagagaaaataggagaaaagtagaaaatcaacataaaccttcctctcttttcctctttcggctgaagcaagcaagggagatttgctgctgaatttctgtgtttcagcaagggattcaactagaaattaaacccaaggtaagctctagcaactcctagcctagttcttgaatttaaagtttaggttgaatatgtgaaattgggtttaggggctgttaggtttagaaatggttagggttcagtttttatgctcaatattgattgattaaaggttctggttgttggttttgatgcttggtgttagttctaagcaagcttgagttttgaaactcaagctttgagctttaatggcaagttgagatttgttggtttgttctgtgaaatactgcctggattttattgtttatgcattgtataggtgtactggagagtttggtaaggtttgggattgaattgagttaaggggattggtttttgtgttcccagcacagaaccggtcgaccggttctgggggac

SEQ ID NO: 277543 - DNA, 594 bp, Cannabis indica
cacctatagcacacacaatataatattaataaaatgaaaaaatctcaaaaaaaatttacaaaaacgaaataataccaatgtacattaataaaatgaacagaaataatatttataccttaatgaacgttgagattaaacgatttctccgctaaaatcggtggtcggagttaaaccaccacctttttttaaaataggttcgggtacagtgtaaatgggtgaaaaaacaaaacttttttagtgtatgggattagatattgaaaatagaaacttttaagacaaaaatgaggtgaaatggtgaagaaatgagagagatatgggagtttttagaggtggttggcgagggttttcgtgggtctctctctgctgtagagtggctggtacgctggagaagaagaagtggggaagaagaagacgctgcaaaaggttcctagcaaagaactgacggcataggtgcacacgtgttaataaagtgtgcacctatgccgtcggttctttgctaggaaccgacggcatagggtttccccaaaaccctcaaaatttcccaatttccaaccgacggaatagggtttattaatatatatacctacagttttt

SEQ ID NO: 277544 - DNA, 549 bp, Cannabis indica
agatttagacacaaatcgttcaaattcagagttacaaaaaagaggagtttttattacttctttctaaatttatgcatctgaaaacacatgaatattttttttccaatacttttcatagcaatatttgttataattacaataacattcttataaatttttaattttttttaataatttacagtgttgaaaatcgattagaagttttttgaacgcccgtagtaaacttcaatatctggaatattatgttgtcaatactataaactatatatgtgtaattttttaaaaatttacataaataatgttgtaactatgacgaacaccaccataaaactttttttttttaaaaaaaataaaagatataccgacattcatttttgaatgcaaataataaaaaagatgttgtaataaaatattttaattaagactcgtctcaaaaaaaattcaagcctaggttatatgaaaaatgcattgtggatacataggaatgtcaatggggcgggtcgaatctgatctgactatgatccgacctgatccagatcatgtacggat

SEQ ID NO: 277545 - DNA, 629 bp, Cannabis indica
agtggactccacgtgtcaccattctcctgatgccacgtcagagtgcaaaatttgggataacatttgccccccaagtctgtatgggacctctaaggttgcgtgtagacttcttccgagctggctctgcctttggatggggacacgtgtcgagcatgaccgttcgagactggatgtgaagctgacggggcgtctcttcggttttcggctaattaatgctctaacaattaacatttcgaaatctgattttctctgtccacggctgacggttgcactcgattactttttatttcccatattcgtttttgaggtagaaagccgaggcgtctgaggttcctttgatgtagttacctcttttcgtgacttgcctataaatacccatagcatttgcacataactcattttatcaccctttgttgctaagtaaacttcagagtgaaaagagagttttctgacttcaaagttgctgaagtgccttcatacaactgctggtttgcttcacgtggctcgaacccagacactcgaatctttgagtaagtttctgatttcctttatgcttttctttgcatgtttacactttgaatgcaactatgctatagaaaaacgcttaggaaaccctagggttctaaact

SEQ ID NO: 277546 - DNA, 587 bp, Cannabis indica
ataatgctctgctacagaaaggaatcaagggctagatatttgaacggaaggagtcattatattccgctgcacccaatgtaaggtttcctaaactttatatgtgtttatttcatcgttttagaaagttcatatttagggtattaataaacatacttgtgagtagatctaagatcttggtaaaataatttccaacatgtttaacataactagtttcaataatttaaatttatttatatgttaagaattctcttgtggtatgttttaatttttttaattaactagctatttcgtgtttcaatacatcattttattgttttaggcttcttatgtttttgtttctatattaattattagttttgtttaattagctatctaatgtaactggtttttgcagtttaattgttattttttttcttctaagaactagtttttatgtttcaatttatataatataactggtttatgcaatttaattattagtttatttttttttaaggaaactagtttttatgtttcaatttatcttttgattgttttaggttgtattggtaactggtttccctatttatttataatttttgttgttt

SEQ ID NO: 277547 - DNA, 561 bp, Cannabis indica
atcctaaataatttccaaggtttccaacaaactgatacagtgtccggtaggcgagagtcaaagatatcattcattgaatagagtagtcagctcatctaaaatggacaccattctagcaaccttttatttgatcaaaataagaatccaacgttgtcccggtaggcgagagtcaaggttattcttattttatgagcttccactattgtttcatactttgtaaatttatctctaagtagtcactgtaggggagagtctaatagagataaaaacttacaaaatacttatctttcgagatctttacgatgttaaatgttcgatgtaaaaccatccataagggggacgaagtctagcgtctcgaggtcccattgaaatatcaaccatgtaagaccaacaatggagatcgaatattcttataactaaagctcattatttgagagggttgtatttttatttgatacttattttaatctatttattttaacatatatatttatttaattaaaattactaatttagatgaatctaaatataaattttaatttaatatttataaaattatac

SEQ ID NO: 277548 - DNA, 582 bp, Cannabis indica
tttgtatgaacagtaaacttttgtaaatgattttttaatcgagatcccgagtcttttgtaattatattttacaagtttaattaaaaagcaaaaattttaattaatcacgtttttccataaacctcgttgattagcaacgagctgcacaacatgtttaaacatcacgttatacgcctatagtagttagggtgttacattagtgcaagtgggagtttgtttggttttgtgccctaaataaaactcatttcaatataatcatattttctaattaatataagatcaaaaattattttatgttgcatggttcacatgatttatttcatgattatatgtataaattctaataagtccataacataagtaaatatatacatatatatttgttcatgattatagtatcgttagcatagtggaatataatcatgattatatgttcaaaagtttgattcccatgatttgtcagttcactagatttagattgacatgataatcagtgataaggtacacttacaccttggataagtcttatgtcctttccagggtattggcaaagtttaccagtatctgatgtatggagtatac

SEQ ID NO: 277549 - DNA, 550 bp, Cannabis indica
cttgagctacacaaccgggatatgtcatatgaggaacagccagttcaaatccttgacagaaaggataaggttcttcggaacaagaccatagctttggtcaaagtcctctggataaataaaaaggtggaggaatccacttgggagttagaatcagacatgagagctcattatcgagagttgttcaggttagatttcgaggatgaaatccttttaagggggataattgtaaagactgcttagttttaatttggaaattagcagataattaggatttaattatggaaattattaattaattttgaattattaatttatgatgatttatttgaattcagaatgcattttataggtcataaatagaaatttcataattttgcatgttttatgcccggcaacattggaacgcggtgtttgttgggctttgtgcccttaataaaactctatttcaatgtaatctttatcattcaattatcaataaagagacagaagtattttcatcacttatttagtgtgtcatttggttcatgttatcatttatatgtttatttaa

SEQ ID NO: 277550 - DNA, 822 bp, Cannabis indica
gaagggagtcacttctgcaacaagcagtttgaagcacttctttcaagatatggtgtccgacatcgaactgctttaccataccatccccaaagtaatggccaagctgaaatttctaatcgggagatcaagatgattctagagaaaacagtgcaaagatcaaggaaagattggtcaagaaaattagatgatgcattgtgggcatacagaactgctttcaaaacaccgattggcatgtccccatatcggttggtgtttggaaaggcttgtcatctaccggtggagttagagcataaagctttttgggccatgaagactcttaacatggaactaaaagctgcaggggagaaaagactgttacagctgaatgagctagaggagtttcgaaacgaagcctatgaaaacgcaaaaatatacaaggagagaactaagaagtggcacgatcaaggtctagtacggaaggagtttcaaccagggcagcaagtgttactctttaattcaaggttgaaactgtttcctggaaagttgaagtcaaggtggtcaggaccattcacggtggtcaaggtgtttccttatggagcggtggagttaaaaggtgatagtccagcaactttcaaagttaatggacagcgtttaaagctctacttgggaggtcaatttgaccaagccaagtccgccatgatcctggcgccactttgaagtacaaggctcagcgtccggctatatgacgataaagacagcgctcttgggaggcaacccaagtgtttttctttaatttttcagactttttgattatgtttctagtctatgctttagtatttttag

SEQ ID NO: 277551 - DNA, 820 bp, Cannabis indica
agttcaatatcggtcccttccattgcatagtccatgcatccaacccaagctttactttaaccaatgccctggaaaggacttaacacttatccaaggtgcaagtaaactatgttgtagattatcatatcagttaaaccctgtgtactgataatctaggaatatatatttaatcacacaatcttgattactttccactgttttgacgacacaataaacaagaatatcaatgtgataagggtttggatgaatctataaatctaataaacatataaatgataacatgaaccaaatgacacactaaataagtgatgaaaatacttatgtctctttattgataattaaatgataaagataacattgaaatagagttttatttagggcacaaagcccaacaaactccaaattgcactaatataaaacaatcagtacatttcaattaatcctaaatttagtcggtacttttcaaatgcagttcctgccaaaactttggtgaatggatcagctaggttgtcctcggtgtccactttctcaaccagtacatcccctcttgccacatactctctcatgatgtcatatttcctttctatgtgtttgcttctcttgtggctacgaggctctttactattgcctatggctccagtgttatcacaaagcaaaaccagtggtttttccattccaggaacaacaacaagtcctgtgaagaactttctaagccagacaagttctttagcagcctctgcggcagctatgtattatggctccatggtagagtctgaaattgcaatttgtttagcacttctccaaaccactgctccacccc

SEQ ID NO: 277552 - DNA, 623 bp, Cannabis indica
atccccctctagaaaaaactcgtgttatgcctagtccatgtgtctcgcaaactacgaccatacttccaggctcaccccacaaaagtgttaaccgatcagcccttgagacaagttttatcaaaaccagatgcttttggaagattgataaaatggtcgattgaactggggcagttcaacataacataccatccttgaacatccatcaagggccaagctttagctgacttcttgatagaaggtattactatagaagaaattccacctgatcagcgagacgcggaaacctggaagttatatgtggatggcgcatccaacgaacagggtgggtgcaggggtaatattaatatcgccaaaaggctttaattttcactatgctatgagattccaatttgacgcatccaataacgaggctgaatatgaagccttgatcgctggcttaaagatagcaaaggcattgaaagtcaaaaatatcatttgtcatagtgatttgcaactgatcgtgaaccaggtcctcggggaataccaggccaaaggcttaaaaatggcgaagtatttagagaaagtttggaagaacttggaaagatttgattattttaaaatcgaacaaattccgagaaaaaaaa

SEQ ID NO: 277553 - DNA, 602 bp, Cannabis indica
caagatagaatccgccagcaagatgaagagattcaaaggttgaggcagcagggtcctcctgccgtgcctcctcaagtggttcaggctgttgcagttcctgcggtgccagcagaacaacctgttgttggcaaccgtatggagccgttgtatgaaaggttccggaaacaggcacctccagtgtttctgggaggtcctgatgtgatgaaggccgagcagtggctttcagtgattgaacgcatcctcaattttatgggagtggttggaaatgatcgggtgacctgcgccactttccagtttcaggaagatgctctcgtgtggtgggagttgataaccctcactcgagacgtcacgctgatgacctgggaagaattcaaggagttatttaactccaagtattataatgaagcagtccgcagtgcaaagcggaaagagttcactgatctagttcaaaccgagggaatgtcggttactgaatacacgacaaagtttgatcggttggctaagttggcggcgggaattgtgccgactgattttagcaagaaagaaaaatatttagcgggtttgagtgcaaagattcggcatgatctggttattactaccac

SEQ ID NO: 277554 - DNA, 647 bp, Cannabis indica
tggccgggaatttagaatgtcccaaaaatacccctttagtatgattttagtgattttatggtggaggggcaaaatggtctttttgccccattagtgttttgtttttagtggcttttaattggaattaaatgtttatttgtttaattgttttggctgaaataaatgagttatatgtgatttataatactttttctctcatttcaaacacttagtcaattttgaaagaaaattccaaaaactcacacacacaaacactctctctttcggccaagctttgagcagcaaggagggggcttttctccttggattttggctggttgttcatcatctcttagggttcatttcaagttaggttggttcttgtctcctttcttaaaattcttgagttttgatgaaattatgagtaaatgcatgttaattttgaatgtgttgctgctgcttgtgattgttgttatttttatgttcaaatgctggattaattatgtttagttaggttggaatgcatgctagataggttgtgcaaagcttggaaattttctatgcaaaatatgtgattttgaagatgaattgtgtaatctgttgctgggttattgttgatgttttgggttgttttcagaggcttaattaagcttgtctaagtaggtttg

SEQ ID NO: 277555 - DNA, 782 bp, Cannabis indica
gaacgtttgtatgacgatacttttgacatagtaacaaccaatactcggtacgctagtcatactctagctataccgatgtgctactgtatcagcctatactcggtacgctagtcatactctagccgtaccgatgtgatactgtcgaataacacgaaagccaacatacatatctaatgtaatctaacaggctcactaacatgtacgctaaacatgtaaatacatatgcatactgttatactaatcttacctcgattgtgaattcaggtgtgccggtcaacctgagttgaacaatctgctcagcgaattacaggcttctaaatcacatcaatcacaacactgataagcgatacgctaaatcacttcccggggacttaaacttgaaactaaaagtttccctatcgataaataagatggcaataccctaaataactcaaaaatgggaaaaactagggttcccaaatttgccccaactggtagactggttccccaactggaattctagttctgggaaaaattcctcgaagccaattggaatttcgattcctacaggcctctctgaaccggaattccggttcagtgcagcaatcacaaaaattttcataactcgaccaattaaaccccaatccaatccaaaccttccagacctgttaattagaccccaatgaacatttctaaagcaataaaacaaccacccaaagacagaaacacaattcaccattaaagctccaagttttgagttcaaaactcaaacttggctaaatctaactaatcaactaacaaaa

SEQ ID NO: 277556 - DNA, 549 bp, Cannabis indica
ggaaaccatcgagaccttatctgttgaggttgatcgtctttaagatgagaggacttctctgcggcaggtccttcttcggctgaaggaagataaggacgctcaggcggccgaggcagaccgcttgaaggagaaagtcgatgctttggagactgccggcctcgagctcttctttgatttttggaaggctaatccccaggccaacttcgactacttgagcgacgctaaggacatgtacctcaagtgctgcgcgacccaagttgcctatggtgggaaagaggtggctgcttcaacttccgaccaagcttctgaccaggctgccgatgcttctcctgctcgaacaacagatcctcctgctccagtcggctcagaagaaccaaatccatagcctggttctccagctgtttgaacattgatctttttatctctcatgtttatatatatattatatggctttaaggcgtttaagacatcatgaccggccaagcggtttttaaacttggaattaattttcatttttcggacaacgggcttaccgggcagcttttaatc

SEQ ID NO: 277557 - DNA, 460 bp, Cannabis indica
aattattttcaagttattaaataattagaattggcatttaaaaggttaaatttgaaaattggcatttttgagaaaatagaaatggaaaataacaaaatgggaaagttgcaaagtgaggcccaataccctttgtatggccggccactatgcataagaaataccatttgtagttttcattattttgccatacaattctaacccaaacctagaaggaattctataaatagaaagtgttggcttgaggaaacagacaacacacacaaattcacacattgtttccttcagagaaaagcctcacgcctctctctcttttattctctctaaatttcgaaacccatgagtgaatgagtagtgcccacacacatcaagtggtacctcaatcatagtatgtaagactatggaaattcaaccatcaaagaaggtgaaaagaagatccagattcagatcttggtgatgctct

SEQ ID NO: 277558 - DNA, 748 bp, Cannabis indica
tcaaccgacagtggggccgtataaatctgatgtttgctacatgttaacaacaagaacaataaaatatgcccaattaaatactatattattttccgagatactacaactctcttactccactatagattcagaattgtactcctaattacatataacgctctacatgttccaaatatagatacgctattaattatctattgttataatccaaataatcaaagatcttctatagataatttacatcgagtagggacaaatctatcgttctacccttcaatgtactttaaccttaaaacacttaacttcctataaatgatattttagtaaactaatattattcatgaaataagagctcttccatttatctctgttaagcaaagctcaaaggaaatcatcattccacttctatgtcattatagaagctataaattatgtatctatgattagcgctcccactcaattgtactaccacgtatccaagatgtaagtattggaccgattcatttggccagcattaacgaataagtcaaaagaacacaaataatacagttaagctagaacctaatcatctcaaaattaagatctattgatctaagaccaactaagtgatattgacttagaaagatataacagtaagtttatgatatcttatccaagctcaatatcgatcccattcgatgtatactcaatacatccgatactagtatactttaccaatgccctagaaaggacataccacttatccaag

SEQ ID NO: 277559 - DNA, 330 bp, Cannabis indica
aattggcatttttgagaaaaggggattgaaaaatgacaaaatggcaaaattgcaaagtgaggcccattaaccatatcatggccggccactatgaaagcattttaccatttatattttcattattttaatgccatacaattctaacctaaacctagatggctttctataaatagaaagtgatgacttcaagaaactatgacttgcatcttattttctctcagagaaaaacctaagcctcatagccgcccctcttattctcttttcttctcttaaattttcaaaataccctagtgatagagtagtgcccacacacatcaagttgtatctcaa

SEQ ID NO: 277560 - DNA, 357 bp, Cannabis indica
aaagtgaggcccatttccacaagccttgggcggccacatgcataggttttatcatttaatattttcattattttaatgctaagtaattcaaccctaaccctatgtgttattctataaatagaaagtaatggcttgaggaaagtaatacaattgcatctcattcctttcagagaaaatcctaagcaaaagccgccacctctctttctccttcttcttcttcgttttgaaatccctaagtgatagagtagtacccacaaacagcaagtagtacctcaatcataatgtggaagattgtgaagaatctagattcaaaaagaaggacattcaggctcagttcttgataatactctgcgacag

SEQ ID NO: 277561 - DNA, 513 bp, Cannabis indica
aagtggatcaggtaccacagctcgaaaagtgccgcattctgccgccaacactcgaagaaaatgcccacgattggtttacccaattacctgaggcgtcgatatcgacgtgggagaccttcgtcgacttattcctcacacatttccaggccacaatgacgtataggccaccttatacaactttggcgaacatcaaacaagaacctggtgagtctttacaagactattttaaacgctttaatgcagaagtaacaaaagttgagaaggctcccgagccttcgcttgtttgcatgctgataacaggtatcttaccgaggaccgacttttggaaggagttacaagctcgaaggcccgagtccttagtcaaattcttcgccatagccgaatcccaaaagagaatcgagaattctctggcggagttagagaagggaaaagataaacgccggtcaccgataccgcgttcacgatctcgcagcccccgagggaagagctccaggggccgaagcccaaggagac

SEQ ID NO: 277562 - DNA, 525 bp, Cannabis indica
aattcagatgctcaattcataacactatgcataaccacagaatttattcacacatgaaatattgttataaaaagttttactctttccaactgttccacagcccgatagctcataagcttgcatgcttacctctctacactaatgttgacaatatcctttataatcattaggtctttttcaggtttagaaattatggctcagatattgagaaatcgacaaaagacggttttggctcaagatatcataagcacacaaacagaatccacaagcttcttacttttttttttcaaaaccccatagtgttcccacatttaccaagattgagaaaagatatatttatatgtctcgaacattactgaaataatttttttttctttcttgaataaactttttccaaacacatcttactttttattgtgtttttttttaaatttttctttttttttttcttttctgttgacaattgagtttacactattttttctttttctctaatcttgcaagttcttctccctctaactgttt

SEQ ID NO: 277563 - DNA, 616 bp, Cannabis indica
agaacatgtattggtctctgtacaatctaaactgttcttagtgtcatctgatcaatctattttgcctatgagtatgcatgtatgtcacagttcttcagcaatggttcttctgtccttccccatctactatatactactttgattgttactacacttgaatcttccccagtcaaaaaggctacctcttccagatgcaatgggaagagctctcatacacctggttctaataagtagtatgctccttctctattagttcttggtactcaaagaggacggctacatctctggaagagagtgaaagccatgtctgggtactaaagcaaaagccagagtgatataaaaaaaaaggcttcatataaaaaaaaaacaatacaaaaatcgtcatttttctactatcagttgttgcttagttgagagagtggtccagctgaatttcactcttcttggaccacatgagatcactgttcacacacgaatggagaaagacatttatatctggtatattaactctgtttttttttttgttggtctttagttttctttgttagtcattgaacataacctgtcaagggggagaatgttagtgttattatttgtgacagtgtttgttctgttc

SEQ ID NO: 277564 - DNA, 540 bp, Cannabis indica
ggtgatattgaattaaatagttataacggtaagattatcatatctaattcaagttcaatatcagtcccttccgatgtgtactccatacatccaacccaagcctactttaaccaatgtcctggaaaggacatagcacttatccaaggtgcaagtaaactacgttgtagattatcatatcagttaaaccctgtgtactagtaaatctaggaatacatttgattacacaatcttgtttactttccactgtgttgataacacaataaacaagaatatcagtgtgataagggtttggatgaatttattaatcaaataagtaaataaatgatcacatgaaccaaataacacattaaacaagtaatgaaattaaatctgtttctttattgataattgaatagaaaagattacattgaaatagagttttatttagggcacaaagcccaacaaactcccacttgcattaacataaagctatcagtacatttcaattaatcctaaattcaatctgtgcttttcaaatgtagttgcagccaaaactttggt

SEQ ID NO: 277565 - DNA, 645 bp, Cannabis indica
gaccgagatcctgacccagacccaaacttggacccgcactcgggacccgaacttggacctagacccgaacctagaccttgatagggttcaaacctggacaaaaacccggacacagactcggacccgaacttaaacacccacacctagaattagacccaaagctagacccggacccggacttaactcgaacccaaaccaggatcagaaccaaggacttatcccaagaaatgaatctagactcagatcgagattggaatttgggactcagatccaacctagaccaagacccaggacgcgaacccacacccgaagcttgatctggacctagactgaaatccggacccgaacccaaactcataccaggactcgaactctgacctgaactaaaacccaaactcgaactcagaatcacaaatggaactcgaaccgaactaggactaggaccaggacaaggacctatacccaaacccgacccaagatcgaaacccagacagagacctaaacctgaaccgagactaggagtcgaacctgaacctagattgggacccaaacccacacaataaccaggacatggaccaagaatcaggatagggacctggaaaacaaaactaggacctgaacctagtacccgacccagacccgaac

SEQ ID NO: 277566 - DNA, 609 bp, Cannabis indica
tgggtctaagtccttggttctgatcctggtcagggttcgagttcgggttcgggtccgggtctacctttgggtcttattcgaggtgtgggtttgatttcgggtctgagtttgtgtccgggtttgtgtccatgtctagaccttatcagggtctaggttcgggtctaggtccaagttggggtcccgagtgcgggtccaagtttgggtctgggtaaggatctcggtccagatctaggtccagcattttgatctcattctgggtcttggtccaagtctacgttcgtatccggatccctatctaggtccaagtctgtgtttgggattaggtcctagatttaggtccaggtctgggtcttagttctggtctgggtacacgaccatgtccgggcccgagttccagtgtcagtttgggtctgaggctaggtctgtgttcgtttctaagtctgggtccgggtcttggtcacggtcctagtcttgttctagggtcctggttcggcgattcttgttcaggttctaattttgggtcccaggtctaggtttgggttcgggtttggttcttcgtttgggttcttgtcctagtctaagtcccaaatctagacaccgactattggt

SEQ ID NO: 277567 - DNA, 234 bp, Cannabis indica
tcactcaaggttcgaaaaattgaagaggaaaagagaagaagaagtggcggctagggtaaatagaaagaggctcagttttcatctgacaaagttaacaaaaagttaagtgtgaatgagagccatcactatctatttataggtaaccacctaggtttaagttagaattatttggcattaaataataaaaaaaataaatgataaaagcctacaatagtggccggcctgggctttgga

SEQ ID NO: 277568 - DNA, 544 bp, Cannabis indica
ttaaagtactaaataaacattcgcttctaagtgaatggccttctgggcggactacgcgcaaaggtttcaaaaacaaagtactcaggtcgggtagaccacttcaaagtactcaagtcggctagaccacttcaaagtaatcaggtcgggtaaacaacattaaagtactaaataaacattcgcttctaagtgaatggccttctgggcggactacgcgaaaaggtttcagaaacaaagtactcaagtcatgtagaccactttaaagtacagtttcttatttgttttatgtcatgttaagctaaaagatcagattagatcactagctctgatgtaagttactacggtaactaatacattttcgatcaataaaagaataaagatagtatttccaattctattgagtcgaaaaaatcagcatgaataaaaatttaccaaaagtgcgtagaaaaggttcagtcaaacccaaaacaccgaacagataagcaatatatttgcaaaagacaagtgaacaagagtcatacgtctgctcggtcacttggggggcacc

SEQ ID NO: 277569 - DNA, 685 bp, Cannabis indica
tcaaatcaactccaaaccaaaccaaaacttccagacctgttctatataacccctagaacatttctaaagcatcaacacagcccagaaagtacagaaatgaaaatcaccattaaagctcaagctttgagttttaaactcaaacttgattaaacctaaataacatgcaatcaaaccagtccaaacctacttaaacatgcatagaatagcctctgaaaacaactacaaacttcaacgacatcacagcaacatattttaaccaattcaaactatcaagcaccacaagtagcttaattaacctctaataaacatgtttaaatctcagaaatcaacaacaaaatcacagcagcaacaacctcaattaatcatgcatgcatcacactattttcatcaaaattcaacaatttttaagaagaaaggaagaggagctaacctagcttgaattgaaccttaaagagagatgaaatcacaagcaaaatcccaagaaaatggccagcttcttgctgctccaagagggccgaaaagagaagaggaaaagagagagtgtttttgaaatttttctatttttttttctaagtgttgaaaatatgaataaaatggaatttaaggcacttaacacatttaacttcagccaaataataaccaattaaacatataattttcaattattaaaatcactagaagacaa

SEQ ID NO: 277570 - DNA, 583 bp, Cannabis indica
ctaaatactttgccatttttaagtcgttggcctggtattccccgaggatctggttcacgattagctgcaaattactatgacaaatgagatttttgaatttcaatgcctctgctatctttaagccgacgatcaaggcatcatattcagtctcgttattggatgcgtcaaattggaaccttagagcatagtgaaacttaaagagttttggtgatattaatattacccctgcacctgaaccctgttcgttggatgcgccatccacatataatttctaggtttctgcatctcgctgatcaggtggaatttcttctagagttataccttttatcaagaagtcagccaaagcttagcccttgatggatgttcgaggattgtatgttatgtcgaactgccccaattcaattgaccattttatcaatcttccagaagcatctggttttgataaaacttatatgaagggttgatcggttaacactttaatggggtgagcctggaagtatggtcgtagtttacgagacgcatggactaggcacaacgtgagtttttctagaggaggatatctggattctgcccctagtaacct

SEQ ID NO: 277571 - DNA, 728 bp, Cannabis indica
gaccatcgagaccttatctgttgttcttcatcgagtggaggaggagaagaagtataaggaggaggagctttcgaccgaggtgacgaagctgaaagagaaggttaatgctctagagacagctggtcttgatctcttctttgacttttggaaggctaatcctcaggccaactttgactacttgggtgatgctaaggacatgtacctcgagttctgcgcttcccaagtagcctatggtgaacctaaggtgcctgcttctacctccgaccaaactgctgatgtacctcccgttcaaacaacagatcctccatcttctactggcccagaagatccgaacaaagagcttgggactccagctatttaaacacttctcctttttatctttttactttttatatatcttattcggccataaggccttttctaagacatcatgaccggacaagcgatttttaaacatggaattatttttcatttttcagacaacaggctgaccgcgcagcttttaatcctggtattacatgcttttgttatcttcaatgaatttcattctctgtttataatcatcgtacaattgtgattgttttatttttaccaaattctttgtacaggtataggtgctccccaagtgaccaagcagacgaatgactcttggtcacttgtctttaacaagtatattgtttatctgttcggtactttgggtttgaccaaaccttttgtacgcactggat

SEQ ID NO: 277572 - DNA, 518 bp, Cannabis indica
attgattttgttattgatttgacacctggagcagaaccggtttcaaaggctccgtacaaaatagctccagctgaacttaaagattaaaaattcaactccaggggttgcttgacatagggttttctcggccttgtgtgtcaccttggggagctccagtattttttgttaagaagaaagatggatctttacggatgtgcattgactaccgggaattgaataagctaacaatcaagaataaatatcctttaccttggatcgaccatctttttgatcaactccaggggaagactgtcttttcaaagattcatctccgatcaggctatcaccagttgagaatctgagaggaggatatcccaaagacagctttccacactaggtatggacattacgaatttctagttatgtcttttgggctgaccaatgctcccgcagcttttatggattcaatgaatagggtattcaaggatttcctcgatatttgtgttattgtatttatcgacgacatccttgtgtactct

SEQ ID NO: 277573 - DNA, 593 bp, Cannabis indica
tctccctttgcagagaaagaatgtttggtcatctttccttctaggcaagactcgcatacaggtaattcacctaagacgacatttttcaatggaccgtctttggttaacctattgagtctgtcatagcctatgtgacctaaacgtaaatgccatagataggtttgatcatcattatcgatcttttgctttttgtggtttctaggtttagctactttaaacagttcgttatgaagcgcacatggttcgtctggtattagaacatatagcccctgttccatggatgcaacagaaatatgaatgtcatttcgagaaatgatagaaccagaaattgaaaaatccaatttgtattgttgcaattgtaagcatgaaatagaaatcaagtttctattgaaatttggaatgtataagacatcgtctagttccaaaattctgttttggaacttgagtttggcttttcctcttgctctaaccgataccatgttgccattaccaactttaagttttaactctcctgatttcaaataatttcagttttcaagctattgcaatgaacaactaacatggtttgtagatccagaatcaagaatccagat

SEQ ID NO: 277574 - DNA, 644 bp, Cannabis indica
gtaataagagagaaaaataagatgacaaagtgattttctactctctctaaaatctaatacctcttttgcattacaagtgactcctatttatagagccaaaattatcccaaaactagtattttcgtattacacttagcacaaaaagctgatggaagtggtgcattatgtgtctggcagattggtcaaaccgggagacatgcagccaggtagcacacggatagaacttctatcaagtgtagtggggatcgcgcgtcagttagctgctgaggattggcttcattgatcaatggtgagaaaatggtgatagtgggacaagcttgtacgtgggctttaggaatttagtttcataattgaagacttggcccttttgctttgcaaagcccatttaattacaaacttggttgtgcaaaaagaatgggaaatttacaaaaatactgtttttggaccaaaactttacaaatatactgggacacggcaaaaacaacatttttactgccccagcccaatttctttacttttgtactgcccaagcccaacaacataacatttatactgtgaacagtaaaacacacgggaaaacaacctgcttcgtgtgtggggagtcgccggagacggacatcaccaagaaaaaaccattaaatccg

SEQ ID NO: 277575 - DNA, 822 bp, Cannabis indica
cttggtcaaactgacctcccaagtagagctttaaacgctgtccattaactttgaaagttgttggactttcaccttttaactccaccgctccataaggaaacaccttgaccaccgtgaatggtcccgaccaccttgatttcaactttccaggaaacagtttcagccttgaattaaagagtaacacttgctgccctggttgaaactctttccgtattagaccttgatcgtgccactttttagttctctccttgtatatctttgcgttttcataggcttcgttccgaaactcatctagctcattcagctgtaacagtcttttctcccctgcagcttttagttccatgttaagagtcttcatggcccaaaaagctctatgctctaactccaccggtaaatgacaagcctttccaaacaccaaccgatatggggacatgccaatcggtgttttgaaagcagttctgtatgcccacaatgcgtcatctaattttcttgaccaatctttccttgatctttgcactgttttctctagaatcatcttaatctcccgattagaaatttcagcttggccattactttggggatggtatggtaaacagttcgatgtcggacaccatatcttgaaagaagtgcttcaaactgcttgttacagaagtgactcccttcatcgcttactattgctcgaggagtaccaaaccgagtaaaaatgttcttttgtaagaagcggagaactgtctttccatcattttgaggtgtagctgaagcttcgacccatttagacacataatcaacagccaaaagaatgtactgattgctaaaggatga

SEQ ID NO: 277576 - DNA, 517 bp, Cannabis indica
tgtcaattcatgtttcatctcttctgtttttctttgtgaaattttaaaactgttagaatcacattgataattttcttgtgtcaaacatcgtgtctttgcttttcttttcctttttttttaaaaaaataaaaaattcaaaactcttaattttttggctgatttcttgtctccaaatttttctatcaattagttttccctttttgttattaaaattaaaaaaaattaaaaaaaaaaactcaaatttgttattgttgaattctagtttccctatttctgtcacaaatctgtttccttatttttgtttctcattggtttcccaaatttgtttcataaagcttgtctacttgatttctttttttttttctttgtgtcattagcaagtaaaaaaaaattccaatttcttaaaaaaaaaggaaaccgagcaaaaaaaaaaaaagaaatctggaaacctttcttagtctccatagtctagaagcttgtttgccaaaaccccacacaagtgtttcaaaaatcatca

SEQ ID NO: 277577 - DNA, 578 bp, Cannabis indica
aaagcttggcccttgatggatgtctgaggatagtatgttatgtccaactgcccctgttcaatcgaccattttatcaatcttctagaagcatctggttttgataaaacttgtctcaagggctgatcggttaacacatttatagggtgagcctggaattatggtcgtagtttgtgagacacatggactaggcataacgcgagtttttctagagggggatattgggattctgcccctagtaaccttttacttacatagtaaataggttgctggtgcgtgccctcttcacgcactatagctgcactaatcgcgtctttcaagatggctaaatagagaaacaacgtctctccagttattggttttgccaaaactggaggcgttgtgagatgcctttttatgttctgaaaggcctcttcgtactcttttgtccactcaaactttttgttgcctcgcgatatgtcgaacaatggcacacacttatcagttgacttcgaaatgaatctgttaagtcaagccattcttcctgtcagggcttgtacttcattaggcttcgtcggtgatggcatgtttataaatgcctt

SEQ ID NO: 277578 - DNA, 393 bp, Cannabis indica
aatttctaaaacaatggaatttaaacacatataaagtttaagaaaccttacattgattgcagctaaattaaataactccttccactcagatctctaaccctggaacccttccggccgcagagtattatcaagatttgagtccaattctccttcagttgttggattcttcacagccttacacactatgattgagtactaacttgctatatgtgggcatgtacgcaatcactaagaggctcaaaattttctgaagaacactcaagggatttcgaaatagaagaaaaagaattaagaaagaggtctcaaaactctctagttgtctgacaaattgtaaactaggttatgagtcattagttggattatgagaccatctgattgttgggttttgtgccc

SEQ ID NO: 277579 - DNA, 486 bp, Cannabis indica
gttcccggggtgtcaaagttcaaattcagtcaaatggtgaaaatacgggacaaactggcaaaaaattggaaaaatctgctcgagaagcatcagtagtcgcgaccaccaatgagccaggtcgcgacccttttttgtggtcgcgacttcgacattttggcagaatcgtagatttttgaggtttgcctgtagtcgcgactaggtacggacgtcgtggttttgacctaattttgatttttctctcaattggaggcacacctctcatccctatataaggaatacgactcagaaggtcaacctaagcagaaaaagacctaaatagtggatgaaggtggagaggaagctatcttgaagaccaggagcgatatcaccttctagtttctttcttttacccttatttcttccttttatgtttagttttgtttcagatttaatcatggatgtttttattgtttttatgagctaaatttcccattaagggaggatgat

SEQ ID NO: 277580 - DNA, 753 bp, Cannabis indica
ctctctctagaaaaactgaaaaaacttcaaaaaatttccctctttctcgtcccactctctcgtccctctctctcttccctcttgaatgcttgtttctcggtgggtgttggtggaaaaccgaagcacaccccaatatcactcaagaatcttacaccattacaatgggtaagttgtgttttaagcattttgttagactttatgtagtttaaaattgttatatgtgtcgtatttgttggaactgctgttttttggtctgaaatggttgagatctggcagatctggttttcagtcaaaatctgggttttccagttgttatcgatgatatatcgataacttatcgatggtttgtcgataattgtacgaggaaaggtcagtgatgaccattgtcgacgtgttgtcgacagtatgtcgatagcatgtcgacgaaaagccatcagcatattatttataagttgtcgatattttgtcgactgtttgtcgatagcatgtcgacaaaaagcaatcaacatattacttacaagttgtcgacattttgtcgacactatgtcgacattatatcgatgcaaattaaaaaagccataaataaaacataaaataacattaaaataacataacataaaataacattaaacataacataaaataacattaaaaaaacagaaaataaagttcataaaaaaaacaaacattaaataaaactcaccacaagccataacataacaaattattttttaaattctttggcttgtgggt

SEQ ID NO: 277581 - DNA, 746 bp, Cannabis indica
tatatttttatataattatattatattattaataattttttattttattttatttaaaaaatcgtgtcgaattcgtgttaagcgagtcgtatcgtgtttgacccgtatctaattttttcgatcctaactcgtaaaattcgtatcgtatttgtatttatgtttgtgttcgtgtaccgtgtcgaaaactgttttgcgactcctagctaatacatattaaagtttggattgcaaaaatcttatcactcattaattcataaatagagttttgaataatatattatgtattaattataagacaccattattgaccaacgtacgatttgaggtttcttctcacgttggaattgtattttgaggtaattgtcaagtctagttatggaccacctaaaaacagccattcaatattactttgtttttagggttagggcaactgcatgcatggattaatgtattgtctttattatgtacgataaagatatatttgtaatggaaatgtagattactaccaaatcaaaaaacaacacgtgtatggataacgattattgcacgttaaagatatcatggatcttgtgtgtgaaatatatacaagtgcatgtagatctatatatatatatatatatatctttatatattaaaagtgcctatgtaacgacagttcttggtttaacagaatatgctttacaaataaaagaatattctgttaaatttaaccccaaaaaatacgcttattgggcttttaacaacca

SEQ ID NO: 277582 - DNA, 521 bp, Cannabis indica
actaatatcaagcaactgcccaccgagaccttgaagaattacataaagaggttccgagaggaagcctcgaaaaccaagaaggttgatgacggacaacagcttgcacttctccaagcaggcatccgtactgggactcctttctggaatgagctgcagcaagaaggagctgctagcctccaggacttccagaagagagtccaaaaatatatcaacctcgaagaagcccaaatcgtggcttatggaggctactatcccaccggaatagcagggtacatgcccggagtatcgccctcgggtactgccccgaccgcaactccacaagcaagtggcatacaattctctgctacccccggatatagccagggccaagccttggcaccagcatcatcccattttggcaacccgtccggagtgaatgggcaagctccttcacactctgctccggctgctagcctgacaggcccttcccagggttcaaggagtaaaagatcctccaaaggcagcacccggacgggagagaa

SEQ ID NO: 277583 - DNA, 637 bp, Cannabis indica
aacacaaacaacttaataaacaaaaaaaaatatgtaagataactaaaaaaataaccggttaaaaacaaatcaacatcaaataaaaaccttaaaaactggaaaagaaatcggttaaatatacaaatcacattggaaaatataaaaaccataaaaatatgtattaccaaaagaaaaatcagaataaactaaaagaatacataaacatataaaaactgattccatatattgtcaacctaacatagaaaatattaacatatcataatgtattgttcaaaaaaataaaaacactaaacaaaactacaaacattgaatctgtctagaaaacactacaaatatttaacaagaatcaaatttcttctacttcgacttctttcccttcgacctatcttcagtcaaatatccttcataaatctttttctggccatagttatacaaagtcacagcgaggtcatccctgtagtgcgtaatcatctcatccatatcaggaggaatctcattaatcttgccccggatgaacagatcagcatacttaatcacaaacacaccacagtcactgaaaaaacaaaaacaaaaataaataacaatacataaccagttattaaagcagaaaaaaataaacaaataaagaatcacagaa

SEQ ID NO: 277584 - DNA, 667 bp, Cannabis indica
cctatgccgtcggttcctatgaaggaaccgacggcatagggtatttcagaaaaaaaaaataaaaattaatttccaaccgcctctaaatggtataatgcaattttatacctacggtttttatcaaaaaaccgcctctaaatgtcaatttcgaacatagcgggtattttcacaccctttagcttccctttttataaatggggttgaaaaaactgcctctaaaggctaacattgtagtagtgcaaccagcgtaacctcccagttgacggttatgacgccgcatgattttagacgagtgtcacccatccttctgacaatgaagtcggtcaagatggctttcaaacatccttaaatcaccgaacgtgaatgcacgccgaaatcccatccgagggtggtgacaccagataatttcaaatgagtgtcagcaatacatcactcagacagtgaagtcagttcggacagctttcaaacatcctcaatcaaccaacgtaaccacccagttgatggttgtgacgccgcatgattttagacgagtgtcccccatccttctgccaatgaagtcggtcaagatgcctttcaaacatcctcaatcacccaacgtgaacgaccgccgaaatcaaatcggagggtggtgacgccgtacaatttcaaatgagtgtcagcaatacat

SEQ ID NO: 277585 - DNA, 637 bp, Cannabis indica
agacaaaataggagaaggaccccaaacatcagaatgaactaactcaaaaggaacactagcacgtttattgacacgtggactcaaactaacacgatgatgtttggcaaactgacatgactcacaatctaacgaagataaactactatattggggacacagtttcttgagcaaaggaagggatggatgacctaaacgacaatgagcctcaaaagcggaagcaacactcgaacaagcaatagaggttggcggaagtgggtcaagaacatacaagccaccagattcatgtcctttaccaataatcttcttcgtcataagatcctgaaacaaacaatgatcaggaaagaatgagatgcaacaatttagattacgagtgagttgactaacagaaagcaaattaaaggacaaatcaggtaaatgtaagactgatgacaaagatagcataggtgtaggaacaatagtgccagatccaagaacagaagctgttgacccatcagctaaggtgacaacagaagtgggactgtgagactgaaaagtggaaaagagacgggaattacctgtcatatgatctgtggcaccagaatcaatgacccattttgaggatttggaaagaaggcatgcattagagttacctgaatca

SEQ ID NO: 277586 - DNA, 703 bp, Cannabis indica
agtactgcgcggcccaagtggcttatgctggaaccgaggcggctgcttcaacctccggtcaggctactgatgctcctcccgttcaaacaacagatcctcctgctccagttggcccagaagaaccgaaccaagaacataggactccagctatttaaacacttctttttatctcctttttttatatacatatctaattcggcctcagggccttttctaagacatcacgaccggccaagcggtctttaaacttggaattatttttcattttttggacaacgggctgaccgggcagcttttaatcctggtattacgtgcttttgtcatccttaatgaatttcattctctgtttataattgtcgtgcaattgtgattgttttatttttaccaaatgctttgtacaggtataggtgcccccaagtgaccgagcagacgtatgactcttggtcacttgtcttttacaaatatattgcttatctgttcggtgttttgggtttgaccaaaccttttgtacgcattgtatggtaaattataaacatgctgattttttcgactcaattaaattttgaaatactatctttattcatttattgatcgaaaagtgtatttgttaccgtagtaacttacattagagctatttgatctaatctgatcttttagcttaacatgaaataaaacaaattgcagacataagaaactatacttt

SEQ ID NO: 277587 - DNA, 723 bp, Cannabis indica
tgttaatgtatgtttgaattgaattcatggctgttgggattgattggtgagtgaggaagctaaaagaaatttgatttcttcacttgagtgtgtgattttaagctagagattgaaccactgtgttttgcagcttaggttatgccatatttatgttaatatactgttctggaaagtttggttaggtttggaggggttttggttcgaatttggtgaagaggaacttttgttcctggtctgccagaaccggtcgaccggatgggttctggtgtatcagaaccggtcgaccggttgcctgcaggggaaaatttttcgggtttgctttatgttcagttttgacccggggagttgtgtactatctgttttaaattaaatatgggatgcttgacctaaattggggttgctgggagttaggttacgtttgatttctaaattagggttttaatccggaactttgagttaaggtatttattgtgtttcaattgtcgtgacataggaccgggattgcttagcttgttcttccactcaggtcggccatacttttgacttctgaattaaggtaagaaaagtggtaagcaccgtatgtggttaaagattaatggatgaatggaagtggccttaattattatcatgatgctgattaaaagtttattaagcctaggttatgacctagggttggaaacggttattaccgttatgagtaattactcttgaaaccgcggttag

SEQ ID NO: 277588 - DNA, 445 bp, Cannabis indica
cgattatgaaataaacacatataaagtattagaaaccttacattgggtgcagcggaataaaatgactccttccgttcagatctctaacccttgtatcctttctgtcgcagagtattatcaagatctgaacctggatctctttctctccttctttagtgctgaaactccttcttgttgaatgtctttcttcacgatcttcctcactatgattgaggtatcacttgctgtgtgtgggcactactctaatcactaagtggttcgaaatttcaaggaagaagaagagtaagaagtggcggctagggtttagaaagagaaggctcaggtttttctctgaatgaaaagtgtaattttcctgaagccttcactatctatttatagcattccactagggttaggtttgaattatttggcattaaaataatgaaaatatcagatgataaagcct

SEQ ID NO: 277589 - DNA, 631 bp, Cannabis indica
ggtaaaataatttccaacatcgcattgggagtccggttgagaagagggctcccaggccaaggcctatcgtccaggtgccgaatacaggggctcctgacgccagcacttccagctctggtaagtcccctttaacaatacattatgtccctcctgttagcgaatatgctagccttaggcttgcagggttcgatgaacgtctccttaggtttaggatgccctcgacccggtggggggatcatgcaaaggactattatttttccaacttaggagattatttaggtcggtcccagatgggttctggacctccggagcccgttcccttggacccttcgtcctatctgtcttctagttggttccggccctcggacagctatctcggggatgatgcagccagcattaagattcgaaactttgctagggccgaattagagagtcagggtaggactagcttgattgctttttaagtgtttttactgctttcacagatattctaacacttaactcttttcttttgttgcagcagctaattccatggaggcaattttggccacccttgccggagctcacactcctgatgctccccttcttccaacttcttcccagatggccactcccatgaaggcttcttcca

SEQ ID NO: 277590 - DNA, 713 bp, Cannabis indica
caaacaagattcagaattgtaaaaacccaagctagggtttcggctgggaaggctagtgatttctcagtggatgaaacgggaatgttgagatttgggaatcgagtttgtgtgcccatggatgagaacatcaagaaagagatcatggatgagtctcacacgactccttattcagttcatccagggtcaacaaagatgtatcaagacctgaaagccatgttctggtggccaggcatgaagaatgacatcgctgaatatgttgcaaagtgccttacgtgtcagcaagtgaaagctgagcaccagcgacctgcagggttactgcaaccactgaatataccagagtggaaatgggaagacattgctatggacttcgtggtaggtatgcctagaaccacgggacaatttgactctgtgtgggtcatagtggacaggtttacaaagtctgctcactttttacctgttcggacgaatttctccattgaccagtattctgagttatatgtcagagaaattgttcgtcttcatggtgtcccaaagtccattgtgtcggatagagatctgaagtttacatcgagattctgggagtctgcatcgagctatgggaactcagttaaagttcagcacaacttttcatcctcaaacggatgggcaatccgagaggacgatacatattctagaagacatgcttcgggcatgtgtgcttgactttgagggat

SEQ ID NO: 277591 - DNA, 379 bp, Cannabis indica
gaaagagagaggggtttgaatgagggggtaatgtgaaaattaataaaatgttgtcccatcttaccaatgtagggtatttagggtttaagggaaaaatttccccctaatgtaagcataaaatttcaaattttccttagataatcttctttaagccatggaccatacaacagtaccttagttccatcaatattagtctcccaaatttgatccgcatcacaatcttcatcttcatgaccctaaaacccacactattaacataacataggcaatctttcaaattttaattgtaccaactttttataccttcaacctgaatgaattttctaacaaagactctacagttaatgggaaaaccaatatggtgttggaaattatttta

SEQ ID NO: 277592 - DNA, 531 bp, Cannabis indica
ttcaagtcgaaaaatattttaccaaatgcacctaagaccatctccaatgattacaccaaatttggtgtggaatctacccaatttagtaggggtgtgcataaatcgatccaatccaatcacaaccgaccgccaaacattggatatccaattgtgattggatcggattggatgttatttttgaatatccaattggatcagatcggatgttggatggagtgtctaaaaatccaatacatccaacatccaattaaactaattagtattttcatttagtttggatgagtaattagatttcataatgttatacgtaaaatatatatgtatacataaaaattttactctttttttccttggattggatggatccagtctaatccaatacatattggacctaaaatattggatggatctgatccgatccaaaaatactagtctaaaatattgaataaattcaaattgaaccaataaatatatatgaaatacatccaatggatagaaccgatccaatccaacatccaatggatgttggat

SEQ ID NO: 277593 - DNA, 534 bp, Cannabis indica
ctttacatatgtagtttttttttttttttttgcagaaagcatattattggattgaagctgaaatcatattaaaaaatatcaaccaagatttttattacatgtcgtgtgatttttgtaataagaaacttatgttctacaacgacaacgaagaaacagattgtgaaaatccaaaatgcggaaaaagatgtcttcctacaccacggtaagcacattataactaaattaatatttgaacttcttgcatattcatactaaccgttacatattctgtataaattattagtgcaaggacatatgtacaactcgacgatggtacagagttgctagatgctgtgatgttcggtgatgttgcagaaaacatattctcatgtactgcagttcaattaagatcatattcggacgaggtaactataaaaaaataaatatgtaaaatttatacattttcgtacatagaaatacattaaaacttataactaatcattttttttttatcagaaacataagttgtttgtccaaaaaactacgaagcaatta

SEQ ID NO: 277594 - DNA, 331 bp, Cannabis indica
agatatatatgttggcttcgaaccatccgactgtgtcacatcggtataggctggagtatgaccagcagctggagtatgaccagtatgaccgagtataggctgacactgtatcacatcggcacaggctagagtatgactagcagctggagtataaccagtgtgccgagtataggctgatacttaggttggtggttccgtactatttgacgtatcacatcggtacaggctgttcgaccgagtataggctgatactgtaacacatcagtacaggctggagtatgaccagcagctggagtatgaccagttcgaccgagtataggctgttacttgt

SEQ ID NO: 277595 - DNA, 490 bp, Cannabis indica
ttctccctatagtctaggtcctaaaaaagagagtgggggttctacctttgaacagaagaaaagaactttcccatcttcgggaagttcagggcaaggaaaaaggtttcgaggaaaccagaacagaggaggacgtcagacttattcctatcctgagtgcccgcgttgcaagaagcatcaccccggaacttgtaaccggagggcctgctttcagtgtggttcagtgggacatctcaggaaggactgtcctcagttgaagaaagaggaaccaaagcctgaggtcaaacctgtgcctgcacctgctcgtgtctttgctataactcaggctgatgctgctgccagtccttcagtagttacaggtcagcttctaatcaatggttttgcttatactgttttatttgattcgggtgctactcgatcttatgtgtcatcaaggcttcttgatcagcttgatagacctagtgatattcttgagacggggtttggaaccctg

SEQ ID NO: 277596 - DNA, 977 bp, Cannabis indica
ctttttcaaccatctctgcatatgtggttgcctcagtggtaggaatcaccaaatcatgtctaatctttgcactcaaaccgccaaatatttctctttcttactgaaatcagttggcacaattcccgttgcaagcttggccaaacggttaaactttgtcgtatactcagtaaccgacatgccctcagtttgaaccaattcagtgaactctttctgctttgcactacagactgcttcattgtaatatttggagttaaacaactccttgaattcttcccaggtcatcactgtgacgtcccgagtgagggttatcaactcccatcacacgagagcgtcttcctgaaactggaaagtggcgcatgttacccgatcattgccaaccactcccataaaattgaggatacgctcgatcactgaaagccactgctcggccttcatcacatcaggacctcccagaaacactggaggtgcttgcttccgaaacctttcatacaacggctccatacggttgccaacaacaggttgttctgctggcaccgctggaactgccacggcctgaaccacttaaggaggcacggcaggaggacccagctgcctcaacctttgaatctcttcatcttgttggtggatccgatcttgcatcttcgcaaatctttgctcccagtccggaggagcctggggtggatttacagggcgaccaccctaagctctgccacggccacgcccgcgaccacgaggattttggggattcctctgaccgccttcggtctcaaccatatcaccttgagttcttgtatttcacggggcgtccatttaataggacttaggctgcaaatccataagccaggccgattagacagcgatcaaaacttaacaccgctcttaatgacttaaaggcaacacacttctttctttctttctttctttcttttttaaaataattaattaaaatctaatatgcttcctaacatgctttaaca

SEQ ID NO: 277597 - DNA, 777 bp, Cannabis indica
tattcattcggtgttgttgtggatatcgaatttggtgttgcagcaggtgttgtgttgttgttttgctggttgacacatagtggatatgtcgtgaaatctgtttccttcattttcaattccaagtaaaagtagaggcttcgatcgttgcatattttgatcggtggtattccttctttagcttggtactgtatttgtagtgttgtgctggtgttttcgcaccccaatgaagtaagcagtatttgcagtagctcttcgtacttgcattttgttggtatgaattctccactagccacatagttcacataattgtgatcttcattccattgtccattgctcttgatgagtactggtagacgttccattacctgtcattccagggtcttatttaatgttaaaacaatagtacaacaacaataaaacaatagcaaaacaacaaaaaaaaatcaacaaaaaaataaaacaacaacaataaaacaacacaaaaacaaccaaacagaaatacccattatattttttattagtttttattattatatttgtctgatacatatatgtaggaatgtttttgtattactaaccgcaaaacaacattagaacaaccctaattttttgtatgaacaattgtagtaatttgtcaactatttttttcgaatcattttgtgttacaaacgtcaaattaacaatagaacaaccctcatttatctttttgcatcataaattaaagaatatcacattttgtttttcgttttttttttcttaaacttcagatctaaatct

SEQ ID NO: 277598 - DNA, 817 bp, Cannabis indica
aaagggacagaaaacaaagtggcggatcatctctctaggttggaaactaacaatcacagcagccacttagagggagaattacaaattcaagactcattcccagatgagcaactgctagtggtagagcaaacacgggtaccatggtatgcagacattgtcaattacttagttggaggtgcctatccacctgattttaccaagcagcagctcaaaaagttccttcatgatagcaagttttatttttgggatgagccatacttgtacaagcagtgccccgatcgtattatgcggagatgtgtgccaatgggtgaagttagaagcatcttggagcattgtcattcagctccttatggtggccattttggtggacaacgcacggcggccaaggtttttcaatccgggtattattggccttctatttttaaagatgctcatgcttttgttcaacaatgtgatcgctgccagcgagttggaaatatctccgccaggaatgaaatgcctcttaattgtatcttggaggtggagttgtttgacgtgtggggtatcgactttatgggacctttcccacaatcctttgggaatctctacattctagtggcggtggattatgtgtcaaagtgggtggaggcaattgctagtcccaagaatgatgctcgagtggttatgaagttccttcataaacatgtttttacaaggtttgggactcctagagctttgataagtgatgagggaacacactttgtgaacaaagtgttggctgccctcttggcaaaatatagtgtaaaacaacaaaattgctactgcctatcacccacag

SEQ ID NO: 277599 - DNA, 538 bp, Cannabis indica
agatctggtagaataatttccaacacactcaaccatagaggcttctgcccgataatggttatgcacataacttttaagtaccttcatatttctttcaaatggatacatccatctcgctcaaaccagcccacacaaccttgcttctctcactagatgaactattaaatgtatcatgatgtcgaaaaaagatggcggaaaaactttcgaggttgcacaatattttgactacatgttcatgtaatacatctaacttatctagttctacttccttctcgcataacttattaaagaaaatgcaaacatgtatcaaacactctcgaacatttattggcaagactgatctaatggcgattggaagtagatgttgcattaatgcatggcaatcatgtgtattcatacccattagtttcaattcagcctcatttactaagtttttgatgttagacgagtaaccatcaggtactttcatatttgaaaatgatttgcaaactatttattttcctttttggacaaagtgaaacaagcaggaggcaaatat

SEQ ID NO: 277600 - DNA, 562 bp, Cannabis indica
tgaggaatgagttggtatggcgcaaggtcgaaaaatacaagaaaattaatgaagtaatcctgaaggggaagcatggccccggtcatcaagtgcgtttggctccaagctccgaagcctctataattgtgattaggcgtctccgcgtcccggggcggccggtggtaagtcacggaagttgcgggcttgatgcctgccaccaccacaatgtgctccagctggtgggcgcaagtaagggtagagtgaagctcggccgcttgccacccctgagcacggggcttgtacccttcctgggcaactggacccttcattacttcctccaaggtggccagacgtttccctcctttctgtgaagatttggaaccggatgcagacatcttggttctgaaaaagattgaaaattccagcagtcaggccccaaaccaaaccctaagtcaaaaaagggaatggaggtcccctaaccgctggaaggaggccccctccggacaattgtcaacaagaaagccttagaaggttttccttgacaaaagtcgggtgcaagaatcccacagatggtgacattacg

SEQ ID NO: 277601 - DNA, 572 bp, Cannabis indica
gggaaataggaaaaaagtaggtgggcacgtgggaaatgtggcgagaagtaggtgaggattttttaatggacccttataggcgacggtttaaaatcgtcacctatactataggcgacggttttaaaccgttgcctataagagtccattaaaaaaatcacattttattaaaaaaaactgtcgcctattttgtttattacaattttaaactatcgaaaatactaaattttttccgatgattttaaatagttacttaattttttagcgacggtcctcgagaaaaatcatttttaggaccgtcgcgaattctgatatttgtaatagtaaatgctagcgttggaggaaatataatatgttgggtgcaaatagtctttgagtagaatttatggatgcattgtttggtctctttattttttttttttttgtggtctttgtttgtttaatattgaatgtgttttctccaagaattatactattttatgtataccatgttagactataatatagtatatgaaatatagcatatatataaacgatatgtaatgcggaaaaactataaacatatcgataatata

SEQ ID NO: 277602 - DNA, 595 bp, Cannabis indica
gcttggggggctgctagggctgtgattctttgcaaaattcaagtgtttttctcaagtttagagtgattttagtgaaggtaatccttgtctagctactcttcttttagtttcttgaaattttgatgaaaagatgatgtttgcatgcttgtttgaattgttcttgctgctgtgttttgatgttgatttcagaggtttatttatgatttaaaatgttgattcaaacatgttagggttggtgattatttgattttattgagatatgaaattttggctcaaaatctatggtttccaaagagaagtgttgaaatctgttgctgttcttttgttgatgtttgttgtggttttcagaggttagattatgcatgtttaggaagatttgagctagtttggatgcatgttagttaggtttaaccaagtttgagttttgaactgaaagcttggagctttaatggtgattttcgattctgtgttttctgggctgtgtagatactttagaaatgttctttggggtatttagaacaggtctggaagttttggtgtggtttggaattgatttgagcaaagtgtgaatttttgaatgttttctgcgaggaac

SEQ ID NO: 277603 - DNA, 552 bp, Cannabis indica
attcttaaagttttggatttataatcaaggattgcgggcttgagacatcaaatagaaagttgtgaagaggtatgaaatattttcctgctcaataatgctaaatgttatctaaggttcagacctattatattttttgttttcagaaaaaacaagtttcagtaaagtgatgacatctctcttgatattgattttttttagagatttttatatcaatggaaatcttatttgatgatctaaaatttttatcaagaaactattcaccaattcggtgttcttctatgccgaaaattatcatctttatgctattgttgtaattcgttttctttatatttccagaaaaagtactttcacttaaaatataataactctgtcaattctcatccatttttaataatctatatatggttttaaagcttattcaatttcccataagttttatgaaaaaacttttttttaattcgaaagtcatactatgtctaaaagttagtttttttcaatatcatgtgattcatttctagaatcttgttcttgcaaaactgttttggtaaaatt

SEQ ID NO: 277604 - DNA, 531 bp, Cannabis indica
gacaaaagtccttaaatttaacaatctcaatagttcggggagaatttttaacagccaaaaaggttcagggggcacgatttggtacatgtcaaagttcagggggaaaaattactaattaacctattaaatatcttcatattatatttcattaaaatctatccgcttttgtgagtgggttgtctaatatactttcacctttcacttaagtatagcacatgatttacattaacttaaaggatataatggggacatcatacataaaattgggtatatctcaaagaatatagaaatgaaggtaaaagttaaaatagataaaataaagtgggtatacaatgtaattttctctttcttcatggaattatttcacaaatacacaaaaataattataaaaattacaaaatacggtttcacggaatttaaatatttttatgatttttttgattttatttatagaaaatataatctttttatgttttactcttattaatttgttgttgattttttattatctgtgtgttattttttgttgtt

SEQ ID NO: 277605 - DNA, 475 bp, Cannabis indica
atactctgcaacagaaagggtacaagggttggagatctgaacggaaggagtcatataattccgctgcacccaatgtaaggtttctaatactttatatgtgtttatttcttaatcattttagaagttcatatttagggtgttaattaacatacttgtgagtagatctaagatcctggtaaaataatttccaacacaatcttcatcagctcgtcctcacggttcctcagccttggccttgcccttacctacacataaacatagcactgtgagtcgacagactcagtaagaaaagcataaatcataaaacatacataatcccgggttatgatcagacgcccatacccctgaccataaccctaactgccgtgtcccacacgatactgagtcccgaacgttcgtacgacggtactattgacataataacagcctatactcggtacactggtcatactcaagctgctagtcatactctagc

SEQ ID NO: 277606 - DNA, 755 bp, Cannabis indica
caagactcacctgggttcatctacaaaagacatcacacaagatgagttttggacggagtatcaagcgaaaaacaagcaaatatgccgaccaggagtactcaacagattaaagaacagctatgtctaaagaaaagtcaaaactcaagaagtcaaaaagttttcttgagttagggcacaaaagttcatgaagcttagaataagcaagatgaaagacagacgcaatgtgattcagagacaagctctatggctgtaaacccacatgaagacatgataaagaagagttgcagaagtttctaaaccctagggtttcctaagcgttttttctacaacatagttgcattcaaagtgtaaacatgcaaagaaaagcataaaggaaatcagaaacttactcaaagatttgaatatctgggttcgaacaacgtcaaacaagccagcaattgtatgaaggcactacggcaactctgaagccagaaaactctcttttcgctctaaagtttacttactaacgaagggtgataaaatgggttatgtgccagtactgtgggtatttataggcaaggaggtaactgcatcaaaaggaacctcagacgcctcagcttcccgcctcaaaagcgaatatgggaaatcaaaagtaatcgagtgcaaccgtcagccgtggagagagaaaatcggatttaaaaatattaattgtcagagcattaattagccgaaaaccgaagagacgcccagtcagcttcacatcgagtctcgaacgg

SEQ ID NO: 277607 - DNA, 770 bp, Cannabis indica
atattttctatgtaaaaatttctttgtttttacgtacatatcatttattaaaatttaagtatatgtaaataataaaataaattataagtgagaaggtacttttataaatttggtaaatatatttcttaatttttaattaagaaaaaataaattaaaacttttaacaatttagtaaatatgatctatatcaaatcaacatacagttttcttttattttggaaaacaaaaataaaattatactctatatttcattgttttttttgtgtgtgataatatcattaaatttatgtctatagtaatttttattcatacttgattaaaagaataaaatataataatatagttagactacacatgttaaattataatttcttaaacatcatttaggatatataatttgtttggtcataaaaattggatgtatatcgtaaaattataattaattagttaaaaaataacaagtgaacaaaaagactaaaaacaaagtcacaaaatgacaaaaaaaacaagatgacaaaaaaatacttccaatctcttatttacagagattagaagaagtgcaaaggaaaaaagaaaagaaaagaaaaaaataaataataaaataatgttgacagtatagctcgaatgtgtcgctatatgcaaatcaacgttatagatgaggtaaattaatttttattttgtatttattttttaaacttttgtaaatatatttcacagattagaccatctttaagtgtagatgtaaaaattatactatatttataaaaagt

SEQ ID NO: 277608 - DNA, 610 bp, Cannabis indica
atatgttatggacttaatagaatttatacattgaatataatcatgaaataaatcatgtgaaccacgcaacatagaatgcgatttctgatctttataaaatagtaaatctgattatattggaatgtgttttgtttagggcacaaaacctaacaaactcccacttgcactaatataaaacaaaaagtgcatttcaaatcatctcaacactcttatatccagatcaagtgtagtatgtagtattctctccataataggatctgacaagttgtatacaatacaacctttctccaccattacatttccttaatcacacaatccttgatattgtgaaattcctctctatatgtctactcctctagggatattggattctttactttttggtaactacatttgtgttagtcaggaagtaacactagtagtaaataaattataagtactatgccaaaaatgaatagagctttccatagactgaataagtatctttcctgcaacttaacattcagtctctctggtagagttagagactccaaatagcttttaacacttctccaaaatcaccactccacccccagagtaatcaccatctgatcagtagactttctagcac

SEQ ID NO: 277609 - DNA, 699 bp, Cannabis indica
tatttttgattttatgcgagttgaagataatgaccgggtcaggtgtgctacttatatgctacgagatgatgcccgtatttggtgggagattgtatctcagggtcatgatctgaataacatgacctgggaagccttccgggccttattttatgagaagtattataatgagtctattcgggcagcaaaggcagaagagtttatacggttaactcagggtagtatgactgtgacagagtatgctactaagtttgatcgactggcaaagtttgcctcagatgaggtggctactgaagctgctaggaaagcaaagttcattcgagggctggatgaacacatcgcccgggatgtgattgttgcttctaaacaaccgggggttgcccgaacttatgctcagatagttgagttggccttagtttctgagggtgcagaagctcagatacgaaagaaaaatattgccagaagagattcatggaagcaaacagcaggtgctggttcgggtaggggtactgatcccggtgaccgcaagaaaagacctagtgaatcatcagcggcaggcccaaacaaaagattccagggtaaccaaggtttccgtcgtggtggaaacgaaaactggcggacttttcctgaatgttcgagatgtaaaaggcatcacctgggcgagtgtcaggccagggcctgtttccactgtggaatggtggg

SEQ ID NO: 277610 - DNA, 650 bp, Cannabis indica
actatgtctatttgtcaatttatcacttattaagggcgaaactgtaaagaaagagtttatagggtatatttattaattaagagactttgattagtctaattaataaatataataaatgacaatataattaataattaattatagttattaaatagttagaattgacatttatatggttgaatgtgaaaattggcagttttttgagaaaatgggaaacagaaatgataaaacaggaaagttgcaaaagtgaggcctatttccaaatgccttggccggccacatgcatgggttttattatttaattttttcattattttaatgccaagtaattcaaccctaaccctgtgtggtattctataaatagaaagtaaaggcttcaggaaactacacacaacacaattgcatctcattcttttcacagaaattttcctgagccgccactctctctctttcttcttcttctttgtttcgaaatttcctaagtgatagagtagtgcccacacacagcaagtagtacctcaatcatagtgtggaagactgtgaagaatccagattcaacaaagaaggacattcgggctcagatcttgataatactctgcaatagaaaggatacaagggttagagatctaagtggaaggagacatattatt

SEQ ID NO: 277611 - DNA, 526 bp, Cannabis indica
ggggcatgatttggtggatatcaaagtctggagagcatggtttatacataaacatcattgaaatagtaacttgaatgaaattagacaaaaatctttaaatctaacaatctcaatagttcggggggaatttttaatagccaaaaaagttcagggggcatgatttggtacatgtcaaaattcaaggggaagaattactaattagtcttatttaaatgttattttcatgttgttatcatgttgtttttgtggaaaaccgtaaagatgtaaaaaaaaaaatctttaaacgtaaaaatataattcttttgtaaaaaatcgtaccttatgtaattatctcaaattttaattgggtcaagcatgcaacactaattacctccattaatgatgcttttataagcttgtatatctcactggtttcaccaatcaattgtcaaaacaaatattatcatgagagtaaatattaagctttcacctaaaaaaaaaaacaaatatatatttatatatatatatactagtaaaaagttaggtg

SEQ ID NO: 277612 - DNA, 665 bp, Cannabis indica
aaattggtccatggagtaagtcatgcgtactggtagaaaatgagcagactttgtatagctatccacaactacccaaatggcgtcatgctgctttgtagtcttaggtaacccagtcacaaaatccatggaaatctcttcccacttccattcagggagcttcagtggttgtaataatcccgctggtctttgatgctctgctttaacttgttgacatgttaagcatttggccacaaattcaactacaacctttttcataccaggccaccaatacaatgcttttaggtcatggtacattttagtggtcctggggtgaactgaataaggtgtagtatgagcttcttccaatatccccttcttgagctcatcattatctggcacataaattcgtcccttgaaccgaattaatcccgtgtcagatatttcataatctttggtgttactattcaaaatttcttgctttagttcaatgagcttttaatctgtcatctgcctctccttaattctttctaacaaagttgattgaagtgtgacctttgcaagttgccctgtgataaactctagaccagctcgttccatgtcttctactaattcccttgatactccttgtaaagtggaaactagtccgggacctctacggctgagtgcatccgctaccacattggctt

SEQ ID NO: 277613 - DNA, 739 bp, Cannabis indica
ctcactgacctcaaaaactagccggttaatatagtgggccagcatctccttgccctttttggcctctagcagcacgggcaaaagtggagttggtgcccgcacccactcaggaacactcctgaccagttcagacccagccgttggtggtccagactctttggacttggcagatttgggggtggaagggtttgcagcagtcagctcctcggaaaggtcaatgacctctccagaaggtctcttctccaaggacccctcaccgcccttagactttttggctggaggagaggtgctagagcttccgcccattctcttcattagagcatcaagcatctgccgagacatgtctgcacagaacaaaaatagtgtggttagaaaacagccatcagaaaacacaaggcatgaaagtcaagaagctcaaaaaagaagtaaaatgcaaggtgaccgcccgcacagagaatcagaagtccatcatcacctgacatcgattttatttcagacatgacagccttcccttttccagcaaaggggggagatggccgaacaggtgaagtgggctcccttatgcgaattgcatgttcaacaagcctgggcgtggccaggagtctcttcttcctcttcaatgggatcacctgctcagcctcagtctgagcctcatcctcaggattcaaaggctcatgagtgtactgcttggccctgacacctcccttaacttagcctctcgcttcaattgaatcaactc

SEQ ID NO: 277614 - DNA, 556 bp, Cannabis indica
ggagttaccccttttctgtcatttttcctccgtccgagtgctgcctttggaggaccttttactcctcggctagactggctgtcagagtggagtgcgagggggcttgtccatttatccctgaggtatttccaaaatgggatgatgcgggggccagggcctggccttggctatatctgggagtggctataaactgtatgccgctcatcggtggagctgctgccggcacagtgcccgagggctgggctccgggcacatatcccgttatcccggtgggataatatcctccataggccactatttgggcctcttcaaggttaatgaatttttggactctcttctggaagtcctgaaggtttgcagctccttcttgttgtagtcgttccagaatggagtccatgtacggatgcctgcttggaggagggcaagctgttgttcgtcatctactcttggttttagaggcttcttcccggaacctctttataaaattctttaacgtctccataggcagcgcttgatgttagtcaaggcgctgcctccaggttgactttccttgcgg

SEQ ID NO: 277615 - DNA, 635 bp, Cannabis indica
ttgaagcagccacctcggttccaccataagccactcgggtcgcgcagtactcaaggtacatgtccttagcgttgcccaagtagtcaaagttggcctggggattagccatccaaaaatcaaaggagagctcgagaccggctgtctccaaggcattgaccttctctttcaacctgtccacctcagtcgaaagctccccctccttggcatctttctcctccttcattcgaagaagaactgctcgcagagaagtcctctcatcttgaagactgtttacctcaacagataggatctcgatggtctcctcaaaacgatcagcaacctcgagatccttagtcagcacggagatcttcttctcagcagcaaacagcttcttgttggcctctccgtactctaaccgaacagctccggcttccgccctggcttcttcagcttcctttttggccaagtccgcctctgccctcaacttgttggacagagccgcgttcttggaagcaacagacttagcccaggagtaagtgtaggaaaacttcagaccggcctgcacagagaaaaaactttagcatattgagctaagtgtggaaagttaaagggaagtatcaaaaaaaacttaccctggtgaactccttcaagactcc

SEQ ID NO: 277616 - DNA, 532 bp, Cannabis indica
agtgcaattccaagttttatggtggatgcaatgaggaattaataagttactgaatgtactttgtaaattcgagatctgcttattgaaagctctattatataggctcatggtccccatactagttgagacaaattgcttagtaagactcagttaattgattttaattaattaattataattctaaaattagactatgtctagtttatgaatttttcactaagatatggcttgattgtgaagaaatagtgttttggggtttatttgttaattaagagactttatggagtctaattaataaatattataaatgacaattttatttgatagttattttaattattaaataaatagttttggcatttatagggttgaaattgtaaaaagtggtatatatgaaaaaatggtaaaaatagttagagaaaaaatgtacaaagcccaaactaatgtagggcccactatgtggccggatattaggggtgaattttactctaattttatcatttttttatcctaataattcaaccctaaccct

SEQ ID NO: 277617 - DNA, 660 bp, Cannabis indica
tgaagaatttgtgaattgttggatagttttggatagtttgttggatatttgggatttttgctatatacattgttgaaaattgtttgtgtgagtagaattgggtttgattgtgagggaattaattcccgggaagtgaatttttaaggggaagtgctgccgaaattttaaaaaatcttgaaagttaggaaatttgggtgatatgggtccaaaaaggtcaagagtgagtgaagaagggggagcttcatcatccaacccacctaggggtcgctctaatcttgatagagtaaggtttaccaacatggatgctcaagagcggtttttgaaattgaaagatagggcattcattgaagacagagggatagacattgtaaacctgagtcaaactgcaaacattcctcctgcatttgcgtctattagagatcaaatcttaaataggcagtggactaagtttgtggatgtcactgagcgtagtaaccaaactctagctttagaatttttagccaactggcctgaaagagaggatgacaaagtaagagttaggggggttagagttcctgcttccacagctgccattcatgctctttacgagctcccaactttcactgtagagcagcaacccttgaaacagcaatttcgggaaagaagtttgaattatgtgga

SEQ ID NO: 277618 - DNA, 709 bp, Cannabis indica
aaaataccataatattttactttcgtagttaatacaactttaactctctttagaaaattggtacaactactctaagcaatagtctctactcactaacaacacaaataaatgagataattatcctcgcaccattaatattccaaaaaaaattaaatactattttaatcttgatattacattctaccctccttaaaagaaatttcgtcctcgaaatttaactttccaagcactcagggtattgtgtcttctacctaccacattacctcctcttctaccacatgaacccaatagtcatgtataaaacgtttgtcttatcggtaaaatgatatcgcatttaatatactcctttatttaaaaaaattgttcttctattaccttcccttcttgcattagaacacaacccaacccttgtttagatgcatcacaatataccgcaaattgtccctcttctgttggtaaactgaggattggtgctgagataagtctattcttcaactcttggaagctttgctcacacttgtctgaccaggaaaattttagattcttcctagttaattctgttaagggtgtggctatctttgagaacccctcaacaaaccttctataatagcctgctaaacccaaaagcttcgaacctctgaggcggtctttggtctaggtccattctttcactgcagcaaccttggcaggatctacttttattcccccg

SEQ ID NO: 277619 - DNA, 754 bp, Cannabis indica
attattattcgtctaaaatgtaaatttcttgcaagcacaaacaccacaatgtccatctcgtccataactattaaagaaattaaaaaaaatataaaatataagatatcatgataaagacatgtgtaaactaacaaaaattatacaattaataattaaaaacatcaaccaattatcctaactttaatgttaaaatatataatttaattcaactattatcttaacttttttttatacgaaggtgtcacataagtaaaatattcttcgccaatcaaagtatgcaagaaatttcaagaagaataaaaaactatatataatacttaaacaaaattatccattactaaatatatacacatacactacacactcccttaatacacccttcgtacgtacacaattaatcaatttccttattatttttcttgttaatttaataatacataaactaatcaaataatataaagtaacaaaagcatacaatgtttaaaatactaaaatcaattaaagagcattcatcatcgtaagcctaacgaccaaggtgttgtaatgaattgatattactcctatgtgtatgtatattagtagcttgaagtagagaacttaatcaaaatcaatattgcatatagcttaaatgattaggatttttggtctctttactttatttggaaaaaaggtaaattgtgaaaggagatggaataggctatagtcgaaatcttaaaaaaaattggtctaaatctaagctaattaattttaatag

SEQ ID NO: 277620 - DNA, 393 bp, Cannabis indica
tcatttggagtttgtatgtgaaagttatgcatattttactgaaagatgctgaagctgtcaaatttgcttcagtagtcgcgaccaccattttccatggtcgtgactctttttcatggtcgcgactaggaggccaggcagagagcatggactttccaattttcttatggtcacgactaggctttatgtagtcgcgaccaggggcgaaagacgggatttttgggcaattttgtaatttcaccattcaaagatatttgcattattttctataaaagggttgcgtgtattagaggcaatggaggcagaaattaaaccctagagctgaagaatgaggcaaaggaagcaattatggcgacccggagcaagatcaccaactagttcttgttgggttttgtg

SEQ ID NO: 277621 - DNA, 585 bp, Cannabis indica
ggctagatatctgaacggaaggagtcattatattctgctgcacccaatgtaaggtttcctaaactttatatgtgtttatttcatcgttttagaaagttcatatttagggtgttaataaacatacttgtgagtagatctaagatcctggtaaaataattccaacaaagacatcttcggatggtgttacaacgtctcagggagcataaattgtatgccaagtttaagaaatgtgaattttggttatctcaggcgagtttcttggggcacatggtaagtaaagatggtattttagtggatccagtgaagattgaagcggtacgagattggcgtcgacctaagtcagcaactgaagttagaagtttcttgggattggcagggtattatagaaggtttgttgagggatttgcaaagatttctacgcccttaacagagttgactcgaaagaattgccaatttgtttgggctgataagtgtgaaaatattttcgaggaactgaaataaaggtccgctcctgtgttaaccttacccgtaagtgatgaaaagtttgtgatatattgtgatgcatccaaacaagggttaggttgt

SEQ ID NO: 277622 - DNA, 1029 bp, Cannabis indica
gattgataaacaaaatgtttaaagactagatcgggcgaaatatggaagtatatgtggatgacatgctcgtcaaatccaggaaggctggggggcacatagacgaatgacctggacgaatgcttcaaagtcctcaggaagtacaacatgaaactaaatcccttaaagcggtcctttggagtgagctcgggacagtttgtgggcttcattgtcaatgcccgaggaattgaagccaatccagagaagattcaagcccttttggatatgaagtcgccaactaaaaccaaggaagtgcaaagtttgactggtcggatcgctgcactcagtagatttgtctcaaaatcaaaagacaagtgtgtcccattcttgaatatcctgtgaggaaacaagaagttcgagtggacagaggaatgtgaaaaagctttccaagagctaaaagcacaactcgcaaaacctcacgtactctcaaaacctcttgacagagaagagcttggaatatagttagctgtcacggagcacgctatgagcgccgtgctaatcagagaagagaacaacatacaacacccggtctattacatcagtaaaaggctcattgaggccgaaggttgatacccattgatagagaaactcgcttactgccttattctagcaaaaagaaagttaaggccctattttcaagctcatcctgttcgggtgtacacagaccaaccattacgccaaatattacaaaagccagacgcctctagacgattactcaagtgggcggtggagttgggtcattacgaaattactttccaaacccgaacaataatgaaaggccaggccttagcagactttgtggtagaatgcacaggcaaagaagaaagcataccaaaaagcaaccctgagccagtacaaacacctccgccaaataacagtgaagataagccgacttggaagctacacgtagacgggtcggctacagattagctatttggtgcaggaatttcccttgtcatgcctgggggacaacacttgcatgctgcagtcaag

SEQ ID NO: 277623 - DNA, 669 bp, Cannabis indica
tgatttaaactttaggtccaatttgtttaaagtatgaacatcgccattgtggcattaagtatgtatgcttaacgatccttttgatgtgcggacatcctcttagtgatgacccttttgaattttatgacgctttgatgtatgaacgttgcttttgcggtggtgtgacttattatcttaatttggtattaatattcttcatttttcattttgctgatgttttatgttattcggttgatgtaaattttgcattgatccatgtactatatcccctagtctaagtcttagtgagggtcactaaaacttagactttggaacagcttgactgagtacatcgcacttggctgaccgtaacactgttgagtaaattttatatttagttacgattgaacgcaattctgaaggcttgagtttatagatgaataggtgggttggtcgcagcccttatcacttaatttgtgagtgaatacttgggttgagtgtaattcctatcacttactttataagtgaatagttgggttgagcgtggctcatatcacttattttataagtgaaaagttgggttgagcgtagctcctattacttactttgtaagtgaatagttgggttgagcgtagctcatgtcacttattttataagtgaaaagttgggttgagcgtagctcctattact

SEQ ID NO: 277624 - DNA, 639 bp, Cannabis indica
aatcaaaatgaaaaacaataaacacaacaataataaaggaaaaagaggtgcacctttcaagtagttgacgaatttcaactttttctgagttagaattcagcatctcttggtaccattcctgcctgcggtcttcccaatagctccgaggcctagatatatctgcgatccagtcgaagctggtgtctgcatactgtgaataattttcttctagttcttcagcagcatcatttccattccagcagccatcaaaacaggtgcttaaatctgcagtttcttgtgactcaatatttctattcactgagcatgtttcactgggaagatctacagtggtattcacagcagaacattcttgtaaagctgagttctcttgctcaacaaaatgaacatcttgagtgtgtgagtcatcttccagcttattagggatagaagattgttcttgttgtgaatctttcttgcttatttcactttgaggacttctaggatcagctgtttcactctcaagtgttgtgcttcgatctgccccatagctaaatttctccctacattaaagtgagttcaaatgattaataagacccagagttgtattatccgcattaagaaataaaatttaaaaattaaacggcacagtaataaaattta

SEQ ID NO: 277625 - DNA, 518 bp, Cannabis indica
aaaggctcattgatagtcatgaaaggagaacttaagaatggaatttattatctaaaaggaaagactatcattagtgaaaatgatatggttgctagagggcctgacatggaaagtactaggctatggcaccttagattaggtcatgttagtgaaagaggcatgagtgaacttgaaaagcaaggcattctcaaaggcaaactaggagagaagctagagttctgtgatgactgtgtttatggtaaatgttgcaagctgaaattctcactagggaaacatacaacaaagggaaaattggattacatacactctgatctttggggggcttctagaacaacaactcttgggggtgcaagctatttcatgagtatagttgatgactatactaggaaggtttgggttttataactcaaaactaagaatgaggcctttaacacttttgttacatggaaaaggctcattgaaaaccaaactagcaagaaaataaaaaagcttaggacagacaatggattggagttctg

SEQ ID NO: 277626 - DNA, 492 bp, Cannabis indica
gagctgaaataagaagaaaaacaaacattgttagtaggtccagaattaataacccaaggggataataattctctaaaacacatgagtttatagcatagaaagaaatatcttgtttctttgctagaaacttagggcattggggtttccagtgtccctttttattgcaatagaagcattttccttttggcttatcacatggagtagcaacctttttctttttaactgttttcacagcttgaacaggcttcttactattcttccacttcttcttgttcttgggtttgtaagttgaggcaaagtttggctcagccttagccaccctattagcattcccagaattaggagctttatatcctcctttatgtggtcctccaatcaaattttcaaatgtctgaaggttttttactaactcgtgaaagtcaagttctgttaggttataattagcctatgtctcgggtcttcaaagttagcattatctcgtctattggtgtc

SEQ ID NO: 277627 - DNA, 910 bp, Cannabis indica
aaaggaatgggggtcccctaaccgctggaaagaggccccctccggacggttgtcaacaagaaagccctagaaggatttcttggacaaaagtcgggtgcaaaaatctcacagatagtgacattgcgcataaaagaaaaaggaagaggaggggcagaaaatcgagaaagacaaagtcttctctgtacccttgaaggccatcacgcaaagaataagtgagcctttacaaaaataataataatgtgtaacaagagtgaccctaacaccagagaagggaaatctagacgtattacgtaaaaactcaaggtgaaacattcccagaaacttcaaacactaaacccagaaaaacaaataaacagtaaagcatgccatgaacaccaaacagtaaagtgagggatgcgagaaacttacatgaagtgttggaactgggggttgctgttgatcaacaaagaaatgtagactgacagtaacgaacaaaggttagcaaagaaatctgtaaagtgtttgaaggttttctggtctgaggatttctttctctctggaaaactcgaagaaagttggcgaaagaaggaaagtaaccaaatgaaggaaaggtggtggcttttataggccaaagtgcatgtggaacaggcacaatcacctaccaatcgaacggctggggaggcgcacgattcgaattcccaagaatcaacggttagattgattcgtaattaaggcggtggaaacgtttgagtatccgtctgacacacattaatgcgccgtatcaatcaatgggcatgaaacgaatcaacgcctgcaaaaagtgaatcgctgcattaatggtgatcattaaatgcaccttcacgcgcccaaagcacgtgccaggaaaccgaggagtcaaccggaggcacttgaacaagccttgattcatttt

SEQ ID NO: 277628 - DNA, 546 bp, Cannabis indica
tatgtcatatagtgaatttcataattttgcattttcggtgcccggtaacatggaactcggtgtttggctcagtaaaatcataacttagtatgttagtattatgggacggttattttagacattgggaatgtcgggagtggtcgggaatttagaatttcccaaaataccctttagtgccctttatgttattttagtgtggaggggcaaaatggtcattttgccccaatgatattttgtcctttagtggactttatgtggtgaaaatgcatgattttaattgatatttgttggctgaataaagagttggaattatacattttatcccttattttcaaattggaaaattagaaaagaaaaacaaaaccattttcctctctagctctctctctcttttggccctctttgagcagcaagaagctggccattttcttgggaattcaagctaattttaaatcaacttaagtgtagttcaagttgtgtgtaagatccttgaacttgtcttgatattttcttgagttttttgaagaaaatggttaggttgcatgc

SEQ ID NO: 277629 - DNA, 1226 bp, Cannabis indica
aaaaaaatacaagactataaggataatgctaagtctagcaactcaatacaacctggaaatagaccaaatggatgttactactgctttcctacatggtgaactagaggaggagatctatatgaggcaacctaaaggctatattgaaaaagggaaggaaaactatgtctgcaagctagttaagtcactgtatgggttaaaacagtcacctaggcaatggaataaaaggtttgatggatttatgctaaaactagggttttctaggagttactatgatcactgtttgtactacaaaggtactgatattaataaagtcatatatctacttctgtatgtagatgatatgcttataatcagtaaggaaagggcaagagtaaacacaatgaagggcctactcaagactgagtttgaaatgaaagacctaggggaagctactaagattttgggaatctctattaagagaaacagagcagaagggacacttatcctaaatcaggaagactacatacacaagataattgagaaattctcaatgaagggatctaaaattgctagccaacctataactacacagtttacactatctaagaagcaatgccctgagagcaaagctgagaaggaggaaatgagtaaaattccctatgctaatgctattggatctgttatgtacctaatggtaagcactagacctgaccttgcttatgctattagtgtacttagcagattcatgacaaatcctggtaagacacactggcttgctatgaaatggttactaaggtacctaattgggacaactaaactaggactcaagtacaaaaagcaacaaggaagcacagcaatagaatgcttcagtgatgcagactatgctggagatagagacagtaggaaatctacatcagcctacatactactactagggggaattgtgtaagttggaaagtccaattacaacctgttgtggcattatccacaactgaatcagagtacattgcaactacagaggctattaaagaaagcatatgggttaaaggagtcctagaagagctaagattactagacacaaaaccagtaatttactctgatagccagagttgtgtacacctatgcagaaaccctatgttccatgacagaaccaagcacatagaaataaagtatcacttcatcagagacaaagtgacacagggacacataaacattgacaaagtacctacagaagagaaccctgcaga

SEQ ID NO: 277630 - DNA, 633 bp, Cannabis indica
actattacatatataaaataataaaaaattattccattttttatttagaaataattgaaaaataagaaaagaataatttataatattttacttatttagtaaaaatattaacaactacttaattaatatatgaatttctaaattaataaaataattataaattaaattttatttttttaatgattataacaatcagatgagacacaatatttttataacaatctcacgtgtgctcaaccaactttatacgatacttatcattttagttactacacaacagtaagacaaataaattatgaaaataattagtcatatgaattatgattcccttttcatcgttataatttaaggtagaaatttcaaatctatataatttattaaaattaatctccttattaaatatttcatatagaaaaattctttttaatatttttttttatataaaaccctcacttttttagttttggaaaatatataatattgtgatagtttattttacagttgtcatcctacattcaattttatgagaaatgcatttcgctgacaccacaaaacaaaatatcaaaactttcataaataaagaaaaagtcctaaacaatcttttaaaaacaactacatcatcaattacaagtc

SEQ ID NO: 277631 - DNA, 1001 bp, Cannabis indica
tttttgaagttttgagaaatgttgatcggttgcatgcttagctttgagatgttgttgctgctgtagttctaggttgttttcaagtgattgtatatgcttgaattaagtggatttgagtaggtttgaagcatgctagatggtttaaccaagtttggatctttttagctcaaaaattataatttctatgaaaagttgagaaattggttgctgtgattgttgcatgagtttgagaatgttttctacagtttctatatgcatgtttacgtagtttaaatcaagtttaaatgcgtgtaggtgagctttagccaagtttgagttttgaactcaaaccttggagctcacatggcatttttggtatctgtggtttctggatggttttgtcgctttaaacttgttctttagggtatatagaacaggtctgaaaagtttgatatgctttgggtttgatttgagcaagttatgaatttttgaatgttccctgcgaggaaccggaattccggttgtgcatccggaattccggatggggttcaggaattcccagaaccggaatttcggttgtgcaaccggcctaccggttaggaaatttttagaaaccctagattttcttgtttttatgttatttggggtattgccatgctttttatcgatagggaaacttttagtttctaatttaagtccccgtgaagtgatttagcgtatcactcattagtgttgtggttgttatggtttaggagcctgtaaaccgccgtccagttcgttccagtcaggttgaccggcacacctgaattcgaaattgaggtaagattagtataacagtatgcatatgtatcacatgtttagcgtccatgttaggaagcctgttagattacattagatatgtatgttggcttcgtaccattcgaccatatcacatcggttaggctagagtatgactagcaactggagtaggaccagtataccgagtataggctgattctagggttggtggtactgtgctattt

SEQ ID NO: 277632 - DNA, 771 bp, Cannabis indica
caatctcttcttgaagaatcttgtcaaaaaatttagcctcggacttcccggcaatcgcctggcttcttcttaccaccggactccccacacgaagtcccctcccggaggccgcctgggcctgagagtatgccttctcctgggccttccggtagagatagtcctggtatttcttctctgccgtggcgataatctcgtcccggaaggtcttctccgcgaccggcgcccttacattgggacagatgacccgggagaggttagagtcctccacggattgatgcggaaggataagtttggccttcctgcagttttccgtagtgaccaaacccccgacgtcaagatcggctcggtcataggaggcaaaggcctgggccctccggaggaaggtctgtgtaggggccgtccgctgatagggagggatcctcacccactcggtaaggagctccgggtggtccattgccctgaacccggaggaaaagaaaaagcgatggcgatactccttgacgtgagtctgcctattatacggaaccaccccttcgttagcaggatggatccggaacccataaaaaccgtccttaagtttgtcccccttcttggggacggatacaagttcataaaaatacaaaatttccgccgggcggggagatccccatccgcgggcggcataaaaaataaataagcctgagagcaggcgataagcttggggaatgagttggtatggcgcaaggccgacaaaaacaagaaaattaacaaagtagtcctgaagaggaagca

SEQ ID NO: 277633 - DNA, 311 bp, Cannabis indica
attttaattagtaatcccgattaggggattagggtttcttaaacattttgggtagcgtgcctaattatttagggcgttacaaatagtgacaccatggggttggtcattgtcatgttggatactacaaataaaaataaatagaaatcaaataaggtttaatacaaaatcatatttagaaattattagcactttgcaagtaggaatgacaagcgaaaatactaaaacatacaatcctaaataatttccaaggtcttcaacaaacagataccagcgtctcgtttaagcgagagtcaaagataccatccattgaa

SEQ ID NO: 277634 - DNA, 1144 bp, Cannabis indica
tgtttatctctctgtattttcttgtttctcactcactaacactttttctttctttgcatgaacatggaacactgagatttggagctgaagcttccagatctggaaatctagggttcgagtttctggtatctctcaactgagagatctggtatggatctagtaccctttatatacttgtagatttagggttgatcatagatctggaagttagttacagcttcggttgtaactaacaaccagatcttgatccactagaggcgaagccacctaggatctgtttttgtctttgtattctgttgtgatttatttgtattttctcttcatctgtaaaactgtaataataaaggttacagtgaggtctaattttaacaatttccaccttagatctcatctgtaatctttattatcatagttcttcgtcctcaagggtcttagctcatagtggtagtggtcatccaccactaccaacccctaacaagtccaagcagtgcttgaacttggttaagggtagcaccttagtaccgatatcagaaggattctcttcagtgggaactttctctatctgtacaaccttctgtgtcactttatctcgtataaagtgatactttatttccacatgtttggttctgtcatgaaagacaggattcttacacaagtggatacaactctggctgtctgaatagattgtaggttcttcatctaggagtttaagttcatctagtagtcctttaagccaaatggcttctttaatagcctctgtaacagctacatactcagattctgttgtagataatgctacaacaggctgcagttgtactttccagctgatacaatttccccatagtgtaaagaaataggcagaggtagattttctactatctctgtcacctgcatagtctgcatcactgtacccagtgatcattctgttgttgtcccttcttttgtagtttaatcccacttctgtagatcccagtaagtatcttagtaaccatttcatagcctcccagtgttgtttacctgggttagccatgtacttacttagtacactaatggcataggctaaatcaggtctggtgctgaccattaggtacatcactgatcccactgcactagaataaggcacttcactcatagattctttctc

SEQ ID NO: 277635 - DNA, 491 bp, Cannabis indica
acttcatcgctgattatcacatcagtgtaaatctagtgcactgatgaatcagggactttgtcttttgaagcatataatcacaatcacattccactgtgttgacatcactgtaattgcaaatgactatatgttctggacttaacagattttgtatatattaaaccataaacatgaaaactatcatcaattcaagggaaaggatacttattcttaatggtaagcttgttcaactcccggtaatcaatacacatttgcagagacccgtctttctgttggaaatattttaccaggatttagatttactaccaagtatgtttgattaacacccaatatgaattctaaaacaatgaaattagaaatttagagagaagaaaagagagagagaggcgtgtagcttttctgaaagaaaccaatgttcaaagttgtgagtttcctgaagccaacattttctatttatagaatgccctctaggtttaggttagaattgtatg

SEQ ID NO: 277636 - DNA, 615 bp, Cannabis indica
actgacattctgagtaagcgctgcggcacatgcatggggacaaggaattttcaacaattggaacatgccgcaagtgcatgttctctcaactaagttcacatctccgcctttttcaaagtcagaaccgtcagcacctcttccaacattaaacaattgtgcaccgttacgtaggacacttctacgtctaccatcctcgtgttgctttatcaaatcttcctcaaaatgagttgccaaaggggtaacacacttacttgccttctcaagacggttagcaaaccaattttgtagtgtgaaccttatgaactcaactagagtagttattggatatgcccggaattcttcagtcacgttgttaaggctttctgcagcgttgtttgtcatgatgttgtacctgtctcctagacaataaggacgagcccatttttctaatcctatattgtcaacataagcagcgatgggaggatccatctgtcggagcacctgcaaatgtctatcacattccctcttcgaccatgcgtaagcggccaaccatatttgcgtgttacatacatcagtcttgaacttgtgggtgacattcatagaaatatgtttgtagcatgcacagtggcatgcttc

SEQ ID NO: 277637 - DNA, 438 bp, Cannabis indica
aatttatacattatgtacatttaatcatgaaataaatcatgtgaaccatgcaacatgaaatgttatttctgatctatattaataagtaaatctgatattgaaatgagttttatttagggcataaaacccaacaacaccatcactatagatgtttaggggtcccgtgatataaagtatgtaatcaagttaggtgtagtgtatcggagtcattagcttcgtaaataaatctctaaccgataaaaaaatagggttctacttagtggtgccgatgtacactcgtagtagtgaaactatcactttagatgtttaggggtcctttgacacaaagtatgtaatcaaattaggtgtagggtattggagtcaccagttttgtaacgaaatcactaatcgataccgaaatagggttctacttattggtgccgatgtacactcgcagta

SEQ ID NO: 277638 - DNA, 618 bp, Cannabis indica
tttttttttctcttttttgtttttcgcccaacaggtgccacttggcgcagcttgattggaaggaagctgacggatagctcacgtggcgcgagctggttggaggttggttgcacgcgtggcggaaggagagggctggcagctgctcgtgggccccgcgtggaagaaaagcagcaggaggagattgctctcactctctcttgtctggggtgcatctcactcgccacctgggtcgttagatctgtaggcggacggctcagattgggtcaaagagctgaccgagagtgggcttcttcttgggctgatttgattttgcttttaaaattgcattttgaccccaatttcttcacatcttcttcaaattaatccatactttatccaccaaatacacctaaagattcataaaattaattagaaaactaaaataaaattaaaaataaataccacataacatattataataaaataattataaaaacacacaaaaacatataaaattacaataaagctaataaattcaaaaataattaaaaacttactaaattaattaaaaacttaagaactaaaccaattttagtttaaaaaaaatagtgaaaataactctaatttctagagttatca

SEQ ID NO: 277639 - DNA, 1125 bp, Cannabis indica
aactagagaagccgaattgctcgatgtaattccggtagatgtattggctcacccaactataaatcaagaagtgatcatggaaatagataccgttcaggagatcacctggatgactcctatcgtcgcatatctggaaaagggtctcttgcccgatgacaaaatagaagcaagaaagctgcgacagcgagccgcccgttatgtaatatatgaccaaaggttgtatcgcagaagttttagtcaacctctactcaaatgcatcagcggggaagattgtggttatatacttcgcgaggtacacggggggatttgtggcaatcataccggaggtaactcccttgcattaaaaatcatgcgacaagggtattactggccaaccttgcgacaagatgctctcgcatttgcgaagaagtgtgacaggtgccagcgaatagccacatatacccaccaacctccgagtaacctccattctatcacaagtccatggccctttgcagtatgggggattgacttaataggcgagctacctaaagggaaaggtggagtcaaatatgcggtagtcgcagtagattacttcacgaaatgggccgaagccaaagcactcgcaaccatcacagcaacaaaattgcgcgagtttgtctatacctccataatttgtcgctttggtattccatacaaactcatttcagacaatggaaaacagttcgattgtaaagagatgcgacaactatgcgacgatctaggaatcaaaaaggcattctccgcagttgcttacccgcaaagcaacggacagactgaagctgttaacaaaataataaaacacaccattaaagggagactagaagaacgcaaagggacttggccagacgagttaccgcaagtcctgtggtcttataatacaacacctcgatccacgactggtgaaacacccttctcgctttcctatgggtgcgaggccatggtgccagttgaaattggggcaggttccctacgcagagatgttttcaacatctcgcagaacgaagagaagcagttactctaccttgatcttctggaagaaaaacgcgatcaagcgcacttaaaaaatgcggcttaccagcagcgaactgcaagatactttaattctaa

SEQ ID NO: 277640 - DNA, 591 bp, Cannabis indica
aagctctctttgatcatgacctgatgtgccaactcttggtttcgcaggctgtttaaactagatggacgccaggcagaataccaggagccagggcaactcagtagggtcaaatcagggtcagggagctcacgtttcccccgcgcgctaagggccgtggtagaggtcccaggggcagggctcgtggtcggggtgatgataacccgccacaggctgcccaggctgcccaagccgatcaggaagcccagaattgggagactaggtttgctgaaatgcaagccaggatagaggaacaagatcttgagatacagagattgaggcagcagggggctcctgcagtgcctgtgccagaagttccagtggcacccgcccctgctgctcaggccgagatagtggtagcggcaaacagaatggaacccttgtatgaaaggttccggaagcaagcacctccagtttttctgggaggtccagatatcatgaaagccgagcagtggctaacggtgataaccaagatactgaactttatgggtgtcaccggaaatgacagagtggtgtgtgccaccttccagttccaagaagacgctctagtctggt

SEQ ID NO: 277641 - DNA, 502 bp, Cannabis indica
tactcactaaacaatagctatgtaaaaccaacaatggagatcgaatttctcttgattaaagctcattatttaaaatatgtattttatttaatcatttatattccatatctcaataatgaaacattacaaattaaagtttaaaaaaaactttaattaaatttcaaaatggaataaatttgaaaaatatcttatttaagttgtttagagaaatctaaaatatccaacttaaatattcttcaatcaatgacttaattaaatattaacaattaagtggtaaccacttaatttagaagatattccattttaagttttccatatttataaaatatcaacttaaaaaatatccaaagaatcttaataaccaattcctaaaattcctcaacttaattttataataggaaattcaaaagatattcaaatctaagttgatttgttagatataacaaaatctcaacttaaataggaatatttaatgaaattatgaaattaagcttcagaaaga

SEQ ID NO: 277642 - DNA, 795 bp, Cannabis indica
ttgtactttcacggaatgtatttcgtgatgtacgacagtcgttagatgaggaagttatttgatctgagggctgagattgatctaggggtaattaaggttaagaaatagtaacgtaccattacactcatctaatgtaccctgagactcatctgacaaagtcgtgtcccataatttatgtatatctactaaatatatataggacacgaatgtagtcatgcatgcgtgactgatcctgtattttttttttaagtggtgagagattgaactaaatatattattttttgtgcccaacttaatagtcattcttctttaagatgaattaattatcttttcatagaaaaagtaaaaataagaaacaaagagaggataaagttaaaagaagcatttcttgatcaaaaaaaaaagttaaagaggctattttttttttttagtattttcaattattaatctattcgtatttgtacttaatcttccaagcttaaattttggtggtaaaataaaaccctctaaatgactgaattgttagtaaatttaaggtgtcatctattttttacagttaactgccaacatagactacttatgtgtacactcttgtacacatagcatatttatattagtacacctaatattattatttaaaaattatttctattttttatttaattttatttaatttttaaataaattttagaattaaaaatattaggtgtaccgatataaacatacgcatgtacaagagtgtacacataaacaatccatggtggcagttaactgaattatttttctctgaatttt

SEQ ID NO: 277643 - DNA, 490 bp, Cannabis indica
aaaaaaattatattgtgtaaaaaattaattaatatttatttttaatttttatagaaagtaaatacatcgttctaaattttgccctaaatctctcataaccttaagacgaccctatactttaatatctatttgttgcccctgatttttccgaatatacgtggaccaaccagacagggacacgtggacacgaaggtcttaactctcaaattattagctaagtctttataaagaaaggcgtcatctgggatctgcctcccggagaaggcatacgaagtcctctatgctcctggaggcctaagcggtatcaaagcatctctgggagatgtcaggcatcctctgagcagtcatctcgcatttaatgccgcatgggaggaaacgtgttggaactgccacacgcaataaagtctgacgacacaacccccgatctgcacctacaaggctatgatcacttaagtctaatgacagctacactgtgaagaatcacatcagt

SEQ ID NO: 277644 - DNA, 690 bp, Cannabis indica
agtattctaaaaaaaaaaaaacgggtcgggcctaacccggcccgattatctcgggccgggcttgacccgctaggccaaaagaaggagtcgggccgggccgggccgggccaaagtgatgtcgggctgggccgggtttgtggcggctgggcccggcccggcccgactgacattcctaggcagcctcccagcgccgaggtttctcggctgtcccccttcaatacgcgcgcggacagcatgctttgcatgctgtccgtaccacctgccatttttcttcgttttcttcgatttttcatgctatttcatggaattaacttccgattttttgtgtagttttgtattttgatttttgttttttcaatttttcaaatctaattatcaaaaataaattaattttattttaaaattaattttagatattagtgtaatttgaatttgaaaataggataaaatcaagtattgcttacctcttttcttatttctcttaaattttgattattttatcttatttttgaataaaaggtcagaaattaattttttttaataagttttttttttggtaaattgaccttatttagaataagattactataatcatggtattttaaaagaggaaataagatatattttttaaaattttgttattttacttaaattagattgtaaaatgagaaaagggtatgtatttaccat

SEQ ID NO: 277645 - DNA, 595 bp, Cannabis indica
ctaattcactctccaacaacaccaaaaacaagcaaataaaaaagctgcattcaacaatgaatttcagcccctaagctcatccatttcaactcaattcacaaccaaaacttaaatccatcaaatatattttccaataattaaatcaggagcttaaaacacaattcatgcattaaaaatccaatggtaaaaacccccaaaattcatattaaacaacataaaattcaaagctccaacttgagcaaaatcaccaagaacttcaagctcaagaacttgaacttcaacaattaatttcaaagttcaataacagaaaaaaacacaataaaattccttttaaattctgtctaaacctaacccaacataaattcaaaagatccaagtacaaacatgctcatatcaacaagaaaacatcaacatgcatctcaagaccatcccaacctatttcatgcttttcaaccataaaatcccagcagcaaattcattaaatttcagcaatagaaaaactacctcaagcttgaatgcaatgatcaagccacaactcctcaaacaattcttcaatttcaagcttgaacaccaagcaaatcaccaatttttcaac

SEQ ID NO: 277646 - DNA, 495 bp, Cannabis indica
tacttaaaatattattgatatttttaattttatttttaaatttattggtttaactttaaattaaaataaaataaaaaattatgtaaatattttatataaaaaaatttaaatttaaaatattataaatatttttaaccatattttcaactttattattatttattttatattttaaattgaattcacacaccatattttcataaagtttggaaataaaaaaaaattaaaatttttaaaaaatacatatgtatgatcacatttaaatgacacgccaatatagtaattattaatttctttatcacttataaaatatgcaatagtaatattcaattttatagataaatatattacatataattataagtgtataattatagatctaaagaatacatttgttgattcaaagagaagaagctaaatagcggaagcgtaccttaatccatagatagtgatgatcttaatctattttgtagagataatctttgtggtgatttt

SEQ ID NO: 277647 - DNA, 792 bp, Cannabis indica
tcacatatgacaaatcattgttcaagacctttgaagagtcaaagggtaaccatgagatccaaatgggcaatgaggtcaaatcaaaggtactaggcaaaggtaccattgatgtgtttttcacctccggtaagaaagtcacattggtgaatgtgctttatgtgcccgacatgaatagaaacttgattagtggtgacttacttggaaagcccggcattaaggccgtttatgaatccggtaagctcatacttaccaagtctaatgtatttttgggcaaggggtactcttgtgagggaatggtgaaattgtgcaccaatgatgtaacttttaatgttagcaataataaagcttctagttccacttatatgattgagcatgattctttatttttgtggcatcttagattagctcatattggtttttctactatgaaaagagttaaaaaatgtggcatgattgattgtgatataaggaattatggtaaatgtgaaacttgtgtaaaagcaaagatgattaaaaaaccttttccaaatgttgtgagaaattcaaaattgttagatttaattcatagtgatttatgtgaattaaatggtattctaactagaggtggtaaaaggtattttattacttttattgatgattatagtagatatacttatgtatatttgttaaagcaaaaggatgaggcctttggtgcttttaagattttcaaagcggaggttgaaaatcaacttaacatgaaaataaaagtgttgagaagtgatagaggaggtgaatacttctctaatgaattta

SEQ ID NO: 277648 - DNA, 348 bp, Cannabis indica
aaaataatttccaacagtctcctactcgcaggattcttgctttgaccttggaattgaaatatcttccgttcgttgctggtaagtcgcgtttttcaggtgagcctgatcgcgcttttcttccagaaggtcgaggtagagtgactatttttcttcgttttgtgaaatgttgaaaacgtctcttcgtaaggaacctgccccaatcttgactggtaccatggcctcacatccataggagagtgagaaaggagtctcgccagtcgtggatcgagaagtcgtgttgtatgaccatagaacttgcggaagctcgtctggccatacccccttacgctcttcgagttttcctttgat

SEQ ID NO: 277649 - DNA, 517 bp, Cannabis indica
tttgaaaagttcacttattttcgaaaaatccgtgtgcttggtgatattacattcttgactaatttcaattttatacttgaaagaacatggaatcatattaggtaatttgctagtaattgaattattttatgtatgctgattgtggaatgtggaaagttgtttgaaataaattctagaacttgcttgcttgctatttgaggcgaaataataaattatgcatgactaggaaagtgatttaggcattttttttggatcgattgtgcctttcaagccatccatgtaattttatcctagttacccttttttgagcctcaacctattctttgttctacacatattgagcctaaaaagataaacccatgaatatccaaaacttaaccctaaccataccataagtagatctttagtttgggggaattcagatgggaagtttgttgtatgtgtgtgaaaaaaaatgtgaaaaaaaaatgattggcaacaacttgaaaaaaaagaaaaaaaaaacaaagaaagaaaa

SEQ ID NO: 277650 - DNA, 575 bp, Cannabis indica
tattcaagataagacttacttgagttgtctgatccatttcagcaccatgattctgggcttcctagaaataacttgccatttggagaaggtgatcacgcacattctgatggggttccatccgtgcattgatgaatttcttcgtcgcgtcaaagcgagactggatagatgccattccgaatagctcagttaattgcgtcattattcctgcagccgtgacagtgttggcaaaccttgttttcaaggtgtcaaccatgctggaaagcatgaagtatcaagcattgttgttagcattctaccaatactcgaacttctctttcacagctttagttgcattgtcacccggctattcaagagacgactcagttaacacaaacagggcactttcacctatgagagcaatattaatgttctctttccatttagggaagttagatccacttagcttatttccagtcaacagtgataacatgggatttgacatggcaatacaggatactacaaaataataaatagaaatcaataacggtttaacacaaaatcttttcagaaattattagcacatagcaagtaggaat

SEQ ID NO: 277651 - DNA, 653 bp, Cannabis indica
atgttgctaattcaattttaattaggttaaactagtataattagcctaatacaattatttaaataaggtaaatgggccttcacaattggagttgttcatgtgagggagggttgagttcagtatgtcgtacccactactaatagccacctaactctcacacaaggcccaaaggagaggaatttaaaccacttactaacaagattaacttcttaaaggtctatgaaacttggtgaattgtaagtgaccaagagaccgtaagtctgcgtgtgcacttggggggcacccacaccgtacaatgcctcgaactagcatagagaacttaacttatggagagaaattttaacgcttagaataacctactaaacctgcttctaagtcaggtgcatgcatactttggcttgacataaagaagagtaaatctggatacttacatgtcaaagccataagaagatagccaggattaaagaccacctaatcggtcacacaatccatgataaaaagcaagagggccaagcaatagtaatgttcaaaaatagagggcatataggccaaaagtacgaacatgaaggccttgaggctaaaaataagtagtgttcaaaaagtaaaaggccacaagccatacagaacatgaaaatactgtctatactataaaa

SEQ ID NO: 277652 - DNA, 829 bp, Cannabis indica
tggtagaaagtgagctgattttgggaatctatccactatgacccataccgaatcatacattcctgtggttttaggcaacctcgttacaaaatccattgcaatgtcctcccacttccactcaggaaggaccaaaggttgcaataaccctgccggcctttgatgttcagccttgatttgctagcaggttaagcatttggacacgtagtccaccacatctcttttcatcccataccaccagaagtagggcttcaaatcctgatacattttggtggttcccggatgcagtgaataaggtgtggtgtgagcttcataatgtatctctttcttaagctcgtcaacattaggaacacaaactcgagtcttgtacaacaacattccactgtttgagactgaaaagtctttaggccgaccagccataacctcatcttgaaccttaattagctcgagatcttctaattgtgcctttctgactctttctaatagatcggattgaagtgtaaagttatgcaactttccaactgcgaactcaatccctgctctaaccatttcagaggctagttgaggggctatcagaaccgtggtgcaaacctgcccgggaccctttctactcaaagcatcggccacaacattggccttcccggggtgatacagaatctcacaatcataatctttacccaattccagccacctcctctgcctcatgttcaaatccttttgggtgaaaaagtacttgagactcttgtggtcagtataaatctcacatttttcaccgtaaagataatgctgccatatctatagagcaaaaaccacaacagcaagctctaggtca

SEQ ID NO: 277653 - DNA, 739 bp, Cannabis indica
cgtgcatgtgcttggttgttagtgtggtaatgtactctaaattgttttgagtttttcgttttagttttttatgaatatatgattcggtatttctatttaaagtggaatgcactgtaatttaggggttttgatttaggtattttgatttcggtatttgtgaaatgtgttagttgacttgtttggattttgaatatttggggattggataaatggagattttttgagcaatatgacaaaactcatttcaatttaaaaatctgaacccaataaaacaaaaatagttgtattgttattattattatggccttatgtataggtattagagaaaaagatgttatctttttcagttatgtgtacggtgaagactaaagatataaatgtatcatatgtttttgagcaacacccgaaaaatataattcacaagttctataatattaggttggatattgttttagtgatcttatcattatgtaactgattttgctttctttcttgtttttgggataaaatatgaaaacatcaagtatttgtaagtatggtaccaattttagaggcactaaacttattggtactgagcataatgtcatacaatttaaatatcctaatagaaataggagatattatcaaaccaaacaagttgtgtattgaattaaaaacttaacacagataaattaggagtactattaaaaattcggataagaataatttaaaaaaatatatgtttaaaattttgtaaaga

SEQ ID NO: 277654 - DNA, 839 bp, Cannabis indica
tggttactgcaaccactatcaagataccaagtatctttttcttcttctgatgcagcttggcagacatagaagagattattttcatcatttttctcttcggaaaaattagcttgatgggatttctttaaacgacaagttttttcagtgtggccaaattttttacaattttggcactgtggttttcctttaaaccagcagtctttctccaagtgactttttcttttacaaatgccacatggaggatacttgtcgttattttctttttgtttttcttgtgtctttttcccatcagcttttggtttttgagaccgcgaatttatgactgaaaggcattttcagcttcactttccttatgcctttctcgtctactttcatatgcttcaagagagcccattagttcagttggtgatagagtttctaaatctttagtttcctctatcacagaaactattgaatcatatttttctgtacaagaaattagtatcttttgtactatattcttgtcagaaattatttctccataggctcccatttgatttactatttctttaattctagaatagtaatcttttgcagtctcattatctttcattctaagattctcaaaatctcttctaagcttttgtagtctaactgtgcgtaccttgactgttccttggaactcctcctgcagcgtgtcccatgcttcttttgccgttgctgcgctcataattcgtggaaaaagattgtctgccatagcttgttgcaagcagtataatgcatgagaatccttttgttgattatcctcgagtgccttcttttgatcttccgaaagagatgtaatatcttccggaatagtg

SEQ ID NO: 277655 - DNA, 662 bp, Cannabis indica
cccaaggtgtacagttgtgcctacatttacaacaaactaatctcctcctagtgtgttcacactagagaagaactcgttggacttgaatccattaagcgaaatggtttgatcagtagctcttcaaaatcatctagttgtaagtctgaggtatcactatcacaaaatgttgtttgctcgcttgatggatcattgctttctccagcatcctcgtcggtaacatccatggcaataaaatcagttaaattttcattagcaatgatgttattgtaatcttgtgcaatgttcttctcaaaccccgcttttctggactcaggaacctggggatctggagagccgaaataccgccctctatcatttctcaattctcttgatcgtttccttttcttttcctgcattcggtttttagggtgatggagcttgcatttggattcttgaagacaggttcctgtagcttcaaaacttggacagatgtagctatgcttcttccggcactgtgagcaagagatggattctattttactagctacttggtacaacaatagattgagtttacgagtatgggaagaaagagacaaaagggttaccaattttacaaacacaaatctacaacagtgttgttggagtgacagaatgtcaaccagtgagatttttttttttttttt

SEQ ID NO: 277656 - DNA, 543 bp, Cannabis indica
aaacacaatgaggtttgggaagttactcaactcccagctcaaaggccctggctgatggatcaacccatcacattcacagaagaagacgctaagacggtgcgttttccccaccatgacccgttggtcatagagacccccattgccaataaagtggtggccagagtcctgatcgacaacgggagttccgtgaattttcttttcaaagaggcctttactgcaataggtctgacggagcgagacctctcaccaagtggttctcaactcacggggtttaatggaacaacacttatcccaatggggaaagtgaggctttcagtcaccttatgcccggacacacccagagcactttcaagtactgtactttcgtggtggtggactgcccgacagcatacaacgcaatcctcggccgaccggccttggtagactttggcgcagtcacatcaatacgacacttgtgcctgaagttcccaacccaagaagctgggatagggacggtgagaggaaatcaaggggaggtgaggcaatgctacaatgttgccaccc

SEQ ID NO: 277657 - DNA, 881 bp, Cannabis indica
cacaacttcaccattgttgagtgagttttgagctcttaaactctaactcactcaactcaaactacaactacaaactcaaccacacctgcccaactgctccaaatcaaaccaaaatcatatactcaacataatccaagcatcaattaacatcacctcatccatttaaccaaaattgcataattaagtgaaattaaacttaataaacttcacctaaatcaattcaaatgaaacagccactaattctaattgatttaaacttaaataaactctaaatccagcctacaaacacatcctcaactctccttagcataacagccttgaaattgaactaaaccctaagcaaaaactcaattcaaatcatgaaatttcaaggaaaagaacatgagactcacctttaatcttgggcagaaccttgggttagcttaaaccaatctaaacttggttgattgaagaagaaaaactcagcttcaaatggcttcttaggattttcgagagagagagaaagagagagcaacatatatgtattctaattttttttccttttatctaacatttcctatctttaatttaaataaaaagaactaaattataattctaattcagccaacaaaaattcaaaatccatataagacaaaactaaaataatacttggtaaaatgactattttacccctcccttaaagcttgagttataacttaacctaagggtattttggtcattttctaactttcccgatttaacctacttctcaacattttaacctagtccggtataattccaatataacacaatttcaaccatcgtgacatttctgaccattctgtcgagttccacaattgtcaggcccgaaaatattttattcgaattatggtatctacgat

SEQ ID NO: 277658 - DNA, 672 bp, Cannabis indica
ctcgacagagtcatcatttttagctttcatcggatccaagtgcctgagtttgatggaggacaagatcccatggtagctgaaaggtggttgaggcatataaagaaaaatttcaacacaataggaacacctgaggaatatcaagttacttttgatgtgtccaagttagagggtggtgcagcagattggtgggagaccttgtccaggacaatggaaactgatggggtgacttggcgggattttgaggaagttttcagggagcaatattttagtccatctcacaggagggctcttattggagtatttgatggtctaagacaaggggatatgactgtgaatgaattttacatgaagtttgtagagctatcctcttatgcatatcctggtgttgttgaccaacccttggtgattgaacagttcatgcgtcgtttgaggcctgcgatacgtggtccaatagcccctttgacctttaacaacctgactgagtgtgtgacagcagccttgcaaactgaggctcatgtagagggaatgagaagaagaacacaagcaaaggaagaggaaatgaccgaaagatgaccaagaagaatcaaggacagtggtcccaaggacaacaatttagtgggggtagcactagtagtggttcatctggaaagactcgtagtggaccatacgggt

SEQ ID NO: 277659 - DNA, 431 bp, Cannabis indica
atagaaatcccatatttgtaaaccaacaataagttttgccgaaaaagttgttggcacttgaaaagtcgccggaaaaatcacagtcgccggaaaagtcgtctgaaaagttagcggaaaagtcatctgaaaagttagcggaaaagtcgtcggaaagtcaacgtcgccggaaaagtcaacatcgctggaaaagtcactggaaaagtcaccaaagtaaatgtcttatatataactaaaaatatgaccggttatatgaataaaaactaataactcaaaccggttataattgaaatataaccggttctgtaacataataataaatataagtaacataaaataactcaaaccagttataattaaaatagaactagttctataacagtgttataaacgaaagaactcagagtagttataactaaaatagaaccggttat

SEQ ID NO: 277660 - DNA, 973 bp, Cannabis indica
ttcatgaaaaatagaaaaatgatcaaaaaccaaatcaaactattctaacaacatttataatgtgtaataagccataaataatttactttgaattttttgaactatctaggtatttttcataattaagtttagaaataacacaaataattcatgaaaaatacaaaatcgatcaaaaatctaatctatcaattttctaacattttataatccatattaagccatataaaattattctagaattttctgggaagcctagctatttttcataattaatttataaaataaatcaattaattcataataaataaaataattgcaagaaaattctaaaacttcatagcagacctagaaatacctaagtaagatcaaaaatccaagaaaatccaaaaaataaacctcagaaggtgttgatcggagcttcgccggagttacgccggcgagcccttcttctccggcgacggcgagcctccaacttcttatacaattgcttttcacgcattattttgattggaaaagcttcctacagtgcttagaacctcaagccgaccataaatcaccaaataatacggtccaacatcgttgtcttcttcgttgccggtgtacctttaaaaatggagtccaacaatggcaattttcgttcagggctttaaagcttcgattctccacgtcaaaacagattcttggggtcctataagcttaaacacaatgttctttaaacccagaaatggttcaagtacgtttaaattcgatattgctcaagaacatgcttgaatgtgcatgaaaatggtggatttcgaaacctctgctcttagcccgtttggtcatgactattagcttccttagatcgtagaaaagctactcaaaacgatcaaacaaacccagaaactctctaagtgtttcaagatcaaaatttctctttctctctctaagtttcatgtaaactatatcggtctctctcgctctctattttttt

SEQ ID NO: 277661 - DNA, 723 bp, Cannabis indica
acatttattgacctcgcttttagccaacgacaacgagtctaatttaataagcgataagtgatttgtagcaatcgatatataataaagcaatataaagacacaggaattttataaaggttcagccccgagcagttcggtaatagcctaatcctcgttacttgtattaacttaagaacaaggagaaatgttccttttcttatagctcttacaacagtatctctgaatatataattcttagataatatttttagggtatagtctcaactgaactgtttgctctctttttgcccagtgaacatgcatcattatttatagggctagtaagcttggagaggaagagtttcccctctcgttacaatgtgtataaacagaaagatcatgtgctcaatgctaagtacaaagatcgtgggattgatgctgaatacactgatcgtgggatcgtgtgtatgtcatatccttgtagtctgatccccaagttatagggatttcgttgatgactcacgatgcaaaagctgaattcgctaagtgttggttgctctgcgcggattgctgaaagctttgctctgggcaggccggcgtggcatcctgctccgactattccctccgagcagattctccaagtggattccacgtgtcaccattatgcgatgccacgtcagaatgcaaaaattgggataacatttgcccccaagtctgtacaggactttcgaagttgcgtgtaga

SEQ ID NO: 277662 - DNA, 806 bp, Cannabis indica
aacagaagttcttagtcaaataagcaacacaaatgtctatgaaatgaaaattaaattgaaaattgcttaccgattctgattggtagtcagttggtgtgtatcctgttttgaagaatatatgactgaaatttcttggccatctctaatatacaaaaaaaaatactaaataaagaagaacgagagagaacaaagaaaaagacattaaagtcagaaacaacatagttagcctaaacattcatagggaagacatcaaaataccacatacacaatcagtgacccatcaacttgaagtttcccttctgcatcaattttagtaaagtcttccaaatacttgtaatattatgtgtgtcataaagtcgaagagcacaacctgtagctaataagctccccaaaaataactcatccaagataaaaaaataaaaaaaaactctttccccactcttcaactcacacattcatatctcttcttgttaaagaagaatgtaaattggcatgcatacaatactaagcggtgtcaacacttcatgaagtatatagctctgtgaaaaaattccacaaattcacaatgcatatgagaagctatgtttcccaattgaagaaaattcacataggaaaggattccttttctctaatatataggttactactttaattactctattttcttttctattcaaagacacgaaaaaactgaaagtaaaatgaaccttttttttctcctttttgatcctaaatccatatatgatattatgtatattcaactctaatacttgaattcacttaacacctgccaaatttggttcaaa

SEQ ID NO: 277663 - DNA, 1126 bp, Cannabis indica
ctccttctttcaggagaattctgtgcatacatgtagcaggactgattcctttgatgtcagcaacggaccatgcaatggcagttctgtgagctcgtagcaccctcatcagcttttcttcttgcacttggtcgagatttgtagcaattatgactggtaaggtttcattctctcctaagtaagcatatttgagatgattgggcagtgtcttcagttcaagaataggagcttgtacaatagatggttgtaacttatcagttatgactggcaattcaggccaccttcttgtaaagcttgttgaagtcgttattaagtgcggttatgacatccaacatctctttagaaaagttctcgtttgaattcaactccaagttctctcgtatagcaacttccagatcatcttcactatgcagatctagcaccctttgggagaggtcatccaacacatcaagagaataagcagcatgtacatcacttggatacctcatggcttcaaagatgttgaatcggattgtctctccatcgaactccattgtcaaggttccctcatggacatcaatcttggttcttgctgttttcatgaatggtcttcctaacaaaattggagtggagcaagggatagaatcatcttccatatcaagaacatagaaatctgctggaaataccaattcattgacttgaactagcacatcttcaatgacacctctggggtaggcattcgacctatcagcaagttgaatgattatcccagtttcttcaagtggacccagattcaaggagttatagatagagaatggcatgacattaatggaggcccccaaatccaacatacaccgctcaatcctggtgtttccaatagtgcaaggaatagtgaaagttccaggatccttacactttggaggaagcttcttttggaggactgctgacacattctcccccacacttacttttcattaccccttaacttgcgcttattggtgcaaagctccttcagaaacttggcatatcgtggtacttgttttatggcatcaagaagaggaatgttcacttccaccttgcgaaatgtttcaagaatttccttgtcagcttcttccttcttagtattctttaatctgcttgggaagggtgg

SEQ ID NO: 277664 - DNA, 553 bp, Cannabis indica
cttttcagaaaaagagaaccaatgtcccctaacataaactcttcgataaagtctagaattctcatcaagaaaatcatcagtgagattagcatagaaatccttaacaatgtttgcaatgaacccattgaaaccagtgagagtgttttcccattgatgaaattgaataaactttacaatcccataaacccgatgagcatgcaaatcatagttcctctcactttcaaacttacgggttgcatataaattccagtcacgttcattatcacgataataaaatcgagggcagtgagaaagagttgaaggaacattaccagaagaaggctcttccataggctgcttgcctttggcagcagcagaagcctttgctgcagaagcagattttgacagaggaggctctggctcgagttctgtgtcctcactgtctttctctgaatgaagagaaactgatttgtctgaagagacttccattggatcttcttcttctgaacttgaacttgaagaaaccgagggaggattggtcttgagtttcttcttggctggagggactgcctta

SEQ ID NO: 277665 - DNA, 834 bp, Cannabis indica
caactaaccctaaccattattgcggcttcatgcttaaatccttccaagtgaagatatgtttgaggcccttgtgatccgtataaatttcacacttttcaccagataggtaatgacgccaaactttcagtgcatgaataaccactgtcaattaatatcatgattagaacactactattcacactccttcaattgtccgggtgcgcaagcaataaccctcttgaactgtatcaaaacataatctaatccttgtttattggtgtcgcaataattcacaatcttctcctcacggactggaaacgttagcactggtgcaataggtaacttttatttcaattcttttcatttaattccactaaagacatagacatctctcaacaactattccacagcatcctgttaattccagaaaacctctaacatcactgtaaatttgagattagcaaaactcgtatttcttatatttagcataaagcttatgctccaagaacgttgcaacaccatcaaaagatgcatatcatatacctcatttaagtcgaaagaaatcacaatatcattaataaagacagctacgaagtcattgaatatgaaaagctattttaggaatatccttccttcgagccttcaactggtaataaccagatcgaagaccgatcttagagaagatggttctttcttaaaattaatcaacataacatctatccttgacaaaggatactcgttcatcaccgttaattggtttaatctcccagcagtcaatactcactcatatggtgtcatccttcttcctcataaataaaacctactcaaactagaaatttcaaacctaatatttcc

SEQ ID NO: 277666 - DNA, 602 bp, Cannabis indica
atacaccacaccgaaggatgggtattgagactaccacatcctctgtgggaatgatcgcagggttagtaaatggaaggtgcgctctctgagacggtttaggacgttgaaacgcgagtcgcagcaaattcaacctcacaaaggtggtgaagtctgatttggcaaccctcgagattaaatcctcgcacgcgaagggctcgttcagctgggaatcgtcgaccgaatctgtcccactcccttccgcctcctcctcttccccacctgactcgcgagctggagtcgtccattcctcgtccatctcctcgacctcgatgtcaggagcatgcctcgtatgtataaggtagtcgcgtgccgacactgtggactcgctgtcccggatatcgatggtcccaggttctgcgagttcctgcaccatcttctcgatgtccacagaagacatcggacctaagtctatttgagcggcatccacttcggaaatgtccatggggagaaaactgtccctcttttggtcagtctcaccgtcaaatgcatggcctcccgagccgagctgttggctatccgatagatcgctcatgtaatatcccagaaaataaataatatttaaa

SEQ ID NO: 277667 - DNA, 993 bp, Cannabis indica
ccatttcttgccaactttgctcaagtttcccagagagaaaaaattctcagaccaagaaaacactgttgaacactttgcaattttcccagtccatcttcgttcactactgtcaatccttcttatctttgtttgatctacagcagaacccccagtctcaacacttcactgtaagtttcttgcaccccttgctttactgttaatgtacatggcatgcttttacttatctgctcgttttttctgggttttgtatttgaagtttctgggaatgcaatcttttagatttttcacgtaacaggtctagattcaccatttctggtgttaggattactcttgtcacgtatttgttactattttttgcaaaagaccatacgttcttcgtatactggtcgtttagggcataggagagattgctctctttcgattttctgcccttctttttctttggtgcgcaatgtcgtcttctgtgaatttattgcacccgactcttgtccaggaaatccttctagggtttcctgtttgacagatgtccggagggggcctctttccagcggttaggggacccccattccctttttcttggtttagggtttggtatggggcctaactgctggaatcttaattctttttacagaatcaaaacatgtctgcatctggttcaaagtcatccaagaagagtggtaagcgtctggctaccctcgaagatgtctcactgggtcccgttgcccaggaggggtataagtctcgggccaccggatgggaggcggcagagcttcactctactctaacttgcccccatcaactggagaacatcgtggaggtagctggaatcaagccttccacatccgggacgtaccaccggccgcctcgtgatgcggagacgcccaaccacaactacggcggcttcggggcttggagccagcgcacttgatggccggggccatgcttcctctccaggactactttgttaattttttagtttttgtcggccttgcg

SEQ ID NO: 277668 - DNA, 780 bp, Cannabis indica
aatgggggaagctcataagatagaatggccttgactatcgcctaaacaggacaacgctggattctcatcatgatcgaataaaaggttgctagaatgcttatcattttagatgagctaactactctattcaatggatgatatctttgactctcgcctaaacgggacactattatcagtttgttggaaaccttgaaaattatttaggattgtaagttttagtatttcactagtcattcctacttgctaaatgcttaataattccttaattgtttatgaatttatattgaaccatatttgttgacctcgtttttagccaacgacagtgagtctaattttgtaagcgacaagtagtttaatatgatcaaaatatactaaggcaaataaagacacaagaaatttatagaggttcaaccccgagcagttcggtaatagcctaatcatcgttatttgtattgacctaagaacaaggagaaaggttccttttcttagagctcttacaacaatatctctgaatatgaattcttagacaaaatctttcgacccttcactcagtgaatatacatcactatttatagagctataagcttggagaggaagtatttcccttctcgttacaattgatataagcagaaagattgcatagtaaatacaaaatacactaatcatgggatttggacagcttgccatatctccgtaatatgatcccaaagttatagggattttcttgatgactcacgatgcgaaagctgaatttgctaagtgttggcgttctgtgcgaat

SEQ ID NO: 277669 - DNA, 503 bp, Cannabis indica
ctcatgtttgttaaattttcaaattttgtcaagacttgtaaatatttctacttattacaccaagctgtaattaaagtcgcatatatatatatattaaaaacgcgagtacccgtgtactgcgaaaatgttaaaggataattatccccgcgaggatataaacttgtccaaagtaaaatgcaaatttgtctaagtacagagtgcgagtacccctgtaccgcataaaaactaaacgagcaaattcaaaaagcataacagtttaaacataggagaaaaagtcaagcatctggagcagcaggagcagtttcatccgcgactttgctaacggcctcgttctcgacttcctcagcatccgcaccctcggcctcctcaggaagattccctccaccaccttgagtttgagtaggcgacatggcgcgaaaagcctcggccatctcagcggcctctgctccgaggatatagaagtcaaagtctgggattttagaaagagtggtgtaaatataatc

SEQ ID NO: 277670 - DNA, 518 bp, Cannabis indica
ataattaattggttccataatttgtcttttatttgacgctgacgctcaatctgaagatgtacatggttaactggtttatattaaatccactaataaactataccaaaaattaaacaaccgtattttacggtatcttgtcccaatcaatgagatattaattaattattaaaatcattttttttaagaaaactgtactaaaaaatatacatacaatatttgacttagatcaaaaaaataaatagtactatattacttgattttctttttaataaattctgtaattttattaagaacagaattagtagaataatttaattatagtaataacatatttctacgtaattgtatttttttaggttattcaagtagatagtacaacctactgatttgaccgtatatggattgatgggaaaatattactaaaatgtttattattttaaaatacaaaaaaggtcctcctcatttatttaaaatcgttttttagggttttgaaggatttgttgtttactttaagtgtt

SEQ ID NO: 277671 - DNA, 1040 bp, Cannabis indica
gtatatacgttttattgtatggtatatgatttttgttgtctataatatattatttatatttaatatgatatttagtttctattttattgtatataaattttttggtatgtattcatattttaatggtgatatatataattttgttagcatgatatatatattttttgagtattaatttagtattgttataatttctttgtggtatataattttattactacggtatattaattttctgtactacgatatatctaatactgctgtatatatttaaatgatctaatatatttatttatttttgttacaatataataatatgcaatactaaaaaaattatgtaacttaattttgttattatatatatttttttaaaaaaatatgtgataaatctatttttataatttttattagctaatttattagatttggccattttcttaatttttttaaaaagtggacatttactaacttagttaccaaatttagggccattttacatctcaacccgaaaaaaaatgacgataaaactacattatttttgtgttgaaccataattttaaggtttatggttggagttggagttgctcttagctctttttggattaaaatattttgttatcatgttgagatattatcatatcacattctactatgcatttatataaataccaacaaattatgtaagtttgaaatacaccataaactataaaggcataaaatttttcctttcattttgacgatgtagtgttacaaatattaattgctccataaattgactgggtatatttttctttaatatgcttccacttatacatttaaaaaggaaaaaagaaagataaattcaaaagtacaatatagtttaggggtttttaatttttacactttaaaataattttctttgtatttttacaaaattctacatagaaacccatattgcaactagcggtgcaacttaaattgcaacaaaaaatcgtatagaaactcctattacaactagcgttgtacccactttaaaaactcaaactgtaaaatttaaaaaa

SEQ ID NO: 277672 - DNA, 882 bp, Cannabis indica
tgttgatttcctctcaagcacccaaccccattctttgttggaaacttaaggcatgaatgaaatatcgacgtgacaacctttaggtcatataaggctagtcgacccaacatgacattaaaggctgatggcacgtccaatatcaaaaatagtgccattacagttatgcttttcagagcttgcccaacagtgagaggtaggagaattttccctagaggtgcaacactctggccggagaaaccatacacgggctgaagacagggggttaagtccttgagttggagccccatcttttcatatggtgtcttgaacaaaatatttgtagaggctccaatatatcatggttcgggccaaaattttgttggctatctggacttccacgaccaacgggtcgttgtgtgggaaattattcttgacaacatcttcatcattaaatgttatggtgagttcccctgcccgtggtatttttggcttcctttcgtcgatagccataaccacttcttcttgctcgtgctgtaatgttcgggcatacctctcccgggctttgcttgaatctctagctatgtgcgggcctccaataaagacttgtaaatgcccatccaccagtggtggcaataaatcttgattattatctgtcctttgattttaatcgaccttgacatatttttgcacgtgcggattattctttcttatcaaaaattcaatttctcgcttcaggttgttgcattcgttggtgtcgtggccataatctccatgaaaacggcaaaacttggtaatgtctcacatggaacaagggctttatgttttaagaccggatatacaaatcacactaaacaatgaacttttcaatgttgctagacctagaaaccttaaaagaaaagagat

SEQ ID NO: 277673 - DNA, 507 bp, Cannabis indica
tttttatgatttagggtattgtcatgctattcatcgatagggaaacttttggtttcaagtttaagtccccggaaagtgatttagcatgtcacttacctatgttatgattgatgtgatttaggagcctgtaattcgccgagcagttgttccactcaggttggccggcacacctgaattcggaatcaaggtaagattagtataatgttatgcatatgttattacatgtttagcgtacatgttgtttatgcctgttagattacattgatagcagtaatagtatacatagagttgtactgattactgataaatgtatgttggctaaaatattgatcgatgatgtcacatcaatatggctagagtatgactagcatattgagtataggctgacattatggtcgatagtattatcgtatgaacgttctagactcagtaccgtgtgggacacgaggattagggttatgatgcggtgtatgggcgccaggttataacccaggttatttgtatgtt

SEQ ID NO: 277674 - DNA, 802 bp, Cannabis indica
atcggttggtttagaattagggttttaatccggaatattatgttaaggtatttattgtgtttcaattgtcgtgacataggaccgggattgcctagcttgtttttccacccaggtcggccatattcttgacttctgaattaaggtaagaaaagtggtaagcaccgtatgtggttaaaaatcaatgaatgaatggaggtgaccttaattattatcatgatgttgattaaagcttattaagcctaggttattacctagggttggaaacggttattaccgttatgagtaattactcttgaaaccgcggttaggtttcttacttatcgtttgcgttatcgggcaacgatagtgacatattcagctcgtatgtaacgagtggtaaaagtggtactttattaagtaccaggaatgtatgatgtttaaggaaatgcttattattatcgaatagtgagtaaacataatggcatgagaataagttgataatcattttctttcaattattgttttgatcactttcttgctgagtctctgtgactcactggtgctttatggtgcaggtaaaggaaaagctaaagtcgaacaaccatgagttatggtcgcagcagcaatgtacataccagccgcaggcagcccagtttacaggatgctctattttgattgtattttggaaaatataaagcttatgttgtaaaatactttgaaaccagtttgtaaatattttgaaaacagggggaccccataaatcatgttacttatcttttgttaaacagtttaaaggttgagttttaactatcaaaattttaat

SEQ ID NO: 277675 - DNA, 717 bp, Cannabis indica
ttttatttcccatattttaaactttaattatttttgaatcccatattttttgcactatttatttataccatataaaagtaagctctattaaatttttccacattaatggaaaaacccttagaaaagaaaataaaataagagggcttggggcaatggctcctccgtcccacccttctaccgttgtggatacgagagagaactgagaaatcaaaagaaataaagaataagagggttagagagagggagaaaaatatgagaatatttcggtaacaagtgtaaataatagcatattttgttaacagaggactaaagtgaacttttttgatatgatgtgcatttggaaacataaaaacttaggagttgtttgacttcatcacttaaaaattgtttacaatttttaaaaacagaaaacaacttttaaaaactaataggggcgtttgactaaattttttaaaaataatttttcgaaaactgagttttaaaaactagaaaacatcaaaatgttgctttctatttttcaaaaataatttttttaactaatattttttttttcttttttgtctcacatatctagacttggatcctggagtcggaacttggaccaaaacccggaccaggatccagatgcagacccgaacataggcctgaaccccaaccccaactcaaactcagacctaggcctcagccccaaaccgagacccagacccaaacacggac

SEQ ID NO: 277676 - DNA, 145 bp, Cannabis indica
gcctgcttggagaagagcaagctgttgtccgtcgtcaactttcttggttttcgaggcttcctctcggaacctctttatatagtttttcaaggtctcggtgggcagttgcttgatgttagtcaaggcactgacgtcaggtgacctt

SEQ ID NO: 277677 - DNA, 811 bp, Cannabis indica
atattcaaattaccataggggaacgccatgtattatcccaatctacggaaagagttgaagaagaaaatacagtcaacttgataactttcctggatagtgcaaatgaaaatgactggcgtcagccaatcaaagactacatccaaaaaggagtcttgccagaagacttgaagaaaagagtggatgtaagaagaagagcgcctcgatttgtggtctttaatgacacattgtacaagcgttcattcgatgggatattattgagatgcctctcgatagaagaagcagcacatgcacttcaagagactcatgccggtacatgtggcgcccatcaagccggcccaaaattgtcggctcaattaaagcggttgggttactattggcctactatggttcaagatgcgattaatttcgctaaatgttgtaagtcatgccaattacatggagatttcatccaccaaccccctcaaccactccatccttctatactgtcatggcctttcgaaacatggggaatggacgtcattggtccttttacgccaccctcttccaaagcccataagtatattttggccatcacagattacttctctaaatgggctgaagccgtaccactaaaagaagtacgggcagaagatgtcgctgattttataaggacccacgtaatttaccgatacgggattccttcaaaaattatctccgacaatgccctttatttcaagtgtaaggcaatggtcaagttgatgaacaagtacaaattcaagcacagtttctcggctagttacaacccgtcttcaaatggtcaagcagaagcatt

SEQ ID NO: 277678 - DNA, 453 bp, Cannabis indica
ataaatgattcttcacgtgatataagattcattcgtttcattatataaatatatgtaaaaatagctagattagtgtatagtactatatattatataatatacaaaaatagaggatttgaatgcgaggtagacaatacggtcagcgactatggtaaaaaggacgatgtcagcttctctccacagccttccttttagcaaaggcatcatcttgatgtgaaagctgagttactacatcccacgacaccaccattacttctctttttcctaattctttctcctttcttgtttcttttttttttttttttttttcaagagaaaagatacgagagaagagatgacaaattcttagaggctgtttgggttctcttataatgtagagataagatgaattaaattctatctcaaaattaattacctacacgaggagtagactcattcctcttatatattcta

SEQ ID NO: 277679 - DNA, 637 bp, Cannabis indica
aagaatttgatttagagatacgtgataaaaaaggttctgaaaatgttgtagctgatcatttgtctagaattgttgttgaaactaatcatgattccaccactatcattgaaacttttcctgatgaacaactcatgcatgtatcttcttttccttggtatgctgatattgtcaattatttggtcactggtgaaattccttctcattggtctaaacaagataaatctaaattttatgctgaagtgaaaaatttcatgtgggatgatccttatttgtttaaatattgccctgatcaaataataagaagatgcattccaaactgtgatcaacctaaaatcatatctttttgtcatgatcatgcatgtggtggacattttagtggtaagaaaactgctttgaaaattttacaatgtggattttattggcctactatttttcatgacacttatatgtattgtaaatcttgtgagcgttgccaaaaattaggaagtgtaactagaagaaacatgatgcctttaaatcctattcttattgttgaaatatttgatgtttggggcattgattttatgggtccatttcctaattcttttggtaatttatacattcttgttggtgttgattatgtgtctaaatgggtaga

SEQ ID NO: 277680 - DNA, 500 bp, Cannabis indica
tgttctcgcaatttggcagtcgtacacagtaatcgccagtcgcgatcttgtaccggaagactcccaagaatttcagctacccccttcttattcgcgtcaagcgttggtcgagctggtctatctgcgatgacaacaaagaagaacgagttagcaaaagatctcgaaaaacaaagtaacagattttatctaagtcaacaaatatgcgacatactgggtctgcgattaaagtcggtcctgatcccaggaaccttaaaaacataaaaccatttcgacttccagtcgcccatgttcgagaccatcccctcaacaccgtttatttcagaagtcgcccatttactaaagcaaaagaagccattatgaagacccacgctctttatgtcatagaagtaactaaactcctctactgacggagccctatgggcgtactccatgtacatcgcatagaatgctagaacagtgcgataactgttgggtgttagctgaaaaggcgatacgtcata

SEQ ID NO: 277681 - DNA, 966 bp, Cannabis indica
caggcatccgtacagggactcccttctggaacgaactacaacaagaaggggctgctagccttcaggacttccaaaagagagtccaaaaatatatcaaccttgaagaagcccaaatagtggcctatggaggatactatcccaccgggatagcagggtacatgcccggagcaccgccctcgggtactgtcccgaccgcggctccgccgatgagcggcatacagttctctgccactcccggatatagtcagggccaggccttggcgcccgcatcatcccattttggaaatccctcagggataaatggacaagctccctcacactccgctccaaccgctagcctggcaggcccttcccagggctcgaggagtaaaagatcctccaaaggcagcacccggacgggggagaagcgtcagaaaagggggtacactccccagtacacccagtacacggagctgacggactcccaagagcgtgtgtactttgctactaggcaaaatacgcactaccggagaccacatcctttgtacaaagatagctcccggagggatccaagcaaaagatgcgagtaccacaacgacattggtcatagcaccaatgaatgcaagaatctcaaagacgagattgaaaacctgatccgattgggccacctctatgagtggatcaagaatcggctgcctcacctcaatccgggccaggcgacaggggttgtgccccagggaacaccggggggtgcagcaggagtattggctccagttgctcccgcgggcgacgcccagcacatccccggtctgccgcccagaccaaacgggagggtagccatgatctccggaggaccccatattggaggaaccacccgcaaagagctaaagcggtacgcgggggccgtaaagcacaatgaggttggaggttactcaactcccagctcaaaggccccggctgatggaccaacccatcacgttcacggaa

SEQ ID NO: 277682 - DNA, 765 bp, Cannabis indica
ggacaccttgatttgttccaataacttatgtgttttctgaatgattgagtcatttactaattattattggctaatgtggaaagtttgttatagatgcaatttatgacatcactttctgtttatagaaatataagattgtgaacctctgcaatgagagactaaacctgtatgtattgtagatgcaaagaagaagacagatgctttttcgtagtatatactgaatgtttttatgtattgcagatgcaaggaagaagataaggatgcttttttgtattatatattgagtgttcacggacaaggtcgcactatagtcttctgtacatcagtggctgctctgcgtcatctatcttctatcttgcgcatacttggtattgatgtttggacacttcatgcccagatgcagcagcgagctcgattaaaggttcggttttgtttttgtctcagaacactatacacacatacacatgtatttttttttttaataatttgttgcaactttttgcttggcaactctaaacttttatgccagaggagcactctgtaatttcttttgttgtagcctagtacttatttccatagcctgacatgaactttctttatttttcctgtttcatattctgctcctcacatcctgggttcaatgcaggcaatcgatcgtttcagggcgaatgagcatggtatacttctggcaactgatgtggcagctagaggcattgatattcctggtgtgagaactgttgttcactatcagctaccacattcagc

SEQ ID NO: 277683 - DNA, 638 bp, Cannabis indica
tatggtatcaattttattacaacagtaataaattaaatagaacataaatcaagatcaagaatttattctgataatttttgctaattcattatattacatccatgtttaaaatatgtgtgacaaagagtactgtggtgtattgagtatagtccagagttcaaaatgaactacatatttcaatagtatagtccacccctaagtatatagagattatgatccacccctaagggatatagagatcatggccatctcttagtgttatagagatcatgtggagttatgaatataatccagagttcaatagatataaaagatcgttgaactgcatattattcttaactttttccacccctatcagatcaaaagatctttctattaaacaaattcttaataattgttttagaattaacaattattcataaacatagaaatgaaattctaagtgtttatgtagtattaactctttgaagagttgaagatactatagaatttgtgtcaataataaaaacacatacacatacaatcattaaaacatataaatataattggtactggcatacacaagataaagtaaatgaagctcaattcataaatgcaatattttttttttaaaattagaaaactttattaaaaattct

SEQ ID NO: 277684 - DNA, 694 bp, Cannabis indica
cgcagttgcttacccgcagagtaatggacaaactgaagctgttaataaaataatcaagcacaccattaaagggaaactagaagatcgcaaaggggcttggccagacgagttaccgcaagtcctatggtcttataatacaactcctcgatctacaactggcgaaacacccttctcactttcttacgggtgcgaggccatgttgccagttgagattggggcaggttccctacgcagagatgttttcaacatctcgcagaacaacgagaaacagctattctgccttgatcttttggaggaaaagcgtgaccaagcgcacttaaaaaatgcggcttaccagcagcgaactgcaagatactttaactccaaggtgaaagtaaaagccctgcgagcaggagacttggtccttagaagagtaatgccaaataccaaaaacccgtcacatggggtctttggggataattgggaaggaccatatctcatcgcagaaaaaattggtgatgccacataccgactcgcaacactcgatggaactgcgattccacgagcttggaatggcgagagtttaaaattatattatcaatagtactcgcattattaaactatgttcactcttgtacttatacttagatatttttcatacaaaaaaaaatacctaagtataggggggtatatatgccagaatgtactattgatt

SEQ ID NO: 277685 - DNA, 776 bp, Cannabis indica
cggaaaggaccgaatattgaactttgattagatatgttaaatttaccacaatatctattacaattcaatatcacctagttgatcctagatcaaatgatcttaatcctgacatgattagggtcgatcttgtaacaccctaactagcataggcgtgttaacgtgattttaaacatactgtgcagctcgttgctaatcaacgaggttaatgaaaatcgtgattaattaaagtttgcttatttaaataaatacttatagtattacatacaaaatattttgggatcccgtttgcaaaacactttacaaaagattgctattcatttataaaatatttgtcgcccagcgactaacaaaagccctgatgtcgcgaggatcgtacgctccaggcctaaccgccccgacatgtacaatcttcatctgctcgtcctcacagctcctcaactttagccttgcccttacctacacataaacacagcactgtgagtcgacagactcggtaagaaaagcataaatcatataacatacatatatcccggattatgataaggcgctcatacccatgaccataaccctaatccctgtgtcctacatggtactgagtctagaatgttcatacgacggtacttccgaccataatatcagcctatactcggtacgctagtcatacgctagccgtactgatgtgatactgtatcagcctatactcggtatgctagtcatactctagtcgtaccgatgtgatactgtcaaatagtacggtgctatcgaccataatatca

SEQ ID NO: 277686 - DNA, 519 bp, Cannabis indica
ctcttctctaatgtcataagtgttttgggttcacctattgtcccaattatggctgtgtttttcttccatgaaaatatggatggggttaaggctatggctatggttttggctatttggggctttgtttcatatgcttatcaaaactatcttgacaattgtagttccaagaatgataatccaataaggaatggtcaaactaatgttacatgctaatatctatataattagtgtgcctatttaagtttaaaatagttttactcgagtaatctcatgttgttttgtttaaattttgggagtaattagatattgtaaagtcatttttttggcaagttagttgacaaaatattttttcttttatggtaagattcttgtgcattcataaccgatttcttaccttgtttattcggtttgtagttgctcttttccttgttaggaaagttgcacttttcagctgaactttcctttgtttggaaacttcttaaaagagaagcaattctcttttggaaagttgtctttttt

SEQ ID NO: 277687 - DNA, 197 bp, Cannabis indica
  modified_base (33)..(33): a, c, t, g, unknown or other
tgtcgttttctagggcagattttctaaaaaaanaaaaaaaaaaaaggaaattaagaaaaatttaagaaaattccgaaattttattattttgatttatttttggaattttattttatttccttatttttattgatttagtcaattaaattacatttgtttaaactttccattcttatttaacatatatcttcatatat

SEQ ID NO: 277688 - DNA, 585 bp, Cannabis indica
gaaactcgagaccagactcctctttgaaggacatgtgtatccagacttccagtgaaggctgaaatgtccaggagaggcttctcgaagtttagacctcgcccaggataaaaccagcgaggtatcgcggatgcgacttaattcacaccgcataaccgtaatcctcatcatacagggtagacctaactcgcatatgtcagaacatgtgcgactgcctccttctatacctccgcagcaagtatagaggccaatgccctatgatgcagttttggtcccaatgacccaatagccctaacggaccaatgtaagttcgcatgtccagatgttaccaacttcagcatgcgacgtctgtaacgagcgatcacctaaggacgcagacgttccaaacgtacgtgcgaccctacgaactcaacagacggaacacgaacggtcaactcgcagatgcgaaggacgcatacgttgatgagttcagtaactgtcatatacttattaatgttaacgttgtctgagtttaatcatgacaatttaatgtgtaaataatggattaacaataaatgtgatcctcatgtaaccgattgggcacctgct

SEQ ID NO: 277689 - DNA, 712 bp, Cannabis indica
atattctggattacattgaaatacagttttatttatggcataaaacccaaccacgtaaaaatctccctcttaatttcttatagctctctaaattattattattttattggttgccgaaaacctcggtcaacattttggtgctttcattgagagctgaagaaagcttctgtaaacacacactacattacaacaatggtggagactcgaagcacacgtcaacctcgccctcttcaagatgctcaagatccgaatgaggaggacgtggcctcaagagcaaccgagggttccgaggaagaagaaggaattcctgatgacgactacgagggaaacctcgatgagtacgcctacgatgaaggtagctactcagaattggtactcttaaggcaaaaggctgtcgatcatgaagctgaaatcgcagcccaaaaagcacaaaaccaaaagatgcaagaggtgatgctggccatgcaaaaagccatggaggcagcaggaatccacgtgcatcctaaagccatccctgctggacttggaaaggaaccagaggaatcctcgccaagtacccaaaagcaaaaatctagggaaccaagccctataaggtatcccgctgaagggaaccaaaagaaaaaccctacttctacccccgggaaaaagaaaaaggtgcaggatccgcgaaaggtccgctcagatttcccgaaagggaaaggtccgcagaggg

SEQ ID NO: 277690 - DNA, 528 bp, Cannabis indica
gcatcaccggcatggaagaaatcgaaatgatcgacacatatccgaactggatgatgccaatagcagcctatctcaactctggggaactcccagataaccgaaattaagctcgaaaaatgagaagaaaggcaacacggtacatcatcgtagaagggatcatgtacagaagaggattctcaatgccattactcagatgcgtcacacaaaatgaagctgcacgacttctatatgaagttcacgatggattctgtgaaaatcatgcagccggacaaagcttatcaaagaaaatcctaaggcaaggctacttctggccgacgatgattgaagattcgaaagcttatgtcaagaagtgcgacaaatgctagagattttcaaagataccaagagctccgcccaatgagctgacacaaatgcaaagtccgtggccctttgccatctggggaattgacctaatcggacagttacctaaaggtaaaggcggagtgcagtacgcagtggtagcagtcgactactttactaagtggactg

SEQ ID NO: 277691 - DNA, 761 bp, Cannabis indica
attaacggatatcggccctcgacctcaatgagtcttttactgatgtaatagactgggtgttgtatatcattctcttctctgattagcacgacactcatggcatgttccttaacagctaagtatattcctagttcctcgtcgtccaaaggttttgagagtacgggaggttttgcaagttgtgcctttagcccttggaaagctttttcacacttctttgtccactcgaactgcttgtttcctcgtaggatgttgaagaatgggacacacttgtctgttgattttgaaatgaatctgctgagcgcagcgatccgaccagttaagctttgcacttctttggtttttgttggcgagttcatatccagaagggctttaatcttttcaggattagcttcaattcatcgggcattgacgatgaagcctaaaaactttcccaagctgactccgaaggaacactttaagggatttagtttcatgttatattttccaaggactttgaagcattcgtccaggttgtctatgtgccccccaagcctttctggattttacgagcatatcatccacgtatacttccatatttcgcccaatctgatctttaaacattttgtttaccaatatttggtaggtagccccagcattttttagaccaaacggcatgactttgtagcaatagagacccatatatgttcgaaaacttgtatgttcttggtcttgtggatgcattttgatttgattgtagcctgagtaagcgtccatgaagctta

SEQ ID NO: 277692 - DNA, 989 bp, Cannabis indica
cttcttttcttgaaacattttccgaagaggctaatgcattacattcatatggtaaaccaaatgatagcccattttctaacacatacaatcctaattggagaaaccaaccacaaatgacccaaggaaaccaattcaacatgccaaagccgaatcatgcccaaccaagtcaaccttaccctccacaaagaaagccttccttagaagacactctacaacaattcatgcaatccacccaacaaatcatgcaaaatcaatctcaatccattgccaaacttgagacacaactgggtcaacttgccaatgtcataactgagagagaaaaggaagatttcctagccaacccgtcccaaatcctaaaggccaatatgaagtaggagttcctagtcataaagaagaagccaagtctatttcaactcttaggtccggaaaataaattgtcaaacccgattacatacctcaagttgaaaaagaccaaagccaacctcaaagttccaacacaaatgacttgtcaaaagataatgatcaaattcttccttccattccaaaagctccttttccacaaagattactcccactcaagaaaggcaaccaatatagtgacatcttagaagtgttcaaacaagtaagtatcaacatcccattcttagatgccattaaacaaattcctgcctactccaaattcttgaaagacctttgcactgttaaaagaaacactaatgttccaaaaaaggcatttttaactgaacaagttagctccataattcaatataaaagccttgtgaaatataaagatcctggttgtccaacaatttcatgcatcattggtgatcattttattaacaaagctttacttgatttaggagctagtgtgaatttattgccttattctgtttataagaacttggtctaggagaattaaaaccaacttctatacaattcaattagctgatcgttctgtgaaaattcctagaggtattatagagatgttt

SEQ ID NO: 277693 - DNA, 589 bp, Cannabis indica
catattccaaccaataaaccaaaaaaaaaaaaactgagtgtaaacaaatatgccattaaagatcaaagctttgaactcaaagctcaaagttgcatcaaacctattccaaccatcaaaaccagccacaagaagctaataccaactcaattgaaccctatgattcgaaccctaagcaagcctaaacctaacagccactaaatctcaaaattacaagttcaaactaaagaaaaacttcaaaaacatgctcaagggttctagggttttaccttagcttcaagagtgcttgattccctagttgaatttccagaaaaataatgaagaaaagaggtgatctcctctggttgcttcagccgaaagagaaaaagagagaaaactctctattttgaatttttccttccaatttccttgttttctaaaatgagacttaaggaaaaagtaattaattcttgctaaaaacttatcttgctaggtgtcactcacctagggcagccacctatcctttaccaaataaaatgactaaaatgccctttaacctaaaattaaggtttttctaaagctaggggtaaaatggtcaaattccataaccccg

SEQ ID NO: 277694 - DNA, 445 bp, Cannabis indica
gggcataaaacccaacacagagcatcaagcttgacttctaccccaaacccgaggagatgattgctaaatttcgggagaagaagaagaaacttgacgccatgctcgaggcgcatattggtcctcgccttcctcctcgcattgattaggtcgtttgagtccagcccacttcatcaagctttttcttctctttttttattttattatttacagcttcttttcttttatttaagacaatctttatcttaatagctgccttattttctaaggggagacaatgattaaggcctgtccccgggctctttgtatatattttttttgacctgtccttagggccaggatttttatatacatgatcttttttttctccacgatacatatatttttctttggacctgccctttgggtcaggatatttatacatgtgatcttttttgatgcataattt

SEQ ID NO: 277695 - DNA, 722 bp, Cannabis indica
ataatactaaagagggttttgccaccaaaaataaaaatgaagggattaagtgtgtaacaatcaaaacataggggggtttggccgcaaatttctctttttattatgatttttagatttatttacatcttttagtatttttatgttgtttatcaaaattattcaaaaaaattaaaattattttattttctttataaaattagaaaaggtaatataaaatttaactaaattatcattattaaaaagtataagtatttttatttatatttatagctttttgaaagatatatttgtttttttaattttaattaataaaattaaaccaaaagtaaaaaatagttagaaaagggaaatatatttcttataaaaatgagacgagaatcttttttttttgtttattttctctctgatttaagtagcccctactaagtcttaatttcatgatagaattttagtaatgagataaatgtaatattttgtgtaattttataataataataataataataataataataataataataataaaattatcaactttcccaccctattgtccattgagcttgttatgaataaaagcctaaactgtataattctcttaggaatcgtttggaatgtcgtattagctcgtattatattgtattgtattatattaaattggattatatatcattatttttaattaatactatgtttaaactttaatttatactaaaatatta

SEQ ID NO: 277696 - DNA, 594 bp, Cannabis indica
gtactataacattaacaatactttttaaaaaagtagattctggttttcataaatatgaagagtaaatgtactataacatttacacacttttattactcaaattagaataatattgcatgaaataaaaagtattgttttttaaaaaaaaaattaaaaataccagttgattatgcttattaattataatatctcatattattatttatgcatgaaatatctttgcatacataatataacactacctatacatttgatctaataattctcactcaaatgtggacaatggattcctttcatggccctcaacttaaccaaagatcctgtattttattttattttcaaattaaaaaaataacagtactaattaataaagtttagagtttaatattaacttgaaaaaaaaatactacttttgtagattttgcttgcacacttaacgatcgtcatcacctagctcattaaattagctaggcctatataggctatatagctaattaattataggcccaacttatctttatatagttgctaatctaatccagtattaattagtcctactttgttggtttaattaattaattaaaccatattcag

SEQ ID NO: 277697 - DNA, 671 bp, Cannabis indica
atctatttcaacatcaaagcgagattttttagtctaatttttttttttttatcatgatcgtgaatatgttgtagttatttagcaccacctataaatttttaaaaaattttgaatggtttacaatgcagaaaaataaggtttaaacaattgtgcttaccactggttaaaaaaaaacaattgcttaccacgtgtataagaaaaataattacgcatgcaacttatcaacttataatttgaatatataattttttaattagattgaattagattaatttgatataattgaaataatgacaaccttgaagaatgattagtattaaagtagttttagaaataaaattatgcaaagtgatttatacaagagtatataaaatattaaatatttagataatatcaaatttatttgataattttaaagagagtcatcattgaaattagagcgttgagacattaaagtatttagagcttctatgacaccacgtcttataattgatttgcgattccctataaattttataaactaaaataattaagtttcgatattaaattatatcaataacgatattatactaaagccaattttcaggagactccatattgtatatatggagtgggcttcttctccaaagaaatactataatgcacactaatttgaggttaatacaacaatg

SEQ ID NO: 277698 - DNA, 404 bp, Cannabis indica
ttttcttattattttctttgtattcttcactataaatacaatgttcaataacttaatcccattcatggattccctaaaaccctcttgtatttctacaacacactagtaagctataaatatattatattgctatatgattatatatgatactattactacctctgttttaagattcaaaagaatggaataagaaatcatatacacatttgtatatatgaaatgatccctttcaatataaactattgactatatgaacaacttgaattattcttatgatattcaaatgaccatataaaatttcttttccaagactcaccatgtcttaatgttgatatcgatcaaactttgtttttgataaactttctctctctcatatatatatattatatatatatatatatata

SEQ ID NO: 277699 - DNA, 740 bp, Cannabis indica
tgccagccgcctccatggctttttgcatggccagcattacctcttgcatcttttggttttgtgctttttgggctgcgatctcagcttcatgatcgacagccttttgtcttagaagcaccaacttcgagtagctaccgtcatcgtaggcgtactcatcgaggtttccctcgtaatcatcatcaggaattccttcttcttcctcggagccctcagctgctcttgaggctacgtcttcctcattcgggtcttgagcatcttctagagggcgaggttgacgagtgcttcgagtctccaccattgttgtaatgtaatgtgtgtttacagaagctttcttcagctctcaatgaaagcaccaaaatgttgaccgaggttttcggcaaccaataaaataataaaagattaaagagctgtaagaaattaagagaaggatttttacgtggttggggcgttaatgagccttagtccacgagtctgtgtatttatgagtgtatttaatacagagaatgttcttggtgagtatttactcttcttgcacttatgcaacccaaaattctcgaccccattaatgagctttgagggggtatttatagtgtttttggtggggtgattcccagaattatagtacatgtatttctgtaactatcaataaagttgggtgttcccaatgaatataccatgggtaatgcatggtcaaatccctaggtgttgtagggattttatgtggaatgtccttattgcct

SEQ ID NO: 277700 - DNA, 133 bp, Cannabis indica
cttgcatttggagaaatgctatgttctttccaaaacattggttaaagtaaagctcaattgagtgggagcgctgacataaacatggaatctgtagcctctatctggcaaacagtaagtaaaggatgatctcctt

SEQ ID NO: 277701 - DNA, 511 bp, Cannabis indica
taagcaatttacttttttacagaactcaaattcgattttatttgaattagttatgattttttgaagttttgaaaaaatggggagtggtgacacacgcttgtgcgcgcggctggctgctggcagcactctttgtgcgcccaaccagccccttgtgcccaaggatgtgcacctggatggtgtgcttacagctcgcaaattttttcattttcttcgatttttcatgctatttcatggaattaactttcgattttctgtgtagtattgtattttgatttttaattttcatatttcaaatctaattatcagaaataaattaatttgattttttaaaattaattttagatattagtgtaatttgattttaaaaataggtaaaaatcaatttttgcttacctcttttcttattgtttttaaaatttgattattttatcttaattttaaatctaaggtcagatattaaattccttttataaaaaaatattctattttaagtaatttgaccttatttaga

SEQ ID NO: 277702 - DNA, 549 bp, Cannabis indica
ctgccttgcttgggggtagacttcaggtcaaagaaccaagcgacctcgtggggagaaggagcatcccatccctgggaagcgtagaggacgaagagagggacaaatacttaatgcctttgggagtaatctgagccgggcagaggccggagaagtccgccacatcccggaagtacttatgcaagggcatcaacgccccttgctggccgtgagcccccgaccaggcacacatccccttatcaaggtttgtggcacaattgtcgtgggcgagaatgtagtagtccagctcgcccaggtatccgtcctggtcaagagtacggaggcgtgcctccgaaatcttggacggaggacttacgcacctggcgcccaaggcaccctgcctcctgtgaggaaccgcctcagcaagctcctcactgacgtaatcaacgccctcaaccaggacgtccccgtcagcatcaactggttgcccatcctcattgtactccctatagttagggggttcaatcgcttcctctccctcagcagcgggagggctgcccggacgcgcctcgt

SEQ ID NO: 277703 - DNA, 667 bp, Cannabis indica
aaaattcccccaaccggcagaccggttcccaaccggaagtccggttctgggtcaccaaccggtcgaccggttgccacaggtcccccagaactggaattccggttctgtgctgggaacccaaaaaatctcccctatgacctcaaaattcaaccaaactttaccaaactctccagtacacctaaacaatgcatatacaataaaacccagccagtatttcacagaaaaacacaccaaatcaatttatgccattaaagcttaaagctttgaactcaaagcttaaaattgcatacaacctaatccaaccattaaaaccagccacaagaagctaaaaccaactcaattaaaccctatgattcgaatcttaagcaagcctaaacctaacagccactaaatctcaaaattacaagttcaaactaacttttaaagcttcaaaacataacaccatagttctagggttacctttgattgctcctccttgaatccctagcttaaattcagagaatttggaaggaaaaattgatccttgctctggttttgtctcagccgaaaaagagaaagagagagtgttcaagagaaatgcaatttcctttaatttttgactttttccttcaaatgaaaaggaatgaacctaatctaatagcttgctgaataaaatggacaggtgtcc

SEQ ID NO: 277704 - DNA, 581 bp, Cannabis indica
gctgagatttctaaccgggaaataaagacgattctggagaaaacgatgcagagatcaaggaaagattggtcaagaaagttggatgacgcattgtgggcctatagaacagcgttcaaaatgccaattgggatgtcaccatatcggttggtgtttagaaaggcttgtcatctaccggtggagttagaacacgaagcttattgggcaatgaaaactctgaacatggatttaaaggctgctggacagaaaagattactatagctggatgagttagaggaatttcggaacaaagcttatgagaacgcaaagatttacaaggaaagaactaaaaggtggcatgaccgaaacttagtcaggaaggagtttcaacctgggcaacaagttctacttttcaactcaagactaaagttgtttcctggtaaattaaagtcaaggtggtcggggccatttacagtggtcaaggtgtttccttatggagcggtggaactgaaaggtgaaggccctaatactttcaaagttaacgggcagcggttaaagctctacttgggaggtcaaattgatcaagccaagtccgccatgattct

SEQ ID NO: 277705 - DNA, 705 bp, Cannabis indica
catttgattcaacacaaaagtttcaagaaaatgcaaattacagtgtgacataaactcaaatctgcatcgtaataaagagtggaccactcttgctgcttcgccatcctctccacagtcatcgttcttccaagtaacttgctctgcacaataagcacacataatagattacattttaaataaaaacatagatttaacaaagtttacagcacaaatacaaaagattcatgtccacttttaaatatcaaatttcataccgaaattctggtgggcataaaccaagttctctttgttccaatgccgttgcgcttcttctctcgaaaattcatgatttgagcaaagcaatcaatgacctgacatttacacaaacaatatccgttatgttgtcattcatacaatttgtaaatggcattaactaaaataatgaactacaaatttcaaagcaaccaaatgggaacttctacgtacactgtttgatatatcggtctccggtttcatgcatttgaaatacctccgctcgacctcaaccttcccaaaatgggctaacacttcactgaaatacaaaacaaataatcaacaacgaaacgaatgtactaatatcaactacgtacacagtaatcatgaaacatgagattacctcggatcattggcgctagagaaaatgtaacggaacaactcgtactgttgatttgagtaacccctcttcac

SEQ ID NO: 277706 - DNA, 875 bp, Cannabis indica
ttttttttttttttttaaattgagggtcttctgtgggctatgcaaatcaaaacccaagctagtcttgtaaaattttatgctgtccttcgtagggcagttactacctatttatttatcaggcaagattattgattagtattaaatgcagatccctccagaggatattcagtgggatggtgctgatttggttatatcgcatggaggaaaccacggtggccatggtcgtggccacaagaaaccctcgaatcgtggtggtgccattccaggttctggaagagggagaggaccaagtaaggtgcagccaaagaaagattttcccccaacacaaaatgggattgcaaaaaaagtatcagatgatattgaattacttaacacggatgcattggtcaaggaggtatgtatgataaatgtatttcagccaaatttgttggtatgttgttttctgtttacttagttacactcatttatttttcaggtggagactgttttcagtgcaaatcaccctgatccttttgagcttgaaaaagcgaagaaaatgctgaaagtaagacaaaatctgaaacatacctgttaactttctccctagagatttacagatttgtatgttatctttctctattgcaggaacacgaacaagcattgattgatgccattgcaaagcttgcatattcatctgatggtgaaagtggtaatatatgtgtagattaattttccttttattgttaactgcatttattttttcttcattggaacattaagatgacgtttagttgggtggaatgaaaacataagaatgagaataagaatagaatggaataaaatttaaatgcattaaaaaattgataaaaaaattctcaatgttatattagaatggt

SEQ ID NO: 277707 - DNA, 561 bp, Cannabis indica
ctcgaccaattcaaccccaaattgattcaaactttccagacctgttctataccttccctagaacatttctaaggcctcaaactaacccagaaatcacagattcaaaaatcaccattggagctcaagctttgagttctaaactcaaacttgagcaaatccacctaacaagcaatcaaactagcttaaaacctcttaaactagcataatataatctctgaaaacaaacaaaaacattaacaacaatacagcaacagatttccaacaatttcttcaaaatttacatttttgagctagaaaattcaaacttgaacaaggaaacctacatgccttctaacagcttaatcacttcaatttaacatgcttacaccacagaaattaaccacaaaatcacagcagcaaccatatatcaaaatcatgcatgcatttcatcaattttacttaaaattcaagaaaacacaaaggaaagttataagtgatcaaaccttgactaagattacacaaagatgagttgaaaatcacaaggatttgaggagaaaaaacccagccctagcagccaagtct

SEQ ID NO: 277708 - DNA, 559 bp, Cannabis indica
tgagtggaacgaattacaggtttctaaatcacatcaatcaaacactgataaacgatacgctaaatcacttcccggggactaaaacttgaaactaacagtttccctatcgatggataacatggcaataccctaaataacacaaaaatgggaaaaaagtagggttcccaaaactgccccaaccgatagaccagttccccaaccaaaatttcggttctgtagggtttcctgggagccaaccgaaattccggttcctacaagccctactgaacaaaaattccggttcaatgcaggaaagactaaaaatttcataactcgaccaattcaaccccaaaccaatccaaactttccagacctgttctatacaccctagagaacatttccaaggcaacaaaacatccacccactcacagaaacaaaacttgccattaatgagccaagcttgagttcaaaactccaaagcttgctcaaacaacataacaacccctaattcaagcataaatcaacaaaataaccatatttaaaccccagaacacaacaacaaccaactacagcaaccaca

SEQ ID NO: 277709 - DNA, 614 bp, Cannabis indica
caacaaagcctaccccatctactgaaaagcctcctcaactagagttaaaagtcctaccagagcatctcaggtatgaatatttgggagaaaataagacacttcctgttattgtggcttcttccctatcttctgtagagacagataagctattacgggttctaaggaagcattcaaaagccattggatggactttagcagatattaaagggatcagcccttcaactgtaatgcatagaatcttaatggaggaaggagtgaagccaaccattgatgcacaacgtagattaaatccaccaatgaaggaggttgtcagaaaagaagtcttgaagtggttagatgccggggtagcgtatcctatttcagacagtaaatgggtgagtccagtccaagttgttccaaagaaaggagggatgacggtggtgaagaatgagaagaatgaactcatcccaaccagaactgtcacgggatggagaatttgcattgactaccgaaaactcaacaaggccacaagaaaagatcactttccactcccattcattgatcagatgttagacaagttggcaggacaagagtactattgtttccttgatgggtactcagggtatcaccaaata

SEQ ID NO: 277710 - DNA, 526 bp, Cannabis indica
agaacataaaagaaaaacttcaatcgtaaagcctttttaatcgcatgcatatcatgtatatatatacactatgtaaattttactcccatgcagaaatttcaatagtataagcatatatatatataataccacagccaccaaatgcaggaaaaataatttaatggaagatcaacactaccatatattctcaagaactaatttagggatgttcttgataccacatgttagaatactgtaaactctgaatatatccctaattaattcatgagaatcaaataatagaatatagattagcggaagcgtaccggagtccatagaatcaattttgtaatgacctttgattggtatgatcttccaatttgcatcaaaacctttctctgaaacttttgctcttggtgatggggatacaagagtgaaaagatacgatgcaaatggggaccattacctgttatattaccaacagacaaaactgttggcaatattattgactatttctatttggtccctcatcaatatagaaattgtc

SEQ ID NO: 277711 - DNA, 836 bp, Cannabis indica
atggttgacttttgactttagatcatcctccaattcaaaagtactgcagattcatctttgtcttcctcgttcacagtctataaaaaagaagcccaccccaacattcagtcactcactactctaactctgttaactgtttacaacctctttctgtatttgaaacaaaaatggcaacagtagtgagaaggactaagctgggttcacaaggtctgcaagtctcggctcagggcctgggatgcatgggcatgtcggccttctacggtccacccaagcccgacacggacatgatcgctctcatccaccacgccattcattctggcgtaactttcctcgacacatctgacgtctatggcccattcactaacgaaatccttctcggaaaggttgcttctcttcttttccacacttatttcgtattatgttttattctttccgctgtttttgtctgggactttgggactgatcaacttttgaattttcaattgaaattaaattatgggtaattaggcgcttcaaggggtgagggagaaagttgagctagcaaccaagtttggaatacgctttgccgacggcaagcaggagattcgaggtgatccggcgtatgttagagcctgctgcgaggccagcctgaagcggctccaagttgattgtgtggatctctattaccagcatcggatcgacactagtttgcccattgaagtcacggtctgtttcatcttctttctttctttttcttttttccatggttttccaaaaattgattgaaagtattagtcaaaatagatttaatgagtcaagttataaattttcataaagtggtattaaggtagttgtaa

SEQ ID NO: 277712 - DNA, 536 bp, Cannabis indica
ttttatcatcatttttttatgttacgggtcatgttcgtgtctaccatctaaaataaatttcaaaattcaacataacacgaacatgacatgatgacattaaaatcaacaatttagtttacaacccgccaacacaatatgcgattttgtgggttcaacacgacatgaacttattcgagtcgtgttcgtgtctgtgttttttaatttctttgtgtcacgtgtcgtgttcgtgtcagcaactttttagtaaatttaagacctcaacacaacacgaacacgacacaccaacactaattgccactccaactgtaaagcatgacgagcacaagaaagttcaatcccaatccaaatggcacatgtaacattatttacaatgcatgattggctacagtatgtgctacttgattagcatccctacaaataaaattcaaaccaattacacaatcatgtgtaatattaatttattttaatatgaattaaaaaaatgtttattaatttatttttgagtaatttatagcgtaaatacttaagtttaactc

SEQ ID NO: 277713 - DNA, 843 bp, Cannabis indica
caacaggaagagagacaacagtccaagttttgtttgcaataagtgcaacagtttctgtatccatagcttttacccatacgggaaatttagaagcttgagaataagaagttggttcagaaaataaataagcagttaaaatggcagcacgaaacttaggagaaaatttgtcataagagataaaatttaaaatgggatgtgaggtagaatactcacaaatgtagtcttgaagatggggtggacgaatgaccgttcgaccagatgttgtggtgatgttggattcacttgtaggggctggaataaccgctggtggtggcggtaattcagcaggaatagtggcaggagtagccacatgttcgggcggcggtggagggtttatagggccagggaccgcagcctttaaggagcctgggaaagaccactaggtgaaccattagtgtgggaaaaaaaagcatcaatattatcattagagcatgtatttttaagaggaaaaatatgttcataaaaaataacatctctagagtgaaatatttgatgtgtttcaagatcaagtagagtataagctttcataccaaccgggtatccaatgaatgcacaagcccgagatcttggggaaaatttatgccttgagctgtccaaagtggaagcatatgcaagacaaccaaaggtgcggagatgatcataagagggcaacctgttatacaataactcaaaagaagacttaaggttaagtaaaacagatggtgtgcgatttagtaagtaaacagcggtattaataaaataactccaatatccaagagatagatgagattgaaatgcaagagagcgagcaacatttagtatatg

SEQ ID NO: 277714 - DNA, 510 bp, Cannabis indica
tagtagcctgatagtagaatagccgcatgctttgtttttaatttccaaattaagcgacattagtaagctctctttgatcatgacctgacgtgccaactctttgtttcgcaggctgttcagactagatggacgccaggcggaataccaggagccagggcaactcagtagggtcaaatcaaggtcagggagcccagtttcccccgcatgctaggggccgtggtagaggtcccaggggcagggctcgtggtcggggtgatgagaacccgccacaggctgcccaggctgcccaagccgatcaggaagcccagaattgggagactaggtttgctgaaatgcaagccaggatagaggaacaagatcttgggatacagagattgaggtagaagggggctcctgcagtgcctgtgcaagaagttccagtggcacccgtgttaggctaaaattagtctaagtttcgggtcatattttcggttagttttcactctttgtttctagttttagggctatatt

SEQ ID NO: 277715 - DNA, 585 bp, Cannabis indica
aacggcctgcctttttttcctggcagccatggtgatttctggtttttcaccccaaaaaccaatcaaacctccaccaaacctaaccaaactttccagaacagtatattatggcaattataacataaccaaacaactatttcaatgcaatatatcaatttgctcaaaatcacacttcaaagtgaagaaaaactaaattttctctcaacaaccatatccaatttcaaccagccattaaaaccacttaattcaaacttcaacacactccaaaacaaacctaaaaacaccatctcaaaccaaactaaacctacagccacgaaatcccaataccctcacccaaaaccaacctaaaaccaattaaattcttaagacaaagcatagaacttaccttgattgcttctaggttgggcctaggttctacaagctgcttcaattcaagaataaagggtgaaattttgatcccttgctggctggttttggttcacacgaaggggagaagaagaagaagtttacttgccttgtaagctttctccttaaatagggtttttcatctcatttcatttcatttcttttgtttttttctttctt

SEQ ID NO: 277716 - DNA, 504 bp, Cannabis indica
gtcaccaagttgtaaggcctgcagacttaaaagtaattttagttagtacatattatgggttaatatttgaatttataaaaaaaaaatagtattctaacctgtgcagtaggtatgtcattgccattgttttggttgttcaatatagccttaagattttcaacttgagattctaaatcatctacttttgactctagagcatctacatacttattttgatttcttttccaagttgatttatctttccattcatctaacgggcagacaccgaatccaaacatgtgcattgatccatgtttttctctgcccatcacttcaaaaaatacatcattcatacttttttctttcgatgcatcttcattccgttcttctttttcttgtaattgtaactatcattaatttaacattgtaaacatatcaattaaaataagattaaactagctagcatgaaataatacataatttaaaaatatttggatgatcataccatagcctcttttgtcttct

SEQ ID NO: 277717 - DNA, 533 bp, Cannabis indica
tttctctcaacaaccatatccaatttcaaccagccaataaacccacttaattcaaacttcaacacaatccaaaacaaacctaaaaacaccatctcaaaccaaactaaacctacagccacgaaatcccaataccctcacccaaaaccaacctaaaaccaattaaattcttaagacaaagcatagaacttaccttgattgcttctaggttgggcctaggttctacaagctgcttcaattcaagaataaagggtgaaattttgatcccttgctggctggttttggttcacacgaaggggagaagaagaagaagtttacttgccttgtaagctttctccttaaatagggtttttcatctcatttcatttcatttctttctttatttctttctttcttttttttttattattttataataggcagctaaaaagaaaagtcaaaagcaccatgaatttactaatctacccctcctccataatttttttttttaaaaaaaaaaacccctaggggcattttggtaatttcactaattctcc

SEQ ID NO: 277718 - DNA, 510 bp, Cannabis indica
attctaccaaaatagtggaaaggacattccaatactttaaaatgcaaccgaacaaatgaatggaatgaaaattgtttcctttccattccattccgtttcattacctccaaccaaatgccaccttagaaccaacatgacagatttaaaagtgaagcttagcaaatgaaataggtcacaagcgtgcaaactaaaacatactcgccatgtagaaccatcatatcatccataagcacttttctcttcttggcactagcacggggagtggaccgagggcgtttcggttttttttcaggtacaggtggagtgggcttcatcttcaaaactgaagattttcttccaactgatgcaacaagaaatacaatttagtcagaacttctattaagtacatcagcatgaatttgccaaaataatacgaaatattaatcaactcatctgacaagtcaaacaaaataagacaataaacaagtccacttcaatacctaggatagaagacagcaaatcatatcatcc

SEQ ID NO: 277719 - DNA, 293 bp, Cannabis indica
tcatccgtgcattgatgaaattccttgtcgcttcaaagcgagattgaattgatgccatcccgtatcattcagtcaacaagttcaagatatctgcagccgtgagagtgttagcaaaccttgttttcaaggtatcaacctgttggaaatattttaccaggatctagatttactaccatgtatgtttcatgaacatcgtaatatgaattctaaaacaatgaaataaacacataagggttcaagaaaaccttacattgggtgcagcagaatatagtgactccttccattcagatctc

SEQ ID NO: 277720 - DNA, 752 bp, Cannabis indica
tattttcaattttttatgttagattaatatttttataacttaaaattttctataacttagttttttattggaaaatactccgctccatccttactcccacttaggggacttttcgccccatccccaatggagataacagggataggattaatttttacgggaatgggaacggggagtactcccgccaatttctcgctctgtgtacatctctaaatttattattaaaaaagttgatttatgtggttaaaggatattagtagtattaccgctaatatcctttatttgaaagggacacatttatttcatatttaaacgatatggcgtttcaatgaaaaacaacatttatagcttatgtaaaaatgacacttttttaagaaacacttacagtgctgaaatcgaagagagagagaagaaacttttttctattttgaaaagtacatattttatttcattaaatgacatgtcacttattgatcaatcaaagagagattcaacaactaaaagaaagattgattatttgggatcctttctttcttcaaacggaacgaacgtgagaagcaaatgattattcatctacttccggaagaaatcgaaaaatttcttgagaatcctacaagatccattcgttctttttttttttttcttgacagatggtcagaacattttaataaaaaacgacatcgtttataggctggttttgtctaaaaacgacacaatttaagaacacaatcgaagagagagagagagagaga

SEQ ID NO: 277721 - DNA, 569 bp, Cannabis indica
aaaatattttatttatcatttgtaaataattttgttggtgcaataaattttatttgttttccaataaaaaactgtacatatatgtgaaatatatattatataggcagtattaaaatatatatatataatataggcagaatatgcatgtattaaaaaataagactttttatcccagtttttatagaaaaagtgggataaaagggtacattttatcccagttttttcataaaaagtgggataaaatttatcccactttttaccaaaaaggggataaaagaggtacttaattttatcccggttttcatagaaaaaactgggaataaaagtatccctttatcccggttttttaaataccttttatcccactggcatacatcccggtttttattttagcgaaaaccgggataaaaagccttaaaaaccgggataaaaggccttctcttgtagtagtgtatgtttttgtattattttaagtcaaaccctaattcttttcaaagttgtttatctttaacccgctgtctctctcttttcttttctctcttcaccggttgattcttgctccgatcgtt

SEQ ID NO: 277722 - DNA, 593 bp, Cannabis indica
taaaccctatacaaagtggcaggccatattagtggataatgggcctcactttgcaattttaccattgaaaaccagctgggttctaggatcatagaccctaatctgagctcagcagcatttgttgattactataaggagttgctgggaacaagcttggctaacagaaggcctgtcctcaagaagatagttagcaggggtgctgtcctgtcaacacaacaagctgaagatctgatgttgaattttactaaagatgaagttaaagctgctctctttgacattccaggaaacaaagcccctggtccagatggtttctcgagctttttcttccaagattgctgggagatagtgggagatgatgtatttcaggcagtgacttcttttctggaatcatgtaatcttcttaaagagatcaatgctacaatcttgaccttagtccccaaaatgaaatgtcctaacacagttaaagattttaggccgatcgcttgttgtaatgttatttataagattgcaacaaagcttttgtgttctagaatcaaactaattctccctaatttagtctccttgaaccaaggaggctttattaaagggagatt

SEQ ID NO: 277723 - DNA, 340 bp, Cannabis indica
gaagaaaacgaaaaaatttgtaagtggtacggacagtatgcattgcatattgtccgcgcgcgctcacgagggtgtctggccgaggtttctcggcgctggaggctgcaagcagccattccgcgcgcgcaccaggacgatttcagacaaggcccccatgtctgaccgagaaaactcggacacaagcctgtccgaagcccacgcgtccgaggaatgaggctcattcgtgcgcgtatgtggggtgatgccaccgtgatattttccgattttcgaaaattcataactaattcaaataaaatcgaaattgagttctgtaaaaaagtaaattgcttaattttttcca

SEQ ID NO: 277724 - DNA, 541 bp, Cannabis indica
tgaattctggatcttcacttcaatctctgtgctcttcctgccgctctcagctgtattttagggtttctaatcgctctcccagacttccaatcgcagttttctatttataactgaaatttagggttcgatggacgaaaatgcccctggtccgtacgggatctcgccgcggctaagcttcctctcgccgcggcgagataattgaaaataaggggtctctctgtatcttttaaatggccgcggcgagcctcttcatcgccgcggcgactgaagcctcatagattttcgaaatctagccgcggccaggttgtgtttagccgcggccagatgtgcacaattactcagaaattgtgttttcttcggctcagcacatcttttaacgaatttctgcacccgagacctcttttattccaaagaacctgaaaacatagaaaacaagcgtaattccgtcccaacacagctaaaaacgcacataaattagatccaaaacataggctaaaaatagcctaacagttttatggcctgaataaaactcatttcaata

SEQ ID NO: 277725 - DNA, 337 bp, Cannabis indica
tacttgtgagtagatctaagatcttggtaaaataatttccaacacttaacattttttcggttcgattcagccaggcattgtcaaagagtgggacatatctagtggaatcatgggcgtctttacttcacctctttgagatttgttctctatttgaattgaaatttccatcgctcctcctagaatgtggaatttcagttgtattggttctttgtgatccctaaggttctttttcagggcgatgagtagtctcctcaaggtggttttctcaatttcgaggggtgttatctgttgggttttatgccctaaataaaactctgtttcaatgtaatccagatta

SEQ ID NO: 277726 - DNA, 513 bp, Cannabis indica
ccaaagcaataaaaccacccagtaagcacagatacaaaaaaatgccattaaagctccaagctttgagttcaaaactcaagcttggctaaagtccacaaacatgcatcaaaaccagcttgaatctactcaaatatacataaccaaacctctgaaaacaacagcaaacaaataccacaagcacaacaagctatttcaacatttcaccattacaatcaagattttgagtcaaaattccaaacttgaacaaaagcaactagcatgcatcaaaacctatcctgtttcactcaactaaacatttttaaactatagaaaacaacaacaacaacaacaacaacaaacaacaactacactcaaccaaattcaccaagcatgcaattatttttttcttcaaaattcaagaacacaacaagaaggtttcaagaaccataccttctttgcttgagatcactaccaactagctgaaataacaagaattacagagcaaaatcccagccctagcagccccaagcaaac

SEQ ID NO: 277727 - DNA, 877 bp, Cannabis indica
agacacaacctaaaaacaactacactttctccatgcaaaatcatatataatctgaaaatcatatacaaaatcatatataatcatatacaaaataatcacattttcgaatagaaaaaacaacaaaaatggaaaaataatctgaaatggaaaaaaaaaacccaaacagtcatatataaatctgaaatggaaagttctctcaaaaaaaaaaatactgaaatggaaaaaaaaaataaaagaaaatgaataaaatttcttacatgcgttcgtctgctgcgcctaagagggaggacctcgcaccggtctctgcctgagagggaggacctcgcaccggtctccgtctgctgcgccggcttcagctggggaaaattttaatgtctgcaggttgagggtatcgtgcgagagagctctaggtgtggggatacaatttgtgggggaagaattactttagggctgctgatatatattttattttttttataaataaaatggtatagtgacgtgccacgcgtgtgaccaaagcggaatccccacgcttttgcgcgtcgctaaagccacctttagcaacgcgcagaaagcgtggggatccctctttggtcacacacgtggcatgtcaccataggccttgcttctttttttttttttaatttttattaaatttatatattttgggttttattttttagtggacactccatattttaagtggacacacattttgtcataataaataccgaacatttagagtctaatgttgtgtgtcactaaaaaccaactcttaatttttagttgtacacacacttttatctagtgtcactatatagtgtcactaaaaggcctaatttagggacatacctcacaccagtaagtgatgtaattg

SEQ ID NO: 277728 - DNA, 1535 bp, Cannabis indica
taacaagaaaagaagtaaagtttatgtgggatgatagttgcgaagaagcttttagagaattgaaggaaagattaacttcggcgcctgttctcactgttcctaatagtgaggaaccatatgtggtattcactgatgcttcaggtactggattaggaggtgtcctcatgcaaaatggcaaggtggttgcctatgcttctcgacaattgaaaccacatgagaagaattaccctacgcatgacctagaacttgctgcggtaatctttgtcttgaaaatttggagatgttatttatatggcgtaaagtttgagttatactcagatcataagagcttgaagtatctttttactcaaagggacttgaacttgaggcaaagaagatgggttgagtatatggaggactatgatttcactttgcagtaccatcctgggaaagctaatgtagtagctgatgcactaagtagaaagcctcatggtactttggcatgtttggctcttgaggactggaaaaggacaatcacaatgggtgattataacttgcaatactatgaaggggaagaagtagcttgtatctctaacttagtggctacaccagtactacttcaacaagttaagcaacgtcagtggcaagatgaaaaactaagacttatttggaaccgaatccaggatggtgagcaactagatgggtggacagttaatggtgaagggtatctataccatatgggaagactagttgttgcagatatccctgaacttagggagaccattttgattgaggcccatagatccaaatttgctgtacatcctggaagtacaaagatgtaccaagatttaaagagacaatattggtgggaaggaatgaaaagagatgtggccagctttgtagctaagtgtatagtatgtcagcaagtgaaggctgagcatcagagaccctcaggtttacttcaacctttgcctataccagaatggaagtgggacaagattaccatggactttgttactgggttgccattgacacctttgaagcatgacgctgtttgggttattgttgatcgtttgactaagtctgctcattttattccaatcaggaaggattacaagcttaccaagctagctcgactttatgtagacaatatagttcgactacatggagtgccttcaagcattgtttctgatagagatcctcgatttacatcaaggttttggaaggccttgcaacaagccttagggactgaacttcacttgagtactgcccatcatccacagacagatggacagtctgagaggaccatacagactttggaagacatgcttcgctcttgtgttttggattttggaggtagttggggagaacatttgtcactagtggaattcacatacaacaacagctaccaagccagtataggcatggctccttatgaggccttatatgggagaccatgcagatcgccattgtgttgggcagaaccagatgagcatgtcactattggaccccaaattatcactagtaccactgaaaagattaagggaatccaagaa

SEQ ID NO: 277729 - DNA, 514 bp, Cannabis indica
ttagtaaaaacttgattagtgtttcatgtttacaaacacagttttatcaattgaatttttcgagttctatttgcactatttctcgtaatggatttcaattatgcgttgcttacatggagcaagggctttatgttttgagaccgaaagtacaaattgtgcttaataacgaacttttcaatgttgctaaacctagaaaccataaaagaaaagagtttgataataataatgaaacatatctatggcacttgcgacttggtcatataggctatgacagacttcacaagttaaccgaagatggtccattgaaaaatatcgtcttaggtgaattactagtttgtgaatcttgcctataaggaaaaatgactaagcgttctctctcttcaaatggagagcgtgccaaagaacctcttaggttagtgcattcagatgtctatggacctataaatgtaaaagccaatggaggttatgagtatttttttactttaattgacgatttctctagatataattttct

SEQ ID NO: 277730 - DNA, 880 bp, Cannabis indica
  modified_base (737)..(737): a, c, t, g, unknown or other
aggggtgtgaatgtgattattcaaaagttagataacttaacaaccacattaattaaaaacattattaattaatattaccattaatctaataatcagtccccacactaaaaaatatattaattaccataaatcaaagtcggcttacttatatatacttttttatataggttctttattttgttacacctactattacttgaaaattttagctatatatataactttaatttaatttagttgacttttattctaaatctaataaataaactacaataaaataattcaatagttgatatcatattcgatattgtgttttgtaaaagttattaatttaattatttgttttgtacaatgataaattaaattctgtattttttaaaatgatacaaaatagtactcgaatttaatttttgataatatatttttttaatataactaacttgaagatgatttctagcacgaacatatgtagagaatgtaccatttgacaaaaaattaatttaagatactattttaaaaaatataaaatttaatttgttatttaataaaacagatagtacaatcgataaatatatatatatatatataaaaataataatatggtatgagaaatgttaatgttcataatatgttacttgtatatcttgatgtagaaggagataaaaaaatattaccaccaaaagaacaactaataaaattatatatataaatatttaaaagaaatatatattactatntaattatataagaaatttacaatgtatcattttaaaactgatgcactgattcatctgtatttgttttcggtattcgtaaataaatttatactcaatttttttttttctattagtctatgtacgttatagttatttaagtatat

SEQ ID NO: 277731 - DNA, 746 bp, Cannabis indica
aacagatttaatttcattacttggtcaatatgttatttggttcatctgatcatttatttgtttatttgatttataaattcatccaaatccttatcacattgatattcttgtttattgtattgtcaacacagtggaaagtaatcaagattgtgtgattaaatgtgttcctatgatttatcagtacacatggtttaactgataagataatctacaatgtagtttatttgcactttggataagtgttatgtcctttccagggcattagttaaagtaagcttgagttggacgtacggagtatgcattggaagggaccgatattaaacttagatttgatataataaacttaccgtaatatctatttaattcaatgtcacctagttgatcttagatcaaatgatctcaatcgtgagttggttaggttctagttcaattatattatttgtgttcttcagtctattcgttaaagttgaccaatggatcttcttgtgatatagattaaggacatggtagaatctatagcttttatctggacatagaagtgaaacgataattttttttgagtctttgtcttaatagagataaatgatagagcgctcattctagtgattatattagttcattgaaatatcatttataggtagctaagtgtttcaaggataaaatacattgaagggtgtaacggtaaatttgtccctactcagtgtaaatcatctatagaggatcattgattattaggattataacaa

SEQ ID NO: 277732 - DNA, 469 bp, Cannabis indica
gtcgataagggtgtatttaatactcttagactacaccaaatcagatttctagacttgtcttagagaagtgtaaaaacctatctgacctctctaagtctaccagagagagactgaatgttaaagttgtagaaaagatactttttcaatctaaggaaagttctatacattttgggcatcgttccaacatttattaaccactagtgttacttcttgactaacacagaagtaattgccaaaaagtaaagaattcagtatccctagaggagtagacatattgagaggaatttcacaatatcaagaattttgtgattaaggaaatataatgatggaggaaatattgtattgaatccaacctgtcagatcctattacggagagaatactacatactacacatgatttggatataaatgtgttgagattatttgaaatgcactttttgttttacagtagtgcaagtgggagtttgtt

SEQ ID NO: 277733 - DNA, 525 bp, Cannabis indica
atacagattataaaacatatttaatctatctagaaacacgtacaatttattatccatatttatgtactaatttacacttaaaactgtatataaaatactaattatttaaataaataaaataacaaaacatctcaacctagtcttaaatttatttcatagactagaattatattgtaacatcatattcacagttcccaaacagtgaacacaatttttaatatttactctatttaaaactcaattaaatagttaattagtcacaaataattataataaatacctacagcaactaataaattataaaaacctttttattttgtaccatagatagtaaatagcactacaaaaatacattttactgttttagcatcacttaactatttttcataattattttaagtattaactaaataaattcatgaaaaatacaaaaataatcgaaaaccaaatctaaccattctaacacagtttatagtctgtactaagccccagataatttactttgaattttctgaacaatctaag

SEQ ID NO: 277734 - DNA, 551 bp, Cannabis indica
tctgtcacttttggggatggtaacaaagggcagattgctgggagaggtgatgtgaatgtgaatggagtagctcagctaactaatgtcctatatgtgagaggactcaaagccaatctcatcagcatcggccaattgtgtgacgacaacctctctgtaagtttcactaaaactcaatgtttagtttcatctgatgggtgtgttgtcttaacaggaaacagaacagtagaccagtgctatgctgtatgcaataccatagtgtgcaacaggaccttcttggacaaacctgacttatggcactacaggctagggcatttgaactacagagatctccaaagattggtgaagcttcaagctgtaaggggaattcctgacatgaaagtgtccaaggagagagtctgtggtccatgtcagcttggaaaacagcataagacacctcatcccccaattaatagacttctcacctctcgtgtgttggaactaatgcatgttgacttaatggggccaatgcagaatgaaagtatcagtgggaaaagatatgtaatggtcttggt

SEQ ID NO: 277735 - DNA, 589 bp, Cannabis indica
aaaaacatcaaagctaggctccaaaccttgagctaaaatcaacacaactccatcttcaaagacttgcacaatcaagccataaactccaacttcaagcaaacaatttcagagctagaaatcacataattaacactaaatatcacccaataattcactcaaaaacttagtcaaagcaaaaatcaaaagctctagacacaaacatgctcataacaacaagtgttgtgctttgtgccctaaataaaactctatttcaaggtaatcttttctattcaattatcaataaagaaaaagatttaatttcattacttgtttaatgtgttatttggttcatgtgatcatctatttacttatttgattaacaaattcattcaaacccttttcacattgatattcttgtttattgtgttgtcaacacagtggaaagtgaacaagattgtgtgattaaatgtattcctagatttatcagtacacagggtttatctgatatgataatctacaaggtagtttacttgcaccttggataagtgctatgtcctttccaagggacattggttaaagtaagctttggttggatgtatggagtatgcat

SEQ ID NO: 277736 - DNA, 589 bp, Cannabis indica
ctgaaatgagtttgtatggaataccaaatcgacaaattatggagttatagacaaactcgcgcaaattagttgctgtaatggttgcgagtgctttggcttcggcctatttcgtgaaataatctactgcgactaccgcatatttgactccacctttccctttgggtagctcgcctattaagtcgatcccccatacttcgaagggccatggacttgtgatagaatgtaggttactcggaggttggtgggtatatgtggctatttgctggcacctgtcgcatttcttcgcaaaagcgagagcatcttgtcgcaaggttggccagtaatacccttgtcgcatgatttttaatgcaagggagttaccccctgtatgattgccgcaaattcccccgtgtacctcacgaagtatataatcgcaatcttccccgctgatgcatttgagtagcggttgactaaaacttctgcgatacaacctttgatcatacattacataacgggcggctcgttgtcgcagctttcttccttctactttgccatcgggtaagacgcccttttccagatatgcgacgattggagttatccaggtgacctc

SEQ ID NO: 277737 - DNA, 700 bp, Cannabis indica
aaagctcggaaaatgagaagaaaggcagcacggtacatcatcgtagacgggatcatgtacagaagaggattctcaatgccattactcaggtgcgtcacaccaaatgaagctgcacggcttctatatgaagttcacgacggattctgtggaaatcatgcagccggacagagcttatcaaagaaaattctaaggcaaggctacttctggccgacgatgattgaagattcgaaagcttatgtcaagaagtgcgacaaatgccagagattttcaaagataccaagagctccgcccaacgagctgacacaaatgcaaagtccgtggccctttgccatctggggaattgacctaatcggacaattacctaaaggtaaaggcggagtgcagtacgcagtggtagcagtcgactactttactaagtggactgaagccgaaccactcgcaactatcacatcaaagaaggttcaagactttatagtgaagaacatcatatgccggttcggactaccgtacaaaatagtttcggacaacggcaagcagttcgacagtcaatctttcactgatttctgcgcgaaccatggcatcatcaaaagcttctccgcagtggcacatccccaagcaaatggtcaagttgaagcagtcaacaagaccttgaaggacacactaaagaagaaacttgaagatgccaaaggaaattggccgg

SEQ ID NO: 277738 - DNA, 569 bp, Cannabis indica
gaaatgaatctcaaaagatgagagggaaggctgcacagtacatcatagtagagggaattatgtacagacgacgattctccatgccattgtttagatgtgttacctaagaagaagttgcacgaattttgtctgaagtgcgcgatggattttgtggaaaccacaccaccgggcagagtttatctaagaaaattctaaggtaaggttatttctagccgaaaatgaacgaagattcaaacgcctacgttaaaaaatgtgataaataacaaagattttcaaagatacctcgagctccgcccaacgagttaactcagatgcaaagtccttggccttttgccatttgggaaattgacctgatcgtagacccgtaccccaaacttgggtccgagtccgagtttggatttgagtccaggaactggaatctgactaggacctagacccaggcccggactgggacgcagacccgaatcaaaacccttatcagactcaggacacgaacttgaaccccgacacggacttggaccgaaacctggaccaaggacccagactgggataggagactcagacctaga

SEQ ID NO: 277739 - DNA, 826 bp, Cannabis indica
agcagaaggtgagcaaaaagccgagcaaaacgaaggctccttccactggaacatctgcccaacttcctcattattccagcaattcaagtggcaagcgttcaggcaacaaccacaagcaaggaaacggaaagaagggaaagttcaccgaaaagaccggacagaatccccgtgatcatgccaaacacactgcattcactctcttaactgaagatatagagagtgtgtatataacaactcagtcattaattccgtacaggaagcccgggcccatgaagaaagataccaacaaaagggacttgaagcgggaaatagaacatctgatcaagaaaaacaacccgcacttacagaagtaagtcaaggccaaccaaggtcagaacaaccagggtctgttgcctacaccaatagatggacacttgcaagtcattattggaggcccacacatcgctggagatacgagcaaagctcgagagagatatgcccgaacagctcagtacgagtaagaagaagttatccaggacgtggaagagaggaaacccaaagttccaggagcaggagagccaaccataacttccaacgatgaagatgttgtccagatcagattcccgcacaacgacccgctagtcgtggaagtccagatagcaaacaaaatggtggctagaaccatgatcgataatggagcttcttcaaacattttgttcaagactgcttacgagaaaatggggctccagctcaaggatctaactccatgcctccagcctgtctacggtttctccggtcaaggagttgcacctctaggacaaatccagctacccctcacagttggaca

SEQ ID NO: 277740 - DNA, 760 bp, Cannabis indica
gctgtcacggaacatgctgtaagtgccatattaatcagagaagagaataatgtacaacacccagtctattacatcagtaaaagactcattgaggccgagggccgatacccattaatagaaaaactcgcctactgccttatcctagcaacaaggaagttgaggccttattttcaagcccatcctgtttgggtatacaccgaccaaccactacgctaaatactgcaaaaatcagacgcttctggacggctactcaagtgggcgatagagttgggtcagtacgaaatcactttccaaccccgaacaacaatcaaaggccaagccttggcagactttgtggtagaatgcacaggcaaaaaagaaggcattccaaaaagcaaccccgagccagtacaaacacctcagccaagtaacaatgaagataagccgacctggaaactacatgtagatggatcagctacagatcaactatctggtgtaggaatttcccttgtcacacctgggggcagcacctgcacgctgcagccaagttcgggttcaaagcatctaacaacgaagccgagtatgaagctctaatcgctgggctaagactagcccaggagatgaaggccgaacacatcaaagtctacagtgactcacagctggtggtaaatcatgtatcgaggctcggggagaaaagatgatagcatatctgagcaaaaatcaatgatctgctcgcacaattcaaaagctatggtctcagacaaattccaagagaagaaaa

SEQ ID NO: 277741 - DNA, 569 bp, Cannabis indica
aacctagaccgggacccaaaccacacataaccgatacctggacccagaataaggataggcacttgggaaacagaactaggaacgggacgtagttctcgatccagactcgaactttaacgtaggacccagctcgtgacccgacaccagacaagtaaccagattcagacccgagattggtatccgaatcttgacccagggcttggacaaaacccatagtcggtgtctggatttaggacccagcccagcacccaagccttgacaacgacccgaacccacacccggaccttaacccagtcccaaacccaaaagtggaccagaacccgtaccctgtgaccaaaaattggaaccaaaccggaagttgatcgggactggaactaggacttggacttggaatcataactgaaattggacctagattcaatacggtaaccggaccaggacccggactcctaattagacttagacccgaattgggagccggacccggaatacaacccaaacctagactcaggacccgaaccaaacctgaactcataaccaatcatggaaccagactagggacacagaac

SEQ ID NO: 277742 - DNA, 508 bp, Cannabis indica
gcagacagcacaggtcgtcaacatacttatgaagaaatgtttgcacaatgggagtacatgactaaacagatccgtgccctaaagaactctctagagcaagtggagactgaaaaaggaaagttagaagacactgtcaaaaatctcaaccgacttcttgatgaaaaggagaatgagatctataaactcacagctgatctaattcgaaccaagcaagctttacagttcattcccccaggcactgctgctatcaatcaaaccctacagcttcagaagccctatggtgatcgaacttcattaggatataagatgctatataaacaagggaatgacctgtctgttgagcattctttaccctccaatgtcaattcatcaaagaaggaagatgggttacctgacacctcaatcaccattaacgaatctgactcatctgagaggagacaggttccaactggacccatcaaactcaagtttgaaggaaggaggactgatgctgacaatctaatacaga

SEQ ID NO: 277743 - DNA, 708 bp, Cannabis indica
atttgggcctcttcaagattgatgtatttttggactctcttctggaaatcctgaaggtttgcagctccttcctgttgtagttcgttccagaatggagtccctgtacggatgcctgcctggagaagggcaagctgttgtccgtcatcaactttcttggtcttcgaggcttcctcccggaacctctttatatagttctttaaggtctccgtaggcagctgcttgatgttagtcaaggcgctgacctccagattaacctttcttgcggcgacaaactgtctccggaagttggtctgtaacttattccaacagcccacggatcctggctccagtttcttgaaccactcctccgcggacccgcttagagtaagcgggaagcacagacatttagcgtcattgctgactctcatgaccgtctgacccggttgaaccgtgacagatggtcgcttggatcggagttcccggtataagctgccatttcgggcatcttaaaattcttggggagctctgcttccaggatgtgcttggcacacggctcccggtcctcacagtctgagtcggagtcgtcgcctttctgtctccgggagactcgggcgatatcttttcggagtatggcgagttccgccatgattccttcgtttaacgttcccgtggagaccgcgggtccgtatttcttttggtcaaggtgatcccggaggtcaccttgattcc

SEQ ID NO: 277744 - DNA, 737 bp, Cannabis indica
gtaacttcccaaacctcattgtgtttcatggcccctgcataccgcttcagttccttgcgggtatttcctccgatctggggtcctcccgagatcatggccactctcccgttaggtctgggtggcaggctggggatatgctgggcatctccggggggaacaactggagccaatactcctgtcgcaccaccaggtgttccctatggcaaaactccagccgcctgacccgagttgagatgaggcaaccgattcttgatccactcgtagaggtgtcccaaccggattaagttttcgatctcgtctttgagatttttgcactcattggtgctatgcccaatgtcgttatggtactcgcatctcttgttggggtccctccgggaactatccttgtacagaggaggtggtctccggtagtgtgtattttgcctagtagcaaagtacacacgttcttgggagtccgttaactccgtgtactgggtatattggggagtgtacccccttttctatcgcttttcctccgtccgggtgctgcctttggaggaccttttactcctcgagccctgggaaggaccggctaggctagcagttggagcggagtgcgagggggcttgtccatttatccccgagggatttccaaaatgggatgatgcggggccaaaggcctggccctggctatatccgggagtagcagagaactgtatgccgctcatcggtggagctgctgctggcacagtgcccga

SEQ ID NO: 277745 - DNA, 524 bp, Cannabis indica
caagaagcatcttgttttggtagaccaccatcaaaggactccatggttgagtgtccttgacttggggtgatttcatttagaaaatttccccatgagcgtgcgagttagagcaaagcatgttagaaatacttggattggtccgtggggccagtcgtcagtctaggaagcaatggtagcgtatgaaccagggagtgaaaccttagtggtgatgatgatttggattcttattttaaattcaaaattatcctttaatttttcctcttagcatattcatttcgaattagcttaaataatatatcattggatgaatggtttataaaccatctacttgtgatgtcactctaatttctcttatgaaattgaataaaatcctcgatcttagaaatctccaacttgtatatgcttactttaggcaaattagatttgagttagattagtagtggtggtcaaagctagaattattactcattgtatatttggtataaatttaagtcattgactttaaattttagattccaaataga

SEQ ID NO: 277746 - DNA, 506 bp, Cannabis indica
ttccaatactgtggtactagaacaagttacattttttcattatacttacccaatttgtatgctcctgattcgagaacttcgaccacctgatatggtccttcccagttagatccgagtacacttgtcgtagtgtctttggtattttgaaatactcttcctaggaccatatctcccacaaagaattttcgagccttcacttgtttgttgaaataccgagctactttttgttgatgggctatcaactttaagtttgttgtggttcgcttctcttcaatttcatcaagtgattcggcaaggagtacgtgatttgcttcttggttgtacgtcaatcttctgtgggatagtggctcgagctctacaggcagcataacttcatatccatatgccatggcaaatggagtctgtccggttgccattttctcagttgttcggtacgatcatagaacttcaggaagctcctccgaccagtttcctttagcatcctcgagtcttttctttagtgtatc

SEQ ID NO: 277747 - DNA, 816 bp, Cannabis indica
gtaaaaataacatataatttttggcatttgattatatcaattaaaaaaaatagcattgctattacgtattcaatgatatatacctatattatcataagttaacattttataaattatcagcgaaatttaataataattattgaattaatatattttcatgatatttacactaatagtaatttatcttggggaagctctattttacaccacatagaatgataaatacaccccattattaaaaaaatataaacttaaataatttttaaaaattattcttaatatatttttttaaattttttctttcgaattattttatgttaatttctaatacttattttaagttcattttcataatttttctaactattgtatatatatttttatttatttttttaaaaaaaattcttataatttttttttttaatttttttgacataatatttaaaatataatttatttttgtttgataggaatattttttaagaatatgaattgcaagaaaaaagttaaaaaaacttagtacaattaaagatataaattttatataaaataagaattataaaaataaggtgtgtttaaaaattttggaggtgcaaataaattttttttaaaatttaatttaaattataattttttatttacatataatatttttatatttacatttattaacttaattatatgtatatttagtaaaaaaaaaccttaatctataaatatttatatataattcttaatggccatgttaattcagtctttgttgatcattatatatatttatatatatatatactaggtgattgttacgtgcctaag

SEQ ID NO: 277748 - DNA, 776 bp, Cannabis indica
atatatatatataaacaagagataaaaagagaagtgtttaaacagctggagtcccaggctcttggttcggttcttctgagccaactggagcaggaggatctgttgttcgagcaggagaagcatcagcagcctggtcagaagcttggccggaagttgaagcagccgcctctttcccaccataagcaacttgggccgcacagttcacaaggtacatgtccttagcatcgcccaagtagtcgaaattggcatggggattagccttccagaaattgaagaagagctcgaggccggcagtctccaaagcattgaccttctccttcaattggtttgcctcggtcaccttggcgtccctctcctcctttagctgaagaagaacttgctggagagaactcctctcatcctgaagactgttaacttcagcagataggatctcgatggtctcctcaaagcgatcagcagcctcgaggtcctttgttaccacgaagatcttcttcttggtagcaaacaacttcttgttagcttcgcccagctcatgccgaacagctccagtttccgccctggcctcctcagcttccttcttggccaagtccacctccgccctcaaggtgtcggatagagccacactcttggaagtagcagatttagcccgggagtaagtgtaacccaacttcaaaccggcctacacaaaggaaaaagtcagcatatggagctaagtgtgaaaagttaaaagggaagtgtaacgccctgtccaacagggacgccacgtgtgtgcaatt

SEQ ID NO: 277749 - DNA, 925 bp, Cannabis indica
tgtggggaagaagaaggtccgatggtcatttggttaagtctgatggtatgggtgtttgggtccgatggtatgggtgtggggaataggggggtcggactgtgtttgagtccgatggtccgatgtgggtagtagggtcagactgctttgagtccgatggtccgattgtctggggatttcatggggtccgatggtccgattattggtgggtccgatggtgccacaaattggtggtgtttgggtccgattattttatttttaatgatttattaagtattttttattaattattgttttaataccaattaataattatttattttttattaattattaattattgttttagtattaattattaattattgttttattaattattagttttgtttttttattaattattttttattgttttagtattaattattaattattgttttaattttgtattaattattaattattgttctatttttttttactaataattgttttatattaattattagttattattttattaagtattgtttttaataattgttttactaataatttttttattaataattattaataagtaatatattaatatttttttattattaatgattaattattgttttattattaattattaattagcatagtattttttttattcataattattttatattatttattagttattgttttattaattattttttattaataattgttttactaataattttttattaataattgttttatattaattattcatattttttattattaatgattaattattaattatttgttctattttttttattcgtaattattttatattatttattagtttttgttttattaattatttttattaataattaaatattattaattattagttattgttttatattattattaa

SEQ ID NO: 277750 - DNA, 247 bp, Cannabis indica
agaaaagaagatccagattcagatcttgattatgatctgctacagaaaggagtcataatattccgctgcacccactataaggttttcttaaactcttatctgtttatttacattgttttagaattcatattacgatgttaatcaaacatacttggtaacaaatctagatcctggtaaaatatttgcaacatatctatatcgtggaacaattataattctaaagttaggactatgtctattttatgaa

SEQ ID NO: 277751 - DNA, 521 bp, Cannabis indica
aatttcaaattagttcccatagccttttgtaaactcacccaaaacttcgatgtaaatttagggtctctatctgaaacgatagatttcggtactccatgaagacgaacaatttctttcacatacaaatcagcatactgatccactgcataggttaccttaacaggtaagaaatgtgctgactttgtaaagcgatccactacaacccaaactgagtcgtacattcctgtggttctaggcaagccaaccacaaagtccattgcaatgtcttcccacttccattctggaagtgttaatggctgaagtaatcctgccggtcgttgatgctcagctttgatttgttgacaggttaagcacttagtgacatagtccaccacatccctcttcatcccataccaccaaaaatagggtttcaagtcttgatacattttggtggttcccggatgcaatgagtaaggggtagtatgagcttcttccagaatttctttcttaagctcattaatatcagggacacacactcgtgc

SEQ ID NO: 277752 - DNA, 532 bp, Cannabis indica
tttaggtttgatgttcttgatgttcatttgagatttgatgcatgttggtgaattagtggtgatattggtaatttttaatgtgtttgagctattgagaccatatggattgcaacttgaatgttgtgtgagattattagggtttgttttggtgtttccattgtcttatgcagctctgaattgtatgttttgcttgagcttgtgtttgaatttaaagattcaaggtttgagcttgaattagtgggaaatttagctcaatgtttggaggttaatttttatattgattaaatctgattttggttaaggattaatgcatgaattttgtgtttttaccctatgtttggttctggttcgaaatctaggaaaagttgggatgtttaggccttaaaaatggagtttttgggtgttctgaacccagtcgtcgcgacgggatttttggccgtcgcgactgggtttggcagtgagaaagtatgttttttccgattttgttttcgccataacttttgactcgggactccgtttgggacgttcttta

SEQ ID NO: 277753 - DNA, 614 bp, Cannabis indica
ttgacaagatcattctctgcaaagagtcaatatgccaatatggatgtacattcaggggtggatacgagttatatcattaaattctttaaatgatcactctagattttactttattcaaaaaatttgaaatgtttgagaaatttcatgaatttctagcaatgttggaaaacattaaggtaagtggttaaagatcttgcgaactgatagggatgaagaaatatttggtggatatgcagttcaaagatcattaagttgaacttcaaattgtattcaaacttacctctccagaaattcggattgcatattagtgatagtgaaaggtttatctttagttactagcagttgcctaagtcatcctaggggaatacccttgtgataggaaaattttagaatgatgaaatggttgtgtacttagtgtacaccattactagattcagggatgtcctgatcatgaacttaagaaaaactagaattgttaacttaagtttgcatgtagctattctaagcgactagaggtggaccatcctatggtcattaagataagaaagtataattgtttcaataatactaattttctaagaaaataattaagtctgaaaacaaagtagcaaagt

SEQ ID NO: 277754 - DNA, 591 bp, Cannabis indica
ttacacttgcacctaagtccaggagggcttggccaaattcctgttcccctatttgacatgaaatggtgggacaaccaggatctttgtatttaagcggtgtcttgcagtcgatcaccgcactagcttgttctgccaagaatgcagttttcttgacatggtgcttccttttgatagtgcatagatccttgataactttggcataagccggtacttgcttgattacatgaagtaatggcaggttaaccttaacttgtgtcaaaaagtcaaggatctcactatgactttccagtacctttccagtggatttcaaagcctgaggaaagggcacctttactggaagattctgtggcacatcaacatctggagcaggcattggtacactagtggtcttaggtaatggtgataccgtactttgaccacttcgggtagtaatggcattaacccctttgagattagactctgaaggagcggaggtttgtgccatatgttgccctttgggagtgattagaggctgagcgggaagcttaccacgctcttgaatgactgaagaatcatttaactttgttatttgaatctttatgtccttcaatt

SEQ ID NO: 277755 - DNA, 807 bp, Cannabis indica
catccgcaaagtaatggccaagctgagatttctaaccgggaaataaagacgattctggagaaaacggtgcagagatcaaggaaagattggtcaagaaagttggatgacgcattgtgggcctatagaacagcgttcaaaacgccaatcgggatgtcaccatatcggttggtgtttggaaaggcttgtcatttaccggtggagttagaacacaaagcttattgggcaatgaaaactctgaacatggatttaaaggctgctgggcagaaaagactactacagctggatgagttggaggaatttcgaaacgaagcttatgagaacgctaagatttacaaggaaagaactaagaggtggcatgaccgaaatttagtcagaaaggagtttcaacctgggcaacaagttctactcttcaactcaagactaaagttgtttcctggtaaattaaagtcaaggtggtcagggccatttacagtgatcaaggtgtttccttatggagcggtggaactaaaaggtgaaggccctaatactttcaaagtgaatgggcagcgattaaagctctacttgggaggtcaatttgatcaaaccaagtccgccatgattctggcgccactatgaagatctcgatcaacgtctagctatgcgacgataaagttagcgctaattgggaggcaacccaagtgttctttatgatttagttgaactctttttaggttttactgttatttttctttttcgtttttgtccagttttgttaaaaaaaaaggggaattgcccagtggccgcggccagatgtagtatagccgcggc

SEQ ID NO: 277756 - DNA, 718 bp, Cannabis indica
cagcttgcctttgaggcctccatgtatcaaatggttcgctctatcaagtccactcttttgcaccattttcctggggattctctgcctgacatctctctgcctgagtttcatcgtgattcgtttggtgcatcatcagacacgtctggaaataatgcacatatgcagggggagccttcagcctttgatcctgtcaccagttcagcacaacctgatctagatcctccagctgactctgcaacacccttggtgtcgactggaccaccttcccagggggagtctggcacagcacaggaacccacagatcatattcaatgaagggggagatatttgtaattcgtttcgcttttgtagtggctttgtttatattcctaaagacatttatatctggtttattaactctttttttgtggtctttagttttgtttgttagtcattgaacataacctgtcaagggggagaatgttagtgttattattttgtgacagtgtttgttctgttcaatgtctagtcgtatctggatttttagtctgttatatctgcactaacgttctgttacgtgagtctcatttaagtattagttagtgccaggtggacttattttgtggatatataaatagtcggtttctgttagtaaagtggttatccattaaatcgttcagacagttatttcggttgtgtgtgaagagagagtcgtatcttgtttcttgttgttgtgatt

SEQ ID NO: 277757 - DNA, 690 bp, Cannabis indica
gcccaggaagaacataaccttctggttgctccatatagatggtttcttcaagaagcccattaaggaaggctgtcttgacatccatttgccaaatttcataatcgaaagcggcagcgatggagagaagaattcggatggatttgagcatggcaaccggactaaaagtttcctcatagtccacaccttctctttgggtataacccttggcgaccagtctagctttgaaagtttcgacttcgcctccagcacctcttttcttcttgtagacccatttacatccaattggacgataatcatcaggtggttctacatattcccagactttgttctttttcatggaatccatttctgaatccatgccggctgaccatcgcttccgttgcggacttgccattgcctgtttataggttaatgggtcgtcatcaataccgtcaccaacgaccatattgatttcaccatccaagccataacgagatggttttgtagaaaccctcccactacgacgaggagcggtgaccttctgaacaggagctttggtagtagttttctcagttgctacaactgagggagtgggatgttcctttcttgagtagaagaggatggaacatttgaaggaacagtatctgtgagcatttcctctaatacaatttcacttttcggtttgttgtctttcatatagttatcttcaag

SEQ ID NO: 277758 - DNA, 570 bp, Cannabis indica
ttctgggaattttcaaaacccatccggaattccggatgcacaaccggaattccggttcctcgcaggcagatttcaaaatttcataactcattcaaatccaacccaaatcacacaagatcttccagacctgttctatatgacccaaataaccattctaaagcaacaaactcacccagattgcacagaaacaaaaagtgccattaaagcccaagctttgagttccaaaactcaaacttggttaatatcaactaacatgcatccaaaccatgattcaaactcatattcaagcatataaaaactgcagaaactaaaacctaactcatgcaacaactacagcaacaattcacacaaattcactttgaaaactcaagctttttaacaagaaaattaaccaactaaagcaagaacaactagcatgcatttcaacctaactaaacatacttaattcaacattttaaacatagaaacaacagcagcaacaagcagcagcaacatcatcaaaatcatccatgcatttactcattttttcatcatttttcaagaaaataaaggaagagaagcttagaagct

SEQ ID NO: 277759 - DNA, 516 bp, Cannabis indica
aatttatttaacttagataaaactttgaggagttttatggagatagactaatctaggcaacaaattaatgaagcatataatttatttaacctaggttttattcttcatcacaaataaaaattgtaatttgtcacaaacacttagaatcctagactattaggtgaatagtaatcctaagatgacggtagattaaagtaaatcctaatttagcggccgtttaaacaagattaaaaataaaagaatagaagcaatttgatatggcggaaactagaaattaatattcaataatgaaatgaagaattcatgtttcgagttttgaaataacccttaactaaaagaaaactactcaaaattagacaatataatgataatcacaataaatagtaagagtagaaggagaagaaaagaattagaatgaagaacacttcaaagtcgatctccgtctcttccttgctctctctctttgagtttctctccttaatttgtagctttagaattattaaattcgtagcctaa

SEQ ID NO: 277760 - DNA, 797 bp, Cannabis indica
gtttttggaggacttgccggagtgggtggttggtcagtatcttgatcggatgtgcttggaagtatggcctcaatttccttgatgccatcaggaggcaaaaaaccagcttttcaatgattgggtaccttgcttcggctcctatcatgcgcttactgacatagtacacaggatgctgagttttctcttcttcccggactagggcagcactgaccgcgtgttcggagacagccaaatatagaaataggtcttctccgagaacgggttttgataggataggaggcttggccatgtgctcttttagttttttgaatgcctcctcgcactcgtccgaccattcaaacttttgacacttcttcaatatgttgaagaagggtatgcacttgtccgtggaccgtgagatgaagcggcttaaggcagctacctttccagtcaggctctgcacatctttatgctttttgggggatggcatgctcaggagagcctggattttttccggatttgcctcaatccccctttgactgacgatgaagcccagaaactttcctgacttgaccccaaaggtgcatttctttgggttgagcttcatgccgtatctccggaccacttcgaagcattcctctaagtcgcttgcatggctgttgcatgctttggacttgacgagcatgtcatctacataaacctccatatttcgccccaggaggcctttgaacatccggttgaccattctctggtaggttgctccggcgtttttcagtccgaagggcatgactaagtaacagtatacccccttatcggtc

SEQ ID NO: 277761 - DNA, 128 bp, Cannabis indica
ttacaagtaatattgtctcaactagtgggggggcacttaaccctgtataaatgatatttcaactaagtgaaatgagtactcaatcatttatctcgtttggttaagctcgaaggaaatcaccctttgct

SEQ ID NO: 277762 - DNA, 572 bp, Cannabis indica
ttggttgccgaaaacctcggtcaacattttggtgctttcattgagagctgaaggaagcgtctgaaagtagacagtaacaaaacaaaaatggtggagactcgaaacacacgtcaacctcgccctcttcaagatgctcaagacccaaacgatgaggacgtggcctcaagagcgaatgtgggctctgaggaagaagaaggaacccacgatgacgagtatgaaggaaacttcgacgagtacgacgcctacgacgaaggcagctacacagagctggtactcttgagacaaaaggctgccgatcacgaggctgaaatcgcagcccaaaaagaacaaaaccaaaagatgcaagaggtgatgctggccatgcaaaaagccatggaggcagcaggaatccacgtgcatcctaaagccatccctgctggacttggaaaggaaccagaagaatcctcgccgagtacccaaaagcagaagtctagggaacctagccctataaggtatccctccgaagggaaccaaaagaaaaaccctacttccacccctgggaaaaagaaaaaggtgcaggatccgcgaaaggt

SEQ ID NO: 277763 - DNA, 752 bp, Cannabis indica
attttaattttctatacatttatataagataataaattttatgtcttatataaataaataataaacatacatattttatttataaaattatatattaaattttaattaagatatcaacaacattatcaaaaacattattataataaatatattagattaatattttataaaggctaattatgattttttttcaccccgaactttgaatgtacaaaattatgtcccccagaacttttttggccgctaaaaattccccctgaactattgagattgttagatttaaggacttttgtgtaatttcattcaattttactctttcagtgattatttatgtactaaaccatgttcccggactctgatatctaccaaatcatgcccctcaaactttgatatgtactaaatcatgtcccctgaacttttatccatgttagaatttttttactaaacttagacaaaagtctttaaatctaacaatctcaatagttcaggggaaatttttaacgacaaaaaaagtttagaaggcatgatttggtacttatcaaagttcggaggaaaaaaatcttaattagccttttataacattatcaatataaaaatataaatatagtgtttatataaaatgtcacatctagtacaatttcgtgtttataaacactatttctaaataacttataaaaacataaaatgtttcttaaaaaaagaaaactataaatattttatttttaaatttatttattgaatttttaataata

SEQ ID NO: 277764 - DNA, 500 bp, Cannabis indica
gttatgctcacatgcctatttatgtctacgaagcgtagacctacgtgttgtgctcacacgtctaattacaataaggccttagaatggttcatctcggttctagttaccgagtccaacctggttatgccttgaacacataaccctaaatcttaacatactcatatattcatatatatatatatatatcatggcatagcattcatacaacatatatcactagggttataaccctaggctattaaaccgctcatgttagggtaataaccctaatactggttactgattactcacatatatcatttccaatataagcactactgcgcataactctacgtgctaactactgtcttacctgatgtcccgtaatagtagatattccaaatccccaagttttcctgaccaggtgccggtaatcctaatcacaatattgggattttacacaacaagggttaacccttgatttcatattcataaaatattcacatggtatttaaaattca

SEQ ID NO: 277765 - DNA, 721 bp, Cannabis indica
tgagccaaaacatacacaaatgaatgaaaaatacttctgtttctttattaatattgaataatacggattacattgaaatggagttttatttagggcataaaacccaacaggtccagccccgagcagttcggtaatagcctgatcctcgttatttgtattgacttaagatcaaggaagaagattttttttcttatagctcttacaacagtatctctgaatatataatttttagataatagtatagtcttagcttaactgcttttcgaccgatccttcgcccagtgaatatgcatcactatttatagggctaggaagcttgaggaggaagactttcctctctcgttacaatgcgtataaacagaaagatcgtgggatcaatgctgaatgcaatgatcgtgggaatgaggctgaatacattgatagcgggatcgtgtgtatgccgtatctacgtaaattgatccctgagttatagggattgagctgatgactcatgatgcgaaaactgaattcgctaagtgttgattgctctgcgcgggtcgctggatatcttgctctgggcatgctagcgaggcatcctgctcggcctgtcttcccgagcagatgttccaagtggactccacgtgtcaccattcccgtgatgccacgtcagagtgcaaaatttgggataacagacgggaattcttcaagtttatgtgaacaaaattgatgaggaattgtaaga

SEQ ID NO: 277766 - DNA, 555 bp, Cannabis indica
aaaattatattattttttataaaattagaaataataattacaattaatagtttgaaaaaaaattataaattatttttaaaaattaattaaaattactactttattattttatgaaattgtgagtttattaataatttattattgtaaaactaaaaatcatttacatgtatattaatgtgtttttttattaggagaataagagcttgattgtggaatccaattgtcttaatattattcatactcttaaaaataaaacgctacaatacttcttagttcttacttaggctatcattgttagagaaatattattatcatccaatgatttttttttgatattaccatgaatcattctcctagaataactaatgaggtgttgttcattatttatatttttaggattggaagatgataatcttgtctaggggtcaaatataattttttgtgctgaaattcttgtgttggcaattgccattattcaataatgtttatgacacttttttcttccttcattttttttttgttaaaattttcttcattggttttgttcttatagat

SEQ ID NO: 277767 - DNA, 653 bp, Cannabis indica
caataatattatatcatcatatttaaaatcaatcccataaatatgtaaaaaataataaaaaaaaaaatactctcagctaaataaaattacaaaaataccctttcggagttagcggatattacaattatccccctctaaaagaaaatttcgtcccgaaattttactcaaataattctggatattgttctcgcatatcagactctagctcccaagtagcttcctcaaccacactgtttctccataggactttcaccagggtaattgtcttatttctcaaaatcctatccttttgatcaagaatctttaccggacgttcattgtaggacaaatcttcctgcaaacccagtgtttcatagctcaaaacatgcgatgggtctgacacatatttccggagttgagatacatgaaatacattgtgcaccccagataatgatggcggtaaagctattctataagctacactgcccactctatccaatatctgaaatggaccaacatatctgggacttagtttccctctcttgccaaatctcttcaccgagagtccttttcgtggtgtcactcgaagaaacacatgatcacccacttcgaactcaatgtccctccgcttcaggtctgcgtaagatttctgtctgctctgagctgtgatcatt

SEQ ID NO: 277768 - DNA, 543 bp, Cannabis indica
agaatactgtgacacacccaccatttggaatggcaattaatgctctcaccactcagcccgtgacatgtaaagattctaaaaagtctagtcaacagttaaagcggaaataagttttggaaatatgcgattattcaaattgttcatccgaatgtccgcgagcattcgagacgtgaatcagtgcctatgagttgtatacggttatgtcagtttataggtcctacactatggatgttacccagtttcatggacccagaacacataaatacccactagcatacactcctaaaagtttttaaaaaaaaacatcctaacccagaaaacaaagcacattatccccaaaaacagaaagcaaaaatacagtgatttagaagctaacctttagttttgattcctgcggttattctcgatcacttctgagaatgaaaatgttgtggaaagtggcagaaaatctgggagtggattttgtctgaagtgtatacactggagggaagttaagaaaagagggaaaaatgggaaatttgattcgtatcaaagcgtttaaat

SEQ ID NO: 277769 - DNA, 723 bp, Cannabis indica
aaccaacaagattacaactcaatgacaaataatacaaaggataaaaatatagattaaataatgttacacatgaataacaatatatatattatatatataaattagagatgtgagagcaatctcaacaccacatacaccacaagtgtataataggggaatcacaaaacttgaacaaggttttacacctttgtccaaaagcttatttccccctaccacaagcacttagggaaaagaaaagaatggaaatagctttctggatttatcaagcctttagtgtttctagcaatgtgctctcttgatagaaacttcttcttttcaaagtaaactcaagacctctatttatagtgttttgagaatcacatttgaaaatcaaaccctttcatcacatggctgttaccaacacattaatttgtgtttaatgggataaaaacgttggacaagagagttagaaacatgctcaattaatttatgtatgtttatgaacgttttcaaaatctggttccagatgttcgaaaacaaccataaaacaacatacaaacaactattaaacaactgtttcctgagaactcaaaatgtaactcctctccgagttaaatcatttcccaacgtcccaatacccatttaaatgatataattgagtattgtaacagtttctaacagctagaaacttatcccattaattccataactcccatatgtaacaactcacataattacatattt

SEQ ID NO: 277770 - DNA, 638 bp, Cannabis indica
cagatgaagtgggggagagaccttcacggttcactcaacaagactagttattcattacaagcatcgagatgagtatcatggagattgattgttgttcaggatgtaaagtcaagaagactcaggacacaggcagagccagttatctagggtgaaagtccgcaggactcaggtactaagataacaccatggcaatgttggcctaaggcaaaagtcagcaggactagggtactaaggcaacaatgaaatgtcgaggggcgaagagtcagaatgatcgaggcattagttcaacatcttcatcaaagtgaaatgtggagtggaggaaccgtatgcgagtatgcggttagcttgcgagctatatcttgagggatattcctctaagagagaagtttttcccaagttgaagtgggggagcccactaattcatgtgtttgaagaatcagggtacttgttcagttttggtgtgtgaatccagagggaaacactacaacagattggttgttcagggtgaagacttgcatgattgctgcaagctgcagatagacaatatgcaagggcgtagactgagatcaagactgagctagtttgcggcatgttatgggcatgttttgtgtttatgggacactgtaagccgaatggtt

SEQ ID NO: 277771 - DNA, 491 bp, Cannabis indica
agatgaactttatgatagatttaatgaagtatttaatttagaaataatggaggaatgaaattctatctttaattaaaatttgtgataacactattaaatcaaatcctcataactccctgtggggtaaattaagagaatttaacttaatatattatcctaattaattataaaaatataataaaatccctgtggggtaaaattattatatccaaataattaattacaagttttgtccattaaggtgaatttcaattaatatataattttatataattaaagatgatgtggctactccctaattatttaaaattatattttcacttagacattaggtattgggctctacctaaaagtaatttcgttattaacataatagacaatcactgaaattagtgctcctagtatggtcgttccgaagatcattaaaaaccgttctagataggagcatttatcccagattcatgtttttttatgtcaaaccacaaaattac

SEQ ID NO: 277772 - DNA, 515 bp, Cannabis indica
ttgaattagaagtcctactgttcactaaagtttttagttaattgaaagacctttctaacggtataaagatcatcaaaatcggagctataacctaggagttatgcatgttttctcaaaacagtttctttaaaatcctggatcatgccgatttctgaatacagcctaaaaataaaagttttaaaaatagttacaccccgatctagacaatactttcttcataaaaaatgtagctattttcctaagctttaaaacgagataaagatcttttaaaatggatcaaaagtgagagagatattgaatttttactgaagacactttttctgaaacaaaacttaaaacgaaatatcataaccgagtaaagatactaacttttgactggtaagaactccgaattagggaaaggtttcttcaaagaaaatatggattattgaattatctttctaacagtataagaatcactggaaaataatagatatcaagagagatatcacacttttactaaggcaatatcgaaa

SEQ ID NO: 277773 - DNA, 611 bp, Cannabis indica
ccattgttctcttgataaatcaattcctagtagatttgcctttggaacttcagattcatcatcaacaggtgcgagtttatgcaactaccaggatgcattttcacactatagagttcttttgctaagatattaactaggagaggatcggggtgagggttattcataatgacactacaacacatcaataaaacagaagtaaggttttggttcataaattcatacacagttcagaaaataacaaataatcacatatgttatagaaatactaaatctaacatagtttattttccaaggtttttcaacaaactgatacagtgtcccgtttaggcgagagtcaaagcatcatccattgaatagagttgtcagctcatctaaaatgataaccattctagcaaccttttattcgatcaagattggaattcagtgttgtcccgtttaggcgagagtcaaggaaattctatcttatgagcttccaccattgtaatttgcaagtaaagtatggtcgccaccattagggtgatccataccatacaaaacacttacaaactacttatctttagagattaaacagtgagaaattgttaatgaacgttcctccaatagggaggatt

SEQ ID NO: 277774 - DNA, 523 bp, Cannabis indica
tatatattttatttttgacatgcccttagggccaggatttctatatatatgatcctttttgatgcacatattttttctttttggacctgccctttgggtcaggatgtttatacatatgctcttttttggtgcatactcttttttctttttggacctgccctttgggtcaggatgttttacttttggcctgtttttcgtctgtccgtgtggtatgccttagtaccccctgagtggcatgaaaactttgtttttaaggcactcagttttatttaaaatacagaggctgcatacacttagacggtacaaaccctttaaacaaagcctaagttacacttttggactattggtaatattttctgaggtgatcggcgttccaggcccttggcacaatggttccatccatcctttttagcttataagtgcctgaaccgatttcgtcctcgatttcatatggtccttcccaatttggcccaagtacccccactccgggttcttgggtggctgggaagactcttcttaagac

SEQ ID NO: 277775 - DNA, 530 bp, Cannabis indica
tttttttttttctgcgccttcttctattattgatatgtaccatcatcaccactaacttcacctatcaccaccactaccactacaaatgacagattaaattaaaaccaaacataagttaaaaaaaaccctattaattaaatggatcaaaataaaacatacactaatgatgacaagaccacccttgttgcgaaggtccatcattcgtttatcttttgatcagatgagataatggctccttcgactcggcccaaaagagcttcttcttcctcatcttcgtcttctgcctttagatttggtttagaaagttctccccgtcgttgataagcttccatcgttacaatcttgctgccaagaagccacctctgatgttgtcgtgaagttctccgcactgttgagaagtcttccatcccttctccgtcagaactaaaggactggtgcggggtttcacggagaagatgttgcaatggtgacagttaggttctatgaagaagataaagaggtagaaagatgaatagagagagagagagaga

SEQ ID NO: 277776 - DNA, 786 bp, Cannabis indica
tccttaaaacacttggccacctataaatgatattttagtgaactaatataatcactaaaatgagatctcaatcatttatctctattcagccaagctcaaaggaatcatcgtttcacttctaaatacttatagaagctatagattccatatctatgtttagcactcccactcaatcaaatcaaagaacacgaataccactcttgagctcgaacctaatcatgtcaagattaagatcatttgatctaggatcaactaggtgatattgaattgaatagatattactgtaaatttatcatatctaatgcaagttcaatatcggtcccttccaatttatactccatacatccgatactggtaaactttcccaatgccctggaaaggacataacacttatccaaggtttaagtatacctatcgttgattatcatgccagtctaaatctagtgaactgagaaattagggaattaaacttttgaacatataatcatgattatattccactgtaggtgcatttcaaataatctttacaccttgatatccaaatcaagtgtagtatgtaatatactctccgtaataggatctgatagggtgtattgaatacgacctttcatccaccattacatttccttaatcacaaaatccttaaaattctgaaattcctctctatatgtctactcctctagggataccggattctttactatttggcaactacttttgtgctagtaaggaagtaacactagtagttaataaatgttggaacaatgcaaaaaatgtatagaactt

SEQ ID NO: 277777 - DNA, 809 bp, Cannabis indica
tactttggtcctaattgtgtctcacttttctcctgtctctaagtgaggctttcctaacattttctcattgagctatactccacaccattgttgttgtatcagtgagtatttggaatctagggatgtcacccttgaatgctaattcctcctctttctcaagttttgaatttgcgatctactctctatagttgtttgttgtacacccgccacaaagctgcatccacaatctcttagttgtgtagttgtgatcaattccgagtagtcaccctcttagttgtctctcattcatgttgtacccaaattgttagccgtgcctggaccttttttgtctttctcctttgaaaatgtctctgtcgaaaccatacacatttttctctattatctcctccaccaagtagatgaccttgagtttaaagtttacaactttccttcggtaatctaatatttgttgatgctctgcttatctcttagtgtttaagataccttcataagttattacctctagtaattttatcatgtctctttctaacttctcattttggattctattcagcacactacactcctttctatatgatggcatcgtcctctcctgactcatttctataacatacttatctccaatgtctttgcatacagtactcatacttcttaccatctaacttaggagtgtgtaacttatagaatatccaacaagatagtaccttctccttaaagatctattatttcatccttcttaataagtaggtttcgtaaattatactgtcccagtctggtataacgtctactattctaagtcatccctactt

SEQ ID NO: 277778 - DNA, 619 bp, Cannabis indica
aaaaaaataccctaactcccttcttcttcttcttcttcttcttcttcttcttcttctctgctaaaaacgacacacacacacacccgcctcccctggacacacacacacactccctctcaccgattcagtccgcgcagccacacctcaccgtcctcatccaaagccctaaacctaatccaccataaccctaatccaccataaccctagaatccccaaattccccaaaaacccccgaatcccccaaacccagatccccgaatcccccaaacccagatcgccaaaaccctcttgatctcgacgacccagaaccggctccatctcctcgaaccagcgagagcaatctccacctctccgagaccgaggctttcatcgtcagaatctccacctctgccatcgccggttgggtgtttgaagtggttgatattagggttccgattttggaggtcatggatgggtgtttgaaggagatgaggaagacgaagtggtggtggagattgagaaggagaagaagagtgggaatggggcggcttgacagagagagaacgagaagaagagtgggaatgggttagggttattagggtttattttttattttttattttttaaaattgttttttaa

SEQ ID NO: 277779 - DNA, 462 bp, Cannabis indica
tttttttttttctgcttggccgaaatggtgtgttgctcaaagtggaaggttgacccacttatttataatgttgttgttgttgtttctgatctgagaaagtttgttgtaatctgtttgagatattttccttgtaaagctgaaagttgttagagtcttgagatatttatttgcttccttttattgttaagaaataaaagacctaagcctaggaaaacagaaccgacaactctatgagttataatggtctgttgaggctttatagaaaggtctattttattttccttgtaactttatttatgggacaatagtatgggaatttatccaacagattccacctaaatttccatactaacagtccaaaagtttctgcctttgctttatttacttgttgctgtctttgagggtcattgcttgaatatgtgtccatttaccatcctgtgtcaactcccaacaggttcatac

SEQ ID NO: 277780 - DNA, 996 bp, Cannabis indica
cctcaaggaagcattctcactcccattgctcaagtaaatcaatcttcctaatatattttctaatttttttggtgtgatttaatttttctatattttataattaattaagagtacataatacacacagcggcacacgtgttcaaactctttttaaaatagttagtccaagatttaatgtctagctaggtgtttggttcacatatagttacacccctattttatattatataatatatatatatgtatattttggtaaatacgctatgtttggtttggtcggaaggtaaatttgagtttcaaaagttgatatagactttgatcacatggacaacagtactgtatggcttttgaacttgtggtcgacacatatttactaagattgaataagacaagagactgtttgaaaataattagtgacagtcagctctctactgactcaatcgtaatattacatgttggattttaagtatagataaagtattattacgtgtatatatattaacttaattaattttctatttattaaaataatctggttaattttattttcaaggtttttgtggctgctatagtgaagagaaaccaggcttatccatcaaatccacaaatgcttcatggaatccataacatgaactacaacaacaacgttggcttttcgtctgatgctgacactttatttcctcacacccaaaagttcaggtataatataaatacgtacgctacttaaaaataattcacttttattatatatgatactttcttgtcatgttgtctacaccaattactttggtcatgcatgcacttgtcttatatatacatatacaatgtatgacctttatatgaaatacatacaaagctatatgtgtacgtattgaaaattaaatatagaataaataaatttcgtcctatttgctagggactatgaacacaaccttaactataattccgctatatatatatatttatataagaacctgaaattaattattaatttgc

SEQ ID NO: 277781 - DNA, 279 bp, Cannabis indica
agtaaatctagatcctggtaaaccatattccaacaccactatcatggctgaccactataggcttattttagctattattttatcattttttattctatataattcaatcctaaccctaagtgaattagtataaaaagaaaagaatagtctcataatccaactaatgactctaaacctagtttacatcttgtcagacaactagagagttttgagacttctttttcttcttctaaatttcgaatccttagagtgttcttcacataaaattttgagccttag

SEQ ID NO: 277782 - DNA, 505 bp, Cannabis indica
aggcatgaatccagaacaccaacatatggcgtccaatgagtgcaaagagctagagcagtagggtttgatagagtcaacttcctctccatgggaatgtcatgcattttatgtcaataattgatcagagcaagctcgaggaaagcaaaggttggtcataaattacaagcccctgaatgagttcttagcagatgataaattcccaataccaaataagaattcattgtttgccagtttattcaaagcccatattttttcaaaatttgacctaaaagcagtactttggcaattaggcatcaaaccagatgatcgatccaaaacaaccctttgcattccaaatcatcatttctagtggaccgtcctacccttcgggctcaaaactgccccttccctattccaaaaggctatgaccaaaatatattgcccaatattggaaaaggctctcatctatattgacgatattttgctcttctctcctgatgcaaaagcccatcaagcgttattggcc

SEQ ID NO: 277783 - DNA, 751 bp, Cannabis indica
acagcgccaattacgccgggtcataagcttcgacaccggcgaacgaagcgaagatcaagaaagtgaaaagcggtgttggttcgacatcgaagagctggagcttgaatgatcctgagttgcagaggaagaaaagagtggctgggtataaagcttacgtcgttgagggaaagatgaaaggctcttttcgaaaaagcttcaagtggatcaaaagtacttacactcaagtcatctatggctagcgttgatcatttcggtatttttttttagcagggaagaagaagaagaagaaggaggaggaggaggaggaggaggagggggcggcgggtagggctcagagagaaagagaatgagagagaagaagagaaagaaggaattagggttttttaattttattttttaaaattgttttttaaattctaatttttaattttaaagaaaagaaaaatttattttattttattttaaataattaatttttatttttaatattattacgtgacataaatgtgcacgtgtacactgtgtacacgtggacattccaccatggcagttaaaagccaaaaatggacggaaagggctaactgctaacagaacttgagtttaggagttttaccgcaaaattttagaattggggttagttgcaaaacctcctactttaggggttttgccgcaataacccttttaaagatataataattgtataatgtatattataaatatgtaataataatatggcctatatttatactac

SEQ ID NO: 277784 - DNA, 771 bp, Cannabis indica
attgtttttattttcaatcttattcattcttttatgttttcattttttttcccaactaaactcgaccttatatattaaattatcggtgcctttgttggtagaatgaaaataaagtaaaataataattttttcaatttgtattggaatcaatttatattcttttaatcttttgaatttaaaaaattattttatttaattattaattcaatattttctttttgagatgattaattcaatattttaaaatacaaataaaagaataaatgtaaaaatattttttttttatttaattttatttttatttctaactaaacacatcggtagcgaaactagaaataaaattcaaataaggcgattatttagatatagagttttgaatttgtgacttagctactagacaaaaagttaaaattaagcagaacaattatctttccaactataccaaataataatatttaatagtatttcatcaaaaaatataaagacattttttttttaatttgattctaatttcaatcattaaaaaataaatagtaatatatggtacacataaatccaccatctactcctctagtttcaatcaaaggaccagatgttaagatatttttaacctattatttatgttatttttagagttaattttcttctttattattatttttttgaaatagaatgaagcttgttttcgtaattttaagtttcaacacttgaaattaatgtataaattgatcaaaatttcacaaaaaatagattaataaattagaaaaaatt

SEQ ID NO: 277785 - DNA, 504 bp, Cannabis indica
atttaaaaaaaaaaaaacgtgtaaattatatattcgtgtcaaaaaaaaaaagttaatttatatttactcaaaaaaaaacctaatactatatgaaaatgattcattgaataacaaataaggtgggactttgctttattatatagcaagtgatagaaaacaatcttaatagaatgtaacaacctttaactgattcaagtataacttgacaatgcttaaactgagctagttagatctaccatacagatttatataaatttcataaactcatcttcgtctgtctgattctgaatgtgaaaacttaaaaaattttagtaccaaaaattcaactttcacttgtttttccttttgaaccaaaacagactttcaaattatggctcctcccagggccggccctaagttttagtgggccatagaaaaaaaaacatattttgggcccttatttagaacaaaatatggtatttttgaaaatcagtaaaaaaaaattgtataattttaaaagggaaa

SEQ ID NO: 277786 - DNA, 549 bp, Cannabis indica
gttcagaaataaatccataaccattcctatagcaatattcagcataaataaattaaaaaagaatagagaaaaataattgttggtggatgaattctggatcttcactttgaatcactctgctcttcctgccgatctgtgctgtgttttgggtctccaaatcgcttcccctgacttccaatcccagtttcctatttatatctgatttttagggttcgtctgacaaaaatacccctgagctgtacggaatctcgccgcggccagatcgatgctcaaaaatcccattatataactttcatatggccgcggtgagggtgtatctcgccgcggcgactatagcctcaaaaccctgccatctgcttcgtgatctagccgcgaccaagctgtatctagctgcggccagatatgcatacttcctcaaaattgtgttttcttggctcagctcgtcttttactggattttttcatcccgagacctctattattccaaagaacctgaaaaacatagaaaacaagcgtaattccgtcccaacacagtgaaaaatgcacataa

SEQ ID NO: 277787 - DNA, 529 bp, Cannabis indica
tttaaaatttgattctcaatttaaaaattgaaaagtaaaaacagttttatagaacgtgtttttgaaaaagattttcactttttcaattttaaaaacagaaaactgattaaaaaagtgttaccaaacgtcacctagatttctctctttgtttgttaatttgtttgtttttttaaatgaaaaactcttgtgattttgcacacaaacaaaacgcacacttaatacttgctattgaagatgatgttgttaatgatggaggttagaaactgagctgaaaaattagaaatcaaaaccctaagctctgactgtgagaaaggtaaaaaaaattgaggagggaataagaaaggatatactaaaatagggagaagaaagagagatatggtgaaacggcagtagaaatgacagttcttaggtttttattagtactatttttaggttgattttagtgtatttttaaatagttttactcttattttgtgtaattttacgcttttggtagttattattttgcaggtttagtgtagaaaaaaaa

SEQ ID NO: 277788 - DNA, 478 bp, Cannabis indica
aaaagaaaaaaaaaactagttttgtacgggattaatgccatcaattcccttcagtttcttcatagcaaaaaattcccttcatttttttttcttcttttgtatttatctaggtggaccaattaaatagtaatttaaagtatgcatgagtacacccactttgaccaaatcaaactaaaattttgattcaatacactagtgctaataatatttttttaagaagttttctaccatcaccatttaaattggattataggggaagtattgatgtgtctattatagggggggtctattaaagaatttcccaataaattttatagcattttcccaacacaatttttttaaagttgttgataaagaagcgatgctaaatataatttttcaagtagatagattaaacacctcttaaagttatgaaagactagttggttaatgtattttctccggacctcgttttgtttttagagatattattaattat

SEQ ID NO: 277789 - DNA, 395 bp, Cannabis indica
ttagggcataaaactcaacacctggttcgtggctcgtatcgacatcaacgagatcttgtttgagaggggtgtcatgaaggagggttctctcggggtcataggttttccttgtcgatggtcatatgtgcaaggtctgggtgttgtttatgctctttgccctcttttggggtggatcctaggccattctatcagggtggttcggtagtggagtcttcagttgtgtcccacgaaagcggttgtgggcagatcgatggtggcctggttggggtttgtcactaggagggttcgggtttggctgctacttttctggctatggcggtgtatcgtcgattggtatgggtactagttgttggaatttattttaccaggatcttagatctactcacaagtatgtt

SEQ ID NO: 277790 - DNA, 654 bp, Cannabis indica
ataagaatttcttcaacttaacacactttatgttcattgtttggtaggacaaacccctcgggttgttccatatagacctcctcatcaaggtcaccatttaggaatgccgtttttacatccatttggtgaacatacaagttgtgtaatgaagccaatgcaaacaacacccttatggtagttgttctagcaacaggagcataagtatcaaaataatcaataccctccttttgcctaaaacctttagctactaacctagctttaaaggtttgtatagagccatcagtgtgatatttctttctaaatatccacttacacccaattgctttgcatccttgcggaagatccacaacttcataggtgtcattggagagaattgagtccatctcatcatcaactgcttctctccaaaatgcactatctctagattgcatggcttctagaaaagtcttaggatcatcctcaataagaagtattaaaggaattttccttattacttcttctctagttccttctaccacgtagaaagaaattaattgagaatctatttcatccttatttagacttttctcttttctcaccctttgacctctcctaggttcaatgggttgttctacaactttagcagtattctcctcttgagatcctcttttagaa

SEQ ID NO: 277791 - DNA, 635 bp, Cannabis indica
gtgggacgagacggtctatcgcgaaaaccaaaagaaaagagcaagtcagattaaaacctcaaagcaacttagaaaaatgtctaagtcagaaaacatgcgacgtactaggtctacggtaaaatcagttctaatccctgggactttgaagatgtagaaccacttcgatttccaatctcccatgttagataccattccttctaccccgttaatttcagaagtcccccatttgctaaagcagtagaaatcattgtgaaggcctacgctttttatatcgtagaagtagctgaactcttctaccgagggagccctatgaacatactccatatacatcgtgtaaaaagccaggctggtgcgataactattgggagttagctggaaaggtgatacatcatatcgcttgaggatagccgcgataaaaggatggaaagggactgataccccacatcgaagaatgggtattaagattaccacatcctctgtggggataatcgcaagattcgtaaaaggaaggtgcgccctctgagttggcttaggacgtaaagacacaagtcgcagtaggttcagcctcgtaaaggtggtaaggtctgatttggtaaccctcgaaaccaaatcctcgcacgagaaaggctcgttca

SEQ ID NO: 277792 - DNA, 781 bp, Cannabis indica
tagttatagctaaaaggaaaaaaatatcttggaattagaggcggttatttttaaagggtaacattcattactctttagaggcggttatttacaaataactgccactatagggtccttacagaggcaattatgagcaaataaccaccaccatatggttcttttagagacagtttttttcgaaccctttagcgacccttgaaacgcctacggttgcgaatattgttaaaatcatctctaacccttttttgtagtagtgaggggttgtggatccacatatatgacctcatatggcttcgataaataattaaagccatagggggttcttttgccttcgatttttttcgaccccttttcatttcacctaatacgccttcaattacgaaatttcttaaaatcaaagctaaagcacccaaataactaaaggtaaaggggatttttatagtaatgtccaatatttaacctaaatatcaaactaccttgagcattgttaaccccaaaaactagcgtggctatagttttcgagattagtcgagtatagcacacaattaactaagtcttgttagcaaggcaaaaaggatataatcccagacctcaagcttaaaggcttgaagcaccaagcctcaaggttccaagactttagcatctcaaccaaaggcttccttgaagcttctcggccatgtgctcaagaccttgagcatctcggccaagaggttccacgatcacatgctgaagacttggtcaagagactcttcatacccgaagctacatgtaagcctaaaag

SEQ ID NO: 277793 - DNA, 822 bp, Cannabis indica
gcagaaaacacccaaaaattcataactctttcaaaaccaaaccaaatcacataagaccttccagacctgttctaaataacccctagaacatttctaaagcaacaaaaccgagcttcacacacagaaactcaattcaccattaaaggtcaaagattgagttctaaaactcaaaacttgactaaacaacataacatgcattaaaccttgatcaaaatcacatactcaagcatttaaaaactgcagaaatcaaaccttaactcatgcaacaactacagccactaaaattccaatttctctttgaaaaccttaagcttctacactaaaaactccacaactctaacaacctaaccatcaagcattacaagcagcttaataacatcaattaatcaagcttaaacctctgcaaacaactataaaatcacaacaacaataacaacttaaattatgcatgcaaacatcatcatttcttcaaaattcttcaagaaactaaaagggagagctacaaggatcttaccaacaacttgaggtccaaatctatgctaaaatcagcttgaaatccaagagaaatccccccccaaacccagctgctcagaaccgaaaaggagagaaagaaagagagcctttgaataccaattttctaacttttgaaatttttgactaaatgaaataaatgccacttaacttattttacttcagccaacatatactctaataaaccacataattccaccaattaaaatccactaaaagacaaactaacaatggggcaaaatgaccattttgcccctccacactaaactaacataaataacactaaagggg

SEQ ID NO: 277794 - DNA, 565 bp, Cannabis indica
gggacctaaacccacacaagaacggggaccgtgtcccagaattaggatagaatggtgggaaaaagaactaggaccttcacctagtacccgaccaagacccaaacttgaacctaggacccagctcgtgacccagcaccagaaatggaaccagacgaggacccgagatgggatccagatctggacccaggtcttggacaaagctcatagtcagtgtctggatttgggacccagccctggacctaaaccctgacaagtacccgaaccacacccagacctttacccagtcccaaacccaaaagttaacccgaactcgttccctgtaaccaaaaattggaaccaaaaccggaagttgatcgggactggaactaggacttggacttagaataataactaaaatttgacacagatccagaaccgtaaccggagcaagacctggactccaaatccgacctagaccctaattaggagccggacccggatcccaacccaaacctagactcgggacccgaacccgaacgtgaacttagacccaaacatggaatccgactagggacacagaatcagg

SEQ ID NO: 277795 - DNA, 579 bp, Cannabis indica
aagatcttttgatctgataggggtggaaaaagttaagaataatatgcagtccaacaatcttttacatctaatgaactctggattatattcataactccacattatctctatatcacttaggggtggactaaactattgaaatatgtagttcattttgaactctagactgtactcaatacaccacaacatctctatggcacacatattttaattaaacatgaatgtaatataataaattagcaaattatttagaacattttcttgatcttaatttatgttccaattaatatattactgttgtaatagaaattgataccaataaaagttctttgacattgtatcacagtaccttatttgagtgggagaattttaaaattctaaactcatcttcatttggatgacacttgtgatatgaactttagaacacaactgagaaagtaaatctaaccattcatatggatagaaataacttatcaaaattttgagagtaagatagtagaattcttgcatagtctattcgaatgacttaggcaaaaattcttaatcctcatgaaaagttttatggtatctctaatgatt

SEQ ID NO: 277796 - DNA, 729 bp, Cannabis indica
gttcttgatttgttgttgatttagtaattttttctcttcgccgaattttatggttttttcttggtgatctccgactccggcgactccccacacacgaagcaggtcgttttcccgtgttttttactgttcacagtataaatgttaagttgttgggcttgggcagtacaaaagtaaagaaaatgggctggggcagtaaaaaagttgtttttgccgtgtcccagtatttttgtaaagtttttgtccaaaaacagtatatatgtaaatttccctaatgatattgtaatcattaaggcccattaattaatgtatatatggaaagtgaaaaatataaatgaacaaattaagattaaattaaaaaaaaattagaagtaaagagattaggagataatgacaattaaggtgccatgtggaattcttttggcattcgtttatatatatattgatgattgatatgatattctttatatataaaaagaaaaaaaaaaaaaactagaccataacatattatgtaattccaattatataaattaaatttcaaacatttctaccaaacttttagtgattttttctctaaaaaaatatttttagtagatttttataaaattgaaaaatccaccaagtaaaattagcattcttgaaaaaattgagtccctcctaattcagtagatgtagactgattaacctgtcgatgtgcaattataatcttataagaaatggttaaaataaatt

SEQ ID NO: 277797 - DNA, 652 bp, Cannabis indica
aagtctggggagcatggtttagtacataaacaatcattgaaatagtaaaattgaatgaaattagacaaaagtccttaaatttaacaatctcaatagttcaggggaaatttttaacggctaaaaaagttcaggaggcacgatttactacatgtcaaagtccagggaggaaaattactaattaaccttttttatattattgcagacaattcgttttattttggagaatattattataataaaatttctcttttggtaatgaattgagctttatttactttatcttgtatgtgcatttcccaattatatttatatgtttaaaatgtttgtatgtgtttgtgttttattattgatacaaattctatggtatattaaactctgcaaagaatgaatgccacataaacacttagaatttcaattctatgtttatgaatagttgttaattctcaaacaattattaagaatttgtttaataaaaagatcttttgatctaataggggtggaaaaagttaaaaataatatgcagttcaacaagtttttatatctattgaactctagattatattcataactccacgtaatctctatatcacttaggggtggattaaactattgaaatatgtagtttattttgaactctagactatactcaata

SEQ ID NO: 277798 - DNA, 554 bp, Cannabis indica
ggttttgacaagatagggggttcagccaggtgtttcttcaatgattgaaatgcttgttcacactcttctgtccattcaatcttagtgcttcctcgcaataagttgaagaatggtaaacacctatcggtggacttggacacgaaacgattgagtgcagctatgcgtcctgtcaggctttggacatccttctttctttttggggaaggcatgtcaattagtgcctttatcttctcgaggtttgcttcaatacctcttgagttaacgataaagccaaggaacttgcctgatgataccccaaaggagcacttgagtgggttcaacttcatgttgtatcttttcaatatagagaaacactcttccaagtcgtcaacgtggttctttgagagtttggatttgacgagcatatcgtccacatacacttccatattgactccaatttgatcggcgaacattttatttacaagtcgctggtaggtagcaccggcattcttcaacccaaagggcatcacattgtaacaataaagccccatgtcagtagtgaagctcgtgtgctc

SEQ ID NO: 277799 - DNA, 594 bp, Cannabis indica
tctcaagaacttcaagttttccttcaatggaggttgaataaaggtggattctcattgaggtaacaattttaagactctctatacaatttttggtggataattttgaaatgttggagaacttttgaattttagtgtggatttttgggatttttgctcaatacattgttcaatagagttgttgtgattagaaattggtttatttgtgagtgggttaattcccgggaagtggatttttaaggggaagtgctgccaaaatttttaaaaatcttgagtgttagaatatttggtgagatgggtcctaaaagagctagagtgggtgagaaagggggagcttcatcatccaacccacctaggggtcgctctaatcttgatagagcgaggtttgcgaatatggaggcccaagagcgatttttgaaattgaaagataggcccttcattgaagatagggggatagacattgttaacttgagccaaactgcaaacattcctgctgtatttgcatccatcagagaacaaatcttaaataggcagtggactaagtttgtggatgtcactaaagcgcagcaaccgaaccttagctttagaattcctagc

SEQ ID NO: 277800 - DNA, 581 bp, Cannabis indica
aaacactcctctaagtcgtctgcatggctattgcatgctttggacttgacgagcatatcgtccacgtatacctccatgtttcgccccaagaggcctttgaacatccggttgaccattctttggtaggtcactccagcgttcttcagtccgaaaggcatgaccaggtagcagtgtacccccttatcagtgctaaagctagtgcactcttggtctgccgtgtgcatctttatttggttatacctggcgtaggcgtccatgaaggatagtaattcgaatccggaagtggcatctaccatctggtcgatcctgggcagcgggaagcagtcctttggacaagctttgtttacatcggtgaaatctatacaaactcgccaagttccgttcggcttgggcactaggaccggattggctagccattccgggtagtatacgtcacggatcatgctgttcgtcagaagcttgtccacctctttctctagggcctcggcctttaccgagtcgagagggcgtcgcttttgttggactggtggcatgtccgggttgacgttgaggacgtgggtaatgacgtggggacttatgcc

SEQ ID NO: 277801 - DNA, 555 bp, Cannabis indica
cgcatcggaggaaaccgcccccaacccttaaccatcatctcctcctcgtcgaaccacccacgcacgacgagcaccacccacatcaaaaaccaaacccacgcccatctatacccatctcgaccaaaccgccatcggcgatccaccacgcaacgcacgccggccgaacaccaccggagatcaaaggcaaacctagtccgatggatctggattgaaggcggtggtgaatctgtgttttttgggttagaaaatgcattttttaggcaagcttgatgcaggtccgatgcaggcctgatgcatcatgatgaaaaaaattgaatctgggttgaagacaaaggcccgatatagggcccaatggccagcccgatggtcagtcaattttttggaaaaaagaggaagagagagggacggttggaaaaatgggaggggttttttggagtttaggaaaaagttatcccattttacaaattatgcatagtattagtttaagagaccaatttatgagtttattaagcatgaacattcaaatttccctattaaaaaaagataattgagaaa

SEQ ID NO: 277802 - DNA, 657 bp, Cannabis indica
ttacccgatgcgcgcctaagcggttcgccacttgtgcctccctgaactctatcttccaggtccaggacctcagccattccctcaccgtggtaagtacttcgcaattttgcttttccctttatttttcttcttgggaatttttctcttacacttgtgttattgttcagcttgctgctgaggctggccgcctctccaagaacatcataaaccacggcttcgttctgtctgactttggggacatgaacgacgtcaggaaggtccttcaggaccttactgcggagaggcagatctaccaagaggctgctgagcgccaggaggcggctgccaaggccaaagaggaggaggccaaacggagggaggctcaggcggaagccatgatccgggacgaggcccagcggagggacaggttggaggcccaacaccaggaggagctgagggcacaaagcgaggctgctgataaggccaggcgggaactccgggaggccagggaggctttggacgagatggttgccaaggtgagatccttagaggaaactcaccaggtgaacatagagtccaaggccgctctagctgcggagctgaaggagctcagggactacaaggagcaatccatcaagaaggcaaaaagagccgagctcctttctcctgtttcctgcg

SEQ ID NO: 277803 - DNA, 1599 bp, Cannabis indica
acttggtcattcctacccctttggggtggattttcaggttgatgttgcctattaggggcatacggccctctggcttgataaccccccagctcaggatttggttggttgttagcccgactttcagcttcatcatcaccatgaccgtcagggtagtttggatggtagtcactgttgacctcagggtcttctcttctccctctggacctactatttcttgggcgatcattgccatctcgtggttggccacgttgatcgcggggttgccattccctacgctggggcgtccttccactatttctgccacgatcaccattattgtttctagagtttcctccaccactccgccttagacggacattgtgggagtcatcgcgtcccatatgatggccgggtaagacttgctcatcaaccgggggtggtcgattattattgcggggaaccctgttggaggggtgactcctagtcctttcttggttccttgggcgctcttcaggtccatagaccaccctctccctctggttccttggggtagggacctcccgagggtaggtttgaggtacctgttgattgttggcatcagtacccatcccttgagtgttttggttgaagtagctacgtattaagtcagcagcctcttgggtgcgacgatcttggtcgtcttggcgcctcctcatctcacgagcatgatcttcgagccaagattggaattctctcctttgattagcaagactttcagtcagggcctctcgagtttgattttgctcttggtgcacagtttgaaactggccttgcatctggcctatcgcgtctcgcatttgatccatctcggggtcaattccctcgatgtcaacatggggttcattccgcggcgtaaagatgccagggccgcggccagtctgagcttggcccgccccgtcagtaggtgggacaaaatttctaggattacctcttccggtggcgccatcagcagcgccgcctcctgcggcagtggcattggtggtacgcccagcagttgtctgtccagtgactgtagttcgaccagttgctccatggcctgcggtttgagcggtggtggtagtgccgccgtttcccggacgtgggggtcgttctccattgtttccggcaaggttgctcgctgatggaacttggtgggcactttccatctcttcgtcaggtcgctcttgagatcttcgggttaacaccattttttccggggaaaaacttgaagattttggctaaagctctcaatgaaagcaccaaaatgttgactggatttttagccaaccgacgcggagtcgtaataaatgagatttaaaccaaaatcacaataataaatgcaattaataatgccggaattcgtaataaatgtaaataaaagacaccggaatttaaagaggttcggccccggatgtcggtaatagcctactccccttgagttttattgatctgagttgcaatagtcaagaacaggctcttgattgcaaagaatgagaaatctttatttttctaagtgtttcagattgcggatccccctcccaggtcatgggtgaccccttatataggggaggggggtcggtgcttctcgcttcaggagacgcg

SEQ ID NO: 277804 - DNA, 626 bp, Cannabis indica
agcaaaagatttcaaaagcaaagcaaaaaatgtctaagtcaaaaaatacgcgacatactgggtctgcgattaaagtcggtcctaatcccaggaaccttaaagacgtaaaaccacttcgacttccaatcacccatgttcgacaccattccctcaacaccgtttatttcagaagtcgcccatttgctaaagcagtagaagccgttatggagacctacgctctttatgtcgtagaagtaactgaactcttctactgagggagccctatgaacgtactccatgtacatcgcatagaaagccaggacagtgcgataactgttgggagttaactgaaagggcgatacgtcatatcgcctgagaatggctgcgacgaagggatgaaaggggaccgatacaccacatcgaaggatgggtattgagattaccacatcctctgtgggaatgatcgcagggttagtgaatggaaggtgcgctctctgagatggtttaggacgttgaaacgcgagtcgcagcaaattcaaccttacaaaggtggtaaagtctgatttggcaaccctcgagattaaatcctcgcacgcgaagggctcgttcagttgggagtcgtcgatcgaatctgtcccactcccttc

SEQ ID NO: 277805 - DNA, 546 bp, Cannabis indica
atttttagggtttatattttttttctttatgaaatttaatttgggatttttgattctatagtttatacactaaaattgatggtgcaaatctcattaccaattgatttaaaatgtttctagacgtttgattttttcgaattggatgagacacatagccaaatcggttctttaagttcttatattttcggattagtttcattaaaatcaagcattgttttacatgtttaatcccaaattgaacccataaatagagtagaaaatcgattccggacaaaacccctagctttcccgttgttttcgtcacttttttggccggaatttcgtcccgacccgctcgggtctgaaccgggtcgcacaaaacccatttttttcagccatggaggttgctggaggttgaagacaacctgctgggacgaagcccactcgcggctgccggagagtgagagagagtgaggtagtttcgtgactccgttttcgacgattcttttttccagcattattagaatttgatttctgattttttggtgatttttaattaattttttg

SEQ ID NO: 277806 - DNA, 619 bp, Cannabis indica
atatcactggcctgccaccgagacccaacgggagagtagctatgatctcaggaggacctcacatcggaggaactacccgtaaggagctcaaacgatacgtaggggccgtgaaacacgatgaggtttgggaggttattcaactcccagctcaaaggcccaggctaatagaccagcctattacattcactgaagaagacgctaagacagtgtgttttcctcaccatgaccccttggtcatagagactcccattgccaataagttcgtggccagagtcttgatcgacaatgggagttttgtgaatttattattcaaagaggccttcactgcaataggcctaacggaccgagatcttttaccaagcggttcccaactcacgggatttaatggaacaacacttatcccaatgggaaaagtgaggctcccggtcaccttgtgcccagacacaccccaaagcactttcaaatactgcacatttgtggtggtggactgcccaacagcttataatgcaatcctcggccgaccggcctgggtagattttggtgcagtcacgtcaatacgacacttgtgcctgaagtttctcactcaagaagctgggatagggaccgtgagaggaaacca

SEQ ID NO: 277807 - DNA, 508 bp, Cannabis indica
aaatattagaagagatataaaagaattttatttaacattgattctaatacttaatattagaattttattagtttatttaagtaaaatagcaaaataaaacacaaaaagttaggtgaaagaggtgcataacatgattttagtatacaaaagatcgttttttggacaaaatagttggccaaaccgccataggctgtttgggatgcgtagaacgcgaaaaaatacccaagttaaaaaaaaaaatcgtctcaaatggataatcggatcaaaagttattaatattcaaagttttcaaaaaaattcatgcaaagtttagccctttctctaattttttctatttattttggtccttaaattattgttttattttattggtcttgaaaaatttaaatatataaaaatatgaaattacataaaaattaaaaaatattacacattatttattatttaatatactaattattatacaaaatataacttaaaaaaattataaaaaatatactaatatact

SEQ ID NO: 277808 - DNA, 339 bp, Cannabis indica
ttttgggatcccaactattttgaaaagtttaaatatattacaagtttattttcattctgattaatataaaagttaaactctgctctattttaattagtaatcccgattaggggattagggtttcataagcattttgggtagcgtgcctaattatttagggcgttacagtcacaaacctgcatgttacgctcacatgcctatttatgtctacgtagcgtagacctacgtgttgcgctcacacgtctaattacaataaggccttagaacagttcctctcggttctaattaccgagtccaacctagttatgccttgaacacattattggaaattattttacc

SEQ ID NO: 277809 - DNA, 1074 bp, Cannabis indica
gaagaacaatgaagaaggctgaaatcactaaggaaggaactctctcatctaggttggttgaatagacaagttgacattagttaagttgacaagcaagaggatgagataagagcatcatgttccttttaagtgtttcaaatagggcttagggcagaattatatgaattaaaaaagaataaaatattggacaaaaatcacttcttggccctacactttaaaggaccaaactctagctagatttttgccactttatttcaaccacttattctttttttcaataataccatattttccaattcaatcctataaatgccaaaactttttatttaataattataattaattagtaataaaattgtcatttatataatttattaattagaccatacaaagtctcttaattaacaaattgatcccaaaacctcttttcttcacaattaagcccttgattagtgaaaattcataaataagacatagtctaattttagaattataattgattaattaaaatcaattaactgagcctgcaagtaatattatctcaactagtgaggggaccatgcgcatatataaacgagctttaaataagtagatctaaaattcaccaagtaaattctcaacttattaattcctccttgcgccactatagatttggaattgaataacactctcaattatattgaacgctctatatgtaccacgatatagatacggtatgattatccattgttacaatcccaatagtcaaagatcctctataatgatctacactgaataggaacaaatttgtcgttctaccctttaatgtcttttatctttaaaacacttagctacctataaatgatactttagtaaactaatataattactgaaatgaggccttaatcatttatctctattcagtcaagctcgaaggaaatcatagttttacttctaaatacttatagaagttatagattctatatctacgtttagcgctcccacttaattgaactatcatgtccttaatctgtatgtcacaagaagatccaattggtcgactttaacaaacaaaatgaagaacataaataatac

SEQ ID NO: 277810 - DNA, 841 bp, Cannabis indica
aaagaagttgtaagtagggtaaagacaatttctcacatgaggtgcatcttataaatcaaacttaaccatcacaagtttctcggatgaagggaatattagacagcctgggctactggttcggacgcggtgggggtttctaccctgaaaatacagagtaactgaaataaacgagtgcttgaatgggaaatatacagtaacaaacaaaccacataaaagcaagacaatattttaaatatatgatgttaaccttagtctagtgttttagcatactaaaatggttatccaactattcgtagtcaaaactaggaacaataaaaatcttctatctccagtgtatgtcttctctctgtcgcgccatttaaaactgacaaagcaactatttacttatgttcactctttcacatatttatttaattccatactttcatacataaatgatgatttatcaaattgacaaagacaataaggagacgtgtaatttggagacaaaagatttctattcaactaggaagcattaatgggctattaacctttcatttgtttctccatgcctcctagggtcacacacacttttgctcatgaaaaaagaacatttaaaaataatcctttgaatctttgtctgcacatgtaaatttggatctcctatttctttgagaaaaaaaatgagtagtagatctaatgccagtacaagaaacaaagctacagtaacaattttataagttgtagaactgcaagtggtaatattcactacagcttctggataagagaatatgtttttgaacacttcaaaactaaagcggcgtttgattggaggtaataaaatagaatggaaaagaaacaa

SEQ ID NO: 277811 - DNA, 660 bp, Cannabis indica
ctaatcagattgtaatgggttttatttagggcataaaacccaacagggccaacttggccgtggagctgaaggagctcaaggacttcaaagaccaagccttgaagaaggctaagaaagatgagctcttttctcccgtctcctgcagccggtgcgtcaagcgtttcgacgatggcgtctacatggcctggtctacaaatggccagaacatcaagctcgacttctaccccaaacccgcggagatgattgctaaatttcgggagaagaagaagaaacttgatgccatactagaggcgcgcattggtcctcgccttcctccgcgaattgactaggccgttgtgaatttgacccagatttttcttattatattttttttttatttacagccaattctcttacatttaagacaattttatttatatagctgttttttatttaaggggagacaatggttaaggcctgtccccgggccctttgtatatattttttgacctgccctgagggccaggattttttatatatatatgatcttattcgatgcacatatctctcttttgaacctgccctgtgggtcaggatgtttatatatgcttcttttttgtgcatactctttttttttacctgccctttgggtcaggatattttacttagcctgttttttgt

SEQ ID NO: 277812 - DNA, 925 bp, Cannabis indica
gatggctagtttgatgattgagaaagctttgagtttttaactacaagcgttggcttactttaatggcgtctctttgtttctgagtttgggtattggttttgttgcttggaaaatgatctttaggatgtttagaacaggtctggaaggtttcatgtgaattggggttgatttggttgagttatggaatttttggtattcctacactgaaccggaattccggtttagagggacctgtaggaaccagaatttcggttgggaaccggtctaccgattggggcaattttgggaactctagtttttcccatttttgtgatgtttagggtattgccatgttatttatcgatagggaaacttttagtttcaagtttaagtccctagaaagtgatttagggtgttacttacctatgttatgattgatgtgatttaggagcctgtaattcgccgagcagttgttccactcaggttggccagcacacctgaattcggaatcaaggtaagattagtataatgttatgcatatgttattacatgtttagcgtacatgttgtttatgcctgttagattacattgatagcagtaattgtatacatagagttgtactgattactgataaatgtatgttggctgacatgttgatcgatgatgtcacatcaatatggctagtgtatgactagtagcatattgagtataggctgacattatgatcgatagcattgtcgtatgaacgttctagactcagtacggtgtgggacacggggattagggttatgatcaggtgtatgggtgtcaggttataacccgggttattgtatgttttatgttatgcttttctcactgagtctatcgactcacagtgctattactatgtgtagttaagggcaaagctaaggttgaggagccgtgagagcgagcagatgaagattgt

SEQ ID NO: 277813 - DNA, 726 bp, Cannabis indica
ttgtgttagctttcagccgtaaggctcgtttcagaactgcattgcgtctgttttccattttgctttcttcaagcttcatgaacttttttgccctaactcaagaaaaactttatgacttcttgatattagacttttcttgaacatgatcgttctttaatctgttgggtactcctggtcggcacatttgcttgtttttttgcttgatactccgtccaacactcatcttgcgtgttgtcttttgtagatgaacccaggtgagtcttgggagcccgagcatcgaatcaaccaggaactgcttcaacttctgcacgaagtccatcctcgtcttcgtgctagtccttctgattctgtacccagccatagaatgatggctcgtacaaagaaaactacgcatctggctgacgcttctaacgctcaggtggctcggcttgccactctgcccgacaccgaataggatttggcagtcccaatggaggaggaccgtgagggggacgctgaagtccaggagattgaggagctcgacaaggcgcgttcgagcagccttcccgctactgagggagaggaagagattgaacaccctaactatggggagtacaatgaggctgggcaaccagttgatgctgacggggacgtcctggttgtgggcgttgattacgtcaccgaggagcttgctgaggcagttcctcataggacgcagggtgccttgggcgccagatgggtgcgtcc

SEQ ID NO: 277814 - DNA, 552 bp, Cannabis indica
agatcctggtaaaataattcccaacaaaagtgtctttcaaatccaaataaaaaccagttcctaataacaatctaaaatgcccaattgcttccacttccaccgattgaccatcgcccacaaagatgtatctttcaccatcacttggctttcggtagctcaggcaaccctgcatagaaacacttatgtgagtagtagcaccagaatctatccaccaagtgtttctaggtactgaaactaaattaacctcagaacagaccaaagcaagattaatacctttctttacacgccatgcgtgatatttggcacaatctttcttcacatgtccaggttggttacaaaagaaacaacccttagaatcctgttgttgtttcttttgaactggacccttagcagcttcattctcaaatttccttttcttgcccttatccttaggggtagtggccaaatgagcactttcagttttgtcctttttcaacctttcttcctcttgcacacaatgagaaataagctcgttgagagtccatttctccttttgacagttgtaactaattt

SEQ ID NO: 277815 - DNA, 516 bp, Cannabis indica
tatgatatatatatatagtatatatgttatatatatatgagatatgtaacttatatattatgaatttaatattgatattatgtgtatgttacatatgagatgtgattagtaacatacatattatattaatatatgagttacatagcatgataataataaaatagtgtttattactattgtgagaattattatcatctattttgtgaataaagaatattttaaattctttttcaatttggtggtgaacatctcactttatgagataataaaagatggcttttgagaagttacatcttttattggattataagagataatcatctcatattatgagataagaaaagtgaactatatgagagttacacttatgagaattgtcttgtcatagcaagaacaatagattaaaagtggatccaaacttgtgaaatgagccataaattagaagagcaattttggactcaaaagtaaatgaatcaatgtggattcaaaaaatagtgaagcaatttggaatcttaa

SEQ ID NO: 277816 - DNA, 674 bp, Cannabis indica
gtgtatgtaaagcaaaaataaccaagcatttgaatatgcatgaatgcatgcaaagtgcaaatcatttatctaataagccacatagagttatgatcgtacatataaagcaaatataaccaggcattttgaatatgcatgcatcatgcgtggatgcatcgaattttaattacaacatttttgggtaaattatgattagtatatgcacatgtgagatgttttaatctttttaattagtaaataatcttttggagtgatgtttatggcagaaaataaatagtcgtaatgcatccatttctccacaaacgacaagctgaagctacctacttcacataggctcaatgtttacttgctcagctcaatagaacaacaacacattaaaacaaaaattaacattaataatattcataaaaagatatttggatatatgatcaagatcaagtactttagatcaatttgcataaaaaaaaatactttggatcaatcttttgggcttaagcaaggttaatttagctgaagcccaataaaatgttgcttataagttgttcgcccatagaaagaaaattgggattctttcacaataaacaaaaataacaaaaaaattacaaaataaggttataaagaattttaaatatttttacaatttttattattttatttataaaaatacagtcttt

SEQ ID NO: 277817 - DNA, 511 bp, Cannabis indica
taagtatcctttgccaaggattgacgatctctttgatcaattgcaaggctcggctgtgttctcaaagatagatctaagatctgggtatcaccagctgaaggtccggaaggaagacatacccaagacagcattcagaacacggtatggacactatgagttcttagtaatgtctttcggactaactaacgccccagcagccttcatggatatgatgaatagggtgttcaaggagtacctagataagtttgttgttgtattcattgatgacattcttatctactccaaaaccgtggaggaacatgaggaacacctgaggatgactctaagccgacttaaggagaaccaactatatgccaaattcaagaaatgtgaattctggttagagaaggtggcattcctaggccatatagtttccaaagatggagtcgaggtggatcctacaaagatcgaagcggtcaagagctggccaacacctaagactgcaagtgaagtaagaagcttcttgggtcta

SEQ ID NO: 277818 - DNA, 566 bp, Cannabis indica
tatcaaaacccgttggtggtgggtttgaagacgaaccctcctccacattcctagtccttttaggtgccattttttctttttttttttttgatactttttcttttcttttctttttttttttttctaaaaaaaaaaaattgggcagcacctccccttaattttctatatcccaaaaattcaaaatcactcaaacaatattctcaaatactcaacaccacaatacaatgataacaaacccaatatcaacaatattcttgcacaacacactattataccacccaaaatctagaaaagttaatcaaattccttaaagattaaaggaagtgatacttacaaacccgaagaagctttactccacctccattgttgaatgttcttgaaaacttgaggttgaagatgaagacaatggtgattttcggatttggggtgttatgggtgatttttggtatgggttttgatgatatgtgtagattgatgagtgaaattgggttttgaatgattgggtttgagaatttaagaaagatgaaaagattgaagattggtgatgaaaaattgaatttttgaga

SEQ ID NO: 277819 - DNA, 483 bp, Cannabis indica
tttgtcttttagtgacttgattatttgaaaaataaatgttgtttgtttaattaattggctgaagtgaaatattatatgtggctttgtttccatttattcatttttacaaaaaaatacaagttagaaaaatagaattttcaaacactctctctctttctttcctctcatttcggccaagccttggagcagcaaggagctgatttctccattgatatttgcttgataattcatctcttcttaaggtccattgcaagctaggttagctcttgttcttccttctttaatttcttgaaaaaaatgatgaaaatggtgatgcatgcatgatgtttttagttgttgttgctgctgtatgttgtggatattttcagaggtttaaagcatgtttttagatgttaatgaagcttcttgtagtacttgattgttaggttatttaaggttatggtttttatgcaaaaatatgtgattttgatggaaatgtagtga

SEQ ID NO: 277820 - DNA, 727 bp, Cannabis indica
ccctaaagtataaaggtacttctaaccctatagattatcttgaaaaattcaatactataatggaggtggatcaggtaccacagcttgcaaaatgccgcattcttgcggcaacactcgaggagaacgcccacgattggtttacccaattgcctgaggcatcaatatcgacatgggaaaccttcgtcgacttattcctcacacatttccaggctacgatgacctataggccgccttatacgactttggccaacatcaaacaagaacctggtgagtctttacaagactattttaaacggtttaatgcagaggtaacaaaagtcgagaaggctcccgagtcttcgcttgtttgtatgctgataacaggtattttgccgaggaccgacttctggaaggagttacaagctcgaaggccagaatccttagtcgaattcttcgccatggccgaaccccacaagagaatcgagaattctctggcagagttggagaagggcaaagacaagcgcaaatcaccaataccgcgttcacgatctcgcagtccccgagggaagaactccaggggccgaagcccaaggagacgcagcccgcggagacagcgaagtccgaagttggccaagtctcctcccaagaaggaatcctcgccgaagaggaagggcggacctcgtttcgtcaattatactgaactcgcagtaccccgagaccatatctatgcaatcgaagagagaaatgg

SEQ ID NO: 277821 - DNA, 534 bp, Cannabis indica
ccagaacccagacgaagaaccaaacacgaaccaagacctagaccagggacccaaaattgaacctaaacaagaatcgccgacctagaacctaatacagacctccccttagaccctaactgagactggaactcgggcccgtacatggtcgttacccagaccggaactgagactcggacctagacctaaatctgggacccgatcccaaacaaagacttggacctatagagggatccgaataagaacctggactcagaccaggacccagacttggatcgaaatgctggacctagatttggaccgagatccggacacagacccaaacttggacccgcacttaagaccccaacttggacctggacccaaaccaagaccttgatcggggaccagacctggacacaaactcggacatagactcagacccgaactcaaacccacacctagaatcaaaccgaaagcaagacccggatccagacccaaactcgaacccatacaaggatcagaacaaagctagaaccagaactgaatcaaaactca

SEQ ID NO: 277822 - DNA, 679 bp, Cannabis indica
cgcaggatgttgaagaatggaacacatttatccgttgattttgacacgaatatgctaagtgcggcgattcgacctattaggctttgcacctctttggtttttgttggcgagtttatatccaggagggcttggattttttctggattggcttcaattcctcgagcattgacgatgaagcctagaaactttcccgagctgactccaaaggagcatttgaagggatttagtttcatgttgtatttcctaaggactttgaaacattcatccaggtcgtctatgtgccccccagcctttctggatttgatgagcatgtgatccacgtacacttccatatttatgccgatctggtctttaaacatcttgtttactaatctttggtatgtagctccagcgttttttagaccaaacggcatgacttccatattttgtgcccggttgttgcatcgacgagctgatcgatccttggaagtggaaagcagtctttagggcatgctttgttgaggtttgtgaaatcaatacagactcgccatttcttgttcagcttaggcacgagtacggggttcgcgacccaagccaggtaaagagcttgaatgatgaagttgttgttgtgcagcttttcaacttcatctttcaaggctactgctcgttctttatccagcaatctttgtttttgctgaac

SEQ ID NO: 277823 - DNA, 514 bp, Cannabis indica
tcttggggtatatgaaaaagaaaaaatacgtgggtgcttgtttggtataattgtgcttatggtataatgtagcttaaatgactttttatctacccatttacctaagccatgctaatataaccgaaaaagacctattcattccgagcaaaaattatcaatattagtggagagaggtatgtcatccaaacttattgaacatgggttagcggaatgtcggaaagtgtagaatggttgtgatatgaatgtcaaatgcaatgttttgtgtctgtatgaattgcttacttctaaatggtgcatccaagttagttcttagagttattgagttgaaattctggttattgatttgcttgaagttgtgcaggtggtagtggtagttcaatcattggaaggtttagttatctattgcattgtttttttttagtttagttgagttttagctttactcgggggcgagtaaagattcagtttgggggaatttgttaggctatttttagcctaagttttgggtcacatt

SEQ ID NO: 277824 - DNA, 580 bp, Cannabis indica
tctgtttttgctgcatagaaagtcaagttataagttagtgaactgagagatccaaacctagccatctcataaatgtgttgttgttgttgtgtcgcggggttaaaatgtaggtggagatttgtcttcgcggatttgctccatcgcttcataagaagagtattaggtattcttctcatgtttaatcttttcattgtagaccacaaatgtctacaagggtacctctgactttcatatagcatgcagctacagtgtagtgctcgttggccttcatagtaatgaactcggtattggacttccagatgctgaaactttccaatggtgtatatctgccactctccttcctcctcctgacctaggacaaaataattattctctaaatcaagctgctcagcaaccttgtggcacatagttcttgtgtagaattcagcacattggttgtagtacgtggtcaagcatgtaggattaggtgggtgaggtcgagtgcatcttcttttgaagtcatttgcagtctcgttgtgtctgagctttgagactgtcatatctatggttgttacaaattcacgcaagcaataattcttct

SEQ ID NO: 277825 - DNA, 348 bp, Cannabis indica
tttcatgagcctccacctattcgtttcatacttttgtaagtcttactaatagtagccaccattagggtgatcaatactaagaataaaacactaacaaataataattatctttcgagattctacggaattaaattgctaatgaacgttcatccattaaggatgattactcactaaaacagaactatgtagctcattattttaaaaaaaatgtatttttatttaatcatttattttagtttatctattttaataatgaaaattagttaattttaagttgctccaaaattaattaaataattaattttcaactttaatttaattttcaaaaattaattttcgaaaattata

SEQ ID NO: 277826 - DNA, 955 bp, Cannabis indica
gtggattcattttgatttgattgtagcctgaatatgcgtccatgaagcttaatatttcatgccctgctgttgcatctacgagctgatcgattcttggaagtggaaaacagtctttgggaggtctgtgaaatcaatacagactcgccatttcttgttcggcttgggcaccaatacaggatttgcgacccaagctgggtagaaagcttcaattatgaaattgttgttgcgtagcttttcaacttcttcctttagggctagtgctcgctctttgtccagtagccttcgcttttgttgtactggccagaaattgggatcaatattcagaacgtgcgaaatgatagaaggatcaattccgaccatatccgcatgtgaccaggcaaaaacgtctaggttttctctcagaaattttatcaattctaattttacttcgagcgacaaaccctggccgggatatctggatcgatttcgatctcttctaattcgtccacaggtccaacattactacttgggtccccaagttgaggatccacatcttcatccccaccttgggaagttccttacttggaaatattttttccctctagctggaggatacttccttcttagccttggccactgcaaggttataacattcccgagcagtctgctggttttatctcagacaccctaccccattctttgttggaaatttcaggcacgaatggaatatcgatgtgatagcctttaagtcatacaaggcttgtcggcctagcattacgttaaaagctgaaggaacatctaacaccaggaattgcgccatgatagtcatgctcgtcagagtttgtccaatagtgaggggtaagcgaatttgtcctagaggagccactccttggccggagaaaccatagacaggcaggagacatggggttagttccttgagctgtagtcccatcttttcataagcagttttgaacaa

SEQ ID NO: 277827 - DNA, 791 bp, Cannabis indica
gagaaaacggtgcagagatcaaggaaagattggtcaagaaagttggatgacgcattgtggacctatagaacagcgttcaaaacgccaatcgggatgtcaccatatcggttggtgtttggaaaggcttgtcatctaccggtggagttagaacacaaagcttattgggcaatgaaaactctgaacatggatttaaaggctgctggacagaaaagattactacagctggatgagttggaggaatttcggaacgaagcttatgagaacgctaagatttacaaggaaagaactaaaaggtggcatgaccgaaacttagtcaggaaggagtttcaacctgggcaacaagttctacttttcaactcaagactaaagttgtttcctggtaaattaaagtcaaggtggtcggggccatttacagtggtcaaggtgtttccttatggagcggtggaactgaaaggtgaaggccctaatactttcaaagttaatgggcagcggttaaagctctacttgggaggtcaatttgatcaagccaagtccgccatgattctggcgccactatgaagaactcgatcaacgtctagctgtgcgacgataaaggcagcgctaattgggaggcaacccaagtgttctttatgatttagttgaactcttttatgttttagcgttattttctttttctgctctgtttagttttctttaagaaattggtgattaaaaaaaaaaaaagacccagtggccgcggctagatgtaggccgccgcggccaaaaggtccttacagaatgaccaatttttc

SEQ ID NO: 277828 - DNA, 586 bp, Cannabis indica
tccaatatggactccactgagcgcaaccattcctcagcttcaagtgagtccgagctcccattgaatattggtggttgttgtttcctgaatcgctcgtacacaggttcaaaacgttgtattggttctggattcactgcagctggttgaagagctaggtgtctaacgggtggattttgattccggcgtaactcctcattctgagctcgtagccttgcaatttcttgagttagctcctcacgtatacgagcgttttctcggagtatctcagcttgagcattgggaggtgcttgttgttgttcaagtgctacttcatctaccggtgctaccgatgctccttgtctacctcccctaccgctttggcctccacgtcggcctccgcgtcgaccatcacctcggcctccgccccttgcgggtgttggagtactgcatccacgtggatgtttctattatcgttgattcgaactgatctcttggagacatttttcccttaatgttccttgtttgtttctaagaatttctaaagaagataaacttaaataagatatcactattttcaaaaaaaaaatgcccatacttgcataactag

SEQ ID NO: 277829 - DNA, 650 bp, Cannabis indica
tgaaatggtgtggctttatgtttaaaaagctttttgtttcatttcatcaaaaaattacaaacttagaaaatagaaaaaaattcaaaaacctctctctcttttcttctctctctctcggctggttgcatgggactctagggctgggattttcattgatttttcaagatagcttcatcctaaattgtgatctcttgttgtggtatgtgatttctagctttctttctctcttttcttgaataaaatgttgaaaaagatgagttatacatggattatttggatgttgttgttgttactgttgtgttttgttgttaaattctgtaatttaagcatgttaatttgaagttatttaagctgttagtaatgcatgttaattgctttgtatcaagtttggaatttttagctcaaaaacatgatttttgaaagaaatgtcttgaatctgttgcagttatattgttgatgtttttaattgtttccagaggcttagttatgcttgtttaaggggatttgagttggtttgattgcatgttagctaggtttgctcaagtttgagtttagaactcaaagcttgagctttaatggtgatttttgattatgtgcaatctgggtggttttgttgctttagaaatgttctaggggttgtatagaacagg

SEQ ID NO: 277830 - DNA, 585 bp, Cannabis indica
ttctccagagggcctaggtctttgcaacttatgaccgggcggaacttgacgtcgggggcctagtcacgacggagaattgccggaaggccaagctcatcctgccgcaccaatcagtggaggactctaacctttctaaggttatctgtccaaatgtgagggtgcccgccgcggagaagaccttccgggatgaactcattgccaccgccaagaagaagtaccagaaatatctctaccggaaggcccaggagaaggcttattccaaggcccaagccgcttccgggaggccacttcgcgtggagagcccggtcgagaggagaagccaagcgatcgctgggaagccccttcacattggggactcagctgagagaagggctcccaggccaacgccttcggctctggtgccaaacgctggggctcctggcgccagcacttccggctctggtaagtctcctttagtagtacattacgttccttccgttggcgaatatgccagtcttaggcctgtagggttcgatgagcgtctccataggtttaggatgcccctgacccggtggggagaccatatgaaggaatattatttttcca

SEQ ID NO: 277831 - DNA, 901 bp, Cannabis indica
ttgtgtaatatggcgagcatagtgtgtacgcgctaatacttcgctcctgagatgcagcacatgcatgaggacaaggaaacttcatgcactggaacaagccgcaagtgcaagtctgttcctgcaagtccactacgccaccggtcagaactgttcctccagggtgaacctgcaacgtgtaaggtccgcatgagtcaacgttcaaataccgacctttttcaaaatgcaatgccaagtcctcctccatttctggtgctaggggtttcgtccacttgtcagctttttcttttcgtgaagcaaaccacttttggactttggacctcaggaacagcagcagtgatcgggaagcctcttgcatccttagttgtgttgttgaagctctcagcccagttgctcgtcattacattgtaacgtacccctggaaagtacgaccggacccatttttcaaatccaatttcctcaagatattgtgcaaccgcagcattcattgcccgaatgttctcaaattctctgtgaaactctgatcttgaatacgtgtaggcacacgtgtaaatgtgattcgtgaagacgtcagtcttgaacttgtggttgacgttcataataatgtggtggtagcatgcaccgtggtgtgcatcagggaacacgatatccaaagcacgaacaatgctttgatgcctatccgaaacaaaagctaagttctcaacatcaccaatcgtttctttcaattttctcataaaataggtccaggaattgtggttttcactgtcaactatagcaaaagctatcgaaaagatataactccctgcatccagagccactgcacacaacatttgcccaccatacctagtcttcaagaaagacctatcaacgcatacaacaggtcgacaaaacctaaacccccgaa

SEQ ID NO: 277832 - DNA, 324 bp, Cannabis indica
  modified_base (16)..(16): a, c, t, g, unknown or other
ctttatctttttaaanattcaataagaaacagaagtattttcatcacttagtatgtcatttggtctatgttatcatttatttgtttatttgatttataaattcatccaaatccttatcacatttatattcttgtttattgtgtcgtcagcacagtggaaagtaatcaagattatgtgattaaatatatattcatagatttatcagtacacatggtttaactgatatgataatctacaacatagtttacaagcaccttggataagtgctacgtcctttttagggcattggttaaagtatagatcgggttggatgcatggagtatg

SEQ ID NO: 277833 - DNA, 289 bp, Cannabis indica
aaaatatctcaatttaactaagtatcttttcaagatttggaaaatatctaatttaagttgttatagaaagaatctataataaccaacttaaaaagtttccaaatgaaatttaattaaatatcaaaattaagtggtaactacttaatttaagaatattccattttaagtttaaaatcaacttaaaaaaatatcttaagaatcttcaataaccaattcctagaattcctcaacttaatattaaattcaaaagatattcaaatttaagttaataaggaaaattagttagaaa

SEQ ID NO: 277834 - DNA, 619 bp, Cannabis indica
ggagtgaatttaaccaggctttagacttatcttttaatgagaatggaaaaagtctaagcctaacagattcatcagaaaaattttgaaatctaaaagtagagcaaatttctaaaaaatctttcacatgcatgtatggatcctctttacctaaccataaaaagatggcaaaagttgaattatggaaggtttcagctcaaaatgtgtagcatttgtttcaggaaaaataatgcatgatggtggattagcagaaatgggagaaaaatgatcaataagagttttttcttccacatttacttgatttggttccatgatgtcagaattttcacttttaatttcaacccacaataattttctttttaccaaacgatttttagaatttcgttcccagcgaatcatacaccaagtatcacaaaaattaaaataacatgaaaaaattaggaggcggtgcctaccatataattgcgtaaataaagactgaatttaaaatatagcgggaaataaataatatgtatatatttgacagaaatataaatactaatattaatatatgtgcagaaataaagacagaatttaaaatatagcgggaaataaataatatgtatatatttgactgaaatat

SEQ ID NO: 277835 - DNA, 627 bp, Cannabis indica
aataatatttaattaaaactatataaatttttaagagtatttgttagcttatctttatcacataacaaagaacaaaaaagttaatcaattactttacatgtcataattctaatattttcatttatatatttgcggacaaaaaagaccaaattggttgtgtccttaccttattatagagtcaacaaaggtaaaagaaaagcaactagctttgaaaggtataataatacaattttatccttgaggaaagtctgccataaacatactacgaacttaggccttaataatatagccaccaaaaagcttatcaagaagatggcacaaacgaaaaaattaaaacaaaaaataaattgagtaatttatagtataaatatttgaatttaatttgaaataaaataattttaaattaatttttataataattaaataaaaagagtaatttgcggcaaaacccctttaactgtcaatttacttgcaaaaaccatccaacctcatatttgtgggaaaaccctaaagtattgtttcgtttacatttttaatgtgtcgtctattcagcctcattaagtcctaattttgctcacgtggcaatgacaggtcactaaaaaattatcctacgtggccatattttac

SEQ ID NO: 277836 - DNA, 759 bp, Cannabis indica
aagccatgaagacgccatcatcaaaacgcttggcgcaccggctgcaggagacgggagaaagaagctcatctctttttgcttctttgaggcttgttccttgaagtccctgagctccttcagctccgcggccagggtggccctggattctaagtttgcctggtgagtttcctctaaggacctcaccttggcagccatctcctccaaggcttccctggcctcccgaagctcccgcctggccttcgcagtggcttcaccttccgtcctcagctcctcctggtgcctggcctccagcctatctctccgcagggcctcctcccggatcattgcctccgcctgcgcttccctccgcttggcctcttcctcattagctttggcagcggcctcccggcgctcagcagcctcctgataaagccgcctctcagcagtaagatcctgcagaatcttcctgatttcgtccatgtccccaaaatcggacaggacgaaaccatggttgattatgttcttggagagacgaccggcttcagcagcaagctaaaaaataataataatacaagtaagaatctccgaaaaagaaaataatgaggaaaaaagtgaactacaaaacacttaccacagtgagggagtggctgagatcctggacttggtagatggagttcaaggaagcacaagcagcgaaccgcttaggtacacaccaggtaagctaggacgcaaactcgtcagtcatctccgtagcaaagggagctaaggtgggcccaagga

SEQ ID NO: 277837 - DNA, 561 bp, Cannabis indica
ctcggccaatccctgacggattctatctttctcggatccaccttaatcccatctttgctaacaatgtgcccaagaaaggacacctgagatagccaaaattcacacatcttgaacttggcatataacttatgttctcgaagtcgttgcagaaccatctggagatgttgctcatgctcctcttctaattgagagtacacaaggatgtcgtcgataaatacaataacacaaatatcaaggaaatccttgaataccgtattcatcagatccatgaaagttgtgggagcattgctcagtcaaaaagacataacgagaaattcatcatgtccatacctagtgcggaaaattgtctttggaatgtcctcctcttgcattctcagctgatgatagcccgatcagagatcaatctttgaaacgactgtcttcccctgaagttgatcaaaaagatcgtcaatcctaggtaaaggatatttattcttgattgttaacttattcaattcccggtagtcaatgcacattcacaaatacccatctttcttcttaacaaacaataccagagctccc

SEQ ID NO: 277838 - DNA, 786 bp, Cannabis indica
actctacgtgcaaactactgtcttacttgttgtcctgcaataatagagattccaaatccctgggtgctcctgatcatgtgtcgataatcctagtcacacaatgtgggatttcacaaataggcttaatccctaattccactttcacataatataaatttggcattcaaaatacagataatcatatagagctcgaaatgagctttccaacaatgtaaagaacgtccaaaacagagtcccgagtcaaaagttatggccaaaacaaaatcaggaaaagggatggctctctgctaggtttatggctgcggcgaccaaaaatctggccgcggccactgggttcgaaaaacccaaaaaaccagattttaaggtctaaaaatgcccactttccctaaatttcgagcctcaaccaaaaagagggtaaaaacataaaatgcatgcattaaatttcaatattaaaccccaaaaattcagattgcataatcaactcaaaatcatgctcaaactccaaaaattcaagctcttgaacttgagctttgttgacctcgcttttagtcaacgacagtgagtcttatttagtaagcgataagtgatttatagcaatcgatatatggtaaagtaatgtaaagacacaagaattttataaaggttcagccccgagcggttcggtaatagcctaatcctcgtatttgtattgattcaagaacaaggagaaaggttcctttgttatagctcttacaacaatatctctgaatatgaattcttagataatatctctagggtaaaaatctc

SEQ ID NO: 277839 - DNA, 610 bp, Cannabis indica
acggggatgttcggggttgaaaaattcgacttgttgaaagatatgttctctttagacaatatgtgggagaccataactaaggatttaacaacagagccaaaaattttcgtcgtgggttggaacgatcacttctttgtcttaaaactagaacttcatgtttgttatattattgattcatatggaagtagattatttcgagggtgcaaccaagcttatatgcttaaatttgacgattcaagtgtaatttacggcaccgatcaacaaattctttgcacgggcaaagattgctgcaaggaatatatgagaaagtttttaagtagtaatattgttatgaaactggagaaggaatacaagaggggatacattcaattaccttatctatatgagaagttgcaagtagacatgagctatatgtgcttaaatgctccatcgccagtatcatcttcatcgacgtcttcctatgatgccccatcttcccttcaattgtgatgattcttcttttattagtgatgctcatcttcctaatgaagagtaaataagagttgtgtgttatgtaaatgttcagttaatatgtaaatttatttattttattattttgtgtttatgtaaa

SEQ ID NO: 277840 - DNA, 505 bp, Cannabis indica
gaaaagcataaatcataaactatacatatatcccaggttatgatcagacgcccatacccctgaccacaaccctaatcctcgtgtcccacacggtactgagtctcgaatcttcgtacgacggtacttttgacataataacagcctatactcagtctgtaccgatgtgttacagtatcagcctatactcggtatgtcagtcatactctgagcataccgatgtgatacggtcaaacaatacagtaccatcgaccataatatcagcttatactctgtaggctagccgtaccgatgtgatactattggatggtacaaagccaacatacatatcgaatgtaatctaacaggcttcataaaattcacgctaaacatgtaaatacatatgcatactgttatactaatcttacctcaattctgaattcaggtgtgcggtcaacctgagtggaacgaactgctcggcgaattacaggctcctaaatcataataatcagaacactgataagtgaca

SEQ ID NO: 277841 - DNA, 714 bp, Cannabis indica
aaccgttattgtggcctcttttattttgatgctgggctctgccaagcgttccactggtactacccccaactctttgatttcactatctgaagctaacttagccagacagtccgcgtgagcgttcttttcccgggggattctttctattttgtagtccgtgaactcgtggagcagctcccggactattgtcacagacgcggcaattcgctcgctgcgtgtttggtattctcccgatatctggtttacgaccagctgggaatcactgtagacttccactcttttggctcctacggcttttgccaatctcagccctgctattagggcttcatattcggcctcattgtttgaagctgagaagtcgaaccgtagggccgcctggagtcgcagtccggtcggagatatcattgccactcctgctccggacccattttcattggaggctccgtccacaaatactctccatgtggggatcgacggtaccggcatattcgcggttgcctcggctttgttgcattcagtaatgaagtccgccaaggcttggccttttatggagattcggggaatgtaatgcaagtcaaattgacttaactccattgcccacttgaggagccttccggacgcctcaggtttttggaggacttgccggagtgggtggttggttagtatcttgatcggatgtgcttggaagtatggcctcagtttcctcgaggctat

SEQ ID NO: 277842 - DNA, 729 bp, Cannabis indica
aaccatattgatttgattgttcatcacaatgatttgtttggttggcggcttacgggtatttatggggaaccaaactgggctcttagaaggaacacttggaatcttatgcgaactttgaaagcagaatcgactcttccttggtgtattattggtgatctgaataatgttttgagtcaagttgataagcgtggtgggaatccgtatcctaactcgcttcttgaaggttttcaacaagctgttgccgattgtgatttagtggacttggagttatttggtcatccgtttacttgggagaagggtagggatactgataattttattgaagtccggttggatagagctcttgccagtttggggtggatcgatttatttccaaattctcagttgattaatcttctgttcaccacgtctgatcactgccctctgcttcttgatccttcctttcgggttccttctcggtctagtaaagctttccgttttgagaaagcttcacttcgtgaagaaaattgtttttccatcattcaggaacaatggggtggttgtaattctaacaacattgtggataagattgtggctgttcaggaacctctggcaacttggggacatgatttgacgggtaattttaaagagaggattcaaaattgcaaaagaaggattggtactttgaagaattgttctgatgattcgtccctggttgagtaccgtgctgcaaagaagcaacttgctgag

SEQ ID NO: 277843 - DNA, 593 bp, Cannabis indica
gtggggagcttgtccacaaacgtattcaataggagtatttttggcacagcataagggcctgactccaaacttatgtcgttcctaccatcataaaaatttaagaaatcaaggaagtatggcagtaactcacagtacgctaggagatcaggcaagatcttcttctgattcttctttgtattcttcatgaagttgaatatgaagatcttcctccttaaaatgctaaagtgaagaaatatccaatggcgttgaacaccgacatgacacgatccgacaacatcgtcaacaccgatccaaggttggaagcaaaagttatattgccccaaaatgtaatcgatgaccatgttgtcatacctgatgacacttggatcacgttttgcctttataaattcagcatacactcccttaagagttgcatcaaaatacgagcatgtcgtcgtcactctcttattaacgctggcatcatataatatgctcttcctaagatagtaaagtgcaacattcagatgctgcacacaataaacaaaaacaataaccagttaaaaattaaaaaaagcaaagaaattattaattatagaaacagatagaaaaaaaaa

SEQ ID NO: 277844 - DNA, 1011 bp, Cannabis indica
gttatggcatttgtgttctttttttcttttcccttgaatttttttctatggactttctcatatacaaatgcatcaagctctatttttgcactcaaatcttccatttttaataaattcaagttcctgcagtaaatcatgctcatgaatgtaaaaattaattgattcataaatctagtagtcatctgctaaagaaaagtgaaaactagaactccatatatgatagtaatgccataaaaatgttaaaatataacccacaactttatctaagtgatcaaaatatgagtacacatagatctcctttgccttagtttccttctgtttctttggccgaataagtgttagttgctaagatattggatttaatgattcaaatgaaacagttaataacacaatgacaatcatagctaaacacacataaatgtaataaaaaaagtaacagaatataacataaattatattaaaaatatacaaataaaattaaacaatagagttatcaacagtttatagccaatcatcaattctaataatgaattcagggagcccaagttgagagaagaatgacttgagtttcttgatgtgtcatctctaagttaccttctctcaatgctgttgcttctctttccatggtgagtggcgtcctagaccttcttcagaacttccgagatcgattgacgacctacatgtttccatctcctcctctcctcccttcctcaccttcatgcttgttgagaatcatgaggttccatctcaaaaccaattggcaatgagcagggacggaggggactttagcccatatgtgggctaaagccctcactcaaatgtatacatcaaattttttatatgtagatatatacatatattaattcactttgctcaatttattaaagtccaattcacaaaagccctcactcaatgtcttaatcatgattcattagcctactcttattctaatcaagcccattttaaaaagtgtccaaatcaaaatataaaaaaaataatacttattaaaaa

SEQ ID NO: 277845 - DNA, 737 bp, Cannabis indica
aatttcaggcacaagtgtcgtattgacgtgactgcaccaaagtccaccaaggccagtcggctgaggattgcgttataagctgttgggcagtccaccaccacaaatgtgcagtacttgaaggtgctctggggtgtgtccgggcacaaggtgactaggagcctcacttttcccatagggataagtgttgttccattgaaccctgtgagttgggaaccacttggtgaaaggtcttggtccgttaggcctattgcagtgaaggcctccttgaatagtaaattcacggaacttccgttgtcgatcaagactctggccacgattttattggcaatgggagtctctatgaccaacgggtcatggtgaggaaaacgcactgttttagcgtcttcttccatgaatgtaatgggctgatccattagccagggcctttgagctgggagttgagtaacttgtcagatctcatcgtgttttacggcccctgcataccgtttaagctccttgcgggtagttcctccgatgtggggtcctcccgagatcatagccactctcccgttgggtcttggtggcaggccgggaatatgttgggcatctccgggcagagcaattggagccaatactcctgccgcaccccctgacgctccttgtggcaaagctccagctgcctgacccgggttgagatggggcaaccggtttttgatccactcgtagaggtgtcctaatcggatcaagttttcaatctc

SEQ ID NO: 277846 - DNA, 347 bp, Cannabis indica
gaaaatgggaatgaaaaataacaaaatggtaaaattgcaaagtgaggcccaatatcccttgtttggccgcccactatgcatagcaattaccatttatagttttcattattttaatgccatacaattctaacccaaacctagaaggaattctataaatagaaagtgttggcttcaggaaactcatcactttgcacattgtttccttcagagaaaaagccatgcatcactttcctctctcttttcttctctctagatttcgaaaccttgagtgtatgagtagtgcccacacacatcaagtggtacctcaatcatagtatgtaagactatggaatttctgcatcaaagaa

SEQ ID NO: 277847 - DNA, 606 bp, Cannabis indica
ttttagtgtgttggcgcactcagcctgaatgtgaccatatccatcacattctctgcacttaattcctcggcccttttgatcagttgaggcttgtcctggtttgaaatttactcctttgtttctcttgagaagattttctttgtcagctggtgaatttttcctgtagttctttttcaagaattttgcatagtttcttgttaacaaggcaactgtttcatctgtaatgccattcaaatcttccagaacaggtttcttgttttcttggtgaataagtgcaatgccagcatctgacttttctttcaccacctccttttgtttcttggttttcttccacctagacagtgatagctcatagttttgcaaagatccaatgagttcgtcaagatcgagttcctcaatgtttctcatttcttcgattgaggtaactttggacatgaatcttctggggaggacaccaagcacctttcgaaccagtttcgagttagagtaagttttccccagagcatacgattcattggagatgtcacaaggttttgcatggaattcagccacagactcatcctcctccatggtaagattttcgaaggcctttgccaaggcacgcag

SEQ ID NO: 277848 - DNA, 860 bp, Cannabis indica
gttttctaatataacctcgagacgctagacttcgtccaccttatggatggttattcgttgaagcaattaacaccgtaaagatctcaaaagataagtatttgataagtttttgtctctattagacactcccctacggtgactacttagagttaagtttaagaaatatcaaacaatggtggaagctcataatataagaataaccttgactcttgcctactgggacaacgttggattcttatttggatcgaataaaaggttggtagaatggtgtccattttagatgatctgacaactctattcaatgaatgatatctttgactctcgcctacctggacactgtatcagtttgttggaaaccttggaaattatttaagatatgattgttttgtattttcatatgtctttgttacttgctaaatgcttaataatttctgaatggtgtatgaatttatattgagccatgttattttgtgttattaatgttgtagtataatttcaaatcttcattattggtctaacttaccttggttttttaatgggacaaatcccaaagaattgtcatccattagacaaatataatagtgttatatctcgacaaataagtatttgtaaatgcaacatctagttgtacatccaaagatgacaacttcgactagtatttacaatatgaaacaatgaagaagtttataaaataagaataactttaactctcgctaaacgagacatcgttggattcttattctaatcaaaaattgtcctttattttttctgtttagcttattcacttcgaatttgctttaatgtatatcattgatgaatggttataaatcatttgcttatgatgtcattctaatttctct

SEQ ID NO: 277849 - DNA, 598 bp, Cannabis indica
tgtaaattgtaatagtttggttgagcaatacaatgatcttattcatcaaaaaaaaaaaatcatcgagataaaacacttgctttgcttgactagcaagtatgtatgggtcatctttataccatacaccactgacattaatactagtgataaggttctcgacgattgttttcttccgtcttggatttgtattgtaccacttgcacttaaataatgtgacagagtaaacaccagtgaaggttaactttagcacttcagtgagtgtgccgtaataattaaaaccttctgttcctgccacaaacactccactattttgtgtgctcctcttctcatctcttttggtagccataaatcgaactccattcacaatacaaccttcatagtaagtacctaagtgatcagacccggatgctaaagctagcaactctttgccattctctaatgatccagacttgtgcaagtcatatatctataaaaataagtacctcattagaaaatgacaaacaccacttaagataataaacgtttactacacatatatattcaccttcttgtgaaaccacagacgaaaatgttttttgtgtagaacattatgatctcc

SEQ ID NO: 277850 - DNA, 634 bp, Cannabis indica
ccccccaccccaaacttacaacccaacattgtccccaatgtggctaaaagtataatcttgaattagctcgccacaaattacactcaccgcactcaccccaaacttaatgtgaaacttggctcttgacaagtgagcaattaagttaggacatatgtggaaatgcaaattaggattgacgtgatatgtatgatcgggttgcacaacaagaataggctaaacggctcaaacttgggtgactagggaaaaattcattttatagggaaggttagaaaggctcaaacgtccaaggatggcctaaatcatttctaagggacaagtctaactaggatttcgcttcaaggagatgcactaaccaattctagatgctaaaattacatgtgaaataatcgtatgagaaatgcaaagcatggtggaaaaataaaagtataaactagtgaggagagactaaagagaaacatccataatatccaacaattcagcatgacaaggcaacaaataaaattaggcagcaacaataatggaatgagcggaaagtatcatcatcgagcagaacactaggccacagaaaaactcataaatctctcaatgtcaaactaacaaccacataaacaacataaaataaaagttccaagca

SEQ ID NO: 277851 - DNA, 1254 bp, Cannabis indica
agcatgacacgacacgagcatttttgtaaaagatggtaaaactataagcttttactcaaaatttagtatttttgtaaaaacacttaaaaatgattaaaaaattatataaatataactcaagttttgaattatacatataatgtagtaattgacccaatctttatgttgggttggaaaatatatagtataaaccgactaaaccgaccgatgtacaaccctagtaattgtaaaaaaatataaaaaaataagacatgaatttaagcttggatataaaaataggctgacgtgtttaagaaatacgagcgatactagcaaagcacaacacgaaaatactgagcctacgagccatgccgagcctatcctttaaataaattagcaagacaagactaagactcatattttgttgaggcacaacttattttttaaaaattacaaataaacccaacacgcaaatttagaaaaatacttttatatgtggcattcctatttgccatttgatgtgatttgctgtaagaggttatctcaaagtgttaaaaacaaacctcttcaatgagattttactatttgtatgataatttttaaagcaaatatttgtttttagcttttcctcttcaagaagtagagaggtacgatattggaaaatgaaaaaatatgtctaatccatcccatcaaatatttatctctcttctcccattactctactctacagtctagactctagtctagttgaatcagaaaatatgtaatgaatgaggtagtatggtaatttcacttttctctctataaaatctgtgatctatatcaccaaacaaccacaccatcatttctatcatctctctctcttaaactttcactagctatagcattaaggtaagccaattttgtctccattttatatatcaatactctttttgtgatgtaattttatggtgtatgactctagcaaaagtagaaatataacatacttgataaaatgtaataaaatggtcttatctattttttctcttacattttagggagatttttgcttctaagaaaatgtgtccggaatgtcaaggaaaatttgaaggttagcattatatatatatataaactactttcatatatggcttgtttgaaataatcttatatatatgtgtgtatatgaagtgcagagtacatggagttagctattggaaatttgaatgcaatgatggcaactaagatttttaatgattttagcaaagaatacgaggtgatgaagtatacttacac

SEQ ID NO: 277852 - DNA, 612 bp, Cannabis indica
actcttagaacttggaattgcattctcagtcatatagaacgctctatatgttccacgaaatagatacgctattaattatccattgttataatcctaatgtgataaatgatcctctaataaatgatttacattgtatagggactaaattaccgttacacccttccaatgtattttatccttaaaacacttagctccgtataaatgatatttcagcgaagtgaaatgagtactcaaccatttaaatctgtttagccaagctcgaaggatttcatcgtttcatttctaaatacctatagaagttatagattccatatctatgtcagcactcccactcaattatacgtatcaccctgaccgcaaagtaggcttaactaataaatcaaagaacatgtataatactcttgagatcgaacctatccatatcaggattaagatcatttgatctaggatcaactagatgatattgaattgaatagatattatagtaaattttaacatatctaatcaaagttcaatatcagtcccttctgatgtatactccatacatccgatactgttaaactttgccaatgccatggaaatgacataccacttttccaaggtgtaagaata

SEQ ID NO: 277853 - DNA, 649 bp, Cannabis indica
ccaggatctcctagcatgaatggtgttgctgaaagacgaaaccgtactcttaaagatatggtaaggagtatgatcagtcattcaaccttaccagaatcactctggggagaggcacttaagacagcagcctacattttgaatagggtaccaactaaagcagctgcaaaaacaccttatgagctttggacagggcgaaagcctagtcttaagcactttcatgtttggggatgtccagctgaggctaggccttataggccaaatgaaaagaagctggaacccaaaactgtgagcagctactttattggatattctgaacgatctaggggtttcaagttttatgatcccaaagtaaagaatatatttgaaacgggaactgcaaagttctttgaggatattgagtttggggggagaaatacggttaaagactttgtttttgaggaggatttagaatcacccacttctcttgaagatgagttgattcctattccaatagttgcttttgacaatattcaggattccattcctaatattgatcaagttttagatcaagagcaaccaaacatagtcaatcaaaccccagaggtacaaactcaacaacctcaagaacaagtgcctttgcgacgatccactagagaaagaagaaatgcta

SEQ ID NO: 277854 - DNA, 683 bp, Cannabis indica
caaccaagcgaatcaatcgctaaggcaaccaggctcttctgtgttcgataggctgggaacgacccatgacctaagggacgatctaaacagaagaaggggaacagacgagcagaatactacaacgatcgtgcagcccggagcccatactcaaatccccgctcagaaagacgctgacgtaatccaaaccgaccaaaatgccaatcaagtcagcccagccgtacaggcccagcttgacgagttgaagaatatgtttcatggcatggccggacagcgtaacaatgatcttgagttagaccgtgctcgcggaactcccttctcaccagagatcaatctcctgccactgcctcacaagttcaaaatgccaacatggaagatgtatactgggagagaagatcctctttcccatctcaagtattttgagatgcaaatggatttacaaggagtacgaggggacgtatgctgcagaatcttccccgccactctgtcggaagccgcacagcaatggtatttcaagttggctcctggaaagtttagttcatggaaaaccttctcttcggaattccatgcacaattctcttcctcacgtcagctcccattgcatctgggagatttggtcgaagtaaagcaacgaccaggcgagccactccgggcatacatcagcagattcatgacggaagcgacca

SEQ ID NO: 277855 - DNA, 576 bp, Cannabis indica
aacaaaatatcacaattcttacccttgtattatcacatgttgatttcttaccttccattgaagcaaggtaggaaaggataagcttttgactgttggaaaattgttgtgctccaatagaaatatcaaaccaacaagattacaactcaatgacaaataatacaaaggacaaaaatatagattaaataatgttacacatgaatcacaatatatatatattatatatacaaaagagatgtgagagcaatctcaacaccacatacaccacaagtgtataataggggaatcacaaaacttgaacaaggtcttacacctttgtccaaaagcttatttccccctaccacaagcacttagggaaaagaaaagaatggaaatagctttctggatttatcaagcctatagtgtttctagcaatgtgctctcttgatagaaacttcttcttcccaaagtaaactcaagacctctatttatagtgttttgagaatcacatttgaaaatcaaaccctttcatcacatggctgttaccaacacattaatttgtgtttaatgggataaaacgttggacaagagagctggaaa

SEQ ID NO: 277856 - DNA, 824 bp, Cannabis indica
gatcttgacgaactcatcgggtcattacaaaactatgagctatcactgtctaggtggaagaaaaccaagaaacaaaaggaggtggtgaaagaaaaatcagaggttggcattgcacttattcaccaagaaaacaagaaacctgttctggaagacttaaatggcattacagatgaaactgttgccatgttaacaagaaactatgcaaagttcttgaaaaagaactacaggaaaaattcaccagctgacaaagaaaatcttctcaagagaaacaaaggagtaaatttcaaaccaggacaagcctcaactgatcaaaaggggcgagggattaagtgcagagaatgtgatggatatggtcacattcaggctgagtgtgccaacacactaaaaaagaaaaaggcccttgcagcaacttggagtgatagtgatgaggaaaagaactccacagccagtgaaggatcagatgaggaaaagcaggtacttgcattcatggcccaaagctgtaatccagttgaatctgaagatgatgcagtctccacctcatcagaagcagacagcacaggtcgtcaacatgcttatgaagaaatgtttgcacaatgggagtacatgactaaacagattcgtgccctaaagaactccctagagcaagtggagactgaaaaaggaaagttagaagactctgtcaaaaatctcaaccgacttcttgatgaaaaggagaatgagatctacaaactcacagctgatctaatccgaaccaagcaagctttacagttcattcccccaggcactgctgccatcaatcaaaccctacagcttcagaagcccta

SEQ ID NO: 277857 - DNA, 616 bp, Cannabis indica
acttaaattaaaataaaaagatataataataaataaataaaaatgaataatcgtagaaaaaaaaaaaaatattaaattataaaataaaataaaattatcctatataatcaagtatatattataaatatataataaaatagtttatcatatttttatttaataaataattaaaataataaaaaatatttaaataatataaaattgtttatgttaaacactaatttaatcactaatttaagataaatattaattttttaaaatatttatataaattttttaataatttaaaaataatatataattttattgtcatattgtttctcttaaaatcaatttaagtaactattgtttaattaataatagctaaaatttaaaacttatgtatgataattcacaattatacattttcactaattttattgaataaatttttgataaaaaaattataaatgaatgtgtgataattctttcatttaaattcttattaaatttaaaattataaatgaatgtgtgataattttttttatttaaattcttattaaatttaaaatatattaataaaattaaaatttaaaaaacgataaaaaaaaaaaatctcacctgcatgggattattt

SEQ ID NO: 277858 - DNA, 619 bp, Cannabis indica
gaatttaaatgcccagtttttaatttgtggaaatggattttgggattaaccctatacttgtgtatcccggaattgtgactaggattaccggcacttggtcaggagcacccggggatttggaatctccatatttgtgggacatcaggtaagacagtagttagcacgtagagatatgcgcaatggcgcttatatggaatgtgatttatatgagaaactagaaaccgggattagagttattactctaaagtgagcggtttattggcttagggttattacccaagtgaattgttaatatgtaattgttatgccatgatgtatatagctgtatattgaagtaaagggttatgtgttcaaggcataatcgggttggactcggtaactagaaccgagatgaaccgttctaaggccttattgtaattagacgtgtgagcgtaacacgtaggtctatgccacatagacataaataggcgtgtgagcgtaacacgcaggtctgtgtcatacagacaaatatgaaatggcattattattatttatgtgatgagttatatatgattaacgatatatcttactgtcttgctgggcttggctcacgggtgctctactgtgcaggaaagggtaa

SEQ ID NO: 277859 - DNA, 960 bp, Cannabis indica
gacaccattgtttataaaataattacatttttacgttctaaagaatttttttttactatttttacggtttttcaaaaaataacatgaaatcaacaagaaaactacataaaagtaacatgaaaataacaacaaaaataacatacatataacaaaaatcaacaacaaattaacaagaatacaacataaaaagaccgtattttctgtaaataaaatcaaaaaaatcgtgaaaatatttaaaattccgtaaaaccgtatttttgtaattttttttgttgttttttatattttttgtgaaataatctctttttttcaattagattcccaatctaaaaaattttattagcccgtaacttttaaaaatatagcatcattagttctttttactttttcttttgtgtttttttttttctcctttaaaaagaataatgagtatttttctcctgaacttgcactaccaaataatataccttacgatctgtggcttattaaaaagtattctattacaataataataatatttgaatctagttcattataattataaatatatataaaaaaatatgttatataaattttttatttttttatatatttttaattatttttttctatagtataaatttatatgcatttgataaaaataatttttaatatttttaaattatatttttatcacttgcaaaagataaaattgtagtttataagaaacataaattgatattatttgttaataataaaaatataaatataaaatattttttaaaataaaataaaaaattagaaatttaaatattatttatttttaaatattttttcatttaaaaatattttatttttataatatatataaataattaataaattttagtaaaataattattataaagtcttttaatcaaaacagctttttctaaaagttggttgtaccagctttagcttttagctgtagcttttccataa

SEQ ID NO: 277860 - DNA, 1145 bp, Cannabis indica
gccttaaggggtagtttgtcaaaacctcaatactgtgagcctggaaataaggtcgcaatttccttgacgatgctatcaaggcaaacgccaacttttccatttgggggtagcgcgtctcggcatccagtaatcgcttactgacataatacaccgggtattgtcgtccttgatcctcgcgtattagtactgaactaatcgcatattccgacactgctaaatagatggacaagacttcaccggtcataggctttgataagatcggaggttcccccaaatgcgtttttaaggcttgaaaagcctgctcgcatttttcggtccagtggaactttttgttgccttttagaatctgaaaaaactccttgcacttatcagaagatcgcgatataaagcggtttaaagcagcaactttacctgtgaggctttgaacctcttttggcttggttggtgatggcatttccaccaatgccctgatcttcgcaggattggcctctattcctcgctggttaaccatgaacccaaggaatttcccggagccaactccaaagacgcatttcagagggtttagccgcatcttatatcgtcgcaatatatcgaacatggcctgtaaatgggcaatatgatccttcgcatgttgagattttacgagcatatcgtcaacatatacttccatggtgtttccaatgagatctgcgaacatcatgtttactagcctctgataagtcgcacctgcgtttatcaaaccaaaaggcattactttgtaacagtatagtcctcgatcagtaatgaacgaggtgtgttcctggtcgggctcatacatcgggatttgattatatcccgagtatgcgtccataaagctcagaagttcatgacctgcagtggcatcaacaagttggtcaatgctaggaaggggaaagctgtctttgggacaggctttgtttagatctgtaaagtcaacgcatgtgcgccatgagccattaggcttaggcacgagtacggggttcgctaaccagttggggtaaaacgactcccgtataaagccgcaggctaggaggcggtcgacttcttcttttagcgcttggtacctcgcagggtccattttgcggcgcttttgtcggacacctcgcacctcggggtcaatgttcaag

SEQ ID NO: 277861 - DNA, 659 bp, Cannabis indica
tatttaggtgtccataaaagttaataccacatatagttttacataaaaatattgtataaaatacaattcaatataatacaatacaatacaatacaatacgacctaatacgacgttccaaacgagcccttaaggctcttagagtctattcagacagttagagttgtgtgcacttgtaaggaaatccagtattccacgacaaaacaaagcatgtggaaattaaatatgactttatcagagacaaagtgatactaggtcaagtgcaaatagaaacggtccccacagaggagaacccatcagaaatggtactaagattgtaactcttagtaaattcaatcattgtaggaattaagtaggagttgacacatgatggggtgataagggacctattcaagttaagaccctcaaagactaagtaagactatcctagacaactcatgtgaaaatttaagaggaaattgttgtgaaattcctatattgtccttacaacattatcaactaatcaatacaattacaataacataataaagacctgcaactgaatcaatcacaacagcttattatcgacctcaataaatactcttcactaagctaacaattatagactaaggtgacgtttagttgggaggaatgaaaacataagaatagaaatgaaatgaaa

SEQ ID NO: 277862 - DNA, 140 bp, Cannabis indica
tatgactaggctcaatctcgagaggctatttgtgttctttgatttgttagataagtcagtgaaattaggttataaattcttgatctgcttattggaagctcagttatatagacccatggtcccccacctagttgagataa

SEQ ID NO: 277863 - DNA, 555 bp, Cannabis indica
taaacttggtcctgatcctattcttgggtctgagttcggcccccagtttttgggtctggttttggcttcgggtttgggtccaggtcccgatcttagtttatgtcccaggacacaggttccggtctgggtccaagtctcggtgtgggttctagtttgggtttaggtttgggtgctgctacagtcccatgtccgagttctagtcctagtcttggtccgattccagttctgggtccctgtgacttgaaactggaagtgggaccgaaagcggactgggacatgggaataagatcaggggactaggacccagactcagacctggacacgacgtggacccaaatcaaaactcagattatgactcaggacacgaacaaaaactagacatgaacttggacccagacccagacgcaggacctgaatcgagattggagacttagacttggacctaggtcctagacctagattgggaacccaaacctgaaattagaaccagaatcgagacccaggactgggatggggacccaacacccgaccccgatctccactactacaaaaagt

SEQ ID NO: 277864 - DNA, 512 bp, Cannabis indica
aaacccaacattatcctcatctgaacttttgcttgcaacataatctttttcttcatcactatcgctccaggtggcaacaagggctttcttctttttgagagtgttggcacactcggcctgaatgtgtccgaactcatcacattctctacgctgaatgcccatgctcttattgtcacagggttgctgaccatgcctgaagttctcaagaggatttcttttgggaacattttgcttaccctcaaattacactttcttgtactttttttttcaaaaattttgcatagttcttggtcagcagatctacagcttcatctgagaaaccagcagacacatctgggatagacttcttttcttctttgtgaatgaatgcaatactgctgtcccctttttctttgttcacatccttcttctttttttttttctttcttccaccttattaaggacatttcataattctgcaaggatccaatcagttcatcaagatccaattcctccacgtttctcatttcttc

SEQ ID NO: 277865 - DNA, 757 bp, Cannabis indica
actttccctctcaaatacttaggtgttccattaagaccatcaaaatggaaagccgaggactgtgggatcattgtggataaaatcaaacagagacttcatacttggtcgagcagacatctctcttttgctggtaaggctcaattaattcactctgttttacttggccttaggaattattggatgagtatatttgttcttcctcatagtgttactaaggaggttgaaaaactgtgtcggggctttctttggggtttgaatggtaatagaagcaagattcatgttgcttcttgggagaaagtctgtctgccaaaggcttatggtggccttggatttaaaaatggagtcaagtggaatcattcaattttggccaagtatgtttgggcgatatcaactaagcaggatctcttatgggttaaatggattgataatatctatctgaaatcagggaggttttgggattatgatctcaaatctgacacaagctggtactggcgcaagttatgccatttgagggagaaatttaaggaagctgatatccttaaagcaggagctaagggtcggttcaagactaactggttatacaataccagtctagttcgaaaacaggtcaattatcacaaagctatttggagttcaaccattgtgccaaaacacagatttatcctttggcaggtggttaactctcatctgctcacaagggacaagttggttcgttttcagattgagctaagttctaccttgtgccccatgtgtgaag

SEQ ID NO: 277866 - DNA, 596 bp, Cannabis indica
agaagaccggcgtcattgctcggcggagcagcctcgtcaatgatgccaagggaattgcttgaagcagtggatgacaccatagttttcaaggctgctgattcgagaacaatgcgcggcgggatcagaacctcgatcgagaagcgattttcggccgtgatcggtgatgggttttcgttagaattggatgaagacgcggcggaaaagatcttgagtggtgtttggactggccggacgagtttggaggaatggattgagaaagttcttgttccaagctttgaggaactgaagtcaacgctttctgggtcaacgatggaagactcaatggttgttaggctcgaagccgaatctgagtctgatcacggcggcggcggcgggaattggcttcctgttggggttaaagtggtggtggccggtgatgcctgaacagtgggggcaaaattggtattttgctattttctttttggatagaaatgtaaatattggtcaaaactgtttggcgggtagtcaaagtcatttggaaaagtcaagagagagaaaaaaaaaccgttataaaagagggaaaaaaaaaaaacaacaagagaaacgtttggattaaa

SEQ ID NO: 277867 - DNA, 817 bp, Cannabis indica
ggttgtcacaatgaggtgacctttggttgtcccttcgagggtttcgaaaaatgacggctataatcattattttgattgcatttatggtgccacgtcacaaaactcttcggcatctgtgtaggcatggccatctctggccgttggattgggcgactctaggcattcctactgccacgtgtcatgatcccaatgaataagggatttgggtatttaaaaccccctgattcgaaccaaaaattacccattttccctcactttccttcaactcccttaacttccttattttttctacttccagagaaaacagcacgaaaaatactttgtaaattgcccagattttcgtcctttattcgtggattctccttgattctacattgctgtcaagggcgattcgtggaaacagattcatcaaagttaaaaggttagttttttttgtaattttctaccatgcttcgttttctgtttttgagtggggactatattttctgggttttcagtgtgcatgagggttgtgtaaggatgaatgtttatgaggctatgtgttttaggtaaaaacctgggtaaattcatagaatatgacctgtaaattgacataaccgcacacgatatacttgaataggcactgtttcacgtcttgaatactcgcgggtattcagatgaacaactcgaatactcgcgggtattcagatgaacaattcgaatactcgcgtattgacaagatttactttcttttgattgatagctagatcttttaggatttttatatgtcgtgggttgaattgcgagggtatcaatcgctgttccaaatggtgggtgt

SEQ ID NO: 277868 - DNA, 292 bp, Cannabis indica
aaataatttccaacaaaatcttgactagctcgggatcttctaactgtgcctttttgattctctttagcaaatcagattgaagtgtcaaggtgtgcaactttccaactactaactcaattcctgcattatccatctctgaagctagttgaggggctatcataacagtagtgaaaacctacccgggacctcttctacttagtgcatctaccacaacattggctttcctggggtgatacagaatctcacagtcataatccttaactagttccaaccaccttctctgcctcatgtt

SEQ ID NO: 277869 - DNA, 638 bp, Cannabis indica
ggtgaaaagtacttgagacttttatgattggtataaatctcacatttttcaccataaagataatgtcgccatatctttaaagcaaaaactacggcaacaagctctaggtcatgagttgggtagtactgttcacagtctttagttgacgagaggcacaagctataactttgtcagcttccatcagcttacatcccaaaccctgtctggatgcatcacagtaaacaacgaacttttctcgatctggcggcaaagctaacaccggagttgttatcaaaccttgcttcaactcctaaaaacttgcttcacatttatctgaccacacgaatcgctgatttttcttagttaactcggtcagtggcatagagattttagagaatccctcgacaaaacgtcggtaataccctactaaatcgaggaaactttaaacttctgtcactgattttggcctcagccagttcttcactgactcgatcttgcttggatcaaccataattccattcttcccgacaatatgccctaaaaaagatacctcggacaaccaaaattcacactttttgaactttgcatacaacttatgatccctgagtagctgcaataccattcgaagatgatgctcatgctcctcttttgactgagag

SEQ ID NO: 277870 - DNA, 527 bp, Cannabis indica
tgcatccgggaaccaccaagatgtatcaggatttgaaaccctacttctggtggtatgggatgaaaagagatgtggtggactatgtgtccaagtgtttgacctgccagcaaatcaaagctgaacatcagaggccggcagggttactgcaacctttagtccttcctgagtggaagtgggaggacattgcaatggactttgtaactggattgcctagaacctcaggaatgtatgattcggtatgggtcatagtggacagattcacaaaatcagctcactttctaccagtgaaagttacatattcagtggatcagtacgctgaactgtatgtaaaggagatagttcgtctccatggaaccctaaatctattgtgtcagacagggatccaaagttcacatcgaagtttgggtgagtcttcagaaggctatgggtaccaagttaaagtttagcaaaacctttcaccctcagactgatggtcaatcaaaaagaacaattcagatactagaagacttactacgagcctgtgtcat

SEQ ID NO: 277871 - DNA, 489 bp, Cannabis indica
actaagatggaaataattcatgttattttcatatccatctaagtaaaatttataaatattaaattaaaatttatatttagaatttttcattctaaattggaaattttaattaaataaatatatatttaaaataaatagaataaataaagagaatcaaagaaaatacaactctttttaaataatgagcttttattataaagacattcgatctccattgtgggttttacaccgcgtttgttttagtgagtaatcctccctaatggaggaacgttcattagcaatttcgcaccgtttaacctcgcatgataagtagtttgtaagtgttttgtatggtatggatcaccctaatggtggcgaccatacttgacttgcaaattatgaaacaatggtggaagctcataagatagaattgccttgactctcgcctaaacgggacaacgctgaattccaatcttgatcgaataaaaggttgctagaatgtttaacatt

SEQ ID NO: 277872 - DNA, 903 bp, Cannabis indica
ttctgggtttctagggtttggaatcgagcaagttctcagagagaacttgctctgctagggtttccatttttggctttgtgaggctgagtgattgagtgttagggtttctagacccttctcagagtatttaaatctctgatgatcaaacgacacaagtttgggtgtcgtgttggtcatacggtgccgtttaagtctaaagcttaagttagacttggaaaggtcgattttgaccttgatactgatattaaagtatcttgttggtgtagggcaaatctgtaaaaatcctacagtggtatcagagcctggtttggctaagggagatcaacaagattcaagggaaaaatatcagaaaggaattggcaagaaaatcttgaaagaaagattgacaaaagaacaacactcaaacagcaagaagatcaagattcagattcaaactcaaattccagaaatacaaaactgagaaattctaaaactctatctgttccttatcaattttattaaaatgagtaacataaaagttgacattgataaatttgatggtacaggggattacaggatctggagaaggaaaattaggtcacttctagctcaacagaaactactaagggtgctagatgaacctattgaatggccagaaggaacttctaaaatacaacaagaagaatacctagaaactgctactggaattctaatcttcaatctatcagatgcaataataagattagtagataaggaagagactccatcaaagatttggaaaaagctagaagagcaatttcaacagaaatctttgacaaacaagatttatctcaaggaaaggatttttgggttcaaaatgaaccaatccaagtccttagatcaaaatcttgatgagttcttgaggatgcacattgagcttgcaaa

SEQ ID NO: 277873 - DNA, 916 bp, Cannabis indica
tgaattgcttaatttttttatactatccaataaaataattccataacgaaaatccaattattttacgtaaaaagtttgcaaacatcaatcaattatcaataaacacattgatcaacatgaatcacattcaaatcacacacacatcattttaaatccatattccttgaaagtaaatcaattaccatagctctgaggccagttgttggattatgttttaccaggatctagatttactaacaagtatatttttaatatcctaaatataagtttctaaaatgatgaaaataaacacataaaaggtatgagaaaccttacattggttgcagcataattaaatgactcattccgctcagatctctaacccttgtattctttctgtcgtagagtatcaccaagatctgagcctgaaacttcttctgttgtttagattcttaacagtcttacacactatgattgaagactcacttgctatgtgtgggcatgcactcaatcactaaaggctcgaatttagtttgtgaagaaggctataagatttcaaaattagaagaagaaaggaagaagatgaagtctcataaacctagttgtcaaagagaaagaaactaggttttagcttttgaagcattagttggataatgagactttcttttcttttttatactacttctcttagggttagggttgatttatttagaataaaaaatgataaaaatggaccaaaaatagcactaagtggctggccattagtgggcccaacactagttagatttttgccatttttttcaaccatttatctaattttcacaaataccactttttgcaatttcaatcctataaatgtcaaaactatttatttaataattaaattaattatcaaacaaaattgtcatttataatatttatgaattagactccataa

SEQ ID NO: 277874 - DNA, 672 bp, Cannabis indica
ggttcgggtccagggctgggtcccaaatccagacaccgactactggttttatccaagccctgggtccagattcggatcccaatctcgggtcctagtatggttccatttctggtgctgggtcacgagctgagtcctatgttcaagttcgggtctgggtcgggtactaggtcccggtcatagttctgtttcctaggtccctatcctgattctgggtccaggtcccggttattgtgtgggttttggtcccggtctaggttcaagttctagtcctagtatcggatcaagtttagatctctgtctgggttttgatcttggttcgggattgggtttaggtccttgtactggtcctagtccttgttcggttctacttcaatttgagattttgagttcgagtttgggttttagtttgggtcggtgttcgagtcttggcctgagtttgggtacgagtccggatttcagtcaaggtctagatcaggctccgggtgtgggttcgcgtcctgggtcttggtctaggttgggtccgagtcccaagctccaatctcgatcttagtctggattcagttcttggtctaagtcctttgttctgatcctggtctgggttcgagtttgggtccaggtccgagtctagctttgggtctgattctaggtgtgggtgtttgagttcaggtctga

SEQ ID NO: 277875 - DNA, 636 bp, Cannabis indica
tcatgatgcgaaagctgaattcggtaagttttggttgctctgcgcggattgctgaatacttcgctctgagtgtgccagcgatatgtcctgctcggaccattcttctcgagtagatattccaagtggactcaatgtgtcaccattcatgtgatgtcacgtcagagtgcaaaaattgggataacatttgccccccaagtctgcacgggacttccgaagttgcgtgtagacttcatccgagccgtttctgcctttggttgaggacacgtgttgagcgtgaccgtccgagactcgatatgaggctgactgggcgtcccttcggtttttggctaataaatgctctgacaattaatattttgaaatccgattttctctctccacggctgacagctgcacttgattacttttgatttcccatatttgtttttatggcgggaagctgaggcgtctgaggttcctttgagacaattacctcttttcgtgacttgcctataaataccaatagcattggcacataaactcattttcatcacccttctttgctaagtaagctttagagcaaaaaagagaaattcttggcttcaaagttgccgaagtgccttcatacaaactgctttttggatagacgttgctcgaacc

SEQ ID NO: 277876 - DNA, 1170 bp, Cannabis indica
gcgaatctttggtggaaacaggcgaaaaagtttcttggaaatcaatgtcctctctctgactatagcctttagccacaagtcgagccttgcacctctctacttgcccatttgagtcacgtttgatcttatacacccatttgcacccgatgggtctacaacctttgggtagttcaaccaactcccaaacttcattttgtgacatagaactcaattcttctttcattgcatccacccacaatgcagatttaggactattcactgcttcttggtaactgactggctcagaatcatctcccacattaaactcatgttcctgcatatagacaagatagtcatcaggaatagcaggcctacaggctctttgtgatcttctcaccacaacctcatcgtccccccaaatcaagattttcatcttgtactggatcttaaggttcaccatgagcttctattggaacttgttcaatcacagggtcattagtaggattagaagcggaagcggaagcaacaggtacagggacatagacacactcttccctgaatacaatttcctgacccttgatttgaaccaaattcatcctcaaaatagacagctcggtttgattccatcaccctggtggtgtgagagggacaatagaacttagaacctcttgaaccaatagtgtagcctacaaaactcccactgattgtattcggatccagcttcttagatttagggttataaggccttacctcagctttgcatccccaaacgtgaaaaataacgcaaactcggtttcttgcctgaccacaactcgtatggcgtctttggaaccgacttgctaggcacttgattcaagatataagcagcagtccttaatgcctcaccccataaaaactctggtaagctagaatgtattaacatacaacgtaccgtatcaagaagtgtgggattccttctttcaacaattccattatgctggggtgtacctggcattatatatcttgcatcaatgccacattcctgcaagtatctggcaaacggcctggggttccttccagtttcatcataacacccataatactctccacctctatcacaattggcagctttaattttcttttccttttggagctcaacatttgtcttgaaaatcttaaggcatctaaggattcagacttctcacaaatgag

SEQ ID NO: 277877 - DNA, 523 bp, Cannabis indica
gatctccgtgctaacaaaggaccccgaagctgctgatcgctttgaggaggctatcgagatcttatctgctgaagttaacagtcttcaggatgagaggagttctctgcggcaagttcttcctcggctaaaggaagagagggacgccaaggtgaccgaggcggaccaattgaaggagaaggtcaatgctttggagactgccggcctcgagctcttcttcgatttctagaaggctaatccccaaactaatttcgactacttgggcgacgctaaggacatgtaccttgagtactgcgcgacccaagtggcttatggtggaaaagaggaggctgcttcaacttccggccaagcttctgaccaggctgctgatgcttctcctgctcgaacaatagatcctcctgctccagttggctcagaagaaccgaaccaagagcctgggactccagctgtttaagacatcgtgaccaaccaagcggtctttaaacttggaattattttttattttttggacaacgggctgaccggg

SEQ ID NO: 277878 - DNA, 172 bp, Cannabis indica
aatcaaaatcaattaattgagtcttacaagcagtattgtctcaactagtatggagaccatgagcctatatatccgagcttccaataagcagaccaagaacttaccaagtaaattcactgacttattaattccttgttgcatccacgaatagaactcagaattgcactctcag

SEQ ID NO: 277879 - DNA, 738 bp, Cannabis indica
gtcaaatcaaggtcagggagctaagtttcccccaaatgctcggggccgaggtagaggttccaggggcagggctcgtggtcgcggtgatgttaacccgccaccggctgcccaggctgcccaagccactcaggaagtccagaactggaaaaataggtttgcagaaatgcaagccagaatagaggagcatgataatgagatctagagattgagacagcagggtgctcctgcagtgcctgttccagaagttccagtggcacctgcccctgttgtccaggccgaacaagtagtagcggtgaatagaatggaacccctgtatgaaaggttccgcaagcaggcacctccggtttttctgagaggtccggacgtcatgaaagctgagcagtggctaacagtgattacgaagatattaaatttcgtaagcgtcgccaggaataacagagtggtgtgtgccgcctttcagtttcaagaggatgcattggtctggtgggacatggtgtccctgatacatgatgtcaccacgatgacctggtaaaagttctaggaactttttaacgcaaagtattacaatgaggccgtcagaagttccaagaggaaagagtttacccacctgacccagaaagagaacatgagtgtgacagagtatacaacacagtttgatcgattggcaagggttgcctcgggaattgtgccaaccgattgaagtaagaaggaaaaataccttgtgttggaaattatttt

SEQ ID NO: 277880 - DNA, 1105 bp, Cannabis indica
aattctggttgggaaccagtctaccggttggggcaattttgggaaccctagtttttcccatttttgagatgtttagagtattgccatgttatttatcgataaggaaacttttagtttcaagtttaagtccccggaaagtgatttagcgtgtcacttaccagtgctgtgattgatgtgatttaggagcctgtaattcgccgagcagttgttccactcaggttggccggcacacctgaattcggaatcaaggtaagattagtataatattttgcatatgtttatacatgtttagcgtgcatgttagttgccgtcagtataggcaaatctatagccctcagattagcatattagggcatcggtgaggtgtacatagagatgcaccgagatgccagcagatatatgctaggctatcagatagtatgaattaattgctaccacatcagtacgattagagtactgagtataggctggattgcggttagtcataccttgtcaagatcgatcctgattcagttagggttatggttaggtgtatgggcgcctgattataacccgggatattagtatgtttattacgtgatgcttttcttactgagtttgtcgactcacactgctattgctatgtgtaggtaggggcaaagctaaagttgaggagccgtgagagcgagcagatgaagattgtacatgttggggcggttaggcctggagcgtacgatcctcgagacagcaggacttttgttgttttatcgctaggcgataagtattttgtaaatatgtagtaaacttttgtaactgtaattttgtatacgggatcccgaaatttataaaagttatatgttatattttaattaaataagaaaaattttaattattcacgtttgccaataacctcattgattagcaacgagctgcacagtacgttaaaaatcacgctaacacgcctacgctagttaaggtattacaatttggtatcagagtagccaggttgtctttcgaggatcgtcacgacatgtacaatcatcatcagtagtcagctcgatccacggttcagtaagctttgattgctttagtagtttattttatagtatgttataagaaaagcctg

SEQ ID NO: 277881 - DNA, 488 bp, Cannabis indica
tacccctaatttagggcgaacctctatatttctggtgtttgatttcttactctaaactactgtgttttggctaatctttgtgaatatgtgtgtgtgttatgtttggggtgattttctgggttagatcgatcaagagatcgagggagatctctggttctagggtttgagaaccagagagaaggcagagagaaagagagagagagtttgaaactctcgaaggttcgaggagagaaatgagctagggttagctctgaactctcgagttttattcaaagaagaacgacagatcgttttgagaatcaaacgatctgtcgtgttggtgagaacgacaagttcctttgtcgtgcaagtgaaaacgaccaattcttggttgtcgtgtgaattgatattaattgatttgaaaggacaattttgtccttgtcgttttaaccgtgaacattgagttggtgtaggttaaacttggaatttcaccaagcaaaattcctaca

SEQ ID NO: 277882 - DNA, 715 bp, Cannabis indica
ttaccgttacacccttcaatatattttatccttaaaacatttagccacctataaatgatattcaagtgaactaatataatcacttaaatgtgtactcaaccattaatctttgttaagtcaagcacgaagaagattatcgtttacttctatgtctagatagaagctatagattccgtatctatgattagcgctcccactcaattgaactactatgtccttaatctatatgtcacaagaagaaccatttggtcgactttaacgaacaaatttaagaacacaaataatgcaactgaactagaacctaaccatctcaagattgagatcatttgatctaagatcaactaggtgatattgaattgaatagatattacagtaacccaagcttactttaaccaatgccctgaaaaggacatagcacttatccaaggtgcaggtaaattacattgtagattatcttatcagttaaatcctgtgtactgataagtcatatgaatacatttaatcacacaatcttgattactttccactgcgttgacaacacaataaacaagctaatcaatgtgataaggatttggatgaatttataagtcaaataaacaaataaatgatcacatgaaccaaataacacattaaactaagtaatgaaattaaatttgtttctttattgacaattgaatagaaaagattacattgaaatatagttttattttagggc

SEQ ID NO: 277883 - DNA, 579 bp, Cannabis indica
atagtgcctcgcatttgcctctttcaacatcacataaggacaagagaagtattttccatattacagttagacccaaaaagttatctttagaatgaagcatcctaagagaaacgttcatattacgagaaaaagaagtatagtcaacataaccgtttataaataaagacaaagagcagttgtggcagttatttattattatctcatatgataagtgttcaaaataatttttatttattatttttcatataattttataaaaaattaacaataataaataattataaaaaataaatttatatacataatatattttataaaataaaatatataaaataatagcgaaattacttcatatatcatttttcaatttgagagaattactacatattttaaatatttttatatacattagtattcatatatatatatatatatataataaaaaaacaattttaaaatgtaaaagtttgtgtccaactgccaatgacattggaaaatcaattgcaaattgagtgacagccacatttttattaggttttccttgccaatcaaactaaagtccaccactttcacttaacc

SEQ ID NO: 277884 - DNA, 645 bp, Cannabis indica
atgttgttgctccttcaaggaatctttgagactagaaaggtctacctcaaacgatgctttatcggcttcgaactcagctcgtcgttgttgtatggctagttccgctgcaataatctctgcttcctttgctttaaaatcttcaaaatcctttgtcttgttagtgacagatatggacaaatgatctatagctgccaaattatccttatcacgacgaagaagatccatgataagagattcatcaagactaagggcattctcaacaacttgagcagaagcaagagacttttcttgggccttgagcaaatcattcacacagtcagtgaaccatgcaacctctgctaaaccacatttataatgcccgcaaagggtactcaacacgtcgagttgcatactcacgtcagcacgatgttttgaaatgtctgatgtggtcaaaggagaagatgacaaatgaagaatgtctttcatgcattcaatcacaaactttttggtatgctcattcaagtctgagttggtgattgctgaagctgacactgtcaacactgggttcggtcgaggaataagcaaatctgaaggaacaagtgatgatggagtacccgtctttgctgagacaatcgattctggtggaatggttggctctgcaggcaa

SEQ ID NO: 277885 - DNA, 740 bp, Cannabis indica
ggtacaactactctaagcaataatctctactcgctaacaacacaaataaatgagattattatcctcccactattaatatcccaagaaaaattaaatactattttaatttggatattacattctaccctccttaaaagaaatttcgtcctcgaaatttaacttaccaacactcagggtattgtgtcttctacctaccacattacctcctcttctaccacatgaacccaatagtcatgtatgtaatgtttgtcttatcggtaaaatgatatcacatttaatacactcctttatttaaaaattattattctactatactttacttaataacaaaacatgctcctacaattgcatgctcgtaatgttataaaagttttccttctcttatgaacatccttacatgccattaagagtaaaactatttattctcatctgaacatccttacacgtcacttgagaacacattatacaatacaaaaaaaataataaaataaaataaaataacaaacaacaaagagtaggttagaagaccttatgcaaacttctctttaattgttcccactctttcgttgaatgttattatgcacataaaacttaatttcctccataaagctacaattccattattatagtttcgtggttattactttagcaatgataaataatagtcccatgacgcaggaaaataatcacttgtgccctttaaaattccttttatataattttaatgatccattaagcca

SEQ ID NO: 277886 - DNA, 527 bp, Cannabis indica
ttttattattgaatgttaatttttagtttccattatatatcaaattgcttctattcttctatgttcaatgttatgattattgttttaatcttgtttagatggccactaaattaggttttactttaatctaccgtcatcttaggattactattcacctaatagtctaggattctaagtgtttgtgacaaattacaatttttatttgtgatgaagaatagaacctaggttaaatgaattatatgcttcattgatttgttgcctagattagtctatctccataaatctcaatgctttatctaagttaaataaattgcatgcttcgtggatttactgctttaggtaaaagagttaattattgagcgcttcgccttgattacatacaatagggagattgggataattgactgcttcagcgttatctgcgggattaatagtttgattggaaactgaaaattacattctttaataggaattaggaatgattgttgagggtggcgaataacctttaactagtttctcatatcgta

SEQ ID NO: 277887 - DNA, 618 bp, Cannabis indica
tcacctcacttttgctcatgcttctcttatgcgatttgccttaagcaattgggttccaaattctaacaaaaccgtggtatctcaagatgtggcttcattcctataccgaatcacttctggaacttccattgatttggcctcacacattctgaaccaaattgtctccttccgaagaggtaaaaagccaacctttaaacttgtgtttccaaatctaatttataaggttttatcttctcagaagaatgtggcccaatcacatgaaacacttgagcctcccatcagtggacctacattccagccctctgaatactttgatggtgtgttccaaaaacgacccaaggctggtgctgctgctgcttctgctgctgcaagttcaggttctgctgcagcagaactcctggaagtcaagtctgaacttcagaatgtgcatactcgccttggagcaacggaagaagtccagcatgagatgtccaggcaattgtcttctttgattaaactctaccgagattaagttgtttctcctttgttttttgattgaacttatatctatttttctttctttgtttactttggcactccgataaacaaaaagggggagagatatttatttttaatttg

SEQ ID NO: 277888 - DNA, 472 bp, Cannabis indica
ataacaatttgctaagctagatcttgttccgaaagggctagatctagtagttcaacttgaatggagcaagagaaatcctagatttaggtttttctgtgtacatggaataggaatatttcatttaccttgcataacttaagaatttatgcataattagtgttctctaatctggtttgatataagaatatgtgaatctagattgtagaacttaaattgtgagttttggaaaattctcataaatacataaaaattctgttatcactggcaggaatgttgaggtaatgttatagcatctgggaaaaacgagcaaatgatggattagttattcaagccactttttaccatattacactttttgaaagcatttttctagcaacaatagtattaattttagcgagtttaattactgtcattttaattttgaatcattgctcaaccatttttatttttttcttttactttaagttgtaat

SEQ ID NO: 277889 - DNA, 776 bp, Cannabis indica
tgttcttcctgcattgctctttcttggacgacctacaggtttcttctccactggtacaccgattctcatgttctgcatgtgttctcgaagcacccattcatcctccttgcttacaagattaattgttgcattgtaagtattcttccacgtatcctttgtgtaataaggggatgacagagcgtacagacttacattctgagtaagcactgcggcacatgcatggggacaaagaattttcaacaattggaacatgccgcaagtgcatgttctctcaactaagttcacatcaccgcctttttcaaagtcagaaccgtcagaacctcttccaacattaaacaattgtgcaccgttacgtaggatacttctacgtctaccatcctcatgttgctttatcaaatcttcctcaaaatgagttgccaaaggggtaacacacttacttgccttttcgagacggttagcaaaccaattttgtagtgtgaaccttatgaactcaactagagtagttattggatatgccggaattcttctgtcacgttgttaaggctttctgcagcgttgtttgtcatgatgttgtacctgtctccctgacaataaggacgagcccatttttctaatcctatattgtcaacataagcagcgatgagaggatccatctatagaagcacctgcaaatgtctatcacattcccacttggaccatgcgtaagcggccagccatatttgcgtgttacatacatcagtattgaacttgtgggtgacattcatagaaatatgttt

SEQ ID NO: 277890 - DNA, 506 bp, Cannabis indica
gtgagaaacaaggctcgattggtagcacaaggatacacacaggtagaaggtattaattttgatgaaacttttgctcctgttgcaagattagaatcagttcgttttattttggatattaaattgtttcaaatggatgtaaaatctgccttcctaaatggtattttgagtgaggaagtttatgttgagcaaccaaaaggattcgaagatcctcaatttccagaccatgtgtacaagcttgaaaaagctttgtatggtctgaaacaagctcctcgagcttggtatgaaaggttaactcaatttttactttctcatgattatcaaagaggtagtgtggataaaactcttttcatcaagcatataaaatctgattttatcattgctcaaatttatgttgatgatatagtttttggttctacatctaaccatgaagtgcaggtttttgttgatcaaatgaaaagtgaatttgaaatgagcatggttggtgagcttactttctttttgggtct

SEQ ID NO: 277891 - DNA, 594 bp, Cannabis indica
aacacttagttacctataaatgatatttcagtaaactaatataattactgaaatgagatctcaatcatttatctccatcaagccaagctcaaaggatagtttcactttcaaatacttatagaagctatagtttccatgtctatgatcagcgctcccactcaattgcactaccatgttcccaagatgtaaatatccgccataacttttagttggcattcacgaacaacttgaagaacataaataatacaactaagttgaacctaactatatcaggattaagatccataggcctaagatcaactattgctattgacttaaaagatataacggtaagtttatgatatcttattaagatcaatatcggtcccttccaatgtatactccatacattcgatactggtaaactttgctaatgtcctgaaaatgacataacacttatccaaggtgtaagtataccttatcgccgattatcatgtcagctaaatccagtgaactaacaaatcatgggaattaaacttttgaacatataatcatgattatattctactatgctgacaacactataatcatgaacaaatatatacatatttatat

SEQ ID NO: 277892 - DNA, 538 bp, Cannabis indica
cttaaggcatacctaagtcgttttagcatggttgctgctagggttagaaatttggatgataatacacaacttacacgcccttcacgcgagaatctctactgatccatacaaccgctgggggtgagctatgggatgacttacaaggtcgtccagtaagaagtccaaaaggaaatgaatttgtttaaaataggctcaggaagcaaacccaacaacgtttcaacaagtgctgtctcaacgagaattgataactcgcgggcttctggcttaaagagaaaggattgttctaaggatccgtcaaaggataaaaagaaacagaagaagcatgataagtacgtgccagtatatactatttataccgagcttaatgaaactcgggagaatatttaccttgcatatgagcaaaaggttgccttcggcaaacccgagcccatgaggaacgcgagcaataaaagagattctaacaggtattgtaaattccataaggatattgggcacacaacctgtaacaccctaactaacataggcgtattacgtgatt

SEQ ID NO: 277893 - DNA, 461 bp, Cannabis indica
ctctctctcatcctaaccctctcttgaaaattctagctttttggtgtgaattgccttgtgttacttgatttttggagcttgattcggaagaattttaagcttgggattgaggtaatttcttgctgagcatatttgagatttagtgttgtaattcttgctgaaattattggggtaaaagcatattttgagttgttcttctcttgaggttgcatgtgcttgattttgattttaatcttagtaaattgagtgagtaattgcatgatttggttgggattcatgtttgttgagcttcgattgtgattatagggtattattctagcttgaatccatgttattttgatatgtggctgctggaaaatagttgagtttgatggatttcttagctcaagttcttgagcttgagtattgctagtttgaagcatgaattatgtgttttatgcaatctgaaattgtgaatttat

SEQ ID NO: 277894 - DNA, 420 bp, Cannabis indica
ttgtcatttaatatatttattaattagactaaccaaagtctcttaaataacaaatgtacctagaaactctttcttcacaagtagtatgtctcaactagtatgaggaccatgggccgtatatatccgagacttccaataagcagaccaagaacttaacaagtaaattcaactgacttacttaattcctcgttgcctccacgcataaaactcagaattgcactctcagttatatagaacgctctatatgttccaccatatagatacactattaattatccattgttataatcccaatttgatcaatgatcctctatagatgatttacattgttataaggattaaatttaccattactcccttcaatatattttatccttaaaacacttatccccgtataaatgatatttgagcgaagtgaaa

SEQ ID NO: 277895 - DNA, 286 bp, Cannabis indica
attaggatgttaatgaaacatacgtgttagtaaatctagatcctggtaaaatatatccaacaagaagaacctcgaggccaagcttgcaggtgctgagaagtaggcaaaggacaagaccaataaatgctagaaactcaaaagggaacttgatgtagccaaggcaacgctagatgggaaagaggccgaaccattgaaagatgcaattgttgggttttgtccctaataaaacccattacaatctgatttatagttatcaatcaagaagtttgaagtgatttatgtttgc

SEQ ID NO: 277896 - DNA, 599 bp, Cannabis indica
taataaataataataatgcagatttctctcattttcacaaagtttgggaagcagcccttcgacatggctttcagcctctcaacaatatttcatctacctaagttattattatagtattaatcataataagctgctttcatattattaattatatatatattgtttacactaggataatctttctataagtttgcgtcttttcttcatatgatcatcataaggtcctcgcattgccactctgtagaaggccttctctattaaattgtgggtgtgctagtaatactatgtttggagcactttcaaaaacaaaacaaagaaaatatgttcggttgatgttttatattgctttaattagtttaatacttaattttaaatataatacaaaatgcattatggaatatattgttagaggaatttagataccatcaaaaactgcaagtattaaagttcatttaaacatttgaaaataaattttttattactcatgacttacaataggaaaatttgaaaaaatatacatcaaataccttaatattttatccctaaactaatacatatcaccattgaaaacatatgaccactttatctaaaacctaaaa

SEQ ID NO: 277897 - DNA, 430 bp, Cannabis indica
ctccagtaggaataacgggtctccacactaccttgacgaccaccttgattctggttccctcggaacctcttgttctgctctgagccaccagatgcagtggatgatttcctcctctagtccatggccgaaccactacctcccctgctgaaacctgatgcaggaggggtaggagccccgccacatactggagtcctaactgattccacgtacatctaactgcgtcctcagcttgcactgccttctccactatcacaacataggtagtcttgtcgtcggtagtaaccataaaatcatacttgatcttcacattaaaaccatcaagatacttctctttcttgctgaagtcggttggcacaattcccgaggctaaccttgccaactggtcaaactgagtagtatactcggtgacgctcatattctcacgctgggt

SEQ ID NO: 277898 - DNA, 498 bp, Cannabis indica
gcacccaatgtaaggttttctcaaactcttatgtgtttattttcattgttttagaattcatattaggatgttaatcaaacatacttggtagtaaatctagatcctggtaaaatatttccaacacctactgcctctgttgtcttgatacaactgatgaggacaataccattagtgttcttagacaaaagtcacggtaccttatcatagtgggagggtttcaaggaactcatcattttatgacttaggagacacttgtgataaaaatccattgttagtttaaacaagtaatggatagtcagaataaggaactgagaagaaaagccaagagaactatggttgaaaccattcatatggagtaaccaaaggttttctattacaaggacaagaaaggaaatttttgaaaataagtatattcaatggacttaacaaaacttcttgatcctagtattataggtttgagattatctaaatctgtggcttgtggtatacctggtaatt

SEQ ID NO: 277899 - DNA, 553 bp, Cannabis indica
gagctgtccatcttgaacttctgagtacctttctaaggtaatttccttgtgtcaaagttagggactcaggtctattccttcttatttcaattcctaggattttcttagcctttcctagatctttcatctcaaattctgagcttagaagtgccttcatttctttgatttcactcttgcttttccctatcagcagtatgtcatcaacatacaggagaagaaagagtgtatcattgaaatatacacaggggtcataggcacttttagtgaaaccacttttcagcatgaaatcatcaaacatgagattccattgcctaggagcttgtttcaacccatacaaggacttctgtagcaagcatactttgtccttgtcttcatcaaagccctctggcatcttcatgtagatggtttcatctaattttccattgagaaaagcagtcttcacatccatttgctcgatttctagatcttcagatgcagccttggccattattgctctaattgaggcctgtttcacaacaggtgagaaaatttcattgaagtctaccccttctct

SEQ ID NO: 277900 - DNA, 506 bp, Cannabis indica
aaacactcaccaaaacattctctgtattaaatacatccataaataacacagactcgtggactaaggctcattaacgccccaaccacgtaaaaatccttctctaattttcttacagttctcaaatcttataatattttattggttgccgaaaacctcggtcaacattttggtgctttcattgagagctgaagaaagcttctgcaaaaatacacttcacgttacaaaaatggtggagactagaagtactcgtcaacctcgccctctagaggatgctcaagatccaaatgaggaagacgtagcctcaagagcagctgagggctctgaggaagaagaaggaattcctgacgatgactacgagggaaacctcgatgagtatgcctacgatgaaggtagctactcagagttggtgcttctaaggcaaaaagctatcgatcacgaagctgagatcgaagcccaaaaagcacaaaaccaaaaaatgcaagaggtgatgctggccatgcaaaaag

SEQ ID NO: 277901 - DNA, 475 bp, Cannabis indica
taattttgattatctaaagtgccaaagggggagattgttaggtccttttttggcaatttagttgtcaaaatattttttaattaatgtgcatatttattgaacattcaatttgtttttatcaactctggaccctttttccaaggggagttgtgttgagtacttgtgaactatttggtttaaaagttagcatgtttctttggttattgttggttttcgattgtgttactcagggggagtagtcatttgtcttgctaactttatcttgctggtactttgtgttaaaaattattttgttcatctaaagtgccaaagggggagattgtaaagtccttttttggcaagttagttgacaaaataatttttccatttatggtaagattgttgtgcattcatattcgatttcttgccttataaattcggattgtagttgccattttccttgtttggaaagttgcactttcagctgaactttcct

SEQ ID NO: 277902 - DNA, 802 bp, Cannabis indica
atttaaaagtttgtttgaggaaaagtcttactacatcgctgtgagaacttcacacatggaagactttgtgaagcttactcagggaaagatgtcagtggttgaatacaccctggagtttgattagctatctaagtttgctggtgatctggtacccacagatttcaccaggaaacagaaatatgtgagaggattgaatgccacaatcagtcgggacttgaagattaccacatcacatgacactttgtataagaaagtggtagagctagccttgattgctgaggagggtgagcaacatatagcaaaagagcagactgtaagtgtcgtgttttgtgtggaaaattagatattactgttgtttggtaattctgaaactgcatttgcttttctaacatcttttctgtagttagttgcatttgtcttcactaatttcattttagtgccatgtcagctttctgcaagtttgttagtttgtgccagctgtaccttgctggttgtttagttagttagtgttgcccctgaattcgcccaaaatacgtggactagtcgaaataggacacgtgtatcagataacctgtaaacattcaataaagtctttgtgtgccacaaggaagcgcagttagcgtgggtcccggaggaggcacccagagtacaaggtactccgggaagctcgcatgacgtgaagcctctccgggatgtgtcagatctctctcgagcaatcaagtcgcatttaatgccgcatgggaggaagcgtgttggaactgtaacacgcaataaagtctgacggcacaacccccaaacagca

SEQ ID NO: 277903 - DNA, 680 bp, Cannabis indica
agacgctcataccaagcacgtggtgcttgtttctaaccatacaaagctttgtctaacttatagacatgatccagaatgaaagtgggacaagattacaatggactttgttactgggttgaccattgacacctttgaagcatgacgctgtttgggtgattgttgatcgtttaactaagtctgctcattttattacaatcaggaaggattacaagcttaccaagctatctagactttatgtaaataatatagttcgactacatggagtgccttcaagcattgtttctgatagagatcctcgatttacatcaaggttttggaaggccttgcaacaagccttagggactgaacttcacttgagtactgcccatcatccacagacagatggacagtctgagaggaccataccgactttggaagacatgcttcgctcttgtgttttggattttggaggtagttggggagaacatttgtgactagtggaattcacatacaacaacagctaccaagccagtataggcatggctccttatgaggccttatatgggagaccatgcagatcaccattgtgttgggcagaaacagatgagcatgtcactattggaccccaaattatcactagtaccactgaaaagattaaaggaatccaagaaagacttaaggttgtcaaagtcgtcagaaaa

SEQ ID NO: 277904 - DNA, 670 bp, Cannabis indica
atgtgtttaccttcattttttgtacaatttggtctttaaagtgttgaggaatttcactaaaattcaagtagtgtcctggcaacttgaatacagtgttggttcgacaatctctcgtatctactccgttaacccacaactccttcaactcatccaccaagggtcttaaaaatatgtctatgtccattccgggtgatttatctccaggaattagaatggtcaacataaaattattatctttcatacataaccaaggtggaagattatagttcgccaaaactacaggccacatactgtaagcttggctcatattgccaaatggattaaagccatcagcagctaaaccgagacgaacatttcgaggttcactagcaaaatcagggtgtttggcatcaaagtccttccacgctgcaccatccacagggtgtcgcatcacaccctcatcttttgatttaccactgtggtgccataccatgtatttagccgtatgccttgaagtatacaatctcttcagtcgcggaattaacggaaagtaacgcatcaccttatgaggcaccttttttgctcctaaattttctgaagttatccatctactagtgccacagactggacatgaatcttcatttgcatgttcattgtaaaataaacagcaattgtgcttgcacacatgaat

SEQ ID NO: 277905 - DNA, 371 bp, Cannabis indica
aggtggtcttgtcgtcggtggtgatcatcaaatcatgtttaatcttcgaatttaacctgtccaagtatttctctttcttgctgaagtcggttggcactattcccgaggctaacctcgccatccggtcaaactgagtagtatactcggtcacgctcatattctctcgttgggtcaggtgggcttcctcttggcgcttctgaccgcctcattgtaatactttgcgttaaagagttcctggaacctttcccaggtcatggtagtgacgtcatggatctgagacaccatgtcccaccagaccagagcgtcttcttgaaactggaaagtggcacacaccactctgtcgttcccgttgacacccataaagttcagaa

SEQ ID NO: 277906 - DNA, 677 bp, Cannabis indica
tcgacgagtcttttactgatgtaatagactggatgttgcacgctgtcttcttctctgatcagtacggcactcacggcatgctccgttactgctaggtatatccccagttcctcaccgtccagaggtttagaaaggacgggaggttttgcgagctgtgcctttagatcttgaaaagctctttcacattcttctgtccattcgaactttttgtttcctcgcaggatgttgaagaatggaacacatttatccgttgattttgacacgaatctgctaagtgcggcgattcgaccagttaggctttgcacctctttggtttttgttggcgagttcatatccaggagggcttggattttttctggattggcttcaattcctcgagcattgacgatgaagcctagaaactttcccgagctgactccaaaggagcattttaagggatttagtttcatgttgtatttcctaaggactttgaaacattcatccaggtcgtctatgtgcccccagcctttctggatttgacgagcatatcatccacgtacacttccatgtttctgccgatctggtccttaaacatcttgttgaccaatctttggtatgtagctccggcgtttttaagaccaaatgacatgactttgtagcagtagagacccatatctgtccagaaacttgtatgttct

SEQ ID NO: 277907 - DNA, 807 bp, Cannabis indica
tcaggatgaactgcgagctgcagcgaatctcgcgtttgacgaacaaaggcgtatgttcgctgaatggagagataaagagataaaggcattaaggctcaccatgcagagatcgaagatcgtagtcggcaagttaccgtgctcatacgaagagcctaccaaactgtaggtcagcacatgccgaacgtcattcccctgggagaaatgaaagatgacccaacgatgaatacttcccagacagctaatggtcagccgcccaatccccggttacgagttccgctcgtgggccaagaggtaggcgagcagaccttgtccgggaattcatcaggaggagccatacatgacggttccaaccagaataatggcgttatcccatctgtcaaccaagcgaatcaatcgctaaggcaaccaggctcttctgtgttcgataggttgggaacagcccatgacctaaggaacgacctaaatagaagaaggggaacatacgagcagaatactacaacgatcgtgtagcctagaacccatactcaaatcaccgtttagaaagacgctgacgtaacccaagtcgaccagaatgctgagcaggtcagcccagccgcacaggcccagcttgatgaattgaaaaatatgtttcacggcatggctggaccacgtaacaatgatcttgagttagaccgagctcgcggaactcccttctcaccagagatcaatctcctgccactgcctcacaagttcaaaatgccgacgtggaagtgttggatatattttagcaggatctagatttactaccatgtatgtttcattaacatc

SEQ ID NO: 277908 - DNA, 588 bp, Cannabis indica
cttgggctaacaattggtatcagagcaagggaaaattatttgattagatttcacaatctagagcatggcgttttcaagtaattcacaaaataacttgttagaaggttttagcacaaatagaacaccatacttcaatggagtagattttccttattggaaaattagaatgaaaacttaccttcaatctatagactatgatttgtggcatattgtgtctagtggtccatacattgctgaacatgtcataaatagtgttgaagtaatcaggactgttatagtgagatttctctcacctagaaactcgagaccagactcctctttaaaaggacacgtgtattcagattcccaatgaaagctgaaatgtccgtgagagacttctcgaagtttagacctcgcccaggataaaaccagcgagatattgcgggtgcgacctaattcacaccgcataaccataatcctcatcatgcagggtagacccaactcgcatatgtcagaacatgtgcgagtgtctccctctatacctccgcgacgagtatggagaccgatgccctatgaggtagttttggtcccagcgacccaacagcccta

SEQ ID NO: 277909 - DNA, 663 bp, Cannabis indica
agagtattaaaataaaagtttagaaattgttttctaaaaaattagtttagaaacaaaagtttaaaaattaactctattttgtatcaatttttttctattttcaattttattcatgtgtttttattttttttagtagctagtagatagttaattacaactacttagcaagttactaattttcattctattcatgtatttttaactagttagtaataaattaactagttagtaactaaatactcataaattatataactagtaagtagctaaataaaaaaatttgtaattttgtagtatttctttatgttgtaggttgtgaggtcaatttgcaaggatctgacttatttggtattgatcggtttctagttagctcgaggtatacactcactaaattttattataaattaattatgaatgcttagtagagtttgaatatcttaaatattcatccgtagtgaagtaggttctgtaatatattgtaatgcgccggatcgatgggtgaaataatatgcatgttagatgagtttgaatatcttcaatattcatccttagtgaagtaggttctgtgaatacatgtactgcagtcgaatgggtggtaaatttttatattgctaaatgttgttgtgattatttcatattgttttgaattgtgttttgttgtta

SEQ ID NO: 277910 - DNA, 532 bp, Cannabis indica
atattgccagaagagattcatggaagcaaacatcaggtgctggttctggtaggggtactgatcccggtgaccgcaagaaaagacctagtgaattatcagctacaggcccaaacaaaaggttccagggtaaccaaggtttccgtcctggtgggaacaaaaattgcggacttttcctgaatgtccgaggtgtaaaaggcgccaccagggcgagtgtcaggccaggacctgtttccactgtggggtggtgggtcacatgaagagaaattgtccacagctgctacgactagagcaaaagaaggatgttacaaccgctcctgctcgagtgtttgccctgactcaggctgaggctgatgctggtccttccactgtgacaggtcagctttctgttgctggtactttattgactgttctaattgattctggtgcgacacattcttatatttcaagtagaataattgagaaattgaatagacctagtgatgtgctttctagaggtttcagaactttgttgcctactggggagttggttatc

SEQ ID NO: 277911 - DNA, 548 bp, Cannabis indica
aatttctcaaaaaactctctctattttcctctccctttttcggccatttgaggcagcaagaagagtggtttctcctcttcattttcaagtgattttcagcaagttagagtgttcttaattgaggtaattcttgtctagctttctttctttgttttcttaaaaaaatgatgaaatattgagtgaaatgcatgctttttgatgttgttgctgctgcttgtgattgttgttgtttttatgtttaaaatgttgaattaattatgtttagttaggttgaaatgcatgctagttgttcttgcttgagttggttaattttcttgttaagaaactaaggttttcaaagtaaaaaattgagaaattggtggctgtagttattgcatgaattaggttttgttttctgcagtgtttctatgcttgattatgtgattctaagctagctttgaggcttgtgagtgagctttagccaagtttgagttttaactcaaagcttggagctcacatggtgttttttgtttctgagtattctgggttggtttgaggccttagaaatg

SEQ ID NO: 277912 - DNA, 345 bp, Cannabis indica
tctcattatcttgctcctcattctggcttgcatttcaggaaacctaacttcccaatttttggcttcctgattggcttgggcagcctgggtagcatgtgcgggttaacatcaccccgaccacgagccctgcccctgggacctctacctcgacccctaacatttgggcaaaactgagctccctgaacttaatttgacccgaccgagttgccctgactcctgatatttcgtctggcatctatgtagtctgaacagcctcgaaaccccgagttggcacatcaggtcatgatcaacgagagtttactaatgccgcttaatttggaaatttaaaacatgcgcctattctac

SEQ ID NO: 277913 - DNA, 710 bp, Cannabis indica
tagttattatgtgagattattattatgtgtataggaagaaatcaaaaattatttgaataaagaattcaatatacacagttatatatatgaatcccattaatcaaaaaataattattcaatatatgaacaataatttgtcacgctatatgtttcccaataaagaaatccacctcctcatagtcaaaaataaataatacatgtaatacagatctttgtaatagagtacctaaaagaaacaaaacttcagttaccataatcggaaaaggtttaagtgaactaaataatgactaagaagatctaaattacaaaatgaaaataacatgtctatatgagtatgatttttttgctatatgagcatgattgatctaagagaaaatagataaacctataaacatataaatatacttaatattaattttgacaaagaaacaattcaattataaacaattctaaatatcagcttgacaatttcaacacactaattactcattaaataaccataatgtatacatcatgataattttattttatttgatatcaaatgatagagattattgaggttttcagccatggaaaacacactatgatcaaaaagtaatgctcattaattgtatatttcaaagaaacccaaatttccatgaatgtccctaataagatataaacaataaagttgtaaattaaaaaaaaaagtagcaaaatttcagttaata

SEQ ID NO: 277914 - DNA, 468 bp, Cannabis indica
cccggccaccagtataaagctttcacatcatgatacatcttggttgttcccgggtgtaaggagtacggtgtagtatgagattcatcaagaatctcttgtctgatttctttatcaaccggtacacagattctgtttttgtatcgcaacaacccatcagataagcatgaaaagtctcttgccaatccagcctctaacttctccttatgtccctgtagctcaaggtcaccttgttgggctactctaattctttccaatagattagattgtatggtgatattagcaagttttccaattacaaattcaattcccgctctcgtcatatcctcagccaacttggctgagatttcctttagttcacaaacttgccctggtcctttccgacttagagcatccgctaccacatttgctttaccagggtggtagagaatctcgcagtcataatctttgaccagttctaaccatcgtcgt

SEQ ID NO: 277915 - DNA, 194 bp, Cannabis indica
tgcggaaatgataaaactgcaatattgcaaaaggtgaggcccaaattcactttgcttagggccggccacttttatagggtttttcatctgaaattttcattattataatgcaaaataattcagagaaaaacttgagccttctctctcgtaaaataatttccaacaactggtctcagagccatggtaatttattt

SEQ ID NO: 277916 - DNA, 582 bp, Cannabis indica
gttttttgatgctactgtatattgtggaaaacaattcatttaatagtatattagtttaaatttgtgatatatgtatattggtttaaggtatattgtttgtatatcatacgatatattaataaaaaactaattatatgcttaaataacatattataaccttgaataattaagtgtttggtatagttattttgcacaatagtatatcgtttttatgtgcaataatatattaaaaaaaactgaaaggtagtatatatattttttttgaaataactgaaaggtagtatattagtttaagattgtagtatattattttaatgtgctatggtatataatgaacgaaagacagaaattaaaaaatatggaatattagtttaagtttgaggtatagttatatttcactaggaaatattgtctttatgttcattagtatatcatgaaggaaagaaaaagaaaaaaaaacatgtggaatattaaattaagtttttggtatatatatattattatattatttttaatataataatatgtagattaaaatgtggtaatatataatattatgtgaataatatatattaagtgtat

SEQ ID NO: 277917 - DNA, 621 bp, Cannabis indica
tagttactgttttttcagcatacaaacacaaacgtttttgagtctttctaacattccaaaactcctcaaaatcacccatttaatactataaatgcccaatttataattggtaacatccaagggctttatggtggtcattcatgttcatatgggagtgaaaaactctataaatagaggtcatattgttcacttgttagagaagtagttaaaaccatttgttgtggttagaaccttgtgaggatatgctcatccttagacactaggctgagcatatgaggcttgataaatcctttagagcatttctagagtttccctaagtgtccatatgagggaggaaatgacttttaggacaaaggttcttgagccttggtcaagctttatgtgtgttattcttcttctttttctctagctttcttgtaatcttcatgaaatacttttatttgcattttgagtattttaattgtaatcctcctattctctcttgtaatgagaacttttccaacatactatagtaaaatatttatcctgatgtattttcgttgttttccaaatttctaatcgtgaatttgttcatattaaatcatgaagagacatgtagatagagttacgtacgtgaaaata

SEQ ID NO: 277918 - DNA, 659 bp, Cannabis indica
ctaaaatttggtaaattaatttttcaatagtaatattacatttttatgtgataagaatttgatatattttttttttattgattttgacaaataaaataaaaatatataagaaaaaaaataatgcattattagttcttaaacaaataaattttggaaaaaaaaatataaatttagatataaaatatattttttttatttaaaaaaaaaaaagttagggtcggatcagatccgatccgtataaggcgggtcggatcagatccgatccgagtatctgatccagcggggcggggcggggcagatccgtatatgatctggatcaggtcggatcagagtcggatcagatccgacccgccccattgacattcctacgtatcaccctaaccaaaaagtaggcttaaacaaaaaaacaaaaaaaaacaataacactcttgagattgaacctaatgatgtcaggattaagattatttgatctaggatcaactaggtgatatcgaattgaatagatattacagtaaatttatcaatatctaatccaagttcaatatctggacccttccaatatatacgtccatacaaccgatacaagtaaacttttccaatgccctggaaaggacataacacttatccaaggtgtaagtatacctatcgttgattatcat

SEQ ID NO: 277919 - DNA, 572 bp, Cannabis indica
atatttaccagcttccattatctattaacactctcttaatcctcttattggcgagttgaatggttatgaccagtggatcgacctgaaggtatctcacgttcttctcgtcttcctttgtgaatgtaatggggggttcctcggttttcacctttttggaaggttctggggcaaagaccgactgcttgttctttatttccttcacttcacatatctcttctgagcgttattgctttcccctgcaatatgcgaccctcctgaaataactaggatgtcctctccttccataagaagaggttgtaacccatggttgtttgggttatcaggctgacgaggctggttgtatccctagccctatcttctcacatactgcctaaaatggcctcgagcgatgagactctctatctcatctttcaactgctgacattcgtcggtcgtattcccaatatctttatgaaatttacaatatttgttaggatctcttttgctcctcgaattcctcattggctcgggtttaccaaaggctaccttctgctcatgtgcaaggtaaatattttcttgagttttattaagct

SEQ ID NO: 277920 - DNA, 530 bp, Cannabis indica
ttaggggtggaccatcccattgtcaatagataagaaagtgtttgttcaaacaaatactacttttctaagataatgactaagtctgaaaacaagtagcaaataaaggagatattataaacacattttgtttataataattgaccacatcatattaaaattctcagaagaaggcaatatttcatgcttcaattctgcaattgtgttaaaacataagaaaagaaaacaaagtctgtataattcacatcatgttaattcttaacaactcatttgattacatatgaaatgagagataaaatagaagaaacaaaaaacgcataattctcttcggaaaaataaacttctaagtgagaaactttccaaacatataatcaagaagattcttcaatgaagctttgagaggggacatagtcttctaatcctacaagttgattcattttagcaaaaatctgagcttttagatgctcataataggctcgtgaacgtgaattcatgttggaggtgtccatgaacataattgttgggttttatgc

SEQ ID NO: 277921 - DNA, 558 bp, Cannabis indica
ttttacatatgaaaaatattgataatagcataatatagggacattattagcacttagtgacataaatacaaagttttgctacttttttgttggatccgtactattggttcgaaattgaagtgtcaatttcttattaatttgggaattaaaaagtattcttttagtattattaaatcctaaaagaaaatggtttcaaaaaaaaaatctttaaagcaaaatatttgaaaatttgaacataaatgaacatgctattggtggttcaaaacaagtaataacttagaataaaaaaattaatgtcttgatttttatattattttttaagtaaattgatcgatcaagatgataactatcttcaataaaaatgtaaataagtgatgcaaaattagaataaaacttatctattaagaaaaatgtgctgcaaatttgacacatagaaaaatatcgtgctaaatttaacatattatttgctatgatataaaatttatattaccataaatacacaattttattattaattttcatgttacttttattattttattaatatatttagttata

SEQ ID NO: 277922 - DNA, 510 bp, Cannabis indica
caactgcggtttgcttggcacttgaggttgcaaaggcaaaggacatcaatttatcttgatggaaaacgatcaaagatagtgatcaacactctcaacggtgttggaatcccaatgggaaaataaaaactactctttattttgtaaaaagaatcgttccttctttcattacctgtttattttgttttacgactagatcatgttattttatggcccaactaattggacttttacccagaacctttatgggtgccttgatgttactactattcctacgaacatttgttgtaattgttttttaatgtctttatgaatgaacgtatttactttttttttaaaaaaaaaaaaaaaaaaaaactacgttgtacatgcatatatttttttttcagagaaatgctaaaaggcacctatgatgtttaacacctttctgaagtataatatcgctattagtacaactcaatatcagatctcacttattttactttaataaatattataaaaaattactaacca

SEQ ID NO: 277923 - DNA, 534 bp, Cannabis indica
cttcgtctgggttctggtcctagtttgagtccctgatctagacaccgacaactggtctgttccaggccccgttacctgaatcccgagtcaagatctgtatcactgtcacgggtctcggtctggttctggttcaggtgtcaggtcccatttctgagtttgggttagggatcgagactggggtgcggttctaggtctcgaccctggttctatgtccctagtcttgttccatgtttgggtctaagttcaggttcgggttcgggtcccgagtctaggtttgggttgggatccaggttcggctcccaattcgggtctaggtttgattgggagtccaagtcctggtccggttacgtttctggatctagttctattgtgcacattgtcccacatagaataaatggtagagaagtgagccatatataagaacatgggctactccactcattgccaattggttttgagatggaaccccatgattcccaacatggtattagagccatatcccttgcaaacaagtgatcatatccgatctgcacc

SEQ ID NO: 277924 - DNA, 789 bp, Cannabis indica
ccccatatttaaaatactatttataaatttctcataagtaaaatgatataaaatatcatttttctctaacttataatttataaactattaaatatttaactaaataacctattttaaatttaaaaatattatggttagagcttctataaaaatatctatgtaaatttcaaatttattaattatttaattcatcttataagataattttaatataatatttcaaattaaaaggataaagttatcttttaatttaaaatatagctaatattaaaatatttgatcttataattaaataatatataaatattaaagaaaataacaaatttttaaaatctgaccataatttaaaaatgaaataatcaatttttaaatttaaacctcaaaatatcataaaattaataataatctattaaaaaataattataattaaatattattaattgatattattattaaaaataatattttattttaatttttagggtttgaatttggaaaaattcgaaaaatggaaaaaaaaatcccacttaattcagatttttggtgcatgagcacctggtgccgacgaggaggtgcatgagcaggcaatctcggtgggcgcagcatcaggacacgggcgtttgcaacctctaggtatgggtgtcccctgtccgaaccaagcgtgcacttgtcttcagacacgatttgcccgccatccggccacgtatcaccttgtccgaaggactcgtgtgtgtgtgattgagccgtgtgcacccgaaatttcaaaccttcataactttcttaattttt

SEQ ID NO: 277925 - DNA, 508 bp, Cannabis indica
agtcacaacaaattgtaatttttatgactaatacttttagccacggaccttttagtcacaacatatgaatgataatttataattaatcacaacttttttacttttagccataaatattgttgtgactaaaagtaaacctttttgtagtgacggtacacagtataaattttacacaatattttttgaaaaaacacattatgtttgaataaaaaaaatctaccttacagtaaaaatgttggaaatttcaagtgtaaaaattaaaataataataataataataatatttaaaaaatctcaacattttaattatgagaaatattttattagccaccatttcgattggtgtcagccaatactaccataaattagcatgatatatgtagttatggaaaattctacaatgcacccccttaaaatggatatattgatgcacctttatttgttttagcacccgaaataagtttttagtcaaattttttctcatggtcatatacgttatagttattta

SEQ ID NO: 277926 - DNA, 611 bp, Cannabis indica
aagtaagcttcagagcgaaaagagagattcttggcttcaaagttgccgaagtgccttcatacaaactgcttgttggattgacgctgctcgaacccagacatctgactctcgagtaagtttctggtttcctttatgcttatctttgcatgtttatatgtcaaatgcaccttctactttcctgtagaaaatgtttaggaaaccctaggtccagaaacctctgcgattcttctttaccatgtctttgtgtgattttacagtcataatgcttgtttctgaactgcgtaacgtctatctttcatcttgcttattctaagcttcatgaacttttttgccctaactcgagaaattttttgacatcttgagttcttacttttcttcaaacataatcgttctttaatatgttgagtactcctggtcggcatatttgcttgtttatcgtttgatattctgaccaaacactcatcttgtgtgttgtcttttgtagatgaactcaggtgagtcttgggaaaacggacatcagatcgactaggacctgcttcaacttctacacgaggatcatcctcgtctttgttctagcccaccttcctctagtgaaggacattcttcaaatc

SEQ ID NO: 277927 - DNA, 707 bp, Cannabis indica
aatttttaataattttttaatattgtccgatttcaatgccatgccatttaaaattccatcgaatgaatcaatagttttctattctaatagatatagaatgctatttaactcaatttaactcaacactaaccataagataaataagcagaaaatagaaaccaaagtatcaaaaaaatgaatgagaggaagaaagcattctaattcaaaaagggattagttgtgagtctggttggttctttgcgcctagttttggtgtagcagctatatttcgattcatcctcttttttcaagggttttataattggacattgaacccatttcatatgatgagagttgcaggggtcttgggcgctgctttgctatgtgctattcatggtgctaccgtagaaaacactttatttgaagatggtgatggtgcaaatacattccgtgcttttaacccaataatattttaataattactattttatttttactatgtaaaattcagattattctttttatttagagaaaagaaaaataagattccattattttttttcttttccaatggtaagttcattttttttttaaaaattaagttgctttaaataataataaaaaacaattatccttatttttttttaatgtaccgcttccatcagcatagcacattaaaattttttgttttgttttatttttttggtctaattagtaattttttcccc

SEQ ID NO: 277928 - DNA, 521 bp, Cannabis indica
aaaatagcagcaaacaactacagcaagcagagcaacagattcaacatatttctttgaaaaccataattttgagctaaaaacttccaaccatgcattactccatttttcatcaaaaattcaagaaaacaaaagaagataagagtaagaacaatacctaaagcttgagttgcacacaaaatcagcttgaaaaaccaaagaaaatctcaaattcttgctgcttcaaagggccgaaacagagagagagagttgagagaaaaagttttgcttttctttctaattttctaacttttttccaacttgtaaaaaaaaatgaaaataacaaggttcatttcagccaacaattattatcaaataacatttaattccacttactaagtccactaaaagacaaactaacaatggggcaaaatgactattttgcccctccacactaaaataacataaataacactaaattggtacttttgggaaattcaaaattccctgccaatcccgacattcccaatgtctaataaaccgtc

SEQ ID NO: 277929 - DNA, 397 bp, Cannabis indica
tcccactcaatagcagatgtctggttaaataatacttttaacctctttattgtttggagagttatctagttgtgacttattgtattagtctgaaactctaagtttcttttaagactaaatcatcaacatagcaaactagtatttgaagtgaaaaatacttgccagagattaagtaatcaaaattaagataccataaaatgttatgaggattaagaattcttggttcaagtcattcgaatagactgaactagagttcttttatcttattctcataattctgataagttatatctatccacatgaatggttagacattatcaaagaacatttataggtatcaatatttactacaacagtaaaacgaaattggaacatacaatcaagatcaaggatttat

SEQ ID NO: 277930 - DNA, 513 bp, Cannabis indica
caaggcatgtttccagtgtggcatggtgggccactttatcagagattgtcctcaagctaagaaagaggagcctaagaagagtgctactcagaactcagggcgactttttaccatgactcaggctgacgctgatgctagtccgtcagttgtgacaggtcagttgtctattaatggatgttcatatactgtgttgtttgattcgggagctactcactcctatgtgtcgagtagagttattgaaagtttccataagccatgtgatatttatgctttggggtttggtaccctgttaccctcaggagaccttatcgtatccactaggtggattcggtctttgtccttctggattgacggatgtgaattgaccaccaatctaattgaattgcaactatttgattttgacataatcctgggaatggatttttctgtctaagtatggggcaacgatcgattataaacggaagatggtggtgttagagcctgatagtgctaacccagcggtgttcgtgggta

SEQ ID NO: 277931 - DNA, 712 bp, Cannabis indica
attataattaaactttattttgacaaaaatcaattcagggtcctatttgtactattttagaaaatacatggtctattttgttatttaacaaaacacagggtccaattggtaatttttgtaaaacagagggtccaaaatggtatttaccctatattgtatagtaggggtgggcatccgatccaatccaacttttttttcctcatccgatccaatccaattagtaattggatttggaaaatcatcatccgatccaatccaattagacctcaaaatccaatccaatccaatccaattactaattggattggatcggttttttaattggatatccaattacacacctaaatttcaatattagcttaaaaatataaagaaaaatacgtaaaaaactaagtatcactttttatttaagtttaatacttcataaatatactattcttacaagtgtattgtagctaaaagttttaaataattaaaacaataacatttctaagtaataaaatagaacaaaacatcatgaaaataaatacactaaacaatcaagtgttacaaattcaacatacaaaaaaatctaataaaaatataataaatatttattatatttttcaatattttttattatataaataattttttatatatatatataaatgtaattggattggatcggtttttaattggattttgagattgacatccaataaccgatcca

SEQ ID NO: 277932 - DNA, 436 bp, Cannabis indica
atgaaggttttgaaagacctggctctgagaggaaggcattccgggaggaggctcaccagagggaggctgaggcggagaggaggtaccaggaggccttgcaggagattgttggaattattttaccacgatcttagatctactcacaagtatgttgatttaacaacctaaatcttacattgggtgcagcggaatatatgtctcctcccactcaaatctctaacccttgattcctttctgtcgcagagtataatcaagatctgagcccgaatgtccttctttatcgactttgaattctacacagccttccctactctatcactcatagaatttcgaaaacaagagaaggtagagagagagagagagagtggcggcttgaagagagtttttgtgtgagagaaaattctgtcaaaagtgttacaaaaactgaagcctttac

SEQ ID NO: 277933 - DNA, 1002 bp, Cannabis indica
aaataaatatatgttaaaataaatagattaaaaaaagtatcaaataaaaatacaactctttaaaataatgagctttagttataaggatattcgatctctattgttggtcctacacggttaaatgttttcaatataatctcgagacgctagacttcatccccttatggatggttattcgttgaagcatttaacaccgtaacgatctcttatgataagtattttgtaagtttttgtctctattagactctcccatacggtgactacttacagataaatttatgaagtatgaaacaatggtggaagcacataaaataagaataaccttgactcttgcctaccgggagaacgttggattcttgttttgatcgaataaaaggtttctagaatggtgtccatttaagatgaagtgacaactctattcaatgaataattactttgactctcgcctactggacactgtatcagtttgttagaaaccttcaaaattatttaagatgtgcttgttttgtattttcacatgtctttgttacttgtatgataatttcttaattgtgtgtgaatttatattgaaccattttattttctgttattaattgtagttgtaaattctgtgtaaaataagaataactttgactctcgcctaccgcgacattgttggattcttattttaatcgaaattatcctaatttttcctcttagcttattcatatcgaatttgcttacatagtatatcattggatgaatggtttataaatcatccgcttatgatgtcattctatttttttttccataaaattgaatggcgcagatgatattcccgacattctatcccgaaatgacataaatcctcgatcttagaaatctcctacttgtatatgcttactttatgaaaattagacttagagttagattagtagtggtggtccaagctaaaatcattactcattgtatattttgtataaatttaagtctttgactataaattttagattctaaatagaa

SEQ ID NO: 277934 - DNA, 419 bp, Cannabis indica
tgccccggtagcaagacttgagtccattagaatgttgttagcttttgcatgccacaagaattttatcttgtatcaaatggatgtaaaaagcgcattcttaaatgggtacattatggaagaggtttatgtctctcaaccacccggttttcaaaatcataaataccctaaccatgtttacaaattgaaaaaggctttatatggtttaaagcaagctcctagagcttggtatgaaagattaagcacttttcttatttcaaatggtttttcaatgggtaaagcggataatacactttttataaaaagaaaatccaaagacattattatagtacaaatttatgttgatgatattatctttggtgctactaatgatgctctttgtgaagaattttctaagtgtatgcatagtgagtttgagatga

SEQ ID NO: 277935 - DNA, 1074 bp, Cannabis indica
aaatatacaaattagtacaattaattatatgaaatgaattaaatgcaaaattaaagaatatacttaatggcagattatcaattaatttaatcaataaattacttaattggtaaataaatataataattgcgcacttaattgtagaataattaaatattcacattcttaaaatatcacaattattgtaattacatgtaaaaataaagcatgtaattaatttaccaaattaaaaactttccataataatttattactaaataacatataatatatgaagatatatgttaaataagaatggaaagtttaaacaaatgtaatttaattgactaaataaacaaaataaggaaataaaataaaattccaaaaataaatcaaaataataaaatttcggaattttcttaaatttttcttaattttccttttttttttgaaaaatctgccctgaaaaacgacataataaattttccttaaacttccaaaaatcatgaaatcaattccaaaatgatctaaatgaaaaaaattaagagatctatattgatttcaagcatcgaaaacacgcaaaatgtatactttaatttcaaaaggtgttctcgggtccgaatggatttttccagtaaagttttcagattttaaggtattaaaattattttgatgcacaaaatcgatctataatatcttatgaatatagtaatgcatatagaattcaaaataaataccaaaaatgaaaacggaaaaaatacggaccgaagcataaaactttcatgtatatatatactcgtatacaatatatactgcataaaatcatcattaatgtatggaagagagtattacatacaatttcatgcaataaaagtatatataaaatatatatatatatatatatatacaacaatacttacgtatatatataatatatataaacaaaattaaaatatgaatatatatatatgtatatacgtagattgaattaaaatgtatatatatgatcggaattatatgaatatgaatatatatatatataaaatatatataaattaagaaccgatcatatacgtatatatatttatatatgaa

SEQ ID NO: 277936 - DNA, 451 bp, Cannabis indica
caatgtaataaacacataagagtttaagaaaccttacagtgggtgcagcggaatattattactcttctctccttctttgatggttgattttccatagtcctacatactatgattgaggtaccacttgatgtgtgtgggcactactcattcactcaagggatttcgaaaatttagagaagaaaagagagagaggaaagtggtggctcaagaattcactctgaaaagaatgagatataattctctgtgaaacctgaagcctttaccttctatttatagaataccacatagggttaaggttgaattacttggcatttaaaaatgaaaaataaaatgataaaagggaagcaaagtggccgaccatagaaaaatggaaacaagcctctcacttttgcaactttcctattttatcattcctagtttcccattctccaaaattgccaattttctcatt

SEQ ID NO: 277937 - DNA, 194 bp, Cannabis indica
gggggtgtccgggcacaaggtgagtggaagtcttaattttcccattgggacaagcgtcgttccattaaaccccgtgagttgggaaccactgagtgagaggtctcggcacgttaggcctattgcagtgaaggcctccttgaagagtagattcacggaacttccgttgtcaatcaagactctggccaccactttat

SEQ ID NO: 277938 - DNA, 508 bp, Cannabis indica
acaccttggtcttcatgtttgtgacacctccttgtgtcaccttattcttctctcttgcatagatcaagtcacaaaatccttccatttggttttgtgactttctaaacgcaagtataacacatgttgtcttctttaagtaccttaaaatccatattataatcaaccaatgtatcttcccagtcaataccatatacttgctaacagcaactatagtatatgttgtatctggtatggtactcaacatgaaatacatctttgaatcaatcccattagagttgaggatcttactcatatcctccaactctttatttatcttactgcatttttctttatgtctaaagggccacatatgtttcacagcactctttcccttgggttttggaacacaaacccaagtcttctctttactcaaagagtctgtctcttcatccatagcacagttccacttcttagcatttttgctcttcatagcttctccacaactttctggtttgttcttctgtccttg

SEQ ID NO: 277939 - DNA, 561 bp, Cannabis indica
aaatatatatctataaatgtttaagttacccatattttttaaatatgaaatttgattagttaaataaagaatgaagttacaaataaattttaaattattactaataagagtatattttttagagcaattagttatgatttcgataagataccaatttgttacttttgataaaattatcaattttaaaataaaaagatgatgataagaccaaatattctataatcagatatgcatatactcatatataccaaataaacttattagtttattttggaatattgaaacaaattttcattctttgtttatatttttcgtatagcctaccatcgtatatgctaataaatctattggtttatttgggcatgatgaaacaaattttcatttttctttttcgtatattggaacaataattcatttcatttcatatagcttactaatatatatgtcaataaacctactagtttatgtttgatggaacattttatattttttcaatatagagtaaactataatcaaacataatgatatacgccaatacatctattagtctatttttcgtat

SEQ ID NO: 277940 - DNA, 918 bp, Cannabis indica
acaaagatgtcaaaagacaagactgaccttttttttttctttttttttcacatattgttaactacactaaaatcaataatcttaattgttcttgtttaatttcatatattactcatttacattttgactaattttttatttcacaaaatttacccaaactattatactaactaatcatgcccctgcataattctcccaaggttggaaatgtttaggttcatcatttgcactttcttaatgttcttcagatcagttacattgaaggtagtgaagatcttgtaggcattctcattaataggttctagaactcaaaatggtttgtcgactcgaggagatattgtgtgagaattagaaattcattcctattccttgataaatgaattcatactaagtctctcctttgaaatgagtgctaacttgcatttgatactttatattgaatcagggctaattttgaaatttagtgagtcataaaaaattatatttatatatatttagaaaaaaaaatatggtaatttttaaaattaataaaaatgtataattttaaaaattgacaaattttttttgggcccctaagttagataagccctaagttagataagccctaaacacaagcctagctcacttatacttaaaatcgaacctgcattgaatgatcttctctcactcttccttctaaaacttcttgatttgcttagcatgttcatcatcatcactaaatttacaagtggtaggtagtagaggaaggtccaataatatttgtaaacaaatatgtaatgtttgattgttaatttattataaggggtaagttgaaaaatgcctcttttattaatcaattaatcaaatttgtctctaattttatatttatttgaaacattacctctttttatatgtattgtacccaaaatacctgacata

SEQ ID NO: 277941 - DNA, 709 bp, Cannabis indica
tgatcagggttatactgtgagctttgatagtaatcattgttatgtgtataatattcttgatgaaattgtcttgcaagggttcagatctaatgataactgttacaccatcactacccatgctacttgtcactctgttattaacaccactgatttatggcatgaaaaacttgatcatattcattttaaaaatttgaagagattgtctaatgcaggaattgttcgaggattacctaaattaggtaaggagtctttgggaaaatgtggaccatgtcagcttggtaagcaactgaaaatttctcataagagtgtttctgatgtgaatacttccagagttctcgaactcctacatatggacttaatgggtccaatccaggttgaaagcttgaatggtaagatagttcgtggtaagagtaatcatgcaaacgattttgaaaatactgtgtatggtaaattctgtaaatcttatggtatttttcataatctttctgctcctaagaccccacaacaaaatggagcgattaaggattcccaccttcttgatcatgttttagacgaggctttgtatggcttgaaacaagcaccccgtgcttggtatgagcatctatctgagtttttacactctcatggttatagaaaaggaaattttattaaaacacagttcatcacacacattcaatttgatattattttttcatatgttgatgatctt

SEQ ID NO: 277942 - DNA, 680 bp, Cannabis indica
tttggaaattaaattccctttccaatgataccaaaatctttgaaattggaattatattcaaagagatattacaattttaccaaaacagttttgcaagaacaagattcaagaaacgaatcacatgatattgaataaaactaactttttgacatagtatgacttcgaattaacaaaaagtttcttcataaaacttatgggaaatcgaataagctttccaacgatataaaaatctctaaaaacggatcaatatcaagagagatatcatcactttactgaaacttgtttttctgaaaacgaaaaaatataatagatccgaaccctagataacatttagcattattgagcaagaaaatatttcatacctcttcacatatttctattcgatgtctcaagcccgcaagccttgattataaatccaaaactttaagaatgaaggtagaaaataagaagaattgtggaaggtttgagaggagcaaacatgaagaagaatgaggctttgactaattggtttggagaggaaaaataaaactatgatagtttagggtttgataaaaagattatgagatatcgtattctgataggtttaggttaactaaaaataataatatataataaaatgctaaaatattattaaatcaacaaatatctaaatttttaaattttaaaagtaagccctttat

SEQ ID NO: 277943 - DNA, 655 bp, Cannabis indica
tatgatcgagtaaaagaaacggttattaccgttatgagtaattactcctgaaaccgcggataggtttcttacttatcgtttgctgtatcgggcaacgatagtgacataagcagctcgtggttaacgagtggtaagggtactttataaagtactaggattgtgtgattacgaaattatgaaatgacttaagcatgttattatatgatgagctgtaactagatatatctgcgttataatgtgaatgaatggattttatattgcttaagaaattagtttcttttcttgcagaatcttagtgactcacgaaatgtaagaattcgtgtttatagagatgtaagattggagtgctttatgaagcactgagattatggggttatggtaatgtgtgaattagagtgttttatgaagcactaaaggtgagtatttataatgatgtatgtttagggtgttgtatgaaacacagagattgtgaattatgaatagttataaatatacttgattatgtaataagtgtgctctcgtagacgttaagttatttatgcaccttgaatgtgtatgacctattggtgtatatattacattgtaatgaagtttgctagcactttctatgattttatttagtagcttttcttgctgagtcactgtgactcacggg

SEQ ID NO: 277944 - DNA, 1091 bp, Cannabis indica
tctttccctccttgttcttattaggaactttggaagttgcatttgctttggaagtctcttcattagacccctccacaagcttatccctacatatcgattcctcctcgattcgaatatgtttttggatttcttccaaagagtaatcctcatttttatgaaggattctcttcctataattcttccaagatggtggcaattttgccactattgcaccaacttggaatgcctcgggaagttcaattttgagcactttcaatttattaacaataacttgcaactcatgaatttgaggtaaaagaggtttaccatcaagaaattttaaatcaaaatattgagaaattaaaaatttcttggtaccttcctcctcggccttgaatttattttcaaggtgatcccaaatttctttggcatctttagtgtcggtgtataggtcataaagcctatccgagagtgagttgaggatgtgtcctctacatagaagattgtcatcttctctcttcttcctttgtgccttgacctcatcggtatccttgtcggtaggcgcgggtaagggctccaaggtggactcaagaatataggcaatcttgagtgtggttaggaggaacctcaccttgtcttgccacctagtaaaattggtaccatcaaaacggtccaatcttaccaagtcttggttcatcatcttgattgtttctccttccattgaaaacaataagctttttgattgttagaaaaatatgagatatcaatagaagaataacaataagatgaataaagagaccaagaaaattacaactctatgcaacaaaattacaaggactatagattaaataaaagttacaatcccaaagcacaaaatacaaataaagagaaagaaaagatgaggacaaagatacaactcaaagcaaatatatacacataaatgtaaaagcaaaaagagaatatatataataaaaagagatatatatgaatgatatatagtagatatatagtatatatatatatatattagtgaatatagaagagatataatatatgtatatataataaagagaagaagaggcaaaaaaacaaataggaaaaagaagatgaag

SEQ ID NO: 277945 - DNA, 435 bp, Cannabis indica
cggtatagcctacgggatttaaagcaccacccttgtagactaacacgaattgccttgtacttttaagtacttcaagatatgctaaacaacattccaatgttcctgtcctggatttgtctgatacctgctcacaattcccactgcatagcagatgtcaggcctagtacataacattgcatacattagactcccaactgctgaagcataaggaacccttctcatatcctctatctcttgaggatcagtgggacactgttccttagatagacggataccaaatctagaaggcattgttgcccctttggtgttggtcattgagaatctctctaaaaccttatctatgtaagttgtttgagagagagcaagggatctgttcttccgatttctgataatctgaatgccgaaaacatatgcagcttcacccaaatccttcat

SEQ ID NO: 277946 - DNA, 584 bp, Cannabis indica
aactttcaacgatgaagatgctgtcaagattagatttccgcacaacgacccgctggtcgtggaagtccagatagcaaataaaatggtggctagaaccatgatcgataatggagcttcttcaaacattttgttcaagactgcttacgagaagatggggctccaactcaaggatctaactccatgcctccagcctgtctatggtttctccggtcaaggagttgcacctctaggacaaatccggctacccctcactgttggacaagctccgacgagcataactatcatggcacagttcctaatattggatgttccttcagcctttaacgtaatgcttggccgaccagccctgtatgacttaaaagctgtcacatcaatatttcactcgtgcctgaagttcccaacaaagaatggggtagggtgtcttagagggaaccagcaatctgctcgggaatgttacaaccttgcagtggccaaggctaagaaggaaatatcctccagccagagcccagacaagggaaaaaacattcccaagtaggaaacttcccaaggcgaggatgaagatgtggatcctcgacttggggacc

SEQ ID NO: 277947 - DNA, 835 bp, Cannabis indica
ccctcactagttgagataatactgcttgcagactcaattaactggttttaattaatcaattataactctaaaattagattatgtcttatttataaatttttactaagcaagggcttaattgtaaggaaaagagattttggattaatttattaattaagagactttttatggtctaattaataaataatataaatgataattaattataattattaaataaatagttttgacatttataggattgaattggaaatatggtattattgaaagaagaataacaggttgaaataaagtggcaaaattgtaactagtaaatggcccttaagtggctgaccactagtggtgatttttgcctaatagattaaaataagtattcaaagaaaatatatctttaaaataatgagctttagttataaggatattcgatctctattgttggtcctacatggttaattgttttcaatataacctcgagacgttagactttgtccccctcatggttattcgttgaagcaattaacaccgtaaagatctcttatgataagtattttgtaaatttttgtctctattagactctcccatacggtgatacttagagataaatttacaaagtatgaaacaatggtggaagctcataaaataagaataatcttgaactctcgcctatcgggacaacgttgaattattattttgatcgaataaaaggttactagattggttttcattttagatgagctaacaactctattaaatgaatgatatctttgactcttgcctaccgggacactgtatgtaacaccctaactagcataggcgttttagcgtgattttaaac

SEQ ID NO: 277948 - DNA, 689 bp, Cannabis indica
gtttcattctttaaaaattacttaaggggcatttatgtatgactaaccgaaattcatctggaaatacattgtataatgcaaaccctccatttcagattttttgtgaaattcaaaggttctcaactaaacctctttgatgaaagtggagtcgaaccgttataactccctgaccaaacctttttgacgaaagaggggtcgaatcattataacaccttgatcaaacctttttgacgaagaagggatcaaacaactataatttttgatttataacctatctgacgggagaggaaaatcaaaagttataactcgcatataaaactgaatactaacggttctcgcgagctaggaaagtactaaacgaggcatcacgacgccttgataaaagtacttaaacctaaaaaatggatagataatataactattcatacgagcaaattaaaaatatacaaagtgataaaatccttaaagtatatttaagtttgcttaaggcagattataactgcaattgcgaggcagaattgacaactactcgaaaatcataaagtttagtagattactaactacttaaacaagaagattacgagcaatggagaaacccaaaagtactgtatatttgatcaaaatatagttgtttacattgtgaataaaaacgcaagcaaatacaattgtattaagttcgaatgaaaaca

SEQ ID NO: 277949 - DNA, 879 bp, Cannabis indica
caaactcttattaagaaggatgaaaaaaatatatatctttaaggaaaagtactatcttgatggatgttttataagttacacactcctaagttagatagtaagaagtatgtatgtgaagactttagagataagtctgttatagaaattagtccaaggaggacaatgccatcatgtaaaggagtgtagtatgctgaatagaatctaagataagaagttagagagtagatcgcaaattcaaaacttgaggaaaaggagaaatttacattcaaggtgacatccctagattccaatactcatcgatacaacaacaactgtgtggagcatcactcaaggaggagaggtttggaaagcctcacttagggatgagagacaagtgagacacaactaagactaaagtgacatgtcttgaagaattttatggcatggaaaggacgatactggtttcagagaagtgttgggattattaaattctcaggcaacatacatggattcaaggaacaacataatcaaatgatactacaatctacttatgattcatggaaaatagcataagtatgttggagtgtcaccgcaaagagaattgagaggtaaactttcaatgagtgccaatttttggttaaagaggtggcattttaggtcttatagtgctcgagaagagaatgacaacaaatctcttagaaagataaagccattaagatctaagaattttgacaaatattaggagattttctcgacctggaaggctagtcatggggacttttagatggactttccaaagtcagaatactccattaacaaacgtctatacaaacaattgaagatcatccaactagaagtggggaaataagaagaaaagaacaagataggtattgataattt

SEQ ID NO: 277950 - DNA, 822 bp, Cannabis indica
gtctcggtcccaatctcaggttcaggttcgggtcccggttagggtctggatcttggtttaggtcccggcgagggttcttgaccaggttagctccaggtctcggtctaggttcgtgtcccaggtctcagatcccagtcctagtcaaggtctcggtccaggttctggttcgagtttgggttatggtttcggtttggttctggtcccaggtctgggtcctagtcatagttccaattctgattctgggttccgatttggttccgggtcagggtctgggtcaaggttggggtcgggattcgagtcttagtccgagtcttggtacgagtttttttgatcccgtgctgggtccatgtttgagtttagctccaaggtttgggtctgcgtctgcgcctaggtcggagtccaggtcatgtgtttcgatactggtattggtctgggtcagtattcggttccgggtctgggttcgtgtccatgtctaggtctgaatcctagtctcggttaggggcttggtttgggtcttggatcaagacttgagttgggattcaagttcgggttcgagtctcaatcctagtctgggttcgggaccgggtctaggactggctccaagcttgagttttgaggcttagttatggtctgttctgggtgtcggttcaggtccaagtcttggtcacggtttcggtcctgttctagggttttggtcaagttatggatgatgtttcaatttcgggtaccatgtctgggctagggtcaaggtcctggtccagcttcgggtccttgtctgagtcctagatcaagcaccgactacgggtcttttctgagccctag

SEQ ID NO: 277951 - DNA, 566 bp, Cannabis indica
aaatcaagaaaaaaaggaaaaaaattggaaattagagttttctcttgaacttctctctctcttgctttcggctgggacaaaccaaggggatttgctgttgatttttgagtttcagcaaggaatccaaagggggaaatcaacctaaggtaagttccaatgaaacccggccttcttagttttcaagcttttaagttaggttgaaatggtgattttgaaattgaggggctgttaggtttagttaggtttagggttcgaattttagggtttctttgagttaattttagtacttttcagctggttttgagattgattgtaaggtttatgcaactttgaacattgagttcaaacctttaagctttaatgacaatttgagatttgttgatttgttctgtgaaatactggctgggttttattgtttatgcattgaataggagttctggaaggttcatggcaattggtggagaattgagcaacaaatgaaaagtttggggaaacctggtgcaaaccggctagccggtttgcagtgccacaaaaactggctagccagttttggcagggttcctcgg

SEQ ID NO: 277952 - DNA, 952 bp, Cannabis indica
gtactcgtccatggtgtagtttttggctatctgaagctcctgcctcgcctcatctctgggaaccggagtcagcacaatgttgggaggcactgtaaactcctccacctcgggagggatcccagaatcatggctcggggccggagtgtccactcttcggggccgtttaggtgcctcctcagctaccatttttcctttgcgcttgcggatcagagcaacctcttgctcttcttcaccttcttcaacttcctcaggaagagcccattgctcttcttgaccttctttagcttcctcaggaagtacctcctcctcatcctctaagtcaatagtgtctggaggggcattggaagaagccttcatgggggtgaccatctgggaagaagttggaggaagggaagcatcaggactatgagctccggcaaggatggccaagattgcctccatgggattagctgctgcaacaagagaaaagagttaagtgttagaatatctgtgaaagcagtaaatacttaaaaagcagtcaagctagtcctaccctgactctctaatttggccctagcaaagttctgaatcttaatattggctgcatcatccccgagatagctgtccgagggccggaaccaactagaagaaagataggccgaaggatccaagggaacaggctttggaggtccagaacccattcgggaccgacctaagtaatctcctaagttggagaaataataatcctttgcatgatccccccccccaccaggtcgagggcatcctaaacctaaggagacgttcatcgaaccctacaggcctaaggctagcatattcgctaacaggagggacataatgtattgctaaaggggacttaccagagccggaagtgctggcgtcaggagcccctgtattcggcacctggacgataggccttggcctgggagccctcttctcaaccggactcccaatg

SEQ ID NO: 277953 - DNA, 630 bp, Cannabis indica
atcaaattctttaaccataaagcttgcaaagatgccccataacatacgacaaattcaacatatatagtagatgatacgattaaagtctatttaacactttttcaagaaatagcagcaccaacaaaagtgaaaatatagccagaagttgactttaaatcatctacataaccaccaaatctgaatctgaataaccaacaacttaaagattgttgacatgcttatacacaagcataaaactcttcgttctttgcaaatatctcaaaactttcttggctgcaacccaatgatcatggccaggatcagataaatatctcctaagaacatcgaccatgaaagcaatatcaggtctagtgcaaacctaagcatacatcaaactccctactgcacttgcatatgggatattcttcattgcttctctttttaagtcgttcttaggacaatgttgcttagtaaatttgtccctttcagaataggaacgaaaccagctttacacaaatccatgttgaactttgagcacacgattattgtaagcttcttgaggtaagccaagaaattttcaattcttatcatgataaatctcaatctccaaaactaaagatgcctctccaagatctttcatatcaaaattgg

SEQ ID NO: 277954 - DNA, 908 bp, Cannabis indica
gtctttatcacacgatgagttgtgattctgttttgactgatcctttgtcgtagtagtcttattattattattattagtagtagtactattaatatttattcaactgatcatcatgatattgatgatgatgatggctattattattactactgatcatcgtccttgccctcttgatagaataatcaaagcttgatcttttgtagaaatggtcttccaacattttgtatttgctgctcgttacttcaaccatcattctcaatcttttgttctcttttctcaaactttccaattctgtttccagcgattccacctaataacatgatgataccatattaataattaataataaactctataagatggagatgaaaagaaaaaactatgatcaatttatacagtaataataagtatttttaccttgttcttgtgagaagtgtgagcatccataactgaatcagtttctctcttcaatatatatatatagagagagaattatatataggtgtagtgatatttaatcatgaaaacataattatgagagaagaagctagctaggtacgtactatttatacaaagaataaagtacatataattagcaaggccaaagtcatgatcaacatataggaatatagtgattataacttatagttgttaaaaaaagataagttaattgtgtggttttgtgggctgctagctagtctattgagtcaactcagtctaaattaataacaaagagcagaaaagtaggttttggtcacagttctaaggttggaaaaacgttgaaatcaaatccacgtgttggaaattcttgtccaaaaataatattcataattggaataatatataaaaaaaaatacgagagaaaaatgtatatgtattttaattagttacaacatatatttgtatta

SEQ ID NO: 277955 - DNA, 620 bp, Cannabis indica
ggtaaaagctatggatacaaaaactgttgcacttattgcaacaaaacttggactgttgtctctcttcctgctggccatcatttcattggctgcaaataggtatataaaataaaatataatgcccaaggtgaaattgaaagatttaaagctcgcttagtagctaaagggtactcccaacaatttgggatagattaccttgaaacttttgctcctgtagcaaagtttaataccctcaaagtcctccttgctcttgctgccattaataattggcaactataccaaatggacattaacaatgccttccttcatggtgatctcaatgaggaagtttatatggcacttccgcccggttacaaacattaaggagacctccctcccaatgccgtatgcaagttctatggcctcaaacaagtctctcgacaatggtatgccaaacttagttctactttggtaagtcaaggattcaaacaatcctcttccgatcactttctttttattagatcttctaacaacatttttcttgctgtcttagtttatgttgatgacattttaattgctagcaataattctagcgatgctgaattatttaaaagacagcttgactccaaatttaaactcaa

SEQ ID NO: 277956 - DNA, 602 bp, Cannabis indica
cattaataaaataatcaaacacaccataaaagggaaactagaagatcgcaaaggagcttggtcagacgagttatcgcaagtcctatggtcttataatacgacccctcgatctacaattggcgaaacacccttctcactttcttacgggtgcgaggccatgttgccagttgaggttggggcatgttccctatgcagggatattttcaacatctcgcagaacaacgagaatcagttattctgcctttatcttttggaggaaaagcgtgacaaggcgcacctaaaaaatgcgccttaccaacggcgaactgcaagatattttaactccaaagtgaaagtaaaagccctgcgagcaggagacttggtccttagaagagtaatgccaaataccaaaaacccgtcgcatggggtctttggggataattgggaaggaccatttctcatcgcagaaagaattggtgatgcaacgtatcggctcgcaacactcgatggaaccgcgattccacgagcatggaatagcgagagtttgaaattttattatcaatagtactcgcattattcgattatgttcactcttgtacttatactttagatatttttcaaaa

SEQ ID NO: 277957 - DNA, 575 bp, Cannabis indica
aaattatttttaaaaaaattaatttaaaaaagtttaatatctcaccttaaatttaaaaaaataagataaaataatcaaatttaaaaataagataaaaaaattaagcaaaaagatagatttttacctatttttaaattcaaattacactaatatctaaaattaattttaaaaaattcaaattcatttatttatgataattagatttgaaaattgaaaaaaaaaatcaaaatacaaaactacacaaaaaatcgaaagttaattccatgaaatagcatgaaaattgaagaaaacgaaaaaatttgtaagtggtacggacagtatgcattgcatactatccgcgcgcgtatgctgggaggcttggccgaggtccctcggcgcaggaggctgcatgcagcctctccgcgcacacaagggacgagttcagaaaaaatcgtgtctgaccgaggaagctcggtcaagcttgtgtctaagcgcgtgcagccgagggttgcaccctcatccgcgagcgtaggagggtgacaccatcctgatattttttcgattttcaaaaattcataactaattcaaatacaatc

SEQ ID NO: 277958 - DNA, 1003 bp, Cannabis indica
  modified_base (919)..(919): a, c, t, g, unknown or other
ttatgtattctatgatggggaccatccagttgggttcttgcccaaccgttgctatggcctcttttattttgatgcttggctctgccaagcgttccacgggtactacccccagtccttcaatctcactgtctgaagctaacttagccaggcagtccgcgtgagcgttcttttccctggggattctttctactttataatccgtgaactcgtggagcagttcccggactatcgtcacatatgcggccattctttcgccgcgcgtctgatactctcctgatatctggttcacgaccagttgggagtcgctgtagacctctactcttttggcccccacagcctttgctaatctcagccctgctatcaaggcttcatactcggcttcattgtttgaagctgagaagtcgaaccgtagggctgcctggagtcgaagtccactcggggatatcattgcaacccccgctccggatccattttcgttggaggctccgtccacaaatactttccatgttgggaccgacggtgccggtgcgttcgcggttgcctcggcttcattacattcggtgatgaaatctgccaacgcttgtccctttatggagatacggggtatgtagtgtaagtcgaattgacttaactccattgcccatttgaggagccttccggacgcttctggcttttgcaggacttgccggagtgggtgattggtcaacaccttgattgggtgagcttggaaataaggcctcaactttcttgaggccattaggaggcaaaaaaaccagttttttgatgacggggtaccgcgtctccgcccctatcatgcgcttactgacgtagtacacaggatgctgagttttctcttcttcccagactaaagccgcgctgaccgcatgctcagagactgccaggtacagaaacaagtccnctccgagacggtttgatggattggaggctttgccatgtgctctttcagttttttgaatgcctcctcgcactcgtcagaccattc

SEQ ID NO: 277959 - DNA, 132 bp, Cannabis indica
caaggatgacaaaagtctgttgttctacataaagctattaacaaaggaggttgatttcacaaggtacccattgtgtgtgaacaaaaccagtaacacggcaccacctaaccaaacaatggtgtggaacaatat

SEQ ID NO: 277960 - DNA, 569 bp, Cannabis indica
tttttctttattatttttttttcttttacatattttttataaatttcttttctaagtaacgtttgatatacttactaaaaaaattatgtacaactataaagtataaataatgatataatagatctaattataattaaattaatgaatatataatcaatttttttatagtaattaataataatatcttatagtaattaaatgaatcaataagaaaattaaggtgatagaataagaatttaaaaattattttatttaaatttaaaaataattagaaaataacaaatgatcataatttataatatttttactcatttagtaaaaatatttacaactatttattagaatataaatttatgaaataaaaaatacgaaaaaataattataaaataaatttattttttttaataattataacaataatatttgtcacaaaatcttcacttttttatatattttaaaaatagcaaattatatttttagttttctaacactattaatttgtgtataatatacacgttaaaatatatttttaaatttatatcatttaatataaatatgatatatatata

SEQ ID NO: 277961 - DNA, 1015 bp, Cannabis indica
gcgatgtatgtacatgttcgggccacactagaccaagcgggttggggtctaccagcgttgaaacttttgtaactctattttgccgcttaggtcagctaaggagaaaagacttgtaatattttgtaaaatgatttttgggatcccgaaacatgtaacttttatttgtaaggttaaaattatcacaagtttattttcatttcgttttcgtgtaaagtttaatttccgcgcttattttaaaaccaatcccgtttaggggattagggtttcttaatcatattgggtagcgtgcctaaatcttagggcgttacattggctgttctcacttattgtagtcacctgaacaaagtttttctgccaaagcaagattattctcccagcaataacagtactagagtagtaattccaagaagtaaaattctcctccatactagaacaaactttttcatgcttaagtttggtctcaaacaaagcaccaaacccaattttattcactctcaaaacatcaatgctggtcctttttattcatccctctaacattccaccctaacatatttaaagcatccataaaaaatgattagagttaggaagcacaacctcttctattgctacaatttgcaacacttcatagccattgttaccgttggttgtattgttttccttcatgtctttagcagtgttaaattgtctcagccttttctttcgaggggtttatccacctattctccccatcaacttcattaacatcactcggcactacctcccctgcctttttttgcaccagcgaacttgtgtttgcctcttgtttagcatcagtttttaacactggttctttgtccgaattaacctcctattttttcttcaattcaccattgtcaactccttgttttttcttccaaacaactttaagatctctattacaattagctacaatgtgtcccaagtttgcacatgccgcacatttggtaggaagccactcatactccactggttgttcaactagttgctttcttcatta

SEQ ID NO: 277962 - DNA, 508 bp, Cannabis indica
aaaagcatgtctttgagttttgaatgttcttgttgcatgatgagtgaattgatgttaatcttgtggaaattgagcttctatttgttatatgctttgttgttgagcttgggcagagattgtatggaatttctaggttggattttcatgttaaaatggtgttatgctgctggatttttattaggtttgtgttgggttgagttcatgttcttgaacttgagattttgatgagttgagcatgatttttgagtcatttatgtaatctgaatttttggatttgatgcatgagatatgtgtttttgatcctctgagatatgctagcagctctatttcatgattttgagatttatgcatgtttaggttgaattgggggtaagtttggcatattttcgaagctgaaaactgggttttctggttttttaaacccagtggtcgcgaccatggttgcgaccatgataatggcagattgttaatgtttttaagtttttgtttttgccataacttttgactc

SEQ ID NO: 277963 - DNA, 653 bp, Cannabis indica
tgatgagtttctcgatgaggactctttcatgtttggcaaagtttttgtcagaggacactggtattcctttactgtgaaggatgttgctgaggctctcaatttgcctatgggaattgagccaactgatgtggagtttgatcgtcaaaaggtgttcggttatctctctggtgataatgaaattgaactctccgacaccatgcatatgtctcaactcacctatcaacatgctgctctcatgaggtttgccctatccaattggtttccttgctccaatccggtaaatgtttcaaatgaacttgctttctttttgtataaagtttcaattggtgctaaaattgatttggctgacatgatttgggagcaaattgtctctcttcgaaagggtaagaaacctaggctcaatctcatttttcctcacttaatctataaaattttatctgatcaagaggaattgattcttgagaatgaatcaattgagatgcctgctgttggaaccactttcaaaattcctgagaagcctcctcaaggaaaagctgctcaaagaaaggctcggtctgcttcccctggtcttacaaatgatcctgctgctggatctgcttccacttctgctcctacagaaatggcagaattcaacttgcgtttgggaagaatgg

SEQ ID NO: 277964 - DNA, 643 bp, Cannabis indica
gcgaagggctcgtgctgagtgtcgtcaaccgagtccgtcccgctcccttccgcctcttcttcatcctcgcctgactcgcgagctggggccgtccaatcatcgtccatctcctcgacctcgacgtcaggagcatgcctcgagtgaataaggtagtcgcgggccgacaccgtggactcgctgtctcgaatgtcgatggtcccaggctcggcaagttcctgcaccattctttcgatgtctgcagaagacatcgggcctagctctattggtgcggcctcctcttctgaaatcgaggttgggagaaagctgtcttcctcctggtcatcgtcgccatcgaatgcacggcctccagagccgagctgttggctatccgacaagtcgctcatctgaaagatagaagatcttttcagcgtgatgaatgtgtgaaaaacaaaaataagtgatctcacccgcattaaaattatagaatcgcagttgccagaatagtcagcattcttacgaatgctgaccaccccatttgtatgcgagttgaaacgcgagtaagtcgcgcatcctgggccaagtgatatatctccaggaacggctgggagaaactcagttactcaaggggcatgcgttcccaggcatgaccctgaaattactgagt

SEQ ID NO: 277965 - DNA, 459 bp, Cannabis indica
tgagcttggagaggaagtatttcccttctcgttacaatggatataagaagaaatattaccatagtaaatacagaatacaccaattgtgggatttggacagcttgccctatctctgcaatctgatccccaagttatagggatttccttgatgactcacgatgcgaaagctgaattcgctaagggttggtcgttctgcgcggattgctaattgctttgcatcgagcatgcatatgaggtatcctgttcagattacatcttgcaaacagatactcgaagtcaattccacgtgtcaccatcatgtgatgccacatcatagtgcaaaaattgggataaaacttaaggtttaacttcttcctatatttccatatctcttaaaagtcttccttctagtcacgactgtgctcttcaaaggttttgtacttcatcagcgtgtcatccacatactgttgggttttatgc

SEQ ID NO: 277966 - DNA, 538 bp, Cannabis indica
ttgctggaactgaagggtttaattactacggcacacttgaagatgtaatcactatatcttatactggtgcatatacagtgacattgtttgaatgtaaatggtataacactaatccattaagaaagaagacaatcactgaaaataatataaccagtataaatactcgtggatattggtatcaagatgaaccgtacatccttgctaaccaggcgaagcaagttttctatcttgaagatccactcagaggtcgcgattggaaggttgttgaagatattagccatcgacaaatttgggacattaatgacaacgaagatgagactgatgtagatgttgttagtgattctaactctgccaattttgtgttgacggttgatcttggagagttgattatgcaatcgaatgaacctccagtaattgttgaatcgtccgatcagttagtggattctgagatagagaataatgaacttgatgaaaattatgttgctgaagaagtagatgatttactagttgaacatgtggaggatgaaaatgaaaactt

SEQ ID NO: 277967 - DNA, 323 bp, Cannabis indica
aagttattttgcaaattttaatatttcacatttttatatgtattagcttcaccacaagaaaagttgctatatgtatatagattattatttagtattaaaagcacaagtttaattagtagtgtttatactcacagttttgatatgattttgcttcacccaatccacaaaaacattagacccatcagcctccattgaaccaaaatatccatcgaaacaatcctttcttctaatgttacattttcctcttcctctaaccatctcaaagctacaaaaaaaaaaaaaaaaaaaaacaataccaaacaatatcaatatattattttaaa

SEQ ID NO: 277968 - DNA, 844 bp, Cannabis indica
ttttctcttgtgcggatccaaagagaataaactttgtcttgttacattcttacttttattatcttgttataacaattaaacatgagtaatattagagtagatgttgacaagtttgatggatcgggggactataggatttggaggaagaagattagagctcttcttgctcataacaaattacttagggttcttagtgaacctatagaatggccagaaaatacttctaaatctacacaagaagaacttcttgaaactgctactggtttaatcatttttaacttgtctgatgctattatcaggttagttgataaagaagatacaccagcaaaaatatggaaaaagcttgaagatcagtttcaaaagaaatctttaatcaacaagatctttcttaaagaaaggatctttggtttcaagatgagcactagcaagactcttgatgaaaacctagatgaatttctaaggttacatattgaattggctaattctggtgaaaatgaggctttaagtgatgagaaccaagccatcatcatcttaaactcattacccgaatcctacaaagaagtgaagaatgccattaaatatggtaggacagaaattactttagaagaagtaatttcagccttgaagtcaaaagacttggagatcaagaatgagaagcatggaggttctaatggagaagtaaacttcagtagagggagacccaatcaaagaaaacatggacactacaaaagtaaaagtcacagcagagatcaccacaaaggaaagagtcacaacaagggaagatcaaactcaaaagaaccaactgatcctacgggatgctacaactgtggcaagccagggcatt

SEQ ID NO: 277969 - DNA, 506 bp, Cannabis indica
aaaaacaataaataaatttgatataacttgtaataataaggttcgctggaaaagttgtcggtgtcggaaagttagtgtcaacggaaaagttgccgaaaaaatcatcgtccctggaaatatcactgtcgttggaaaaagtcaccggaaaagtcaccagaagtaaatgtatcaaatataaataaaaaatagaactagttctataacataatgaataaaaacaaataatgcaaactggttataattgaaatataactggttctgtaacataataaataaaaaaataacacaaaataattcaaatcagttataattaaaatagaatcggttctataacagtgttataatgaataaaaataaataacatgaaataactcatactggttataactaaaatagaatcggttatatataacataatgaatataaacaagtaacacacaacaactcaaactgattataattaaaaaataaagaaaaaagcagttcctaaaacactgaaacataaa

SEQ ID NO: 277970 - DNA, 558 bp, Cannabis indica
taattctaaaaaaaggaatgtctatttaattaattattttaagaaaatagttaattacaattaattaaatctaaaaaaggaaagtctacctattagtaacctactattacaggttaaagaaaaatgtaaccatatggttacaataaaaatgtaaccattgaatagtcaccctataaatatatatataaagttttaaaatgggtcaatgtattgtttttagatcttaaaactgttaatgaaaatatttaaatcttaagatggaatttaagattaagattgaaatttagaaagaaaataatgacaactacaagtgaaatataatgattacaatataaatgaaatacggtaataacatattaacgtacaagagatacaatgataacaacaaatttaaatgaatgaagtataaaaaatagtgtattattagaaaaaagtacttatcaatttttattatttttcaataatttatgtcttatatctttatatattaaaagtgtctatctaacggcatttcttggtttaacagaatatacttaaaaataaaagaatattctgtta

SEQ ID NO: 277971 - DNA, 790 bp, Cannabis indica
cattctatggctgggtacagggctagaagaatgtccttcactagaggaaggaggagtagaacaaagacgaggatgatcctcatgcagaagttgaagcaaatcctagtcgatctgatgtccttgttcccaagactcacctgagttcatctacaaaagacaacacacaagatgagtttttggccagaatatcgaacaataaacaagaaaatatgccaaccaggaatactcaaccaattaaagaacgactatgttcaaagaaaagtcagaactcaagaagtcaaaaaaatttcttgagttagggcaaaaaagttcatgaagcttagaataagcaagatgaaagatagacgttatgcacttcagaaacaagaaatatggctgtaaacccgcatcaagacatgataaagaagaattgcaaatgtttctaagcctacggtttcctaaacatttttctacagcacagtagaaggagcattcaaaatgtaaacatgcaaagataagcataaaggaaatcagaaacttacttaagattcaaatgtctgggttcgagcaacgtctatccaacaagcagcttgtacgaaggcacttcagcgactttgaagccaagaaattttcttttcgctctaaagcttacttatcaaagaagggtgatgaaatgagtttatgcgccaatgttgtgagtatttataggcaagtcacgaaaagaggtaattgtctcaaaggaacctcagacgcctcagcttcctgccttaaaaacgaatatgggaagtcaaaagtaatcgagtgcaaccgt

SEQ ID NO: 277972 - DNA, 702 bp, Cannabis indica
tagtaaaaagttacgtgcgaggcacgtatactaaattttatgctaggtattttttattatattaaaaggtaatacacttaaaaatgtttatctcatcttggttcaacccaattttatgttgttcccataggattgtgtgttagatatgagcttagaagaatagtattcgttagaatgggtgccagcaatggcggtgctgatgtgagttttatcttctgggaaaaatctagctactccgacattacaattacacctagcctttcaaaatgagcatcatcaaaaattcaaggattataaattgaaaaggatatcttgttacttttggtgtgcccaacaaactctctaacggatgacattatatttcgcatatcccaaagctgtttaaaagtaaagcaatatagcaagggaatagaagacttactcaaataaataattacttgagcaacaaaggataactcgctaatagaacactgaatattacacccaaataaacaaaaagtgaggaatcgcagcagagaggccatgaatcacggcatagaagatgaggcaataattcaatagcaatatagggtttgagggtttgagatttagaaaaagaaattataaatgattatcctaaataatcacgattggttgctcatccttttggggttagttattttattgagaattttcagagattgtgtttccggttaggtttat

SEQ ID NO: 277973 - DNA, 480 bp, Cannabis indica
gatcttgcatttgcacttctttaattttctgtaaaagagtagattggagggtaatctcatttgctagttgctgggagatttgtttcaccgtatttatctgactctgtccctttctgctcaaggcatcaacaaccatgttggctttaccagggtgataaaggatctcacaatcataatccttcaccaactctagccagcgtctttgtctcatattaaaatctctctgggtaaagaagtatttcgtactcttatgataagtgtatatctcacatttctcgccatatagggaatgccgccaaatctttagcgcaaaaaccactgctgcgagttctagatcgttagtagggtacctctgctcttactcctttaactgccaagaagcataggttattacctttccagcttgcataagcacacagccgagaccttgtctcgaggcatcacagtaaaccacaaacttttccttatctgaaggaagag

SEQ ID NO: 277974 - DNA, 142 bp, Cannabis indica
atatcccaggatttatgtatgtttttgatttatgcttttcttactgagtctatcgactcacagtgctatgtttatgtgtaggtaagggcaaggccaaagctgaggaaccgtgaggatgagccgatgaagattgtacatgtcg

SEQ ID NO: 277975 - DNA, 410 bp, Cannabis indica
ctttctctattcctctttaatttctttatgttgaatattgtcataggaatggttatggatttatttctgaactaaatttcccatttagggaggatgatgaatgttgtttaatgtttttgcctagttaatgcataattgccattcctccattcttgtttgtgaaattatctttatttgtgtttaatttcatgtttaagattgatcaccttgtgcatgttctatgatctcaattcaaaatctgaaaagtgagaattgagaatgctaaaattagataatcgatgttctatgtgaaacgagagtattcacatgacttatgtgacaaatagattattgcttaatgctgatttcatgttagtttaattaagagatgaattagagaacatgtgatttagaacctaaaagatctgaaa

SEQ ID NO: 277976 - DNA, 488 bp, Cannabis indica
agcccagccgtacaggcccagctcgacgaactgaagaatatgtttcatggcatggccgggcagcgtaacaatgatcttgagttagaccgtgcacgcggaactcccttctcaccagagatcaatctcctgccactaccccacaagttcaagatgccaacgtggaagatgtacactgggagagaagatcctctctcccacctcaagtattttgagatgcaaatggatttacaaggggtacgaggagacgtatgttgcagaatcttccccgccactctgtcggaagccgcacagcaatggtatttcaagttggctcctggaaagtttagttcatggaaaaccttctcttcggaattccatgcacaattctcttcctcacgtcaactcccactgcatctgggagatctggtcgaagtaaaacagcgaccaggcgagccactccgggcatacatcagcagattcatgacggaagcgaccaaggtatcacgggt

SEQ ID NO: 277977 - DNA, 955 bp, Cannabis indica
gatttatcgttctcagaatcaactatgcagtatgctagtggaaaaattttcgattctgcatcttgtgtgttggcagtgagcaacgtgcctccatacgcggcctttaggaatgtaccgtctaccacgatgattggtttgcagtttggccaaccttttatagcagcattcaatgcaacaaatgcatatttgaaactgtcatcatcatctttctctatgtctattaatgttcctgaattttaatcaaacaggattttgtcaaacaacatgtactcaacgaaataacaacgcaaaaacaactgttttttcacaaatattttcaaagtaaaatttttaaattttttttacctggatttgttttctgtagcatgtacaggtatcttggcaagagattgtacgactctttagcatttccatgtagctgggtttgtgctcgctctttactacgccatgctttcatgtaattcatctttattccgtatttgtctttcatttctgtctttatgtctgcagggctgcactttgttttcaggttcaagaattttggttttacaaaatctgctatcaactttgatgtagcttgtcgttgatctccaaatcttattgtaactgcacatgtgtgttcttcttcgtagctccttattatgaatgtttctgtgtttccattttttgtagcctttaaactccatttgcagtttgtgtccaaacacactatgttgtattcttttgtgcaagatttcactactttgtattgaaatgtcttcttgattgcaaagtagcatagtgtacttatcaatgtttctttgtccttgtaaatttgccccttctctattgtttcatgtcgtttgtcattgatgatcatcatttctgtgttgtccacttcctcttcttcttcctggttgttttctagttgctgtaccatttctgcagccacaagctttgcatagtcggtgaagtc

SEQ ID NO: 277978 - DNA, 587 bp, Cannabis indica
taattggattggatcggttattggatgtcaatctcaaaatccaattacatttatacatattaaaaaattatatatataataaaaaatattaaaaaatataacaaatatttattagatttttttgtatgttgaatttgtaacacttgattgtttagtgtatttattttcatgatgttttgttctattttattacttagaaatgttattgttttaattattttaaacttttagctacaatagacttgtaagaatagtatatttataaagtattaaacttaaataaaaagtgatacttagttttttacgtatttttctttatatttttaagctaatattgaaatttaggtgtgtaattggatatccaattaaaaaaccgatcaaatccaattagtaattggattggattggattggattttgaggtctaattggattggatcggatgatgattttccaaatccaattactaattggattggatcggatgaggaaaaaaatgttggactagatcggatgcccactcctaatctacattattagatttccaaaataaaagttgtaagaatcatcttctctaataaactttaa

SEQ ID NO: 277979 - DNA, 697 bp, Cannabis indica
agaacctttgttcccatgtcagcaaggttgtcacttgtgtgcaccttttccaattccagaaccctgtcctcaatcttctctcgaatccaatacaatctaatgtcaatgtgcttgctcttctcatgatatacaggattcttgcacaggtgaatagatgacagactatccgaatagactgtccctttgtctttgagcagtagcagctcttgcagtattccttgtaaccatatagcttccttgaatgcttcagtggtggccatgaattctgattcagtagttgacagtgccaccactggttgttgttgtgatttccaacatatgcagcttttgttaaccatgaatacataggcagtggtgctccttctattgtccctatttgatgcataatcagcatcaacatagccttctaacctcacatcagatgtgtctttctgatagatcagaccatacttgattgtccctttcaagtatctaatcagccactttacagcattccaatgctctcaggtctagtactgaccatgatatacattagacatccaacagccatagcatatggtacacctctcatattttccctttcagtttcagttttagggcagtactcattagacaacttgaagtgccctgcaagtggaactgcagtggccttagatgaatctaagttaaactcctgatcaccttctcaatgtagctt

SEQ ID NO: 277980 - DNA, 439 bp, Cannabis indica
tcatccacatataagcaaacaattatcacataatttttacaagtttttgaaaacaaacacttgtctccattgttatgcccaaagccatttgaaagaatagcattgtcaaacatgacatgccattgtttcggagcttactttaatccatataaggatttcttcaacttaaacaatttatgttcattgtttggtaggacaaacccctcgggttgttccatatagacctcctcatcaaggacaccatttaggaatgtcgttttacatccatttggtcaacatacaagttgtgtaatgaagccaatgcaaacaacacccttatgttagttgttctagcaacaagagcataagtatcaaaataatcaataccctccttttgcctaaaacctttagctactaacctagctttaaaggcttatatagagccatcagtgtgatattt

SEQ ID NO: 277981 - DNA, 574 bp, Cannabis indica
ctagttccatttgcgattctgagttcgagtcctagtctgagtttgggtttgggtctggatttcagtctaggtccagatcaggctccgggtgtgggttcgcgtcctgggtcctggtctaggttgggtccgattcctaagttccaatccgatctgagtctggattcattgctgagtctatgtccttggttctgatcctggtctgggtttaagtttgggtacgagtccgagtctagctttgggtctgattataggtgtgggtttgtgttcgagtccgagtctgtgtccgagtttgtgtccaagtctgaaccccgattgggtctaggttcgggtcgaggtcctaggttgggtcccgagggcaagtttttgtctgggtcaggatctcggtctaaatctaggtccaacatttcgatcccagtctgggtcttggtcctagtcaaggttcgtatccggatccctatttcggtccaagtctgtgtttgggatcgggcgccagatttaggtccaggtccgggtctcagttccgttcagggtacacgaccgtgccgggcccgagttccagtctcagtttgggtct

SEQ ID NO: 277982 - DNA, 196 bp, Cannabis indica
catcttatttcctttcagagaaaaacctgagccatctttctatacctagccgccacctctctttcgtctgtcttcttttgttgtttcgaaacccctaagtgatagagtactgcccacacacagcaagtactacctcaatcatagtgtggaagaccgtgaagaatcaagattcaacaaataaggacattcgggctca

SEQ ID NO: 277983 - DNA, 420 bp, Cannabis indica
ttatctaaacctatggcttgtggtatgcctggtgatttacaactcaagtgctagcaacttactttagtaagatggtggagcatttttcttctaatggcgatctatagaagctactcgacttctagaaatagattttatctaaggaaaagttttaactattctagaaaagataaatgccaaggaaagaattccttaggataaacagtgagaggtctcaattatgcttccctatgcattagaccagacacctgctgttgagtgagagtaatgagtaggtatcagattaatccaggagaatgttagtctataagggtgtgtttaaaactcttgactacaccatatcagatttcgaaatttgcctttgtgctagtaaatctttctgataagatggtggttactctgggggtggaatagtgattt

SEQ ID NO: 277984 - DNA, 648 bp, Cannabis indica
ggtaattcccttgccttaaaaattatgcggcaagggtattactggccaacattgcgacaagatgccctcgcatttgcaaaaaggtgtgatagatgccagcgaatagccacttacacacaccagcccccgagtaacctccattctatcacgagtccctggccctttgcaatatggggaatcgatttaatcggcgagttacccaagggaaaaggcggagtcaaatatgctgtggtcgcagttgattacttcacaaagtgggctgaagcaaaagcactcgcaaccatcactgcaacgaaattacgcgagttcgtctacacctccatcatttgtcgttttggcattccgcataaactcatttcagacaatggaaaacagtttgactgtaaagagatgcgacagctatgcgacgatttggggattaaaaaagctttttccgcagttgcttacccgcagagtaatggacagactgaagccgttaataaaataattaagcacaccataaagggaaaattagaagatcgcaaaggggcttggccagatgaattatcgcaagtcctatggtcctataatacgacccctcgatctacaactggcgaaacacccttctcactttcttacgggtgcgaggccatgttgccagttgaagtt

SEQ ID NO: 277985 - DNA, 318 bp, Cannabis indica
acaaataaaaaatttaccaaaatattatactataaagttacctatattaatgtatgagtatcacaaataaaaactagtataaagatatttatagcgttgaggctttaattgattatcgatgaagcatttatagatgtagcaaagcttgtacgtcaatgagcaaaaataaagtatagtatgtatgagtgaagtttagtagtgattttgggtatatatgcaataatgatgtacaagttttggtacatgtacataaatgtttttagggttaatttcataaatgcacaaaaacaacaaaaatacggtttcatggaattttaa

SEQ ID NO: 277986 - DNA, 631 bp, Cannabis indica
agtttcattatgaaattttttgcaggccaaaatggttgagattcgtgacactcaaccaacgctagttgatgcccccctccagtgcaatgttgaccccacccaatttcctgcagatacgcatattatgacacaagtattgggtgagcagtcacgccacttgagaggagtcggcccgttgccaagacttaaggcgggggcagaaagagcaactcccaggccaggtgcatccgggcaggcaagtgtcactcaagaggaataagaggcactgaagtgaagggtggaagagcaagaggcacggaacgagtggcaacaacagatgatgatgactcaaaatcagatcatgagtgcgttccaacaacaaataatccaattggtcggcgctgttccatgatttaacatgccggatctgcctccgattccaccatttcagccttctggccatgcagctggttcctcctcacaggctgcccctcccactgatgacgaagatgatgctgttgatttgtagtttttttgactttacagtgtagatattactgtttatgaattcagaatactttcacttagtttatgacgtttaatataaatagttttgtaataacattataaatgtcggttttataatatattt

SEQ ID NO: 277987 - DNA, 850 bp, Cannabis indica
tgcaacataaaatgtgatttctgatctttattaattagtaaatctaattgtattgaaatgggttttatttagggcacaaaacccaacaaagtcaagatggtaaatgcaatgtacttggcttgattctcttggggagcttgctggtttttccggtgaactttcccttcttcccattcccttgcccgttattgttgttggaacgtttaccatttgagctcgaactatttgggtaatgggagagttgggcgaacgttccagtagaaggaacttttgacttgccaggcttttgctcgccttctgcccgctgaatagcctcttcaagtttgatgaagccttcagcacggtcgagaaaatcgctcatcgagtctaccgggccattcttccttatgtccttccaaatttcaccgaggacttcaatgcctccaagtattgcgaacaactttccaccttcagttacccatgaaaccttggtcgcctccgtcatgaatctgctgatgtaggctcggagaggcttgcctggtctttgcttgacttcgaccaggtctcctagatgcaatggaagttggcgagaggaggagaactgtgcatggaattttgaggagaaagctttccatgagctaaactttccagggaccagcttgaaataccattgctgggcggcttccgagaggatggtaggaaaaattctgcaacatacgtctcctcgtaccccctccagatccatttgcatctcgaaatacttgaggtgggaaagaggatcttctcatccagtgtaaatcttccaagttggcattttaaacttgtggggtaacaccaggagattgatattgggagagaaaggggttccacg

SEQ ID NO: 277988 - DNA, 411 bp, Cannabis indica
gtcaatatcattgataaagtcgaatcaatgatgccatgttcttcctcatcctccaatgtcacagtatctacactttcatctaacaacctttcttcttgttgctcactctccacttggctatccataaccttgcttgtgatttcatgttcaatgagttcctcttcacaaggatcttgatcttcaattgtaggctcattatcttccttgtattcaactaatgacccttcttcattgtagcaataactctcataactttcattattggagttattacattctgaatcatgagccactaaattatcacataaggatctcaccatgtctgttaagcgattaatctctcctggaagtgattgtagaagtgctagtagttgctcctctttttcagcttgttgggatgaatttgggcaa

SEQ ID NO: 277989 - DNA, 592 bp, Cannabis indica
gaatttcccaaaactacccgtaagtgccattttatgtattttagtgtggaggggcaaaatggtcatttttccccattagtttgttgatttagtggtttgttattaagtaataaaatcagatttttattaaataaatgggctgagatatttaataaaataaagttttaattcatttattcaaaaataagaaaaaacttggaaaaggaagcattacactctcaaattctctctctcattttcgaaccccctagatcagctagggttttgatttttattcttcaaatccttgcaaattccaggagcttttagttaaatccaagccaaggtaacctctttacaactctttctttgatttcttgaattgtaaaataatggattatgcatgttttgaggagttggttgttgttgttgctgctggtgtttatttatgttttctgaagttaaaatatgtcaagttatgttgatttgagcatgttttggtaggtagtttgttgtttgagcaagctttgaagtttaaaactcaagcttggctctttaatggtgaaattcgattctaagtatgggtagttgttttatcacttggaaaatgttt

SEQ ID NO: 277990 - DNA, 757 bp, Cannabis indica
atgtttcgccccaagaggcctttgaacatccggttgaccattctttggtaggtcgcaccagcgttcttcagtccgaaaggcatgaccaggtagcagtatacccccttatcggtcctgaagctagtgcactcttggtccgccgtgtgcatctttatttggttgtacccggcgtaggcgtccatgaaggatagtagtttgaatccggaagtggcgtctaccatctgatcgatcctgggcagaggaaaacagtccttcggacaagctttgtttagatcagtgaagtctatacaaactcgccaagttccgttaggcttcggcaccaggaccggattggctagccattccggatagtatacgtcgcggatcatgctgtttgttaaaagcttgtccacctctttctctaaggcctcggcctttactgaatcgagggggcgtcgcttttgctggactggcggcatgtccgggttgacgttgaggacgtgggtgatgacatggggacttatgccagtcatgtcctcttggcgccatgcaaaaatgtcgatggcgcccttcagtgtttttattattttttctttttcctccgggtctaggctttttcctagccggagtaccttggtggagtcgaggtcgcacactgatatctcctcgacatcctccatcggttctacaattttctcggaccccacgcggggatccaactcatcttcttcagccatttctggctcaatggtttcccggaccatcagtacgggcacgt

SEQ ID NO: 277991 - DNA, 790 bp, Cannabis indica
acaaatgatgtttactgagtttcaatcttttgccaaacgctataagaaggatcaaaagcgtcagcttgcctttgaggcctcaatgtatcaaatggtttgctctatcaagtccactcttttgcaccattttcctggggattctctgcctgacatctctctgcctgagtttcatcgtgattcgtttggcgcctcatcagacacatctgggaataatgcacatatgcagggggagccttcagccttggatccagtcactagttcagcacaacctgatctagatcctccagctgacactgcaacaccctttgtgtcgacaggaccaccttcccagggggagtctggcacagcacaggaacctacagatcatattcaatgaagggggagatatatgtcatttgttttgcttgtgtagttgatttgtttatattcctaaaaacttttatatctggtttatcaatattttctggtctttagttttgtgtgttagtcattgaacataacctgtcaagggggagaatgttagtgttattattttgtgacagtgtatgttctgttcaatgtctagtcgtgtctggaattttagactgttatatctgcactaacgtttgtttacgagagtctttttaagtgttagttagtgccacctggacttatcgttgtggtcatatatataatcagtttctgttagtaaagtggttatccaattaatcattcagacagttatttcggttgtttttagagagatagtcgtatcttgtttcttgtgattgtgattacaggttagatcttg

SEQ ID NO: 277992 - DNA, 610 bp, Cannabis indica
aggtatatttatccacatgcaaaattttttgttgtattgtattaaaaaaaatatgatcaagaaacttatgttagttcattttctttgtgtattagttttctgcacttatccctctacctccgtagaaccaccctcttggtgacgatctctctcgcccgctcttggactcgatcaaagaacctgtgccactgtcgctattcagaacaacccatggagtagtgcctccgcactagaatacttcccccaacacgaactcctccgagtccctcacaatgtccctccagtcaaccaagtagcccttgcaacattgaccctgaagctaacacatcatctgatagtagttcactcgccaatgtccaatgcatactccttttgacaaggactaagtatggtgtaccccttggggtgaggttcgcaaaccaaccgtacccaacgacacctacagaacacgtttccactgaagccaagtccctctggacaagtccctctggaaacttcacacgccaactccatagcgcaccatcctcctgatgacaatcgaacaagacactctcatcgcaggataaaatttggtgtgtcccatctggacgaggctcgcaagccaactgca

SEQ ID NO: 277993 - DNA, 536 bp, Cannabis indica
aataaagaatatttatagctattcataatcaaccatctcagtggtttattaagtaccttaatcacacatcattataaacactcactttcagtacctcataaatcactctaattcatatattacagtaaccacataatctcagtgcttaataaagcactcaaacacataatcttattgcttcataaagcactcaattcttacatccctacaacatgtatttttttacccccgacagttacagagactaatttcataaataatataacgttcattcaatcataccataacacaataatttagttacaactcatcacataataacacgcttgatcgttccacaacttcataaccacataatttaggtacttcataaagtacccctaccactcgttaaccacgagctgtatatgtcactatcgttgtccgatacaacaaacgataagtaagaaacctatccgcggtttcaggagtaattactcataacggtaataaccgtttcttttactcgatcataatcgagccacaacgataataat

SEQ ID NO: 277994 - DNA, 844 bp, Cannabis indica
cggggtaaacattttattattataaggctgatttgattacgtcttctatcacaactaaatatatattatatgatacatcaccatccaccctcacaaaaaataattattaaagttttcattatttttaaaaattggatttaacgctttaaattttatcgactaatatatatatatgataaagtttccatattctttgtaattgtattaaatcaaaacaccaatcaatttcacttgataaaaagggcacatatagttgtactttggctagagaatatagataacgacacataataataattcactacccgtaatgacttttatttccaaaatatctgtaagatatatatattttatttttactaactatatatgaaaaattttatggaaccatatgtggtctagtggtaagaacccataatttaaaacatttacaactcagaccaccacgtattatttggtgcaggcgaaggtacttactaggttgtgagcatttttacttacttgggtacgtgtgtgatccacctttttcgataataataataacgaaaaaaaaaatccaccactatttggacatattgttgaaaaaaaataataaattaaatttaagtgcaacaaaataataaaaaaaataatattttttcgtaacagcaatactaaaaaatatttttttttttttaactaacaaaaaacaacactctatgtgtgtgtacagtcttgtctttgacatggtgagagtattcctttcaatttgttgagttttggttatcggtttaaagattgttatggcgtctagtagtgcatcgtatcgggaggtggaagatcaatatgcgattatttcaatcga

SEQ ID NO: 277995 - DNA, 594 bp, Cannabis indica
tacattaagaagttgagattatttttttggtgaattaaagaaggctacaatatatataggacatgaatatggctggaataatcaatgctatgataagtatgaagttatgtgatacctcagatggctggtatattagaagaagcaatcattgaacataactatcagaatctatcggcattacagattcaaacttcaccactatatcgatgtaataccaaagtagataaaagttagtatagaaaactagctaatctcataatcaagtcaacttgattgaagggggtaatggaggaccaagcaccataagagagattagcaaagaaaatacaatagagtgatacaaaaatcagacaacaaaaggatccaaagacgattatcttggaaaatgggaagtcatgacaagtgcaacgaatgcatggataaaggaaattaagaagtgaacgttagacaaaaaggtggtcggatagatagttaaatatttatacatagaagaccttttaaagagattccatgtttatttccaagtgccatggaaaaagtatctatcgatgagtaacaactatgaaactgcaagaatgacaccgtagctttaca

SEQ ID NO: 277996 - DNA, 720 bp, Cannabis indica
cctcatgctcctcttctgattgagagtacacaaggatgtcgtcgataaacacaatcacacagatatcgaggaaatccttgaatactctattcatcaaatccatgaatgccgcaggagcattggttagtccaaacgacataaccagaaattcataatgtccatacctagtacggaaagccgtctttggaatgtcctcctctcggattctcaactgatgatagcccgatcggagatcaatctttgaaaagaccgtcttcccctgaagttgatcaaaaagatcatcgatcctaggtaaaggatatttattcttgattgttagcttatttaactcccgatagtcgatgcacattctcagagacccatctttcttcttgacaaacaataccggagctccccagggtgacacactaggccgaataaaccctatgtcaagcaacccctggagttgaattttcaattctttaagctcagctggagccattctataaggagccttagaaaccggttctgctccaggtgccaaatcaattataaaatcaatttctcgctgaggtggtaaacccggaagttcatcaggaaaaacatctaaaaattcccgaaccaccttgatgtcttctggccgaacagagtctggccgagtggtgtctaataccacggccagaaaccctagacatccatcacacaacaattctttagctgataaggccgaaatcaccggga

SEQ ID NO: 277997 - DNA, 623 bp, Cannabis indica
atagtatactaatcaagagggctttttagtaaattattattagaggacgaaaatttttagaggacgaaaatttttatagtttttattgtagttatagattattttaggattcgataaggcacaaggtaacaatatttataaaaaataaaaaatagaaaataattacataagtgatacttaattacacaattattttcacaattttcacaatttcacaatttcacaatttattttcacccacccacctagctagctagctgctagtaaagatgaaaataatttataactactagatgggttctttgagtattagaaagtgatggagagagtttgactttcacgtgtttcatcactagctctacttggtcggttatcatatatgtcaagctacttagattgtcttaccagtatatcatgcagtactttgatcctccgcgtatctgggtccacacacaaataaacccactcagtccactttgatacatcactacaattcttactttgaaattattattatgattattttgaaacgtatctttactttgaattttgaataatacatatattgatatatgtatgattaatttcgttttacaaatttcatttgcttcaaaaattttgtt

SEQ ID NO: 277998 - DNA, 717 bp, Cannabis indica
atttctctaccatcatattttccttcatactatatcctataatcaaattgttttgaatacttcgttccaaacgccccttaactaactaaataatattcttgttctatatatgtaaatgtaataactaaaaccactggagttggtgtaatagttttatctaaatttagaataaaaaacacgtaagaatttaataattatgtactctaatgcacaagctgccaattaattatcaaaatcaacatagttattaaattttcattgaaaacaatataaatatatatatatatatttatataaaataagtcatttaaataaatattaaattttcattgaaaacaatataaatatttatatatatatatttatataaaataagtcatttaaataaatataaaaaaatcttgttaaaaagcttttattaattaataaaattaattagtaaatgaataaataaataatgtgatatttattatggtgcaaatatgattcatattatattttatgataaatttcacctaatttttagcctatgttaattaaaatatgctaaaatataacaataaactatttttataacccatactctaattaaatttatataatctactactcacatatacagttgtgaaacatatctattctatataaagtgtgtctatataactgaattcttgtttatgagaaattcataggtgactttttatttatatttaataa

SEQ ID NO: 277999 - DNA, 661 bp, Cannabis indica
ttttttattttgattatagttttaataatggcgttgctacaccactctattagattaagtggttacttgttatttttaggaaagatgtttgtgaactgttgattattgttacaagtcttgccattcaaaaagctagttgttattctggaaataagttatgggaagcttggtgtctatccggaaagctttgtttgagaagttgtggccagtctggatgatccttccagatagcttatcctccgtaaggaaagtcttgtcagatagcttgtcatgagttaggagacgtacttccagataacttgttgtcagacttgagtgtccatctggagtacttgtattcatccaaatagtctcgtcgtgattgactcttctatattgtccatactaacagcacgttactgaagctgacatggaatatgttgctagagctgactcggagactttaaagcggcattaattagtcacgataaaaaattagagctaattttagtaaacttatacaagcctatatatagctatcacatttgtagtccatggtaatcaaaaccactgaaagcttgagtaaaaatcgtgatagtgtaaggtttgagagagagagagagagagagagagagagagagagagagagagagagagagagagagagagagagagagagaga

SEQ ID NO: 278000 - DNA, 646 bp, Cannabis indica
ttattttataagtttttttttttttttgaaaccagtgaaaagacttattcattagagttaataattcttcaatgcatataattagtgccttaatttactcaataatttgacaaatttaatacatattacaaatgtagggggatatttttaatattattttgattattcatgtgaaatttaattctttttaataattccaccaatttttaatgtgacaagttcacctaggtgatcttctttttccaaatgttactaacatataaatatataaggaactcacggtcctctctcttcttattactcttacctctcacaacacttcaacctttctatttcttcatcgttgttcgtgatcgcatccccagtacttacttctccatcgttttgatcctccaacaaactatcacggtaaatatctctctctggttttctttttttcttttttgtagactgaattcattccattttatatagccgtatttcgatattatgtgaattgtgatagtgttttagttggtgtatatactgttggatataatctgtgtgattcgtgaaagaattggttatattaaggaccagtgatcacgattttgaagcaacttttctgtagtttaatacctcttgatcagattcattgttcaagtta

SEQ ID NO: 278001 - DNA, 720 bp, Cannabis indica
gaagaagagcaagaaattgctctaatttgtaagcgtaaaggcaaaatgattgcccaggaggagcccaagcggcctcggagggctgatactccgacccacggtcttgatggtggggtctcttccatggaagaacatattgcccctcccaacattgtgctgactccggttcctagagacgaggcgagacaggagctccggatagctaaacacaactacgccatggataattactccccggggtatgctgaggtggaagcccttaggagggttctgtgggttgaggtgcaaaacaccatcaataacccggagtaccagaatccgtgggacctaaatttggaccccctatcggattggttaggtcgcttccttgggcccaccttagctccctttgctgcggagatgactggcgagttcgcgtctcagcttacccggtgcgctccttgtgcatccttgaactccatcttccaagtccaggatctcagccactccctcactggggtaagtgttttgtaattttgcttttccccttattgttttcttttttggagattctttcttatacttgtattgttttttagcttgctgctgaagctggccgtctctccaagaacataatcaaccatggcttcgtcctgtctgattttggggacatgaacgaagtcaggaaggttcttcaggatcttactgctgagaggcagctttaccaagaggctgctgagc

SEQ ID NO: 278002 - DNA, 492 bp, Cannabis indica
attgatgtgatagcctttaagtcatacaaggccattcgacctagcattacgttaaaggctaaaggaacatctaatatcaggaactgtgccatgatagtcatgctcgtcggagcttgtccaacagtgaggggtagacgaatttgtcctagaggtgcaactccttgaccggagaaaccatagacaggctggagacatggggttagatccttgagttggagtcccatcttctcataagcagttttgaacaagatattggaagaggctccattatcaatcatggttctggccaccattttattggctatctggacttccacgaccagcgggtcgttgtgcgaaaatttaattgtgacagcgtcttcatcgttgaaggttatggtaggccctcctgctcgtggaactttgggcttcctttcttccacggccaggataacttcttcttgctcgtgctgcgctgttcgggcatacctctcccgagctttgcccgaatct

SEQ ID NO: 278003 - DNA, 623 bp, Cannabis indica
gtttttcacgatctcctcgaaatgccaaattattttgcccaaatctttttacaatagcaagaattctctctaacacttgtttccaatgttttttctcttgattaatttgttcttctaaacttgcatcaattgttaacttcattttcagtcgtttttctaattccacccaactagcaattgactcaatatgttgtgtacttcgttcatgactttttaatcgatcagaaatattatgccagtcattaaaacctccctcagctaaaaaacccacaagatgcttctttgttgcaaacaatttacaacaaaaacaaaatactttatctaaagaaactgaataaatcaaccacttcctatcttgtttctctccatttggtaattctctaatataatgccacgaagaaaaattcctaccgaaagcatccctagtaaactcatccttaatgactctttttggacctctttcaactataaaatttgtcatattaatatgaccaatcctatcccaatttcctggatcatcaatatcaaaaggaaagttgaatacaccacttgaagttttctcattctcattcactgtttgattcagttcttcattttcattcacatcacttgaacttttctca

SEQ ID NO: 278004 - DNA, 859 bp, Cannabis indica
actgggatcgaaatgctggacctagatctggaccaagatcctgacccagacccaaacttggacccgcacttgggacccgaacttagacctagacccgaacctagaaactaatcggggtcaagacttggacacaaacccggacacagactcggacccgaactcaaaaacccatatctagaatcagacccaaagctagacccagacccggacccaaactcgaaccaagacaaggatacgaaccaaggacttagaaccagaactgaatccagactcagatcggcattggaaatttggactcagacccaacctagaccaagccccaggacgcgaacccacacccggagcctgatctggacctagactgaaattcggacccgaacccaaactcagaccaggactcgaactccgacccgaacaaaaacccaaactcgaactcagaatcgcaaatggaactaaaaccgaactaagactaggaccaggacaaggacctaaacccaaacccgaacccagatcgaaacccagacagagacctaaacacgaaccgagactaggactcaaacccgaacctagaccaagacccaaacccacacaataaccgggacctggacctagaataaagatagggaaccaagaccaagacctagtacccgacccaaacccgaacttgaacctaggaccgagctcgtgacccggcaccagaaatggaaccagactgggacccgagattgggatccagatctggacccagggcttggacaaaacccatagttggtgtctggattgggactcagccctggacccgaaccttgacaaggaaccgaacccacacccgaacctgaacccagtcccaaacccaaaa

SEQ ID NO: 278005 - DNA, 801 bp, Cannabis indica
caagtaagtacaacaacataataatatttgttaactcatgtcatgcacatcatatgtgtttttatccattttgatattgttctttctctatgaatgttgtctctgaggttttggacttaagttttgtattataactaattgctagtttggtctgatttggttttgaacttaacatggagtactctgcattttgcagcctgcagcaatgcgaaagagaaaagcttcacaagagcctgggcaaccatcaccagaggctgctcgggacgaccctaagtttttaatgaataattattttatttttatgtataattaacattaaatagatataattaaaaaatatttttattttaataatgtaatttaattaacaggaatatgagtacatattagtctgttaaacacagtttaaccatttctttataattatattcttctttataatatttttataatcaaattattttgaacataagtcactgcatttgattttctaaattggtctttttctttttttttttgagtaaagacatcaaaaaatttataaataatatttgtttatttttcatgcagactttaccactatatttagatcttgtctaagaaatggcctttatgggtggcatataactaaaaggcctatagtagatcataacttctgactgtctattcacataccaataaaaatgatatttttataataattggatgaaaaatatactatttctaaattttgaaatctttttatgcagaaaatgtagttctttaaaaactcgtttgtaacgtcgtattaggtcgtattgt

SEQ ID NO: 278006 - DNA, 617 bp, Cannabis indica
gctctattttaccatttattttattttttcttatgccaaataattcaaacctaaacctaggtagtttcctatacatagatagtgatgaccacaaattgaaggatgatgaacacacttgccttcagtcaaaaatttgagccttcttccctatgctattcgaacctctcttctctcttcctctcttcataatttcgaacccttgagtgagagagtgagtgccacacacatcaagttggtcctcaatcatagtatgtaagactgtgaagaatccaaacataaggaaggagtttcgggctcagatcttggtgatactctgctacagaaatgatacaagggttagagctctgagtggaaggagtcatttaattgccttgcacccactgtaaggtatcttataacttttatgtgtttaaattacattgttttagaaattcatatttaggatgttaaaaacatacatggtagtaaatctagatcttggtaaaataattccaacaactagcctcaaagccatgataatgatttactttcctgaattatagatttaaaacgatgtttgtgttgatttggatagtttcatgatggtttatatgattatatgatgaatgtatgtattt

SEQ ID NO: 278007 - DNA, 924 bp, Cannabis indica
tcagaccaagactcgaactccgacccgaattcaaacccaaactcgaactcagaatcgcaaatggatctagaaacgaaataggactaggacaaggaccaggacctaaacccaaacccgaacctagatcaaaacccagacagagacctaaacccgtaccgagactaggactcaaacaggaacctagaccgggacccgaacccacacaataaccgggacctggacccagaatcatgatagggacctgggaaacagaactaggaccgggacctagtacctgacccagacccgaacttgaacctcggacccagctcgtgaccaggcacaagaattggaaccagactgcgacccgagatgggatctgaatctggacctagtgcttggacaaaacacgtagtcggtgtctggatttgggacccagccctagacccgaaccctgacaaggaatcgaacccacactcggacctgaactgagtcccaaacccaaaagtggacccgaacccgtactctgtgacccaaaatctgaaccaaaactggtagttgaccaggattggaactaggacttggacttgggatcataactgaaattggacctagatccataacggtaatcggaccaggacctagactgcaaatcagacctagacccaaattgggacccggacccggatccataaccaaacctggactccggacccgaaaccgatctgaactcaaacccaaacatggaaccacactatggacacagaacaaggatcgggacctagaatcgtaccccagtctcgatcccaaacccaaacgcagaaatgggacttgggacctgaactagaacaagaccgagacccctgacagtgatccagatcttcactcaggattcaggtaacggggcctggaacacaccactagtcggtgtctagatctgggact

SEQ ID NO: 278008 - DNA, 727 bp, Cannabis indica
gttttcatttgtgtttctgtgttgttttttttctcagcatatgaacaccatattctattaccttcggaaaaaaggtaaatattcttccgctgtgacgttgaatttcgcaactactgattgtctttttgatgattccatccaagcattgtaccacaaatttaacaaggccaagtcaatgaagactaagatgtcacacattcacgctgcccacccaatagcgcattacatccgaggtatgcgcattccctgttccaagccttggtatgaagccgatcatgtgctattcatcatcaatttaagaagggaaagtcattgggtttttgggcgtcttgacttgaacgaagggacgttgtttctgtacaattctttgaggaccgcgaagatgaatgccgcagctaggaatgcgatgaaggcttattccgtgttgctgcctttgtttttcgatttacttgggttctggaagaatagagcacaagctcctgcctcagtttctgaccctacagctccattcagaatcgtggagcttagtggtcttgcgtctcagcagaagaagtgagtgtttcttttaagtttcttttatgttgttttttagtttctaaactgtttactttttcttctgttttttatagtgattgcggggcatatgttgctgcctttgctgaattctttatccacggaaaggatgtccctgcagactttgacatcgaagtttatcgtacccgacttg

SEQ ID NO: 278009 - DNA, 723 bp, Cannabis indica
tagatagaaaagtcatgatatcatctattaagtaagtcatcttggatagtgtgacctatactagtgtagatttttgttgttaagttgtaacttatgaaatggtacaataatattcaagacaatactatattcatggtttggaacatatgatatggggaatgttaaactctattgttgtatgtatatttttaagtactgtcaagagtaaagatttaaattgaatataaatataggaaatgtttatggtaaagatcttagttttgtccctatggtagggatacttttttagcccttgattattgatctaatggtaataaagttaaagaaacatgatagtaatagtggaacctagcttataatattttttacacattttttgtctttacattattgtcttattcttctccatcttctttcctttttttttttattttttttaaaaactaaatttaatagttattttattttattttttagtacacttaaattacttaattaatattttttttttatatatatattctcttaaagataattttttttaacatgttagtttcaaaaaattatttatttgaataagcttgttgatgatttttttcaaaatttattatctaaaaaaattatattttatatatttcttagatttgttttctttataataaaatcagttttggagcaatacaactttctggttcataaaaaaaaaaatttaataagtacaat

SEQ ID NO: 278010 - DNA, 670 bp, Cannabis indica
cgtttccaccgcctttatggcagctcgatctgatccgttgatctttgggtattcgaatcgtgcatctcccccaccgtacgattggtaggtggtgacgcctgttcctcatgcacttttgcctataaaagccaccatctttccttcatttggttactttccattccttgccatttttgctcgaatttcccagagagaaaattcttcaaaacagcacgaaccgtcttaacacttcgccatttcttccagtttttccgtgtttgctatcatcagttcttctcaactttactcggccacactcaggacccccagttcaacaatttactgtaagtttcttgcatcctttgatagtgacatgcttttacttgctttgtttgtttttctgggttcgtactttgagatttctgggcatgcaagtgtttaggttcttcaggtgttctgttttgtgtctattgctttagttgtaggaccgccattatcatgcctctgttataatcgtgcatttttgttgaagagagccataggttcttcgttcgacggttgcttagggcatagaatggggtcttttcccttctatttcttttactctgtaaaaccattttctgcgattttactgcacccgacacttgttcagggaatctttctagggtttcccatgtgacacgtgtccgga

SEQ ID NO: 278011 - DNA, 574 bp, Cannabis indica
gtttctcgttgttctgcgagatgttgaaaatatctctgcgtagggaacctgccccaacctcaactggcaacatggcctcgcacccataagaaagtgagaagggtgtttcgccagttgtagatcgaggagtcgtattataagaccataggacttgcggtaactcgtctggccaagctcctttgcgatcttctagtttcccttttatggtgtgtttgattattttattaatggcttcagtttgtccattactctgcgggtaagcaactgcggaaaaagcctttttaattcccaaatcgtcgcatagttgtcgcatctctttgcagtcaaactgttttccattgtctgaaatgagtttatgcggaatgccaaaacgacaaatgatggaggtatagacaaactcgcgcaatttcgttgctgtgatggttgcgagtgctttggcttcggcccacttcgtgaagtaatcaactgcgactaccgcatatttgactccgccttttcctttgggtaactcgccgattagatcaattccccatattgcaaagggccatggacttgtgatagaatggaggttact

SEQ ID NO: 278012 - DNA, 1014 bp, Cannabis indica
attaatgcgattattaggataagttgattttaaaaatatcagggtattttagggtactcgaagttggccaaataccttagaaatagagatttcttagtggctaagaaataacttaatatatatatatatatattaagttatcagtgaaacagaacagaacgaacgacgaacgaaaccctcgttctccctccttcgataaaaccttctccccttatatctattttcttcaattttcaatccaaaacttagcgatctaagctctggtagtagcaggatagcaaatctttgaagagggaagcttaaggtatggtttaatttcgttttaagtttaaaaacaattggtttcgtataggggttttgtgaattagaatagttatgaaggttctgaccttatagaattgttctcgggtagtcatgggactagtttcgatattttcttgttgaattagaagtgatttttgagttagaaatcgagtttggaactttttaaagcttagtccgaacgttaatggcgtttttcatttaaggggtcgatttttatttctgttacgtaaggatggtagtatttatggcatacatgcaccctgtgaagtttggagtgatttggataagttttggtagtgtttcggtgagtgcgaaaattgaaattttcgtatttcacagtttatagaaattcctaagagatcagaaatcgtatttttgtcataacttttgactcgggtgtccgttttggatattctatataccgtttcgaagcttgagacgagctctacaatatggtgtatgttttagagctgaaatataagttttattttagtgtatttataccgcggggtttggtagaaaaccctagattgtcttatgtgaatataagcagtgttttaggataaacacttattagtttatcgttgttgtgacatagggccgggatcatcgaggatagttctccacttggattgattaatattgagatatagttaatattgttatatatagaaaagtatattgtactgc

SEQ ID NO: 278013 - DNA, 499 bp, Cannabis indica
ccttggagtaaggaaggataatgtgtatgttattgatgttgattcttttgatagtaaaaataaatgtttaaccgttatgaatgataattcttggttgtggcatagaagattaggacatgctagtatggattctatttcaaaattggttagaaaagatcttgttattggtttgccatctattccgtttgttaaagataaactttgtgatgcatgccaatttggaaaacaaattaaaacatcttttcattccaagaaagaaatttcaactactagacctttgcaattgcttcatattgatttatttggtccttctagaattgctagtcttggtggtaaatactatgcatttgtaattgttgatgatttttcaagatttacgtttgggttatttttcttgactacttaaaaagtgattgttttaggtaaaaatttgtacaaaattttagtaaaaatgtgaaaaaatagaaaaaggatattctattacctccgttaggagtga

SEQ ID NO: 278014 - DNA, 524 bp, Cannabis indica
ccatttcttgccaactttgctcgaatttcctagagagaaaattctcagacccagcacgaagcctttgaacactttgcgatttttccagttcttccttgctcgctgctaccagtccttctcgtcttcactcgactcgcatcaggacccccagttcaacacttcattgtaagttttttgcatcctttggtattattgaatggcatgctattactcgttctgtttgttcttttctgggtttgcattcgagatttctgggcatgcaagtgtttaagttattcatgtagtctgttttgaatttactgctttagtcgtaggatcgccattatcatgcctctgttgttattgtgtattttcattgtagaagaccatacgctcttcgttcaatggttgcttagggcatagaataggatcatttctttctgtttcctttatcgtgtaaagccaccttctgcgattttactgcacccgacacttgttcagggaatctttctagggtttcccgtgtgacacgtgtccggaggggg

SEQ ID NO: 278015 - DNA, 675 bp, Cannabis indica
cttcctcgacctcctccatgggttctaaaattttttcggatcccacacggggatccaactcatcttcctccgccattcctgactcaataacttcacgaaccattagaacgggtaggtgggcagcaacgttgtaacactgcctggcctctccctggttccctcttacgactcctatcccagcctcctgagtagggaatttcagacacaagtgcctaatcgatgtgactgcaccaaaatccaccaggaccggccggccgaggattgcattgtaagccgttgggcagtccactaccacaaatgtgcaatacttgaaagagctttggggtgtgtaagggcacaaagttactgggagcctcacttttcccattagaataagtgttgttccattgaaccctgtgagctgggaaccgcttggtgaaagatcccggtccgtgaggcctattgctctgaaggcttctttgaataataaattcacagaactcccgttgtcaattaagattctagccacaatcttcttggcaatgggagtcttcatgaccagggggtcatgatgagggaagcgcactgtcttagcatcctcttctgtgaatgtaatgggccgatccattagccggggcctttgagctaggagttgagtaacctcccaaacctcactgtgctttacggcccctgcgt

SEQ ID NO: 278016 - DNA, 567 bp, Cannabis indica
agtagtaattaatccaattccctgtggttcgacctcacttgcgtgagctactacttgattgtgtatacttgcgtagtgttattaattttcgtaacaagactttattaagtctaattaataaatatattaaatggcaattttatttgatgattaattttaattattaaataaatagttttggcatttaaatagtaagaattggaaaaatgacatttttgagaaaataaggaaatttttttcaaaagtggaaaaattccaaagtggggcccattaccatggccggccacttatatgggattttccacttaattttttcatttttttaatgcctaataaatcctaacctaaacctaggtggttgcctataaatagatagtgatggctcacacttaaaagagagatgatgaaatttcctgccttcagaaaaattttcttgagccatccttccttctattttcgaaccagaccctctcttccttctttatattattttcataccttgagtgatagagtgagtgcccacacacatcaagtggtatctcaatcgtagtgtgtaatgctgtgaag

SEQ ID NO: 278017 - DNA, 560 bp, Cannabis indica
ctccggaattgagaaattataactctaatgcccatttctaataatagggcccataaataattaaattcataaataattataaaaatatcaaaaattagtgctaattgcctttactaatccaaattactaatctgatcattacagattatccattgttataatcctaatagtcaaagatcatctatagatgatctacactaaatagggacaaatttacccttctacccttcaatgtattttatccttaaaacacttagctacttataaatgatacttcagcaaactaatataattactgaaatgaggcctcaatcatttatctctattcagccaagctcaaaggagatcatcgtttcacttataaatacttatagaagctatagattccatatctatgatcagcgctcccactcaattgaactaccatgttcccaagatgtaaatatccgccaaaactataagttagcttccacgaacaactcgaagaacataaataatacaactaagttgaacctaaccatatgaggattaagatccatagacctaagatcaaccattga

SEQ ID NO: 278018 - DNA, 630 bp, Cannabis indica
ttgcacctcctttcaacttagctacacgctcaagttgaatgagttcatcctcctgatgagctctctcagcccgtccagcactagatatcctcttcctctccttcacaggaaatccttcggatagagcccatacttcacaaagttgtcctcggaggtcaactaaatgatattccggtcatcctccagcagttgagcaagcctttgagccctatccctaagagcaagagtgaagggagggcggtgatacgtggggatctgctggaaccgagtatgggtggtgcccatgcctttcaccatgaaatactcatcaacaaaatgcccaattttgctaaaggccttatcctcggtgcccgtcaaccacttgaaatctggttgagagaaatagaagtaccccgacctgccttgcttaggggtggacttcaaatcaaaaaaccagctaacctcgtggggagaaggcatatcccacttctgggaggcatagagaacaaagagggcagacagatacttaattcccttgggagtaaattgggtcggacagaggcagaagaagtctgccacattcctaaagtacgggtgcaaaggcaacaatgcccctagctgggcatgagcacctgaccaggcgcacattcc

SEQ ID NO: 278019 - DNA, 599 bp, Cannabis indica
cgcaagaacaacatggacaagcagttttcaaatttttgaaagtattcaagaagttgcacatcaaccatccatttgcggaggccttgaaataaatgccaagctatttcaagttcatgaaagagatcttatccaagaaaacaaagatggaggatttcaagacattgacattaactaaagagtgtagtgcaatattgtagagaaagtccctcccaaattagagatctttggagttttaccataccatgcaccatcaaaaggatagaagagataaatacttggccaagcaaacttaatggacaagaaccctcgaagacttcattgtgtatcatgtcaacatactaatgatccaattaaaaaatgatgagctataaaaaccttataactcaaaattgactattttttcattatataaaaaaaagtaagggtaaaaattcgtattcgtattatgcaagttgacatatttaatcaatcaattctataacctgactcatatatatttcgtgtcaattttttttaactctgacctgttttattatgttctcatatcaacctatcgtattcagtatcaactatacttatcttaccattgattaatatag

SEQ ID NO: 278020 - DNA, 651 bp, Cannabis indica
agtgcgatttctcctttcagcaacgccattttgctcaggtgaagctaacatagtgtattgagaaactacactattttcgagaaaatattcagtaaaaggcctcatgcgtagtccatattctgaataacgaccataatattctccgccacgatctgaaagaacaactttgatgactctttctaattgtttctcaagaacatttcaaaagattttgactttatcaagagcatttgatttttcttgaattaagtgacgccatatagagaaatatcatttattgaagttatgacatacttaacatagtggaaaaagatccactaatatcagtgtggaaaatctctaataaagattgactacagttagtagtttgatttcttattttagtcaatcttccacaagtacaatcagcacatgtatcccaaccagaaacatcaacaggaggaagaattttagctaaaagtaatcgatcaactttttctttagaaatatgactcgatatatcgtaccataataataaggatgttatcttaatataatatttcttacccacaatattcacacattgaaaaaggaagctaaggaagtcaatgataatttgaaaaaaaaaatatcagagtaaaaaagtttccaattattcggagtcaaacataa

SEQ ID NO: 278021 - DNA, 952 bp, Cannabis indica
tatcgagagtcactgtactgatcttgtcttctattttccaatcattaagacagatcttagggcctcaagtagtgctggagcatcgtgaggacacggaacatacttaaaactcaatatctgactgtgtaagttccaagaatcatcaataaaatgagctgttacagccatatatcccctcttctgatgatttgcagtccacatgtcactggttatggctattctgctcctacttttttccaaattttgcctgcactttctttctcagttttatacattttcataatgtctgacctaattgtattccttgacaccatttgaaacatgggacataaagtgcttgaatattctataaacccgctatgctcaaccatagacaagggatattcgtgcttaacgatcatttgagccaatttggtccttgctaaatcaggatcaaaattaaaagaaactgaagggcttgcagttgcactaggattggcggcaagttgggcctttcttacaggacacgttttcacgtgagaatttaaatgcctagtcccactagaactttctcccaccagcttacgctcgcaatacttgcaaactgctttaatttttccatcaattttttcccgtgtgaaatgatcccatgcacgagaagttctttttctctgattctgagtttcatctactgtattgctaacagattgtacttcatttgtagttgatggcacaaaatcaacatcatcctcaaaattagaatcgatttgaccagacattctattttaacctacattaacaccatattctcatatctatcaattaatccatgcaattgctttaaaaatatgataaacatatctacgaaaaatcgggcagcattttccctattttattaacctaaccatctgtcaattttaactataaataatcagataacacacaatttatcatccttatatcaccgcagcac

SEQ ID NO: 278022 - DNA, 575 bp, Cannabis indica
tgacgtactcgtgtataagagccattcattctgtgggtgtaaggacctaatggaggcttgaagcggggacgttacattctcttaaacaaaatacatttttaagttttaggtattttgtgtatgacatcttaccatgtgtcattatgctaatgcagaaaatgttgtaagaatccaatctacacaagtaagaaaagatggtgtaataaagtaattgcagacattaaatttaaataataataattcagaaaatccatacttacatgaaacggttagatcaaaaaagaaaaactctatatgattaaatatagtatagagttttatttttgacaatattcattatttttgaatataatatttggacaatattcattattcacaataaattgttacaactactttctttttatattttcttttaatttacaatcaatcaatgttattactgttttagaaatttaatagaaacaatagaaacgaaaacgaaatatgagagatgcatgatgaagatatattcttcttaaaagaaacaaatgaagaagcgatgaatattaacattaaaatttcatatttatctt

SEQ ID NO: 278023 - DNA, 538 bp, Cannabis indica
aggtccggacgtcatggaagccgagcagtggctataagtaattacgagaatataggattttatgaatgtaacggaatacactacgcagtttgatcggttggcgaggttggcctcgggaattgtgccaaccgatttgagtaagaaagaaaaatatcttgatggacttaatgtgaagatcaagtatgaccttatgatcactagcgacgacaagatcacccatgttgagatggtggagaaggcagtgtcagctgagggcgcagttggatgcatgtcggagtcagctaggactccagtaagtggcggggctcctacccctcctgcatcaggtttcagcaggggaggtagtggttcggccatggaccagaggaggaaatcatccactacatcccgtggctcagggcagaacaagaggttccgcgggaaccagaatcgaggcagtcgttaggatagtgttgagacccgtcattcctacccgaagtgtctcattggtaagaggcatcctccgggtgaatgcaaaggtcagggatgctttcactgt

SEQ ID NO: 278024 - DNA, 557 bp, Cannabis indica
tgtcattctagtaaagtcatcaatgaagagaatgaagtacctgttttggtcatttgatggagtgcgcattgccccgcagacgtcagtatggactagctccagtggctttttggctctccaagctttgccagatggaaaaggttgtcgatgttgtttcccgagcatgcatccttcgcagactgtgttgatctccttaattgttgggaggtctcgcatcatattcttctgcttgaggatctttagcccatggaagttaaagtgaccgaaccttctatgccatagccatgattcatctgtttgtgcttgcattgccacattgcttgcatatttatcttgcttatcatatattgtgcaagaatgtccttcaaaatgcaaagagtgccctttttcaatcatttgacctacgctaagtaggttttgatcaatgttgggtaccaagagtacatccttgatgtatctcttgccttttttagtgtcaatggtaatggtgcctttgcggactgcttccatgaaatcaccattatcgattttgactttagtcttggatctatcaagac

SEQ ID NO: 278025 - DNA, 596 bp, Cannabis indica
gaaaatgtcgatcacctattcactgggatgaggctggtgaacgtaggtatcttggacctgaagctgtccaaagaacgagcgaggctattgaaaagattcgagctcgtatgcttgcttcccaaagtagacagaaaagctacgcagatccaaagcgtagagatgttgaattccaagttggggattttgtttttcttcgggtatccccaatgaaaggaattcgaaggttcgggaagaaaggaaagttgagtcccagatttattggtccatttgagattcttgagaaagtaggtcaggtagcttatcggttggctctacctcctgctttatctggggttcataacgtgtttcatgtctcgatgcttcggaatatgtatctgatacaactcatatcttaagttatgaagacattgagcttcaaaccgacctgtcatatgaagaacaaccagtacagatcttagacaggaaagaaaaggtgctgcggaacaagactattccgctagttaaagtgctgtggcggaacagcaagattgaagaagcgacttgggagttagagtcgcagatgcgagagttgtatcccgagcttttcaggtaaattt

SEQ ID NO: 278026 - DNA, 325 bp, Cannabis indica
aaacctaaccctagtggaatgctataaatagatagtgaaggcttcaggaaaattacacttttcttctgacttttcattcagaaaaaactgagcctctctctctccctatctttggccgaccactccctctctctcttcttcctaaagatttcgaaattcttagtgttagagtaagaaagactttcaacaagaaggagtttcaacactaaagaattagagaaagagatctaggttcagatattgataatgctctgctacaaaatggaatcaaggctagatatcttaacagaaggagtcatattattccgcggcacccaatgtaagg

SEQ ID NO: 278027 - DNA, 560 bp, Cannabis indica
ggagtatgtgattggtaccttgatcgtacgtcaatcttctgtgggaaggtggcttgagttcgacggataaaataacttcataaccgtacgccattgcgaatggtgtttgtctggttgctcttctggccagtttcctttggcatcttcaagttttttctttagtgtatccttcaaggttttgttgactgcctcaacttgaccatttgcctgaggatgcgccaatacagagaaacttttgatgataccatggttcgcacagaaatcagtaaaggatttgttgtcgaagtgcttgcgattacgtgagactattttgtatggtagtctgaatcggcatattatgttcttcacaataaagtcttgaactttctttgatgtgaaggttgcgagtggttcgacctcagtccacttagtaaagtaatcaaccgctaccactacatactgcactcaacctttacctttaggtaattttctgatcaggtcaatcccccaaatggcaaagggccacggacttttcatctgtgttaactcgttgggtggagctcttgctatctttgaaaatc

SEQ ID NO: 278028 - DNA, 567 bp, Cannabis indica
accaattgattatttctttcaaataatattaaaagtaacttttttttaatttgttgttgttattatttaattgccaaaatagaacaatctaaaaattggttttttttaattatttttattcaaaataataataataaaagaaattatactatttaaaagtacacttttttaataatatttattcaacgtaatacaaatcacatctagcttatttttaatccctaattgatttatagttgtttcatcttttaatttattttattgttgttgtttcaccaagtcatccatattaaagagtctttaagggcaaaaggtgagataatgatgtcgaggttgcaactcaaaagattaatgtataatttttattgtctttgtttggtttcaaagacttattttgttttgtttatatatttttttgatgtatttagtaagaagaattatacaaccttaaatggtttatgtctctcactttttctgtttataattagttaattttcaattttaatttagttattatatggttcttaaaaaaaaaactatatcattgaattaagtcttacatttatt

SEQ ID NO: 278029 - DNA, 534 bp, Cannabis indica
ctccggaattgagaaattataactctaatactcatttctaatgttggggtccacaaataaattaattcataaataattataaaattaacagaaattagtgctaattgcctttactaatccaaattattaaagcgatcattacattaccgttacactctttcaatgtattttatccttaaaacacttggccacctataaatgatatttttgtggactaatataatcactaaaatgagcgctctatcatttatttctatttagcaagctcgaaggaaatcatcgtatcacttctatgttcggatagaagctatagattccaaatctatgattagcactcccacttaattgtactattatgttcccaaaatgtacatatcaccctcaccaaaaagtagtcttaactaacaaatctaagaacataaataacactcttgagatcgaacctaaccatgtcaggattaagattatttgatctaggatcaactaggtgatatttaatcgaatagatattacggtaaatttatcatatctaat

SEQ ID NO: 278030 - DNA, 564 bp, Cannabis indica
tttgttggccaaagatttcttgcccatttttgatttttgtttgagaactggagaaggggatgatgatgaacgagtgattgccatcttataaataaaattgaaaaaaactgaaacagagagggaaaaacagttgataaatcgtgggcttagagggagttgaaatttcgtggatgaacaaaaaagaagagggaaaaacgtgatcaataatgggtggttaatcttatgaagggaggttacttgtattcaaatgaagttagaaaacagaaatgaaaaatcgaaaatgaaatgaaaagaaaatgaaaaaagagagggaagagagtaggatttgattgatgatggatggggaaagcacacgtgtatgtgcatgaaatgatgactaagtggtatttgtgtaataaaaccaacattgtaagtaaaaaagttgatataggcgtgtaggagtatttttgtaataaattgtgcaaaaaggatttttcatgtaaaaatttcaaataataacatatgatttttcttttttattttttttaaacagaattacatacaatctttaactatatttattat

SEQ ID NO: 278031 - DNA, 425 bp, Cannabis indica
atctctagcccttaattcctttatgtagcagagcattatcaagatctgaacctggatctctttctctccttcttgagcctgattcactcactctatcactcaaggctgaataatatgaagaagcaaagagaggaagagggtggcggctagggtataagtagaaggctagaatttttctctgaaggaatgaaaagcaacaaccttttcttgaagccaccactacctatttataggtaaccacctaggtttaagttggatttaattagtattaaaataatgaaaaaataaatggtaaattgcattagtgtggtcggccctaggattggataatgggcccactttacaatttttccattttgttcatttttcctatctcattttctcaagaacgtcaatttccaatttaaccacttaaatgccaattc

SEQ ID NO: 278032 - DNA, 612 bp, Cannabis indica
tgcgatattttgcgatatttgtgcgatttactttacagtgcattataaatgttcagtgattaataagttttttggcgactttgtgcgatgttgtgcgattttacttgcactccttataaatttttacttgtatttgttttatttgtttagcgactttatgcgattcttgttgcgattgttgtgcgatttgttggaagtctcatgttttccacttgtattttttgatatttttgtgcgactgtatgcgattactgtgcgattttgtgcgattttcgatgacagtagcaaatatacttttctatgtatatgtaatagttttttggcgatatagtgcgatttttgtgcgatatgtatgcgatttttttagttttatgcgatttatttgcgatttttgtgcgacatatttgcgatttaccgtgatcttgtgtttttgcagatggttgtgcttcaaatcttgtatcctcggaattgggaggttgattactggaaggacaattgtgagggtgaggtccccacagtggaaatggggttggatgaggtcgaagaaacacaagccggggcgcaagattcgaccgcattcgagacccaagcccaacgggtggcagaatatgt

SEQ ID NO: 278033 - DNA, 501 bp, Cannabis indica
caaaatcaatttcacgttttggtggtaaccccagtaactcctctggaaacacatccaaaaattctcgaaccatgggacatgctccggtcccgctagtggttccctggtaatatccacaacatttgctaagaaaccaatgcacccctcacacaacaaatctcttgccttaagtgctgaaattaagggaattcgagatccatgcatcttacccacaaatacaaaggggtcctcgccctcaggctgaaaagttaccatttttctcttgcaatcaatagtggcgttgtattttgcaagccaaccatacccaaaataacatcaaagtcctccaattttaattctatcagatcaactgataactcccttccttccacaaatactggaagggatctcacccacctgctggagataaccaactccccagtaggcagcaaagtcccaaaacctctagaaagtacatcactaggtctattcaatttctcaattattctacttgaaatataa

SEQ ID NO: 278034 - DNA, 555 bp, Cannabis indica
aaacacaaaactcggtgagctctggtgaattctgtcgagctcagtcaaaacacaaaattccaaaacatattgaaactcaacaatccaaaaatctcaataaaatttcaacgaaagcataccaaaaacaagattaacccaaaataaactaataaagaatatataatagaaattatttgtaaattaaataatatcacaaatcatagaacaaaaaacacgcctcctgtgactatggttgtgactggttcgcgacaatgggtgtaaagaccgcctaagattaatattttggattattgaataattagggtttatgcatgagatttaattaatatttatgaaatgcatattttggaaatatatttaatatcatatatgtttattatgctattttatgtaaattataaaattcctgtgtttgtgctcggaagcggtggaaggtgacgttgggcctttagagagtcacattttatatgtttagaatattattatcgggatatctttgttgggtattggaggtgtgggaattgtgtcgggcatttggtttgaccatttttccct

SEQ ID NO: 278035 - DNA, 912 bp, Cannabis indica
atcttcaatcagagtagcaaacagagagaaatccctgagccggtttatttcccgagccacagacaaatgcattcccttcttcaacatcctgaagaaatgccaaaaattcgaatggaccgaagaatgcgaggaggcattcaaaaaattaaaagagcacatgactaaacctccaatcctgtcaaaacccgttctcggagaagacttgttactatacttagtcgtctccgagaatgcggttagtgcagccctagtccgggaagaggaaaaaactcagcaccccgtgtactatgtcatcaaacgcatgataggggcggaaacacggtatccagtgatcgaaaaactagttttttgcctcctgatagcctcaggaaagttaagaccctacttttaggctcacccgatcaaggtgttgactaaccatccaatccggcaagtcctacagaaaccggaggcatccaggagactcctcaaatgggctatggaattaagccagtttgatctacactgtataccacgcacttccataaaaggacaagcgctagcggacttcataatagagtgcaatgaagcagaggctagtgcaaacgttccaacaccacaaaccccatcatggaaagttttcgtggacggtgcctccaacgaaaacggatccggagctggggtagcaatgatatctccgaacggacttcgactcctggcggccctacgtttcgaattcatagcttccaacaacgaggctgaatatgaagctctgattgcagggctgaggttagcaaaagtcgtaggtgccacaagagtagaagtcttcagtgattcatagttggtggtaaaccaagtgtcgggagaatatcaaacatgtggagaaaaaatggttgcatatgtagcaattgtctgagaactgctccatgagtt

SEQ ID NO: 278036 - DNA, 530 bp, Cannabis indica
ctacatgacataaaaatgcatctctgaattcaataataacagtataataaattatttaactagctataaataatttcataattaaccatgattacttgctaatttccaaattaaactaagcggtctttacaacatcggtacaactagagtatgactagtgtatcgagtataggctgttactatgtcgaaagtaccgtcgtacgaacgttctagactcagtattgtgcgggtcacagggatagggttatgattgggggtatcggcatccgattataattcgggttattgctatgttattttttatgcttttcttactgagtctatcgactcacagtgctatttccatgtgtaggtaagggcaaggctaaagttggggagtcgtgagtacgagcaggtaaagattgtacatgtcggggcatttaggcctggaccgtacgatctttgggacatcagggctttttgctatttagtcactagacgacaaatcttttgtataatgaatagtaaacttttgtaaatgtattttgtaa

SEQ ID NO: 278037 - DNA, 486 bp, Cannabis indica
caagtcaatgctttaatctgataatcctgtattgcattgcctaatcaggtaagcccatgccatagcctggcatccatatatcgcataattgtatcacctaatcaggtgatcctgtgccaaaaccctgcactcatatatcatataattgcatcacctactaaggtgagcccaggccataatctggcaccaatatcgcatcgtctaatcaaacgagcccatacctacgtccggtacttatcatatgtcactgacgctcgtacctacgcccgatacgttgccaggaaaatcgtatcacctaatcaggtgagctcgtacctacgctcggttctcatcatatatcactgacgcccgtacttacacctagtacgtcgcctagaaaatcacatcacctaatcaggtgagctcgtacctacactcggtactcatcttatatcactaacgcccgtacttacgcctagtacgttgccaggaaaatcgcatcaccta

SEQ ID NO: 278038 - DNA, 699 bp, Cannabis indica
gtaaaaaaaattaattattatagttactttaataaaaactagtttttttttaaattgggttgtactagctttagcttttagatgtaattttccataaattttctataaaactgttttttaactgcttaaccacatactttattatcatagcttttttgagaagcagcttttagttttccaaaaactgtgttaaacttgcttctttaagggttttatttttttttaatgttttttatatatgtaataaaatataatatatttaatattataaatttataatatgtattttccatcttaatattggatggtattgaatgatcattgaattagatcggtcggttagattcattggatttacatgtcatccaagaactaaccgatcaaatattagatttataaaaatattatccaatccaatcatgaatatttaatttttagtgttcggttgacattggatcggtattgattttttattagattggatcatttctgcacagttatagttatttaaggtatattgtaaaatttaaaaaaaatttagaataatttagaatatagaaattaatgttcaaaccatttattttacatgcatatcaaataaaataaaaattataaaatagaccaaaaatttgaaaaaaaaaaaattacaaaagtacttcaacacggattttttttttgtttttactctgtgaatttttt

SEQ ID NO: 278039 - DNA, 1247 bp, Cannabis indica
ttttggaaatggttaggtccatgcttagctactcaactctacctacgtccttctggggatatgcaattcagatggcaaccgacattttaaatgttgttccatctaaatcaatccctaagacacctttagaactttggaatggtcgtacacctagtttacgccattatagaatctacgggtgccctgctcatgtcttaagaaagaaagatggcaaacttgaaaagcaaaataaggtttgcatgtttgttggaaattctaaagagactaggggtggactattttatagtcgaaaggatgataaagtgtttgtttctacaaacgccactttccttgaagatgactatattaagaatttcaaaccacaaagtaaagtagtattggaggaaatgcttgcagatataagtccttctaatgttccatcctcttctactcaagtagaggataatcccacttcctcggttgaacctttacaagttgatacaaccgagagaactaccactaaagttcctgttcagaagatcaccgctcctcgtcgtagtgggagggtttttactaaaccatctcgttatggcttggatggtgaaatcaatatggtcgttggtgacggtattgatgacgacccattaacctataaacaggcaatggcaagtccagaacggaaacgatggtcagccggcatggattcagaaatggattccatgaaaaagaacaaagtctgggaatatgtagacgcacccgatgactatcgtccaatcggatgtaagtgggtctacaagaagaaaagaggcgctggaggcgaagtcgaaacttttaaagctagactggtcgccaagggttatacccaaagagaaggtgtggactatgaggaaacttttagtccagtcgccatgctcaaatccatccgaattcttctctccatcgcagccgctttcgactatgaaatctggcaaatggatgtcaagacagccttccttaatggggttcttgaagaaaccatctatatggagcaaccagaaggctatgttcttccagggcaggaaaagaaagtttgcaagttaaataggtctatttatggacttaagcaagcttctcgctcatggaacaaaaggtttgatgaaatcatcaagacctacggctttcttcagaatgaagatgaaccttgtgtttaccaactcaaggaagaccaagtagtagtattcctggtcctttatgttgacgacattttgatcattggcaacaatgtcaag

SEQ ID NO: 278040 - DNA, 522 bp, Cannabis indica
gtcgaaccacgtaacgcaattcacattatgcggggtatatccaactcgcgtgtgtcagaacatgtgcgagtatcccctctatatttctgcgaaagcatagagaccaactctctatgatgcaatttggtcccaacgacccaatagccctgacaaaccgatataaattcgcatgtctaggttcagccagctcaacatgcgatgtctacaagaggcggttacctaagggcgcagacgttccaaacgtactaatgaccctgcgagctcaacaaacggaacatgaaccgtcaactcgcagatgcggaagacgcatacgttgatggacttagtaactgtcactcatttattaatgttaacgttgtttgggtttaattattgcaattcaatatgtaaataatggattaacaatgaatgtgatccttatgtaaccgatttggacacctactttgtatataaaggggtgatccaccatgaaaatggcacctacgaatcctttgctacagtggactaagcagatcacaatct

SEQ ID NO: 278041 - DNA, 460 bp, Cannabis indica
tggctccgggaaattccttgggttcatggttaaccagcgaggaatagaggccaatcctgcaaagatcagggcattggtggaaatgccatcaccaaccaagccaaaagaagttcaaagcctcacaggtaaagtcgcagccttaaaccgctttatatcacgatcttctgataagtgcaaggagttttttcaaattctaaaaggcaacaaaaggttccattggaccgaaaaatgcgagcaggcttttcaaaccttaaaaacgcacttggggcaacctccgatcttgtcaaagccaatgaccggtgaagtcttgtccatctatttagcagtgtcggaatatgcgattagtgcagtactagtacgcgaggatcaaggacggcaatacccggtgtattatgtcagtaagcgactactggatgccgagacgcgctatccccaaatggaaaagttggcgtttgccttg

SEQ ID NO: 278042 - DNA, 579 bp, Cannabis indica
ttcacactgacaacacaaaaaagtcaatcacatataaaaaaaatacacaaaaacaaatgtaaataatataaatataaataaaaaaatactaaccccctattcatgacaatgttctcatcaataaatttggaaaacttaatgcactgctcagcaccagtattaaaaccaatttcatctttaaaaggattgattccatgcacaataaatttatcatcttgcacaatcctcattaagtcttccttcgaagatgacgaagacccaaagtccacaacatatggcgacagaacaacagagcttggtttgggctgcctcttttgaacctccggagacaaatacgattcatcgtacaaaaccaaactcaacttatgactatcatcatgaaacaaaacatcatctgtcttcaaagcactcttaacagtgctatcaaccacacccttaagaaaataaggatcgataaacatattttcaaaattcaaagtctccttttcctcctacaaaattgaataaaaaatatttagaacgaacattaacatccaaacaatgcaaaacataaatgtgaaaaagcttgtacctcagctt

SEQ ID NO: 278043 - DNA, 336 bp, Cannabis indica
taaaataatttccaacattttcaccataagattttgtagaaaatcctaagttatttgatgcgggttttagacagtgttttggaatagacccttattgatttacttttatcgtgacataggatccgagattgtcgagcatcattccactaaggtcggcccacatactttaatttggacttgaggtaagaaaagtattaagcaccataaatggttaacgttatgattgtaatagtcttgattatgatcaagatcccgatatgtatttgttgtgactcgtttatgatcgagggaaataatgggaaacaattattatcgttgtgactcgattatgatcga

SEQ ID NO: 278044 - DNA, 273 bp, Cannabis indica
tatatatttattaattagacatataaagtctcttaattaatacataaacctagaatctcttttctttacaatttcgctcttgcttattgaaaattcataaactagatatagtctaactttagaattataattgattaatcaaaatcaattaactcagtcttacaagcagtataatctcaactagtatggggaccatgggcctatacagagcctgcaataagtcaaactgaatttaccaagtaaattccctaacttattaattccttattgaat

SEQ ID NO: 278045 - DNA, 719 bp, Cannabis indica
aaagtgatttcatactggcccaactctactgcccacttgagtagccgtccggaagcatctagcttttgcagtatttggcgtagtggctggtcagtgtatattcgaacaggatgagcttgaaaataaggcctcaacttccttattgctagaataaggcagtaagtgagtttctctatcaatcggtatcggccctcgacctcaatgagtcttttactgatgtaataaactgggtgttctacggtgttctcttctctgattagcacggcactcacggcatgttccgtgacaactaagtatattccaagttcttctctgtccagaggttttgagagtacgggaggttttgcaagttctgcttttagctcttggaaagctttttcacactcctccatccactcgagttgcttgtttcctcgcaggatgttgaagaatgggacacacttatctgttgatttgaaacaaatctgcttagctcggctatccaacgagtcaagctttgcacttctttggcttttgttggcgagttcatatcttggaaggcttgaatcttctctggattagcttcaattcctcgggcattgacgatgaagtttagaaactttccagagctgactctaaaggaacactttaagggatttagtttcatattgtactttctgaggactttgaagcattctccaggtcgtctatgtgcctcccagcctttctggatttgacga

SEQ ID NO: 278046 - DNA, 436 bp, Cannabis indica
atgaactgctaaaggagacttaccaccggagccggaagtgctgggaccaggagccccagtgttcggctcctgagccgaaggctgtggcctgggagcccttttctccgctgagtccccaatatgaaggggcttcccggcgatcgcctggcttcttctctcgatcaggctccccacgcgaagtggcctcccagaagctgcctgggccttagagtacgtcttttcctgagccttccagtagagatagtcctggtacttcttctcggcagtggcgataatctcatcccggaaggtcttctccgcggtgggcaccctcacgttgggacagataacccgagaaaggttagagtcctccacggattggtgcggcaggatgagttttgccttcctgcagttctccgtaataaccaggcccccgacgtcaagatcagcccggtca

SEQ ID NO: 278047 - DNA, 573 bp, Cannabis indica
tgtccgtcatcaactttctggttttcgaggcttcctctcggaacctctttatatagttctttaaggtctctgtatgcaactgcttgatattagtcaaggcgctgacctccaggttgacctttcttgcggcgacaaactgtctctggaagttggtctgtaacttgttccaacagcccacggatcctggttctagtttcttgaaccattcctccacggacccgcttagagtaagcgggaagcacagacatttggcgtcattgctgactctcatgaccgtcatgacacggttgaactgcaacagatagtcgcttgggtcggagttcccggtataagctgccatttcgggcatcttaaagttcttggggagctctgcttccaggatgtgcttggcacatggctcccggtcttcacagtctgagtctgagtcatcgcctttctgtctctgggagactcgggcgatatctttttggagtatggcgagctctgccatgattccttcatttaacgttcccgtggagaccgcgggtccgtatttcttttggtcaaggtgatcccggaggtcaccttgattcc

SEQ ID NO: 278048 - DNA, 772 bp, Cannabis indica
tatagttaattctattttacaaatacatacattatgtcacaattaatacattaaatataaatatatcacaggctcaattggtactaaggcggattaggtcatacttaaaatctagcaaattctgaactcaaaaacccaacatacatatacgacccatatattttaaaaaaattatactacaaaaataataaaatgattaattatttttgaagaaattacattgtatacttactttatcttatttgttttaattttcactttcatttttatattttttaagatatatcaacttttataaataatgtccccattaaaccccttaaattaatgtaaattatatgatagacttaagtagagaataagtgtatattgtatgtttactaatattagtagattgtgtaactttgtagcccataatgtggtcaaataggcatttgctcatcaaaggtttggtgttattacgttatctgccattcctacaaacttattatgtaacgaccgtgaggtctaattacttttatctatcataagtacgcttttttttttctttaaaaaaaaaaaactcattcataaaaatgagtatatttttataaaatataatataaaattatttttgattaatagatacaaaaaaggggtgttcctcaacttatcatatatatatatatatatataatttattaagtagtttggcctaatttaattattaaaataggcccactcttcttaaagtccgaaattacccctttcactttcccaactctctctctct

SEQ ID NO: 278049 - DNA, 592 bp, Cannabis indica
tatatgtcgttggactcgattttgaatgtagaatgcgataatgataattatttaaccatttggtggtataggtgagagtaatacgtaagattggactaaacaattggagctcgggacttaagagcttaagatcgtcttttggaaaaagtttaacgactcgggagaggtagggactcaacttgattattggacttgatttttatatgtgttgtctaacattggacatattccaatttttatgatttacaaattgtttgaaaaattgaaaacttaatctacatatttttctggactgttctggggcactgagtgccaaatatatttttgtgtgcaaatatttatgtaggttatgatttttgggtttatttaaaatacagctgttatgctgtcgaattttttttagaaaataaaaaggaatatgttcttttgttattcttattatttgcttgctttggttatactgatgagatttcttttgttattcttattatttgcctgctttggttatactgatgagagccatgttgatcatgttcggtgcatattgttgtttcacaacctagtctctgtgtcatcataggtagatcaggtg

SEQ ID NO: 278050 - DNA, 525 bp, Cannabis indica
tacttagatatttttcatacataaaaaaaaaaatcctaagtataggggggtatatatgccagaatgtactattgattatataaaggaaattgattcatgattgttaaattttcaaaattttatcaaaagacttgtaaatatttctacttattacaccaagctgtaattaaagtcgcagatatatatattgaaaacgcgagtacccgtgtactgcgaaaatgttaaaggataattatccccgcgaggatataaatttgtccaaagtaaaaagcaaatttgtctaagtacaaagcgcgagtacccctgtaccgcataaaaaagtaaaattaaaaagcataacagttttaacatagaggaaaatcaagcatctggaacaacaggagcagtctcatccgcgactttgctgacgacctcgttctcggcttcctcagcatccgcaccctcgacctcttcaggaaggttccctccaccaccttgggtttgagtgggcgacatagcgcgaaaagcctcggccatctcagcggc

SEQ ID NO: 278051 - DNA, 596 bp, Cannabis indica
atagtcttaagtaaataatcagtataggaatgtatgtttaagagatttggaagttttagaggtacaattaagaagttaagatatgttttggcgaactaaaaagaagcgcaagatacagggcatgaatatggctggaataatcaatggtatgataagtatgaagttatgtgatacctcagatagttagtattacagaagaagtgatcattgagcataactacaaatttatcaagattacagatttgaccactatcgtaaagtatcacaaaagtagacaaaagttattgtgtaaaactagctaatctcataattaagtcgacttgattggaagagtattggaggacaggaaccagaggagagattagcaaagaagatacaatagagtggtacaagaatcaagagactgaaaaaaaaagaatcaaagactatactatacgagaaatagaaggaaggacaagtgcaatgaacatacgactaaatgaaactaaaaagcaagctcatactgagtggtggctgaatggatcattaaaattatataaggaattataaagggcctgagtgctatttccaatgttatgagaacaagtatctataac

SEQ ID NO: 278052 - DNA, 712 bp, Cannabis indica
tcgaactcttctttgatttttggaaggctaatcctcaggccaatttcgactacttgggcgatgctaaggacatgtaccttgagttctgcacgtcccaagtggcctatggcgaaactgaggcggctgcttcaacctctagtcaggctattgatgcacctcctgttcaaataacagatcctcctgctccagttggcctacaagaactgaaccaagagcctgggactccagctgcttaaacacctctctttttatctctttatttgatatatcttattcggcctcacgaccttttctaagacatcatgactggccaagcggtctttaaacttggaattatttttcattttttggacaacaggctaacccggtagcttttaatcccagtattacgtgcttttgttatccctaatgaatttcattctctgtttataattgtcatgcaatcgtgattgttttatttttaccaaatgctttgtacaggtataggtgccccccaagtgaccaagcagacgtatgactcttggtcagttatcttttataaatatattgtttatctattcggtgttttgggtttgaccaaaccttttgtacacattgtatggtaaattaaaaacatgctgataatttcgactcaattgaattttgaaataactatctttattcatttattgattgaaaagtgcatttgttaccgtagtaacttacatcagag

SEQ ID NO: 278053 - DNA, 376 bp, Cannabis indica
aatgggttttatttagggcacgaaacccaacaaactcccccttgcactaatataaaataaaaagtgcatttcaaataatatcaacaccttgatatccaaatcaagtgtagtttatagtatactctccgtaataggatctgacaggttgtattcaatacagcctttcctccaccattacatttccttaatcacaaaaatccttgatattgtaaaaatttgtctctatatgtctactcctctagggatactggattctttactttttggcaactaatcctgcgttaatcagaaagtaacactagtagttaataaatgttggaacaaatgcaaaaaaatgttgtaatgaccgctctataatttggattagtaaaggcaa

SEQ ID NO: 278054 - DNA, 509 bp, Cannabis indica
atgacctaatcaaaatcttaagaaaagctagaactgttaaccatagtttgttagctattctaagtgattgggggtggaccatcccatagtcattagataagaaagtgtttgtttaaacaaataccatttttctaagaaaatgactgtctgaaaagtagcaaataaaggagatattttttcttgattccaaaagtgttctatcatcttattccatatgatgatcccactgcctctgttgtcttgacacaaccgaagaggtcaataccatttagttttcttagacataattcacggtaccttgtcgtagtgggagggtttctaggaactcaccttcttatgacttggaagacactagtgattaaaatccattgtgagtttaaacaagtaatggattgtcaagataagaaactaagaagaaaagccaatagaactatggtttgatccattcacatggagtaacctaaagttttctattacaaggacataaaaggaaattttcgttaataagt

SEQ ID NO: 278055 - DNA, 944 bp, Cannabis indica
agaccagtaggcaactgtccaaataagaaaaaagagcggacctgtttgatgacgtcattacccacaattgcccaacacttttgataaaaacctggagtcatgccatcgggtccaggggatttatctgggtgcatctgaaatagagcatctttcacctcctcatcagtcaaaggttgcaagagagagtcattctgagttgaagtcacagtagcagaaatcccatcaagaacatcatccatagtacagttggaactagtaaacagattctggaagtaagaacacatgacatctgatagacccgattcccagtcaacccaacttccatcttcgcattggagtttatcaatagcattcatacggcgccgagaagaagccgttgcatggaaaaatttgctatttttatccccctcctgaagccacaattgtttcgatcgttgacgccaaaacacctccttctgagtaagaacttcaaaaagttctgtctcagcttccttatatttagaaatagcatcaggatctctaccttgcttccaccgcctcacctccttcttccaatattttatacgagaagcaaaattacccgaataatctttgccccaaaccgaaagagattccccacaccgttgtattttctcttggatacccgctagattatactcctcccaacactcctttaccacctgataacacagaggttcccgaagccagcaattttcaaagcgaaatttgcgactcccggaagctatattatgccgaaccaagtcaaggaaaatgggacaatgatcagaagaagatacctcgagattaataagtttagcccgtgggaacagttggagccatctgtctgtcaccagagcacgatctaaacggacctctatccaattatcggttccccgacttttctcccaagtgaactgatgtcccacaatgtctaaatcaattaa

SEQ ID NO: 278056 - DNA, 623 bp, Cannabis indica
gctttgtcaatccctccagccgcaggagacggggttgctgcaactgcggggctcgcaactactgcggcaagatttgctgggacattaatctcagtggtcgcgatcggcgcggtaggcgggttattataagtgttggcaccctgatcgtccgcatggggatcacggagtgtctcagtattatgtgggacgcgagagcgtgccctgaaaactgcgttgagatgatcacgcaaatcacctcggtgtacctgataacgtcctccctgttgtgtctgtacagagccggaccttgtgtacctgcttagagtgcgaccatgcgacgacgaagaggctgattctgcgtcgttgtctcttgatggtcggctgcgaggattacggcgctcaggatcttcgtttcctgcgtacacggttagtgtgacgtctagaagttgttacctgagggttatcggtgcgaatagcaggaactcgaggagggcgtcgggctcggttttgtccatctacttcggcctgtagtgcgcgcagttgatcctgaatcgcaacatattgatcagtggtgagctggatcattccctcggataccaccgctggagtgacggggggaaaatgcatggttgctggtggcgtgg

SEQ ID NO: 278057 - DNA, 376 bp, Cannabis indica
tcttctttacccttttagaaaaaaaaacaagaagcaagcagtctatttattctttttagtttatttgttagttgtatttattattttgttattatattagggtgttagctttttttttttactattattttattttgtatacttttttttattttagtattagccttttttttaggttagttgtagacttttatcctttaggctaaaaaaaaaagttgtgcataaaatattttcataaactttttagtgtaaaacccaactgtgtaatgataaaagtggtacaaactgagattattctgtctaagaaagattgactttaaatgtttgtggtagagtactctctacactttctagcaatcccagggagttctactaa

SEQ ID NO: 278058 - DNA, 703 bp, Cannabis indica
tcggttactttttgaggtcaaacaacatccaatccgcacaggtgcggatttcaaatttttcaatccaatccaatccgcacaagtgcggatatccgcattttgcggattggattggattggatcgtgcggattggattggatcggatactttgtgaacacccctatgacatatcacaatgagctcgaaaatacgccattactctatattcggtagagatgaataaaaataggagaaaaagaaaatattggggggaaataaaatgtaaataaaatgagataaaatactttttattaagttttttggtattgagttaaaaattaattagaaagaaagaaaaattatatgtttatgttgtttactattttatccatagtattaattttatttattttaaataaaaaatattataatcttacttcaataaaaaaaaataattcatgttcacttttttctcttatttaggtagaaaaatatttttttggtgtagacccacaaaatattttttctttatttttcatttccctttcttttgtcctttactaaataatctcaaatattacgtctatctgtttttcctctatttttatttttcttcccgttcttccttctctacctaaaaccatagcgttaaaattagaaaattaatctaaaagtatcatacatcaaaaaagcgtgataatatataatagtaataaaaagctt

SEQ ID NO: 278059 - DNA, 914 bp, Cannabis indica
gatgcatgggaaagattcaaggagttgttgaggaagtgcccacaccatggtattcctcattgtatccaacttgagacattttacaatggtctcaatgcggcttctaggatggtgttggacgcttccgctaatggagccattctttccaagtcttacaatgaagcttttgagattttggaaaggatagctagcaacaactatcaatggtcaactaatagagctcctacaagccgaaaagtagcgggtgttcttgaagtagatgctttgaccgctctaaccgctcaaatggcctcaatgaccaacattttgaagaatatgaatatgggaggaagtgtacaaccagccgctgccattcaaagggcagaaatctcttgtgtgtattgtggtgatgggcatacttttgaaaattgcccctcaaatccagcttcggtttgctatgtgggtaatcaaaacttcaaccgcaacaacaatccatactcaaactcctacaatccggcatggaagcatcatccgaacttttcatggggaggtcaaggggcaagttcaagtggagcacaagcacaaggaaagcaatcattcccaccgggtttttctcaacaaccaagacctcaacaacctcaccaacctcaaggctctcaaactagttctttggagagcttaatgagagattatatggccaagaatgacgctgtaattcaaagccaagcagcatctcttcggaatcttgaagttcaattggggcaattggccaatgatttgaagaatagaccacaaggcactttgcctagtgacaccgaaaacccaagaagagatggcaaagaacattgcaaagcggtaaccttgagaagtggaaaaataattgagtcaaatgtggctgcaacaggcagtaaagagccctcttcaatccaaaaaga

SEQ ID NO: 278060 - DNA, 829 bp, Cannabis indica
gtgcagtaaaatcgcagaaggtggctttacacgataaaggaaacagaaagaaaagatcctattctatgccctaagcaaccattgaacgaagagcgtatggtcttctacaatgaaaatacacaataacaacagaggcatgataatggcgatcctacaactaaagcagtaaattcaaaacagactacatgaagaacttaaacacttgcatgcccagaaatctcgaatgcaaacccagaaaagaacaaacagaacgagtaatagcatgccattcaataataccaaaggatgcaaaaaacttacaatgaagtgttgaactgggggtcctgatgcgagtcgagtgaagacgagaaggactggtagcagcgagcaaggaagaactgggaaaatcgcaaagtgttcaaaggcttcgtgctgggtctgagaattttctctctaggaaattcgagcaaagttggcaagaaatgggaagtaaccgaaatgaaggaaagatggtggcttttataggcaaaaatgcatgaggaacaggcgtcaccacctaccaatcgaacggtgggggaaacgcacgattcaaatacccaaagatcaacgggccagattaatttacaataaaggcggtggaaacgtttgagtatccgtctgacaccattaatgcgccgtatcaatcaatgggcgtgaaacgaatcgacctctgcaaaaagtgaatcgctgcattaaatgccatcattaaatacaccctcacgcgctctaagctcgtgccaggaagtgccaggaaaccgaggagtcaaccggaggcacctgagcaagccttgtttcattttcaaataacaag

SEQ ID NO: 278061 - DNA, 623 bp, Cannabis indica
gtacttctttcatctgtgtaaacctagtaacatgatagggcccatccaaatcatttgacctgtgtgagcctatatgtttgcttttgggcttagatgcatataggaagcccatttaagttttaactaataaatggactaggttgctaaaataaaatttcacataagtaattttatttaggcccaattagaattgggcttattcaatgaataacaattgtttatttaagggaaatttacacccattactgctttttccatatttttttcgtttgtactgttacacggagaatttaacttttatactgttttttatttttaattctttttggcagtatactgcctttggtaagttttatatatatgtgatttattgctttacaagtgtcatgctggggttgtgccacgtttttttttaaaacgcaaatcattttaaaaattttgatttgacggttttctctacttaccaaagcagttgtacttttccatttttttattttatttttattttttttcgaatataaaaaacgttttaataccccactcgccctcacactgttcatcttctcactcttttcgtttttctttcagtttcgagtagtgggtggtttcatccatttcaaaaa

SEQ ID NO: 278062 - DNA, 972 bp, Cannabis indica
gctatttctccagagtactttgatcagagctatggtcttgttccgaagaaccttatcctttctgtcaaggatctgaactggttgttcttcataagacatgtctggttgcagttcaagattctcatagctaagtacatgagtagggtctgaaatgtattttctcaacatcgagacatggaatacgttgtgaattgttgaaagagctagaggcaaagctaatccatatgccacttttccaaccttctcgagaatctcaaaaggtccagtaaacctagggcataatttgcctatcttctcgaaacgcttgatccccttcataggagacacccgtagaaacacacgatcccctacttaaaattctacatctctacgtttcggatctgcataacttttttttttgccttctttgagaagtaagcattctggctttaatcttctcaattacttcattggtccgttgtactgattctagacctaagtatttcctctcccctgtctcatccaagtggatgggagatctacattttcggccatataatagttcatagggagccatccctatagtactctgataactattattgttcgaaaattctatcaacggtagatacttactccaggagccttcgaaatccataacacaggctcgtaacatatgttccagtatctgaatcgtcctttcggactgtccatctgtctgaggatggaaagatgtactgaacttcagtttggtacccatagcccgttgtaaactttgccaaaattttgaagtaaacttcggatctctatctgaaactatggattttggcacaccatgcagtcttacaatctcttttacgtatagatctgcatactgatccactgagaaggttgttttaactggtagaaaaatgagcagacttcgtaaatcaatccaccacaaccgaaatagaatcaaacaaaacccgtggttctaggtaacccaaccataaa

SEQ ID NO: 278063 - DNA, 1335 bp, Cannabis indica
atgcatattttgtcttccattactgtcgacttcagacacagtggagactccatcatcctcagattcaacagactgatgactttgagccatgaaagccactacctgtttatcctcattagaacttttgcttgcaatagagtctttttcttcgtcactatcgctccaggtggcaacaagggctttcttctttttgagagtgttagcacactcggcctgaatgtgtccgaacccatcacattctctacactgaatgcccatgctcttattgtcactgggttgctgaccatgccagaagttcccaagaggatttcttttggaagcattttccttaccttcagaacacagtttcttgtacttctttttcaagaattttgcatagttcttggtcagcaaatctacagcttcatctgagaaaccagcagacaaatctgggatagacttattttcttctttgtgaatgaacgcaatattgttgtcccctttttctttgttcacatccatcttctttttttctttcttccaccttgttaatgacatttcataattctgcaaggatccaatcagttcatcaagatccagttcctccacgtttctcatttcttcaatggaggttactttagacataaatctcctaggtagaactccaaggactttacgaaccagctttgcattagaataagtctttcccaaagcataagattcatttgatatgtcacacaatttagcatggaactcagccaccgtttcttcttcctccattgataaatcttcaaacgcttttgccaaagcacgaagacgggatttctttacagcatccgttccttcatttttaattcgtagtttttcccaagcctctttggccatctcacagtttgcaatgaccttcaattgatttgtggacactgcattgaacaaagcatgcatggccttcgaattaaaattggccctctccatctcatctggagtccacaagctcgtaggttttggtttggtgacaccgttatccatcatcgttgggcatgtccaaccatcttctatggccatccaaactctttcattcaccgccctcaagaatgctcgcattttggttttccagtatgggtaattagcaccttccagcattgggggtcgtgatgtggaccctccttctctgaacatctccattcctgtactaacaaggaaaaacaaaacaaagatagagagcagtatactcccagagtcgtgtctggagagggggttagttccaactgggtgttgcagaaagaaaaaatgcagaaaaatcaagaattgcagcaacaataaattcagaataacgaatcttgcaagacctaagga

SEQ ID NO: 278064 - DNA, 425 bp, Cannabis indica
accctttgatgtaactaaacctaagtcatcaaaagacacaaccacattcttatataaagctatggcatttgtatcttgttcacagttgttttgacaagatccttctctacaaagagtcaatatgcctatatccactgaaagtgtaatcatctcattcgcaaatggatgtaaattcatgggtggctatgagtttttcgttatattcttaagatgatcactctagattttaccttaagcacaaaaatttgaaatgtatgaaaaatttcatgaatttctagcaatggtgaaaaaccattaaggtaagtggttaaagatcttgcgaactgatagggatggagaaatttttggtacatatacagttcaaagatcattaagttgatttttttgaattatatccaaacttacctccccagaaattcgatttg

SEQ ID NO: 278065 - DNA, 640 bp, Cannabis indica
acgttcgggaccgatataactgtggctctgataccaaactgtaacgcccgtacttttataaaaatattaattttatttacaagcgttaaacgcggaaaatcataatgtcgcatttttatttaatacttgaaaatgttcacaactggccagttttcgtacaaaagacataataaataataactaaaataattgcgacataaatttaatagcgtaaataaataaatagagcgccctagaccgcccgcagttatatggtcctcagcgagttcacacacacaagcgtttaaagttccactcgccaccggcattctagactttcagttaccttggtctgcacatggtaatttgataagggtgagctactaaactcagtaaggaaatgtgtgtcaggtagtcacataaataaaagaaaacacacaactaaaatgcacatatctagcaatacataaacttatttttgatcactagtaactaataactagtttctaagctaaatcacataataatgattacgcccgagtctgactttggcaaataaaatcgagctattggactaaatggcggagggctgggttcagtaaaatcgtacccactactaaatggccccctatctaccatatagacccaacagtcaagtatt

SEQ ID NO: 278066 - DNA, 492 bp, Cannabis indica
tttaagaaaaaaaaaaacttaaattaaaataaaaatatataatgataaattaaagttaaaatatataataataaataaataaatatgaataatttgaagcaaaaaaataaataaattataaaataaaataaaataatatatcctatataattaagtatatatcataaatatataataaaatattttattatatttttatttaataaataattaaaatagtaaaataaaaatacttgaataatataaaattatttatcttaaacattaacttaaccactaatttaatataaatattaatttttaaaatatttatataaatttaatagtaatttaaaaataatatataattttattgtcttattgtttttcttcgaattaatttaagtaactattatttaattaataaaattctaaattttgaaaacttatgtataataattcaaaattatacattttcactaattttaatgaataagttcttgataaaaaaat

SEQ ID NO: 278067 - DNA, 983 bp, Cannabis indica
agtatcttgtaactcggtgttgatacgctgtgttggttatttagaactcagctcattttccatcaagtagatccaaggacaattttagaagtttctggttctcttcttgattataaaactctcttatgtgagtcgatatgttcacttcaacatgcagcattacttctgagccaaatgctagcgacaaaggagtgtgtcccgtagctgtcttcttgatagttctgtgggcccagagcacctgaggtagctcgtcaacccatctgcgtgcctttggcagcgtctagcttcttcttgatagtatcctttagggttttattaacggcttccacttgtccattttcctgaggcctggatactgacgagaagcttttgataattttattcctctcgcaaaattttgtgaacaagtcgccatcaaatttggtcccattatcggatactatcttcatgggaattctaaacctacatataatgttcttgacgacaaagtcaaggactttcttgtaggttatggagacgaggggctcggccttcgtccatttagtgaagaagtcaactgctaccaccgcatacttagctcctcctcgcccactgggtaatgccccaattaggttgatcccccatatagcaaatgggtagggtgaggttatcattctaagtcctattggcagtacgcgaggtatatgtgaaaacctttgacacttatcacatttcttaacaaactcaagtgtgtccttattgatcgttggctagtaatatccttgcctaatgatctttttttgcatgatccccacagaagcctttatgaatttctctaatgattttgtttgcttctgcgggaggaacacaccgaagtaggggcattggataccctcttctatatagtttgccttcgatcattgtgtagcgaagcactgtatcaaggcttcatattcgacctcgttatttgatgcgtcaaattggaatctcaatgcatagtgaaa

SEQ ID NO: 278068 - DNA, 593 bp, Cannabis indica
tcaaatttaaaatttgcagaaagagaagaggagaatggagattagcttgaaatatatttaaaaaataataatgctacacacttactatggatacttaactcgagccggtaataataaaattataaagaataggggtagcaggcatataactggacatatgaaagaaagaatataaaaaacaagaaatatgatagcttccaaataatattataacaaagcaatgctctccaaatttatcttaatatcatctataacatcataaccttatatttagatttgggccaactttcttctcagttgggcttccagctttcttcacaatgcaagttgccacttctgactttttttttttgaaacttgaactgcagccatcgtaatctcattcttctcttgaagcctctcatcaatctcatagcactccatgatagactcaacaaaatatatgtgtttatgtatatttgttttgagcaaatcagtaaacatatattttcaacaaattaacccgataaactcaagatccacatatattcaaatacaattgtaaaatctaaacttaaaacaaaatcaaatggacaattcatgctcaactaaag

SEQ ID NO: 278069 - DNA, 521 bp, Cannabis indica
atttagatgaaaaacaagaagcaaagttgttagatatccttagaaaacataaaaaggccataggttggaccatgggagacattaagggaattagcccagctgtgtgcatgcatagaattcatttagaagaaaatgctaagccctcccgagaaagtcaaagaagattaaatccaaacatgaaagaggtagtaagagatgatgtaattaaaatgttagatgtagggatcatttaccctatttctgacagtccatgggttagtccagttcaagttgttccaaaaaagtctgggatcactgttgttaaaaatgaacaaaatgagttaatccctactagagtccaaactgggtggagagtgtgtatagactatagaaagttgaatagtgtcactaggaaagaccacttcccattacccttcattgaccaaatgcttgaaaggttagctggccatgcttattattgctttcttgatgggtattcgggatataaccaaatccccattgcccccgaagatcaagaaaag

SEQ ID NO: 278070 - DNA, 502 bp, Cannabis indica
ctttttcctcttgttttcggccccctttgagcagcaagaaaagtggttttttctcttgtgattcaagtggtttccatcaagtttagagtgattctagtagaggtaactttgtctagcttctcttcttttgttttcttgaattttggacgaaaaatggagtaatgcatgcttagtttaggttattgttgttgctgtgattttgttgttgtttgcagaggtttaagcatgattatttgaggataattaagctgcttgtgatgcatgatagttaggttgattagagttatggaatttttagttcaaaagcttaagttttcaaagagaaaattggaaatttgttgctgtgtttgttgcatgagcttgtgtttgttttctgcagctttagtaagcatgtttaagtagttttggtctgatttgaatgcatgatatgttgcttagtcaagttttgagttttagaactcaatcttgaacctttaatggtgaaatgagtttctgtggttga

SEQ ID NO: 278071 - DNA, 893 bp, Cannabis indica
ttctagtacatcatgaggtcttttttttcttggtgtgtccggtgatgcgatttttttcgaaccctctgaacaacaaacccacctccgcattacaatgaccccatgagaacgtcgtacatcgtctttccttgtgccgaaacccatccgtttcgcatacatttcgtagaatgcttcccatttttccagtttgtcgagactcttgcctagcacgtcctgtatctcaatctcattcactggttttatgatgtttagctctgctgtgatggtttcccattcataagtgtgttcgtcattcatgttggcttgttattgatttgtaagaattgtagatgaggagtaaggtgtagagggtgctgaggggattgaaattagattttgtgagtatagaaggctgagataatagggttgtgtggagttggtgatcacatttaaagctgttgggctgatattaatgggcctcttcaatattacaatctgaactcaactcctctcgtacgtcataacagtataatagtacaaattgttttaatttcattccacatgtaattgtgaaataaggttatttgacgaaaaatttgaagggttgatgttattgagttgaaaggtttggtggtgggatttaaatagattggggttatgttaatgggccttcacctaagtttttcaatgagttgaaccatattcgtacgtccgaaataaaacattgtacttttattgtttttggaaaaaaatatgttaagaaaagaagaaaattttaataaatggttagttgttcacatttaaatccattgggcttatattaatgggcctataccaacatcttttaatgaattcaaccattcctgtactttacaaagataacgcagtactattatgaaaaccccatgcgtgta

SEQ ID NO: 278072 - DNA, 581 bp, Cannabis indica
agctcccggactattgttacatacgcggccattcactcgccgcgtgtttggtactctctcgatatctgatttacgaccagctgggaatcactgtagacttccactcttttggctcctacgacttttgctaatttcagccctgctattaaggcttcatattcggcctcagtgttcgaagctcggaagtcgaaccgtaggggcgcctggagtcgtagtccggtcggggatatcattgccactcctgctccggacccattttcattggaggctccgtccacaaacactatccatgtggggaccgatggtactggcatatttgcggttgcctcggctttgttgcattcggtaatgaagtctgctaaggcttggccttttatggagattcggggaatgtagtgcaagtcgaattgactcaactccattgcccacttgaggagccttctggatgcttcaggtttttggaggacttgccggagcgtgtggttggttagcaccttgatcggatgtgcttggaagtatggcctcaattttctcgaggccattaggaggcaaaagaccaacttttcgatgatggggtacct

SEQ ID NO: 278073 - DNA, 418 bp, Cannabis indica
tgttgaatttggattcttcacgatcttccacactatgattgaggtacaacttgttgtgtgtgggcactactctatcactaagggatttcgaaacaatcaaagaagaaggaagaagaagaggtggcggctaggtttagaaagatggctcaggattttctctgaaaggaataagatgcattgttactttcctgaagccatcactttctatttatagaataccacatagggttaggtttgaattacttggcattaaaataatgaaaatattaaatgataaaccctatgcaagtggccggccatggcttgtggatatgggcctcacttttgcaattttgctgttttatcatttctgcatcccattttctcaaaaacgccaattttcaaattcaaccatctaaatgtcaatttcaactattta

SEQ ID NO: 278074 - DNA, 761 bp, Cannabis indica
ggcagtggcaggagattgatctccgcacgagaaaggagttccgcgtgctcggtctagctcaagatcattatttatttgtccagccatgccgtgaaaaatctttttttcagttcgtctagctgagcatgtacggcggggctgacctgctcggcattctggtcaatttggattacgtcagcatctttctgagcggggatttgagtacgggctccgggctgcacgattgtcgtaacattctgatcatctgctcccctccttctgtttagatcattccttaggtcatgggttgtccctaacctttcgaacacagaagcgcctggctaccttagcggttgattcgcttggttgacgggtggaatggcaccattgatctggttggaaccatcaggtatgactcctcctgatgaattaccagacaaggtctgctcacctactcgctgggcccacgagtggaactcatgacggggattgggcaactgaccatttgcagtctgggaagtgttcatcgttggatcctcatccgtctttcccaggggaatgacattcggtgattgccaacctacagtttggtaagctcttcgtatcagcacggtagcttgccgactacgatcttcaatctctgcatggtgagcacttaatgcctccatctctctatctctccattcgacgaacatcgcctttattcgtcaaacacgagatttacttctgcgcgtagttcgtcttgatcatgatgtagggtattattatgaccctacatgagt

SEQ ID NO: 278075 - DNA, 569 bp, Cannabis indica
ttggtaaggtttctaaacctttcccttttgtaatttatggaaaatgtttaaaaaagatgattgttgcatgttgatttgttgtgatgcttgctgctgtgatttgttgtggttttcagaggattaatcttgttatttttagtagattagagctagtttaatgcatgatatttgctttgattcaagcttggaagtttttagctcaaaactatggttttcaaagagaaatggttaaaatctgttgctgtggttttgttgatgtttgtagtagttttcagagattatattatgcatgattaagtagatttgggctgaattgaatgcatgttagtggtgtttgatcaagtttgagtttagaactcaaagcttgatgctttaatggtggttttggtttggttgcatgaagcttggtttttatgctctagaattgttccttagggtctaaatagcaggtctggaagttgtggtatagtttggaatggatttgagctatgtgtgaatttttgagttctgcctgcgaggaaccggaattccggttgtgcatccggaattccggatgggttttgaaaatt

SEQ ID NO: 278076 - DNA, 848 bp, Cannabis indica
aacagacttaactgtcttcaacaatatgcaaccactcattccatcactcttctttatttactaatctctctcttctaccaaatatagtgcaagcaatgaaatataattagtattattttgcttgtttgttgttatgagatgatttatcataagtgtgtacaaaaatgtgaataggcaaatgtggtttaattatatgaaacaaattgtaccacttgtcaaagaagatcaaatagaatcatatatatatatagaagagaagcaaggttttgtgcccaaagcatatttgtccaagtctcgtaagaggtttttgctatactttgcttcttatgttgtgttacattgatagacttatgacatatgtcacatgaagaaagttacaaggaatattgtgctttagagaagttaagaaggttacaatattataatttgggatatatatatatgttatgattgtggataagataagagaatggagtgagtgtagtttttgtgaggtgtgtatattcgaaacattatctattatgtctgttttttatgctggtatgggtacatgtcatggcaaattgtataaattatgagttgaataaaaccaaccgagctagtttttgtctttttgtagaactgacttcgaaggtaaaaacaaaaggaaaaaaacaacagaattaaaaaaggtgtgtagagtagagtacggtacaaacattttctacatgtgactaaggaagtctaatatgacttaaccacttggggctagctcaagtggccataggtgggtgtgtgagtgttggaggttctgggttcgagtcccaggtaaaacatgatgtaatatataaacgcttgaatcaaaaaaa

SEQ ID NO: 278077 - DNA, 734 bp, Cannabis indica
gtacatttatgaaaaaagctcaataatatttcagtaaactaatataaaaactgaaatgagatctcaatcatttatctctattcagccaacctcgaaggaaattattattttacttctaaatacttatagaagttatagattccatatttataatcagcgattccactcaattgaactaccatgttcccaagatgtaaatattcgccaaaactattggttagcttccacgaacaacttgaagaacataaataatacaactaagctgaacctaatcatatcatgattaagatctatagacctaagatcaaccagtgatattgacttagaaagataaaacagtaagtttatgatatcttatcaaagatcaatatcggtcccttctaatgtatactctatacatccaatactggtaaactttgtcaatgccctagaaaggacataaaactttatacattatcgccgattattatgttagtctaaatccagtaaactgataaatcatgggaattaaacttttgaacatataatcataattatattccactgtgctgatgacactataatcatgaattaatatatatttatatatgttcttgacttaatagaatttatacattaaacataattatgaaataaatcatgtgaatcatgcaatataaaagcgatttctgatcttatattaattagtaaatctgatcatattgaaatgagttttattaaggacacaaaaccca

SEQ ID NO: 278078 - DNA, 722 bp, Cannabis indica
catacatactactctcaatttttgaattttgaagcctaatatagttactaatttgagattatatcgtttttttttttttttttttgctgaaagttagggattatatcttggttccaagttttttctatgtcgattccgatgtgttcaatatagtttttatttgatttctatattttttatttctgtgatgttgcttgtgcaagttcaacgactgttttttcgttgttcgttttgtgtgtgaaaatagtgtgtggtggtgcttaataaggtgaaaatttttattattaaatcagtgtcaagaaaattttcggatctcccgaaaacagcaagtgtgaacttaaaatttcaacaaaagaaaaaaaaaacaagtgtgaacttgaaatgtttgacagagagattttttaacttctttaacatattgaaaggatttgtctttacatgtctcttgaacaaatatattgatattgtctttatttttcctcaaggaaagacaaacaaataaaaaaaaatattacaatctcaatactagtttcattaatctttatatgcctctcttgtggcacgacataactgtttttctaaagaatcacattgcatattttcttgtccatagttttcgatattagtgtattgtctttacttagttttaattgaataaatatatttatattgtctttagttcacctaaaaaaatagaagaaaaaaatagtgaagtaccactg

SEQ ID NO: 278079 - DNA, 1245 bp, Cannabis indica
tatcaatgatatatatactatatatatgttaagaataaaaatagaaattatgtatatctatatcgggatcagatattgtgcggatagtattatctctgtccccgtttttggtattgaaattgtctcccaccaccgccccattaaccaccaagacggggaattcccaccccattaggggcgggtccccgcagtataaatttccatctctaattgaaagggactgatattgaacttgtactatatatgataaacttacagtaatatctgttcaattcaatatcacctagttgatcctagataaagtgatattaattctgagatggttaggttctagttctgctgcattatttgtgttcttaaatctattcgttaaagtcaaccaaatggttcttctcgtgacacataggttaaggacatggtagttcaattgagtgggagcactaatcataggatacggaatctatagcttctatccggatatagaagtcaaacgatgatttcctttgagcttggcttaatagagaaaaaatggttgagtactcatttcagtgattatattagataattgaaatatcatttatacggagttaagtgttttaaggataaaatacattgaaggtgttacggtaatctagtccctttacagtgtagatcatctatatagaggatcattgatcacattaggattataacaatggataactaatgacgtgtctatatcgtggaacatatagagcgttctatatactgagagtgcaattctaagttctatgcgtggattcaacgaagaattaataagtcagtgaatttaagatataaattcttgatctgcttattggaagctcggatatatagacccatggtccccatactagttgagaccatactgcttgtaagactcagttaattgattttgattaatcaattataattctaaagttagactatgtctactttatgaattttcactaagcaagggcgaaattgtaaagaaaagagattctaggtttatttattaattaagagactttatatgtctaattaataaatatattaaatgacaatattatttaataattaatttttagttattaaataattagaattggcatttaaatggttgaatttgaaaattggcgtttttgagaaaatgagatgcagaaatgataaaacagcaaaattgcataagtgaggcccattatccaagcccatggccggccacacttatagggttttatcatttat

SEQ ID NO: 278080 - DNA, 543 bp, Cannabis indica
gacagcaaggagacagctgaaattctcgggagccttccggtacaagatcgcgactggcgattattgtgtacaactgcgaagttgcgagaacatcagctgattcccgagaacgcaagtcttcaacgggagccagtatacaaagaaccatccgagaagcagcaagagcgaatagacaagcgtctttctaagcaaactcctcgacaaatttcaggtaactcgtcttttgttataaactgacgggtaggattgtgatttatacttatctttcattcatgttcgcagatatgacttttctgaagtctgcccctgtcctgaagatcaaaccaaagggtggaacagcgacgacttcgccggtcgttgcccagaagaggaagagcgatgtgatggcttcgcttgtcgcagactcttccaagaagctggccaagaccactcaggacaaggggaagaaagtcgtcattgaccctcctgttcgcgctcgcgacttctggccatgcaggaaaagttcctggctgagatcccttacgaggatctcgttactcgatc

SEQ ID NO: 278081 - DNA, 589 bp, Cannabis indica
aaatctcaattttcgcactcactgaaacactaccaaaacttatccaaatcactccaaacttcacagggcacatatataccatgaatactactattcttacgcaacagaaattaaaatcaagcccttaaatggaaaacgccattaacgctcggactaagctttaaaaagttgcaaactcgatttctaacccaaaatcacctcaatttcagcaagaaaacatcggaactagtcccatgactacctgagaacaatcttataaggtcagaaccttcataactactctaattcacaaaacccctatacgaaaccaattgttattaaacttaaaacgaaattaaaccttagcttaagcttctcagctctgagaattcgctatcctgctactaccggagcttagatggctaagttttggattgaaaatcaaagaaaacagatataaagggagaaaaattagttgaaaggggacgaacgagggttcgttctctgattaagttatatatataacttaatatatagataacgtattctactttacttttttacgtttataataatataataatatattaataatataatattaataaaa

SEQ ID NO: 278082 - DNA, 505 bp, Cannabis indica
ttcgaggagcagctcaaacggagacgtagccaaattttaattggtgtaacgttcgggaaattttcgtggttgttttcgtatccctaatcttttcctatttgtgtgtgtgggtgtgtacagatcagattcattgtagatctgatctgtgtatagtgtttggggcttgattttctgggtagattgaaacctagcttcgagtttctcagagagaaactctctgctagggtttcgaagtgaagacagagaaatagagaaagtggctgagaagattctcgagccttggggttttgttcaaacacaaaacgctgtcgttttgggttctctgactttgaaaagtcattgaacagggaaaggtcgaaattgaccttatacttgattggttttgtttgttggtgtagggggcaagatagtaaaatcctatctcaaaattcctacaacaatattttacacgtgtgaccttctttctcttttatttctcttactcattgtaaaatggcttaaaata

SEQ ID NO: 278083 - DNA, 548 bp, Cannabis indica
aaaatattcctatttcactactaattaatacctaaaagaaaaggtaaaaatcatgcatcaattagaagggttcaactaggtcttacttttccaagtaagatctagcttgctaaatgttaaaaatggccaagaattaacattcattcaacatttcatcacaactaattgaactaagtcaagattacttcatcattgcaaagtcaaaacactagtccatacaagggtttataaccacccaaatctcaaaaagtttagttcatagctgaaattagaaactcaaaaccagaaaatgtattgttcatgaagttaaagaaaagcttaaagagaagaaaatgatacaaaacgaagtggagagcaagagagatgagtgttgagctcaaatcctttctttgaatgttgccttcttctccttcttctcaatcttcttcttctttgtactctctttctctttttctgtacttagaaacttttgctgtgatttttcgtaccctccttcaagtgcagccagcctcttttaattcctcccctctttttctttttgcccccca

SEQ ID NO: 278084 - DNA, 543 bp, Cannabis indica
tcatcacgacccgctggtcatagagacccccatcgcaaataaagtggtggctagggtcttaattgacaatgggagttccgtgaacctgctcttcaaagaagccttcactgcgatagggttgaccgaccgggacctctcgcctagtgggtcacagctcacggggtttaacgggacgacgcttatcccgatgggaaaagtaaggctcccggttaccctgtgcccggataccccccagagcacatttaaatattgcaccttcgtggtggtagactgtccgacagcctacaacgcgatcctcggccgaccggccctagtggactttggtgcaatcacttcaatccgacacctgtgcctaaaattccctacccaggaagccggagtcggaactgtgaggggaaatcagggggaagccaggcaatgttacaatgttgccacccacctacccgtacttatggtccgggagtcccctgagatagagaaagctgaagaggatgagttggatcctcgtgtaggatccgaaagggtcgtggaaccaatggagga

SEQ ID NO: 278085 - DNA, 589 bp, Cannabis indica
tagactccaaatagaaattttatctttctgcttccagaatacaatacagttcaactttcacaagtgattaatatccattttctgtcaacggattcaaactgtatcttaatgtatggaatgtgagtttagtattctttgatcaggctctacttggactattctaagaactttaatgtaactagacctaagtcatcgaaagaccacaaccacatattttataaatctatggcatttgcatcttgttcatagtggttttaataagaccattctctacaaagagtcaatatgcctatatccactgaaagtaagatcatctatattcgaaatagatgtaaattcaggggtggatatgagttttcgttatattcttaagacggtcactctatattttaccttatgaaaagaaatttgaaatgtttgaaaaatttcatgaatttctagcaatggggaaaaaccattaaggtaagtggttaaagatcttgggaactgataggggtggaaaaatatttggtagatatgcagttcaaagatctgtaagttgttttttaaattatatccaaacttacctccccagaaattcgatttgcat

SEQ ID NO: 278086 - DNA, 683 bp, Cannabis indica
catgtttttgggtttttggttactgttcttgctgctggagtttaattatgttttcagtagttaaagtatgtttatttaagctgatttgagtaggttttgatagctagttagtaggatgagcaagctttgagtttttgaactcaagcttggctcatcaatggtggtttttgtatttgtacatgaagttgtgttttgttactttgaaatttatctttaggatgcttagaagaggtgtgggaggtttcatgtggattggggttgttttggttgagttatagaatttttggtcattcctgcactgaaccggaattccggttcagaggggcttgtaggaaccggaattccggttggctcctaggaatttttccaaaaccggaattccggttggggaaccggtctaccggttgggggcaattttgggaaccctagtttttccaatttttgtgtttatttagggtattgccatgttattcatcgatagggaaacttttagtttcaagtttaagtccccgaaaagtgatttagcgtgtcgcttacctatgttacgattgatgtgatttaggagcctgtaattcaccgagcagctgttccactaaggttgaccgacacacctgaattgggaatcgaggtaagattagtataatgtcatgcatatacttatgcatgtttagcgtacatgttag

SEQ ID NO: 278087 - DNA, 474 bp, Cannabis indica
cctggaactggaaagtggcacacaccactctgtcattaccggtgacacccataaagttcagaattttggtgatcaccgttagccactgctcggccttcatcacatctggacctcccagaaagaccggaggtgcttgcttccggaaccgttcatacaagggttccattcactttgccgctaccactacctcggcctgagcagcaggggcgggtgccactggaacttctggcaccggcactgcaggagcaccctgctgccgcaatctctgaatctcattatcttgctcctctattctggcttgcatttcagcaaacctaacttcccaattctgggcttcctgattgacttgggcagcctgtggcgagttgacatcaccccgaccacgagccctgcccctgggacctctacctcggcccataacacttgggggaaaaactgagctccttgaccttgatctgacccgactgagatgcc

SEQ ID NO: 278088 - DNA, 851 bp, Cannabis indica
tatttcacatgttaaatatcgatcctaacatccggccagttcaacaaaaacgaaggctgttggataaagaacgagcagtagccctgaaagatgaagttgaaaagctgcgcaacaacaacttcataattgaagctttttacccagcttgggtcgcgaatcccgtactcgtgcccaagccgaacaagaaatggcgagtctgtattgatttcacagacctcaacaaagcatgccctaaagactgttttccacttccaagaatcgatcagctcgtagacgcaacagcagggcacgaaattttaagcttcatggacgcttattcaggctacaatcaaatcaaaatgcatccaccagaccaagaacatacaagtttccgaacagatatgggtctctattgctacaaagtcatgtcgtttggtctaaaaaacgctggagctacgtaccaaagattggtaaacaaaatgtttaaagaccagatcgggcgaaatatggaagtgtacgtggatgacatgctcgtcaaatccagaaaggctgggggcacatagacgacctggacgaatgcttcaaagtcctcagaaaatacaacatgaaactaaatcccttaaagtgctcctttggagtcagctcgggaaagtttctaggcttcatcgtcaatgcccgaggaattgaagccaatccagaaaaaattcaagccctcctggatatgaactcgccaacaaaaaccaaagaagtgcaaagcttaactagtcgaatcgccgcactcagcagattcgtgtaaaaatcaacagacaaatgtgttccactcttcaacatcctgcgaggaaacaaaaagttcgagtggacagaagaatgtg

SEQ ID NO: 278089 - DNA, 187 bp, Cannabis indica
atattatttaatgatctattttagttattaataattagttttggcatttaaattgttagaattagaaaaggggcccattctatacaccttggccggccactttacgtggattttcaaattgatattttcattattttaatgccaaatatttatctttgatccatgtatatagaggatctttgatcac

SEQ ID NO: 278090 - DNA, 534 bp, Cannabis indica
atttaatatttatttttatcatttaaaaaaaatcagttacaccattagtctgggctcaaaacatagtgccacttcaatataattttggctaattagtaatttttcctttcgaactttgacatgtactaaatcgtgccccctgaacttttttagccgttaaaaattcccattgaactattgagattgttaaatttaagaatttttgtctaattttagtaaaaaattctaacatggatgaaagttcaaggggcatgatttagtacataaacaatcactgaaacagtaaaattgaataaaattagacaaaagtccttaaatttaacaatctcaatagttcgggggaaatttctaaaggccaaaaaagttcagggggcaagatttagtacatgtcaaaattcagagggaaaaattactaattaccctatactttttcaatgtgatcatttaaaaatgttgaaaccatatattcaaagtcaaagcaattttttagtttattttatatgttgttaatcaaaaaaaaattatatttaaaaa

SEQ ID NO: 278091 - DNA, 463 bp, Cannabis indica
ccttcattgagcattgctagaagggacaatttttaagaaatgttaaaattagagaatcttgttctctaaatatattttaatactccaaaaattttaatcttaataatactttccccatttgaaactctcactctcccctaagagcatttctaatggtaaaattttagaggatgcttagtgaagtagacatattattgttgggattttatgccctaaataaaactcatttcaatacaatatgatttgttatcaatagaagattagaaatcctttatgtttacatctagttttcatgtttatggtttaatgtgtacaaaatctgttaaatccagaacatatagttattcacaattacagtgatgtcaacacagtagaaggtaattgtgattatatgcttcaaaagataatgtcccttgattcatcagtgcactagatttacactgatgtgatagtcagcgataaa

SEQ ID NO: 278092 - DNA, 462 bp, Cannabis indica
ggaattttatttgatttctggaattgattgttttggtgattgcaacaagttgttgttttcacaggaaacaaatcagttggtagaaatctgttttcgtggtgtaaaaaccattgaccacaaagccattgaggatgcttttttgggtagtcggtggggtttggatgagtcccttggtttgaaaatggttgttttttattttattcagtgttttcttcttagtaatactcctgataaagaagtatctaggtttgatctagatgttgtggatagcggtcggtgggacgagtattgttggggtagggaatcctttgaattgacaattgattcattcaaaggtagaattcagcatgggattactatgaaaaataggaaggcagagaagggaggccagtatgatggttggtatagggctttgggatgtccttgggtttttacggtttggttttatgaatgctgtcctgc

SEQ ID NO: 278093 - DNA, 654 bp, Cannabis indica
cattccctttttcttggtttagggtttggtatggggcctaactgctggaaccttaattctttttacagaatcgaaacatgtctgcttctggctcaaagtcatctaagaagagcggtaagcgcctggctaccctcgaggaggtctcgctgggtcctgttgcccaggaggggtacaagtctcgggcaaccggatgggaggcggccgagcttcactccactctaacttgtccccatcagctggaaaacatcgtggaggtagctggaatcaagccttccacatccgggacctaccaccggccacctcgtgacgcggagacgcccaaccataactacggcggcttcggggcctggagccagacgcatttgatggccggggccatgcttcctctccaagactattttgttaattttttagtttttgtcggccttgcgccataccaacttattccccaagcataccgcctgctttcaggcttatttattttttactccgcccggggtggggctctcccagcccggcggagatattgtatttttacgaacttgtttctgtccccaagaagggggacaaacttaaagacggttttacggttccggcccaccctgccaatgatggggtggtcccgtataataggcaaactcatgttaaggagta

SEQ ID NO: 278094 - DNA, 583 bp, Cannabis indica
aaaaagattattgagcttatgtattattgtatattaaaagttaaggttttatcaagatgtgtaatgatttgagatgtaacaaacttgtcaattaatttggttaaaatgaaaacataattttaaatgactcaataattaattttctttgccaaatagaggacactgtctcaataaataagctttgtcaatagttattatatccacacaaagatgttgcttataaatctaactttagtttggagcatttattttagtttaaataccttcctattattcatatttctgaatattatataaaaaaaattacattataaatcaattattttaaaaaaaattacaaaaatatatcaatacgaaaaaaaaatattttaatttttttatttacaaaaatatctttctattttttggttattttataatttatttatagttatcacagaattattatttttttttgtctattttttattgttttataatatatttgtagttgtcaaaaagttgtttttttcaacaaaaaaaaaattattttttaatagttttcttactttttgttaaactaattgtatttttgtaattttaa

SEQ ID NO: 278095 - DNA, 504 bp, Cannabis indica
ttttatgtaattattcctaactataatttaaaattatttttatttataatcaactcaaattaagactataagttttattataatactaagtatctacaacatacaccaagtagctcaaaaatataccaaaagatctttttaaatagtgtacataataatggagttgtataagctcagaaaaagacactattggcttatatcacacacttacatatggaatgataaatattaattattattgccagcaactcccactctctctattttctctttctttgctcatgacacaaaatttattatatctctctaactctaatgtttcatatacacaatatacatttacatctatatatatgtgtaatgaattttgttccctttatgtaaaaaaaacacaatatatttacatatacagtagaacctctatttaaaaatactctattcaagaataacctctaatttgttataaaaaaatcaagtcccaatttggaccagttataaataaga

SEQ ID NO: 278096 - DNA, 550 bp, Cannabis indica
agcagggttgttgcagccgttaaccctacctgattggaaatgggaagatatcacgatggactttgtggtatggttacctaaaaccacgggtttgtttgattctatttgggttgtggtggatcggtttacgaagtctgcacactttttaccagttaaaacagccttttgagtggatcaatatgcagatttgtacgtcaaggaaatagtaaggttacatggtgtgccaaaatccatagtttcagatagagatccgaagtttacttcgaagttttggcaaagtttacaacgggctatgggtaccaaactgaaattcagtacaaccttccatcctcagactgatggacagtccaaaaggacgattcagatattggaagatatgttacgagcctgtgttatggatttcgaaggctcctggagtaagtacctaccgttgatagaattttcatacaataacagttaccaaagtacaatagggatgatccctatgaactttgtatggcagaaagtgtagatctcccatccattgggatgagactggggaaaggaaata

SEQ ID NO: 278097 - DNA, 556 bp, Cannabis indica
aactccttccttgtgtttggattcttcacagtcttacatcctatgattgaggaccaacttgatgtgtgtgggcacttactcaatcactaatggctgaatttattttgtgaagaaaggctaagtattttcaaaaattcaagaggaagaagaagaaggaataggtctcatcaaaaagctaggtttttagctttggaggcattagtttggatgaagagaccatagccttccttttataatatcttcaatagggttagggttttattattaggaataaaaaaatgataaaataagagtaaaattcactcctattggctggccacatagtgggccctacattagtttgggctttgtcatttttctcaactattttacctatttttcataaataccactttttacaatttcaaccctataagtgccaaaactatttatttaattataaaaataactatcaaataaaatttcatttacaatatttattaattagactccataaagtgtcttaattaacaaataaaacccaaaacactatttcttcacaatcaagccatatctt

SEQ ID NO: 278098 - DNA, 702 bp, Cannabis indica
cttcaatccatatagagacttgtcaagcttgcaaacatggtcttccttgcatttagccacaaacccctttggctgctccatataaatgtcttcttctaggtccccatgtagaaaagttgtggtcacatccatttggtcaatctccatgtcaaactgagtagctagtgagagcatcaaccttatagtcttatatttcaccactggtgagaatatttctgtgaagtctaccccttctttctgtgtgaacccctttgccaccaatctcgctttgaaccttaccggttcatcctcggtcctcccttccttgactttgaaaagccatttgcaagataccacactcttgccatcaggtctaagtacaactctccaagtcttattctttatgagagagtacatttcctccttcattgctttcaaccaagccttgtaatttctgtctttaagtgcttcttcataagattgaggctcatagatctcagctttaagtttgcacatataggcataggcaatactctcatcccacacattgtaactgtacttctggttcggtttagggactcttctagctctatctcttgtaagctgatattctgtgaggtcttcatgattcctatcttcttcatcttgaacttcatgttccacctaaattggttccacccgatttggtgcttcttgaggttccatttgaattggttccacctg

SEQ ID NO: 278099 - DNA, 650 bp, Cannabis indica
ctagttccatttgcgattctgagttcgagtttgggtttgggtctggattttagtctaggtccagatcaggctccgggtgtgggttcgcgtcctgggtcctggtctaggttgggtccgattcctaagctccaatctcgatctgagtctggattaaattcttggtctaagtccttaattctgatccaggtgtgggtttgtgttcgggtccaagtctgtgtccgggtttgtgtccaagtctgaaccacgattgggtctaggttcgggtcgaggtccaagttggggtcccgagtgcaagtttgggtctgggtcaggatctcggtctaaatctaggtccaacattttgatccagtcttggtcttggtcctagtcaaggttcgtatccggatccctatttaggtccaagtctgtgtttgggatcgggtgccagatttaggtccagatccgggtctcagttccgttctgggtacacgaccgtgtcgggcccgagttccagtctcagtttgggtctgaggctaggcctgtgttcggttttaggtcttggtccgggtcctggtcacggtcctagtcttgttctagggtcttggttcggcgattcttgttcttgttctaatttagggtcccaggtctaggtctgggttcgggtttggttc

SEQ ID NO: 278100 - DNA, 627 bp, Cannabis indica
gtgtgggttcgcgtcctgggtctttgtctagttggggtccgactaccaagtttcaattccgatctgagtatggattcagttctgaatctaagtccttggttctgatcctggtctgggttcgagtttgggtttgggttcgggtctgattctaggtgtgcgtttgagttcggttccgagtttgtgtctgcgtttgtgtccaggtctggaccccaatctgggtataggttcgggtccaactccaagtttgggtccagagtgtgggtccaagtttgggtcttggtcaagatctcggtccagatctaagtccagcatttcaatcccagtttgggtcttggtcctagtcgagcttcgtattcggatccctatctaggtccaactctgtgtttgggattgggtccaagattcaggtccaggtctgggtctcagttccagtctaggtacacgaccgtgtccgggccccagttccagtctcagtttgggtctgaggctaggtgtgtgttcgtttctaggtctgggttcgggtcctggtcacaatccaagtcttgttctattgtcctggttcggtaattcttgttcaggttctaatttaggtctaggttcgggtttggttcttcgtctgggttctgg

SEQ ID NO: 278101 - DNA, 117 bp, Cannabis indica
accatgggtctatatacccgagcttccaataagcagatttagaatttaccacttaaattcactgacttattaaaacccaagctttactttaaccaatgctctagaaagaacatagca

SEQ ID NO: 278102 - DNA, 782 bp, Cannabis indica
tccatcttggacaactttcttctctataggttgtttttcaaatgggggacagccatcacgcttcctaataagcacaaaaagataactcgtaaataaattaagcttcataacaacaatcaattttctttctaaaagtctaagcaagagaaaatgatgaggcatctgagacattctcacccaattcttttcacgttctgagtatatgctcgatcaactttatgaagaaaatctttaccctttggtttggtggagtcatctcaagcagctttttaacatgctcctcgtatgattttatttcctctttctggaagcaacgtcaagttgttaaaattaatctttacagttgtgtcttcacataaatctgtattcataggcataaaactccaaataaacaattgtgcatgttcatgttctctcaactaagttcacatcaccgcctttttcaaagtcagaaccgtcaacacctcttccaacattaaacaattgtgcattgttacgtaggacacttctacgtctaccatcctcgtgttgctttatcaaatcttcctcaaaatgagttgccaaaggggtaacacacttacttgccttttcgagacggttaacaaaccaattttgtagtgtgaaccttatgaactcaactagagtagttattggatatgcccggaattcttcagtcacgttgttaaggctttctgcagcgttatttgtcatgatgttgtacctgtctcctagacaataaggacgagcccatttttctaatcctatattgtcaacataagcag

SEQ ID NO: 278103 - DNA, 549 bp, Cannabis indica
acggggcctggaacagaccagtagtcggtgtctagatctgggactcagactaggacaagaaccaagacgaagaaccaaacacgaaccgagaccaagacctgggacccaaaattagaacttgaacaagaatcgcagaaccaggaccctagaacaagactacgaccatgaccaggacaaggacccagacctagaaccgaagacagaactagcttcaaacccaaactgaaactggaactcgggtccggacacggtcgtgtacccattccggaactgagacccggacctggacctaaatctgggacccgatcccaaacacagacttggaactagatagggatcgaaatgctggacatagatctggaccgagatcctgacacagacccaaacttggacgggcactcgggacccgaacatggacctggacccgaacgttgacccagatcggggtccaaacctggacacaaacccggacataaactcggacccggaacctcaaacaacccaccacctacgaatacagacccaaacgactagacccacgattcggac

SEQ ID NO: 278104 - DNA, 527 bp, Cannabis indica
gagagcggatctccctgtctaataccccttccaggaacaattggccccatctcacgacccccatgagtaatagtgtacgaaaccgttgagacacaatgcaaaataagatcaaccacccgcgcatcaaagcccatttttagcatgatattcttaagaaaaagccactcaacacggtcatacgctttactcatatcaagcttaagagccatataaccttcctttccaactcttttccgcttgagataatgcatcacctcaaacgaaatcataatattatcagttataagacgcccgggaatgaaagcactctgattctctgaaatgactgcaggaagaacatgcttcaaccgattagctagaaccttggagcaaaccttgtagaggacattacaaagagcaatcgggcgcatgtcacccatagtagtggcatttttcttcttaggaatcaacactaaattagtatgattaagaccagtaggcaactgtccaaataagaaaaaagagcggacctgtttgatgacgtcatt

SEQ ID NO: 278105 - DNA, 599 bp, Cannabis indica
atgtagtcatttattatatttttatttattttttgtcaaattaggtagaagaattatatgataatggtgataatcgagtttctgaagatctgtgttatttggctaaaggaccgaacaatactttctttcgatataaaaaatatttaataaatggttttaagtttcatacaaagaaagtcgaaaagaagttaacaactcaaaatagtggggttattatgactgccaaaactcaaagtttttcaagtagtagggatccaaatcctatttttggagatgttacattttatgggatattaacagatattatagaattagattattgttcagcaaatcgtgttgtattatttaagtgtgattggatttcagcaagtggcatcaagaaagaagaagattgcacaagagtaaacttatcaaaattgatgcgagaagatgaaccatttatattagcttcgcaagcagaacaagtaatgtatgtggaagacctcaaacacgaaggatggcatgtagctttaaaaataaatcctagagattattataatatgagcgcgcaatcaaaaaatgagaatgtggagtcttatttgcaaagtgaagtttgtggg

SEQ ID NO: 278106 - DNA, 536 bp, Cannabis indica
ggcataaaacccaacacccttctagttctgtctctggttagttggtaatcttgtattgcctcagtttcttgtccatcttcaggaataggttccacctgaatgttgtcatcctgaacttggtcatttccttccaagttttcatctccctgagtgttttccacctgttctggttccacctgaacagtattaggttgagtgttccttgtttgcatgtccacagatgtgcctgcagggttagtgtctaaagtaggactagatacagtattattattagtaatacaaggaaataagtcttccttaaaaataacatccctactgtttatagctttaaacccttgtttctctcttacccataatctgtagcctttagtgccttcaggataacctaagaacacacatttgagagctctaggatccaatttaccaacactctgatgtgcataggctgcacatccaaacactcttaaattggaaagatcaggaggcttacctgaccagatctcctctggtgtcttgaattcaatggcactggatgg

SEQ ID NO: 278107 - DNA, 552 bp, Cannabis indica
atattatatttttacagttttctatagaaacaatacgaaagcaacaagaaaactacataaaaataaaaatagcaggaaaataatatctaaacaatatcaaaacaacaataaaaaattacatacaaataacaaaaaatagcaacaaattaataagagtacaacataaaaaagaccgtatttcagtaaataaaatcataaaaatagtaaaaaaatatttaaaatcccgtacaaccgtatttttgtattttttttgctatttttgtgtatgtgaaataatcccaaatgaaaattggggtaagttgaaaaataccccttttattaatcaattaatcaaatttacctctaattttatatttatttgaaacatacctctttttatatgtattgtatccaaaatatcctgacataagagagtcacatagagagtatcttgaagtgacaagggcaaaattggtataatgttttaaaaaaaaggtaaaaataatagactttaaaaaagagggtaaaaataaaagagaacaatataaaaaaggtatagagtataatttcctc

SEQ ID NO: 278108 - DNA, 1019 bp, Cannabis indica
atgcctttctaacgacaaaagagaaccgcgagatgtattgtatcttaacacttagcatttttcctaaaaatacgagtaaaaaagataacatgcaatcggcgagaacaatctaacacagtcagcataattgtctgtggataaagacaaagaacggttgagcagttatatattatcccatatgcacaaagataaaacgtgaggattgtccacgtttcatgagcgattatgaatgcgtagatctaaggaataactgtcataccgtacatctataaatagggatagaacccaggataaaaagagaccgccaatctagagaaaaaagagatattattgctacttatatcattatattatgtatttaaatattactattcttaataagatagactcgtagactatgaagatttaacttcaaaatcacgttaaaaccttcctattatttatgtatttagtaaataaattgctatgtaatcaattatgtagttaatttattacaaaaaagactaatacttttgactaaacccatcacctcttcaaagacctcctcacacaattcaagaaccaaagggcttttcaacttggccatgaccacaataaaactagaatgttgcagtagagaaactcaaatggaacaaagcaaagagacttggttgaaaccaaataggaaataaaccaagcttaaaaggatgaagtatatatatttagctgaatttcttcaaagggggtatactagaaacccaaaccctattttgggttaaaatggtcatgcctttccgaactaggaacaccacgtccccaccatacacacatattttcgtgccaaaacgtacccatcaagcgagaaatcaccacaaccaatactcatcaaaaaactaacattccactactaaaattacaaaatattgtggagggaatatatgaatgtaactctaatggcatgtttactaataaataatgggaatcaatagtaaggtaatcattcccttacatttgtttacttgcattattaaaattaggaa

SEQ ID NO: 278109 - DNA, 579 bp, Cannabis indica
ctacagtggtatcagagccaaacaaggcacaatctgcagcaaagattaatcaagaaagcataaagaaagcataaagaaatcatcaagaaagcatcaagattcacattcataccagcaagaattcaaacacacaaaaccaagattgcaaagaacaacaccaggatttttctaaactcattatctatataatttctttgaaataactttatacatatacaattatgagttccatgaaggttgatatagataagtttgatggttcaggtgattatcgtatttggaggaagaagattagggctctattggctcaacacaagctgttgaaggttcttaaagatccggtggaatggtcaagtgatacaaccaaagaccagcaagaagagttgctggaaacagcaaccggattgatcattttcaacctctctgatgctataatcagattggttgacaaggaagatacacccgccaagatttggaacaagttggaagagcaatttcaaaagaaatctttgatcaacaagatttacttgaaagagagaatctttggttttaaaatgagtccatctaaatctctagaac

SEQ ID NO: 278110 - DNA, 512 bp, Cannabis indica
taacaagtatgtttcattaacatcctaatatgaattataaaacaatgaaataaacagatataaagtttaggaaaccttacatagggtacagcagaatataatgactccttccattcagatctctagccctagattcctttctgtagcagagcatcaccaagatctgaacgtggatctctttctctccttctttgatgctgattctccttcttgttgattagattcttcacaatcttccacactatgattgagataccacttgatgtgtgtcgacactcactcattcactcaagcttcgaaattgttgaagaaaaaaagagaagggaatgatttcgactatagagaaagaaggcttaaaattttactaaaggaatgtgatgtctgatcaatctctttctcttaagccatcactatctatttataggtaaccacataggtttaggttagatttatttggcattaaaataatagaaaaataaatggaaaaatcttagtggccggccataggatgt

SEQ ID NO: 278111 - DNA, 783 bp, Cannabis indica
tttcgtaaaacatatacattcatcatattaacacataaaccaacatgaaaccatcaaaatcaacacaaacatcgttttaattcatatttcatgaaagtaaatcattaccatggctctcaagccagttgttggaattattttaccaggatctagatttactaccatatatgtgtttaacatcctaatatgaatttttaaaacaatgtaatttaaacacataaaagttatgagaaaccttacagtgggtgcaacggagtgggtgcaatggaattaaatgactccttccactcaaatctgtaacccttgtatcctttctgtagtagagtatcaccaagatctgagcctgaaacgttcgcagtcttacacactataattgaggaccaacttgatgtgtgtgggcacttactcaataactaataactggataatattttgtggagaaaggcttagtgtttcaaaaattcaagaggaagaagaagaaggaagaggtctcatcagaaagctaggctttcagcttggaggcattagttggatgaagagaccatagccttccttttattctatcttcaatagggttagggttgaattattaggaataaaaaaatgatcaaaatagggtgaaaaactacttgatggccgaccacttaatgagcccgacacaagtttgggttttgtcatttttcccaactattttacctatttttcatatataccactttttacaatttcaaccctataaatgccaaagatatttatttaataattaaaataactatcaaataa

SEQ ID NO: 278112 - DNA, 482 bp, Cannabis indica
tccattcgggtaattttgtcggatcacttccaagtgttcactgtaaaataaaatagatttgaattgattgattgaaatttaaggtgaaaaaaaaaaaattaataaagaaaaaaactcactctaagtaagcttgaatttcaggtgaattgttgaatatataccactctacttgttcacgagatgcgcgatcaagtggccggagattgccttttgtaatgggtcgacattgagattgaaacacagaaagctttcgtgggacaacctcatcttcattacgatcaagacggttaaaccttgtttcaacccccttgaaatacattgaacaaaatgtcaaagcctcatcaataacgtaactttctgctatcgacccttcaggacgtgctttatttcctacgtagttcttcaattttttcatgtatctttcaaatggatacatccacctcataaaaacaggtccacccaaaattgcttcttcaggcaaa

SEQ ID NO: 278113 - DNA, 631 bp, Cannabis indica
tccttctgagtgaaaaagtacttgaggcttttgtgatcagtataaatctcgcacttctcaccatacagatagtgacgccaaactttcaatgcaaaaacagctgctgccaattcaatatcatgggtaggataccgctgttcatactctttcaattgcatagatgcataagcaatcactttccctgactgcataagaacacaacctaaccctgtttggatgcgtcacaatatatcacaaatttttcatcacttaccggtaaggttaatacaggagcggtaatcaacctttgttttagttcctggaaactactttcgcacttatcactccaaacaagcttgcagttctttccagtcaactctcttaagggcgtagaaatctttgcaaagccctcaacaaaccttctataataccctaccaatcccaagaaacttctaacttcagttgctgacttaggtcgaggccaatctcgtaccgcttcaatcttcactggatccactaaaataccatctttacttaccacgtgtcccaagaaactcacctgaggcaacacacaaaattcctaaactttgcatacaacttatgctccctgagacgttgtaacaccatccgaagatgtctttcgtgagactct

SEQ ID NO: 278114 - DNA, 445 bp, Cannabis indica
atgaacaaactactgttatatatgtgttatttgtcattatacaagcatgtttaaaatttttgggggcattcaattacaaccgttatgctgctgaaatttcagtagaatttggataaaatttgatatattatgttctgttttatttagggaccactcgctcaaccgccttcaagacgtgatgcgtcgaaggggaaagctccgatgctttctccacaaggcggtggtgcacgggaagatgaattattctcgaaagagaagatggacttgatccctaaatcgctaaaatggatggttgttgaattcctaaacctcaaagataaacgtgatataatcacaagtcttgtaccccgaggattcatagcaccgcgtacccagatcacgttatctggagaggatttgcagcaggttgctatgtgtgacttcatcggcaaccagggaatgctgt

SEQ ID NO: 278115 - DNA, 687 bp, Cannabis indica
tgtctggaaaagtaatatatagtgactcttcatatgcgtcacttaaaccttttagactctctcaaagcgcgtcactatagacttttagaatctcaagttgtgagactctaaatacaacagccacactcagaacgtgtcactatatctatttttattttaaaaaaaaaacttatttccacaataagaccacactaaaatagtgtcactatatcatatttttcttaaaaaaattgcataatatatcaaatttattttatttctatttttatttttaataaaaaaaattaaatttaaaacaacaaaacaaaataatgtgtatattaacaattaaacattaggaacaaaatttgtgtgtatttattttcttatatataattgtacctaaaaaaacagtacattaaaatgggtattagctatgaaaaaatttgaatacaaattttaataatttgaatccaatatacagattaatcatacatccacaaacccaaaaatttacaaacttttaacccaaaacaacaaagaaaataacacctaacaaaacctgtgaagaatacagtgggattattcataaagtttaaaacatacaaaaaattaacaaaaaaaaaacttaaacaagaataaatgaaaaggaaaatcaaaatccttcatgagtgcgccgatatctaacgaattgagcttcaaacgcca

SEQ ID NO: 278116 - DNA, 504 bp, Cannabis indica
tctctctctctctctcttttcggccacttcttgagcagctggttttggtgtgtttcttctacatttccagcaagattcatcttggtttgaggtgcttaaactttaggtattttcccttgtagcttgtcttagtgttttcttgtgttttaaggaaaaattagtgaattgcatgcttgattttgatgtgttcttgttgctgtatgttgtggttaatttctgaagtttattctagattatttgtgttgatttgagctgctggtaatgcatgattagtggtgtggtttaaggttatggattttctatgtaaaagtttagttttcaatgagaaaattggaattttggtggctgtagttgttgcatgagttaggttttagtttctgcagtttttatatgcttgaatatgagtttttaatcagggtttgatgcatgttttgttgcttggtcaagttttgagttttagaactcaatctttgacctttaatggtgaaatgagtttctgtgtgt

SEQ ID NO: 278117 - DNA, 535 bp, Cannabis indica
cataaaattacatcgtctactaacagattcaagcatacaaccaataaaaaaaggggaggtgagtttacaaaaggagacgtagttatcaagctcccaccgggactccttcccattaagagcattgatcaccaccctcgaatcactctccaaaataagaaacttgatgccacaaacttttgcttcctgaagggccagacagcacgccattgcttccccacagagagcattagaaaattccagcttagaagtaaccacccagatcaccttgccaacgtgatcccttgcaaccacagccgcgcacatgctgtccaactccactctgacgtcgcaattcagtttcaaccaatcctgcgggggagggcgccaagcttccgtcggatacggtatggggcaagggagcaagtgagcacgatgatctgcaaaagaaaacttatcattccgagtccgccatattgtgtccacgatcagcgatgcatagagaaaaacttcctgttcacttatgccttttttgcttaggtcccataggaattttacc

SEQ ID NO: 278118 - DNA, 332 bp, Cannabis indica
atgtacctcgcgtagtatatagtcgcagtcttccccatcgatacacttgagtaacggctgactaaaacttctgcgatataaccttccatcatatatgacatatcgggcagctcgctgtcgcagcttccttgcttccatcttgtcatcaggtaagatacccctttctagatatgcaactattggagtcatccaggtgacttcttgagcggtatctatttccatgatcgcttcttgatttatcgttgggtgagccaatacatccaccggaattacatcgagcaattcggcttctctagtcgaggccaacgggccaatgcgtctgcgtgtgaatt

SEQ ID NO: 278119 - DNA, 819 bp, Cannabis indica
aatttaccctggttcggggaacccaagcactagtcggatgagatgtgttctcagtgcagatgaagcttgtaaattgatgcgtgatttacagcttgacttttaattcatatcttgaaatcaatcaacttaaagatgtacaacttggtaacttgaatcattaaaatctactagttgcactttcaaattgttaattcaaacagatacaatatggaggccgagtctcaagcagagaacatgaatgaggaacaaacctacgaatgggaaagcataacagcagagctaaacatcacaaaaccagtgaatgagattcaaatatgtgacgtcctaggcaagagtctcgacaaactgggaaaatgggaagcattctacgaaatgtacgcgaaacggatgggtttcggcacaagaaaagatgatgtacgacgttctcacggagtcattgtaatgcgcaggtgggtttgttgttccgagggttacaaaagaatcacaataacggaaagacaaagaaaaaagagacctcatgatgtcactagaaccggatgtcaggcagcattacgtattttactcacacaaccgtctaacacttggaaatgcaaagagttcagcacaatacacaatcacgacctcgcttcatcaagtgaggtacaatttttgagatcataccgagtagtgtccgatggcttgcttgcccaagttaggtcgatgaactccgttggaattaaaactgccaacataatgtctcatgttgctttgcaaagtggaggttacgagagaatgccatgtcaacttcgagatgtctacaacagggtgttggaaattatt

SEQ ID NO: 278120 - DNA, 525 bp, Cannabis indica
ttggaggcggaactccccaaaaagttagtttaagatgcccgaaaatatggcagcttacaccggggacacggaccccaccgatcatttgtctcggttcaacctagtaatgacggtcatgagagtcagcaatgacgccaagtgcttatgctttccactaacgttaagcgggtccggggaggaatagttcaaaaagttggacccaagatctggggactgctggaacaagttgcaagttagcttccagagacagttcgtcgctgcaaggaagattaatctcgaagtcaatgccctgactaacatcaagcaactacccatagagacattgaaaaaatttcataaagaggttcaaaagaagaagcctcaaaaaactaagaaagttgatgacggacaacagcttgcacttctttgagctgggatctgtacaggaaccccattctggaacgagttacagcaagaaggagctgcgaaaccttcaagatttccagaagagggtccaaaagtacatcaacttagaagaaagcccaa

SEQ ID NO: 278121 - DNA, 672 bp, Cannabis indica
tagaacaacctaattataaagaccttctaggatcaatgtgtgagttagcctctactcattctaatgatacaatgaaacttgagcaaattaatgcaagtttagtcttaattaaaaaatcaccgaagtgtgatcgattcgaaggagaattatgggggcttagttctcttaaatctctctcacatagaatgagacacatcttcgtggccacaaaatgaatataaccatgagaaccaaaaccaaactaaaaagatatatatacgagatatatcatcgtttattcatttgcacgaataataaaatagttcaaaaatattgtatttactgattcgctagtaaaataaatatattttcacgaaagaagatttaaatgttaacattctgtcactttattgcgtcgactcttgaaatttgaccaattttattcatgtgtgagttcgttgagatgtgaataaaataattttgtggtttgtcccatattgactaggaataaaaaatttatactccaaaagttatataaatatagactttcataagattaaaaatttacactcataagcaaagctaagactaaccgggggcggttgtcctatgagaaatttaattcgattctatgttattaagggcttaaacttaaataatttttttgacctttatacaaatattatcaaattg

SEQ ID NO: 278122 - DNA, 657 bp, Cannabis indica
tgtactgaatttcaatttcgtacccataacccgttgcaaactctgccaaaacttggaggtaaacttcggatctttatccaaaactgtagactttggcacaccatgcagtcttactatttctttgacgtacaaatctgctaactgatccactgaataggttattttaactggtagaaaatgtgcagacttcgtgaatcgatctaccacaacccaaatagattcaaataaacccgtgggtctaggtaacccaaccacaaagtccatcgtgatgtccacccacttccactcaagtaaggttaaaggctgtaacaaccctgccggtctctgatcttcagccttgatttgcagacaagttatgcatttctatacgaattctaccacattcttcttcattctgctccaccagaactaaggtttaagatcctgatacatcatggtggtgccgggatgcatggaatatggagtggtataagcctcttcaagaatttcatttctaagttccacactatttagaacacaaaccctagctttaaacaataacattccactgtctgacactgtaaatgctctggcttgaccagctgaaacgtcttctctgatctttactaattctggatcagtcatctaagcgactttaattcgttctagcagatcaga

SEQ ID NO: 278123 - DNA, 487 bp, Cannabis indica
cccttacagagacttcaaaaccgttttcaccttttgcccagatttctaccgttcttctaaagcatcctcaatctcagaagtagtcgagagcaaccaaccgcaggaacaacttgcaaaaactaaaggttagtttcgagttccaatgtatttttttttgttttctgtgttcgagaaaaagtgttttttctgggttttggtattttggggctttttaggaatgtatgtttgtaagggatatgcatgaggttacgttttttgggtgaaaactgggtaatcttatgaaaaaatgacctgtaatttgaaataaccgcatactgtgtaggaaatatttaaatagacgctgcttcatactttgaatactcgcgggtattcggatgaacagttcgaatactcgcacactgacaaaacttatttacttctgattattagctaggtcttttaggattttatatgctgtgggttggattgcgagagtattaatcgctat

SEQ ID NO: 278124 - DNA, 515 bp, Cannabis indica
gaggtacatgtctttctgtaattttcagtaaaggcacacattcccaatggatacatcataggaaatgcatggtctaatccctaggctttgtaggggtttaatggacgtagtcctttatccttcttgactgatgtgattcctcataaagtagtcgtcactaggcttactaatcatagcgtagtagctgcagaaagggggttacgccgtcagactttaagacatatggcagtttcaatacgccttctcccatgcggcattaaatgcgaggtgactgttcagataggatctgacacctcccggagatgctttgttgtagctttgctctccgggagtatgtgagactcacgtgccttctccgggaggcatgtctaaggctgatccctttggctaaagagacttagctgaattatctaaacgttaaaccccttcaatctacgtgtctcaatccagttggtccacgtattttagacaaaatcaggggcaacaacatcaataaaattcttgatgataaaaaa

SEQ ID NO: 278125 - DNA, 656 bp, Cannabis indica
acatggtgggaacaaaagatttgtaaacccattcagagggtcgagatgcaagagacaccagtaaaatgaacgctacatgagagcctgcattcagtgtggggtagtaggccatttcaaaagaaacttcccatggttacagtagcgggaatggaagaatgattaagagtttgtgtaaatttaatggtgtgttactgagtagttctggtacctttttgtttactggaaaactagttattttccagtatgtggtctaaacccttcccagattgtgagggtaaggaaatagttcgttgttttagttgtgctgaatttagagaaatctaatattatactagagttgaactaatttgcaaggtataatgcaactatcgattgaaaagaaaggtggcaactcttgaatcaaaaagtaaggacacatttgtgttcttaggcaaggttcaaaggtcccgaaatccattgatcccagcgtttaaggctgggatggatgtatcaacttttcagttagtgtggccaatattataaagggaacattagtgagattgtgacacaatcttgtggctcaaggtttctagatgcttttagaggagccactagggttattggttaagcgggaaattgattctgaattgagtggtaatgggagtaaaacctgtatc

SEQ ID NO: 278126 - DNA, 486 bp, Cannabis indica
gactcattccgttcagatctctggcccttgattcctttctatagcagagcatcaccaagatctgaacctggatctctttctctcattcctttatgttgattctccttcttgttgattagattctacacaatcttccacactatgattgagataccacttaatgtgtgtgggcactactctatcactagggtatttcgaaattgaagagaacaaaatagaagaagagagtggcggctatggctcgggtatttcttttaaaaagaataagatgcatgtccataatttcctgaagccatcactttctatttatagaataccatctaggtttaggttagaattatatggcattaaaataatgaaaatataaatggtaaaatacttgcatagtggccagccatgatatggataatgggcctcactttgcaattttgccattttgtcatttctgcatctcattttctcaaaaacaccaattttccaattcaa

SEQ ID NO: 278127 - DNA, 495 bp, Cannabis indica
atgttccacgatatagatacgttgtaaacatttaaccatcgttctaatcccaataatcaaagatcctctatagatgatttacaccgtgtaaagactgcttagcgtcaattttggaattagcagataaattaggttttaattataaaaattatttattaatattcaattagttatttatgataatttatttgaattcagaatgtatttttatgtcacatatagaaatttcataaattttgcgtgttttgtgcccgacaacattggaaagcggtgtttggctattagaatcacatcctagtatttttagtatagcgagacaataatttagacattgggaatgtcgggaatagtcgggattttaaaattttccaaaataccccttagtgatttatgaaggttttgtgtgggcaagggcattttggtctttttgctcatagtgtattttgtcctttagtggacttagtattattttaataagttgattttaagtgattt

SEQ ID NO: 278128 - DNA, 545 bp, Cannabis indica
ggtcatttgaccattattgagtaaatggaatttattggattttagagaaaataaattgtattttctgattttctctctctctctcaccgaaccctctttctctctttcaccccttttcattttcaaagttcaatttgtggaaagaactagttgatttgaagttggttgcttgaaagaaaggtgttgggaggcttgaggcttggttgtgcaagtatttgaggtagttttcttgatttttaattcatgtttttttggctgaatattgtgatagaaacatgtttaagtttcttaattttggttatgcatgagttaggttgttcttgcttcataattgggtaatttggaactatcttggattggatttgagtttagaattgttgtatgcttgttaatgagttgggctgagattattggtaattctaggttgaaatttcaggtgtgaaattaatgtctaattgctggttttgacttgaagaacttggttttgaagttcttgagtttgagcttaggttttgttaatcttaagcatgattttgggtgttttt

SEQ ID NO: 278129 - DNA, 592 bp, Cannabis indica
ctaagatcaactagtgttattgaactagaaagatataatggtaagtttatgatatcttatccaagttcaatatcgctccaatccaatgtatattccatacatctgatactagtaaactttaccaatatcttggaaataacataatacttatccaaggtgtaagtataccttatcgctgattatcaggtcaatctaaatccagtgtactgacaaatcacgagacttaaacttttgaacatataatcatgattatattccactatgctgacgacactataattatgaataaatatatgttgtggatttaatacaatttatacattaagtatataatcatgaaataaatcatgtgaaccatgcaacataaaataatttttgatcttttattaattagtaaatatgattatattgaaatggattttatttagggcacaaaacccaacataaacaaattcaagcatttcttgaacttgatcaatctctaaagttaatatactgagatatttaaaacagtaaccatgatggctgcattgtttcttcatcaccgtcaatatttaatttgaagaaactaggtgaaatttatggtatagtt

SEQ ID NO: 278130 - DNA, 913 bp, Cannabis indica
gataacatttaccgctttttctctgcgagtttaactgctgcgttgtagcattcccgcgaatctacctggactccccgcacagaacctactccagcgggagtagggaacttcattgtcagatgatagatcgaggttatgatcttcatctccttcaggatcggtcgaccaatcacggcgttatatgctgagtactggtcgattactgcgaagtcagccattgacttggctgtcaccggggcggttcccaaagtgattgggagtttgatcattccttttattgttatgacgtcgcctgtaaaacaatagatgctcgacgtcacaggtcgcaggtccttctcctgcaaccccatttgtttgaatgcttggaagttcaacagattcactgaactcccattgtcgacgagtatgcggtggacattatccccgccaatattggcgattataactagtgcatcggaatgcgggtgatggacccatctcgcatcactctccataaaggtaatgtcgtcgcattccttcttaaatagtttctcgggccgctcactaagattgttgacattggtgaacggcttttctttagcttctctggcataccgctcttgtgacttgcgagagtctcctacgatatggggtcctccaatgatggttaggatgttgcgaggcattctggaaccactcgcattttggttttctcctttgtcatccgcttggggatgactttcctcacccttcttatacttgtcgaactttcctctccgaatcagctcctcgatttcatcctgcaagacccaacattctaaggtagtatgaccaatgtctttgtggtacttacagaattttttgggctctcttctgtcgcgatttcaactgatgggggccggcttcttgaagactccgtttctttcttcgattg

SEQ ID NO: 278131 - DNA, 543 bp, Cannabis indica
taatgatggtcattaatacaccatcacttgcccaaagacacgtgccaggaagccgatgaggcaaccgtaggcatctaagcaagccttgttcacttcgtaactaaacaaggcttggggggtaaatgttgcccctgattttgcccaaaatacgtggaccaaccggatgattacacgtggatggaaagggtttagcatttaaacaaaacaactaagtctccttaaagcgcaggattaccttagacatgcctccccaacgaaggcatgtaagtttcgtatgctccaagagagcaaggttgcaacaaagcatctctgggtggtgtaagattctatctgaacagtcatctcgcatttaatgccgcatgggaggaggcatattgaaacttccatacgtaataaagtctgacgacacaacccccaatcctgtacctactaggctatgatcaataaagtctagtgacggctactctgtgaggaatcacatcagtcaaaaaggattaaggactgccctcataaaaactcctaccagaacctagggattagacc

SEQ ID NO: 278132 - DNA, 599 bp, Cannabis indica
tagttgaaacactataaaaggaacatgatgctctcatctcatccaactctttccacctgccaaaatctaattttctctgtcagacaactagtagatgagagacaccttctataatgattaaaaccctccttcattgttctttacctatttggcctatagtgatagagtaccatgcccatacatagcaagtcaagtactcaatcatagtgagtaagatggtggtaaccaaacccgaaggagagaaagagacccaagctcagatcttgataatactctacgacaaaaaggaacaagggttagagatttgagcagaaggagtcattatattccgctacaaccaatgtaaggtttttctaaactcttatgtgtttaatttcattgttttagagatattcatatttaggatgttactcaacatatttgttagtaaatcttgatcctggtaaaatattcccaaaatctggcctcaaagccatggtaatgatttactttcatgaaatatggatttaaaacgatgaatatgttgattgtgtagatttggatgtgttcatgttggtttatgtgttatttgatgaatgtatgtgtattacgaaattttt

SEQ ID NO: 278133 - DNA, 709 bp, Cannabis indica
aaataatttccaacaaaaggttcttcacttcgcttggaaagctatctcggggtgtctcccaactcgtacccaattgcgtacaaaacatgttcctgttgatcctcgctgtgtgttttgtaattctgatgaagaaaccatttttcatgttttggttggctgccattttgctcaatcatgttggcataggtcgggtgtggggttacatttttctgcagaatctaccttcgccgattggtttaaggcatttctgtcagggggtagagtggctttggtggatgagctcttgatggtagcatggggtatttggaaagctcgaaatgagcttctttggcagggtcgttcttctcaggctgcggatgtggttcgagtggcaaggtcgtgtcattctagttggctgttggctcaagagaacaggtttgaaccgctgttgtttgatgctactgttgttggtagcagtgtttgttgggtaaagccgcctgctgggaagctgaagatcaacacggatggggcgatttttgaggcaacaactcaatatggtacgggcatggtcattagggattgtcatgggaagttaatcgaagctagttcctctttgcattctggggcttgtcagccggctgtggctgaagtattgagcgtcaaggaggcccttagtggttgaagtcgaagtttgtccaatgtgctagttgagacagattgtattgctgtt

SEQ ID NO: 278134 - DNA, 762 bp, Cannabis indica
gatattataatcttaccgttgtatcgtttttaagtcaatatcactagttgatcttagatctaaaagatcttaatcccgatatgcttaggttcaatctcaggagtgctattcatgttctttgattgttagttaagcctactttcgggtcagggtgatacgtacattttgggaacatggtagtatgattgagtgggagcgctaaacatagatatggtaatttataggttctatcaggacatacgaagtgaaacgatgatttccttcgtagtcttggctaaatagaggtaaatagaagagctcttattttaatgattatattcactcaaatatcatttacaggaagctaagtgttttaaggataaaattcattgaggggtgaaacggtaaatttatccctacttggtgtaaatcatctatagaggatctttgatttattgagattagaacgatggttaaatgttgatagcgtatcgatatcgtggaaacaatagtaagagacgttactacatgactgatagtgcaattccaagttctatgagtggatgcaacaaggaattaataagttagggagtttacttggtaaattctagttcggcttattggaagctcgattgtataggcccatggtcctcatactagttgagaccatactgcttgtaagggtcagataattgattttaattaatcaattattattctaaaattagactatgtctaggttatgaattttcactaagcaagggctaaactgtgaagaaagag

SEQ ID NO: 278135 - DNA, 543 bp, Cannabis indica
gaggaaacaaaaaaattattatagatgatgccttattatccaccaaatcaaaaaggaatctgttgagtttcaaagatatacgtcgtaatggatatcatattgagacaatagatgaaaataattttgaatatctttgcattacatctattgtttcaagaaaaaaatgcatattagaaaaattacctggtttgtcttcaggtttgtacgttacacgtataagtacaatagaaactcatgttattgtgaacgagaagttcacaaaccagaaaaatttatttgttatttggcatgaccggttaggccatcccggttcaattatgatgcgtagaataatagagaactcacatggtcatccattgaagaaccaaaagattcttttatccagtgagttctcatgtgctgcttgttctcaaggaaagttaatcattaagccctcaccggtaaaggttggaattgaatcccctggatttcttgaacgaattcagggcgacatatgtgggcctatttgcccaccatgtggaccattcagatattttatggtat

SEQ ID NO: 278136 - DNA, 688 bp, Cannabis indica
ttatgataaaaatacaatttctgatctcttaggaatttctaaaaactatgaaatacgaaaatctcaattttcgcactcaccgaaacactaccaaaacttatccaaatcactccaaacttcacagggtgcatatatgccataaatattaccatccttacgtaacagaaatcaaaatcgagcccttaaatgaaaaatgccattaacgttcggactaagctttaaaaagttcaaaactcgatttctaactcaaaattacctcaaattcaacaagttaacatcaaaagtagtcccatgactacccgagaataatcttataaggtcagaaccttcataactattctaattcatgaaaccctgtacgaaaccaattgtttttaaaattaaaaacaaattaaaccataccttaagctttcccttttcaatgatttgctctcctgctactaccggagcttagatcactaggttttgggttgaaaatcgaagaaaatagatataggaggagaagattttgtcgaaggagagaacgagggtttcgttcgtttgtttggtttcactgataacttaatatatataaataaacttaagttaacgtattaacttatatataaataatattataataatacattaataataataatataatattaataatagtattaataaaaactttattattaatagttat

SEQ ID NO: 278137 - DNA, 540 bp, Cannabis indica
ttattatatagtatgcatgtgttgtcttttcaggtgtgatctgacaggttggcgcggtatagtcacaaccaggtatttcggaccgaaccgggttcgggcccgacatgcaaattggatttgtttatttgacattttatttgatatgtgataatctgaaatttaattgggatttatttatgcttggaatgacaaaaatacccttgtgagggtgaatatgtgtgttttgggccctaagggcattttggtcttttgacctctattttctatgtttaataaaattgatctttttgagataaaggaaaagaatttctggttttgctcccctcacccgacctctctctctcactcaaaccctctcatttctcaatctttgatttcttgagaaattggtgtgattattgcacgaattggagcttgattacttagggaattgttggagtttagccttgaattgagatttgaggtaactttccttggttaatatttatttattaatttgaatttttaataaagaggagcatgaaatagatgtgtgttctt

SEQ ID NO: 278138 - DNA, 580 bp, Cannabis indica
tttcattttgaattgagtgtttagcaattcctttatgtcaatcattttcttgatattgttgccaatgattaaaatgtcatcaacataaaggaccaggaatattaccatttgattatccttgagttggtaaacacaaggttcatcttcattttggtgaaagtggtaggttttgcttatttcatcaaacctttttttccaagagagtgaagcccacttaagtcgataaacgacctatttatcttgcaaactttattttcttgttctggaagtttataaccttctgattgctccatatagattgtctcgacaaaaattttgttgaggaaagctgtcttgacatccaatgtcatatttcataatcaaaagcggctgctatggagacaagtattctaatggatttgagcagggaaactggactaaaagtatcctcatagaccacaccttctcttgggtataacgcttttctacagtctagcttagaaagtttcgacttctccactagacctcttttcttcttgtagatccatttacatccaattgaatgataatcatcaaatacatctacatattcccagacttt

SEQ ID NO: 278139 - DNA, 522 bp, Cannabis indica
caaagcaggcagaaagttatgcagatcccaagccacaggatgttacattccaacctggtgatcatgtctttcttcgagtatccccaatgaaagggatcagacgctttggaaagaaaggcaagttaagtcctaggtttattggaccttttgaaatactggagaaagtcaaacaagttgcttatcggttggctttacctccatcattgtcagctgtgcataatgtatttcatgtttccatgctgagaaagtatgtgtctgacccaatgcacatcctgagttatgagatgttggaattgcatatcttatgatgaacaaccattgcaaattctagataggaaggaaaaggtccttcgaaccaaaaccatagcgttggttaaggtactctggaggaatagtaaagtggaagaagccacttgggaccaggagtcggatatgagaactcagcatcctgagctgttcaggtagatttcgaggaccaaatcctttaacggggggataattgtaaagaccgcctaaaattaa

SEQ ID NO: 278140 - DNA, 776 bp, Cannabis indica
ctcagccataagggtcagctcaacctctaagcataaaaccagacaactcctagttgtttagccaatatctacattctgaacgatatactcattccaccatacagcctttcctagtggccctattaactgcttcattgaaacaaaatttgccaatcggtctagcttagtatcattctccattattgcgctgcccgaaatcaaccatacaggttctactacagtgtcactcaaataatctcttacttcatagcattcatttgctctcagccctgtggtaggaagatttatacccacactacctaccccgagcctaataggctctcaattttacttactagatcacctcaggtatacctcctagtatactcgtgatcaatcctttctcatagttaaaatctttctaactagaattaatgctaataagcattaccgcacatgcatagacatacttagcaaccttatatcaaaaacttatcacgcttctctaacaactttacacatatcaaataagaagacaattcaaacaattagtaaataaaccactaatcaactaacaatcagcacttactaaaccatgagtcgaacgagtcttcgcagccaatgtacatatcaagccagtcttcaggatctttaaaccttggtcgctctgataccatgttgtaacaccctgaacctcaggaacgccacgtgtgtgcttttataatcttattatcaataatctattagtttaggaaaagtgtggtttaattcaaaaaaatatattatctttaattaaa

SEQ ID NO: 278141 - DNA, 596 bp, Cannabis indica
tttttcatggaatccatttctgaatccatgttggctgaccaacattccgttctggacttgccattgcctgtttataggttaatggatcgtcatcaatcccgtcaccaacaaccctattgatttcaccatccaagccataacgagatggtttagtagaaatcctcccactacgacgaggagcagtgatcttcttaacatgaacttgagtggtagttgtctcggttgtatcaacttgtaaaggttcaaccgaggaagtgggattatcctcaacttgagtagaagaggatggaacattagaaggatttatatctgaaagcatttcctccaatactactttactttgtggtttgaaattattaatatagccatctttaaggaaagtagcatttgtggaaacaaacactttattatccttgcgactataaaattgtaacaccctaactaccttaggcgtattacgtgatttttaaacgtactgtgcagctcgttgctaatcaacgaggtttatggaaaaacgtgattataaaattttgctttttaattaaatttataaaccatattacaaaagactcgggatcccgattataaaaatattt

SEQ ID NO: 278142 - DNA, 666 bp, Cannabis indica
tttaaattttatttcattccattcttattttaattctcattctcattctcatttctatttttatattttcatttctcctaatcaaacgctacttaaatagaatagagagtggttggttcttccgaaagagaagactaaaaccacattgttctcgatagtgaaagggaaatttgaatttccatgcttaaataacctaaaaatttgtctcctaaatgcaaagttataaaaattggtaatatatgacactttttgtatttttcccataataccctccccacctacatctacccactccaacctttttctcatcaattcaacaaacaaaatccccacccaaaagcttccacaaccaccaaaaaatttttcttctcttcactcatcactaaaagctacaaccttccacactacaagctaccacactaatccaccacattacaagctccatcaatgggtaagtaattaatttttttttttttctaaatcttgtttgttgttgtcatatttaattaagaacgttgtgtttgatgattgatctgtggattgttgctgttattttgttattttttctgttatattttttgctgcatgtgaaaactgggattttgctgtttttctgcattttttttcgtcgggtccgatggggcccgatgctggcccgatgggtgg

SEQ ID NO: 278143 - DNA, 562 bp, Cannabis indica
cttcccaatatcacccttgctcgtccagctaagcatcctgggaaaccgaatcccgtggttcgtgccatacctcttcccaacctccaaaatggcctcgtacgcccaatattgtactgcaggtgcgaagccatatgctgtgtatttgcactcatgctgaacatccgaactcagcttcttctcgtagttggccttctgtttcaacatgtctttttgaagcgagtgcatgagtctggcgaatgagtgcttcccccaaggaatccggaagaagaactcgagatcttcgacatatctaagtatgtcaggcgtaatcagcgcgttagcctcgcgacccagaagcactgactcaacaaacaagcacaagccgagcttgtacaagtcttccgggttctgacagtttgtgaacctatcttggagtgcttctgtcttcacactaccagaccggttgaaatatttgttgatcaatcggtctgacccttagcgagcaacctacgtagccttctcctcttctgttggccccgtggagaagtccaggcctgtaatgagtgcaaaattaagcactccg

SEQ ID NO: 278144 - DNA, 507 bp, Cannabis indica
ccgaaatatgaatctctaaaacaatgtaaataaacacatataaagtttcagaaaccttacagtgggtgcagcagaataataatggctccttccactcagatctctaagccttgtatcttgtctgtagcagagtatcaccaagatccgagtccgaatctccttctcttgaaactggattcttcatagccttacactctaagattgagtaccacttgatgtgtgtggggacttactctatcactatagggtatgaaaatatgaagagaggaagagagaggagtggttcgaaatagggtagaagtgatgtctcagaaaatttgactgaaggcttgaatttcatcatctttgatatgaggcatcaatatctatttataggcaaccacctatttttaggttagaattattaggcattaaaatattgaaaaaattaaatggtaaattcccttcaaagtggccggccatggatatgtgggcccccactttgcaatttttccttattctctcaaa

SEQ ID NO: 278145 - DNA, 622 bp, Cannabis indica
attttctctcaaggatgaagcttggctttgaattaaggcatcatttttagccatgaactccatcatcaacacctcaaatgagcttgattgagccatttgatgaagatcttcttctatgttgaactcttgtaaatcttctaaaatctcatcatttggtccttgagtgtaagtgtcaaaatttggctccaaattattgtagttgtcctcccaaacatggtctttgtttggacaattacaacaccactcattgtactccgccatgtcttccaacatccaataggcttcatcgattgatagttggtagaaattggtggtaccatttcctctttctacccattttcgtgtgcttggattcaacccatttaggaagatttctaattgacactctttggacaacccatgatatggaaacctcattaggagtgccttgtatctccaccatacttcatacaaggactccaagtcatgttgaacaaaattcataaggacttgtcgatgagacatcccaagtaccttgaaaaaggaaccaagacaaacaaacaaagcgtaaaatagaacaatgaaataaaacgaaacaaatgaaaaactgaaaaaaaaacccaaattagatagtaattaagtt

SEQ ID NO: 278146 - DNA, 760 bp, Cannabis indica
agtgatccagagagagagaaggaaatgagaaaaaagtgattttaaaatcattaaatatgtgtttttaaaaatttgtttaaatttagattttaaattaaaaaataaaaataaaaatcagttaccgaacattattttcaaaatgtgtttttataattttgattaaaaaaataacaacctacttttaaaattgttaccgaacagagccttaaatatttaaaagaaacaaaataatttttatttttattttcaaaagaagcttttatatttcttttatttttttttactaaaaacacaactgtagagttgggaaaagacaacttcaattaatatatatatttgatcagaagacattcattagtactatttttaataactctttattacttttcatcatgtaattagcagacaatatataaatatggataaacaaattaattatgatgtcctcaaaaaaaaaaaaaaacaaaacaaacaaattaatgattgggggaattgacatttgaataatcgatctaatataatacaaatcaaacttcaaccttaattatgaagaaaataatagtccaaattaacatgaggctattgataaggtaatacaatgaaattttccatgcatgcgtatatatatatactaggtgattgttacgtgccaaaccacgtagtgttagttttatttaatattttagttttttattttaattaataattaaaatagtataattatttgaacgatttgttttataaaaataaaatatgtgtc

SEQ ID NO: 278147 - DNA, 672 bp, Cannabis indica
accttccacaattcagactccgagtgaataccccattctcctttcagttcttggagataacagtaggaactcttaaccgagtaaaacccattcgactctttaccccaaaaccaagaatcaacattaacattatcacttagaggaacctgcattatcaactcgatatcccttgcctcaaacaaatcatgcaagacctcaagatcccattgcttacgatcgatgtgcatcaactgcgagaccgtgctatgagccaacacagggtgtctagaaatgacacaagggttcacatcagaaatcagccaagggacattaagcacaggggtagacacaccagacccgattctccttctagcaccatcacgaaccagtcgttgtgattcaaacacactccgccaaataaaacttgggttaggacctatctcagccgttagaaaattaccatttggaaagtagcgggccttgtaaatacgtcccacaagagaatcttcatacagaagaagacgccatccctgctttcctaacaaggaaagattgtaatcccgcaaattacgaaagccaatcccacctgaattcttgcttctacaaagccgtcgccaactaaaccaactaacaccttttgttctattattagaggacccccaccaatactttgacattaagctctcaaggtgt

SEQ ID NO: 278148 - DNA, 800 bp, Cannabis indica
attgtcgttttgggtttttgatgaagagtttgtataccaaaacgacaatgactaggccgatcagagctgtgtagagttgttcttgttccatttttgaatacttgaaaagcttttttatgtgtttttgttttggcagagaagagtagttattaatttttgagatgtaattcgtataaatatatgggagatatttatatgatgataattgtacgattttgatgtgtgactagatctgagtacgtgtgtggataagagaatttattggctataaatatattatatataaatattacgtcattgactacgttcttttttcaatggtaaacatactattatttactcgtgtttattactttctaaatgttattgtaatttttttttaaatgaaatgtcattgtaattaaatattacatataatttaatataataatttttataatatattcactctatgtcatttttaaatggttttattaaaatttaaatttattaaatagttttttcttgtattagcttatattattagtgattgaccgttaatgagcttaacatcatgtcaaatttaagtgaaggagaagtgtgaatttttttagttgatttgaaacttttgataatcagatgtagctagtgctcttcctaattttattgtatactttagataatcagattgcatataaaagtgtggaattaagtgggtttaaagttaaaaataatgtttgattttgaatttatgatttcggtgttttgggaactaacatcttggcattaatactttccgtaccgagattttcttcaaacaa

SEQ ID NO: 278149 - DNA, 949 bp, Cannabis indica
acaagtcgatgaagatcctgaacgccgtaatcctcgcagccgaccatcaagagacaacgacgcagagtcagcctcttcgtcatcgcatggtcgcactccaagcaggtacacaaggtccggctctgtacagacacaacagggaggacgttatcaggtacaccgaggtgatctgcgtgatcatctcaacgcagttttcagggcacgctctcgcgtcccacataatactgagacactccgtgatccccatgcggacgatcagggtgccaatacttataataacccgcctaccgcgccgatcgcgaccactgggattaatgtcccagcaaatcttgccgcagtagttgcgagccccgcagttgtagcagccccggctcctgcgactggagggattgaccaaagcatgcttctgcaggctttgaaaatgctcgagcagcaacgaaagcctatatataagttgcatggtacctcgccttttactacagaagtgcgacaggctcaacttccaaaagggtttcgtctatccgagtccctcaaatataaaggtacttctaacccgatagattatcttgaaaaatttaatactataatggaagtggaccaggtaccgcagctcgcaaagtgccgcattcttgcggcaacactcgaggaaaatgcccatgattggttcacccaattacccgaggcatcgatatcgacgtgggaaaccttcgtcgacctattcctcacacatttccaggccacaatgacgtataggccaccttatacgactttggccaacatcaaacaagaacctggtgagtctttacaagactatttcaaacgctttaacgcagaagtaacaaaggtcgagaaggcccccgagtcttcgcttgtttgcatgctgataacaggtatcttgccgaggaccgacttttggaaggagctacaggctcgaaggcccgaatcctta

SEQ ID NO: 278150 - DNA, 582 bp, Cannabis indica
tgaatacaatgacaaactgatgatattccttgaagactcggttcatgaggtccataaaagctgctggggcatttgtaagtccaaatgacatcaccatgaactcataatgcccgtatctcgttctgaaggctgtcttcggtatgtcttcatttttgattcttagctgatgatatcctgaacgaagatcaatcttagaaaacacctttttcccttgaagctggtcaaacaagtcgtcaatcctcggtagtgggtaccgattctttatagtcaccttgttcaattctcggtaatctatgcacattctcatagtaccgtctttctttttaacaaatagaactggtgcgccccacggagagtagctaggtctgataaaccctaacttaagcaattcttccaactgtattttgagttctttcaattcagatggtgccattctatatggtgcgcgggaaactggtgctgtcccgggcactaattctatcacaaattcgatttctctgtgtggtggtaacccgggtaactcctctggaaatacatcaagaaactcagcaactacccgtgtttcctccggctttctttcaa

SEQ ID NO: 278151 - DNA, 605 bp, Cannabis indica
ccctcacatgaaccaccccaattgtgaaggcccatttcactacaaaaaaaaggatattcagctacaaaaaaattggtagcaaataatgcctatttggtagctattaaactttttgctactaactttttttggtggctacttcgtagctaatactctgttgctgaaagttttttgctaccaagacaatttgtagcaaatttgctactaatatttttgtagcaaaaaatgtcaaatctagtagcaaaataattactttgaaagactactaaaacttttttgctactacattttggttgcaaatcactttaaaattggtaacaaatacaactttagtacttaaaaatataataattttgctactgaaattttgttgcaaaataaatttaaattgaattatatgtaatttttcaaccaaatttatatttaatatttaattttaattattccaataatgtaaaatttctaattatatatttgtagaataattaaaatatcaaaactcactttagaattaataacttatatatatatatatatatatacaaattcaactagtaaattgttgatatataatacaaaatctctaacataatttaaaatttata

SEQ ID NO: 278152 - DNA, 702 bp, Cannabis indica
atgtcccaccagactagagcgtcatcttggaactagaaggtggcacacaccaccttgtcatttccggtgacacccataaagttcagtatcctggtgatcagcgttagccactgtttggctttcatgacatctggacctcccagaaaaaccggaggtgcttgcttccgaaacctttcacacaagggttccattatgtttgccgctaccactatctcggcctgagcagcaggggcacaggcactgcaggagccccctgctgcctcaatctctgaatctcctgatcttgctcctctattccggcttgtatttcagcaaacctagtctcccaattctgggcttcctgatcggcttgggcagcctgtggcgggttatcatcaccccgaccacgagctctgcccctgggacctctaccccggccccaaacatgcgagggaaactgagctccctgaccctgatttgaccctaatgagttgccctggctcctggtgttccgcctggcgtccatctagtctgaacagcatgcgaaaccaagagttggcagatcaggtgatgatcaaagagagcttactaatgccgctaaatttagaaattaaaaacatgcgcctattctactatcaggctactaacatgcttcctatcagacttttcttatttaataataattaaataagctactaaagcaataaaagcttactgaaccgt

SEQ ID NO: 278153 - DNA, 640 bp, Cannabis indica
gtaataaataaaaaatttgaacatccacataattattaatatttataacatactctatattagtacacatttttacatttttttccccttataacaaatagacggctttaatttaatgaattatgaactagaatacagttaaatttagagaggacatgagaatgagaagaatttggacggtggttactatgcttataagtgataatcacaataatcctaataccactacaatgtcacaattaattcataaaaaaaaaaaaatatatacacaattaataaattaatttcttttgcgataaaaacaaaataaaaaatgatttcttgtaataaaaatattaattagctttggttttttagctaaaaaaatcgctatattattgtttatcggacaacgtgctcctaaaaatcaactccaatgtacgatggaatactggccaatgtcggccatcactaccaataaatatataaatctacacactcaaccttgtctgtttgatcacgtaaaatatcattaataaaagaaaaaagagaaaaaatcttgtaatagattatactttaaataaaatcagaaaatagatttaattaacatttattaaatgtgtgagctttacaaaccaatatgcaaagctaccaatattct

SEQ ID NO: 278154 - DNA, 705 bp, Cannabis indica
ttgcgatcgatgatgagtctaggatttagaccagttcccttggatatcagtggttagtggttttccggatgtgtttccagaggatttaccagggttaccacctgataggaagatcgagttttgcattgatttgattcccgaagcttaaccagtttctattgcaccttatcgcatggcacctgcagagttggttgaattgaaaaaataattaggggagttaatggataagcgctacatcagacatagtacttctccatggggagctccagtcttgtttgccaagaaagctgatgggactttgcgactttgtgtcgactatagaaagttgaatcagatgacaattaaaaacaaatatcctctaccgaggattgatgaattatttgatcaacttggtggttcaaagttcttttcaaagattgatttgaggtcaggctaccatcaattgaggattagggaagaagatatccctaagactgctttcaggacacgttatggacactttgagttttttgtaatgccatttgggttaacgaatgcacctgctgcatttatggatcttatgaatagagtctttagacctttcttggataagtttgtggtggtatttattgatgatatcttggtgtattctaagacacgtgaggatcatgctgaacacttgacaacagtattacagacattgagagatcatcaattatacgctaa

SEQ ID NO: 278155 - DNA, 638 bp, Cannabis indica
accctctcttcttagcaacaaacccaagcccatacatgtgtattaaaatttggagttggaagtttgtgtttgttttatttttaatctattgatgtaagtatgttagttgtacatttatattgttgttggaacttaattagtttcaagtttgttattttgatttaagtgtgttgttgaaactttaaaaagattattgacttattgttgttgttataacttttattagtctcaagtttgttgtattttcttaagtgttttggaataattatattaatgatagtttaattattttatgattatttcaaaaaaaaaaaattgtgatagttcaaaccgcataaaccgcaaaaaccgcaccgcaccgcatcattttttgcggtgcggtttttgcggttttttagtatcgcggtgcgggtgcggtttggaaaattagaaaaaccgcatgtgcgggttggtttgaaaaaatggttaaaaaccgcacaacccgcaccgcgaacacccctactaaataagaataggttaaaaactttaggaaattacactctataccctttttatattgtcctcttttatttttaccctcttttttaaagtctgtcatttttacttctttttttaaacattgtaccaattttgcccct

SEQ ID NO: 278156 - DNA, 820 bp, Cannabis indica
actcatgttgttcatggagtagaggatgagcgttggactaaaccggatattaacacgattaaggtaaatgttgatggagcaatttttcaagcttcgaattctcatggttttggcttcatagctagagattgtgaaggtatcatgattgaagcccgtacttctattactctcggaagtacctcccctgaagtggctgaagttattggtatcaaagaagttttgagttggctcaaaactaagacttggccttcggtgattgttgagacggattgccttgttgctgttcaagcaatacatagctcggtgtgcctcccttcttacttcggatttctggtttcggattgtaagaatttgcttgatgaattatctaatgtctctttgaattttgttaaacgcactgctaataaggccgcgcatttccttgctcagagctcttgttactcgtcagtacgtatctttaatgtaaccaactcaccttctgagttgacgaacattgtaatggctgattctatttaataaaattgccatatttccattcaaaaaaaaaaaaacttaatttcaacagtctgttaatgtattattgttggtctttataatatatggtcgtctatttgatcgtcgcaaaactggatgaataggtaataatttaaaacagttgccaaaaatttttacggactattaaaaccgtcacattaaaaaaaaaattaaatcatccaatgaccactctcctcccatcacacaacagtagtccaccaccggactcaaaataccaaacagacatgaaatgggcatataagcattaacattattaatttagatt

SEQ ID NO: 278157 - DNA, 500 bp, Cannabis indica
aaggcatgactaggtagcagtataaccccttatcggtcctgaagctagtgcactcttgatccgctacgtgcattttaatttagttgtaaccggcgtacgcgtccatgaaggacagtagtttgaatccggaggtggcgtctaccatctggtcgatcctgggcagacggaaataatcctttgggcaagctttgtttagataagtgaagtctatacaaactcgccaggtcccattaggtttcggcaccaggaccggattggctagccattccgggtagtagacatctcgaatcatgccactcgttaatagtttgtccacctctttctctaaggcttcggtctttactgattcgaggggacgttgtttctgctggaccggtggcatgtctttacattgaggacatgggtgatgacgtggggacttatgccagtcatgtcttcttggcaccatgcgaaaacgtcaatggcacccctcaatgtttttattattctttctttttcct

SEQ ID NO: 278158 - DNA, 662 bp, Cannabis indica
cctaacaataaggacgagcccatttttctaatcctatattgtcaacataagcagcgatgggaggatccatctgtcggagcacctgcaaatgtctatcacattccctcttcgaccatgcgtaagcggccaaccatatttgcgtgttacatacatcagtcttgaacttgtgggtgacattcatagaaatatgtttgtagcatgcacagtggcatgcttcggggaaaataacctcgacagcatgttcaatgctttgatgcctatccgatacaaacactaagttttcaacctccccaatcgcttcctttaacttctgcaagaaatacttccaagagtcatgattctcgctgtcaacaattgcaaaggcaatcggaaacagttggttatttgcatcgtacgctacagcaactagcattgtgcccccaaaccttgtcttcaagaacgtgccgtcgatactaatcacaggacgacaaaacttaaatcccctcctacaagcagccagtgaccagaaacagtacttgaacctgttatcctctgtgataatgtctgtaatagtacctggattcttctgttccagcacgtaaaagtaaccaggtaactgactataagctgctgctggcgtacccctcgaatacataagtcccttctctcggcacctccaagcc

SEQ ID NO: 278159 - DNA, 509 bp, Cannabis indica
ggacttcatttcgttgaggtgttttgttgattttaatttcaaatccgtaatgactgtaattaaggatatccaagagaaggttaatgccattcatcgtcgtccttctgacgaggtatttattcttattttattgtttaggtttttttatatttttttttgtatagtttctttactgttttatttaagtttcatttatgttggttgatacagggaaagtcatcggatgaattagtaactgtaaagaagaagtcattccggtacttaatattttacaaagggtcgcaactgtaacaaaacgattttgaaactattaaaaaactgtttcaaatttcataaaaatgaaatcccatgtatttagaacatcacagatcaacctgtttgaatttgcacacaaaattaaacaattcaaatatttcatatgtatctattttattgcttgattgttgcatgtctttcgattgtgtccgtgttgtccacatttgccgcacctgttatgtttttttgtatcc

SEQ ID NO: 278160 - DNA, 596 bp, Cannabis indica
tgtgtgaagtcctcaaaacaatgctgtaaaacttttcttcaaacaaattttaaattcttcccaagtcattacactgacatcccgggtttgacccacaatatcccaccaaatgcaggcatgatcttgtagcatgaaggttgcacagttcactctcttagttcccatcacccccatgttatcgaggatacgggtaatagtactcatccactgctcggcctttattatattagtacctcctagaaaagtcggaggttgcaacttcacgaatcgctcaaataccgagtctctatgcggcattataaacccctggttacccaccactagcacaagtgctggtggtaacacttgttcaacaggggcagccgatgccggttgccttaatcgtcgcaactcctcttcttgacgaactatgatacctcgcatttcttgatacatctgctgccaatcagcaagaggattagcattgtcaacctccgcattatcccccgaattctgcggaggtggaggcgatgccagtggattggtttggtcaaccccaggctctacttgctcgccctatggtctagatgatttcggagggtccattactagtaccc

SEQ ID NO: 278161 - DNA, 583 bp, Cannabis indica
cacaaaattctaacaaaatttggcttttgtttcaatgaaaaacgatttttgaattaaaagatatgaagaacacaagtttgaggcacaggggtatgcagtgcatacccctgcgcgcgcggagagcatgacgtgggcgagaaacaaggctgcacgcagccttcttgacggaggaagctcggtgcacgcagcctgttcagacagggcatatccgagaaaactcgatcatttttggctgaatggccatgcgcgtccgagcgtgtccaaggcgtgtgcgcgcgcgtgtgtgcattcaaatcccgatattttcattcaaattcaaaaaatcataactaattcataaaaaatccaaattagattctgtaaaatcctaaatttattaatttttcgtctactttccagaaaaaataatttcagatcgaaataaaaaatatttcagtaacatatattgcgatttctaaactatcatcaaataagcacataaaccacatgaaaccatccaaatcaacacataacatcgttttaattcatatttcatgaaagtaaatattaccatggctctgaggccagttgttggatatatttt

SEQ ID NO: 278162 - DNA, 602 bp, Cannabis indica
tatacaatctcttcttcaaatacttgtttgccaatgatttcttcatgtaaattgaagaaagtttattccataatcctagtgccttctcctcatcagatacttcccgaagtacctcatccccaagactcagcaggattgcactgtgtgccttgagttcgatttccagcttcctcttcttatcttcaatcagattcatagcttcttcatcaagagcttcatgaattccttgatgcactaggaaggctttcatcttaatcctccataaactgaagtcatttgatccattaaacttgtccacctcaaatcttgcagtagccatttaactcaatctgtttcttgatgtttgaagatcaatcttggaggtttgtgtgcggatcttgaaacctcttcttgacaccttgctctgataccatttgtggtgaatcaaactcacctttctctctcactgttgattaacaacagtggcaagattgaactcaaacaacaacatcttggacaagaaacataaaccagaaaaacagagatggaaacaagagaaataatgaacaaacaacataagaacttaatgaacacttgaaagaaaaagaagcaaagaactcaca

SEQ ID NO: 278163 - DNA, 1445 bp, Cannabis indica
caaaactaacatacataaacaaaaaagcaaccccaccaccatcaccaccgttcgaaccccgcaaccccaatgccaagagagcaagggactataccatcatatacaggcaacaaccatgagatatggtctcacctaaggtagaaatttacacaaatacacctgaaaatagatttttccttcgaggaaattacactctataccctttttatattgtcctcttttatttttatcctcttttttaaagtctatcatttttacctcttttttaaaacattgtaccaattttgtccctatcacttcaagatactctccatgtaactctcttatgtcagggtattttgggtacaatacatataaaaagaggtatgtttcaaataaatataaaattagagataaatttgattaattgattaataaaagaggtatttttcaacttacccctttttcttttatacttctacggttttaacttatgttgttttcctagcagctttatcaaaataacattattttgaaaataatggaaaaataatattttgtatttttttaaaaaaaattacctaaaaatgtaaataaataaatactgtaaagatgttaaatttttttcctttttttattattctatgaaatttggtaatttataaaaataccataaaagtatgtatatttttgttaaataattttctatattttgggtcctcatagagtgggtcataggcacaaaccaagtctcccatccatgaaagtcaagaagactacaaagtagtccccccaccacaaaatctactactcctttttcttattattttttttaaataattacataaaaatagtatttccaacacttattattttttattttttgtacagtaatagttaaataaaaatatttaacatgatactcaattatataaatcaaaatagattaatattagctgccataaaatcttatagtggcatgtatagctgccagccataatatattactagcattttagaaagtggcaaaattttagcaatatataattttcaatattagaatttataaattttgtataaaatattgatgtgacatatttttcccatttggtcaaactctttgaatagtatgatacatgttttagcattactcataagaattttgtacaagtgaaagttataccatatgagttgttaagtctttttataataatcgaaaaaggaaaagaagaaaattctattgggtagtaaggattattcatactaattaaaaagaatgataatgttaaatagcttaaactatagtgtaattggtatttttagtgcatggtgttgtgaatggtatattagtcaactattttggcgaataaaatggaaaattacaaatatatatatttatattgtcttttgtaaataataaaaataaaaaaataaaaagaattaagaaaatgactggttttcttatt

SEQ ID NO: 278164 - DNA, 1101 bp, Cannabis indica
ttttcttgaagtttaagaaaaagtgatttattgcatgtttgatgaaattgtggctgtggctgttgttattgtttattgttgttttcttaagtttaaatatgtttaattgagtagaataaagtaggttttgatgcatgattagttgattttaagcaagtatggagtttttagctaaaacttggtttttatgggtgatttgttgttttagcttgttgtagctgctgtggttattgttgttgtgttctgcaggttagatatgagtttctatgtggtttaatgcatgagttaggggttgtttgaagggttagtcaagttttgagtttttgaactcaatcttgaaccttcaatggtgaatctcttttctgggattaaagcttggttttattgctttggaaatgttcattagggtctaattagtaggtctggaaggttgcatgaagtttggggttaaattgcttgagttatgaaaattttaaggtttcctgcactgaaccgaaattccggttcagtatggcctgtaggaatcggaattccagttggtgttctaggttcctccaagttacggaattccagttgttgaaccggtctaccggttggggaaaaattgggaaccctagttcttcccatttttgtgttttttagggtatttccatgctttttatcgataaggaaacttttagattctagtttaattctgggagaagtgatttagcgtgtcacttatcagtgttgtgattattatggtttaggagcctgtaattcgccgagcagttcgttccactcagattgaccggcacacctgaattcggaatcaaggtaagattagtataacagtatgcatatgtatttacatgtttagcatgcatgttaggaagcctgttagattacattagatatgtatgttggcttcgtaccatctgacagtatcacatcggtacggctagagtatgactagcgtactgagtataggctgatattatggtcgatggtactgtactatttgaccgtatcacatcggtaaggctagagtatgactagcgtaccgagtataggttgatactgtaacacatcggtaaggctagagtatgactagcggctaga

SEQ ID NO: 278165 - DNA, 577 bp, Cannabis indica
aaacaagaaaattaacaaagtagtcttgaagtgggagcatggcaccggccatcaggtgcgtctggctccaggctccgaagccgccgtaattatggttaggcgtctccgagtcgcgaggtggccggtgataggttcccgaggtggaaggcttgatccccgcaacctccacaatattctccagttgatggggacaggttaaggtggaatgaagctcagccgcttcccacccggttgctcgggacttatacccctcctgggcaacgggtcccagggaaacctcctccaaagtagccatgcgtttcccgctcttcttcgaggcttcgaaccagaggcagacattttctattctgtgaaaaacaaaagagaaagagaaattccagcagttaggccccataccaaaccctaagtcaagaaaaggaatgggggtccccaaccgctggaaagaggccccctccggacacgtgtcacacgggaaaccctagaaagattccctgaacaagtgtcgggtgcagtaaaatcgcagaaggtggtttacacataaggggaacagaaaagaaaaagaccctatacatgccct

SEQ ID NO: 278166 - DNA, 684 bp, Cannabis indica
gtcgtgtacccagaccggaactgagacccagacctggacctaaatctgggagatgatcccaaacacagactcggacctagatagagatccggatacgaacctgtactagaaccatgacccagactgggatcaaaatgctggacctagatctggaccgagatcctgacccagacccaaactttgacccgcactcaggaccccaactttgacctggacccgaacctagacctagatcggggtccagacttggacagaaacccaaacacagactcggacccgaactcaaacccacaccaaggacttagacccagaacttaatccagactcagatcgggaatggaacttgggatgcgaacccacacctggagcttgatctggacctagactgaaattcagacccgaacccaaacttagaccaggactcgaactctgacaagaactcaaacccaaactcgaactcagaatcgcaaatggaactgaaccaaactaggactaggaccaagaccaggacctaaacccaaacccgaacctagatcaaaacccagacaaagacctaaacccgaaccgagacgaagactcgaagccgaacctatactgggacccaaacccacacaataaccgggttttggacccaaaattaggatagggacaagggaaatataactaggaccgagacctagtacc

SEQ ID NO: 278167 - DNA, 606 bp, Cannabis indica
aattggttccaaagataaaaatcatcgaaaaagaaaaggggcagataagcatgataactccaatatggatgaaaataaccatagaaaaactcaagatgagggaaacactcaagaagagaaagcaagtgaagtgagtcaagagatctcagttgattataccaggactaaaaactcatcaaatgaaaatgattcgaaagttattgataagacattttcttataatgtggcatgcaatatagtcaatgaaatagatgatcaagaaccaaaatctgtctctaaatgtcaaaatagaaatgattgggataaatggaaagatgctatgcaagttgagttagagtcattaaacaaaagaaatatttttggacctattgttctcacacatgaagatgtgaaaccagtaggattgaaatgggtcttcattcgaaaacaaaacgagaaaaatgaaattgtaagatacaaagctaggcttgttgctcaggatttttctcaaagacccaaaattgattatgaagaaatatactctcctgtaatggatgcaatcacatttcgatatttgatcagtctacagtttctgaaacttaaaaatgcatcttatggatgtagtga

SEQ ID NO: 278168 - DNA, 786 bp, Cannabis indica
aatattatcttggacaagaacattattgggctcatcatcatggtccacttccttagactttgccacatcagcagctttatatatagcactttccattcttttcctttttaattccaccaaatccatatccacatcagaaatgtacatagcatcattctctatcacattaacgataggatcaaaaataaccttatcaagtctttgaccaacctccctagaatcatgggattgagatatgggaatgccttgattgccgtgggtgttatgatgcagctggtgagatcccacaaaatcagcttgtgttgatggctttggagtaatggtgctcggaccaccattgttaccgtcggctcttggtggttgatcggcaaagctggtacgcaaccatggagaagctgtgaggaagctttgctttcttgatggggctcgcatggctataccataaggtttttcaatgtcttccaatggagtatcatataacttgtgacacaaacgctcggaatggcccattataccgcaaataaaacaaaaggttggtagatattcatacttgaagtttgcataaaatgactcaccacctttttttctgaatttcatgcgcctcttgagtggaacgtcaacagtcaaacgaactcgaacccgcaaatattcacgccatacaccttgaaaatttttcggatccgattccagataaacgcccatatagttccctgcttgttgtaccgcccttgcagttttgaatccagattgaagatcatggatttgcacccaaatgtccagcttatt

SEQ ID NO: 278169 - DNA, 760 bp, Cannabis indica
ttttatttgttaaacttttttatttacaaaaaggtaaatatcattttgaatcatgtgttttgcaaaagttactaatttgactctctgttttgttaaatgacaaaatagacactgtatttttcaaaatgatacaaataggaccctgaattgattttttgtcaaaataaaatttaataataatccgatctaaaagtgttacgataaaactgtttacattttctgtatttgttcatgttaggaattgttttcaagttgctcacattaaaaaaaattgtcaaaaattaagttcaaggtcctatttttaccattttaaaaaatacaatatcaattttgtcatttaacaaaatggagagttcaattaataatttttacaaaataccgggtctaaaatggtatttaccttttacaaaaatatattttcaataaatttaataaatagtctttttggttgttttatagtttatttattgttgtattataattgtcattttatagaaaattataaaaatatatcaacacgatttttttttttcatttttactctttgaactttttatttacaaaatacattttcaataaatttaataaactgttttttggtttgttttatagtttattcattgttgtattatagttgtcatgggtttgttttttttgattgttttttgttgtttctaattaatttatagtttatttataattatcgcgaggttgatttctcgttgtttttttatttttttattgagcaaagtgtattttt

SEQ ID NO: 278170 - DNA, 324 bp, Cannabis indica
ttcgaatggacagaagaatgtgaaagagcttttcaagacctaaaggcacagctcgcaaaacctcccatcctctctaaacctctggacggtgaggaactggggatatacatagcggtaacggagcatgccataagcgtcgtactaatcagagaagaagatggcgtacaacatccaatctattacatcagtaaaagactcatcgaggtcgaaggctgatacccgttgattaaaaagctcacctactgcctcatcttagcaacaagaaagctaagaccttattttcaagctcatcctgttcgggtgtacaccgaccaaccaatacgg

SEQ ID NO: 278171 - DNA, 619 bp, Cannabis indica
ctttgtgccgaaacccatccgtttcgcatacatttcgtagaatgcttcccattttcccagtttgtcgagactcttgcctaggacgtcacatatttgaatctcattcactggttttgtgatgtttagctctgctgttatgctttcccattcgtaggtttgttcctcattcatgttctctgcttgagactcggcctccatattgtatctgtttgaattaacaaattaaatgataaagttaataggtaaggaatggttttcgagaaagataaaaaaaaaggacttactgataagtaaccaattgttccttcgacgttaatgtactggagtggagttacagtgttcgattgttattgatatccaagaattagagatgaagagtaagggaaagatagtggtgagtcgatttaaattagattttatgagattgaatgcctcagattgtagagtaatatgggttggtgatcacatttaagtgtgttgggctgatattaatgggcctttcaaatattggaaactctattccactctcttcgtacttttgaacagtaaaatagtacaattacatttacttttgaataaattaattggaaaataatgttattgtatgatttttgggttt

SEQ ID NO: 278172 - DNA, 556 bp, Cannabis indica
cgttcattagcaatttaacgccatagaatctcgaaagataagtattatttgtaagtgttttatttttagtatgggtcaccctaatggtggcgactattagtaagacttacaaaagtatgaaacaatggtgaaggctcatgaaataggaagaccttgactctcgcctaaatgggagaacgtcggagtctcttttcgatcgaataaaaggttgctagaatgtttgtcattttagatgagttcactactctattcaatggatgatgctttgactctcgcctaaacgggacactggatcagtttgttgaaaaccttggaaaataaaaatatgtttcatttttggtatttttataaacatatttgttatacttgttattttctaaatttgtgtatgaatttattgaaccaaatgatttacttctgtttattgatatttgtagtgtcaaaatgaacaacccacaccccgacccactcctagtaaatgcctttgcaaatgaactctatagtgtgaaaatgctccctggaaagagcattagctcacacttgttaatgatgaatc

SEQ ID NO: 278173 - DNA, 514 bp, Cannabis indica
aggtgaccaccatctaaagtacagattcttatttctgcaattttttttatctcatgttaagctaaaagatcaaattggatcaaatagctctgatgtaagttactgcggtaacaaatacacttttcgatcaataaatgaataaagatagttatttcaaaattaaaattgagtcaaaattatcagcatgtctctaatttaccatccagtgcgtacaaaaggtttggtcaaacccaaagtaccgaacagataaacaatatacttgtaaaagccaagtgaccaagagtcatacatctactcggtcacttggggataacaaaagcatgtaatacagggattaaaagctgcctggtcagcctgttgtctgaaaaatgaaaaataattctaagtttaaagaccgcttggtcggtcatgatgtcttagaaaaggccttatggccgaataagatatataaaaaaacaaaaagataaaaggagaagtgtttaaacagctggagtcccaggctcttggttcggat

SEQ ID NO: 278174 - DNA, 658 bp, Cannabis indica
ttgtacagtatgaccatagaacttcggggagttcttccagccaatttcctttggcatcttcaagtttcttctttagtgtatccttcaaggtcttgctgactgcttcaacttgaccattttcttggggatgtgccactgcggagaagcttttgatgatgccatggttcgcgcagaaatcagtaaagattgactgtcgaactggttgccgttgtctgaaactattttgtacggtagtccgaaccggcatatgatgttcttcactataaagtctttaaccttctttgatgtgatagttgtgagtggttcggcttcagtccacttagtaaagtagtcgactgctacaaccgcgtactacactctgcttttatcttcgggtaactatccgattaggtcaattccccagatggcaaagggccacggactttgcatttgtgtcagctcgttgggcggagctcttggtatctttgaaaatctctggcatttgttgcacttcttgacataagctttcaaatcttcaatcatcgtcggccagaagtaggcttgccttagaattttcttggataagctctgtccgactgcatgatttccacagaatccgtcatgaacttcatatagaagccgtgcagcttcatttggtgtgacgcatctgagtaatggc

SEQ ID NO: 278175 - DNA, 545 bp, Cannabis indica
acacataataataatctcacctaataattaataatattttttctttaatttttaattctatcactttcaaataacatagaaaaaaactagcataaatttagtatacgtgcctcgcacgtagatttttgctagtatatatatatactagaaaaaagttacgtgcaaggcacgtatatttagttttatgttaggtgttctataatttaattgagaaagattcaataaataatcatataatttaaaatgatttaaaaactaattttaattagtgtgtggggttatttgaaaatcaatagtgaaaagtcaaatttaaaatttgcagaaagagaagaggagaatggagattagcttaaaatatatttaaaaaataataatgctacacacttactatggacacttaactcgagccggtaataataaaattataaagaataagggtagcagacatataactggacatatgaaagaaagaatataaaaaacaagaaatatgatagcttccaaataatattataacaaagcaatgctctccaaatttatcttaa

SEQ ID NO: 278176 - DNA, 155 bp, Cannabis indica
aatgcctaataattcctaacctaaacctagtggttgcctataaatagatagtgatggctcacacttaaaagatgatgaaatttcttgccttcaggaaaaattgagccatctatcctataccatagccgaaccacctttcctctcttttcttcttc

SEQ ID NO: 278177 - DNA, 279 bp, Cannabis indica
acactgtatcagttcgttggaaaccttggaaaataaactatgttagatttagtatttttataacatatgtgattatttgttttctgaacctgtgtatgaatttatagaaccaaaaccttacttctgtttattgatatgttgtagtgccaatatgaataaccctcatcccgatccactcctagttagtatctttgcaaaagaactcaatagtgtgaaaatgcatcctggtagttgcattaactcgcacctattgttgatgaatctgaaattccaaaaggc

SEQ ID NO: 278178 - DNA, 565 bp, Cannabis indica
taatatactaaaaatacaataataattattaaaaataactaattgaatttatataataaatacagttacaatgatcacaacatcctttaaataattttactcacctaaatttttatacgaatttcttttataaaattttcctttattaaccaaatttatttaatattaatcttagattatacatttattagttgaatagttgtgctatttgcacacacacacgcaaaaagtagtatttatcatcacaaactttaataacactccaaaataagcattagaatttcagaaaaagaataatttttgatactattaaataatttattaatatcaattctacttttactcttattatgtttgattgaaatccaacagtaaaattatattttcactcaattaagacattctatagcataagatatatacttttactactaattaatagttaactcaaatatttagatactaatgaatttttttaacaggtaacacaaatatttaaatagaaaaatgcttaaagttactcatcaaggagctagtgctacgaaagagactaaaattcaaattt

SEQ ID NO: 278179 - DNA, 515 bp, Cannabis indica
acactaattatttcacaaatattaaagtttttaagtacttttattatgacctattaaattaatgatttgtttcgtttgttgcagtttaaaaggaacatatcatcctcttacactaacaaagaaatcaatgaaatacgtgacgaatgggcaaagtatgtcatgcagatgatagcagcaggcaaatgactaataacatagagtatgatgaccaatgatcgctcatggacgatccccatgtgatctaagaaaatgattgataggtttgacatcgatcttagttactattgtcttgcttttttagtttttaggaagtgatctccagctatttgattaaagtcccaagtgactacttggagacttattttgttcttagtatacatatttttagatgttcagaagatattctacaaaagattgcaaaatgtaaaaacttaattggatttccttcttttgtattgcattactaaactttgatggcatattatggttttcatgaagctttaattcttttgaag

SEQ ID NO: 278180 - DNA, 704 bp, Cannabis indica
tacgtgctaatcactgtcttacctgttgtccagctataaaaggagattccgaatccccgggtgctcctgatcaggtgccggtaatcctagtcacacaaatccgggataattcacacttagggttaacccctgattttcaactcataaaattcaaacatggcatttataactcagataatcatacagagctcggaacgagctttccaacgatataaagaactcccgaatcggagttcggatcacaaagttatgcatttttgaaaattcaacccaaactgcccaaaaacacgagggcgggccgtggcatgccccagaccatgccgcggcacctgggaccaattcccaggtccactcagaggagcgggccgcggcatgctccagagcatgccgcggcatctgggtgcagaacccagaaaaccagcaagctcaactcgaattttcagcccaaaactcaatcttttcactccaatttctcaaccaaactttcaaatcaacaagtaaggttgctagcaattattagatgatcaaaataacctatttcatgcatcaattccaataataattcctcaatttcagattactcaaacaacataaaattcatgctttaactaaacaacttcaagctcttgaacaagagcttcatcaccaataacccaaacaatttccagagtaaaaacatcctaagaacacatgattccaagcta

SEQ ID NO: 278181 - DNA, 567 bp, Cannabis indica
tttttaaagtattagaatgacatcccaacagaatgccctttccaccattttggtggaatgaatattctatttcataatggaaggaacaacaattatcatgtaacatgagaaaaaatttaatgatttttatcaactcttttatgcattttaaatttaattttattcaattctcattcccattcccctaaaccctaaaccctgaaccaagaaccctaaccctgaaaccctgatcccaaaccattcccattcccattcccattcccattcccattcccattcacattcccattcacattcccaggcccattcccaggcccattcccattccaattcccattcccatcccattctaaatcccattcccattagcattgccattcccattccccaacccattcccattcccattcacattcctttcctatttgcattcgcattcccattcgcattctaataccctagcccattcccatttccattccccgacgcattcccattcccattccccggcccattcacatttccatactcattcccattccctagcccattcccattccaaatccc

SEQ ID NO: 278182 - DNA, 629 bp, Cannabis indica
aaagtaagaaaactagacaagaatacctcttcaaggatcacacaatacttgctgaaaattactagattcagaagagaaaatcccctttttcttgctgcacaaaggggtcgaaatggagaggaaaagagagagagcttttgagaaaatttctaattttcttttctaaatttgatttttgaaatgaaaatgaaattaaatgtcacttactcctattttacttcagccaaaacataataaaataaacatataatttaactattaaaatcacaagaagacaaaataataatggggcaaaatgaccaatacctaaataacactaaaggggtaattttggttatggtcaggggtatgggcgtctgatcataatccaggatatatgtatgctatatgatttatgcttttattactgagtctgtcgactcacagtgctatgtttatgtgtaggtaagggcaaggctaaggccgaggaaccgtgaggatgagcagatgaagattgtacatgtcagagcaattaggcctggagcatacaatcctcgggacatcagggctttagttgttagtcgttgggcaacaaatatttggtaaatgactagtaaacttttgtaaagatttttgtaaacgggatccca

SEQ ID NO: 278183 - DNA, 266 bp, Cannabis indica
tgtagatcatctatagaggatcattgattattgagattataacaatggataatttatagcgtatctatatcgtggaacatatagagcgttctatatgactgagagtgcaatttcaagttccatgcgtggatgcaactaggaattaataagtcagtggatttacttggtaacttccttgtctgcttattggaagcttggttggcatttaagtggttaaattggaaatttggcgtttttgagaaaataggatggaaaaatgacaaaat

SEQ ID NO: 278184 - DNA, 670 bp, Cannabis indica
tatataaaggaataacaatatttaaattaggctgtatatgttatatgtgttgtagtttgaccaataagataaaagttaactacatatttgttgggtccatatggtagataacgaggtcatgtagtaagtggtgacaaacatgaagtccctcgtgtatttggtagtaaaatttcgatgacgaaatttctttaaggagggtagaatgtaatacccgataaaaatatacatatattttaaattttatttgttatacaatttgtgtgagaataagtatttatttatttctactaatagtgaatagagactattgcttggaataatattgatagatttctaaacatagttgaaattatagtaagtgtcaaggtaaaattatggtgtttttacgaattaggataattactcaattaaagcccaatatgaaagtctattagagttttatagattatttagtgggtttaatttattgtatgaagtgcattaaataacattataatggaattaatgtcacaaaaattcgtaggttttgataaattcgcaggattaaaaactgttttactaaaatgatcatatctagagttttagagctccgattgaggtgattccagtggcgttggaaagataattcaaagatctataaattttgtagaaatagttatatcataattcg

SEQ ID NO: 278185 - DNA, 545 bp, Cannabis indica
gagtagtctgatccatttcagcaccatgattctgggcttcctggaataacctgccatttggagaaggtgatcacgcacattctgatggggttccatccgtgcgttgatgaatttcttagtcgcgtcaaagcgagactggatagatgccataccgaatagctcagttaactgcgtcatgatttctgcagccgtgacagcgttagcaaaccttgttttcaaggtgtcaaccatgctggaaagcatgaagtatcgagctttgttgttagcattctgccaacgctcgaacttctctttaacagctttggttgcattgtcacctggctgttcaggagacggctcagtcaacacaaacagggcactttcacctatgagagcaatattaatgttctctctccatttagggaagttagatccatttagcttattttcagtcaacagtgacaacatgggatttgacatggcaattcaggatactacaaaataataaatagaaatcaattatggtttaacacaaaatcttattcagaaattattagcacatagca

SEQ ID NO: 278186 - DNA, 652 bp, Cannabis indica
cattaccaaccttaagtttcaactctccggatttcaaataattcaatttttcaagcaattgcaatgaacaacttacatagtttgtagacccagaatcaagaatccaaatggatttatcattctctaaaacacatgattcgaagactaaagcatcactgcttattcgtttttgaattgttgtttttgctggttaattttgttgtgaagtataacttgaggaagtggaatccttttctcttatcttctcaactgagcttgaattagtaggatttatggagctatgaactattttctcttcagagtgaacaattcccagcttatctgctttctggaatttcatgttcatcatgagcacatgtgaagtattactctgaccaggagttttattcatatcttcaagttcatttgctaagatattaactaggagtggatcggggtgagggttattggcactacaacatatcaataaaatagaagtaaggttttggttcaataaattcatacacaagttcagaaaataacaaataatcacatatgttataaaaatactaaatctaacatagtttattttccaaggtttccaacataatgaaatacagtgtcccggtaggcgagagtcaaagataacattatttgaatagagtagtcagct

SEQ ID NO: 278187 - DNA, 628 bp, Cannabis indica
aaaacttaacaattttgtcgttataccttcttgtgaaaccacggacggaaagtttgcctatgcaaggcatcgtgattaccattaggattttcatgcttgatcttgtccaaatgttcactgtgaagtatgataatgtcaagatacgatagaaggagatagaaaataaaaactaaaaatttaataaaataatttataaaaatgtaacaaacttactctaagtaagcttggatttcaggagaattttgaagaatgtaccactcagctttttcacgactggtatgatcaagaggcttgataagtccgctagttaaaggacgagattgagaattaaaaactgagagatagcgacaaacagaaggcgcatcttcatttcgatcaagccgattaaatcttgtttcacaccctttaaagtacattgaacaaaggttactgcctcatcagcaacataaccttctgcaattgacccttcaggacgtgccttattcccacataattcttcaattttttcatgtacctttcaaaaggatacatccatctcataaagaccgggccacccaatatcgcttcttcaggcaaatgcaataccaagtgtatcattatgttcaaaaaaagctggaggaaaaatcaa

SEQ ID NO: 278188 - DNA, 739 bp, Cannabis indica
cccgaagagttgccaagagtgttatgggcctaccggacgacccccagaaccacgaccggccactcgcctttttcaatggcgtacggttgtgaagcgatggtcccggtagaaacgttattcccgtcccacaggagaacgacttacgatccagctacaaatcaagctttacttcaagaagcgctggatcaagttgaagagctccgggacgagtcacaaatacggatggcagcttatcaaaagaaggtgaccaaatattttaactccaaagttaaaaacagaaaatttgctattggggatatggtcttaagaagagtcttcccagccacccaagaacccggagtgggggtacttgggccaaattgggaaggaccatatgaaatcgaggacgaaatcggttcaggcacttataagctaaaaaggatggacggaaccattgtgccaagggcctggaacgccgatcacctcagaaaatattaccaatagtccaaaagtgtaacttaggctttgtttaaagggtttgtaccgtctaagtgtatgcagcctctgtattttaaataaaactgagtgccttaaaaacaaagtttctatgccactcaggggggtactagggcataccacacggacagacaaaaaacaggccaaaagtaaaacatcctgacccaaagggcaggtccaaaaaagaaaaatatgtgcatcaagaaaaaaagatcatatataaacatcctgacccaaagggcag

SEQ ID NO: 278189 - DNA, 568 bp, Cannabis indica
attttttttaaaatttttttgttacttttttattatatcaattttagaatacaaaatatacctatttcaacaaatttgattttttttattatattatcatttttttgatttttaaattttgtaagtttaatttaaattatttaaataattaaaattattagaaataaaaatttacatttttttacttaaaacatactttttgtttgttcaacaaaataatactttttgtagtttacattataaattaaaaacaaaaatatgacctataaaatgatttatgtggcatcctatgttaattttaattcatattcttttatccattttctcattgtttatgaataaaataaaacaatcaatatcaatatatttaacatgattttaatattatgtttaaattcatgtttgtataacttaaattattataacaataaatagttttatttttcctaaattattactaaagaaatcatgtctttgaactattaaggtaactaagttgtgaccattatcttactttttgtcctacatgaattttaattttttttaaaaggagtccaaagaatgacta

SEQ ID NO: 278190 - DNA, 1122 bp, Cannabis indica
ttttttgtaacatataaaataaatactataagatatatggttggtaggaaggagaaatgatagacttgtattttcatagcactctctacacacaaaccaccaacaatccttgagaaacaactatggtccacaaaccaggcctcttaagtaatactgattctattggcaaccccctaattaataatctcccaatttaacccaaacaaacatagttatacagcctatatgtgtagacgttatttaattttccatttttaaatgaatatgttccccaccttatttggtctcaagcaaactctttctttcacttatacacatttaattttctctctttctgtctccgtctccactctatatcaatataaaagtctttcttatctatttgtcacccactttttctttctgttttaattatgtaaaaatatttagaggaacagaaaagtaaaaaagtgaagataatgataattatgatgagctagatggaaaagacgagaactagaaagaaagcttctatatttataaggcaagattatggtatggcttagaaaaagttttttaacggtagggaacatttttttaccaattttagatcatgtggttattaagatataaggtgtatactcttacaataggactgcttgtatacaattaaaactttatacatattataataatatttaattatatatttattttaaaaaataaaataatattaataattaaaaaattattaagtatcaatttgaattattattttttttaagttaactctcatgtaaatcttaacagtttccacactaatattattgttattctaatttttattctcactcgatatattaaactagtgtgttccttcttttttttttttttccttttattctatttttccgttttttttgttttgggaaatttactttttcttttatttcatcaataaattttaggagttttttatatcaagtcattttttttattcaattttgtactataatattatgttgtattattattattattattattattattattattattattattattattacaaagtgatttggatcactcaagaatttacaataaaaacatcaacatttgtaggtgggaaccgtttac

SEQ ID NO: 278191 - DNA, 487 bp, Cannabis indica
aagtatttgtttcaacaaatactaattttttaagaaaatgtctaagtctgaaaacaaagtagcaaagtaaaggagatatttttcttgattccaaaagtgttctatcatcttattcgtaataagatggccccactgcctctgttgtcttgacacaaccgaagaggacaataccacttatgttcttagaccataagtcactgtaccttatcgtagtggagggtttcaaggaactcaccctgttatgacttggaagacacttgtgatgaaatacattgttagtttaaacaagtaatgaattgtctaaataaggaactaagaagtaaagccaagaaaactatggttaaaaccattcatatgaaacaaccaaaagttttctattactaggacaagaaaggaaatttttgaaaataagtctattcaatggacttaacaaagcttcctgttcctggtattataggtttgagtttatctaaacctatggcttgtg

SEQ ID NO: 278192 - DNA, 541 bp, Cannabis indica
ttatttaggattgtatgtttttttagtattttcacctatcctttctattttctaagtgctaataatttctgaatgtgattttgtgttgaaccttacttgatttctatttattgttatttgtagtatccaataagactatgaacaatcccatggtgtcactattgactaataacaagctcaattgatctaactttaccaaatggagagagaacattaatattgctcttattggtgaaagtgccttgtttgtgttgactgaagaggctcctgagcagccaggtgagaatgcaaccaaggcagttaaagaaaagttcaagcgttgggaaaatgctaacaacaaagctcgatactttatgttgtctagcatggttgacacctgaaaacaaggtttgcaaatactctcactgctgcagatatcatgaacaagttgactgaactattcgtgatggcatcaattcaagctcgctttgaggcgaaaaagaatttcatcaatgcacggatgaaacctcatcagagcgtgcgtgatcaccttctccagatg

SEQ ID NO: 278193 - DNA, 483 bp, Cannabis indica
gttttgttgttttgttagaagtttcgaaatggatagagattggatgagtgcgaataggttaacggtaaaatatagggaaggtgttgacttctttttggagttttctgcaaagaatgcggataatcctgatttggttcattgcccatgtctcaaatgtggtaacatggagcgtatgaaaattgcccaaataagagaacatttgtttaagaacggtatagacaggagttataaggtttggtatcaccacggagaaaaaattagaagatcgggcgagggaccctctagaaaggataagattgttaataatgtggagtatgaagatgatcacatcgcagagatgattaacgaagcagagtttgaatctcaagttcgtcctgaaacatttcaaactatgttagaagatgctgaaaagccgttaccctaattgtactaggtttactaaattatcgacgcttattaggctatacaatttgaaagcaaaac

SEQ ID NO: 278194 - DNA, 734 bp, Cannabis indica
agatcaaggaaagattggtcaaaaaaaaattagatgatgcattgtgggcatacagaactgctttcaaaacaccgattggcatgtccccatatcggttggtgtttggaaaggcttgtcatctaccggtggagttagagcataaagctttttgggccatgaagactcttaacatggaactaaaagctgcaggggagaaaagattgttacagctgaatgagttagaggagtttcgaaacgaagcctatgaaaacgcaaaaatatacaaggagagaactaagaagtggcacgatcaaggtctagtacggaaggagtttcaaccagggcagcaagtgttactctttaattcaaggttgaaactgtttcctggaaagctgaagtcaaggtggtcaggaccattcacagtggtcaaggtgtttccttatggagcggtggagttaaaaggtgttggtccagcaactttcaaagttaatggacagcgtttaaagctttacttgggaggtcaatttgaccaagccaagtccgccatgattctggcgccactttgaagcacaaggctcagcgtccggctatatgacgataaagacagcgctcttgggaggcaacccaagtgttttctttaatttttcagactttttgattatgtttttagtatgctttagtatttttagtattttcaatttttagattagtaccagacattatttcttttagttgaatcgtgaaaagcgtgaaaa

SEQ ID NO: 278195 - DNA, 475 bp, Cannabis indica
ttcatggaatccatttctgaatccatgccggctgaccattgtttctgttccagacttgccattgcttgtttataggttaatggatcgtcatcaataccgtcaccaacaaccatattgatttcaccattcaagccataacgagatggttttgttgaaccctcccactacgacgaggagtcgtggtcttctgaacataaacattagtggtagatttctcggttgtatcaacttgcaaaagttcaaccgatgaagtgggattatcctctacttatgtagaagaggatggaacattagaaggagttatatctgaaagaattttctccaatactactttgctttgtggcttgaaattcttaatatagtcatcttcaaggaaagtggcgtttatggaaatgaagactttatcatccttgcgtctataaaatagtccacccctagtgtaacaccctaactaacataggcgtattacgtgatt

SEQ ID NO: 278196 - DNA, 1292 bp, Cannabis indica
gaaaaaaaaaaacaatagactaaaaaaaaataaatttaaaaataaaactaactaataaaaatacagtttctaacatataaaattatataatttcaaaaaatatataaaaaattatatgaatacctaataccccaatttctaacttcatactttattttggcatttaatctcttatttgcttgctcaaaaattagaatttatttaaacattcaatacagggtaaatatgtccaagagaatcacaaactaaataagtttcataaaaaatgataataataatgtaaaaataataccaactttaaaaatcagtttcatcaatattaaaaagaataataatttcattaaaagcagcaagaaaaaaattaatttcatcaacatcatactgaaaaacatactatgcaaaaagttataacctaaaaaaggataccaactttaaaaatcagtttcatcaacattaaaagatagggtaaatactattttggacactatattttgcaaaagttaccaattagaccatctgttttgttaaataacaaaatagaccctgtattttctaaaatggtacaaataggaccctaaattgattttttatcaaaataaaatttaattataattcgatctaaaagtgttatgacaaaactgtttatatcttttattggaatatcttttaccaatatctagatttactatcaagtatgtttttaacatcctaatatgaatttctaaaacgatgaaaataaacacataaaaggtatgagataccttacattggttgcagcagaattaaatgactattccgctcagatctctaacccttgtatcctttctgtcgcagagtatcactaagatctgagcccgaaactccttcagttgtttggattcttcacagtcttatacactatgattgaggactcacttattatgtgtgggcatgcactcaatcactaaaggttgaattttgttttgtgaagaacactaacgattcgaaattagagaagaaaaagaagaagaagaagtctcataaacctagagagaaataaaactaggtttattgcctttgaagcattagttagataatgagactttcttttctttttatgatacttctcttagggttagggttgatttaggaagaaaaaaaaaaagaaaaaaggaaaaaaaatagcacctagtggccggccatgaagtgggcccaacactagttagatttttgtcattttttctcaatcatttatctattttttacaaatactactttttgtaatttcaaccctataaatgctaaaactattt

SEQ ID NO: 278197 - DNA, 675 bp, Cannabis indica
ccccacctttaggtaacgctacatcactctgaacaaagatttagtatttgaatcaattagatcgatgcctccattcactactcattttctatattccactatggaatatcaacaatttaactcatattgtcatctttctaatctgtctaccctgttaaataggttaccactaaataacatacatgcatagtccattcagatttcttgatgtctctaactaaatttacaatgtataatatcaatagtaattataatattgcccataaattctaacttgagtcagctgaaggaccgatatccctgtccccttgagtcataaccagcacttgcgcaagacccgtacacttttctcctttaacataagtctttcttaactacgtgtaggttctctttagatgacccactaccccataaaaaataagatatggctctacattggctcaaatgacgcctttttgcatcttgaacactcaagataaggtcaccatttcttatactcactttgatcgctatcatggtcaccctagaacctttcgttgtatcccataattggtggttcatatagtttccacctattgatctgctagtaagttgggttcatatattttaccacacccattggtacaacaggaagtgtcggtagtataagaagagacacaagatgagcctattatc

SEQ ID NO: 278198 - DNA, 643 bp, Cannabis indica
tgtcacccaatgttgcactatcaaagtaaagggccatatatattctctccttattcttccaactatccaagtattgaccttcatcccctcaaatcaaatccaatatgccctcatcccactgaaagttagtgtggtcattcccaccaacaaataactccggctgggaaaatacacgacaggatgacacatctatttgggtacacctccagataaaagtgttgtgacctcctcatcaaatgaaatgccgcatccaaatgctaaaacatgaaaattaaatatgtcagagattaaataaaaagagttataataaaagtctttaaaacccaaaaagaaaaaaagtcttaaaaacttacatcgtctccaagccatgtctttggagtatgtagttcgaggaaccaagctgttacgaaaattatgtttatacgcaagtgtacgcaatcaagtagtatctcacgcaagtgaggtcgaaccacagggaattggattaagtactactaaactatacttatgattctattcggtaaaataataagattgcaatttaaaagtaaataactcagaaattaaagagaaaataaacgaagattaatcaagatgagagattagggaggtgaatcctgttgataagctacctatgttaata

SEQ ID NO: 278199 - DNA, 435 bp, Cannabis indica
ctacggctttcactaatttcagccctgctattaaggcttcatattctgcctcattgttcgaagctgggaagtcgaaccgtagggccgcctggagtcgcagtccggtcggggatatcattgccactcctgctccggatccattttcattggaggctccgtccacaaacactctccatgtggggaccgatggtgctggcacatttgcggttgcctcggcttcgttgcattcggtaatgaagtctgccaaggcttggccttttatggagattcggggaatgtagtgtaagtcgaattgacttaactccattgcccacttgaggagccttccggatgcttcaggtttttggaggacttgccggagcgggtggttggttagtaccttgatcggatgtgcttggaagtatggcctcaattttctcgaggccatcaggaggc

SEQ ID NO: 278200 - DNA, 563 bp, Cannabis indica
tccgaactttagaagcacgagaagaggtttggcaccggcttgacaaaggacttttgattttgcttgaaggaaattttatgatataaacaagattgttatatcagtccgataaggatgctgagtggaaggttctgaatgagtctttatataataacagttattagagtactgtgaatgtggcactgatgcgatttaaagtttcaagttcgtatgttgctttatataatggatgaaaaagctatactgatctaaagtgtataagtattaaatttcaagtggggaaatttatctttcttcaggttgttccaatgagggaattcagaaaatgggaagaaaggaaagttaagtctccggttaaccggtctgtctgaatttctggaaagggtaggtcgggtagcttattagctaaccatactccctgctttatctagggtttccaatatgcacttcaatgtttcaggagtacgaggtagaagcgatctttatatggagttatgaaaatattgaaattcaaacagacttgtcatatgaggaacaatcggtatagattttctgaattgaaa

SEQ ID NO: 278201 - DNA, 602 bp, Cannabis indica
aaacctatataaatattattattttgtttattaaattagtatgtttaattaatagaaaataaaataaacacatatataaaatgttttatattattagtatgttttattataattgtaaacataaaaataaacatagccaatattaccatatatataataatcaataattattaccatatatattataaaagaaattgaattttttttaattatatataaaaatgtataagaaaatgataataagttttttttgctacatattttgtaattaattaaaataatacatataaaattataaaatgccctataaaaaatgaatagagtgtaattttctcgctcccataataatacaatatttaggttttgtttggttggatttttgcttctatttttaattttttagggaactcttcaatgagaaagctattaaagtaaatttttgtaaaaaaaaaaaactttttagagcttaaatttattaattacctaactagcaacataaatatttggaataactatataaaatattaattttgtaagaattttacatttttaccgttcaaagttttttttttagatatttttacagtattctataaaaaaat

SEQ ID NO: 278202 - DNA, 797 bp, Cannabis indica
aaaaagaaaccctaatttccatgaatgtccctaataatatataaacaataaagttgtaaattaaaaaaaaaaagtagcaaaatttcatttaatataagaaatagaacaaattgaagatttatacaatactggaatttgaactcttagaagccattagcgaaggggcgaaactcgttagatctcctagttgaacactaccttaaaaaaattaaatgatgtggaggtttttttatgtgtttctgtttcgatatgttcttttaaaacaccataaattgtaaaacaagcctaacagttgcttaatgtttccttagctttaacgtggcacccacttcttagattggcttttttatcttgtatatttatgtatctttgagatttaacggaaaaggctctattgccttgagatttaaaccacgtttgattttcttattatttacagggccggcatgctttggtctatgatataaatacaacaaatgagacttgggagtgggttgaccttaaggaggtaacaattgtgttttaaaatcttggttcctgaagaatgtttcaagatacaagtatgatgggttttttatattatagacgatttgttccaaaacataatagaactaaccaatttaggttaatgatctggcttctgatacgtccatattaaagatgattgggggtgtgcggttctgtaaatgctatgaaataattttgtagttagtctgtgaatattgcaatgaaagtgttggtttgacctggcaattttgtggttacaacttacaagaattcttgacaaggttgttgaa

SEQ ID NO: 278203 - DNA, 970 bp, Cannabis indica
aattctaaaagattctatatttctcttgtatgtttgggacttaatagattatttagatttttgtctttaaattaaaataaatgcccctaattttagttccctaaaaattgtccagaatccattcatagtggtgtgaattaatagttgtgtcaaattttgtcacacatgcaaacagaataataatttggttgtttaaataattgtcatcttaaaggcacctcaaagctgtgtcaactcaacgtctgttattaatttcataaaaaaaaaaaagaaaattaatttacatttacataatttttttaaaaaaattgattgatttttattttaatgatgttttaaaaatacagatatacattgtttttttaattattttaatcttaaattatacatgtggcactgactgacgtagtaattggctaaacaactatatcattattttattgtaaaaaaatttgatagatccaccaatttacaactgtgagtagttcatcaactatattttaatggactaaaaagtttaaacattttatgagacttgttttaattattttttttattttttcaaatttaacatattttttttaagttttatttttttaccaaaataaaaaattactgatataacacattgcatatataagaaaatggaaccttgggtatttttttttcattttcctctaaaatttaagattccaaacaaagtatatacgctgtataattttatgtaattttaaaaaattacggtatgtgcaaaaagtatgtagatattaaaaaataataaataaatctgttatcaaatttgtcgaaaatatattcctttatatttttttccactatatgttttctctcataaaagttttccttcaaaaattcaaggtctaaataaggcctggagcacggttggggtaagttgaaaaatactatttttattaatcaattaatcaaatttacttctgctttcatatttatt

SEQ ID NO: 278204 - DNA, 734 bp, Cannabis indica
tttcacttctatgtccagaaagaagctataaattccatatctatgattagtgctcccactcaattgtactaccatcttcccaaaatgattgatcaccataaccaaaaagtaggcttaactaaccaatcaaagaacatgaataatactcttgagatcgagcctaaccatctcaggattgagatcatttgatctaggatcaactaggtgatattgaattgaatagatattacggtaagattagcatatctagttcaagttcaatatcggtcccttccgatgcatactccatacatccaacccaagcttactttaaccaatgccctggaaaggacatagcacttatccaaggtgcaagtaaactacgttgtagattatcatatcagttaaaccctgtgtactgataaatctaggaatacatttaatcacacaatcttgtttactttccactgtgttgacaacacaataaacaagaatatcagtgtgataagggtttggatgaatttattaatcaaataagtaaatagatgatcacatgaaccaaataacacattaaacaagtaatgaaattaaatatgtttctttattgatatgaatagaaaagattacattgaaatagagttttatttagggcacaaagcccagcaaactcctgttgggttttatgtcctaaatgaaactcatttcaatataatcagatttacttgatctgaaataacatttaatgttgcatggtt

SEQ ID NO: 278205 - DNA, 591 bp, Cannabis indica
ttatttcgtactgacccaattctaccgcctacttgagtaatcgtccagaagcatttggcttttgcagtatttttcgcagtggttggtcggtgtatacccgaacaggatgagtttgaaaataaggcctcaacttccttattgctagaataaggcagtaggcgagcttttctatcaacggatatcggccctcagcctcgatgagtctcttactaatgtaatagacagggtgttgtacgctattctcttctctgatcagcacgacacttacggcatgctccatgacagctaggtatatccccagctcctcacagtccagaggtttagaaagtacgggaggttttgcgagctgtgcctttagatcttgaaaagctctttcacattcttctgtccactcgaactttttgtttcctcgcaggatgttgaagaatggaacacatttgtctgttgattttgacacgaatttgctgagtgtggggatttgaccaattaggctttacacctctttggtttttgttggcgagttcatatccaggagggcttgaattttttttggattggcttctattccaggagcactttaagggatttagt

SEQ ID NO: 278206 - DNA, 616 bp, Cannabis indica
gctaaatataaatatgccttatacatataaataccaagatatttattactattattatttaaaataaatctaaactatttggtgacacactccgaggtaattaaacccggtgctctgataccatttttctgtcacgacccgagccctaggctgtggcagatgtgtaatatccataacttgggtggtcaaaggtcacactttgacccttgtaggaaaataaagcttataaatgatccttttatttatattacaaaatactaatttaaaagaatggattaactcctatattaataagaaaatattagtaataaaatcaggaccactcatcaatataagagaacagtaatatccccacagttatgtaatcaccaaatagatagatttaataagtcaataaaataccaaaataatacctagcatccatcatttctcatttctaactagtacatagctaatttaagtcatccagaccatccatttgttcttaaatacaaaatcagtctcattagaaggtgaaagagtaaaatatgactaaactaataacgacattcctttcccaacggtaccatcctcatccactagcatcaaactgagttcctggaatgggagaaaatag

SEQ ID NO: 278207 - DNA, 344 bp, Cannabis indica
taatttcattgttttagaattcatattagggtgttaatcaaacatacttggtagtaaatctagatcctggtaaaataattccaacagtgatagcctagcagatatctgttggcatctcggtgcaactctatgtacacctcacagatgccctgacatgctaacatgtacgctaaacatgtataaatatatgcataacattatactaatcttacattaattctgaattaaggtgtgccggccaacctgagtggaacaactgctcggcgaattacgggctcctaatgttggaaatattttaccaggatctagatttactactaccaagtatgttttattaacatcct

SEQ ID NO: 278208 - DNA, 533 bp, Cannabis indica
gtgtgacaggtgcagcgaatagccacatatacccaccaacctccaagtaacctccattctatcacaagtccatggccctttgcaatatgggggattgacctaatcggcgagttacctaaagggaaaggtggagtcaaatatgcggtagtcgcagtagattacttcacgaagtgggccgaagccaaagcactcgcaaccatcacagcaacaaaattgcgcgagtttgtctatacctccatcatttgtcgctttggcattccatacaaactcatctcagacaatggaagacagtttgattgcaaagagatgcgacaactatgcgacgatttgggaatcaagaaggcattcttcgcggttgcttacccgcagagcaatggacagactgaagctgttaataaaataatcaagcacaccattaaagggaaactagaagatcgtaaaggggcttggccagacgagttaccgcaagtcctatggtcttataatacaactcctcgatctacaactggcgaaacacccttctcactttctta

SEQ ID NO: 278209 - DNA, 458 bp, Cannabis indica
tcactaagcaagggcttaattttatttgataattaattttaattattaaataattagttttggcatttaaatgtttagaattggaaaaatgatatttttgagaaaataaaggaaagattgtcaaaagtggaaaaattccaaagtggggtccattagtgtggtcggccacttggttgctaatttacacttaatttttctattattttaatgcctaataaatcctaacctaaacctagtggttgtctataaatagatagtgctggctcacactaaaagatgatgaaattttttgccttcacaaaaaattgagccatctattcctactatattcgaaccacctctcttttccttcttattcataattttcataccttcagtgatagagtaagtgcccacacacatcaagtggtatctcaatcatagtgtataaggttgtgaagaatccagaatcaagagaa

SEQ ID NO: 278210 - DNA, 564 bp, Cannabis indica
accgagtataggttgatactagggttggtggtacagtgctatgtgaccgtatcacatcggttaggctagagtatgactagcagctggagtatgaccattgaaccgagtattggctgatattgtaacacattggtacgggctagagtatgactagcaggacaagtgtactgagtatagcttgttacttgtcaatagtaccatcttttgaacgttcggcactcagtatcgtgtgggacacgacaattagggttatggtcaggggtatgggcgtctaatcataacccgggatttatgtatgtttatgatttatgcttttcttactgagtttgtcgactcacagtgctatgtttatgtgtaggtaaaggcaaggctaaagatgaaggaccgtgagagcgagccggtgaagattgtacatgttggggcggttaggcctggagcgtacgatccttgggacaacgatgctttttgtaattagtcgctaggcgacaagtattttgtttagtcagtaaacttttgtaaagtgttttgtaatcgggatcctaagtatttttgtataaatatttt

SEQ ID NO: 278211 - DNA, 644 bp, Cannabis indica
taataaatatcgctataaaaaaaatattctaataaataattttaagcgtgaaaattgacgaaaagattgtaattaacactcgccatttaaaattacaggaaattgtgtaatccttattgtaataaaaagttttgatttcaatcttattattatgaaatttctactttctattatttcacattatccgttttcatgttgtttccttccaaacatagccttattaagaataaattaattttaaggaaagaaaaaattgtgtttggtcaaattctaaactttgcacttctcttttttgagcaattaaaaagtggcaattattggacctacacttttaggcctattaggggttttgggccatgacattgatctgggcctgatgcacccagctctaaacctataaacaaattaagaaaattataatttttttttttttaaaaaagttattttataggaaaaattaaagaaaaagttgaaaaaatatgaaaaaacccaaataaaagtagggttaatttcacaaatgcacaaaaacaacaaaaatacggtttcacggaattttaaacatttttacaatttttttgattttatttacataaaatacggtctttttatgttgaaattttattaattttttgttgtatgtatgt

SEQ ID NO: 278212 - DNA, 818 bp, Cannabis indica
ctagcagtttactcaacaattttaagacgttctttctgctatgactactaccgatgaatgttctggttctactgctgatattaacaagccttttcgttttgagggtttgcactttaaacgttggagacagaagatgttgttttttctgaccatgaaaaaagttgcgtatgtgcttactgttttgaaaccagttgtttctgagactccacctcctgccgagaagaaggatgaagtcgagaagtacgaatcgcaggttaaggaaagggactcctgggtagagaatgattttctgtgtaagaattttattttgaatggtttgtctgatgatttgtatgattattataattctgacaaatctgccaaggagatatgggaagcattacagaaaaaatatgacaccgaggaggcgggaacaaagaaatacgctgtcagccgctacttgaagtttcaaatgaccgatgataaatcagtcgaagctcagtctcacgagcttcagaaaatagctcacgaaattctttctgaaggtatgactattgatgaacaatttcaagttgctgttatgattgataaattacccccttcgtggaaagattttaaaaatactctcaggcataaaacaaaagagttttcgttggaaagtctgatcactcgtcttcgaattgaggaggaagctcgaaaacaagaccaaaaggaagaggtgcttgttgttggaaacaacaacaacactaataaaagatccactgctgttctgaaacccaatgggaaaaactttaagaatcagaatcgcaaagcgaatccaaaccgcaacaatcaacctc

SEQ ID NO: 278213 - DNA, 657 bp, Cannabis indica
atctagacaccgactacaggttgagtctaagctattgaactttatgccctaaataaaactctatttcaatgtaatctctatcatttaaatatcaataaagagacagaagtattttcatcaattatttaatgtgtcatttggttcatgttatcatttatatgtttatttgatttataaattcatccaaacccttatcacattaatattcttgtttattctatcgtcagcacagtggaaagtaatcaagattgtttgattaaatatatattcctagatttatcagtacactgggtttaactgatctgataatctacaacatagtttacttgcaccttgaataagtgttatgtcctttcgagggcattggttaaagtaaagcttgggttggatgcatggagtatgcattggaaaggatcgatattgaactttgaatagatatgttaaatttaccgtaatatctattcaattcaatatcaccttgatgatcctagatcaaatgatcttaatcctaacatgggtaggttcaatctcaagagtattatacatgttcttggatttgttagttaagcctactttttgctcagggtgatacgtacatttttggaacatagaagtgaaatgattatttccttcgagcttggctgaacagagataaat

SEQ ID NO: 278214 - DNA, 776 bp, Cannabis indica
ttgatgtgtagtcttttgaagacctctagaaattttgtaaactgcttgtctagattggtctttcggagtctctgaggataaggtatcttcacatgatgatcgatactgactggtggagactgttgttgtggtgcaggactatcagtagccttcttttctattgatgttggagttggtgctgattgatctttaacttcttcattcaatggttgtaccacatcaggcccatcataattctttccactcctcaaggaaattgctttacattgctcttttccttttgcctcactagtgctaggtgaatttccttgagcttgttttgccacttgagtagccaattgttccatttgagtttctagagttttaatagaggctctagtttccatcatgaattggagcaataaatcagcttggatattggagcctccactaggactttgttgttggttttgttggggctgatttctctgctggtagaacccctgttggttgtgcccataattattattttgggagtagttcccaatggcttttgcttgatccattggcaaattatccacatctgcctgacactctgaaaagtgatggttacctccacatatctcacaaataacttgggcttgtttagcttgccctgcaatcagctttgtcaaggcctcaacctgagctgtcaactttgtgatggcatcaacctctagcacaccagctactttcttagtttgactcctttcagttggccactgctgattgtttagagccatctcctccaatagatc

SEQ ID NO: 278215 - DNA, 873 bp, Cannabis indica
atttcgaaatttgattttctcttaccacggttgacgggtgcacttgtatggctttgtaatttcctatattcgctagttggggggaactgagacgtctgaggttcttttgaaatgattaccccttttcgttgtttgcctataaataccagtgagcatttgtccacaaactcattttcaccaaccttccttgctaagtaagttcagagcgaaaagagaggtttttggattcaagtttgctgaagtgctttcatcaaaactgctcgcttggtttggcataacttgaatccagatactcgatccttgagtaagttctcgatttcttttatgtttactttgcacattcaacattgttgtacaagatgtggaggaaaccctaagttttagaaactatgcgattttcctttgtaacgattcatgcgatttcatcattcgtaatgcttgctttttaaacggcataatgactgtccttcatcttgcttattctaagcttcgtgaagttttttgccctaactcacaaaaatttcaaacttcctgagttttgacttttcgttgaatattcttattctttaatatgttgagtactcctggtcggcgtatttgcctattttaatgtttgatatcctgaccaaacactcatcttgtttgttttcttttgtagatgaacccaggtgagttttggggaagcgaacaccaaatcgaccaggacttgcttcaactcttgcaagaggataatcctcgccttcgtgctagtccaacttctttgagtgacaggcattttagcttaagtcttccatccagccataggatgatggctcgcacaaaaaagatactgcgtagaatctaggcatctgaccctcaagtggactggcatgc

SEQ ID NO: 278216 - DNA, 1273 bp, Cannabis indica
aggttattgacctttccgaggagctgactgctgcaaacccttctacccccaaatctgccaagtccaaggagctggaccaccaacgactgggtctgaactggtcaggagtgttcctgagcgggtgcaggcaccaactccacctttgcccgtgctgccagaggccaaaaagggcaaggagatgctggcccactatatgaaccggctggttcctgaggtcagtgagcaactggctggtgctgatagtgactcatctctggatgtgttggtgggcggagtcctgaaggagctcaccagggtaagtcttttttgatacttcccttttactttccacacttagctccatatgctgacttttttcctttgtgcaggccggtttgaagttggcttacacttactcccgggctaaatctgctacttccaagagtgcggctctgtccgacaccttgagggcggaggcggacttggccaaaaaggaagctgaggaggccagggcagaaactggagctgttcggctggagttgggcgaagccaacaagaagctgtttgctgccgagaagaagatctccgtgctaacaaaggacctcgaagctgctgatcgctttgaggagaccatcgagatcttatctgctgaagttaacagtcttcaggatgagaggagttctctgcggcaagttcttcttcggctgaaggaggagagggacgccaaggtgaccgaggcagaccagttgaaggagaaggtcaatgctttggagacagccggcctcgagctcttcttcaatttttggaaggctaatccccaggccaatttcgactacttgggcgatgctaaagacatgtaccttgagtactgcgcggcccaagttgcttatggtgggaaagaggcggctgcttcaacctccggccaagcctctggccaggctgctgatgcttctcctgcccgaacaacagatcctccgctccagttggctcagaagaaccgaaccaagagcctgggactccagctctttgaacacttcttttttttttttttttttctaaggggtggcacaccccaaacttaattttaaacattcttttctttcttttctttctttttttttttttttttgaataactaacaatacaaatataataatggcaatatacacaaaatatggtaactctcccccaacttaaaattcaacattatccccaatggtgagaataataaagtagtacaatgaaaacactcacccaattaccactcaaccaaaattacactcctcccacccct

SEQ ID NO: 278217 - DNA, 542 bp, Cannabis indica
gtcatcctaatatttttaggtgcgtgataagacctctgacgttgttgacaagttgaagcttccaaagaaaaatattgtcaaggtttataatttgcttttttgatttgtcttgtttgaaatgttctctgattgtggttcattcatttgaagaaatcataccagaaagttgttttatagtttgtttaatgttgttttaactgctgcaggacttgatttctagtgatgatgaacttcaaagttgatcagaatagacttattgttcatttctattcctttggtagaatgaagtcatgagttgcaaacattgaaagtatacaagaaaatgtttcaaagtcttttaagaaagttgaagctactgtacatgaattaataattgagctatttggttttggttgtatgtgctgaagagcaatattttttaagaaactttgtttttataattttttaaatatttttctatttaatttcacatgtatcttgcataggatattgaaaattataattttttttatttgtttatattttttagtacaatgagaaac

SEQ ID NO: 278218 - DNA, 711 bp, Cannabis indica
aaaaaagttgaaaatttcagtacatggtataaaaatcccttgaaaagcaaggtactgtggttttacattcggaaaatcaacaaataagctattaaaatcttacaaaatccgatcatcaaaaagaatacgaataaatcattcaaagaaacaacaatccaacaacgatttgatctgagaaagccaatcacataaagaagcgactaagaaacatcattaaaaaaatccaatcccttcaaattaaaatacttgttttaatgttgcatagaattaaaaataagttgatagagtgttgattacgagctctcaatataatctaattcgaaattgtaggtatcacttgaatatatgaatataattttgctgtaatataaaaataatacccaaatcttattaattaaaactatttgctggattggtcttgatgcttaaattgtttaacacgttgaaatatagttgttgtttcggtgatttcccttcttagattgtgaaactagttggaaattgatggacaatgcaacactgaaacggtaggatttcttggtgaaattccaagattgccctacaccaactcaagtaaatgattaaaacgacagggacaaaattgtcccagaaaattcacttaaagaaaataaccaaacgacacaaaaacttgtcgtttccttcctgcacgacagatcgttttgcacaaaacgatttgtcgttcttccttga

SEQ ID NO: 278219 - DNA, 602 bp, Cannabis indica
cctagacctgggacccaaaattagaacctaaacaagaatcgccgaaccaagacccgagaacaagactaggaccatgaccaagacccggacccagacctagaaccgaatacagacctcgccccagaccctaactgagactggaactcaggcccgtacatggtcgtgtacccagaccggaactaagactcggacctagacctaaatctgggacccgatcccaaacacagacatggacctagatagggatccaaaatacgaacctggacacagaccaggacccagacttggatcgaaatgctggacctagatttggaccgagatcccgacccagaaccaaacttggacccgcactcaagaccccaacttggacctgaacccgaaccaagacctagatcggggaccagacctggacacaaactcggacacagactcagacccgaactcaaacccacacctagaaacagaccaaagctagacccggatccagcccaaactcgaacccatacaaggatcagaaaaaggacttagaaccagaactgaatcaaaactcagatcgggattggaactctggactcggaccgaacctagaccaagacccagga

SEQ ID NO: 278220 - DNA, 740 bp, Cannabis indica
ttaccccgtcttgaaaataccctagttttatgagtaagggcattttagtaatttgccaagggggggagtaggtggcagcctagggttgtgacacctagtagtttaatcaactcagcaaggaattaatcaattaattcccttttcatttgaaatagaaaataaaagaaaaagtcaacctagaactctctttttctcttcctctctttcggctgaggcaaatccaaggcaagggcatcattttcttccatttctctggaaattatcaaggattcaaggttgtagtaagtgaggtaaaccctagaaacctttatcttttgagttatgagtttttagttgagtttattttggtttcaagcatgattttgaattatggtggctgttaagtttagaaatggttagggttagatttttatgctcaatattggttgattaagggttctagtagttaactttgatgcttggtgttagttctaagcaagcttgagttttgaaactcaagctttgagctttaatggcaagttgagtttctttggtttattctgtgaaattctggttggaaatggttgtttatacattgtataggtgtactggagagtttgataaagtttggttgagttttgagttcaaggggagatttttcgggttcccagcacagaaccggaattccggttctgggggacctgtggcaaccggtcgaccggttggtgacccagaaccggatttccggttgggaaccggtc

SEQ ID NO: 278221 - DNA, 639 bp, Cannabis indica
acgagttcttctccacctagcttgcactgacatggattatgcaataaggaaagatgaaccagctgctatcactgatactagcactgctgctgagattgcactgcgtgaaaagtgggagcaatctaatcgtctttgcatcatgttcattatgtccagaattcctatgggaatgcgtggatcggtggagccacctgagaaggtgaaagactttatcaaagttatggatgagcagtttgacacttcagataaatctttgttcatcaacctcatccaagagttctcgtccacaaaactcaccggtgttaaaggagttcgagaacacatttctaaaatgagggacatcactgctcatttgaagaaactcgacgttatcattcctgataccttcctggttcattacatccttcacaatcttcctccacagtatgggcctttcaaaatttcctacaacacacataaagaaaaatggactatcaatgaattgatgaccatgtgtgttcaagaggaagccaggctcctacaggagcaaggagaaagtgttcacctgaccactcaacctaagaaacgcaagccattcaagaagaacaaagggaaaaagcccatggctcccaaggctgccataaagaaagattccatcaa

SEQ ID NO: 278222 - DNA, 523 bp, Cannabis indica
ttttttccaaattatgaagtttccttatcctcatgcatgtgttgcagctcaacaacaaagtattagtatgtatgcactgtgttcaccatattacacaatataatattggaggaatacatatgaagacacaattatgccaatttgtaatgaggacgattgggaattgcctgatgacataaagaacatgacagttggagtgcctgttgagaagaaactaatagggcaacccaagaagcaaaaggttggaagaattaagtcaaactgaactgtttgtaatggtgaaagaattaattttgataaaatgaacttgcagcaagtgtggtggcaaggggcacaacagaaagtcttgcacctaccgaggttaaaaatgaatgtttaatattttagtaattgtattgtagtgttacgtattcttgttgaacttcgtaattgacaacataaattttgttactaaatacatttagttaaaataaattataatttttgtgactaatacttttagccacagactttttaatcacaa

SEQ ID NO: 278223 - DNA, 620 bp, Cannabis indica
aaaattaaaaatcaatctctaaattgttgataattgaagataacatctatctaaaaattgtagataagaaaaataatgatactcatgggtggattttaatcttcctctgcttcgacagagacaatagtgtaatttttgtattttacattttttattctagccggatccgcatataattggattatccatttttcgttgataaattgaatatggtagtgtcgacaaatcccattaatatttgaactgatatttgatgctaattattcgagagtcacaaccctctttccttctttattcgagagtaatatataggtaagttttgattatataattggtttgtataatgtcgttttcttcttgtgattcgcgttcgaaagttatttagtcgagtttcaatatttgagactgaggtagtgtcttcgaataattggagctcataattagattcatcgaaatcatcaccactatcgtcatcgtcatagaggtaaaaatcagcaccatcatcgttattgtctcccatggtgaacccacccaaacgtaatattaaacctaaagaattaattttaggaatcacactaccgatctctttaaccaacaaaaaagaaaaattcaatattata

SEQ ID NO: 278224 - DNA, 718 bp, Cannabis indica
tttcgaaaacctaatagtaatggcaaaatataacaaccgaaataatattcacaataataatgaccatacagtaataataatctgttccaccaaattctaaaaactaccacaagtcttaccctatagtaaattataaaatcaccaacattagtgcaattccaaatcacctaacagtagtatgatgcaagtatataacatgactgactaaatataatttacgacctaaaacctaacttttgtaaccattgtactgaacatagtaaatatataaataaagtaacttttgtaaccattgtaatatactacttgttacttatggccagccttttagaatgacgtgttttcggggacttgctcttgccagtccacatgttttcggacctggccttcgctgtgctgaatcgggggtctcgaggagaccttgatggactacgtaatggtatagttgtagatgttgatggaagaactttggttttgctcaatccaaattgcttcttaactccctccatcacagcatgtttagccttgttactctcgtgggtgacaattttcccaacacaatccagtctggcttcaataggatcaaactgcattgtacattaggaaaccaattcagtaatacacatgacaaccaaatccatagaaacaaatccatcaaaaaatagattgacaactcaattttcacataaacagttagttaactggatgaaaacttaaa

SEQ ID NO: 278225 - DNA, 137 bp, Cannabis indica
gggtgagtcctccgtccaagatttcggaggcacgcctccgcactctcgaccaggacggatacctgggcgagctggactgcttcattcccgcccacgacaatcgcgcttcaaaccctagtgaggggatgtgcgcctag

SEQ ID NO: 278226 - DNA, 746 bp, Cannabis indica
tgtaacttatcagttatgactggaattccacataggccaccttcttgtaaagcttattgaagtcgttattaagtacagttatgacatccaacatctctttagaaaagttcacgtttgaattcaactccaagttctctcgtatagcaacttccagatcatcttcactatgcagatctagcaccctttgggagaggtcatccaacacatcaagagaataagcagcatgtccatcacttggagtggagcaagggatagaatcatcttccatatcaagaacatagaaatctgctggaaataccaattcattgacttgaactagcacatcttcaatgacacctctggggtaggcattcgacctatcagcaagttgaatgattatcccagtttcttcaagtggacccagattcaaggagttatagatagagaatggcatgacattaatggaggcccccaaatccaacatacaccgctcaatcctagtgtttccaatagtgcaaggaatagtgaaagttccaggatccttacactttggaggaagcttcttttggaggactgctgacacattctcccccacacttactttttcattaccccttaacttgcgcttattggtgcaaagctccttcagaaacttggcatatcgtggtacttgttttatggcatcaagaagaggaatgttcacttccaccttgcgaaatgtttcaagaatttccttgtcagcttcttccttcttagtattctttaat

SEQ ID NO: 278227 - DNA, 512 bp, Cannabis indica
aatttttttttatttttttatttattaaattaagcatatataaatataacaatttgtttatatactattgaagaaaagatgcattaatcaatccaaccaacaaacaaacaacctgttcatcaaatcaaatcaaagttcatattcatgttcatgaatcatgataaaagtgaaaactaaaatatttcaaaatacatccatatccaatatccatatctaaagtccataaagtccataaaatctataaagtccataaaatgaaaatctaaagtccataaagtccatagtaatgtctcaatactaaaaaaatgcttataaatccaaagtccatataatgacttgaaagttgttgggtgacttggcttcgactcctctctttttccgtcaggacatcatctgtatttcaaaatggaaacacacgacaagatttagctagcttgaaccatgaaatcaacttaaatatatagaagatatgggcaaatgatcaatcaatacttattagttattatttacta

SEQ ID NO: 278228 - DNA, 1040 bp, Cannabis indica
ttgattaagtatggggattttgatgcttgaaatatgttggttatgcatctagtaatttacctatgatcccaattgttaatttgtatgcttggttgagaaattggtgtgaaagattgagtttggaagctgaaaattcgaaggaagggctgctggtttctgggttctgcacccagatgccgcggcatgctctgagcatgccgcggcccgccccttgttgctggaacctgggttttgtcccaggtgccgcggcatggtctgggcatgccgcggcccgccctcgtgtttttgggcagttttgagttgattttcgaaagttcgtaacttttgattccgaactccgatttgggagttctttatatcgttggaaagctcgttccgagctctgtatgattatctgaattgtaaatgccatgcttgaatttttatgagttgaaaatcaggggttaaccctaagtgtgaattatcccggatttgtgtgactaggattaccggcacctgatcaggagcacccggggattcggaatctccttctatagctggacaacaggtaagacagtagtttgcacgtagagtatgcgcagtggcgcttatgtgaatatgatatatgtgagttatggtaaccgggattagggttattaccctaataggaacggtttgttagcctagggttattaccctagtgaaatatgtgtataaatgccatgccatgttaattgaaatgaaatttaaggattatgcgctcaaggcataatcaggttggactcggtacacataaccgagatgaaccacttctaaggccttaatgtatttagacgtgtgagagcaacacgtgggtctacgtcacgtagatttaattagatgtgtgagcgcaacacataggtctacgccacgtagacataaatgggcatgttgatatagtgatcaggtctgtgctatacagacatatatgtgaatgagcatattatatttgttatgatttatactgtcttgctgggcttggctcacgggtgctctactgtgcaggaaagggtaaggcatta

SEQ ID NO: 278229 - DNA, 533 bp, Cannabis indica
tcaagattagactcacttgagtttggctgataaattaacagctccatgattctgagcttcttggaaatgacttgccatttggagaaggtgatcacacacattctgatgaggttcatccgtgctttgataaaattcctcgtcgcttcaaagcgagattgaattgatgccatcccgaatatgtcagataactggttcatgatttgtgcagtcgtgtcagtgttggcaaaccttgttttcaaggtgtcaaccatgctggaaagcatgaagtatcgagctttgttgttggcattctgccaatgctcgtacttctcctttacaactttggttgcattatcacccggatgctcaagagacggttcagttaacacaaacacgacatttttaccaatgagagcaatgtttatgttctctttccatttggaaaagttagatccattcagcttaatatcggtcaacagtgacaccatggggttggtcattgttatgttggatactacaaataacaataaatagaaatcaagtaaggttcaaca

SEQ ID NO: 278230 - DNA, 369 bp, Cannabis indica
agacggggttagtaaatagccatctcagtatgaggcggtccttcacagagagtcagaaagatctgaaggagactctactggctaagatggacgagttgatggcaatggtaaaaggagcgcccacacctggagagcccacacctgcaccgcaaaatgaggaacaaatggagagtgataacgaagatgtcttcccagaagattgggaagcagatgataacgaggcaccatcaactccattggaagcaattatcacggccattggtgatacacaatcccagggtgaagtcctacttctacttggacccccagaaaatgtgccatttgtgaggaagaggaagccgccaaagtacttgaacgactacactgcgg

SEQ ID NO: 278231 - DNA, 598 bp, Cannabis indica
gggaaaatcaaaagcaatcaagtatagccatcaaccgtggtaagagaaaatttgatttcgaaatattaattgtcagagcatttattagccaaaaactgaaggaacgcccagtcagcctcacatcgagtcgcgaacagacgctcttgacacgtgtcacccattcaaatgcaaagacagttcgaatgaagtctacacgcaacttcgaaagtcccatacaaacttggggggcaaattttatcccaattttcgcactctgacgtggcatcacacgatgttgacacgtggaatcaactctgagtatctgctcgtaagatatagtccgaacacgatacctcagatgcatgctcgaggcaaagcaatcagcgatccgcagagagcaacaaacacttagcgaattcagctttcgcatcatgagtcatcaaggaaatccctataacttgggatcaaataaatcagagatatggcaagctatccaaatcccacgatcagtgtattctgtatttactatgcaatctttctgcttatatccattgtaacgagaagggaaatacttcctctccaagctcatagccctataaatagtgatgcatattcattg

SEQ ID NO: 278232 - DNA, 430 bp, Cannabis indica
aaatgcaaaatatgaaaactattgaatgacatagcaatgcatttctgaattccataaataacaacataataaattatttaaatggctataaataattttcataattaatcataattaactgctaatttccaaattaaactaagcgggctttacagaagagctcgaggccggcagtctccaaagcattgaccttctccttcaaacggtccacctcggccacctgagcgtccttatcttcctttagccgaagaaggacctgccgcagagaactccgctcatcctgaagacgatcaacttcagtagataaggtctcgatggtttcctcaaagcgatcgattgcctcgaggtccttttttagaacgatgatcttcttctcggcggcaaacacttcttgttggcctcaccatactcatgacgaacagctgcagtc

SEQ ID NO: 278233 - DNA, 641 bp, Cannabis indica
tatataatataaatataatatagggtaaatagcggcataagtacacgaaattttaagcttacaagtagcataaactcaatgtttatttttagcagtataagtatccaatttttctaaaacagtaattttcttctagtttcgtcagtacagattctgttttgaatttattaaaaaaatatttagaagtaactgatactacatgtttctatctagacccaatgatttagaattcaggtcttatatatgccatatttaagataataacagagttagtactgacacaattagagaaaaattatagttttacaaacattagatacttataccgctaaacataaatatagagtttatgccgcttacaaactccaaacttttagttttatgccgctatttaccatatatattataaaaatatttgtgagataaatatcttatattttcttatccatacacttatattatactaggcgaaagttacgtgcattgcacgtatgcttagtcatatatattcaattttatttagcaagtgataaaatatgcatatttcttcaatttttatttttacattcaaatagtcattctaatatgcttagaaatgttttagcagtaaaaaaaaattcaattaatttagtatgtctgtt

SEQ ID NO: 278234 - DNA, 586 bp, Cannabis indica
aacataaaaatgaggctttttctaagtttacacagtggaaaacacttgtggaaaatttaacaaatgaaaaattaaaaactctaaggactgacaatggattagaattttgtaatgatgaatttaacaattactgtaaagaacatggcatacagagacacaggacagttagaataacaccccaacagaatggagttgcagagagaatgaacagaaccattctcaacaaagtgagatgcttactgttgcaatctggactatcacaaggtttctggggagaagcagctttaacagctgtgtacttaattaacaggagtccatccagtgcaaatggattcaaaactcctgaggaaaaatggtctggtaaacctcctaacttatctaatctcagagtgtttggttgtgcagcatatgcacaccaaagtgttgggaaattagaacctagggctatgaaatgtgtttttctgggatatccagaaggagttaagggatatagactttgggtttgggaacaaaaagggtttaaaactattaatagcagggatgtaatatttaaagaagatatatttccatgtttgcctatttcttc

SEQ ID NO: 278235 - DNA, 826 bp, Cannabis indica
aaaatagtatttaccctttgtaaaattagtttgatatatttttaacatatatggtgaattaaaatattagaaactttattattgatgctttaaaacttttacaaagagaaaacagagagaatcagagagtgacacgtggagtccacatggaacatctgctcgggaagataggccgagcaggatgcctcactggcatgtctagaataagatattcagcgatccgtgcagaatgagcaacacttagcgaattcaactaacgcatcgtgagtcaccagctcaatccctataactcagggatcaacttacgtggatgtggcatacacacgatcccactatcagtgtattcagcctcaatcccacgatccttgcattcagcattgatcacacgatctttctgtttatgcgcattgtaacgagagaggaaactcttcctcctcaagtttcctgccctataaatagtgaggaatgttcactgggcaaaggacggagaaattgtacgccgaaacgctataagctaaggctatctaagaattatatattcagagatattattgtaagagctataagaaaaggaatcttcttccttattcttaagtcaatacaactaacgaggattaggctattaccgaactgctcggggctgaacctctataaaatttctgtgtcttattattgctttactacatattcttattacgacatatcgtttatcgcttatcaaaaagactcattgtcgttggctaaaagcgaagtcaacattttggtgctttcattgagagaagaatcacagatcgctctttcgacacgatggtacaaactcgtagag

SEQ ID NO: 278236 - DNA, 834 bp, Cannabis indica
atacatttgcccccaagtctgcacgggacttttgaagtcacgcgtagacttcacttattttgactacatgtctaaacgggtggcacatgttcgatgtgcctgttggtgatctaatgtgattccgaccaaaggtctcttcgatattcggctaataaatgctggttaattcgtacctcaaaatattccaacgattgcatgctttgatggttgctcttcctcaggtacttgattacttgatttcccaatgtttacttttgggggaaattgaggcatttaaatttcaaaatgattacaacccttcactaacttgcttataaatagagcaaaaagtcctagtaaaccacttttagcaatttcttacttggtgatttcagaacaagaacacatttttctctcaaatccttcaaagaatttctagaaagtgccaatcagagtcatccgagcaacctcaaagcttcgaacagtgagtaagtttttcatcctttttcctctttaatacttgaatctctaattttctgggtttccattgttgaaaattcaatagtcttgaacttgttctaggaaacctatagagaatctaggtttagaaataggagattttgattgtgattgaccatatatcttaactgctgtggcattctgactttattttcacgatattcggttctcacttgcccattcggtgtttagtgaagattaacccataatttgaagttttgaaattctgggttatgaacctaaatcacgcgaaatttcccttttttaatcttttgattggacctagtcggtatactttgtttttttatgttcgatatcccggccaaaaactcatct

SEQ ID NO: 278237 - DNA, 569 bp, Cannabis indica
aaaaacaagctaggcaatcccggtcctatgtcacgacaattaaaactcaaatgaataccttaacttgatattttccagattaaaaccctaatttaaaaccgattagacttagccttaaccaactttcaaataactcaaaaacattcaaaggcaggtactaggttcaaccccgagtcaaaacagggttcggagaaaacccgagaaattttcccctgctgtaaccggtcgaccggttctggtacaccagaaccaaccggtcgatcggttgctgtcagaccagaaaaattctgggttttcttccccagctcgaaccaaaaccattacagacctaaattgcatttccagaacagttcaatataccaagtacaacatattcaacacatcatttaatcacaattcaccatttaactcaaaatcaccatctcattgaaacaagttccaattcaaccctaagaacctaccttacctttagtttataccccagctcagaattcattgaaaaccttccccaaaagctaaactaaacttaaaaaaaaaaacccaatcaagagaagagtagaaaatcatac

SEQ ID NO: 278238 - DNA, 375 bp, Cannabis indica
agcccgaatgtccttatctttgagtttgatccttcacagtcttccaatctatgattgagttactacttgctgtgtgtgggcactcactctttcactagggttcgaaatttagaagaagaaaagagagagaggggtttcggccaaggtatagaaaagggaaggctcagtttttctgaagagagaaatttctgtcagaagagttatgaaaagcatgtattttgactgagccatcactttctatttataggcaactactaggtttagattaggaattatttggcattaaaataatgaaaatatcaatttggaaaaactaaataagtggccggccatggtgtagataatgggcccacttgattttgcagttttaataaa

SEQ ID NO: 278239 - DNA, 550 bp, Cannabis indica
attcttttggaagctgctgacacgacaggaatggcttacagataacgtaagtaaagtattttataatattacttcactttacaactttatgtgcaattaatatattttgttgtctaattgacatttccctttatatgcagcatatagatgcagcaatgcatatgctgaggaggcgacgcgccgactatccactgacatttcctcagaagggtatcattctctccacattcgtgaccagcatgatcagcagtgcatggacgaaccacaggggtgcgaggagaaactttgtgtgggagggttatatcctggagtactgcaaacgggttcataaggtattgttaattgttgaactatgattataacttcgattgttaattgtttgggaggattattatggtttgttaattgtttcgttgttctccgtaattacagaaccagttctttccgagatggatgggtaacgacttcatttacttcattttgcatcttcacgaccaaaggcactgggtcacagttgaatttgacatagagctgtggaaaattaatgtct

SEQ ID NO: 278240 - DNA, 538 bp, Cannabis indica
atcagttagcagatttgtatgtcaaagaaatagtaaggctacatggtgtgccaaagtccatagtttcggatagagatccgaagtttacctctaagttttggcagagtttgcaacgggctatggatacgaaactgaagttcagtacaactttccatcctcagacaaatggacagtccgaaaggacgattcagatattggaagatatgttacgagcctgtgttatggatttcgagggttccttgagtaagtacctaccactaatagaattctaatacaataacagatttcagagtatgatagggatggctccctatgaactgttatatggaaggaagtgtaggtctcccatccactgggatgagacacgggaaaagaaatacctgggtccagaatcagtacaacggaccaatgaggcaattgagaaaattgaaattagaatgcttgcctctcagagcaggcaaaagagttatgcagatctgaaacgcagaaatgttgagttccaagtaggggatcacgtgtttttacgagtatctccaat

SEQ ID NO: 278241 - DNA, 521 bp, Cannabis indica
ttgaatacgctgcagaaaacaactcatcattggcaagagcatactatggaatttaatctcggtaacaaacgggtggtgttacaaggagatcccaccttacataaaacaccagtttctctgaagtcattaatggctaccttacaaaccgagaagattggtgtttgggtggaattgggccattcggcagtcatggcaacagaggacgaaccgtcggaagccatctccgccttgctacagcgctatactgccgtgtttgaggagccacggtccctaccaccaccacgacaacatgaccatgccatcaccttacgaccggatgctgcaccagttagtgttcggccgtatcgatatcctcagatcacaaaggatgagattgagcggttgattgaccaaatgaaaggagccaagatcattcaagatagcaacagcccgttttctagcccggtcttgttagtcaaaaaaaaagacggtagttggcggttctgtgtggactaccgtgcccttaatcgagccaccattcc

SEQ ID NO: 278242 - DNA, 801 bp, Cannabis indica
ctgtcggtccccttactgacgttaccactagcaggcggattcgatgctgtgacggcatcctttgcggtctgctcttttactacatattgctcagcctcctcagcaattaaggctagctctatcactttcttgtacaaagtgtcatatgaagtggtaaccttcaagtcccgactgattgtggcattcagtcctctcttcatccactgcttggccttaattatgtcaatacctcctagaaaagtcagaggttgcagcttcacgaaccgctcaaacaccgagtctcaatgcggcataacaaacccctggttacccaccactggcacaggtgctggtggtaacacttgatcaacaggggcagccggttaccttaatcgtcgcaactcttcttcttgacgaagtatgacacttcgcatttcttgaaacatctgctgccattcagcaggaggattagcattgccaacctccgcattatttccccagattctgcggaggtgggggcagtgcgatgaattggtttggtctacaccaggctctactaactcgccctgtggtctagatgattaaagagggtccactactagtacccgtgtaatcaacaaccccagcgaattaagcaccaataccacacttacgcacttaatgccttaaaccctaactcatctatttacctcatataaataaacacttaatcatatagcatttaaagcatgacatcacatataacatacatactctagatgcttgcatactgcctaaaatggaaagcggtaaacagatgatcacacatacagtcaagtattt

SEQ ID NO: 278243 - DNA, 681 bp, Cannabis indica
ttttctataccctagccgccactttccttttcttcttaaattttattcatccttgaatgatagagtgagtgcacacacacatcaagttcctggtaaatctaggatgttaatgaaacatacttgttagtaaatctagttcctggtaaaatatttccaacaatagcttcttccacccctaagtgttatagagatcatgtggagttatgaatataatctagagttcaaaagatataaaagatcgttgaactgcatatattacttcttaacttcttccacccctatcagatcaaaagatctttttattaaacaaaatcttaataattgtttaagaattaacaattattcataaacattgaattttaaattctaagtgtttatgtggtattaattctttgcagagataaatataccatagattttgtatcaataataaaacacaaacacatacaaacatgataaacatataaatataattggtattgacatacaagttgaagaaaacatgaagcttaattcataaatgcaattcataactaaaagagaaaattttattaatattctcaaaaaatgaattgtctgcataaatatgaaatagggaataaaatcccaaaccaataatttaaattaaattgttcataaattaaaacaattaaattcaaaaaatttaaaagaagattccga

SEQ ID NO: 278244 - DNA, 460 bp, Cannabis indica
ttgaagcggggatgttacattaagggtacattacggtgttaccaacactagtacgggtagatacagagtgcatgtagtacaacacttagcggtactcggggtacagttcctaccctaccaacactagtacagtggcggtactgagtgcatgtggtacagtggtacatggttgtatcttagttaagaatgttcttattcatttgttgagccttgtagataggtttatgggtacctagatacaagttgatattatattatttgttatatgcttttcttactgagtctgtcgactcacagttgctacttccgtgtgtaggtaaaagaaagacgaatgttgaataggagtgagttttgagctagaatggtgtttgtacatgtcgagaagacgcgacatggagtgttcggtctcaagacatcttggattttattttgtagtcgctgagcgaccagtttataaatg

SEQ ID NO: 278245 - DNA, 616 bp, Cannabis indica
aggccagggacatactaaggcagttccgagaggtactggactctattgaacaatcacctcgcatttaatgccgcatgggggaagacgtattgagaccaccataagcgatatgacaaatggcgtaaccccccttttttagctattacgctatgattaataaggctagtgacggctactttatgaggaatcacatcaatcaagaggagatcaaagattatatccacctaacccctaagatacctacggtataggtcatgtatttcctattttgtatctgttgggaatatgtgcccctattaagcctgcacagaaagataagtgattcattcctagggatcaccccaaaaaaatactataaatatcctacaaacatactgagaaaggggtcgaggattctgggttcaaaggaatcaaagagaggaaataggagtgaagttcaccaagaacattctctgtaataaatactctcattaataaaaaagacttgtggactaaggctcgttaatgccccaaacacgtaaaaatctcatgcattaaacttcctacagctttcttatatattatttaattggttgccaaaaacctcgatcaacagttaccaatgagttactttata

SEQ ID NO: 278246 - DNA, 778 bp, Cannabis indica
gacatgtttcagagaaacggattcaaaggcacagaacagttaggctaacaccacaacaaaatggtgttgcagaaagaatgaacagaaccattctgaacaaagccagatgtatgttaatacaatctggtttgtcccatggtttctggggagaagcagttatgacatctgcttatttaataaacagatgtccctcaagtgttattgaattcaaaacacctgaggaaaggtggtctggtaaaccaccagatctttcaaacctaagagtttttggttgtagtgcatttgtgcaccagagtattggtaagcttgaacctagagctattaaaggggtttttctaggctatcctgaaggagttaagggttacagaatttggctaagagacaaaggtggattcaaaactataattagcagagatgttatttttaaagaaaatgaatttccttgtttgcttaaaactaaccctgcaggtacagtagacactaaccatgcaggtacaatacagtttgaccctactctatggaagctagatgaccaagaagaacctgatataaatcaggtggaaccagctggaagtgaacctgatcaggatcaggtggaacaaacagaaagctccaacagagaaggaactgaaggagaagagcaacagggagatgaaactgaagttgttcaacccactgaagctctagatgactaccaattgaccagagacagagagaagaggacacctaaacctaatcctaagtacagtttcaatatctggaatgaagacatagccta

SEQ ID NO: 278247 - DNA, 1294 bp, Cannabis indica
aaaagtcttgagcagcttccgatcaaccactctaagtgggtccgcattcacgagtgtcgaagtagccctagccttcttcttcatttcagtgtactcagcgaaccacctaggccgccttctcttcctccggttctccatgacttctggagctgtctctaacacctgcacctcagaatcctgagtatccccgatgctggtgatattcgtcttctcaggtgtacagaacatgtcatcatcatccggttggtaatcatttgggagaatgaagtcatcttccggtgtccgagcctcctcttccggttgtggctgtggctgtggctgtggctgtgaatctgctgccggccttccaggatcttgcaggagcgtcattatggtcttcaactgatccataatcgctgtttgtcctcttagcagagcggcctgccccctctccacagtctccaaccttgccaaaatggcagggtatactggatcccgagcctccgaggtgctgggaatggaagctgccgggggaacaggaggaccctgtgacgctgcaagtgggtcaacaccaaacccatcaggaattgaagctgcagatgggtcaacaccagacccatcaggaactgaagctgcagatgggtcaacaccagacccatcaggaactgaagctggagatgggtcaacaccagacccatctggaactgcaggcggtgcacgtggaggagacggtggaggtggtgtagagtctttaaatattcgggctgcctccgctcgttcttccaatgtggaggcaagcttttcggcctggcttcgcaaagcatcctgtgttggttgcccatcctcacccaacacaagttcctccaagtcaacaaataacggaggctgacccccggttatgtaactcacaaactcaatctcgttcggccgaggacataacacggagtacactgtcaactgaaaaatataacaaatatattaatataatatatggaaattaacatgaattcaaaataaagcgtaacaaacttacatttttagcaaataatctggtcacttcatccttcccgagtgtagtgttcggcttactctcccagttgaccattctcggaaagccatgcgacctcctcactgcatactcgttgcccagctgtaatatggcctcgtatgcccaatactgcaacgctgcagcatagccgtaggctgagtattttgcctccttctgagtgactcccttctcaatctttttcaacatcttattcttcacatccaagtaatccttgttacaactttccatcagcttggtgtaagaaat

SEQ ID NO: 278248 - DNA, 923 bp, Cannabis indica
agcacagtagcttgctgactacgatcttcgatctctgcatggtgagcccttaactgcctcaatctctttgtctctccattcagcgaacatatgccttgttcatcaaacgcgagattcactgcggcacgcagttcatcctgatcatgatgcaaagtgttgctatgactctgcatgagtctaagcgcagcacagagattttacaattcaattgcgtctccgatggtcgtctgggagttggttccaggcggaatagtcgtgttatgaatgccttggctgtgtgcggaacttttattcccagtctcttgcacaccaggcgcagtttcagtaacaagagctgtttcaccattcaccatgcttcccgtctgtccaggattgacagcaggtggaacccttgaactccctgggtcctgcaatgtcggatccagcgtctgtgaatttgctgggtcagacaggcctctacgagtttgcaccatcgtgttgaatgtcgaaaagagcaatttgtgatccttctctcaatgaaagcaccaaaatgttgacttcgcttttagccaacgacaatgagtcttttttataagcgataaacgatatgtcgtaatgaatatataataaagcaataataagacacaagaattttatagagttcagccccgagcagttcggtaatagcctaatcctcgttatttgtattgactcaagaacaaggaagaagattccttttcttatagctcttacacagtatctctgaatatataattcttagataataatatagtcttagcttagctgcgtatcgactttcaatctctcggtcccttgcccagtgaacattcctcactatttatagggctgggaaacttgaggaggaagagtttcctctctcattataatgcgcataaacagaaagatcgtgtgatcaatgctga

SEQ ID NO: 278249 - DNA, 576 bp, Cannabis indica
ggtgaagagaccatgtgaacactcttgatcccttcaggtaatccaacatcgctacaagggattttgattgtaaggactttgacttgtgtgcctaaaaaggctctgcttttctcgattgttttagaaaagttttgtgcgtagtaagaggttgtaacaatggtggcttttaaccctcgtgaagagcttggccatgtccatggttggcattgtgtggccttgagcatggtgcttcttctcaccgtcggatacacctggttttgctctctttgcatcatcatcctcgtcgctgccgatatctttatattttccttttttcctgatcttcattgtttgataaattaggtcgcccattcttgagtcataaccctgatttagttgacggtagaggtgattcaagtgacgttttctttttaaatcaggtgtgattgtagaatatttaatatcagttcaaatattaataagatttgttttattattattttattatatataaataatattttattattttattaaataaaaattaaaagtcacccataaatttctcaaaaaccaagaatttcagttatataggca

SEQ ID NO: 278250 - DNA, 537 bp, Cannabis indica
attgagtgggagcgctaatgatagatatgaatctatagcttctatctagacatagaagtgaaatgatgatttccttcgagcttggttaaacagagataaatggttgagtactcattttagtgattatgttagttcactgaaatatcatttataggtggctaagtgttttaaggataaaatacaatgaagggtgtaacggtaaattaatccctatgcaatgtaaataatctatagaggatcattaattattgagattataacaatgaataattaataacgtatctatatcgtggaacatatagagctagcgttctatataactgagagtgagattctaagttctatagtagatgcaatgatgaattaatcagttagtggatttacttggtaaattctagaactgcttattggaagctcagatatataggcccatggtccacatactagttgagacaatactgcttgtaagactgagttaattgattttaattaatcaattataattctaaaattagagtatgtctagtttatgaattt

SEQ ID NO: 278251 - DNA, 495 bp, Cannabis indica
agttatttttcactattttttttactaattttagtttttaattaattaatttagtaagtttatatgtttttaattaatttagtaagtttttaattacttttgaatttattagctttattgtaattttatatgtttttgtgtgtttttataattattttatcataatatgttatgtagtatttatttttaattttattttagttttctaattaattttatgtatttttaggtgtatttggtagaaaaagattgggattaaaatgaagaaaaacttaaagaaatgggttaaaagcataattttagaaaaggaaatcagatcatcctttatgaagcccactctcggtcaaagtcaacagcccatccacaccgttcgttgactgatcgaatggctcccatgcgcgcgtgctcctcactcccgaccagaagaaagtggcgcctgccacacttgctgctccagcatttcacgcgggcccagctcgtcagcccccctccaac

SEQ ID NO: 278252 - DNA, 506 bp, Cannabis indica
gtacataatatcacgtaccgagtacaaaatttcacgtaccgagtacgttcatttacgtttcgtagtatattgtttaaaattttttttttagtgatgaaattatttgttgttatacattgagtttttagttggtgtaattttgtaattgtaaatatttcgtatattaaaaattaccagaaaaatatattttttcaccttataagattcagttttttttcctaggcataatttagttgttcgtcaataataattttgagatttggtgaagatgagagaattaccttaaacacaccaaacataacaagaagtatataaatgtagaatttttgaagcaataagtagagtcataaacgttaaaacaacaatggctaaaagtagctagttataagaatgaccatagtaagactcttgtgtggaggaaggcggttccgggaaatacgcgttggagtggtcattgaatgagtcagatgctggttgattgtttggaggttgttgcccctgagatc

SEQ ID NO: 278253 - DNA, 592 bp, Cannabis indica
ctaataacaaagactcgtggactaaggctcgttaatgccccaaccacgtaaaaatctcatgcattaaacttcttacagcttttcctatatactatttaactggttgccgaaaacctcggtcaacacaataaaaggtaagaaactgattataaattaagaagattaataaatgaagccatatattgttttttcatataaaaaaaaaataaaatagtacctcagggctattaaactctttcgacacaatttccgattaacctccagttttcttcttgtgtatactctcccaattcaacactcgaggatatggattcgcaatcatcttgcagtacttagaactaagtctagacagaatctcaaagaaccaaataaggaaagcaaagggataacctcgtaatttaaaagaatgacatttatctttttcatctttttccttttgaatcttataaaagatattgtcaccatccctaaacgccaagttaatataataaaatgtcctatcccacaaaaattttccaaaagaaatatttctcaaatgagacaactccttatcaagaaccaaacaactcattatctactttctttccattct

SEQ ID NO: 278254 - DNA, 1002 bp, Cannabis indica
gatctctgttggctcaacaaaactacttaggttgaagcctattgaatggccagacaacacttcaaagattcaacaagaagagctgttggaaacagctactggaatcataattttcaacctttctgatgccattatcagattggttgataaagaagagactcctgccaagatttggaagaaacttgaagaacagtttcaacagaagtccctaactaacaagatctacctaaaggagaggatctttgggtttaagatgagtcacactaaaaccctagatcagaatcttgatgagtttctcagaatgcacattgaattggcaaattcaggagagaatgaagctctaagtgatgaaaatcaggcaataatcattttgaattcattgcctgattcatacagagaggtaaagacagcaatcaagtatggaaggacttcaatcacacttgatgaagtcatttcagccctaaaatctaaagacttagagatgaagagtgaaaaatccaattctggacatggtgaaatgaacctaagtagaggaaggccatctcacaagaaaccctaccagaacaggggtagaagtaatagcacacatcatcacagaaactcaaacagagggaagagtagatcaccatcaagagattctggtgattctacaggttgtttctattgtggaaaacctggacactacaagaaagactgctatttctacaacaacaaatacaagaacaagaaagggggcagatttccagaaagaacagatcaaaacaaacatcaaagtgacaaacaacaagaagctaactactcagatggttatgacagtggtgaagtctatgttgcatctacatctttcaaagatgactggattttggattctgggtgcacttttcacatgacaaactctagggaaatcctaactgactacagggattctaaaggtggcaaagtaatattgggaaacaacaatacatgcaatatagaaggttcaggtaatgtcagttttaaaat

SEQ ID NO: 278255 - DNA, 96 bp, Cannabis indica
tccagatacttctccttcttgctgaagtcggtcggcacaattcccgaagctaacctcgccaatcgatcaaactgagtagtatactcagtgacgctc

SEQ ID NO: 278256 - DNA, 780 bp, Cannabis indica
ctatgtctgttcttattgcctttgaaaacttgttcacatctggagagccttatgtctaagtattggtggagttcgagtagtaggaaaggtgtgagctggtttagttggaggaaactatgcaagactaagaactctggtgggatgggttttcggagtttgcgtgagtataatctatctttgttgggtaagcaaggttggcggttacttctgtaccaggattcccttgtgggtcggatatataaggctcgatattttcctaactgttcattcttggaggctgagttgggtggcaatccgagcttcatatggcgcagtgtctttgagtcacaaaagctactcagagatggtgcccatagaagaataggatctggttcatacactgaggtgcttaacacaccttggctcttgtctgaggctaatccttgtgtggtatctaatcatccggccttgaccaattgcaaagtgtctcaactcatgaagccagatagtagacaatgggacttggagcttattgaggacttgtttgattcccgtgatgttgaactcatcaaacaggtgcctttgagtgttaatcttgtgagtgatagttggttttggaacaaggatccaactggtttttttactgtcaaaagctcctataatcacttacagtcggtcaatggtagttggaactcatccatggaggatgatgtttggaagatgttgtggaagattaaagcccctcccaaggttttacattttgtttggaaagctctttcaggttgtttgcctacacgtact

SEQ ID NO: 278257 - DNA, 875 bp, Cannabis indica
aattaaatttatttttaaaacaataattatacttataaaaacctataacatattcaacttataataattttataataatcactcttaaaataattaaaatgtcacgagttcaataatttagaagtaatattttcttttcttttctttacttatatttaatttaagatttcaattaatttaatagttttaaaattctatcatattatattaattaattttatttttcaagattataatgttcaatgtattatgctatcttaccttgctttcgtgctcaagtttgctggtcagcttgagtggaattgcagctcgacgctttacagggtcctaaccataatattcaaaatttaataagagacacgctaaacacttattggggacctaaaattaaaactaggaataactatatcgataaataggatggtaatgttccaaacaacacaaaaatacaaaaaactagggttctgaaaaagacccaaccggaagaccggttcctagagaccaaccggtcgaccggttgttacaggcttccctgaaccggtcgaccggttcagtacaggcaaccccaaaaatgtcccccacaactcaaatcgagcccaaactctaccatactctctagaacacctgcatatactatactaaatccatttcaagcaacagaacacatcaaatagctcagaaattaaaaacaccattagagagccaacttaagctctctaacttcaagtttgagtaatctgtagcacaactagctatctcagcacaaaatcaactaaaataaacctatcttaaccccagaattcaaacccaaactagctgcacactacagaacctcaaatcactaaaatcatgcaattaacctatcttgagctaaa

SEQ ID NO: 278258 - DNA, 518 bp, Cannabis indica
ctaatgatagtcattggtggatttcaatcttcatttgcttcgatagagacaatagtgtatttttgtattttgcacttttcattctagccgggtccgcatataactggattgtccattgaaaaagcttttcatttaggaagtgaaattgataacactactattttactcttataatattttttttcctttctttcttttctttaggtcatgtacattttgttgaagacgatgatatgtttaagcatgaacttggcaaaaattgcttaatacatactggtaaaaatatatccaataccgatacatgttgtattgatagattatgatttttattctttaggtatgatgtactcataagccaacttagtttaacattttatagtcagttttgttaatgggtgaataccaatttggttcaaatgctaagaagtaagaatgttctgtcatgaatatgaatgatatattattaatgcaatataaatagagtgacttttttttgacagttataaaccgtcatttaa

SEQ ID NO: 278259 - DNA, 1183 bp, Cannabis indica
tcaatctttttcaacatcttattcttcacatccaagtaatccttgttacaactttccatcagcttggtgtaagaaatctttccccaggggtactcgtagaagaatggaaggttatcaaccattcttatcacaaaaggaggaacggcagtcttctcctccttaccagtgaggacgcccataacaaacaaggccatccccaacttgtaaacatcatcagcttctgtgcagctctcaaaaactctgcgcagttggccgaaggtgatcgaagcactaccgttgaaatattcctgaatcaaccggtcagagcttccattttgtttgatgtcttcctcagtagggccgggcaacaagtttaacccggtgaccaagccgaactccaccctcccaaatctacatctcttccttcccacatagaaatgcacctcgtccggcttgtcagattttattttgtgaagcatcaactgatgaaaaaatgctccagaaaattgtatgggcgctctctcgaaaaaatttctgaaaggggattccctcaccctgtccaataggttaaattcttcaaatttagccttaatcttcgggtagtagtaactacccccgcgccatgtgacacggccagtgtaatggtccgacactggaattataagatgtgcagttccctgaaaaaaaaaaccaacaacgataaataattaataataaaacataaccaataatgaataaaacaataaaaaataaaacaataattcataattaataattaataattaaacaataatcaataaaacaataaaaattaaaaaaaataattaataatttatactaaaacaataattcataagtaataaaacaataaaagataaaaaaaaaataattaataattaaaaaaaaaataaattattaaaaaaaacaataaaaaataaaacaataattaaaaattattaaaacaataaaaaataatacaataattaataataaaacaataattaataaaaaaaacaataattaataaaacaataaaaaaacaataatataacaataattaataattaataaaacaataaaaaataaatacaataattaatcattaataataaaacaataaatcaataaaataataaaattaataagacaataaaaataaatacaaaagttaataattaataataaaacaataattaataaataa

SEQ ID NO: 278260 - DNA, 500 bp, Cannabis indica
gcgaaattataatgactccttccgctcagatctctaacccttgtatcttgtctgtagcaaagtatcaccaagatcttagctcaaatctccttctcttgaatttggattcttcacagccttacacactatgattgagtaccacttgatgtgtgcaggcacttactctatcactatagggtttgaaattatgaagagagaaagagagaagagaggtttgaatagcataaggaagaaggctcaaataaattttgactgaaggcaagtgttttcatcatcttttgatttgaggcaatcactatctatttataagcaaccacctatgtttaggtttgaattatttggcattacaaaaataaaataaatggcaacatagagcaatagtggccgaccataggatgtgggcccccactttgtaattttgccatttttccaactatttatctcattttctcaaaaatgttatttttccaattcaactatttaaatgccaaaactattta

SEQ ID NO: 278261 - DNA, 309 bp, Cannabis indica
ttgtcttctagtgagtttattaagtggaaaataaatgcttatttaattaaatatcggctgaaatgaatattacatgtgtattttatttcattttctcatttttcaaaaaaatcacaaagttagaaaatagaaaaaacctctctcttttccttctctcttttcggctgggtgcatgtgattcaagggctgggattttcatcaattttcaagctagattcaacttaaaattgtgaactcttgattgtggtatgtatttcctaattttcttcctttgttttcttgaaaaaaatggtgaaaatatgagtgaat

SEQ ID NO: 278262 - DNA, 713 bp, Cannabis indica
ttcaaacataatatttcagcaaccaaaactagattaaaatcataaaaagttacctcaattcacaataaaataagagcaattggtctttcctccaaactcaagccaaaagcaagctttttccctcaacaatttaagctttaatttgacaaatcaagttgaaaacatcaaaagggtaagagagggtgagagggttcgggtgagagggtgaacaaaccagaaaatcaatcctttttcttaaaaatcacttttaatcaaatataatccaaatatggtcaaatgaccattttgcccctagggcttataaaacatacctattcactttcaagggcataaatgccatttcacattcaaatattgccaaataaatttcagattatcacatgtcaaataaaatgccaaataattaattcaatttacatttcgggcccgaacccggttcggcccgaaattcccgggtgtgactataccgcgccaacctgtcagaacacacctgaaaagacttggatcactgtcacgggtcttggtctggttctggttcaggtcccaggtcccagctcccatttgtgagtttgggttcaggatcgagactagggtgcggttcagggtcccgaccctggttccgtgtccctagtctggttccatgtttgggtttcagttcaggttcgggttcgggtccttcgtcctagtttcggttgggatctgggtctggctcc

SEQ ID NO: 278263 - DNA, 506 bp, Cannabis indica
gaccgataagggggtatactgttacttagtcatgcccttcggactgaaaaacgccggagcaacctaccagagaatggttaaccggatgtttaaaggcctcctggggcaaaatatggaggtttatgtagacgacatgctcgtcaagtccaaagcatgcaacaaccatgcaagcgacttagaggaatgcttcgaagtggtccggagatacggcatgaagctcaacccaaagaaatgcacctttggggtcaagtcaggaaagtttctgggcttcatcgtcagtcaaagagggattgaggcaaatccggaaaaaatccaggctctcctgagcatgccatcccccaaaaagcataaagatgtgcagagcctgactggaaaggtagctgccttaagccgcttcatctcacggtccacggacaagtgcatacccttcttcaacatattgaagaagtgccaaaagtttgaatggtcggacgagtgcgaggaggcattcaaaaaactaaaagagc

SEQ ID NO: 278264 - DNA, 762 bp, Cannabis indica
atctgtaaagatgtttttacctgcaacacaaaggagacaatagttacaggaaattccactaactacagctggtaaaggaaaacaaaaaacaaataaaaaataaaaagaaagagaaaaatcccatgatctggaaaactcaaacaaagccttcagacaaagaaatctatctacttaagggattgctacctataggtaaaagtaatcaccacctataggtatttttgatattttgggagatgaataagttttaattgtattttttttcataatcaagatatataatgtagaacatgggatttctcataaaattttaattcccacatcatatattaagatgccaaaattttaacaaaatttacacaaaatactattattgttaaaaaatttacacttttacgttccaataaatttttttgacatttttacagcgtcctataaaaaaacaagaaaaccacatgaaaataacaaaaaaacaacataaaaataatatataaaaacaaaaaactaacaacaaaacaacacaataacaagagtataacataaatataacatgaaaacataaaaacataaaaagcttgcattttttataaataaaatcttaaaaaccgtaaaaatatttaaatttccgtacaaccgtatttttataatttttttgttattttcaggtatttatgaaattatcccaaaatcttaattgaaatagctaattgcccacgccaattaatattaaaacaaacgtgtgtacaattagctatttgaatc

SEQ ID NO: 278265 - DNA, 578 bp, Cannabis indica
acctgctactgcatagaaattaataataggaagacaatcatattaggccataatcaatagaaacaattgaagtcgaagccctagtttttattaactgttaatttccttattagtttaattgcttactctttcactgtttttattttctagttttaatactttcttaatttttatgcaaccaaatagaagtaaaagtttaattttaatgtacttaactacaatcctcgtgtgatcgacctcactcttggtgagtttactacttgtcacgatacgtgcacttgcgtgtgcaaaatatcacaagtttttggtgccattgccggggattgttagttaatattattaaaaattaaattttgttcttttggtttttcttcttagttttattattaatttgttttttcaaattgttatctttagtactaatttagttttatttattttaattttactaatgttttattgatgagtttgacctgcaaggtaaatccagatgctataccttgagtgtaacgccctaaacaattaggcaagttacccaaaatgtttatgaaaccctaatcccctatatcgggattact

SEQ ID NO: 278266 - DNA, 508 bp, Cannabis indica
tttttttttaaaataaaattacttcactaaatttttaaattacatgttccaatttcaattttatgttttactttatttattttattttatcaacaattactttattaagttattcttaatttttttttaaacaattaattaatttcacattttacctactaaaatttcggcagcataacggcttaaaaattgtaaacccaaaattttcaaaacctataaacaacacaaacaaatatttcaagacaatatataaacaaaaaaataatccacccatccaacagcagtcaattttatcacagaacctacttcactaacatgcatatacatataaactaatatcaaaaactactacgtactaagcgaaagcaaaaaaatatacctgaatcgagtgcaaaaataacaacttgtggcagcttgcggtaatcccgagcggttgaacacggacctaattccataaaaaagtaaaatcaaattaaaaatttaatacctaaatacatatcaacacata

SEQ ID NO: 278267 - DNA, 209 bp, Cannabis indica
agaaagacattcaacaagaaggagattcagcattaaaggaaggagggaaagagatccaggttcaaaataatttccaacaacttcttgtttgagctccactgtttggtcatacctctctcgagctttgcccgaatctccggtggaggtagcaaatcttggttgttctgaccctagtcagtcttgacatacttctgcaggtgtggattgtt

SEQ ID NO: 278268 - DNA, 556 bp, Cannabis indica
ttagcaaggatgggatcaaggtggatccaggaaagatagaatccgtcagggattggccgagaccgaaaacagtgacagaagtcagaagcttcttgggtctagccggttattatcgtcagtttgtagaagggttttctaaattctcaacacccttaatcgagcttaccaaaaagaatcagcattttatatggtgagacaagtgtgaagctagttttcaggagctgaagcagaggttgattacagctccagtgttagctttgccatctaacaaagaaaagttcgtggtttattgcgatgcatccagacagggtctgggatgcgtgctgatgcaagtcgatcgagttatcgcttatgcctcccgtcacttgaaatattatgagcaacgatatccgactcatgacctagaattggccgcagtagtgtttgctttgaaaatttagcggcattatctttatggagaaaaatgtgaaatttatacagaccataaaagtctcaaatatttctttactcataaagatttgaacatgagtcagaggcgttggttggagttagtcaa

SEQ ID NO: 278269 - DNA, 618 bp, Cannabis indica
gttgagcatgatggcaacgtacgagaagcgaggtgctcgccgaaaacagagggggacgagttttgggcaagtctttgttcttagtgttctgggttctcttgcatcttcgaatttcattttgaaacccataaagtgtatgaatatataattgatatgaatatgtaattcttttaggtataatttatttattttttagtgtatttgtttgagttgaatttgttgtttatgaatcaagaatttgttgttgtgaatcaagaaattgtctgttaaatttttttattcttaattttttaatttttatttatattattattattttttaaaatttatttatattattattgtaattagataattattcatatataataaattagtttaaatgtatttttttttaatctagataatatttttaccaacaattataaatagtcatttaaagttattttttctaacaatttataactgttggaaaaagtaacttttcccaacagttataaactgtcttttaaagctaggcatttttatgacacccacatagccaacagttttaggaactgatgggaaatagtataaatgacagttataaactgtggggaaaagccaattttgtagtag

SEQ ID NO: 278270 - DNA, 792 bp, Cannabis indica
tacatcactttagtaaggggtgcgagcaaaatgtgtgcaacataatatgttatagggtgattctacaatgcacccccttaaaagggatatactgatgcaccccctacttgttttggcatctagaaaaaattttgagtctaatttttttcatattcctgtacgttatagctatttaagatatcctacaaaatttggagaaattcggaataatttacaatatagaaaacagtgttcaaacagtcgactttacacgcgtataaaataaaatagtcacgcgtagaacacactgcttgaatgcaattttcgacgtattaaacatttccgaatttcttaaaattttgcaggatatcttaaataactataatttacatgatcataagaaaaaatttgactaaaaaattatttcgaatactaaaacaaatagacaggggcgaacgtacatgtatatgtactgtggccttggccacccccaaacttttataattgttaattattaccattttatttattttatttatgtatagagtttttttttttttcttattatgtaaaacaatattcacttttattatatatatctataaataattttgagacccacttttagaaaaatcaattatatatttaaaagagaagttactttctttttttttcgtttctttttgaataaatatttattatttaatattatatttatttaactattaccatttatattcaaaacccactacttttatcttttctttaggcaaacaagaaagagaaagtggcaataaaaaaattagattaatc

SEQ ID NO: 278271 - DNA, 782 bp, Cannabis indica
ctaattccgataaaaaaaattcagtaaataaaatccataaaacaacatacaagaaaaaactaaactaatacattgtagtggcttctctctaatcttttcaagggcaaaatttgtttaacccattatcggaattgaataagagcaaactaaaaccacaaaacattaaagataccaaatttactagatcaattatccattccagtttcagattttagggatacaatcaattctaaatctagtgcagtaaattgaccgatctacaaaaaagagtacagatcagaatacaacattaacaggaaccacaaaatcagaacttcgctcaacttcacacactaatcaccgatcacaattcaactaaattagttgatttttatacaaataataaaatagatcggcttcatagagcaaactaaattaagatcgaacagcggttattgaagtagaagatctgaattaacaataagcggaataacagtaaataaagaagcagaagaaaactccatagttatggaagtacttaccttgagtagtagacagagaggaaggagtgtttggacgaaagaagaagaggagagagatcgggagagaccttccttaggcttggattttttgatatttaactgcaaaataatttgccagcgaaggacgaataaagagtaaggatcttcagcctaagtatgggcttatggattcgggtttgggtctgaaccggctattgggctctttatatatgcccaaaaattgacgtgtctttctgaattatagtataactaggattttat

SEQ ID NO: 278272 - DNA, 658 bp, Cannabis indica
taatgttcaaggaagaatttgagatgagttccaatccagaaggagagacgccacaacctggaagatatcgtaacaaccccaacattattaaagaccctgaagttgtgagaacaaagggtacgggaaatccaagggaaggaccgaacggggagcagatcccaagaaactcaagacattgtcgcatttgtcgctcatcaggccatgattatcgacggtgcccaaaccgtcaacagaatactggatctcaggggcaacagtctgcacacaatcaaccaacaactgactcattcaatgaacactccaacgcgtatttcccggaaccgccttcctccacacaagaatcatactatggtcattcatatatataactagctatttttaaccattgatgttttaaggtttatgactctaattattgcttcaaaaactctagatttatatacttcatgttatgtttgccgtgtttaaggtaattatctcaacaaatctcaaaattataattaatgaacaaataaattattttacccaaaaaaattcaatcttataaggtcaaaatttccatagtaattaatttttttatacacaataataaaaataaaaataatacaccaacacataatttcataatttataaaaaattattcttaacaatgtacta

SEQ ID NO: 278273 - DNA, 336 bp, Cannabis indica
gcctgttagattacattagttatgtatgttggcttcgaaccatccaaccctgtcacgtcggtacaggctggacgatcaggctgacacttaggttggtggttccgtactattatactgtaacacgccggtacaggctggagtatgactagcagccggagtatgaccggtcaatagtactgtccctatgaacgttcagaactcagtaccgtgttggacacggcagttagggggactcagtatgatcaggggtatgggcgtctgatcatgaccgagatttatgtatgagtattattattatgtgtaggtaaaggcaagactagagctgatggaccgtga

SEQ ID NO: 278274 - DNA, 1078 bp, Cannabis indica
tcacttctgtccattgaacataatcatcttcccaaacatcgtctagaacaatcaagaacttctttcccattaattttttcaacaaattaacttgaagtgaattcaaattcatatcattgcaagtatcacacggagctacttcttgaaatatagtttttgtgagggccatggcatcaaatttatctgaaacatatgtccatgctctagattcaaacatatcttttactctttcatcattgaaaagaatttgagcaatagtagtttttccaatcccacccattcccactataggaatgacacatatcttcccactactaacttcattcgacataaacaacttcattaacgcattcgtatcagtgtctctatagtagatttcaggttcatctggcagagaggtcttaccacgtgaaccttctgatggtttcaactcgacaacattcttttcaagattcaagtttccaatctgattggctaagtactccaacctcttaagaatctcttccatattgccattccttacacgatgagttgaatgagaattagagaaacaagagagtaacttactaattgcctttcatttttctttctttgactcattcgctttgctgggtttcatagcatcgtatttaatatcaccaaagaggtcttctgcatcatcgacaacatccagaagatcgtccagccacttccccacaacgagggtttttgattctcctgatctccacttggaagcgaacaacagcaagagcattgaaggttgacttcaacttgaaaagcctctcagaaacagcagatgaactttcattttttcccttgaagaactcttcaacataaggagaagcaattttttcaagcaaaaaaatcaaaagaagcagagagaacagcaccgatcactagctcaaccatcggtaacaagctcagttactacacacaatagttaaagattcagagggaagttctataggagagactgagagtaggggtgttcatccgatccaatccgcactttttggtcaaacacatccaatccgcactaagtgcggatttcatattttggatccaatccgatccgcat

SEQ ID NO: 278275 - DNA, 563 bp, Cannabis indica
atgattatttaatttactttttgtaataatcccacattatttagaaagtatagtatcactaacctatgtctatgaccactattaaatgattatttggaccctatgttttgaaacatgaaatataataatatcataatattagtgaaaataattacaataaagatagattaaaaatcgggtaacaattgtttagaatgagggttaggatgaaaaagttttaagattagaataaaaatatttgattacaattagactcattgtatcgttatattttattttgtaaatattgagaactatggcttcttaataacttttttctctttgtaattaaaatctcgcatgtattaaaaaatacataattattatacttctaaattctaaataaagtattcttacattcattttgatttgtctaaatatacatggttgatttatcacttgatattgcccaattagttataatctttttattattattttgagttttcaaatcaactctatatatttatctaatatatttatatacttatttaataaaaaaaatacttaatatatgaatttct

SEQ ID NO: 278276 - DNA, 451 bp, Cannabis indica
tctatttcactatagcataatcgacactcacttctcaaatctcgcatcgaaaccataaaactgttaattgatggccagacaattaaaaataattaagcacgaatgaaatagaatacatagaaattagggggaaataaatcatattaaaaccataaagcaatgttaaacaacatcaatctcaaccctaatcaagtgtttagctacacatgttcatggaaaaaaaatcacccatattaactttaagaaagagaaaaagatagagaataaaataatgtcaaaaaccctctgcagaatgcctccagtattgacttctgtctctgaaattcgtactcctttttccctctaaattgcttgaccaaaactattgaagtccacttcttttatagccaaaaaatgatataaaaaaataaaaacacactaaagaaaaaaacttattctgcttaggattaga

SEQ ID NO: 278277 - DNA, 640 bp, Cannabis indica
tttatcgtaggcccagccggaagtgtgctccatttactctagcgctagccattgggttaattctgagcgcatgacaaataattgtcacgacacacagaatgagatttagtagcaccaaaagtaccaccaaacgatcaaacgacattcacggaatccttcttcagaggttctcacgaacccatgaagtgttagtgttgtccattttgaaatcgtgttagtgttgtccattttgaaatctgaagaagaagaagaagaagatccccaaataaaaaaaaaataaatgacaagtatgattaatttatatatatgaccaatttgttggtgaaatatttcttaaatcaaatgtctctttcaactgagagattagcctataattgtatcagttcaataatttttatagcaaaaatcctcccagtcgttattaaactgaatcaatggccatgatcataggctataattatttataataaaaagtatttagatgtaaattctccatttcttgaggctgcatccctttagatgggttgattatcttcattggcgatttcttcaacaggtgcagtacacacacaaaatgagagttagtagcaccaaaagtaccaccaaaacaatcaagaacgacattcacggaatctttctt

SEQ ID NO: 278278 - DNA, 963 bp, Cannabis indica
attctttttgacacaccattaaagtacattttttgccaagtccatttaaaaaaaaaaaagaaaaaagaaaaaaaagggaaggctattagtgaaagagaaaagaatcaaacaacaatccaaacaaagttagagatgtacatcaaaggcatgtttgtggaaatgccacaagaacagtttcaaacgactaaagatattggatctccatagagttccccatagtattcaagttgaacacatgacaggctgctttaaggtggcgttttggttggagacaatgaaatggaatagaaagaaaatgaaacaatctccattctattctgtttggttgcatattaaagtgaatgtcattctaatagaatgccctttctactattttggtagaataacaattccattttgacaagaaaggaaagactattttgatgaggaaaaatttaataatttttttatcaatttttttaatgcattttaaattttattccattcccattctccttcccatttctatgttttcatttctcccaatgaaatgccacctaacttttaattactaaaaaaagctatttttcatttttgaacttgatttgggtttgatttctaaactaggctaccaatcaaaaattatgtggatcgtgctgcttgggggtgtgcaatatagaattcctaatattattaaaaaactaaaaaggaatatttttataataaataccaaaaatgacaataatttgtattcaatactattttcaccttagttttcaaaaataaataaaaaaatttgtaaaaaaaacaaaatacagaaaataatattaaaaaaaaaggaaattaccctatatactgttttttcaaatttacggtttgggtttctaaagtggttgtagcgctaattgcaataagggtttttattacgatttttttgtttgtcaatttaggtttgctagtaccagttgcaataggagtttctat

SEQ ID NO: 278279 - DNA, 1390 bp, Cannabis indica
gataactcacacttggatggacttgtgtagctaaaaatcttatactatcacgttggtttttactattttttttttttaaaaaaaaattactaataacacaagttcatattattaatgatatggttttttatttaattttatttttagtaaggttgtttggtgcgtcgttttctagtattataatttataagatcaatatctttaaaataatgaagctttaaaaaatttcaaaaacatcactaaaaaatactatcgcatatgttttaatttctttttgaccctaaaactgttagtaacatcttaagaggtggtatccgagtagccagggaagagataaatgggtctggacaaaagaatcaaatggtctgttttcaaccaagtctgcctatcttattcaagaccttgatcgggctcccttgtacaacattgttccggcactatagaacaaactttagagctcaaaaattttagagcgacacaaggtccattggtagagtatcttttccaatgctctacccttacgagcccctcttgctaagagaatgggttttgaggaggtttcctgccctatttgtggggaggctgaggagaccacaaagcacttgttcctgtattgcaactttgccttccacctttggcgatcttctccttggggggttatgcatgttctggattcaggagcctgaatgtgggactgggttacttttctatggaatcttaaatccagaggagttgatactgatgagttgttcctctatgcctcgattgtggtaaatacgatttggagggcccgcaacgacaaggtacataataaatcaatgggtaacattaaacactatattgactctatttcttcttgttacacagattatggctcctgccttctttcccctccacagtctgttgggactcaggattggtctccgccgccggaagattgggttaaaatcaactgcgatgtcaaagtcggaggtgaaactatgtgtgctgtggcgattgcgagagaccataacgaatcagttttgtgggtggcggcaaaaaggctacacttctctgacccactcactggagaagctgcggcctgtcttttagccatggagacggcggtctcattgcatcatccttttgttttggtggagagtgattcagagattgttatcaagaacctaaaaggggatgactctatttgggggattgagaactatgtgcgtcattgcaagctcctctctacttttatgactaattgtaatttttcttgtatagctagaaactgtaactacgcggcccataatgtggccaaatgggcgtttgccaacaatgttacgggcatggtagagatatctactatacctattaatatcttttgtaatgaccatgaggtctaacttca

SEQ ID NO: 278280 - DNA, 607 bp, Cannabis indica
tttccgccttgtatccttccacaaccgacttcccaccagaatgccccccatgatggcggcccgcttgccatcatcgctgagattttttactttggttgactcttgcataaagcgttgaatgtagtcttttagtggctcatcgggcttctgaaagtcacccaactccgccggtatctgccgggctgaagagaattgggtatagaataacccttcaaactcatcccaagaagtgattctccttgggggtagtttagtaaaccgttgttgcgccgtgtccgtgagggttgcatggaaaattggacacctaaggtcatccctgattccttgaaggtccatttggattttgaagttctccacatgagttagtgggtcttcactacctgtgtacttgcaagtgggcatcttaaactttgctggaatagggaggtcattgatcatttgggagaaggcagaccctcttctcctttccagatccaagtcagtgggttttggagcagttaggtcgttgaccaatcgggttaactcgtccaaccgagcttggatcaccggatctgtgactgtttgaggttgagcaatattgacaccaacatttgcttggtccccttgg

SEQ ID NO: 278281 - DNA, 500 bp, Cannabis indica
tttttttttaattgtggattcatatacatatatacagtatattggttttcattgttttttttttctcctttaggctttaattaagatatgtatattttgtcatgttagatatatattttgaataattattgagcaggttacgcattgattttattttaagtatatttatatatgatatgtttcaatgtgtaatatatgttacagtatagtttggtaaatatgtattttggtacaaacaatttaattcaaattttggtgttggtttatgactaatattttgagtaaattaattgaaacaatatgtcgccaaagtgacctcttttgtgtagattaatttatttaaatattaggatggttgtgtgtttgtaattgatgcttatattgactagcccaaaggtaagtgaatattttgctagatttcaaacatacctgtggcaataaatgtgtgacaattataaggtattttgtgtgagcaatacgttaatccaaagattgaccta

SEQ ID NO: 278282 - DNA, 922 bp, Cannabis indica
aatagttgagctatttttcaacatcaacacactataggtgtagaattaatcaactataaaagtcaataatttttttttaatttttattgaaagtatataacaatcctattaaatatataggctaattagaatttttgttccctgaactttgacatgtactaaatcatgtcccctgaacttttaaggtcgttaaaaatgctctctgaactattgaggttgttggatttaaggacttttgtctaatttcattcaattttactatttcagtgattgtttatatactaaaccatgctccccagactttgatatctaccaaatcatgcccctcgaactttgacatgtactaaattacggcccttggactttcatccatgttagacttttttactaaaattggaaaaaagtccttaaatccaacaatctcaatagttcaggatgcatttttaacgaccttcaaggttcaagaaacatgatttggtacatgtcaaagttctgaagataaaattcctaattatataaataaaaaataaaaacttatcacttataaatactaatgactggaaaaataataaattaatcaaaataatatattttatggtgtaaatttagctcgtacaatttttatactaattaaatttggtataatttttagtaacaaatttatacaccactattaaagtttaattcaattaagatgagctaaaaaaatgcatggtattggtgactcctgtataatactctattagagatattctaaatacctcttataacaataatctttcattattttatatacttataaatcaaaagtagtggtggccaatttcactaattttctttgcaatagtttattttcattattgggcagaaaaatcttttaagaaaaaaaaagtccaaaccactaattatccatttaagcttt

SEQ ID NO: 278283 - DNA, 655 bp, Cannabis indica
aaggtaacaaagttacgcaaccagagaaggattttcttccatctataacagttcattgtctatcctaagggcatgcagagataccccaggagaactagacaataaaaccataatatcagaaaagaaaacctcaaaattgagagttgtcactttcgatccactagtagaacacctacaaaataaagagaaaaaaattaatacataataaatatttaataaaaatgaaatttcccattacaaataaaataaaataaaatatgaaattttatataaatagtcacatagaattctctgatgtaaatactagaacttatctattcttatctccattgctgacggtgactacactacatttgatgtgttattattagaccaacctgaccttacaaaattaaaactagccatataataactttacaaaaccaaaactagccatgttagccttgcaaaactaaaactagtcatattgaccttataaaattaaaattagtcaaactggccttacaaaaccaaaaactagccatgctagccttacaaaaccaaaactagccatactggccttacaaaaccaaaacctaaccacattggtcgtacaaagaaaactagccacattggccatacaaaaaaactagtcacattggccatacaaaaaaaa

SEQ ID NO: 278284 - DNA, 452 bp, Cannabis indica
cttatgtgatgaatgtttgtgttgtactaaatttttccatgaaaaatatttttctatatgttagtagtttgggacggttcattagacattgggaatgtcgggaatggccgggaatttagaatttcccaaaaatacccctttagtgttatttatgttattttagtgtggaggggcaaaatggtctttttgccccaatgatattttgtcttctagtgattttaataattgaaaaatatatgttaattgattattatttggctgaaatgaagttgatatatgttaagtagctttttatttcattttacaaaaattacaaagttaaagaaaattggaaaactctttttctctcaactctctctctctatttcggccctcttggagcagcaagaagctggccattttcttgtgatttcaagcttgtttcaacctaaatttgtgaactcttgttgtgg

SEQ ID NO: 278285 - DNA, 615 bp, Cannabis indica
cttccaaggcaagaaacaacacttcattcttcttctccccttcgtgcaaaccaaccagccagcaagagaggctctcctcaccattttcttttgtctttggagcatattattcaacctaagctcaacctagaagtgattgaggtaagtttacaccttatgggttgtgatttttaatggattttggttggtttaaggttagagttttgtgtttctgtggctgtagggattaggttgagtttgagttatgtttaggttatgtttttgtgtatgttgagaatggttttgagaggtttctttggctgcttggattgaagtgtgttggttgaagctaaaagttgaatttcttcacttgaacatgtgattttgagttagagattgaatttttgtgttttgaagcttgggttatgttatatttatgttattatactgttttggaaggtttgagcaggtttggtggaggtttgattggtttttggggtgaaaaaccagaaatcaccatggctgccaggaaaaaaaggcaggccgtttttctgggtgtctgaaaaacggccgaccgtttttcccaggaaagggggattttgggtttttctcctcaagtccgatctgattcggggt

SEQ ID NO: 278286 - DNA, 470 bp, Cannabis indica
tttatgtagtaataactctgtaaagagtctaaataactatagaatttgtgtcaataataaaaacatatacacatacacacataataaatataataattagtaattgatttataagataaagtaatgaagctcaactcatagattgcaatttatttgtaaaaaaaacttaattataaattaaaaaaattgtttgcaacattatgagaacagggaataaaatcccaaacttgaaatccaaattgttttaaaattgaaacaattaattcaaagaaaaataaataaatgagcttcttctttatctttgacgaactccatccccttatccagctttcagatccaactcgctaagacagcacctgagtttaagaagcttgagctataagaagaaaaataaacaaggttagtagtccagaattaataatccaaatggataataattcactaaaacacatcagtttatagaaagaaat

SEQ ID NO: 278287 - DNA, 752 bp, Cannabis indica
gctagacttagcattatccttatagttttgtattttgcaactggtgcaaatacttcattaaaatctataccttctttctgtgtaaatcccttggccactaatctggccttataccttataggttcatccttagttctaccttccttctccttgaatagccatttgcagtccactatgctcttatctttaggtttaggcaccacaatccaggttctgtttttcttaagagattccatctcttcatccattgcacctttccatttcctggaatttggtcctttaatggcctcttcatatgattgaggttcattattgaccatttccaattcactcataaaggcatatgcaatgtcttcatcccaaatattaaaactatacttaggattaggtcttggtacccttctgcccctgtccctgactaattgataatcccccaagtcctcttgagtgccttcatcaacaatgtcagtgttgtcctcatcaggttccacctgaacctggtttccaggttccacctgaacctgatctccctggttctgttcaggtgtgttcactgtttgttccacctgaatagagccagttccttcatttgcagtgttacctgcattttcagtgtcttttgtacctgcactagggttagaagaaataggcaaacatggaaaaatatcttccttaaatattacatccctgctattgatagttttaaaacctctttgttcccaaacccaaagtctatatcccttaactccttc

SEQ ID NO: 278288 - DNA, 677 bp, Cannabis indica
aaatatattcagagagaaagagagtaagcatactcgattgctggggaaaatcacaactgagcccaactcggtttacccactctcgagcgtaaatccgagttgaaaaatgactgaaattgcagagcaaacccctgcccaaaaaaaatcagaaccctagaaaatcgaaaaatgtaagagatgatttgattcaaaaatggattcttttttttgcagcggaattttgagaatagaatcgcataggacgacacaaagagagtatatctgagttaaaaacacattgtgttgtctcaaactgaacgaactccatttttttttttctttttcattttttctaaataattatttcacattttcttttcctttttttttttaataatttactttttaacaataatcaatgacgatttttttttctttccgttgacctgaagtggagtatttgagctcactcatctaattaagggtcaattttttttgtgtttttcagtaacgattttaagtaattttatattatgataagttgtaactaaactcttaaattatagtcaaattaaatataatttcaattaaagaaagtgaaattaaacatattttatattttgtttaattttcttttctcaatttaatattactcaggaaaaactattaaacaatagcatgaatcacgtgtgataaat

SEQ ID NO: 278289 - DNA, 802 bp, Cannabis indica
gtcaggagatttacgtaatctctgcctaacaagatttaaatttatatatatatataaataattatataggagatttacgtaacctccctaaatatacatatttatatgcaaacgtattttatttttaagatagtggtggagtgggtatatggtttttgttttacttaaattctttttgcatgatttacaaaaaaaaaataaaaataattctttttccatttatagtaatatagctagtttttaaaaagttctaaataatttaccatgctaaaaataaatttaaatagcgagttacacatataaaaggtaacatggcgtgcattaacaaaatcttaatctatgcacaaatattctccacgcattatgtactcattaaaaaactagaagattggtaaattttctgaatgtgatcaatgtatatatcatctatttattttattttacttctttaaaaatatatatgacttagttctgaaaattaatttgttcaagatttatatatattagaattgggatttatgttttactccttttcgattttttattgagcttgtattatttgcctgttctaccctcataaaatatgccaagatctcattagaaattatggtaggaaagggtctaagcctaattgcatgatcaaacttgatctggaaaaagcttatgacacaatgaattgagatttcttggaagaaatgttgtgttatctaaaattcccggagaagtttataagactaatcatgacatgtatcagaactcctagattttccttgatgtttaatggatctatgcatggtttttt

SEQ ID NO: 278290 - DNA, 703 bp, Cannabis indica
agaactgctctaccgtaccatccttaatggccaagctgaaattctaacctggagataaagatgattatggagaaaacagtgcagagatcaagaaaagactggtctagaaagttagatgacgcactgtgggcatatagaacggcatttaagacaccgatcgggatgtcaccatatcggttggtgtttggaaaggcttgtcatctgccggtggaattagaacataaggccttttgggctatgaagactctcaacatggaattgaaggctgcaggagagaaaagactactgcaattgaatgaactggaggagtttcgtaatgaggcttatgagaatgctaagatctacaaggagagaaccaagaagtggcatgaccaatgctaagatctatgttttagattcaacctgggcagcaagtattacttttcaattcaaggttgaaattgtttcctggtaagctaaagtcaaggtggtcgggaccgtttaccgtggtcaaggtgtttccctatggagctgtggagttgaaaggtgaaggtccagaaactttcaaagttaatggacatcgtttaaagctctacttaggaggtcaaattgaccaagccaagtctgccattattctggcgcctctctagacaacaactcagcgtccggctagatgacgataaagacagcgctcttgggaagcagcccaagtgttttctttaat

SEQ ID NO: 278291 - DNA, 626 bp, Cannabis indica
gttgcttgtttgttgtgtttatatgttgtattcagaggtttaaagcatgcttaattgagtggaatgaaactgttttgatgcatgttgagttggttttatcaatatatggaattttggttcaaaagttatggttttcaaagtaaaaatgtgaaaatagtttctgtagagtttggttgtgcttgagttcagtttcggcagtttttatatgcatgaatgagtagatttaagctagttttgatgcttgtaggtgagctttagccaagtttgagttttgaactcaaagcttggagctcacatgacatttttcgtatctgtgttttctggatggtttagatgctttagaaatgttctatggggtatttagaacaggtctggaaggttttgtttgaattggacttgatttgagcaagttatgaatttttgaatgtatcctccgagtaaccggaattccacttgtgcaaccggaattccggatgagggttcaggaattcccagaaccggaattccagttgcagaaccggtctaccggttgggggatttttgggaaccctagtttttctcgtttttatgttatttggagtattgccatgctttttatcgatagggaaacttttagtttctagttt

SEQ ID NO: 278292 - DNA, 626 bp, Cannabis indica
tttggcggcgtggctgatcataggggttgaagcggggtggcatggcaaaataattaggatcgtccacaccgacattcatcctcgtgacaagtgtgttcaattgggccacctgctgctcatcaaaaacactccgttgggccatgtaattctgcatgtgcatgttttgctgaatcagataattcagctgatcgtgagtgtactgcatggctgggtcaagaggcccggcaagacgtggtggttcaatgtcgtcatgctcctcttgttctgttgcgggaggatctccccgagctggtggttgaccatgagggtgaggaggtttgagtcgcataacagtggataagttaatactgcgttgtggcgctaccttggtatcataagagtactgtggtactccatgtttctcacacagatcagtgataatgccagcaagcccaagtccaccaccacaagacccctcaaccattatatcaaatgtcactcgaatgatgtcccccacattcaaattataacctttcataattccatacacccacttaagcctgtccatctgagcatctgaaaaatgtttgttcgggagcatccttgcactaacaaagtatagccacgccttggctacctggttgagt

SEQ ID NO: 278293 - DNA, 1255 bp, Cannabis indica
tgcgttcttctttgctacccgtaagagtgggtaacgacgcatatttagaaccttattatcctaacagatttgctcgccagtttggtttcgatcaaggtgtgccctcagataagttttgtctgagtattcctaggaggaggcagtgtggaataagcgaaatcgctaaagcttgggttttaatattaaggagaaatactggcatccactttcacattcctaggactctccgtatgggtcaatgcacgtggtggtactgtcgttggtgggtgaggagttgcattccatacttggggagatctgtgaaggccattcattcaacattgtccaagcaaccattcaaagaagaggagtcaaattatgtgatcaaagacattcgcttactttactccaaccctgaagaagtttttgagagatgtcctccccaacataatgaatttactggcgccaactatgctgatactgagtcggacattggatcagaaaatgtccattccttagtcccacatttcaaacaaaagaaacgtgcgaagcatgacgagtctagtcgtattgaagatgtcttcttcccactaactcagagttcagaaatgccaccatctgatacttgcttcggagcttctagctctagggatgaacaacttatcgactttgatgggtctgatgattatgttaacaaaggatttgacagtgaggcattgcctgcagagccaaccattccaccagaaccgattgtctcagcaaagacgggtactccatcatcacttgttccttcagatttgcttattcctcgaccaaacccggtgttgacagtgtcagcttcagcaatcaccaactcagacttgaatgaacataccaagaagtttgtgattgaatgcatgaaagacattcttcatttgtcatcttctcctctgaccacatcagacatttcaaaacatcgtgctgacgtgagtatgcaactcgacgtgttgagtaccctttgcgggcattataaatgtggcttagcagaggttgcatggttcactgataatgttaatgacttgctcaaaactcaagaaaagtttctcgcttctgctcaagttgttgagaatgcccttagtcttgatgaatctcttatcatagatcttcttcgtcgtgataaggataatttggcagctatagatcatttgtccatatctgttactaacaagacaaaggattttgaagattttaaagcaaaggaagcagagattattgcggcagaactagccatacaaca

SEQ ID NO: 278294 - DNA, 646 bp, Cannabis indica
atttcaaaattctcttttccttttgtaaaattgtaaaccaccttgtttaaatcatcaattttagctttcaagtttacaacatctttttcaaataaggaacactttttgcattgggtttcaatcaaaaactcaatttctttgactttcaaagcctcaacttcttcaagcaataaacttattttctttctttgagttgagttcttagcaagcaatttttcaaaatcaacaagcaaatcattgaaggattttgataattcatcataagacatatcaagtgcatcatcatcactttcactttcaaaatcacttgtatggttaggattacttaccttatcatcaatggccataaagcaagtgttggctatctcatgttgttcatcttcagaactttctttctcactttcactccaagtagccatcattgcccttcttctactcctctttctcaaaggacaatccgttttcatatgaccgggctttttgcattcatagcaaataatttgatcatcttttcttgagctctcccttgagttgtaaaatctatttgcattcttcttgaacttcaaaaacttcttaaagttctttgtgagtagggttatatcctccatatcactatcaccatcctcactagcttcactatcatcat

SEQ ID NO: 278295 - DNA, 546 bp, Cannabis indica
cattaaagctcaagctttgagttctaaactcaaacttgagcaaaaccacctagcatgcattcaaaccaacttaaatcctcttaaactagcataatataacctctgaaaacaacagaagacaaccaccacaaacacagcaaccaaattcttcattttcttcaaaaatcacatttttgcatagaaaaatcataactttaaataatctaacaatcaagcattacaaggagcttaattaaactttaatcaacatgcttacatctcagaaaacaacaacaaaatcacagcagcaacaacattacaaattcatgcatgcatcaccattttcatcattttttttcaacaaattaaagagagaaagttagagatcacataccacaaacaagagttcacaattataggttgaatctagctttgaaaattgaagaaaaacccagcctttgcaccccaagtaaccagccgaaatagagagaaaaagagagagagagttttgaaaattctattttttctttctaagtgtaatttagtaaaatgaggaaatgaataaaa

SEQ ID NO: 278296 - DNA, 167 bp, Cannabis indica
ttttgggttgctggtatatatattttgttgtacggtatatttctattttatcgtatggtatattattattcttagatgatatttaatttttattatgatatgtataatagtggcatataattttattagcataataaaaatattttaatgtatgtatataattttat

SEQ ID NO: 278297 - DNA, 620 bp, Cannabis indica
agagttgtgtggaggccagagggccgtgccagtgagacttagtagtcatgttggcctgcgaaggtcgagaagggtgctacagtttgcatgaaggccagagggctgcgtcattggaacttagtacaccgtgggagccagaagggcgtgatgcaagtgtgaatcagttggatggttgagtgggaagttagtgcatgcatgtggaaatcgacaggggtgctaatgaaatagttgactcgagagtcacatcctgcgggatgcacttttagatgacatggtgtgcatgaagagttggggcagtcaggcatttgcgtgtgggcatgttgtcgaggacgccaacagatgaagtgggggagagaccttcacggttcactcaacaagactacttattcattacaagcatcgagatgagtatcatggagattgattgttgttcaggatgtaaagtcaagaagactcaggacacaggcagagccagttatctagggtgaaagtccgcaggactcaggtactaagataacaccatggcaatgttggccgaaggcaaaagtcagcaggactagggtactaaggcaacagtgaaatgtcgaggggcgaagagtcagaatgatcgaggcattagt

SEQ ID NO: 278298 - DNA, 932 bp, Cannabis indica
atcggtcggttctcattggattagattgatttatgcacacccctacacatagcaagtcaagtactcaatcatagtgagtaagacggtggtaaccaaacccgaaggagagaaagagatccaggttcagatcttgataatgctctgctacagaaaggaatcaagggctagagatcttgaacggaaggagtcatattattccgctgcaatcaatgtaaggttttcttaaacccttatgtgtttatttcattgttttagagaattcatatttaggatgttaattcaacatacttgttagtaaatctagatcttggtaaaatattcccaacatatttaactgcaaaatcacgtaaaaatatctggtgttattgatatactatttgtactctatttatttcttattatttctgtgttaaatttattacgaaaaggcttattattggttaacgaaaatctgcgttaacatatgataatttaaaattatatattttcactaattctaatgaataaatttttgaataaaaaaaaatataaataaatttgtaataattatttcattaaaattcttattaaattaaatatattaacaaaattaaaattaaaaaaaaataataaaaaaaaactctcacttgtatgggataagtaatgccagatagatagaattagttgaattaattatcccaacatatttaaatattggactgaataaattaagatgtctaatccaatattgtataataaaaagaacgaaagtatatataaggctataggggccatgcccccctctattttcaaaacttcattatacatagcaaaattactttcatgaaacaaaatcatagacagttaattcatgaccaggtaattaaaagtagttaagcacgaatgaatagaatacatagaaattaggggaaaaataaatcatattaaaatca

SEQ ID NO: 278299 - DNA, 473 bp, Cannabis indica
taaaataatttccaacaatagccacctgtagatcatctgtcatcgatgtagttggcccaatctgcaacattgtaaccacatatgctgaaactatctgatgttcgaagcagtattccatcagatagagtaccttttaagtacctaagtaatctctcacatgccccccaatgagtaacagttggaaagtgaataaactagcttaacttgttgacaataaatgcaacatcaggtttggtcaagcttaaatattgtaatgctccaagtgtgcttctatataaagtgatgtctatgacagtcagtagtcccgtgatccataaagaaaaataccaggtaagttgtgcaatcccacatcgcctagggaaggtcaagtgggatgattctaagactgtgtaggtatgggactacacagttgaacaaggcttaaatggattgattggtactacctatatgaacaaagtacatcttgtttttcg

SEQ ID NO: 278300 - DNA, 510 bp, Cannabis indica
aagggtttagcatttgaataaaacagataagtcttcttaaagcgaaggattaccttagacatgcctcccggagaaggcatgtaaatctcgtatgctcccggagagccagatggcaacatagcatctctgggaggtgtcaggtttcatctgaacagtcatctcgcatttaatgtcgcatgggaggaggcgtattgaaactgccatacgcagtaaagtctgacggcacaacccccaatctatacctactaggctatgatcaataaagtctagtgacggctactttgtgaggaatcacatcagtcaaaaaggattaaggactgccctcataaaatccctacaaagcctagggagtagaccatgcattacctatgataatttcattgggaatgtgtggctttactgatagttacagaaatgcatataccttaattctagaaatcacccctcaaaaacactataaataccccccaaaactcattaaagaggggtcgagaattctgggtattataa

SEQ ID NO: 278301 - DNA, 451 bp, Cannabis indica
cgaaggaaaaatgatgatgagaccaaatatcctatctgtgttaacatctcaacatccacaaccgacaatgaacacaatgatagagtaaactatacctacaatggggaaactagtttacaaacaaggcaactgctaccaacaagaacagaatatgcaacaaagatggcagattatgtgattgaacaaactcaaaaatcgatggaagaaagctccgaagaaaatcaaataatttcaaatcctcaagttgctgaaatacacattggccaagtttttgcaaacaaggaaaccctccaacaagcagtaagccttcactcaataagatacaatcaacctttcaaggtaaaaagatcatcaaaactagactataaactagtctgtattgatgataactgcaactggacattcttagcatcaaaacatggaaagactgacatgtttatcataagaaaaa

SEQ ID NO: 278302 - DNA, 642 bp, Cannabis indica
ggtacctgctcgcaagacacaggcccaacagggcacctcatacattcgctcggacgaagtcttctagaccgagcagtaagcagtccgcgcagcatgccaacacttagcaaattcaacttttccatcgtgagtcatcaaggaaatccttataactttgggatcggattacagagttatggaaagctgttcaaatcccacgattagtgtattctgtatttactatgcaatctttctgcttatatcaattgtaaccagaagggaaatacttcccctccaagcttatagccctataaatagtgactcatattcactgggcaaagggttgaaagattttgtctaagaattcatattcagagatactgttgtaagagctctaagaaaatgaactattttccttgttcttcagtcaatacaaataacgaggattaggctattaccgaactgctcggggctgaacctctataaaattcttatgtctttatttgctttactatatttcattcgtattaaactactcgtcgcttacaaaattagactcactgtcgttggctaaaagcgaggtcaacattttggtgctttcattgagagcagaatcaaggatcgctctttattccaatttaatcacaagtacgatgatggtac

SEQ ID NO: 278303 - DNA, 554 bp, Cannabis indica
tattcggagttcctgtctcgcctcatctccaggaaccggagtcagcacaatgttgggaggggctgtgtgttcctccaacctggggagagatcccggcatcaaggccaggggccggagtatcagctctccgctgccgtttgggctcttccttggcaaccatcttgcccttgcgcttgcgaattagagaaacttcttgctcttcttcactttcttcaacttcctcaggaagatcccattgctcttctttaccttcttcaacttcctcagaaaggccccattgcttttcttgaccctcttccggaagcgcctcctcctcatccactaagtcaatagtgtctggaggggtgctggaagaagctttcaagggagtggccacccgggaggaagttaaaggaaggggagcatcaggagtgtgagctccgaaaagttcggccaagatggcatccatggaattacctgctacaacaagaataaaaaggcaagtgttagaatatccatggaaacagtaaacactcgaataaagcaatcaaaatagtcctaccctgactctctaa

SEQ ID NO: 278304 - DNA, 625 bp, Cannabis indica
catactgcctaaaatggaaagcggtaaataattgatcacataagcagtaaagtatttactctcaacacttactgcaccatgagtcgagcttatctctgacgatgattgtacatgttcggccggtctacaggaagtttaaaaaccttggcgctctgataccaaactgtaacgccctaagatttaggcacgctacccaatatgattaagaaaccctaatcccctaaacgggattggttttaaaataagcgcggaaattaaactttaaacgaaaacggaatgaaaataaacttgtaataattttaaccttacaaacaaaagttacatgtttcgggatcccaaaaatcattttacaaaatattacaagtcttttctccttagccgacctaagcggcaaaatagagttacaaaagtttcaacgctggtagaccccaacccgcttggtctagtgtggcccgaacatgtacatacatcgcccaactcccatactcatggctgatcagagatagatttaccctttcctgcacagtagagcacccgtgagccaagcccagcaagacagtaagatatatcgttaatcatatataactcatcacataaataataatgccatttcatatttgtctgt

SEQ ID NO: 278305 - DNA, 479 bp, Cannabis indica
tttcttgaagttttaagtgaaatggtaggttgcatgctagttttgggtggctgttgttgctgtgtttatatgttgttttcagaagcttaattaggtctaaaatgaatggattatctaggttttaatgcatgcttgctatcttgtttaaagctatggtttttctatgcaaaatatatgatttttgaaagaaatgtctatgttctgttgctgtgatgttgtggatgtttgtaattgtttccagaggcttagttatgcatgtttaagtagattcaagctggtttgattgcatgttagctaggtttgctcaagtttgagtttagaactcaaagcttgagctttaatggtgatttttgattatgtgcaatctgggtggttttgatgccttagaaatgttatttgggttatatggagtaggtctggaaggtttgaattgatttggagttgatttgagcaagatatgaatttttgagtttgctgcc

SEQ ID NO: 278306 - DNA, 672 bp, Cannabis indica
gaatagagacgaggatggcctcgtcgaagtagttgaagcaagtcctggtcaattcgatgttcgctctcccgaaactcacctgagttcatctacaaaagacaacacacaagatgagtgtttggtcggaatatcgaacgttaaaacaagcaaatatgccgaccaagagtactcaacagattaaagaataagaatattcaacgaaaagtcaaaacttaggaagtttgaaatttctcgagttagggcaaaaaatttcatgaagcttagaataagcaagatgaaagacagacattatgcagtccagaaatcaaacactacggacggtgaaatcacatgaacccatgacaaaggagaatcgcaaagtttctaaacttagggtttcctacatatcttctacagcaaagtcgaaggtgcattcaaaaagtaaacatgcaaagtaaacataaaggaaatcgagaacttactcaaggatcagatgtttggattcaggtaacgccaagccaaacgagcagttttgatgaaggcacttcagcaaatttgaagccgaaaacctctcttttccctctgaacttacttagcaaagaaggatggtgaaaatgagtttctgtacaaacgctcactcgtatttataggcaaacaacgaaaaaggggtaatcatttcaaaagaacctcaga

SEQ ID NO: 278307 - DNA, 787 bp, Cannabis indica
tgattgattaaataatgttacaatggtgtgtcacaaattttaatctagtgggggaatgttatattatttgatataatataatatagattaaaatatttaaatgtgacaaattatatattaataggagattaatatatattatgtgttggaggttatattatatcatatatagtataataatacacataaaattgtaacatatgatgagttacaaatctgaaaatagattgtaacttaaggatcacaattgataaatatgtaattatgtgagttgttacatatgggagttatggaattaatgggataagtttctagctgttagaaactgttacaatactcaattatatcatttaaatgggtattgggacgttgggaaaagatttaactcggagaggagttacattttgagttctctggaaacagttgtttaatagttgtttttatgttgttttatggttgttttcgaacatctggaaccagatttttgaaaacgttcataaacgtatataaattaattgagcatgtttccagctctcttgtccaacgtttttatcccattaaacacaaattaaagtgttggtaacagccatgtgatgaaaggatttgattttcaaatgtgatcctcaaaacactataaatagaggtcttgggttcactttgggtgaaaaagtttctatcaagagagcacattgctagaaacactataggcttgataaatccaaaaagctatttccattcttttttttttccctaagtgcttgtggtatggggaaataagcttttggac

SEQ ID NO: 278308 - DNA, 580 bp, Cannabis indica
taaacataaatgatttctaatcttcgattgataacaaattagattgtattataatgggttttatttatggcataaaatcccaataaactcccacttgcactaacataagacaagtagtgcatttcaatcaattaattgttttgatatccagatcaagtgtagtatatttgacaaaacccaaattattggaactgtaagtctgtggtaagatactgcttttcccactattacttcctttgtgtttgttatcccaatttttacactctgacgtggcatcacatgaatggtgacacgtggagtccacttggaatatctgctcgggaagaatggtctgagcaggacatatcactggcacgctcagagcgaagtattcagcaatacgggcagggcgaccaacacttagcgaattcagctttcgcatcatgagtcatcagcacaatccctataacttagggatcaatttacgtggatatggcatacacacgatcccactaccagtgtattcaacttcaatcccatgatccttgcattcagcagtgatcccacgatctttctgtttatacgcattgtaacgagaggg

SEQ ID NO: 278309 - DNA, 478 bp, Cannabis indica
tatgtctagtttatgaattttgactaagtaagggcgaaattgtaacgaaaagagattctaggtttatttattaattaagagactttatatgtctaaattaataaatatattaaatggaaatattatttaaaattaatatttagttattcaataattagaattggcatttaaatggttaaattggaaaattgacatttttgagaaaatgggattaagaaatgacaaaatggcaaaattgcaaagtgaggcccattatccaataatatggccagccattttgtataggatttaccatttatatttttcattattttaatgccatataattttaatctaaacctggatggcattctataaatagaaagtgttggcttcaggaaactatgacttgcatcttattttctctcagaaaaaaacttaagcctcatagccaccactcttcttctcttttcttctcttcaatttcgaaataccctag

SEQ ID NO: 278310 - DNA, 511 bp, Cannabis indica
aggaattaataagttagtgaatttacttgataaattccagatttgcttattggaagttcggatatataggcccatggtccccatactagttgagacaatattacttgtaagactcagttaactgattttaattaatcaattataattcttaaattagactctgtctagtttatgaattttcactaagctagggcttaattgtgaagaaaagagattctagggtttatttgttaattaagacactttgtcaagtctaattaatgaatatattaaatggaaatattatttaaaaatttattttaattattaaataattagatttgacatttaagtggttaaattagaaaaatgacatttttgagaaaataagatcaaaaattaaaaaagaaatggaaaaattgcaaagtgacgcccactatccatggtcggccacttgggaagcaatttgccactttattttttttattattttaatgctaattaaatctaacctaaccctaagtggttttct

SEQ ID NO: 278311 - DNA, 515 bp, Cannabis indica
aaaaataaaaaagtcggggtaagatgaaatttctaggaggctggggctccaagcctattgtttcacatgttgtcgagggggtaagtttatatttaactatcattcatttaaatttttctagtaaaataacaatactaatatattttctcttgaaaataggctaaccccgacacaggagaactgccaactgcggtggaaacttttcaaaagtttcaccataaaggcaacaattggcgcaacgagtacgcgcaacaagcttacgtaagtttacattttaattcaatttttatttatttctttcaatttattttgtattaaaattaaccatttaacttatttgtttgttttaggagcaaatggttgaaatagcggcaactcaaccagcgcccactgaagatgagcccgatgagcctgctgtcgatcctacacagtacccccgagacttacctgttatgacgcaagtactcggggaacgatctcgacatcttagaggctttggccatctccccagactg

SEQ ID NO: 278312 - DNA, 728 bp, Cannabis indica
ggagtaactcaagaggtgtggagtgactgcatcgcttattggagcacagacaaacaaaaggtacattttttaaaattttaaattttggtaatgtttaatttatatagtcaataataaataattaattgttagaaaaattattaatttcaggcgagagcagcgaaaaataaagaaagtcggggtaagatgaaatttttaggaggctggggctccaagcccattgtttcacatgttgtcgaaggggtaagtttatatttaactatcattcatttaactttttctattaaaataacagtactaatatattttctcttgaaaataggctaaccccgacacaggagaactgccaactgcggtggaaacttttcaaaagtttcaccataaaggcaacgattggcgcaacgagttcgcgcaacaagcttacgtaagtttaccttttaattcaatttttatttatttcttttcaatttattttgtgttaaaattaaccattttaactttacttgttttaattaattttaggtagctaaataggttgaaatagccggcaactcaaccagcgcccactgcagatgagcccgaagagcctgctgtcgatcctacaccagtaccccccgagacttacctgtaatgacgcaagtactcgggaacgatctcggcatcttagaggctttggtcatctccccagactgaagggagttggggccaaaagagcacctgccacgcat

SEQ ID NO: 278313 - DNA, 500 bp, Cannabis indica
tcaattgtgattcagaaacataaacaaaaaaagaaaaggtgtctaattggtaacttgatatatagcttactttgtattgtggtcgtttatgctcaatacttaacaatttgtttatgcatttaataattcatatacactacttgttatatatataactaactttaaattttatttgttaatggtgtagacatggccaactcgggatcaggatctgattcaggcgcagaggcagagtgtccaaccgtaatacctacacgagggcctacgcagatgaatgaaatatccaaactaatggatcagggcaaaagagtggccctcgaggttaatgacaaaggacaatactgcgggaaaagctatgccaagctcgtatccactctaggagtcagataccggcagacgatagggttgtcctataaaaactggaaagaagtcaacccgactctgaaaaataaagtttggaaagacatacaagtaagctattatttgttagaattttgatt

SEQ ID NO: 278314 - DNA, 572 bp, Cannabis indica
aatataaatataacatacaaatattataccttagagtaatatgagtattatgtccttttttattttttttactgataggtattcttttaattttatttttatttctttccttcatgatatatatcatataacatacaaatattatatcttaaagtaatatgaatatactacaacaattctctatagtcaaataaatatataaaaaaaaaacttaaataaacttccacaagttttttttttacttttctttcatgatatactatagcaaataaaaataatatgtcactctatttatttattaatatatcatagcacataataaagatataccatacaaaacaaaaaaaaattctaaaaacttaaattaatatttaatagttttttcttcctttctatccttcacgatataccatatcagatacaaatgatataccttagactaatatgaatataccataaacttaaacgaatatactattaactgattttttgtacgatatacaatagcatataaaaattatattctgcaatcataagcataaatactataataaaaaattaatataccacca

SEQ ID NO: 278315 - DNA, 118 bp, Cannabis indica
ttatcaaataaaattgtcatttataatatttattaattagactccataaagtctcttaattaacaaataaaccccaaaacactatttcttcacaatcaagccataacatagtgaaaaa

SEQ ID NO: 278316 - DNA, 433 bp, Cannabis indica
atttgtagtttcattttgaatcttcattgttggtctaactaggcttgtttttttaatggaaaaatccctaatggattgtcatccattaaacaaacatactagggttagatctcgatagataaatattgtaaatgcgacatctagctgtttatcaattgatgacaccttagactaatatttataatatgaaacaagaagattatacaaataagaataactttgactctcgctaatcagagcatcgttggattcttatttgaatacgaaattatccttattcctcttagcttattcatttcgaattggctcaatcatatatcattggataaatgctttataaatcatataatgtcattctatattttctcttaagaaattgaatgacgcatatgattatattcccaatattctatcccgcaatgatataaatcct

SEQ ID NO: 278317 - DNA, 240 bp, Cannabis indica
ggcaactcgcgcccacgtctcacggtcaaatgaggctgcttgcagcctctttgctgggccagacaccccattccgcgcgcgcaggggtatgcaatgcatacccctgtgcctcaaacttgttttcgtcataacttttgattcaaaaatcatttttcattgaaaaaaaagccaaagtttggcagaattttgtgtagaatctaaattttcaattaaaaatctaattttgagaataaaattaat

SEQ ID NO: 278318 - DNA, 749 bp, Cannabis indica
ttgaagggaagagttctgttcagttggactcccttatgctccaacttgagaggtgcgaagataaagatgatgcctacaagcttggactgatcgctttcattgaaggtgtattagtatcaaaggagggcaatgtccaagtttggcctgagatgttgaagtttgttaacgatctcgaattcttctttaagtatccgtggggcgagcgcgcttttcgtaagctgatggagacattaggaaagaatatgcaacattacaaggataatgttgacaagaagaaggggaagaagattgctcaggaggcaaagtacacagttagtggctatgtacctgcctttcagtactgggcatacgaagcaattgagaagttggggaagaagtatgcccactgcaacgggaccaagttccccagaatgttgagctggaaaacaccggagggccagcggaaacaagatgtcaaggcaaccgacattgcactgttattcaacagtcgggtatgtttctttactgttctgtattttatttaaatttattgaaaatgaacattcgcgacattgttagcgatatgttagcgacattatgcgatgtcgcaaaagaaatggctgtatcgcttatcgcgacatatgtcgcgacatgttatcgacatgtagcgacattgtgcttcttttttcaattatcataatttttgacttcttttaacagtttttaattattctgtgttttcttttttgtttcagttggtggtgaagaag

SEQ ID NO: 278319 - DNA, 605 bp, Cannabis indica
ttaattcatgttcatttattctgtttttggattcttttcttttattcttgttgtgtttataactggtttataatcagttttaatgttgtattttttattttgttaacacgttgagcctggtaatgttgcgtttgttggtcctgattctggaactggttccgaagttccagttgatgcacctaagaaaccagaggttaaaaaatctcgtgctaagaagaagaaggtgagtttattaactggttctgttattgttgttgttttttaactggtttttttttattataaaaatgtgtttttaaatgtttattgtatgtaatttagtttttatactttttataacttgttttttttttttaagaaatgtgtttataaatgtttaattaatgtaatttagtttttatattatttataacttggttttttttttctttcagaaatgagttttcaaatgtttatattatgtaattgagtttttattacttttttttaacttggtttcttttgttagtttttttaactatattttgtgtttcatttgttattttattattataacaggtttctaaatttcatttgaactttttaaaagttttgtttttgtatgt

SEQ ID NO: 278320 - DNA, 575 bp, Cannabis indica
gcatcaacaagtttatctttaaacaaacggaatagataggcaaaaccaattaacaagatctacttttctaaccaattttgaaatagaatccatactagcatgtcctaatcttctatgccacaaccaagaattatcattcataacggttaaacatttatttttactatcaaaagaatcaacatcaataacatacacattatccttccttactccaaggaaaataacttcattggttgaaacattttcaatggagcattttgaggattcaaacacaacacgaaaacctatatcacataattgactaatactaagcaagttatgtttaagattatcaacaagaagcacatttttaatacatggagagtatatgttaccgatatcaccaatgcccaagatttttccttttgaattgtctccaaaagtgacaaagccactttccttgcttttaaagcttgaaaatcttgatggatcaccggtcatatgctttgaacatccactatccaagaaccataagctttggctctttcttgttgattcctacaaaaacaagttcatttgttggcttttggtaccca

SEQ ID NO: 278321 - DNA, 631 bp, Cannabis indica
ccaagacccaacggaagagtggccatgatctcgagaggatcccacatcggaggaactacctgtaaggagctcaaacgatacgcaagggccgtaaaacacgatgaggtttgggaagttactcaactcctagctcaaaggccctggctaatggaccagcccatcacattcacagaagaagacgctaagacagtgcgttttcctcaccatgatcccttggtcatagaaactcccattgccaataagattgtggccagagtcttgatcgacaatgggagttctgtgaatctattattcaaggaggcctacactgcaataggcctaacggatcgagatctttcaccaagtggttcccaactcacagggtttaatggaacaacacttatcccaatgggaaaaatgaggctcccagtcaccttgtgcccggacacaccccagagcactttcaaatactgcacatttgtggtggtggactgcccgatagcttatacgtaatcctcggccgatcggccctggtagattttggtgcagtcacgtcagtacggcacttatgcctgaaattctcacccaagaagctgggatagagaccatgagaggaaaccaaggggaggccaggcagtgttataacgttgct

SEQ ID NO: 278322 - DNA, 678 bp, Cannabis indica
cctttagtgttatttatgttattttagcatggaggggcaaattggtcattttgccccattgttagtttgtcttttagtggattttaaatggtggaattatgtggtttattaaggtatatgttggctgaaatgaataagtggaagtctttatttttcatttttacaaagttagaaaaaattagaaaaaggttggaaaactctctttattcggccccctttgagcagcaagaaaagaggattttcctcttggatttcaagccctccttagcaagattaagtgttcataagttgttggtatgttttctacatctttcttttatgttttcttgaatttttgaagagaaatggtaggttgcatgcttagttttaggttgttcttgttgttggattttgatgattatttttgaagttaaagtgataatttgaggttaattaagctacttgtcgtgcttgatagttagattgattatagttatggtttttctatacaaaagtttggtttttcaaagtgaaattgagattttggtggctgtgattattgcatgagtttgttttggttttctgcagctttagtatgcatgtttaggtagttttaatctaggtttgatgcttgttatgttgtttagtcaagttttgagtttagaactcaatctttgacctttaatggtgaaatgagtt

SEQ ID NO: 278323 - DNA, 468 bp, Cannabis indica
taaaaaaaaaaaaaaagagagataagaaaaatctgggttgaaatcataacggcctaatcaattcgaggaggaaggcgaggaccaatgcgcgccttagcatggcgtcaagcttcttcttcttctcccggaattttgcgttcatctccgcaggtttggggtagaagtcaagcttgatattctggctatttgttgactaggccatgtaaacgccatcgtcaaagcgcttaatgcattggctgcaagagacgggagaaaggagctcatctttcttagccttcttcaaggcttggtctttaaagtccttaagctccttcagctccacaaccaggtttgccctagactccaagtctgcctggtgcacttcctctaaggacttcaccttggcggccatttcatctaaggcttccctagcctcccggagctcgcgtttggccttggcaacagcctcgccctccgccctcagctcct

SEQ ID NO: 278324 - DNA, 511 bp, Cannabis indica
ccttccggtagagataatcttggtacttcttctttgcggtggcaatgatctcatcccggaaggtcttctccgcggccggaaccctcacattcgggcagatgaccttagaaaggttggagtcctccaccgactgatgagccaggatcagcttggccttccggcagttctccatcgtgatcaatcccccgacatcgagatccgccctatcataagtcgcaaaggtcttggcccgctgaagaaagatctgagtaggcgcggtccgctcgtacggagggatcctaacccactccgtaagaagctccgggtgctccacagcccgaaacccggaggagaagaaaaagcgacggcggtattccttgacgtgcatttactggttataagggaccacaccctcattcgaagggtgggcccggaagccgtaaaaaccatccttaagtttgtcccccttcttggggacagaaacaagttcgtaaaaatacaaaatctccgccggactgggagagccccatcc

SEQ ID NO: 278325 - DNA, 575 bp, Cannabis indica
tagaaaaaacttttagaaaataaaaaaaaaataagaaagtgagaataataacaatttgtgtcgtttattcacaattaattttttttttaaaaaaaaaaaatctgattgtatatcaactaggagagtcaataaaatgtaaaagaaaaacatatggttaatttttaattttagtaggcgtgtagcggtattgaaaacaataaaatggtctaagaaaatttcataaatacaattcacgttgatacatataattatttttttctaaaactactaattagattaaaaaacaaaaaagaatgtaaaataataaaaaaaaaatagaatgtaaaaaaaaaatatttgatcaacctagtttactgttattttgaaaaaataagatttttattaaaaaaaaaaagctactgtctagaaaaagaaaaaaaaaaaaagctagcatgtaggcagagtttaagagagagaagcaataaatatacattggtatacctataaaaaagaaatgcctaaattgtgagtattaaaataggtaagggtaaattcttaaataatttaataataatagttattggtgcaaatatttc

SEQ ID NO: 278326 - DNA, 500 bp, Cannabis indica
atttcactatctgaagctaacttagccagacagtccgcgtgagcgttcttttcccgggggattctttctattttgtagtccgtgaactcgtggagcagctcccggactattgttacatacgcggccattcgctcgccgcgtgtttggtattctcccgatacctggtttacgaccagctgggaatcactgtagacttccactctttcggctcctacggcttttgctaatttcagccctgctattagggcttcatattcggcctcattgttcgaagctgcgaagtcgaaccgtaaggccgcctggagtcgcaatccggttggtgatatcatcgccactccggctccggacccattctcattggaggctccgtccacaaacactctccatgtggggattggcggtgccggcatattcgcggttgcctcagcttcgttgcattcagtaatgaagtccgccaaggcttggccttttatagaaattcggagaatgtagtgtaagtc

SEQ ID NO: 278327 - DNA, 624 bp, Cannabis indica
aaatcactgtagaaaggagtctccatctactagttgacagagaaagaaaactaggtttagtttggttgaagtaggttgttggatgagaatgagagcatcatgttccttttatagtatttcaactagggttcatgattcaattatatggattaaaaaagaataaaataatgggcaaaaatacaattaagtggccgaccacactaatggggctcactagttacaattttgccactttatttcaacaacttattcttctttcaataataccatatttccaatctcaatcctataaatatcaaaactatttatttaaaaattataattaattatcaaataaaattgttatttatctcatttattaattagacttaacaaagtgtcttaattaataaataaactccaaaatctcttttcttcacaattaagcccttgcttagtgaaaattcataaataagacatagtctaattttagaattataattgattaattaaaactaattaactgagtctgcaagcagtattatctcaactagtgtggggacaatgtgcctatataatcaaatttccaataagtagatctagaacttactaagtaaattcactaatttatgaatttctctttgc

SEQ ID NO: 278328 - DNA, 569 bp, Cannabis indica
tttacaggtcatttttcataggattacccagttttttacccaaaaaatgtaacctcatacatatcccttacaaaatgcatttctaaaagccccaaaataccaaaacccagaaagaacaccctttctcaaatacagaaagcaaaaaatacaatggaactcgaaactaacctttagttttggcaagttgttcctgcggttactctcgattacttctgagattgaaggatgctttggaagaacggtagaaatctgggcaaaaggtgaaaatggttttgaagtttctgtaagggagggaaaaaggaagttaagaaacaagagggaaaaatagggaatttgattcgtatcaaagggtttaaatacccatatccctcattaattgggatcacgacacgtggcaactggaatgcctaaggtcgcccaatccaatggccaacgatggccacgcctacacgaaaaccgaggagtttttgtgacgtagcaccataaaggcaataaaaggtaataattgcagccgtcatttttcgaaaccctcgatgggaaaaccgaaaggtcacctcctcgtgacaacc

SEQ ID NO: 278329 - DNA, 117 bp, Cannabis indica
gcaattttgcagttttctcaattctctatctgattttctcaaaaacgccgaatttagcactaaaattcactaacttattaattcttcgttgaatcctacgcatagaacttagaattg

SEQ ID NO: 278330 - DNA, 609 bp, Cannabis indica
acacgtgtaaatgtgattcgtgaagacgtcagtcttgaacttgtggttgacgttcataataatgtggtggtagcatgcaccgtggtgtgcatcagggaacacgatatccaaagcacgaacaatgctttgatgcctatccgaaacaaaagctaagttctcaacatcaccaatcgtttctttcaattttctcataaaataggtccaggaattgtggttttcactgtcaactatagcaaaagctatcggaaagatatgactccctgcatccaaagccactgcacacaacatttgcccaccatacctagtcttcaagaaagacccatcaacgcatacaacaggtcgacaaaacctaaacccccgaatagaaggacccagagagaagaaacaatacttgaagcgaccatcttctaccacaaaatccgtgatggtacctggattccacaactgtagcatgtgcaagtaactaggtaatttcgagtacgaatcttcaggtgtaccctgagctaggtgtagtgccttctctctgcacctccattccttttcgtaactcatttgtatcccgtaatccttgtgcatacttttcttatatcagagggcaactgatccgag

SEQ ID NO: 278331 - DNA, 356 bp, Cannabis indica
caaaaacaaaaaaaaaaaaaacaagattgaattgttgaggagagtgattggggaatacaaataggaattatttgagagaatgttgtatatgtatgctatggtgtgatttgagcccaaattaaccttctttatctacctttcaccctagccttacattataaccccctaaagtcctattgatctttaaattatgtgtgattacattagtggagaatggtttgataattaagcttatggagtggattttcgttgaaatacacatttattttgagaaaaatattgattgttgacatgcatgaattaattgaatgttagtagtatgatgatttgattgaacacacacacacaaaaaaatt

SEQ ID NO: 278332 - DNA, 649 bp, Cannabis indica
atcctggtaaaatatttccaacaagtttatcatatctgattcaagttcaatatcggtcccttccgatgcatactccatacatccaacccaagcttactttagccaatgccctggaaatgacataacacttatccaaggtgcaagtaaactacattgtagattattctatcagttaaatcttgtgtattgataaatcataggaatacatttaatcacagaatcttgattactttctattgacctcgcttttagccaatgataatgagtctgatttgtaagcgacaagtagtttaatacgagtatagtataataaagcaaataaagatacaagaattttatagaggttcagccccgagcagttcggtaatagtttaatcctcgttatttgtattgacttaagaacaaggaggatggttcattttcttagagttcttacaattatatctctgaatatgaattcttagacagaatgtttcgaccctttgcccagtgagtatgaatcactatttatagggctataagcttgggagggaagtatttcccttctggttacaattgatataagtagaaagattgcatagtaaatacagaatacactaatcgtgggatttggacagcttgccatatctctgtaatctgatcccaaagt

SEQ ID NO: 278333 - DNA, 649 bp, Cannabis indica
tgagtctttttactgatgtaatagactggatgctacatgttatcttcttctctgattagtacgacgcttatggcatgctccgttactgccaggtatatccccagttcctcaccgtccagaggtttagggatgacgggaggttttgcgagctgtgcctttaggtcttgaaaagctctttcacattcttctgtccattcaaactttttgtttcctcgaaggatgttgaagaatgggacacatttatccgttgattttgacacgaatctgctaagtgcggcgattcgaccagttaggctttgtacctctttggtttttgttggcgagttcatatccaagagggcttggattttttctggattggcttcaattcctcgagcattgacgatgaagcctagaaactttcccgagctgactccgaaggagcattttaggggattcagtttcatgttgtattttctgaggactttgaaacattcgtccaggtcgtctatgtgcccccagcctttctggatttgacgagcatatcatccacgtacacttccatatttctgtcgatctgatctttaaacattttgttgaccagcatttggtatgtagcttcggcgtttttaagaccaaatggcatgactttgtagcagtagagatccat

SEQ ID NO: 278334 - DNA, 512 bp, Cannabis indica
accaagatcaatatcggtctcagtccaatgtatactcaatatatccgaaactagcatactttgccaatgttctggaaagaacataacacttatccaaggtgtaagtatactttatcgctgactatcacatcagtgtaaatccagggcactgatgaatcaaggaacattatcttttgaatcatataatcacaattaccttccactgtgttgacatcactgtaattgtgaataactatatgttctagatttaacagattttgtacacattaaaccataaacatgaaaactacatgtatacataaatgacttctaatcttctattgataacaaatcagattacattgaaatgggttttatttagggcataaaatcccaacagccgcggtcagggcggcacagccgacgaatgctcaaaatcaatctgaacctaaagtgagaagaccacgaggcaggcctcgtggctcatgaactaggagacaggaaaatgcgcgggaagaacaacctagggaaga

SEQ ID NO: 278335 - DNA, 581 bp, Cannabis indica
cccgaccagaaaggtaaagatcgaaaaaggtttgttgctcgatgtaaaatcagaattgataaaatttctgggagcaaacctagacgtttttgcctggtcacatgcggatatggtcggaatcgatccttctattatttcacatcttctaaatatcgatcccaacttccggcaagttcaacaaaaacgaaggctattggacaaagaacgagcagtggccctgaaggacgaagttgaaaagctacgcaacaataacttcataattgaagctttttacccagcttgggtcgcgaatcccgtactagtgccaaagccaaacaagaaatggcgagtctgtatagatttcacagacctcaataaggccttccctaaagactgttttccacttccaagaatggatcagctcgtagatgcaacaatagggcacgaaatattatgcttcgtggacgcttactcaggctacaatcaaatcaaaatgcatccacccgaccaagaacatacaagttttcgaaagaatatgggactctattgctacaaagtaatgtcgtttggtctaaaaaatgttggagctatgtaccaaagat

SEQ ID NO: 278336 - DNA, 739 bp, Cannabis indica
ctttatttcaaccacttattcttctttcaataatgctatattttccaatttcaatcctataaatgtaaaaaactatttatttaataattataattaattatcaaataaaatttccatttatattatttattaattacaccatacaaagtctctcaattagcaaattaaccctaaaacctcttttcttcgcaattaagcccttgcttagtgaaaattaataaataatacataatctaattttagtgtaacaccctaactagcataggcgtgttgacgtgattttaaacgtactttgcagctcgttgctaattaacgaggttaatgaaaatcgtgattaattaaaattttgttatttaattaaaacttatatatatttcatacaaaatattttgggatcccgataacaaaacactttacaaaagtttactagctctttacaaaatatttgtcgcctcgcgactaactacaaaaccgctgttgtcccaaggatcgtacgctccatgcctaatcgccccgacatgtaccatattcattggctcatcctcacggttcctcagctttggccttacccttacctacacataaacatagcactgtgagtcgacagacttagtaagaaagcataatataataaacatactaaatcccgggttatgttcaagcgcccatacacctgaccataaccctaactaaatcagggtcgtccatgacaagtatgattaaccgcgaatccagccta

SEQ ID NO: 278337 - DNA, 531 bp, Cannabis indica
atagattggaacactgtgaaggataacattaaaagagaaggacattcgggctcagatcttgataatactcttcgacagaaaggatacaagggttagagatctgagtggaaggagacatattattccgcatcaaccaatgtaaggttttcttaacgttatatgtgtttaattatcgttttagaaagttcatatttaggatgttaaacattatacttgtgagtagatctaagatcctcgtaaaataaattccaacataaacacataaatttgacctagaaaatactcaataatctccttcaataatcaacaataaactcacaactaaatcttgcaatttcacaactaaaatcaacaaagtcaagcaccaattctcttatcatgcaaatctaagaacaacatcacttttcatgctcttcaacaattaaaaaccagcaagaacttcaattaaattcaatgaaagaaagctacctcaagcctcaagcaagaattaagcacaacacaccaaaattccaagcccaattcaagcaattc

SEQ ID NO: 278338 - DNA, 724 bp, Cannabis indica
tgatgggtggtccgatggtataaatgagggtgatgtaaatgagggtattatagggatataataaaagttgtcatatcctacaaatattagttattatttgtttagaaaattttttttaaccaaatgtaagcataaaaaatcaaatttccctaaaataatgactaattttttttagaaaaaaaaaaatactcaatcgataatcggacaaaatttgataaataattattattttttattatcatcaattattcttttttcggttttccattctcatggttgcaaaaaatcataaaattaatgtagtataaattaataattagttaggaataataattattatatgaagtaaatttattacagtttaagaaaatttataatttttaaattagtgttagttttattataaaatgaacacatttatttggatgttatgattaaaaaccaaaatataaactatgtaattatactattcaaaaaaatgtgtaataattatttatttagagaaaaaatattacaataactataaaaagcaactgagtataaatacttttatattataaagttttacatttaaaaaattgcaattttatcaaaataaattattattaatattgtcataccagtttaacaatgaagaataacattgttaattacaataatattactattattttatttattttttgttaattaagttcataatataatattatgttaatgtctg

SEQ ID NO: 278339 - DNA, 500 bp, Cannabis indica
cgatctaatggtgccgtggcactcgcaactgcttcatcaggtgtggcagcatctattcttccgggaggtcgtacagctcactcacgtttcaagcttcccctcgatgccgatggaaaaagcacatgctgtgtaagcaaacagagtgcactggccaaactactttgtgcagcaaaattaattatatgggatgaggccccaatgacccgaaaacagcacatagaagcgttagataaaatgctacaagacattaacgatacaaccttaccatttggtggaaaggtaattgtttttggaggagattttcgccaggtgttacctgtggtacaaaaaggaacgagacaggagcagataaattccagcttggtatattcatacctgtggcctactttgactaaatttcgactaattcaaaacatgcgagccaggctggatccgttgttttcggactacgtgttgtcggtgggcaacggcacgccaccaaacacaatcaatgacataat

SEQ ID NO: 278340 - DNA, 575 bp, Cannabis indica
ttttcaatgaaagtatttttatattttgatattatatttgcatgttaggtgaaataaattgaaatacaaattttatgaatagaaaagtacaattcgtagggctgacaaagaaaatttagctggtgaattaaagagattcaaaaattatgagttacattcattcctacgtagggatgcacattttccccatggggatgggccccgcggggacccgcccttaatggggcggggattccccgtctaaatggggaacgggattaaaaacggggcgggaacggggatgatactccccgccccgacggggacccgtttaatttattaattatttttttattaatattttatattttatatatgcgtttgtatttttttttgtatattaatatcatttttacaatttttgaagttgtatttttgtataataattactatattgaatagtaaataatatgtaatattttatcttttatgtaatttaataattttatacatttacatttttaaaataaactttatttttacaataggggattccccgccccgtccccgctctattaggggattccccaccccgt

SEQ ID NO: 278341 - DNA, 526 bp, Cannabis indica
ataatttttcaattctggggattttattaaactctaggggtattatttagcttatatgagaaatatgcaatttttgtaatttttgctcggcgacaacgaaaaatgcaatggatggctagtttgatcacatgggtaaatttagaaccttatttcttagtggaaaatattttagagaaattaaattatcgggattgagcgaggttatggaatttgaccattttacccctagctttagaaatacatatgttttaagtctaagggcactttagtcatttcttttggtgagagttaagtggcagcctaggtttgtgacatctagcactctaatttgttcagcaaggattagcttactcaatcctttattcattttgaaaaaaaaaaaacttacaggaaaatacaaagaaaatcaagaagctttctattcctttctttctctcttcgaaccagctcaggacaggggattagctgctggtttttgagtgtttcagcagggattcaagagaaatcaagccaaggtaagctctag

SEQ ID NO: 278342 - DNA, 481 bp, Cannabis indica
aactctatggagatgataaatgggaggttgaaattagaaaggtgcgtaggctttgtgatgatctattcaatgagtacaaacctaaatgtcctactttaagtgaaaacaattcacttgtggaagggtcatcatcttcttcaacacaagatcatctatctaactatgacttatatgttagagcttcatctggtgcaatgaatgaaaagtcagagtcgaatctctatttagattaccaagtgttacccaggactgatgaattctttgatatatgctactattggaagataacaggatctaaatatcgtgtgttgaacatgattgccagagacatatttgctgtgccggctagcactgttgcttcagagtcctcattcagtactggtggtagacacgtgagtccacatcgagcgagacttcatcctactactttggaggcattggtctgtactcaaagttggttggcaattgacaaacaaagtat

SEQ ID NO: 278343 - DNA, 580 bp, Cannabis indica
attatagtccaccactaattatactcattagcccaataagcctaagccccttagggttaggtgttggatatatataaggggttaatatgtgttagtataaataggagagtgtgtgtggtgatgagaataagggttttgctttcataggctcctcttctaccatcttaggatacatggaagaatttggtgttatagcaacaatggaaaatacaaatatgggaggtatgtttttcatattgtttgtgatgctctaaataaagtattgatcttggttcataatctgtagtagattaacaattggtatcaagagctagtatattttattttagagctcatgaacttaaccctttttttgttttatgatttatttcattttcggattaatatgtttattaatgagtaatgtgagattaaatgttgtagaatatgttattttcttaatatttgggctgttgctatattttttatagtaaaataacaagttttttataaagctcattaatggaggaaaacccatttcgggttcaaaatgttttatctattattttgtattttttgaatttaaatgggtattggaaaa

SEQ ID NO: 278344 - DNA, 612 bp, Cannabis indica
aaaaatgcgaggaggctttcaagcctcaaaaacacatttggggcaacctccgatcttatcaaaacccatgaccggcgaagtcctgtccatctacttagcagtgtcagaatatgtgattagttcagtactaatacgcgaagatcaagggcgacaatacccggtgtattatgttagtaagcgattactggatgccgagacacgctatccccaaatggaaaagttggcgtttaccttggtaacatcgtcgagaaaattgcgaccttatttccaggctcacagtatcgaggtcttgacaaactaccccttgaggcaagttttagaaaaaccagagacattagggaggttgttgaaatgggcgatggaattaagccaattcgacatcaagtataaaccacgaactgcgatcaaggggaaagccttggcgaattttatccttgaattccccagcaccgaggtagcactcatagaagacaaaatcgacattgctataacgaatagagagatgtggacattgtacgtcgacggagcctcaaataacgaaggctctggtggcgggatcttattaatcagtcctagcaattttaaggtacacgctgctttacgttttgaatt

SEQ ID NO: 278345 - DNA, 622 bp, Cannabis indica
ttcgtggtaggtatgcctagaaccacgggacagtttgactctgtgtgggtcatagtggacaggtttacaaagtcagctcactttttacctattcggacgaatttctccattaaccagtatgctgaattatatgttagagaaattgttcgtcttcatggtgtcccaaagtccattgtttcagatagggatccgaagtttacatcaagattcaaggagagtttgcattgagctatgggtactcagttaaagtttagcacggcatttcatcctcaaacagatggacaatccgagaggacgatacaaattcttgaagacatgttacgggcatgtgtgcttgactttgagggattatgggtaaagtaccttcccctaatcgagttctcttataacaacagctatcaggcaacaatcgggatggccccttatgagcttttatatggaagaaagtgtagatcgcccattcactgggatgaagtgggtgaaagaaagttcttgggtcccgaagctattcagagaacaagtgaggcagttgacaagattagagcgcgaatgctcacggctcaaagtagacagaaaagttatgctgatccaaagcatcgggatattgatttcaggtcggaga

SEQ ID NO: 278346 - DNA, 656 bp, Cannabis indica
ataattaaacataaacaactgctaatttccaaattaactaagcgggctttacatatggaccctcccagttcggatcgaacactcctgctgatgcatctctcgtatttgcaaagactcgtcgtaacaccaagtctctagcattgaacaatcttttcttgactcttttgttggagtatcttatgactcggtgttggtatgcagtgttggtgatttgcgactcatttcgtttttcctcaagtagatccaacgacaattttaagagttcttagttttcttcttgattataaaactctcttctgtgagtcgatatattcacttcaacaggcagcattgcttccgagccaaatgctagcgagaaaggagtgtgtcccgtggctgttttctcggtagttctgtgggcccagagcacctgaggtagctcgtcaacccatctacctttggcagcgtctaacttcttcttgatagtatcctttagggttttattaacggcttccacttgtccatttgcctgaggcctggatactgacgagaagcttttgataattttattcctctcgcagaattcagtgaacaagtcgccatcaaattgggttccattatcggatactatctttatgggaattccaaacctacaataatgttcttgacgacgaagt

SEQ ID NO: 278347 - DNA, 630 bp, Cannabis indica
tattgattgacagatccatctgaggagcctaaaaaaacaaaatttattcatcaataatcttttaaattcagaattttttgcttcaagtagagcttataataacaaatgcaaaagaataaaatttcgactttaattatacatatatgtatatctactaaacaactttttaatttcgtgactgaatcgattatatgatttaatttcttagagaatcttttgggattaaatgtaacaactataaataggtgtttctctattctaaaagggagttctgatctccaatctttaaagctcatacttgagattcagagtcaagtttagagagagagtccaagatcataatgagtgtgcgtaaaggaatgtaataggagtatcactctagaagtgattttctatttctttgtaattattcactgtgttgagttgtaatcttaggcttattcaattgtgtactattgactattcctaatcaataaaagatccatgattcattcattctcgagctaagtttttcttgtctaattttaattaagttctaattttaattttgtgattggttttagttttgtttatgcattcttgaatattgttactattgtaacaatcaattttgaaggtgatcattcacca

SEQ ID NO: 278348 - DNA, 540 bp, Cannabis indica
ccctttagtgatttttatgtgattttggtatggaggggcaaaatggtctttttgccccaatgactttttgtcttttagtgaattgattatttaaaaataaatgtttatcttatatgttatttggctgaaagaaattagtgtttaaagattccttttttattcattttttcattcaacttagaaaatagaaaaattgcaaaacactctctctcttttccctctctctcttttcggctggtggtggctgtgcaaagggctgggttttgcttggttgattctagtggtttagcaagatcaaagtgattttcattgaggtatttcttggttttagtttcttaccttgtttttcttgaaatttatgttgaaaatagttgatgcatgcttgaatctttgattttgttgctgctgaaatcttgttgttgtttctgagagttaagtatgttgatttgtggttatttaggttgttagtaatgaatgttaattgctttgctcaaatttggaatttttagctcaaaatatggttttcaaagagaattgatt

SEQ ID NO: 278349 - DNA, 498 bp, Cannabis indica
cacacttgaattcggaaaacaggtaagaactgtatatagcgtgttatatgagatatatgcatgatgtatgtatgattgtatatgttttgggtgatatcatagcggcacaacaattgtgtcggttcgacagtacaggcatcgtactggttaagagtgatattcaccccagagagtattaattggcgctatcatagcggcacaacaattgtgtcggttcggcagtacgggcacagtactggttaagagtgatatcatggccaattgtactcttgggtgctattgatgctatcatagcggtacgaacatagtgccggtcccgcagcgcgatcatagtgctgatagtgggtgatatcatggtcaatagcacagctagttagaacgttcttactcatctgttaagccttgtaaataggtgtatgggcgcctagttacaagtcgaaagttatatgatatgttatatgcttttcttactgagtctgttgacccacagttctactt

SEQ ID NO: 278350 - DNA, 532 bp, Cannabis indica
catatacatacactcagacattaatatcacacatcatacacagtccttaccttctttccaaattcaagtgcgctggcagacctgaacggaaagtctcgcgctagatggatgccctaatcacattatgaaaccgggtaagttacatgatcaaaaccctaatcccgggaaacccgaacccacaaccctaggttctgctatactccctagaggttactcaaactctagaaatagggaaacacccaaccacggcactgaaatggatgaaaattgagaaaatgaagcgtttggggaccctgccaaaaccggctagccggttttagaggtctggtaaaaccggctagccggtttgcactagtccaacccaaacttttcattctttgctcaattttccaccaaatgcaaccaaactttccagagtacctaagcaatgcatagacaatattttcaacccaatatttcacagaaaaactcaatgaatcaaattatgccattagaaatcaaagctttgaactcaaagctcaaacttgcataa

SEQ ID NO: 278351 - DNA, 625 bp, Cannabis indica
gcgctaatcatagatatagaatttgtagtttctatgagtatttagaagtgaaatgataattttcttcaagcttggcttaatagagataaatgattgtggcatcattttagtaattatattagtctactgaaatatcatttatagatagctaagtttcattgaaaggtagaacgataaatttgtccatattcgatgtagataatctatagaggatctttgactatttggatgagaacgatagataatttatagcatatctatatcttggtatatatagagcattctatataattaagagtgtaattctaaatctatagtggcacaaggaggaattaataagttaagaaatttacttggtaaattttggatctacttattgaaagcttgattatataggctcatggtctccacactagttgagataatactgcttgccgactcagttaattggttttaattaatcaattataattctaaaattagactatatcttatttatgaattttcactaagcaaaagcttaattgtgaagaaaagaggttttatagtttatttgttaattaagagacaagtctaattaataaataagataaatgataattttatttgatagttaattataatt

SEQ ID NO: 278352 - DNA, 698 bp, Cannabis indica
ctctcgactgggctccccacgcgaagtggcctcccggaagctgcttgagccttggagtaagctttctcctgagccttccggtagagatactcctggtacttcttctcggcagtggcaatgatttcgtcccggaagatcttctccgcggcaggcgccctcacattcggacagataaccctggagaggttagagtcctccactgattggtgcggcaggatgagcttggccttccggcaattctccgtcgtgaccaggcccccgacgtcaagttccgcccggtcataagttgcaaagacctgggccctccggagaaagacctgagtaggcgcggtccgctcatagggaggaatcctgacccactccgtgagaagctccgggtgctccactgctcggaacccggaggagaagaagaaacgatggcgatactccttaacatgagtttgcctattataagggaccaccccatcattggcagggtgggcccggaatccataaaaaccgtctttaaatttgtcccccttcttggggacagaaacaagttcataaaaatacaatatctccgccggactgggagagccccatccccgggcggagtaaaaaataaataagcctgagagcaggcggtatgcttgaggaatcagttggtatggcgcaaggccgacaaaaactaaaaaattaacaaagtaatcctagagagg

SEQ ID NO: 278353 - DNA, 601 bp, Cannabis indica
catatttgacttgcaaattatgaaacaatggtggaagctcataagatagaattaccttgactcttgcctaaacaggacaacgcaaaattccaatcttgatcgaataaaaggtcgctagaatgtttaacattttagatgagctgacaactctattcaatggatggtagctttgactctcgcctaaacgggacactgatattgttagtgtcattattttgtgattgtttttgttctgttcaatatctagtcgtatctgggtttttagtctgttatatctgcactagcttcctgttacgtgagtttcagttaagtattagttagtgccagtggacttattttatggatatataaatagtcggtttctgttagtaattgctttatccattaaatcgttcaggcagttatttcagttgtgtgtggagatagagtcgtatcttgtatcttgttgttgtgattacaggtcagatcgtggagcttgaggatgttcatcaattgcggaatgatctgaatctggaattgctgagttcaaactgaagggagttcagtgtcatcttcatcatcagatctgaagggatttcaggttgaagacatgttgaagaag

SEQ ID NO: 278354 - DNA, 1018 bp, Cannabis indica
tttaaaaaaataaatagaaatagaaaagaaagaaaaagaagagaaaatcttattatttaagttacttggaggctaagtaacttcatcatcttcaactcctctcattccctctctcgagcaagcttgagccagccattaggagacttcttttcctcagcaaatccaccatttcagagttgaattcaacccccaagccaacctagaaccttgaggtaagttcctccttatgttcttggtgatttcctaggttttaagctaggtttttattagttctttatgggtgttcatggctgtaggttagatgagttctaagcatgatttcttagttgaattaggtttgtttgtgcatgttttatttgatttcatggctgttgagattgtgttgtgtttgaagaagctaaagaaattgattttctttcacttgagtatatgaatttgagttagagattgaactattgtaatttgaagattggggtatgttatatttatgttattatactgttttggaaggtttgagcaggtttggtggaggtttgattggtttttggggtgaaaaaccagaaatcaccatggctgccaggaaaaaaaggcaggccgtttttctgggtgcctgaaaaacggccgaccgtttttcccaggaaagggggattttgggtttttctcctcaagtccgatctgattcggggtgtctttcggagtggaattcagggtattttagagacggttaagttagtttgatccgggggaaagtagggtgtgttcgattgtgagaattaaagttgattatcagaaatttgattaaggtttttattgagttttggttgtcgtgacataggaccaggatcgcctagcttgttttccactcgagttggcccgtacgcttgagttcagaactaaggtaagaaaagtggtaagcaccgtatgtggttaaatattaatggttgaaaggttatggccttgattattatcaagactttgattaaatatttgttgagcctaggttatgacctagggttgg

SEQ ID NO: 278355 - DNA, 544 bp, Cannabis indica
aaaataaattccaacacattcacatatgcctgtatgacacagacttgcatgttatgctcacatgcctatttatgtctacgtagcgtagacctacgtgttgcgctcacacgtctaattacaataaggccttagaatggttcatctcgattctagttaccgagtccaacctggttatgccttgaacacataactctaacttttaacatactcatatgctcatatatatcatggcatatcattcatatgacatatatcactagggcaataaccctaggcaattaaactgctcatgttagggtaataaccctaatcccggttactgattactcacatataccatttccaatataagtgccatcgtgcataactctacgtgctgactacttcttacctgatgtcccataataataaagattccaaattcccgggtgctcctgaccaggtgccagtaatcgtagtcacaatattgggatttacacaaatagggttaatccctaaatccacttccacaaaaatataaaattggcattcaaatcacagataa

SEQ ID NO: 278356 - DNA, 604 bp, Cannabis indica
gagagaagaattcggatggatttgagcatggcaaccggactaaaagtttcctcattgtccacgccttctctttgggtgtaacccttggcaaccagtctatctttaaaagtttcgacttcgcctccagcgcctcttttcttcttgtagacccacttacatccgattggacgatagtcattgggtgcatctacgtattcccagactttgttctttttcatggaatccatttctaaatccatgccgactgaccattatttctgtttgggacttgccgttgcctgtttataggttaatgggtcgtcatcaataccgtcactaatgaccatattgatttcaccatccaagccataacgagatggtttagtagaaaccctcccactacgacgaggagcggtgaccgtctgaagaggaattttagtggtagttctctcagttgtaacatcaggtgttgtttcaactaagggagtgggattaacctaaacttgagtagaagaggatggaacatcgaaggtgttatacttgaaagcatttcttctaacacaactttacttttcagcttaaagtctctaatatagtcatcttcaaggaaagtagcatttgtaga

SEQ ID NO: 278357 - DNA, 536 bp, Cannabis indica
ctgatatagtgtcccgtttaggtgagagtcaaagatatcattcattgaatagagtagtcaactcatctaaaattacaaacattatatcaaccttttattcgatcgaaaagagaatttgacgttgtcccgtttaggcgagagtcaaggtcagtccaatttcatgagcctccaccattgtttcatatttttgtaagtcttactaatattagccaccattagggtgatcaatactaagaataaaatacttacaaataatacttatctttcgagatggtacgtcgttaaattgctaatgaacgttcatccattatggatgattactcactaaaacaagaactatgtagaaccaacaatggagattgaatgtctcttgattaaagctcattatttaaaatatatttttatttaatcacttattttagtctatatattttaataatgaaaatgacttaatttaagttgatccaaaattaattaaatcatttattttcaactttaatttaattttcaaaaattaatttttgaaaatattatat

SEQ ID NO: 278358 - DNA, 503 bp, Cannabis indica
atataatgtataaattctatttaagtatagaacgtatgaatttgttaatgattatagttttgtcagcacagtggaatgtaatcttgattatatgttcgaaagtttattccctaatttgtcagttcactggatttagactggcatgataatcaacgataggtattcctacaccttggataaatggtatgtcctttccagggcattggcaaagtttaccagcatcggatgtacggattatacatcggaagggagcgatattgaactttgattacatcggatctactgtaataattattcaattcaatatcatctgttgatcctagatcaaatgatcttaatcctgatatggttaggtttgatcttaagagtattatacatgtccttagatttgttagttaagcctactttctggtaagggtgatatgtacattttgggaacatgatagtataattgagttggagcgctaacataaatatggagtctacaacttctataggaattt

SEQ ID NO: 278359 - DNA, 373 bp, Cannabis indica
gcactactctttcactagggtcattcgaaattggaagagcaagagaagagctatatggttcggctatagagagaaaagggaaggcttaaattttcagtttcctgaatgcttaactacttcttttggtgtgagccttcactttctatttatagacaactgctaggtttaggttagtaattaattggcattaaaataatgaaaataataattggaaaatgcttgcacaagtggccggcctagggtgttattgggcctcacttggattttgcaattttcacaatttctatttctattttcccaaaaatgccaattttccaattctaaccatttaaatgccaaaattaattatttaataattaaaatagattattaa

SEQ ID NO: 278360 - DNA, 627 bp, Cannabis indica
taatgatggcattaaatgcagcgattcgctttttgcagaggtcgattcgtttcatgcccattgattgatgcggcgcattaatggtgtcagacggatactcaaacgtttccaccgcctttattgcaaatcaatctggcccgttgatctttgggtatttgaatcgtgcgtttcccccaccgttcgattggtaggtggtgacgcctgttcctcatgcacttttgcctataaaagccaccatctttccttcatttcggttactttccatttcttgccaactttgcttgaatttcctagagagaaaattctcaaaaccagcacgaaacctttgaacactttgccattttcccagttctcccttgcttgctgctatcagtccttctcgtctttactcgactcacatcaggacccccagttcaacacttcattgtaagtttcttgcatcctttggtagtgacatgcttttactcgttctgtttgttcttttctgggttcgcattttgagatttctgggtatgcaagtgtttaggttcttcatgtattctgttttgcatttactgctttagttgtaggatcgccattatcatgcctctgttattattgtgcattttcgttgaagaagaccatacg

SEQ ID NO: 278361 - DNA, 804 bp, Cannabis indica
tgccaaatggagtcggccactaattatggcacatggtcaatgtggttacaacttgttctgagctttctctctccaactttttacataattattacttctaagattattttgtaaagtccctaaaaaaaaaaatttattttgtaaagaaaaaataaataaaaaaaatctatctacctcactatcatcttctcaattttatttttaaaataaatcagtaattttttattttacatcaaacttttatattatactatatattaattttttaaaatacatcactaaaatttattttttttcttctaaattttaatatattttattcatttcatatgtataatattaatatatacacatatttttatataaaaaaattattcaaacacaaaataattaataaaatatattcagagcaataaataaattttatcaatataaagtataaatagataaatttaaagaaactttaaaataaataagaaatttaaaatatatgatgtaatatgcttttagtttggttctgtaaatattttaaaacttctctaacatctcatctcatgttcttaaattgtatttctatatatcaaaggatacttattttgtgtgttttttgttttgataaaacctacaatgggtatatagttaatagttaacatattgttaaataaattaagaaaaaaattctaaattttatgatgtttatacttatatgcaaaaatataatttttttacccttttttttttcaaaaggtttatttatagtagaaattgaagaaaaagtaaaaaaataaaaaaaatcaaagtaag

SEQ ID NO: 278362 - DNA, 564 bp, Cannabis indica
ataagacattgtctaattccaaaattctattttgaaacttgagtttggcttttcctctagctctaaccgataccatttcgccattaccaaccttaagtttcaactctcatgatttcaaataattccagttttcaagcaattctaatgaacaattgacatggtttgcagatccaaaatcaagtccaaatggatttatcattctctaaaacacatgattcgaaaactaaagcatcactgcttaatcgtttttgaattgttgttatttctagttcaatcggttgtgaaggataatctgaggaagtgaaatcactttctctaatcttctcaactgagcttaaagtagtaggattgttggagctatgaactctttgctctttagagtgaataattcccaacttagctgctttctggaatttcatgttcatcatgagcaagtgtgaagtattacttcgaccaggagtcttattcacactttcaagttcattcttaaaggaaatttctagatgagtgttgggatttgggttgtacatttttggcactacaaatatcaataaacagaagtaa

SEQ ID NO: 278363 - DNA, 651 bp, Cannabis indica
ttggcggggataatgtccatcgcctctctcgagtaatagtttccctctgtgaccgcacctgtcacatcgcgaaactaggggcatgtgttatagtgagatttctctcacctagaaactcgagaccagactcctatttaaaggacacgtgtattcagccttccaatgaaagctgaattgtccatgagagactcctcgatgttccaacctcgcccaggataaaaccagcgagatactgcgagtacgacctaagtcgaatcgcataactttaactcacattatacaggatggatccaactcgcatgtgtcagtacatatgcgagtatcctctctttatttctgcgaaagcatagagatcaactctctatgatgcgatttggtccctacgatccaatggcctcgataaaccaatatagactcgcgtgtctaggttctatcagctcgacatgcgatgtctacaagaggcaattacctaagggcgcggacgttccaaacgtactgatgaccctgcgagctcaacaacggaacatgaacggtcaactcgcagatgcggaagacgcacacgttgatagacttagtaactgtcgttcatttattaatgttaacgttgcttgggtttaattattgcaattcaatatgtaaataatggattaa

SEQ ID NO: 278364 - DNA, 825 bp, Cannabis indica
tttgggcacctcctcggctaccatcttgcccttgcgcttgcgaatcagagcaacctcttgctcttcttcactttcttcaacttcctcaggaagagcccattgctcttcttgaccttctttagcttcctcaggaagcgcctcctcctcatccactaagtcaatagtgtctggaggggcactggaagaagctttcaagggagtggccacttgggaagaagttaaaggaaggggagcgtcaggagtgtgagctccggcaagggcggccaaaatggcatccatggaattagctgctacaacaaaagaaaagagtcaagtgttagaatatctgtgaaagcagtaaacgctcaaaaaagcaatcaagctagtcctaccctgactctctaattcggccctagcaaagttccgaatcttaatgctggctgcatcatccccgagatagctgtccgagggccggaaccagctagaagaaagataggccgaagggtccaagggaacgggctccggaggtccagaacccatccgggaccgacctaggaaatctcctaagttggaaaaataataatccttggcatgatctccccaccgggtcgagggcatcctaaacctaaggagacgttcatcgaaccctacaggcctaaggctggcatattcgctaacagaaggaacgtaatgtactgctaaaggagacttaccggagccggaagtactggcgtcaggagcccctgtattcggcacctgaaccgaaggctttggcctgggagccctcctctcaaccgggctcccaatgcgaagggacttcccggcaatcgtttggcttctcctctc

SEQ ID NO: 278365 - DNA, 738 bp, Cannabis indica
acatgtattaaattatgtcattaaatttttaagtggttcaaaattcttcaattattaaaattattggatttaaaaatttttatctaattttagtaaaaaaatgtaacatagataaaagttaaaaaagttttatttggtacatatcaaagttctgatataatttggtagatatcaaatttaataaataaataatcaccgaattaataaaattataaaattagataaaaaattcttaaatccaacaattcaataattcaaataaaaaaaattaatggataaaataatttaaaaagtataatttattatatgccaaaatttaagaaaaaaaattatcttagagaaaaattctaattagtttttatttaataatgcttcgtacgttccatcaaataaaaaaaataaaataaaaaaggaaaattaaaaacgtatattccgcgaaaagagaattttgagaaggtgattccagctgtgaaatagatacgtacacgtgtaggtgactgattggttaagccagagagattaagaggcctaacagtcagtcacaccatcttagcagtgagtcgtgtggcgcagtttcgtttcgtcggtgagtagtccattttacgtttcgtgaacgggtttgtttcagtgcggtagagtgtagacgtcgattggggtgagatcgacacgtggcctaatcgtattgttgggttcagtatttttgtgtttttttttttttttttagcggttatacgtaag

SEQ ID NO: 278366 - DNA, 524 bp, Cannabis indica
tcaacttagcctcgcgcttaagttgaatgagttcatttctactgatgagctcgttcggtctggccagcaccagatttcctcttcttccccatcacggacttaggataaagcctgtacctcacaaagttatcctcagaggtcaactggatgatattccggtcttcccccagcagtcgggcaagtttttgtagctctatccctaacgagcaagaatgagggagaggatggtgatatgtcggaatctgctggaaccgagtgcgagtgatacccacgccatccaccatgaacgtactcatcagcaaaatgccatatcttgttgatggccgtgtcattcgtgccagtcaaccacttgaagcctggctcgagagaaatagaagtaccctaactgccttacttggggtggacatcaaatcaaagaaccaggaaacctcgtgaggagagggagtaccccactcctggaaagcgtagaggacgaaaagggcaggtaaatacttaactgccctttggagtgaactgggtcgggc

SEQ ID NO: 278367 - DNA, 548 bp, Cannabis indica
ttatgaaaatgatagactaaagatttaatcttatattttttcttcatcgttgttcgtgatcgcatccccagtacttacttctccatcgttttgatcctccaacaaactatcacggtaaatatctctctctggttttctttttttcttttttgtagactgaattcattccattttatatagccgtatttcgatattatgtgaattgtgatagtgttttagttggtgtatatactgttggatataatctgtgtgattcgtgaaagaattggttatattaaggaccagtgatcacgattttgaagcaacttttctgtagtttaatacctcttgatcagattcattgttcaagttaccttaagagttttctatttcaattttctttgtctatcgtttgttgctgtaaatgagttcaatgtttttctttcttttgtttcacaactctttttttattctttcttttttcaatgttttctttttttgttataggtttgttttatattgattttgttctattttgcgccattatttatggctttggcgccttacaa

SEQ ID NO: 278368 - DNA, 889 bp, Cannabis indica
tttaaatataatttcagaattaaagtaaaaataaaatgctttaaagtattagtacacatggaagacataatgaatgaagtcaattgatttattacggccgtataaaaatgtcacatcaccatcttcaaataataagtacatggtttaaatggtgaaattaaaaatgtgatatgacatccactcatttcagtagtcaataatttattaaaatttgacatcataatcgttgttggtactactatcataatttattaaatctgacctaattgatttgtccaaattttaataagaaaaatgtcatattagtatattagagcccaacaaatattaaatctccttaagtaatataggtaggtttcgtgttttcatatagtatcttaattaactcaaatcagggaatcccatgagatctgcatgtcataatgtactgagtttgatttgacgttacactgtgaaatcgctgacgtacgttatttaaagtataggaaatactccatttaacgtcagtgagtacactgtgggacgtacacagaaaattaaatattgataagacaacaattggatttttttagtgagtatctacaaattaaaattacaggaaatagtccatacttggttaagaagattacaatatttggacaatttttaaataattcccaacaacttaagaacgtggactattaagaatgggtagtagtccaaaattagtacaactcctaaataggaaatggtttaaactgtattaaaataagtattgtacgaataaatatgtccgaaattatagtttacatttgaaaaaaaaatcttattatctcattaaattcaaatattgagtaaacataattgcaccatactgtatttacgatgtgaagtactctgcacatatatt

SEQ ID NO: 278369 - DNA, 455 bp, Cannabis indica
caatctcaatagttcagggggcgttttcaataaccttaaaagtttatggggcatgatttggtacatgtcaaagttcaaagggcaaaaatcctaattagtcaaaaatatatatatgcacatatacctaaaaataactagtccaacaaaataaacttctagccattactagtattcttgatcatttgcccgctaccatcacctgtgtgacatgcttaatttgcctatttatcacgcgtttcattgattttcttgtcaatgaggaatcattctttttaaaatgcaacaaactagtcaaatcgttaattaataagttataataaaagtatttcaaaaaatttctatttgtgaaaataactcgtgtgtttatcttagtttcaaatttgtggacagatgcttatcctaaatttattagtgttcctgtaacagctgatttgatttgaataaataacatactt

SEQ ID NO: 278370 - DNA, 552 bp, Cannabis indica
aaattacttaattggtaaataaatataataattgcgcacttaattgtagaataattaaatattcacattcttaaaatatcacaattattgtaattacatgtaaaaataaagcatgtaattaatttaccaaattaaaaactttccataataatttattactaaataacatataatatatgaagatatatgttaaataagaatggaaagttaaacaaatgtaatttaattgactaaatcaacaaaaataaggaaataaaataaaattccaaaaataaatcaaagtaacaaaatttcggaattttcttaaatttttcttaattttccttttttttttgaaaaactgccatgaaaaacaacaccgatgaccaaaattcatgaaaccaattccaaaatgatctaaatgaataaattaagagatccatattgatttcaagcatcgaaaacacgtaaaatgtagactttaatttcataaaaaattctttcgggtccgatcgtgttcttaagagaattttttcagttttcagatgggttttaaatccttttcattcataa

SEQ ID NO: 278371 - DNA, 450 bp, Cannabis indica
aaaaaccaattttaaagtgtaaaaataaaaaaatttaaaaaattaaatatataatacaaaacaataagaacactgatctaagttgaaacatctaaatcaagggttcaacccaaagaacaataagaacattgatcaaagttgaaacatctaaatcaacggttcaatcctaactctctatcaatctttcaaaacgttctaaaacctttttgaaccttaactcaaaaataatttaaaagctctagttaaatatggtgacttactacttaggtggcgtttggttggaggtaatgaaatggaatggaatggaaaggaaaggaaacaattttcattcaattcctttgtttggttgcattttaaagtattggaatggtattccaatggaatgctctttccaccattttggtggaatggctattccattttaaaaggaaggaatgaccattccaatgt

SEQ ID NO: 278372 - DNA, 563 bp, Cannabis indica
cagggttccttttcctcagcagcaggcttttcaagcaaatcttcaatctgttcttctgtggaaaactcagaaaaatcttttagatcatcaacaacaacattagcagattccataacagtttgggttctcatgttatacacacgatatgccctactatttgtggaatatcctaagaaaacaccttcatcacttttagaatcaaatttaccaatgtaatcacgatctcgtaaaatataacacttacatccgaacacatgaaagtgacttacatttggtttcttacctttccagatttcatatggtgttttgtgagtacctggacgcaagaatactctgttgatggtatagcaagcagtgttaatggcttcggcccaaaggcgctttgtgagcttcttgctattcaacattactctagccatttctgttagagtacgattctttctttcaaccactccattttgtggaggagttttaggagcagaaaattcatgagaaataccgttagctttacaaaattcatcatatacggtattttcaaattccttaccatgatcactcctaat

SEQ ID NO: 278373 - DNA, 617 bp, Cannabis indica
ttagttttttattttttgcgtctttccatacttaaaatctacaagttgaacttgttggagaatttgttccccagacagtggcaaaggagccatatcaccctcttcagttcatcgaatgctttcttattccgtctatcaggatgatttgcaggcaagtaccgtctgtgacccatataacacatcttgtgtccatttgccaagcgacgagccgatgtgttagtgcaaaaaatcggacaaccttcgtaaccttttgtgcttaagcctgataaattactataagcagggaaatcactgacagtccacaacaacacagctttcagattaaaaaattcttttttaaaaccatcatagacctgaacaccgttctcatacaattctattaaatcgtcaatcaatggttccaaatatacatcgatattatgtccaggttgttgcgggcctgatatcattaaagaaagcatgttaaatttcctcttcatcactaaccagggaggaagattgtacataactaggaagacaggccatgaactatgacgactacttagagatctatgtggatttactccatccgcagacagaccgagacgaatgtgtcttggttcagatttgaattcagg

SEQ ID NO: 278374 - DNA, 667 bp, Cannabis indica
tttatcgatatttattattgaaaattttaaacaaggtttatcaagatgttattcccttttttttttcttgtttgaataaggaagtatttttttttttttgtcaataatatgtattaaacgagctttgaaaactagttacaaataggagaaagagtttcttcctaccaataaaactcattatataatcaaagagcatgtttagctaatccacgagtcgcaacattaaaattacgactaaaataagaaagagatgcctctgaaaatttagacaacaaaactttcatgttagaaaaatataacaacttggtattgtacacattggagttattcaatgtcataaccagcaataaagaatccgaaaaaataactttaatatgcaacacaatagaacaagtccagttcaatctctgaaagaacttgtccaattcgtagtccagaaatcctagtcactactcaaccctggtgatctcgaacaaccccatcaaaaccatgtcttccctccccgtcaaacaatgcaacatcaatattcactttgagtttttcataacctggtttagaccatagctcaaccctatttgaaagataccaagtatcaaacgaaggaaacaaacttatttcttgagcttttctccactagtgaagagtgatacgagccaaattgacaacg

SEQ ID NO: 278375 - DNA, 605 bp, Cannabis indica
gaattccggatgcacaaccggaattccggttcctcgcaggcagaacttcaaaatttcataactcaaccaaatcacacccaaacaacctcaaaccttccagacctgttctaaacgacctaaataacaattctaaagcatcaacacagcccagaaagcacagaaatgaaaatcaccatgtgagctccaagctttgagttcaaactcaaacttggctaaagctcacttacaagcctcaaaactagcttagaactacataaacaagcataaaaacactgcagaaaactaaccctaattcatgcaaacactacagccaccaaaacctcaatttttactttgaaaactatagctttttaacaagaaaactaaccaactaaagcaagaacaactagcatgcatttcaacctaactaaacatacttaaatcaacattttaaacatggaaacaacaacaacaattagcagcagcaacatcatcaaaatcatccatgcattactcatctttttcatcaaaatttcaagaaaaacttaaaagaaaggtgtagaaaacataccaacatctatgaacacttaaacttgctaaggagggcttgaaatccaagaggaaaa

SEQ ID NO: 278376 - DNA, 531 bp, Cannabis indica
gtccattgaaaaatgtcgtcttaggtgaattacctgtatgcgagtcttgcctagaaggaaagatgaccaaacgttctttctctgcaaagggagagcgtgccaaagaaccactaggcatagtacattcagatctttgcggaccactgaatgtcaaagctagaggtggttatgagtactttgtcactttcattgacgattactctagatatggtcacatttaccttatgcataagaaatctgaaacgtttgaaaagtttcaggaatttctagcattggctcaaaaccaattgggtaaaactttaaagatcttgcgaactgataggggtggagaatatatggatatgcagttcaaagatcatttgatcgaacttggcattgaatcccaattaactgcccctagcactccacagcaaaatggagttgcagaaagaagaaatcgcacgcttttggaaatggttaggtccatgcttagctactcaactctacctacgtccttctggggatatgcaattcagatggcgaccgacattt

SEQ ID NO: 278377 - DNA, 539 bp, Cannabis indica
atggttgatctagcttttctttgcctttacctgcaccacatagcacccgtgagtcacaaggactcagcaagaaaagtaataataacaatcatatagtttgttattcgaacattgtcatttatacacaataagaatcaaaccatcacccattgttcataagatgaaatccaaatcactactggcatctgccacgaataaacatcagtatacagatatttggtaatacaaaaccattataccaataatggaattcatattcatttaatcatataaataatatatatgttacctcataaagcaaccatcttcataacatcatgttgcctaatcaggcaagtcgatgctttaatctgatgatcttgtattgtatcgcctaatcaggcaagcccgtgccatagcctggcacccagatgtcgcataactgcatcacctaatcaggtgagcctatgccaaaaacctgcacccatatatcatataattgcatcacctaatcaggtgagcccgtgccataatctggcaccaatatatcgcatcgtcta

SEQ ID NO: 278378 - DNA, 654 bp, Cannabis indica
aacagtctggtagactcgatgagtgattttctcgaccgtgcttaaggcttcatcaaacttgaagaggctattagcgagcagaaggtgagcaaaagcctggcaagcaaaagctccttccactggaacgtccgcccaactccccattacccaaataattcaagctcaaacggtaaacgttccaacaacaacaatagacaacagaatgggaagaagggaaagtacaccggcgaaaccgaacaaggtccctgggagaatcaagccaagtacactgcatttaccatcttgacttagtatatagaaagtgtttacatggccactcagtcataagccccgtacaagaagccagcgcccatgaaaaaagatgtcagcaagagagacatgaccaagttttgtcagtttcatggcgactacggccacgactccaatgaatgcaacaatatgaagtgggaaattaaattcctgataaggaaaaataaccctcatgtacataagtatgtcaaggccgataagaatcagaggaagaataataagcaagactttctacctccaccagtagatggacatctgcaagtcatcattggaggcccgcacatagctagagactcggacaaagctaaggagaggtatgcccgaactattggaatttattttacc

SEQ ID NO: 278379 - DNA, 753 bp, Cannabis indica
gaatttatgcccttaaaaaggaatatgtgtgtgttataggcctatgggcaaaatggtcatttgaccattattgagtaaattgaatttattggatttttagagaaaatgaattgtattttctgattttctccctctctctcaccgaaccctcttcctctctttcaccccttttcattttcaaagtttaatttgtggaaagaactagttgatttgaagttggttgtttgaaagaaaggtgttgggaggcttgaggcttggttgtgcaagtatttgaggtagttttcttgatttttaattcatgtttcttggctgaatattgtgatagaaacatgtttaagtttgttaattttggttatgcatgggttaggttgttcttgcttcatgattgggtaatttggagctatcttggattggatttgagtttagattgttgtatgcttgttaatgaattgggctgagattattggtaattctaggttgaaatttcaggtgtgaaatttaatgtctaattgctggttttggcttgaagaacttggttttgaagttcttgagtttgagcttaggttttgttaatcttaagcatgatattgggtgtttttgagcaatttgaattctgggattttgatgcatgtcatgtgataaatgagtatttagtatgtgctattaatcctatgtgcaaatttgtgttttggttgtgaaatttgcaatgaaagattgggtttttgggctgaaattcgaaggtttgctgctggt

SEQ ID NO: 278380 - DNA, 508 bp, Cannabis indica
ggtcatacacctaggaatttttccaaatttttagatagcaaaggattcctgatagtggtcatctaccggaatccttatatccaaattttaaaataccgtattctgaactagaagtggcttgatccttcacaaagaaggtatgtaggcagctcggttaattaagttgactgagttcagctgcaatttcaaatttaccctgaatttccctaatttatttcaaatcatttaatatcatcgtaattggaatcaaagggtatttcctttaaataaaaggattgtaattaagaggttattcttataatcttggataggtcgaacttaaattaataaactcttatgctataaattcagcataggtgaaattgtgttttgcatttattttaatatgttaaatgtgaaataaaactcttgggttttataagctaaataaaactcatttcaatgtaatcagatttacttattaatatagatcagaaataacattgaatgttgcatggttcacatgatt

SEQ ID NO: 278381 - DNA, 351 bp, Cannabis indica
ggggttttggtcactacggagaactgcaggaaggccaaacttatcctcccgcatcaatccgtggaggactcaaacctctcccgagtcatctgtcccaatgtgagggcgccggtcgcggagaacaccttccgggacgagatcatcgccacggcagagaagaaataccaggagtatctctaccggaaggcccaggagaaggcgtactctaaggcccaggcggcctccgggagggcgctccgcgtagggagcccggtggagagaagaagttggtgccagcagttccggcgcaagcggtaagtctcctttggtaattcattatgttccttctgttggcgagtatgccagtcgtag

SEQ ID NO: 278382 - DNA, 790 bp, Cannabis indica
agtcaaacgatcaacaatacccaaacagcgtcatgcttcaaaggtgtcaatggcaaccccgtaacaaagtccatggtaatcttgtcccacttccattctggtataggcaaaggttgaagtaaacctgagggtctctgatgctcagccttcacttgctgacatactatacacttagctacaaagctggccacatctcttttcattccttcccaccaatattgtctctttaaatcttggtacatctttgtacttccaggatgtacagcgaatttggatctatgggcctcaatcaaaatggtctccctaagttcagggatatctgcaacaactagtcttcccatatggtatagatacccttcactattaactgtccacccatctagttgctcaccatcctggattcggttccaaataagtcttagtttttcatcttgccactgacgttgcttaacttgttgaagtagtactggtgtagccactaagttagagatacaagctacttcttccccttcatagtattgcaagttataatcacccattgtgattgtccttttccagtcctcaagagccaaacatgccaaagtactatgaggctttctacttagtgcatcagctactacattagctttcccggggtgatactgcaaagtgaaatcatagtcttccatatactcaacccatcttctttgcctcaagttcaagtccctttgagtaaaaagatacttcaagctcttatgatctgagtataactcaaattttacgccatataaataacatctccaaattttca

SEQ ID NO: 278383 - DNA, 550 bp, Cannabis indica
agtctaacctggttatgccttgctcgcataactctattcatatatatttacgtaatccatacattacgttctttcagtggtttatcctgataatatataccaggtctaaccaagttatgtcttatacacataactcttaatatatatacatacattccatatacactgtaacatataaaatcttagggtaataaccctaacttgcataccaaatagtctctcatataacatattattgcatgctcaaaataacacttatagagattaataaccctaattcatgctttcacttgattagcaatattattgtcatcatcgctttcttaccttcacatcaattctagggtaataaccctagaccgcattactatcaaactcaaggtactaatttaccgagtctaacttaattatgccttgtgcgcataattctttattacaatatatttagcatggcatagcatttacacattaatatttactagggtaataaccctaggccattaaatcgctcactttagggtaataaccctaatctcggtttctaatttat

SEQ ID NO: 278384 - DNA, 52 bp, Cannabis indica
actaatgatgcatctatatggtggaacatatagagaattctatatactgaga

SEQ ID NO: 278385 - DNA, 707 bp, Cannabis indica
ctggacgaagaatgtacatgtccgagccatatcagaccaagcgtgttggggtctaccagtgttgtgttttggagaatctgttttgccgcttaggccggccgaaagaaaaaggacttgtaataatattttgaaatgtttttgggatcccaatttctgtaacttttagatcgtaaagtttaaattattacaagttttatttttactccgtttatgattaaagtttaaattccgcgctaatttcattagtaatcccgtttaggggattagggtttcgtaagtatcttgggtagtgtgcctaattatttagggcgttacagaaggcattgtttaaatccttaataagttaagaaataagactgggattcgaccatgttaagtaggggtgttcatcaaaccgcccaaaccgctcaaaccgcccgcaccgtaaaaaaaatgcggtttgaaattctttgtggtgcggtcgcggattgaatttttcctaaaccacgcggtgcggtgcagtttgcggtttgaatttttcctaaaccacgcggtgcggtgcagtttgcggttttgaattattaatatgcggttcaaaccgcaccgcatattataaaaataccaattttaatatttatttaggtccaatatatgaatgttcaacttaaagtctattattctttcaaaaaaaacttaaagtctactaatttgaaaaaccgcatgtgcgg

SEQ ID NO: 278386 - DNA, 633 bp, Cannabis indica
gtttgtgattgtgtacacttgcgcaattataaagcaatataattttcacaacagatgtggagactaataagttgcttagagtactccgaacacacaataaggccattgcatggacattgggtgatgttaagggaatcagtccctctacagttatgcatcgaattttaatggaggagggcgccaaactgactattgatgcacaacgaagacttaatccaccaatgaaagaagttgtcagaaaagatgtggtaaagtggctagatgttggtgtggcatatcctatttcaaatagcaagtgggtcagcccagttcaagtggtacctaacaaaggagggatgactatggtaaagaatgagaagaatgagttaatccctactaaaacagttactggttgaaggatttgtattgactacagaaaactcaacaaagcaaccagaaaagaccactttcccttgcccttcattgatcagatgttagaccggttggcggggcaagaatattactgtttcttagatggctactctgggtatcatcaaatagccatagcacatgtggatcaagagaagactactttcacatgtccttatggtacttttgcttttttggagaatgccatttggactatgtaacgct

SEQ ID NO: 278387 - DNA, 688 bp, Cannabis indica
gatttttctcttaaatgttaaaaacaatcaaatcatatgtttggtttgtgcaatttttactggaattactatctaagtaactaaatatagtataaactagtctaacacaatatttatttattcacataattagcagcagaatttgactcaaaattttcaaaaaggtaagaaatttatcgaacttaacgcaagaatatactcagtacccccaactaaaatgagacagtgtcctcaatgtctaaatatgtatatgataagaacatgagatgagaaccgaaaaaaacggagaatatgcacagtgatagatgttaattttctaaaaaaaacaaatgacagaaaataaactaaaatactgaaaataaagaaagcaattaaagataggaccagtagtgaaagaattcactaaccttggtaaattggatcgtgaaggagtgtttcctccacttcaggtggtgttaattctaaaaatggtttcaaccgttgtccattgactttgaatatgttaccagttttagaattttcaatttcaacagctccgtgaggaaaaacagtacgaacagtaaatggaccagtccatttagaacgtaacttaccgggaaacagatgaaggcgagagttgtataaaagaactttctgaccagtggagaaatcttttcgcaagatgttcttatcatgatacaactttgta

SEQ ID NO: 278388 - DNA, 511 bp, Cannabis indica
attcgggtctaggtctgatttggagtccgggtccgagtccggttacggttctggatctaggtccaatttgatttatgattccaagtccaagtcctagttacagtcccggtcaacttccggtttatgttccaattttgggtcaacttttgggtttcggactgggttaaggttcaggtgtgggttcgggtccttgtcagtgttcgggtccagggctgggtcccaaatccagacaccgactacaggttatgtccaagccctgggtccagatctggatcccaatctcgggtcccggtcttgttccatttcttgtgtcgagtcacgagctgggtcctaggttcaagttcaggtctcggtcgcgtactaggtctcggtcctagctctatttctgaggccctatcctgattttgggtctacgacaaggttattgtgtgggtttgggtcccggtctacgttcgggttcgactcctagtctcgatttttgtttgagtctctgtctgggttttgatctggg

SEQ ID NO: 278389 - DNA, 487 bp, Cannabis indica
ttatttatataataaaaaatattgaaaaatataataattatttattatattgttattagattttttttgtatgttgaatttgtaacacttgattgtttagtgtatttattttcatgatgttttgttctattttattacttagaaatgttgttgttttaattatttaaaacttttagctacaatacacttgtaagaatagtatatttatgaagtattaaacttaaataaaaagtgatacttaggttttttatgtatttttctttatatttttaagctaatattgaaatttcactacaaaaaacagctagttttagtgacaactttttagtcaaaaaataatttttttgtgactaaatgtgacttttggtcacaacaaaaaactacttgtgactaaaacataacatttagacacaagtagtcactaatttacttttagtcacaacaagtattgtgactaaaactacatttagtcacaacaaattgtaat

SEQ ID NO: 278390 - DNA, 806 bp, Cannabis indica
gtaaatctttacttaaaattaaataattttgtaaaacttttttttttacttaattttttcttttgtatattttattttatgaaataatccctaaaaaaattgaggaatatatatatattttttctattaatcaaaaataccttcatattatatttcattaaaatatacctaattttttgagtggattgtccaatataccctcactctctacttaagtttagcacatattttacattaacctaaggggtataatgagaacattaaagaatatgaaaataaaggtaaaaattaaaataaataatgtaaaataaatatacaatgcaatttactcaagaaattgaagttgagttgagaaatacctctttttttatatctattaataaaaataccctcatattatattttattaaaatatactcatttttttttgagtgaattgcctaatatacgctcgttcttcacttaagtctagcgtatattttatattaacataagggatatatgaggacatcatctataaaagtaggtatatcttaaaaaaatataaaaataaagataaaaattaaaataaataaaataaaagggaaattttcaatgggccaccttattttggtcaattattttctaaaaataacgttgtttttagtttatgttaagtttttgttactatataattgccatttttttggttaaattttcttatttttaggtattaacaagttgtgtttatgtttgtcaggtaatcgtggtaggagagtgatgacgtgtcacgtcattttgtgtgtgatacattattacgttatttt

SEQ ID NO: 278391 - DNA, 514 bp, Cannabis indica
aaatttccacaattgccgggcccaaaaatattttatttcgaaattgatatcctcggtactcacatatcccaatgtaatctccgtaattaataaattacgctatttatttcattgagtaaattctcaataattaccctaagcaagatcataatcttacttcgttaccaaaataattacatatttaataaaatatgtctatttaaatattatttatttttcgggatattacatatacaatatttataattacatatttgtatattttgttaataaattgtattttagtgagatttcacataaaaagtgtttgtatcagttcatattttacgttaaaaatattcatttgagtacatcatatatgttggtgtgaaacataatgataaagaattgtgtttggtgtgtcatgcaagtgaaattgacctacgtgttgtgtagtttgacgtaagatttcattgttaatcttaggttatgcttgaatatattttaagtgttattgtgttattggatttaggat

SEQ ID NO: 278392 - DNA, 901 bp, Cannabis indica
tcgcagacagaatttcaaaaattcatatctcaaccaattcaactccaaattgattcaaaccttccagacctactccatatatcccaaataacatttctaaagcatcaaacctacccagaatgcacagaaatgaaaaacaccatgtgagctccaagctttgagtttaaactcaaacttggctaaagctcactcacaagcctcaaaactagcttagaaccacataatcaagcataaaaacactgcagaaaacaaaccctaattcatgcaataactacagccaccaaatcctcaatttttactttgaaaaccttagcttcttaacaagaaaattaaccaactcaagcaagaacaactagcatgcatttcaacctaactaaacatatttaattcaacattttagacatagaaacaacaacaacaacaagcagcagcaacatcatcaaaatcctccatgcattactcatctttttcatcaaaatttcaagaaaacaaaggaagaaagctagacaagaattacctcaactagaaacactctaacttgctgaaaatcacttgaaaatgaagaggaaaatccactcttcttgctgcctcaaatggccgaaaatgagagaggaaaagagagagagcttttgagaaatttgtaatttttctaagtgtaatttgttgtaaaatgagaaaatgaataaaggacacctaacataaacccatttcagccaattaaacattaaaataaatatttaattttcaaataataaagtcactaaaagacaaaacactaatggggcaaaaagaccattttgcccctccaccctaaaatcacataaatcacactaaaggggtatctttgggaaattctaaattcccggccattcccgacattcccaatgtctaataaaccgtc

SEQ ID NO: 278393 - DNA, 650 bp, Cannabis indica
gacttggacctagaacaaaacacagacctagcctcagacccaaactgaggctggaactcgggcccggacacgatcctgtaccaagaccgcaaatgagacgcggacctggacctaattctaggaccccatcccaaacatagacttcgaccaagatagagattcgaatacgaagctggactcagaccaagacccggactgggatcaaaatgctaaacctagatctggactgagatcctgacccagacccaaacttggactcgcactcggcacccgaacttggacctgcactcgaatggagacccaaatcagggtccagacctagacacaaacccgaacacagactcagaccccaactcaaacacccacacctagaatcggacccaaagcaagaccaggaccaggacctaaactcaaacctagaccaggatcggaaccaaggacttagacccagaattgaatcctgactaagatcgggattggaatttcgcacttggacccaacctagactaagacccaggacgtgaacccacacccggagcctaatttggacctacacttaaatccggacccgaacccaaactcagaccaggactcaaactcaaacccaaacacaaactcagaattgcaaatggaactagaaccgaactagg

SEQ ID NO: 278394 - DNA, 508 bp, Cannabis indica
ctagatcctgataaaatatttccaacaactagcctcagttccatggtaatgatttactttcatgaaatatgaattaaaactatgatatgtgttgatttggatggtttcatgttgatctgtgtgttatttgatgattgattgatgcttgtgcaattttatgaaaaataattgaattttcgtttctggaattatttttattggatattttggaaaaaaattaagcaattcacttttttacagaacttaatttcgattttatttgaattagttttgactttttgatgttttgaaaaaatcgggggtggtgacacacccttgtgcgcgcgggatgctgctgacagcaccttttgtgcgcccaagccgccccttgcgcccaagaatgtgcacctggatggtgtgctttgcatgccagctgtactggtcacaatttttttcgtttttcttcgatttttcatgctatttcatggaattaacatccgattttttgtgtagttttgtatttagatat

SEQ ID NO: 278395 - DNA, 504 bp, Cannabis indica
ttatcccgatgggaaaagtaaggctcccagtcaccttgtgcccggacaccccccagagcacattcaaatactgcaccttcgtagtggtggactgtccgacagcctacaacgcgatcctcggccgaccggccctagtagactttggcgcagtcacttcaatccggcatctgtgcctaaagttccctacccgggaggccggagtcggaactgtgaggggaaatcagggggaagcaaggcaatgttacaatgtcgcaacccacctgcccgtgcttatggtccgggagtccgctgagccagaagtggctgaagaggatgagttggaccctcgtgtagggtccgaaagaatcgtggaaccaatggaggacgtcgaagaagtatcagtgtgcgacgtcgactccaccaaagtactccggttagggaagaacctggacccggaggaaaaagacaaaataataaaaacactgaagggcgccatcgacatctttgcatggcgccaagaagaca

SEQ ID NO: 278396 - DNA, 580 bp, Cannabis indica
ttttgttgttggatgagcatggaaaaagggttgtgatgctttgattgcatgtgtttgaattttgagttgttgtaagtgagtttatgcatgatttggttatgtgctatgttgttgagctttagatgaagtattcagaatgttttctagctttaaccatgtgttttctatggtatttattgctggaaatggattgagtaaattgggtataaagcttaagttttagaatttgatatgttgtgggttagagcatgattttggtgattttatgcaatctaattttggaggttttatgttggaatttgatgcatgattatgtgtttttgaccctctattatatgctagcagctctatttcgtgattctgggagacatgtatgtttggggtgagtttgggtgagttttggtacttattttggaagcagaaaactgggtattctgggtttttaaacccagtggtcgcgactatcttaggtctggtcgcgaccatgataatggcagattatttatttttttgagtttttatttttgccataacttttgactccggactctgtttgggacgttctttataccgttggaaa

SEQ ID NO: 278397 - DNA, 710 bp, Cannabis indica
agctaagtctttataaagcaaaggattatgcctcccggagaaggcatacaaagcttcatatgctcccggagagcatatagcatcaaagcatctccgggtggtgtcaggcttcctctgaacagtcatctcgcatttaatgccgcatgggaggaggcgtattggaactgccacacgcaataaagtctgacgacacaacccccgatctgtacctactaggctatgaccaataaagtctagtgacggctactctgtgaagaatcacatcagtcaaaagggattaaggactgccctcataaaatccctacagcacctagggattagaccatgcattacccatgatatattcattgggaatgtacaactttactgatagttacagaaatgcatgtaccttaattctggggatcaccccacaaaaacactataaataccccccaaagctcattaaagaggggtcgagaattctgggttgcacaagtgctagaagagtaaaaactcaccaagaacattctctgtattaaatactatcataaatacacagactcgtggactaaggctcattaacaccccaaccacgtaaaaaatctccttcttaatttcttatagctctctaaactattattattttattggttgccgaaaacctcggtcaacaggtctctttcttttgtttttttttttctaaaatccatacacttattatatttttt

SEQ ID NO: 278398 - DNA, 572 bp, Cannabis indica
cctaagacgacatttttcaatggaccgtctttggttaacctattgagtctatcatagcctatgtgacctaaacgtaaatgccatagataagtttgatcatcattatcaatctcttttcttttaaggtttctaggtctagcaacattgaaaagttcattgtttagtgcgatttgtatatccggtctcaaaacataaagcccttgttccatgtgagcaacacataattgaaatccattacgagaaattgtgcaaacagtactcgaaaaattcaatttataaaattgtgtttgtaaacatgaaacactaatcaagtttctactaaagtttggaataaataaaacattttctaaaactaaaaatttcttttgaaacttgaggcgggcttttcctttggcttggaccgatactaactcgccatttccaactttaagctttaactcctctgggtgaagattttcccaagtttcaagcagctgcaatgaagaacaaacatggttagtagatccagaatcaacaatccataaggatttgtcattctctaaaacacatgattcaaagacaaaagcattacc

SEQ ID NO: 278399 - DNA, 544 bp, Cannabis indica
tcaccaagatctgagcccgaatgtccttctcttgattcaggattgttcacagtcttacacactatgattgagtaccacttggtgtgtgttggcacttactctgtcactatagggtatgaaaatagggagagagaaagagaggaatgtggttcgaaaatagcaagagtgatggctcaggaaattttgactgaaggcttgaatttcatcatcttttagtgtgagccatcattatatatttataggcaaccacctaggtttatgttagaattattaggcattaaaatattgaaaaaattaaatagaaaatccctcttaagtggccgggcataggatgtgggccccactttggaattatgccattttcaacaatttttctttattttctcaaaaatgtcattttttttccaattcaaccacttaaatgccaaaactatttatttaataattaaaattaatcatcaaataaaaattccattgaatatatttattaattagatttgcttagttaaaaattcataaactagacatagtttaattttagaat

SEQ ID NO: 278400 - DNA, 857 bp, Cannabis indica
aactgctcagtttcaaagctttgaactcaccagccgtgggcctcatatttgaaagttgcagctgatcaaaaaacaccaaaattaaaatttcaattatgaagattaataataatgaaaaacaacacaaaaacaactactgaaaaaccaaattacaacaaacagatataccttatctttggaaacatcaaagatagtagtcttcaaaactttgaaagtaggttgactattgcatgtccactgagtgatccttggaatacgagagctttccttttggcagtacttacctttcatgtacttacaacactcgtagaaccaaacttgaagaacatgaggacaaccaatcaaagtgtaaaaaacactcggcctctttcccgaactccttgccttcctaaccccctcaacccaactatcaagcttacccttcaatgaggaaatagtcaattcaaaagaactccggccccaagcaaattcattgtacctcccactatctacaacatctaaaatagacttgggtacatttttatgcttagtgccactaagcaagaaccactccacgaaatacaaaactgccaacttcacagcatcctcatcagaatcaccccacctcttggtggtaaaacattccctaacagattccttagtgatagaggacgaagttggccaatatctttcacaaagactattaacctcttgcttaaaatctaagacactacagtcaccttcacagtctaacccagtaatcaatgcaaattcctcaatgctaaacctaagcctaacaccgcgtatcattacccacaactcagcatcattaggttgctgaacctcccggagcaacaacccatgaaacacttggggtt

SEQ ID NO: 278401 - DNA, 759 bp, Cannabis indica
tgtcattatttaattttttaattacttttatttaatatcaatatgtgcattaattttcagttataaattaatgtacgtttaattgtaattatatgctataagtgtacattatttaatctatttaaatttaagttcttatacatttatattctataattaataaaatgtaacgtaaattattaaatttttagttttgctaattaagtgttgagattttattacctttaactaagaaaactatcaaatataaaaagtttgtatgttttaataatctagaggaatttattaaatttaattggtccatcaacacaccaaatgtatcttctcacatatctctacaattaatatggaaaatatgaaaattaaataagttatcacttcttttttaaaatgcttaaaaattatgagagttttttttttttttttaaaaaaaaaaaatagcttaaaaaaattattttatctatataaccgtgatcgttacagtaaaactatgacgattatatttttttataacctgctataataggtcactaacatgtaaaatttttatttttagacttaaattaattatatacttaaaataaattaatcttctaataaaacttttttaagaaattaatatttataatttttttattttaaaaatataaataaaatcatgttagtatcaggttacatataatttattaattatttttagttaaaatttccaaattaatcacaatcgttaataatattttgttttcaaataattaaaaa

SEQ ID NO: 278402 - DNA, 511 bp, Cannabis indica
gtgaacaagttgccatcaaaactgggttccattatcggatactattttcatgggaattccaaacctacagataatgttcttgacgacaaattcaaggactttcttgaaaattatggagatgaggggctcggcctccatccatttagtgaagaagtcgactgctactaccacatacttagctcctcctcgcccagtgggtaatgccccaattaggtagatcccccatatagcaaatgggtagggcgaggtcatcattctaagttctattggcggtacgcgaggtatatgtgaaaactgttagaatatgttctaccgggatctagatttactaccatgtatgttgtttaacatcctaaatatgaatttctaaaacaatgtaaataaaaacatataaaatttatgaaaaccttacagtgggtgcagcaaaatattaatggctccttccactcagatctctaacccttgtatcctgtatgtagcagggtatcaccaagatctgagctcaaatgtc

SEQ ID NO: 278403 - DNA, 516 bp, Cannabis indica
ccgtgacggggaagaagaggaaatctggtgctggccggaccgaacgagctcatcaggagaatgaactcattcaacttaagtgtgaagctaagttgaagggaggtgcaagggctaagcaatatgctcaggagccctttaatcctgaagatgaggctgaggaagagcaggtgactccactgaaaaggaagaagaaactcctggccccgcccaggcctgttgaacatgcgattcgcataagggagcccatttcacctgttcggccatcccctcccgtgttcgaaaaagggaaagctgctatgtctgaaacaagaccggtgtcaggtgatgatggacttctgagtcttgttcgggaagtcatcttgcatattactttatcttctttctgatgtctattttctaaccatgttgttttcgttctatacagacatgtcttggcagatgctcgacgctctgaggaagagaataggcggaagctctagcgcctctcctccgactaagaagtctaagggcggtgag

SEQ ID NO: 278404 - DNA, 805 bp, Cannabis indica
tatatatgcttaatttaaaaaataaaaaaaataaaaaaataattatttgaataaaaaattaatttttttaaagagttgaccgagttgactgagttgaccgggtcaacccgccaacccgctaaacccgaccaaccgaaacccgccaacccgtgacccgccaacccgccaacccgtgccctatttgggtccgggttcggtttcaattttttaaacccgaaacccgtgaacccgaaacccgcaaacccgaaacccggtaaacccgcccgatgttcagccctagtggacattgtcccacatggaataaatggtagagaagtgagccatatagaagaacatgagctactctactcattgccaattggttttgagatgaaaccccatgattctcaacatggtatcagagccatatcccttgcacgcaagttatcatatccgatccgcacctatacagatagtgaccatgtccactttgatacggttcaagattgggttgttgaccaaaagtcattcactcatttattttgatgataaacaaatatttgattattatttgttactaatcttttcttgattattttgcaagcaagttcacagagtatctatatttgctcggtaaagtcaaacataatcaaagaagtagattcaacaagtatataaactacttcatacttcataagagcaaaagattcatcaagggatcaacaagtcaagaccctattcaaaaaaggtcttcaaaaagctcaaagtcaaaagtcaacccgaaagtcaaagtcaaagtcaaagtcaaaagtcaactctcgggaaa

SEQ ID NO: 278405 - DNA, 779 bp, Cannabis indica
gcatcatgagtcatcagctcaatccctataactcagggatcaacttacgtggatacggcatacacacgatcccactatcagtgtactcagcctcaatcccacgatccttgcattcagcattgatcacacgatctttctgtttatgcgcattgtaacgagagaggaaactcttcctcctcaagtttcccagccctataaatagtgaggcatgttcactgggcaaagggaccgagagattgaaagtcgatacgcagctaagctaagactatattattatctaagaattatatattcagagatactgttgtaagagctataagaaaaggaatcttcttccttgttcttgagtcaatacaaataacgaggattaggctattaccgaactgctcggggctgaacctctataaaattcctgtgtcttattattgctttattatatattcgttacgacatatcgtttatcgcttataaaaaagactcattgtcgttggctaaaagcgaagtcaacaaaagtgataaatcgagtattgtatccacaagggattgaaaattagaaattaatttataaaactaattactcacaaattagtttaaacaaaaataaaataaagtgttgagaatatataaaaattaacaaacacaaactatgagaagaaaacaagctagaactattaaatttgcctaaaaatataaagttgatataatagcacaaatgagtattattgttaattgctaatgtcaactagaaatttaaaatgtcataatcttttttccaaagt

SEQ ID NO: 278406 - DNA, 485 bp, Cannabis indica
accttggaaattatttaggattgtattttttagtattttctctagtcattcctacttgctatgtgctaataatttctgaataagattttgtgttaaaccataattgatttctatttattattttgtagtatcctgaattgccatgtcgaatcccatgttatcactgttgactgaaaataagctaaatggatctaacttcccaaaatggagagagaacattaatattgctctcataggtgaaagtgccctgtttgtgttgactgagccgtctcctgaacagccaggtgacaatgcaaccaaagctgttaaagagaagttcgagcgttggcagaatgctaacaacaaagctgtagaaaacaaggtttgctaacaccttcacggctgtagaaatcatgacgcagttaactgagctattcggtatggcatctatcgagtctcgctttgacgcgactaagaaactcatcaacgcacggatggaaccccat

SEQ ID NO: 278407 - DNA, 551 bp, Cannabis indica
ttcaaatacaaaacccaaaaaaacgaacagataagtaaaagcatgccatgtacattaacagtaaagtaaggggcccaagaaacttacagtgaagtgttgagactgggggttctgctgtagatcaaacaaagataagaaggattgacagtagtgaacgaagatggactgggaaaattgcaaagtgttcaacagtgttttcttggtctgagaattttttctctctgggaaacttgagcaaagttggcaagaaatgggaagtaaccgaaatgaaggaaaggtggtggcttttataggcaaaactgcatgaggaacaggcactatcacctaccaatcgaacggttggggaaacgcacgattcaaattctcaaagatcaacggatcagattgatttgtaattaaggcggtggaaacgtttgagtgtccgtctgacaccattaatgcgccgtatcaatcaatgggcgtgaaacgaatcgacctctgcaaaaagtgaatcgctgcattaaaggccatcattaaatgcaccctcacgcgctcaaagctcgtgccaggaa

SEQ ID NO: 278408 - DNA, 965 bp, Cannabis indica
tacaagctacttcttcccttcatagtattgcaagttataatcacccattgtgattgtccttttcaagtcctcaagagccaaacatgccaaagtaccatgaggctttctacttagtgcatcagctactacattagctttcccggggtgatactgcaaagtgaaatcatagtcttccatatactcaacccatcttctttgcctcaagttcaagtccctttgagtaaaaagatacttcaagctcttatgatctgagtataactcaaactttacgccatataaataacatctccaaattttcaagacaaagattaccgcagcaagttctaggtcatgcgtagggtaattcttctcatgtggtttcaattgtcgagaagcataggcaaccaccttgccattttgcatgaggacacctcctaatccagtacctgaagcatcagtgaataccacatatggttcctcactattaggaacagtgagaacaggcgccgaagttaatctttccttcaattctctaaaagcttcttcgcaactatcatcccacataaactttacttcttttcttgttaacttcgtcaaaggcatagcaattcgtgagaaattctctacaaagcgacggtagtagcctgccaacccaagaaaacttcgaacttcagtgacattctttggtctttcccactgtagaatagagtctatctttgcaggatcaacggtgataccatcttgagaaattacatggcccaagaacttgacttcagtcatccaaaattcacacttctctttcttagcgtataattgatgatctctcaatgtctgtaatactgttgtcaagtgttcagcatgatcctcacgtgtcttagaatacaccaagatatcatcaataaataccaccacaaacttatccaagaaaggtctaaagactctattcataagatccataaatgcagcatgttatagtgagatttctc

SEQ ID NO: 278409 - DNA, 506 bp, Cannabis indica
tgtccggtattttggaactcggcgtttggctcagtagaaatcacaacttagtaagttagtatttggggacgggctttagacattgggaatgtcgggaatggccgggaatttagaatttcccaaaaatacccctttagtatgatttatgtgattttatgatggaggggcaaaatggtctttttgccccaatgactttttgtctttagtgactttttatttgctggaatgattgtggaatgttgttgctgctgggtattagttcttaatttcagaggttaaagcttgttagattaaggttatttaggttgttttgaagcatgatagttaggttgagttaagctttggtttttctatgtaaaatatgtgaatttttgaaagaaatggttatgttttgttgctggaatgttgttgatgtttgttattgttttctgaagttattctatgcttgattaagtagaattaagctggtttgaatgcatgttgtttagatttgctcaagtttgagt

SEQ ID NO: 278410 - DNA, 513 bp, Cannabis indica
aaagagaatgaaaaaaaaaagaagtatgtccgatttgtggcgagagtcgttggaaaaagagaaagggagacggaaaagaagttgctagaaaattttgtggtactttcctttaattcagagactgaagaggttatacagttcaagacactcggcagaggacatgcggtggcactactctaagagacctaaagaggatggcgtgcttagacaccctgcagatgcagaagagtggaagcagtttgacagacgtcatccatccttcgcacttgagcctaaaaatgtgagattgggattggccaccgacgggttcaatccctttggtaacatgagtaacgcttacagtgtgtggcctgttattttactcccgtacaacttacccccgtggaagtgcatgaaacctgagtcgttgatgttgtctcttttggtgccaggacgcactgcccctggaaaagacatggatgttttcatgagaccattaattgatgaattgagggagttgtgggattcaggtgt

SEQ ID NO: 278411 - DNA, 394 bp, Cannabis indica
taccgatgtgacacagtcggatggttcgaggccaacatacttatctaatataatctaacaggcttcaggtgtgccggtcaaccttactggaacgaactacacggcggtttacaagctcctaaaccataacaatcacaacactattaagtgatacgctaaaacacttgctcaaatcaaatccaatgcatatcaaaccttccaaacctattctaattacccctaagaacaaatccaaagcaaaagaaccaagtttcaatcacagaaactcaattcaccattggaggttcaagattgagttcaaaactcaaaatttgactaaaccctccaaacagccactaaatcatgcatagctcaacctatttcaacataataaaactccagaaaacacatttaa

SEQ ID NO: 278412 - DNA, 577 bp, Cannabis indica
caactggtatcagagccatggtaatggatttgcttgcaagaaatttggacttaaaacgatttgtatgtgatttggatggtttcatgttgatctatgtgttatatgatgattgattgatgtttgtgaattttttcgtgaaaaataattgaaattctgtttctggaattatttttattggatagtttgagaaaaagcaatttactttttttttacagcgctgagctttttcggccagaccccctgctacgcgcgcgcggacagtatgcaatgcatactgtccgtaccacttgcaaattttttcgttttcttcgatttttcatgctatttcatggaattaacttccgattttttgtgtagttttatattttgatttttatttttcaattttcaaatctaattattaaaataaattaatttgatttttttttacaattaattttagatattagtgtagtttaaatttgaaaataggtaaaaatctatctttttgcttgattttaaggtcagatattatttttttttggtaactttttaaaataagattactataatcatgatatttaaatagaaataagat

SEQ ID NO: 278413 - DNA, 521 bp, Cannabis indica
tcgtcctcctctgctaccactgggagagcttgagggtctccagcaccctcggcggcttcctccgagaagtcccaccctttcccctggccttctcccggaagcacctcctcgtcatccaccaagtcgatggtttcgggaggagcgccggaagaaaccttcaaggaaggggccgggggagagggggtgaaagccggaggagccaccggagtatggaccccagccagccgttccaggatggcatccatggaggtacctgttccaataaaacaagcaagtgttagaagtccgtgagaaactacttacaaaaaggtgcagcaaataaactactcctacccggactccctagttcggccctagcaaagtcccgaactttaatgctggcagcatcatctccaagataactgtccgagggccgaaaccagctggacgctatgtaagccgacggacctaagggaataggttccggagggccggggcccatccgggaccgacctaggtaatctcctaagtttgtaaaataa

SEQ ID NO: 278414 - DNA, 806 bp, Cannabis indica
agagaggtggcggctcaggaattttctcagtaaggaatgagatgcaattgtgtgtagtttcctgaagtcattactttctatttatagaataccacatagggttagggttgaattacttggcattaaaataatgaaaaaaaattaaatgataaaacctatgcatgtggccggccatggcatatggaaatggtcctcacttttgcaactttcctgttttatcatttctgtatcccattttctcaaaattgccaattttcacattaaaccattttaatgtcaattttaactatttaataactataaataattattaaataatattgttatttattatatttattaattagactaaccaaagtctcttaattaacaaatataccctataaactctttctttacagttttgcccttaataagtgataaattcacaaatagacatagtctaatttgagaatcataattgattaattaaaaccaattaaatgagtcttacaagtagtattatcccaactagtgtggggaccatgggcctatatatctgaccttccaataagcaaatcaagaatttacctcttaaattcactgacttattaattcttcgttgaatccacggatagaacttagaatttcactctcagctatatagaacgctctatatgttccaccatatagacacgctattaattatccattgttataatcctaatttgatcaatgatcttgtaaagaccgcttagtttaatttggaaatttagcagctaattaagatttaattatgaaatcatttatagatatttaaataatta

SEQ ID NO: 278415 - DNA, 788 bp, Cannabis indica
ccatcatatggccggccattaggagggattttcactctatttttatcaatttttttattcctaataattcaaccataaccctattgaagatagtataaaaggaaggcaatggtctcatcatctaactaatgcctccaaagctaaaaacctagctttctgatgagacctcttccttcttcttcttcctcttgaattttcgaaacactaagcctttcttcacaaaatattattcagccattagtgattaagtgcccacacacatcaagttggtcctcaatcatagtgtgtaagactgtgaagaatccaaacacaaggaaggagtttcgggctcagatcttggtgatactctgctacagaaaggatacaagggttagagatctgagtggaaggagtcatttaattccgctgcacccactgtaaggtttctcaaactttatatgtgtttatttacattgttttagaaattcatattaggatgttaaataacatacatggtagtaaatctagatcctggtaaaaataattccaacattttgttggtagcgtctttgtgaatggatatgccaggttatgttctgatgcaatcttcaagactgtcacatcacttctctctactagtatctcttagtgatggtacttcctcttaatttcttacatctcttgtggatccttggtccttggagttggccatcactccagtattgtcacagtagagcaccaaaaggtttttcaacttcttgaactacttccagagtagtgtagaacttcttcaaccaaactgcttcctt

SEQ ID NO: 278416 - DNA, 486 bp, Cannabis indica
cactacaggaccgacattatgttcgtaccgctatgatagcatcaatatcacccaagagtacaattggccatgatatcactcttaaccagtactgtgcacgtactgccgaaccgacacaattgttgtgccgctatgatagcgccaattaatactctctggggtgaatatcactcttaaccagtacgatgcctgtactgtcgaaccgacacaattgttgtgccgctatgatatcccctaaaacatatacaatcatacatacaacatgcatatatctcatataacacgctatatacagttcttacatgtttttcgaattcaagtgtgctggccgacctgaacgaaaattctcgcgctagatggatgccctaatcacaataattgtaacacagatgagtgactcgctaaatcactttccggggacttaaacttgaaactaaaagtttccctatcgataaacaacatggcaataccctaaatatctcaaaa

SEQ ID NO: 278417 - DNA, 478 bp, Cannabis indica
aggtgcagattgggggttgtgccgtcagactttattgcgtgtagcagtcccaacacgcttcctcccatgcggcattaaatgcgaattgactgctcaggggaagcctgacacctcgcggagatgccttaatattagctgggcatccgggagcgtatggggctcagcttgccttctccgggaggcacgtcccggatgctgccttatatcacaaagacttagcaaataattatagcattaagacgctctgatccacgtgtccctgtctagttggtccacatatattgggcaaaatcaggggcaacactatgtttaagaagatcctttttggccattacctcctcctccaccattggcatggtaccttggcatccatcatgtgcattcattgaattcaagtcaagttgagcattttgccttttcaattccatatctcgccaagcttgagggcatccacgataaagacccatttgtgagggca

SEQ ID NO: 278418 - DNA, 514 bp, Cannabis indica
atttagatttaaatttacctaatctttttttccctattattgtagcttacttttaataatttaccaggttacttttattaatttatgcaggttcctcaatatatgatatcccaaacaaagcgatttggaacaaaagtacaacctttcaatgatctctcagtaatttctgacttgaacactactttcactaataaacagaaggagctgtttaaagcaacaccttttggacattttttaaaatttccaaaggatcttaaatttcaagctcagttagtacatcacatcatcttgagagaggtctattcgatgtctgaagatgttgagttttggtttaagataaatgggactatggtaaggttctcgatagaggaattttccttgattactggactgaaatgtcatggtaacgatgatgattctatctttgttgagaaggatgagagtttaaagaaagtactttttaaggaaagcaagggtttgataacaaaaaaagaagttaggaatgctttcattc

SEQ ID NO: 278419 - DNA, 655 bp, Cannabis indica
ttttttaatttttggaacacgggtccgatggtccccataggggtccgatggtcggaccatcggacccatcgacccaatttattttttttttgaattttttatttttttttaaattttttaatataaggtccgatccttgtggggtccgatggtcggaccaatcggaccctacgggatttttttttattttttaatctattattattttttatttattattattaatttattttatattgatttattatttgtgttattagttatttttttattaatcattattagttattaattattattttagttaatgttttaagaattattttttttagttattttattaactataaattatgaattattattaattattgtttattttttatggtttgagtaataattattaattatattttattatcaattaataattattttttaattattaaatttttttattatgaattattaattattgttttattatgaattatgaattattattttattatcaattaattattattgttttgttattaatgattaattaagattttttttcggtgagatttttgttgtaaattataactgtgtttttttaaatatatgtgacaggttcaactgttaatgcgtgtgttatgtataatggtgtttg

SEQ ID NO: 278420 - DNA, 524 bp, Cannabis indica
ctagagaaaaactaggtttttaactttggaggcattagttggataatgagactatagccttcattttataataatttccaatatggttagggttgaattattaggaataaaaaattgataaaaatatagcaaaataagcaccaagtggccgaccacttaatgggccccacacaagtttggtttttgctatttttctcaaatattttatctatttttcacaaataccattttttgcactttcaaccctataaatatcaaaactatttatttaataattaaaaaaaccatcaaataaaattgtcatttataatatttattaattagactcgacaaactctcttaattaataaattaacccgaaaatactatttcttcacaatcaagccataacatagtgaaaattcataaactataaataatctaattttagaattaaaattgattaactaaaatcaattaattgagtcttacaagcagtttgtctcaacttgtatggggactatgggcctatataacggagcttc

SEQ ID NO: 278421 - DNA, 613 bp, Cannabis indica
ccacaaatggttgatgttccagatcgaacccaatagtagttaaggctaacgatctaatagaggcattggaaggaatgtgagcatgactaagacgatttgttgaagagttttcacaggctcagcgcaatagatcaccaacactagtagtggaacttgaagcacataatgaaatgtaccaatagccaactaagtatcgatgcatagaattgcacctgtctacaaatggttaaagatgaagtctctacacctagttatgaaaggaagcccaacctatagggagtagggaatgatttaagatagtgaatgctatactagactagatagggtattttatgaaactcacttattaagaaagatgaaagaatagacctataaggagcaagtactgtcttgatggatattctatggatacacacccctaagttagatggtaagaagtatgaatattgtatatgaagactttagagaaaagtctattatacaaattagtccaaagaggactatgccatcacgtagaaaggagtgtagcgtactgaacagaatctagaataagaagttagaaagaaacctgatataatttttttaaagtaatgacttatgaaggtatcttgaa

SEQ ID NO: 278422 - DNA, 557 bp, Cannabis indica
cattcagagtttgagaagtgttcgcagttggatcttcgcctgtctcgcccaggagaataacggttgcagactgttgactggtagcctgataggcttttcgtatcagcacagtggcctgcctggttcggtcgtcaatggctgcttgctgaaccctcaacgtttccatctctttatccctccattcatcgaacatgcgcctttgctcttcaaatgcgagattcactgcggcacggagttcctcctgatcatgatgcagggtgttggtatgaccttgcatgattccaagagcagcatggaggttctgttgggttttgtgccttaaataaaaatcatttcaatataatcagatttacttattaataaagatcagaaataacattttatgctgcatggatcacatgatttatttcatgattatatacgtataatgtatgaaatctatttaagtccagaacatatgaatttgttaatgattatagtgttttcagcacagtggagtataatcttaactatatgttcgaaagtttattccctgatttgtcagaacactggattta

SEQ ID NO: 278423 - DNA, 590 bp, Cannabis indica
gccatggtaattgattttcttgcaagaaatttggacttaaaacgatttgtttgtgttttggatggtatcatgttgctttgtgtgtcatattgatgtttgattgttgtttgtgaattctgggaaaaatagttacttttctatctctgtaattatttttattggatagtttggaaaattctcagcaatttacctttttacagaactcgatttcgatttaatttgaattagttatgaatttttgaaaattggaaaaatcgggatgatgaacaccctcccacgcgcgaggaatggctgcaagcagcctccctgcgccgtgagatctcggcatgcatcccttgggcgcgcgcggatgggtatgctttgcataccatccgtactgttcatcaaatttttcaattttttcgatttttcatgctatttcatggaattaacttccgattttttgtgtagttttgtatattgatttttatttttcaaatttcaaatctaattatcagaaataaattaatttgatttttcaaaattaattttagatattagtgtaatttgattttgaaaataggaaaaatcaagttttgcttacctctttt

SEQ ID NO: 278424 - DNA, 521 bp, Cannabis indica
ggcatgctgagtcctcttcggtagagaattttgtccatcattacataacggtgagcctgatactgaatctttctggacagtgccctttcttggggcaactcaccttttgttatgtattctatgatggggaccatccagttgggttcttgcccaaccgttgctatggcctcttttattttgatgcttggctctgccaagcgttccacgggtactacccccagtccttcaatctcactgtctgaagctaacttagccaggcagtccgcgtgagcgttcttttccctggggattctttctactttataatccgtgaactcgtggagcagttcccggactatcgtcacatatgcggccattctttcgccgcgcgtctgatactctcctgatatctggttcacgaccagttgggagtcgctgtagacctctactcttttggcccccacagcctttgctaatctcagccctgctatcaaggcttcatactcggcttcgttgtttgaagctgagaagtcaaaccgtag

SEQ ID NO: 278425 - DNA, 976 bp, Cannabis indica
atcctgcaaagatagactctattctacagtgggaaagaccaaagaatgtcactgaagttcgaagttttcttgggttggcaggctactaccgtcgctttgtagagaatttctcacgaattgctatgcctttgacaaagttaacaagaaaagaagtaaagtttatgtgggatgatagttgtgaagaagcttttagagaattgaaggaaagattaacttcggcgcctgttctcactgttcctaatagtgaggaaccatatgtggtattcactgatgcttcaggtactggattaggaggtgtcctcatgcaaaatggcaaggtagttgcctatgcttctcgacaattgaaaccacatgagaagaattaccctacgcatgacctagaacttgctgcggtaatctttgtcttgaaaatttggagatgttatttatatggcgtaaagtttgagttatactcagatcataagagcttgaagtatctttttactcaaagggacttgaacttgaggcaaagaagatgggttgagtatatggaagactatgatttcactttgcagtatcaccccgggaaagctaatgtagtagctgatgcactaagtagaaagcctcatggtactttggcatgtttggctcttgaggactggaaaaggacaatcacaatgggtgattataacttgcaatactatgaaggggaagaagtagcttgtatctctaacatagtggctacaccagtactacttcaacaagttaagcaacgtcagtggcaagatgaaaaactaagacttatttggaaccgaatccaggatggtgagcaactagatgggtggacagttaatggtgaagggtatctataccatatgggaagactagttgttgcagatatccctgatcttagggagaccattttgattgaggcccatagatccaaatttgctgtacatcctggaagtacaaagatgtaccaagatttaaagagaca

SEQ ID NO: 278426 - DNA, 910 bp, Cannabis indica
tgtataatactcctgagatcgaacctaaccacatcaggattaagatcatttgatctaggatcaactaggtaatattgaattgaatagatattacggtaagtttaatatatctaaatcaaagttcaatattggtcccttccgatgcatactccatgcatccaacccaagctttactttaaccaataccctggaaagaacatagcacttagccaaggtgcaagtaaactatgttgtagattgtcatatccgttaaaccttgtgttctgataaatctaggaatatatatttaatcacataatcctgatgactttccactgtgctaacgacacaataaacaagaatataaatgtgatatgggtttggatgaattcaaaaatcaaataaacaagtaaatgataacatgaaccaaatgacgcacaaaaagtgatgaaaatacttctgtttctttattgatatttaaaagataaagattacattgaaatggagttttatttagggtataaaacccaacactaccatcaattgtagttgaagaagcagcattgttgaaagcttcatccttaattcttttcctcgtacacaagttttcaaatacggggggcggcattgcaatcaagttccgttcataagctcgcaattctgcttttagcttatccatgtcggaagagttaaaattgttgatcatatacgatacaaaaaatccattatactcaggaggaagactattaagtatgaactgaacccactgttctcttgataattcaattccaagcaagtttgctttttggaatttcagattcatcattaacaagtgtgagttaatgctctttccaaggagcattttcacactatagagttcatttacaaaagcatttactaggagtgggtcagggtgtgggttcttcatttt

SEQ ID NO: 278427 - DNA, 530 bp, Cannabis indica
ttactcatcccatgtaatcgatatgcgcgatcagtattaaattctccctatcctactctacttttaatcatgccaagcataattatgcaactagacccttgttctgatcgtatcttctcataagtttgagtcatgcaaggttagctctaagaaaagcattatattgacacgtcattttttttattgagaattgagtccacatattcactactcagtacttatatttcaagataaaaaaattcgtcctataacaattcgaataccaataatacgagcgaaaaaaataactgttggaatttagtttatcaggatcttagatctactcacaagtatgttgtttaaaatcttaaatatgaacttctaaaacgataataaacacatataaattttagaaaaccttacattggttgcagcggaataatatgtctccttccactcagatctctaacccttgtatcctttctttcacagagtatcaccaagatctgagtctgaatgtccttctcttcaatttggattcttcacgatct

SEQ ID NO: 278428 - DNA, 571 bp, Cannabis indica
aattttttttttgctagaattattttattgacttgaattatgatttgatattttattgctatgttttagtaaattggttttgttcattcaagtgtatttattgtgcaattgcttagttttgcttgattaccattagtaagtaagtagctaatcttgattttggaaaaaatagagttagtagaattgcttgaatgatgcatgaatatcactttagaaaaatgtggtttgtaaatgacataggaatatgttatttaccatgtatgacttgaaggaattgtgcttaaattagtattcttaaaattaattgggcataggaatatgttaattaattacagaatcaaactataaatactttggaaaaaagattatgacattttaaattcttagttgacatcatcaatttgcaacaatactcatttgcaccattatatcaactttgcattttttttaggtcaatttaatagttctagcttgttttctttacaatttgtgtttgttaattttttttacatattctcatcactttattttattttatttttttgttaaaactaatttgtgagtaattagt

SEQ ID NO: 278429 - DNA, 670 bp, Cannabis indica
accggtggagctagaacacaaagcgtactgggcaatgaaaactctgaacatggatttaaaggctgctggtcagaaaagattactgcagttggatgagttggaagaattccggaatgaggcttatgagaacgctaagatctataaggagagaactaaaaggtggcatgaccgaaatttagttaggaaggagtttcaacctgggcaacaagttctacttttcaattcaaggctgaagttgtttcctggtaaattgaagtcaaggtggtcagggccatttacagtggtcaaagtgtttccttatggagcggtggaactgaaaggtgaaggccctaacactttcaaagttaacgggcagcggttaaagctctacttgggaggtcaatttgaccaagccaagtccgccatgattctggcgccactatgaagatctcggtcaacgtctagctgagcgacgataaagcagcgctattgggaggcaacccaatcttttaatttaattttactttgtttttcttttgaattctttttagaagacatttacaagtgttttgtagctttttaatttgttgcatttaggatcgatttgcatttgttagttttaaagtaaaaccgtgaaaatcgtgaaaaaaaaaatttgaaaaaaagggccatggctacagtagtcgcgacg

SEQ ID NO: 278430 - DNA, 545 bp, Cannabis indica
aagtgactcccttcatcgcttatgattgctcagagagtaccaaaccgagtgaaaatgctcttttgaagaaagcgaagaactgttttaccgtcattggctggtgttgctgcagcttcaacccattttgacacatagtccacaaccaataagatgtatagattgctaaaagatgaaggaaaaggacccatgaagtctatcccccaaacatcaaacaattccacttccaagattcctgtcaaaggcatttcgtttctccttgagatattacctgtgcgctgacaacgatcacatgccttcacaaaagtactagcatctttaaaaagtgttggccaaaagaatccgctctgcaacaccttggcagctgttcttgttccactgaaatgtcccccacatggtaaagcatggcagtgattgagaatagagtacatctcctcttcaggcacacatcttcttattatctgatcagcacagtgcttgtagaggattggctcttcccaatagtaatgtttcacctcagaaaagaacttcttcaattgttgacgaga

SEQ ID NO: 278431 - DNA, 588 bp, Cannabis indica
ttttttttattttaaattttaaattaaaaatacaatttggactaataatttatcaacacgtgatatttttttattagtaaatggatttgttgaaaaagaagactgacggacttacaaaaataatgagcttcgggactattatcggcaattttcgaagttagaaacttatatgtatcaagttgaagtttttgaaaacttatactgtaattttttcatatctattttctatataaagtgtgcctatataacataattcttggtttatgagaaattcatggatgactttttatttatattaaaaataaaatggtttattaataaaaataatatagtttatgagaaattcatgggttactttatataatgaaataaataaaataaatctcattaaatctaaaaaaatacaattgggtttttgctttatattatatatatatattgctaaataatttttctatttgtttttttggctcgatcaggttataattgtttgcctgaatatataaaatgtggctatataaacgaattcttggtttatgagaaattattgactaacttttttaaaaatattatctttttttttatata

SEQ ID NO: 278432 - DNA, 607 bp, Cannabis indica
gatatgtgaagggctgcactgttgtcacaaaaaagagttgatggaagcttgaaactgatgctgagttcattcatgatagaatgaagccaagagagctcacaagtggcattggccatggctcgatattcggcttcagctgaggagcgtgagacagtgtgctgcttctttgatttccaggaaatgagggagttgccaagaaatatgcaataccctgaaattgagcgtcgagtgtcaaggcaagcaccccaatctgcatctgcaaaggcgtgaagttgaagtggtgttggtgcagaggcatggaagagcaagccttggccgggagtgcctttgagatattggagaattctggtggcagcatgaaggtgaggttctcgaggtgtttgaagaaattggcttaatttattgactgcaaaagatatatctggtcgtgtaattgtgagatatattagcttgccaatgagactacgatattgtgtaggattttgtagttgttttcctgtctcattgttgagtttaaggtttgtttccatgggagtggaaactggttggtgccaatggtgccagtatcgttaatagttgaatggtgaatgggcgttgagaaacagag

SEQ ID NO: 278433 - DNA, 638 bp, Cannabis indica
aatgcggttaatatttatttaaaaatcacacagctatgataggtctgcttttaccgagtcaagataatcgtgtattaaacacgttataaatcataacgttctgggatgtctcggtaggaactcagtatcaataaccttgatagcgcgctagagcttttcctatatctttctgagattgataatgtacacctcgtcgcttctgcgcttgaagatataacgctttattttgacaatcgcagttcttagtgacaaggggtacttcagcagttaacataatttaaatgtcagcttctgttcgagagagctgactcgtcaagactataaatctcattgaaggatgtctgaagttgattagtgaaagtaccagaagcatgccttcctatagcaagatggacgtctcgttatctgtcacttaggttcttcaagctgttgtacttacttagtataatgtatatcttctttatatattaaaagtgtctatctaacgacaattcttggtttaacgattcttggtttagtttaacgattcctttagccttacacgattaacttaacagactgttaacgttaaacgttaacaaataaataaacccaataattaaaaccaaaaaattaaacaatcttttttttaaattaaa

SEQ ID NO: 278434 - DNA, 603 bp, Cannabis indica
gatttgtgtccaggtcttggccccaatctgggtctaggttcgggcacaggtccaagttcgggtcccgagtgcgggtccaagttttggtctgggtcaggatctcgatccagatcaaggtccagcatttcgatcccagtttgggccttggtcccagtccaggttcgtatccggatccctatataggtccaagtctgtgtttcgaatcgggtccaaaatttaggtccaggtccgtgtctcagtttcggtctgggtacacgaccgtgtccgggcccgagttccagtctcaggtttgggtctgaggctaggtatgtgttcgggtatagctcttggatcgggtccttgtcacgctcgaagtcttgttctagggttctgcttcgacgatgcttgttcaggttctaattttggatcctaggtctaggtctgggtttgggtttggttcttcgtttgggttctggtcctagtctgagtcctagatccagacaccgactactggtctgctcaaggccccgttatccgaatccggagtcaagatctggatcactgtgacgggtctcggtctggttttggtttaggtcccaggtcccatttctgagtttgggttag

SEQ ID NO: 278435 - DNA, 575 bp, Cannabis indica
caagcatcaaagtaaaagaggccataacaacggttgggcaagaacccagctggatggtccccatcatagaatacataacaaaaggtgagttgccccaagaaagggcactgtccagaaagattcagtatcaggctcatcgttatgtaatgatggataaaattctctaccgaagaggactcagcatgccttatttaaggtgtgtatcggaccctgaagctaggcaaattatgctagaggtccacgaagggttctgtggagatcatacaggaggacccagtctctcaaagaaaatattgagacagggatacttctggccaacaatgaaaaaagattgcatagactacgtccaaaaatgtgattcgtgccaaaggttcgcgaacataccgagagctcctcccaatgaaattaccctgatgactagcccctggcccttcgcggtctcggggatagatcttattgggtccctgccaacaggaagggatgagtaaagtatgcaatagtagcagaaaacaactcaacaaaatggacggaggctgagccaatgaagactataactgctaaaaaagcactagact

SEQ ID NO: 278436 - DNA, 734 bp, Cannabis indica
aacccagaaaacttctgacctctgtagctgacttcggtactggccaatcccgtacagcttcaattttagccggatccaccatgatcccatctttatccactatgtgccccaaaaatgagacacgagataaccagaattcacactttttgaacttagcataaagctgtgatcccgtaatctttgcaaaaccgctctgagatgcaactcatgctcttcttctgtctcagagtacaccaaaatgtcatcgataaacacaatcacgaacctatccaggtaatccttaaacacccgattcatcaaatccatgaatgccgccggggcattagtgagtccaaaagacatcacaagaaattcatagtgtccataccgagtacggaacgcagttttcgggatatcttcctctcgaattctcagctgatgatagcctgagcgaagatcaatcttggaaaagaccgtcttccccttcagttgatcaaacagatcatcaattcgaggtaaaggatacttgttcttaatggtaagcttgttcaactcccggtagtcaatacacattcgcagggttccgtctttcttcttcacaaacaaaaccggagcaccccaaggtgagtagctcggtctgatgaatcccagattcagtaactcttgcaattgtatcttcaattccttcaactcagctggagccattcggtacggtgccttagacactggatccactcccggagccaattcaataa

SEQ ID NO: 278437 - DNA, 534 bp, Cannabis indica
taaatataaatatatgtagtatatatattgaagggagttttactttaaaaaaaaaatacactaaataataattaaaattactcattaataatttagaaaggcaagcaactatagaaccattcgaattccttataatggctcctattccgatcgtctaagaaatggtatttattagttgcatcaacatttgatttcaaatagcctataattggagatgaccaattacagcctttttttcaaaggagaagtagacagattcccaacttataccaaaagtataaatacaaaataaccaataccaaaaataatttattacctacgctaaggcttgaaattataacatataaatgacgtaactatacaaaatcttttacaaactattatatatgacttatatgttacaatcctttttaatttaatatacttttacaattttacactcattaattacaccttaaaatttgctcaaattatgttgtttatgttataaaataatataagggctcgtttggaacgccgtattaggtcgtattg

SEQ ID NO: 278438 - DNA, 662 bp, Cannabis indica
aaagttcaggagataaaaattctaattagcttaaaaaaaatacctcatcttcataaaacaaaatcaacgcttaaatatgaacataataaatgaaataactatgaatcaatttacacctgtttgtcaaaaaaaaaactaacaatagaagtaaaaagttccagtgccaaagtcactaaataagtaagtcatcaatctctaaacaaattatgcaatgtactttatctgttgagttggacattttattagaagtttctattgtatcaatctaccgttgtatgattcctgttaaagtatatacttgagggtagattgcaaggtaaacgattttaaaagggacaccccatttattagatggagaagatcaccaaaattttgtaattactactgaacttattcaaatttaataagcattctcagtattaatattatgccttgaaaagattttgattacaattgtaattctattacatcatatttaaaagcaaactaaatattatttagtgattataattccattactattaccatttcaatagaatgacataaattattaagtaatacaattatatatgttttgctaaaaaaagtcatatattaagagtgtttggtaatacttttttaattaattttttgttttttaattagaatagtgaaaatatttt

SEQ ID NO: 278439 - DNA, 636 bp, Cannabis indica
gcgtttatacgctgagtattggtcaattactgcgaagtcggccatcgacttggcagttattggggcagttcccaaagtgattgggagtttgatcattcctttgatagctatgacatctcccgagaagccatagatgctcgatgtcattggccgcaaatctttttcttgtagccccatttgcttgaaggcttggaagttcagtaaattcaccgaacttccattgtcgaccaatatgcgatggacgttgtctccacctatattggcgactatcacgagtgcgtcagaatgcgggtggtggacccatctcgcatcgctctccataaagacaatgtcctcgcattctttcttgaagagcttctccggccgttcaccaagattgtttacattggttaacggcctctccttagcttctctagcatacctttcttgtgacttgcgagagtcgcctgcgatatgcggtcctccgattatggttaaaatgttgcgaggcgttctcgagccactcgcgttctgactatcttctttgccatccgcttggggatgtctttcctcatttctcttatatttgtcgaactttccccttctgatcaattcttcaatctcgtcctgcaagacccaacactcaagggtagtgtg

SEQ ID NO: 278440 - DNA, 599 bp, Cannabis indica
aaaacaacaaaaaaaaaattaaaaaaataataaaaaaaaaagtgaatgtcacgaaatagagacagattagggagatttgtaaaacaacaaattgaaattttagaaaactctcctaaatcgtcttcttccactcgttctcattcaccaccatcacccatacttcctgcactgccaatgatggctcaacaacaggaaatccaaccaagaacgctacaggattatctacatcctacgcgtacggccacaccttcatgcataatgtatcccatgaatatgcccaacttcgatttcaaacctggcatgattcaacttttaccaacctttcatggtatggaaaatgagagtccatatgtgcatattcaggccttcgaagaggtggtggccacattcaacaaccatgctgacatcataaacttggtgagattgaagttctttcctttctcactcaaggaaaaagccaaaagttggttgtattctttaaggccaaggtctattgggacatgggaagaaatgacaaaagtatttttctctaaatttttcccaccccataagaccagcaaccttaagaggcaaatctctaccttcacccaaaaggacca

SEQ ID NO: 278441 - DNA, 486 bp, Cannabis indica
ttttggaaatggttaggtccatgcttagccactcaactctacccacgtccttctggggatatgcaattcagatggcaaccgaaattttaaatgttgttccatctaaatcagtccctaagacacctttagaatcgtggaatggtcgtatgcctagtttgcgccattacggacattttaagtgttcgtttccacaaacaccactttccttgaagatgactatattaagaatttcaagccgcaaagcaaagtagtattggaagaaatgctttctaatataagtccttctaatgttccatcctcttctactcaagttgaggataatcccactccctcagttgaaacaacacatgatgttacaactgagagaactgccactaaagttcctgttcagaaggtcaccactcctcgtcgtagtgggagggtttctactaaaccatctcgttatggcttggatggtgaaatcaatatggtcgttggtgacgatat

SEQ ID NO: 278442 - DNA, 583 bp, Cannabis indica
tggaaccagactagggacacagaaccagggttgggacctagaaccgcaccacagtctcgatcccgaacccaaactctgaaatgggacctaggacctgaaccagaaccagaccgagacccgtgacagttatctagatctggactcgggattcgagtaatggggccttgaacagaccaatagtcggtgtctagatctgggactcagactaggacaagaacccaaacgaagaaccaaacccgaacccaaacctagacctggtacccaaaattagaacttgaacaagaatcgccgaactaggaccctagaacaagactaggaccgtgaccaagacccggccaagacttagaaccgaacacagacctagcctcagacccacactgagacaggaactcgggcccggacacggtcgtctacccagaccggaactgagaccctaacctggacctaaatctgggacctaatcccaaacacagacttggacctagatagcgatcccgatacgaacctagactcgggccaagacccagaatgggatcgaaatgttggacctagatctggaccgagatcctgacccagacccaaa

SEQ ID NO: 278443 - DNA, 718 bp, Cannabis indica
tttatagcgattgatatatagtacagcaatgtaaagacacaaaaattttatagaggttcagccccgagcagtttggtaatagcctaatcctcgttatttgtattgactcaagaacaaggagaaaggttccttttcttatagctcttacaacggtatctctgaatatgaattctcagataatatctcttaggtaaaaatctttgaaccctttgcccagtgagcatgcatcactatttatagggctatgaacttggagaggaagtatttcccttctcgttacaatggatataaacagaaagattgcatgataaatacagaatacactgatcgtgggatttggacagctttccatatctctacaatctgatcgtcaagttatagggatttctttgatgactcacgatgcgaaagctgaatttattaagtgttggtcactctacgcggattgctgatcgctttgcttcaggcatgcatatgaggcatcctattcgaactgtatttttcgagcagatactcgaagtcgattccacgtctcaccatcatgtgatgccacgtcagagtgcaaaaattgggacaacatttgccccccaagtctgtacgggacttccgaagttgcgtgtagacttcatccgagctgcttctgcatttggatggggacacgtgtcgagcgcgtctgttcgagactcgatgtgaggctgactgggcgtcccttcggttt

SEQ ID NO: 278444 - DNA, 581 bp, Cannabis indica
atataattgtacttagcaaataccaataatattcatattttatttaatgcaacaataacatatcaaaacacacaataatataccaaaaataatatacttttactggatattacaattaaaggaatatgaattccattattggtataataattttgtattactaaatatttgtatactgatgtttattcgtggcaaatgtcagtagtaatttggatttcatcttatgaacaatgtgtgatggtttgactcttattgtgtataaatgataatattcgaataataaattatatgattgttactattacttttcttgttgagttcttgtgactcacgggtgctatgtggtgcaagcaaaggcaaagaaaagctagatcaaccatgaggtgacagtcttctcaaacaatgtacatattgaccccaccggcatgcgtgccgagttgtcaagagttgttttgggctagctgtatctgttgtgtattttgattttgtgtttaaatggttgtcgtatatatttctttagcaaaactttttataacaaggatccctgaaacatactttttatgtcgttataatgtccgttt

SEQ ID NO: 278445 - DNA, 518 bp, Cannabis indica
ccctgtatttccataaaggggcaagcgctagcagacttcatcaccgaatgtaatgaagccaaagcaaccgcgaacatcccagcaccgtcggtccaatcatggaaagtaattgtggacagagcctccaacaaaaatggatccggagcgggggttgcaatgatatctccgaatggacttcaactctaggcagccctacggttcgacttctcggcttcaaacaatgaagccgagtacgaagccttgatagtagggctgagattagcaaaggctgtgggggctaaaagagtataagtctacagcgactcccaactggtagtgaaccaggtgtcgggagaatatcagacgcccggagaaagaatggtcgcgtatgtagcgatagtccgggaactgctccacgagttcacagattataaaatagaaagaattcccagagaaaagaacgctcacgcggactgtctggctaagttagcttcagacagtgagattgaggaactgggggtagtacccgtggaacgctt

SEQ ID NO: 278446 - DNA, 646 bp, Cannabis indica
tgttcgacagcatatcgacataccatcgatatgctgtcgacattccaataaaatcaacccaacacaacatcacacaatattatcgacattgtgtcgacatggagtcgatatatcacatagaaattaacagcataaagtgtcgataacatatcgacatacaatcgacatgctgtcgacaacaaattaaaacaatgaatttacattgtgtcgacaacgtatcgacatacaatcgacatatggtcgacaaaatgaatttaaacactaaatccagttcaaaaaaatttcactcaacatctgtcgacattctatcgacacactatcgacatcctatcgatacactttaacacacagaaatttctaaaggtcattttgtcgatatcctatcgatatctcatcgataacattgttttttggccgtggatcatcgtggatcaatgtggaactatgtgggtcgtcgtgggtggttcggtcgcgtcgtgggggtgagtcgtcgtcctcggttgcgtctgtgggtttagtagtggggtgggtttagtcgtcgtcgtggggtcgcgtctgtgggtgggtcgtcgtcgtcgacgtctgggtttagtcgtgggggtggatcggttgagatattggtgtggtgtggggggtgggtcggttg

SEQ ID NO: 278447 - DNA, 696 bp, Cannabis indica
agattttttcggttggaagaaattcctccttatatattgaccaatgtattgtttctctcagcaataaaattaattattatatttaaaaaaaaaagacaataatgtaaaatatgcatatagtttaatttcctcaaattcaaaggccaattaagattttggtcatttaaattttgacatatactaaattgtactctctaaactttttcagacccttaaaaattcatcccgaactattgacattattgaattaatgatttatgtccaatttcattcaattttattaatatgataattgtctatatacaaaatcgtgacccttaaattttcatttatgtcaaacaattatttaaattggatggaaattttttaatttaagaaagaaattttaccaacttaaaatgttcaagatagtacatatcaaaattgtagtgaaaaaaaattataattagccaatgtaattagggagtcacttgaggcaaattatccttcaaaatattctacttaagaaaaaggaaaagttttttttttggctaaataataataataaaaataaataaataataataaaaaaactttaccaaaaaaattagaccgataaaagaaaaaggaaatttgcataaaatcaagttataaaaacctctcttaccagaaataccttatcctattttctctattattgtaaatgactgttgattt

SEQ ID NO: 278448 - DNA, 550 bp, Cannabis indica
agtccggttcctgggaccaaccggtcgaccggttgcaacagggccccaggaaccggaattccggttctgagctgggaacccaaaaattccaccccttttcctcaaatcaaaaccaaatcttctaaaaacttccagaatacctgtatacactatttcaaaccaaacccaaccaacaaaactcaataaatcattcaaatttcaaaaacaccattagagagctaagtttgagttctcaaactctaactttgctcaaacctcaattcaattcataactttagttcaaaatagctcaaacaacatcaaacaatctccagaatactaaattaaaccaccatagaccatacagcaacatatcactcaaatttcttcaaaataactaacttaggttaagaaaaacttaaggaagaagaataggggaagttaccttgaattggaaccttagaattcaattaaattcccacaattgtattattattaataataataaaatctcatacataaaccctaattatttaataatttaaggtattcatcaaatgcggtctttaca

SEQ ID NO: 278449 - DNA, 614 bp, Cannabis indica
atgaatttctcataaaccaagaaattcaaattacagatatcagttcaaatattaatgagatttgttttatttttattttattatatataaataatattttattattttattaaatataaataaaaagtcacccatgaatttctcataaaccaagaaattcagttatataggcacactttatatagaatagatataacacatacatttaagatatgatatatcttagaaagaaagaaaaaaaaaataatacctacattatatacaaaaattctataatacacccctcaaatgggattattctggtacacctcctatttcgtcattcagaagaatattattaatttgatttttattcataatcgtgtatgttagttagataggaccacctgtaaataaagttcaaatgttttgttgtacatgtgattattttttcttatatatgtggtaagcaactatttaagcctaatttttgacactataaactatgcaattttttttaaaaaaattacaagttctcccctaaaacaaaattaagtcaaaaccctctcgaccaaacacttggtctcgaattcacagctaggttagaaaccctagcattgaatcaaaacccaaaa

SEQ ID NO: 278450 - DNA, 720 bp, Cannabis indica
tgtttctgcttagtttgtttttagtttttttatagttttattatagtttgtatacttgtttatttacaatttatatttattgttgcaaaatagtgtttttttagttgcattccaggacctctttcagcttccgttgtaattcttcatagttacaattgactgaaatgtaatgtccactagcttcataattttcataattcattcgatcatcaaattgtccattgcagaagactaggaatggaatgtctttttttcctgtgattttgaaattgttattagtgcaaggcaacgatattgaaactggtttgattctgttatgaaatagagtagaaacttacttctattttcttccctttgttcgtcttatatttcctgttctgattcctgcttttgtcatttttatttattttattgctgttaataaactataataaaactaaaatgaaactattaagaaacgtttaaatttatttcagaaactaactatttctcaaagtgttttctccttttcttatttccaaaataaattcttgcaaacaattgaattaaactaatataaaataatgatgcaactgtaaatcaacttgaaaaaccacaacacttaattcaatttaatatagttgtggtcattgtgctttttcatcagttttatttgaatcagatcaattgaattaatagttgtatttttctcgttttggtttcattttggttgttttgcag

SEQ ID NO: 278451 - DNA, 507 bp, Cannabis indica
ctatgaaaaataaaaatatgaacaccgagtttttttacgtagtcttgcagttaaaattctgcatagtccatgagtcaatcttattcagatttctgagtattttttttcaacgcctctttcataagagttttttcatcctttttttgagcttgtctgccactatttgtaattacatagtgggcagctaattacaaagtcgaccgaaataatattacaacaatcatccctaaaatcgtgggatttgattacatattatgtagtgtaaatgcagttttatattttgaaaatcatatagctatgattttcctgcttttactgggttaaaaatatcgtgtattaagcacgtctttaactgttgaatctggagatgtctcgacagaaacttgattgtagtgatcccaatggcgagctggaaccattcttcttttcgagatcgacaagatatgtcttacgtcgatcgcgggtatatagaaatcttctgacttgccagggttatgagcctcactc

SEQ ID NO: 278452 - DNA, 496 bp, Cannabis indica
ttttcatttgaatattttaaaattaatttaagaaaaatacacttagtttaatgaaactttttcaaaataaactatatgtatttttcttgtatttaattaaataaagaattataactaattagattcttctgatgcataattatttaatatttcattgaatatttttttaagttgtaaattagttatttataactaatttttaaatcaacttgaatttgaatatttttaaaattcataattaagttgaagaattctaggaattagttattgaaagattctttgaatattattttaagttgaaagtttgttaattttggatcaacttaaaatagaatattttcaaattaaatggttagtaacttaatttgttatttaattaaatttttgttttgaaaataatttaagttggaaatttagttattttagaacaacttaaattagatattttttaaatatttattttattatattttaattaatttatttatttttcgaa

SEQ ID NO: 278453 - DNA, 670 bp, Cannabis indica
ccaatagagctaggcccgatgtcttctgcagacatcgaaagaatggtgcaggaactcgccgaacctgggaccatcgacattcgagacagcgagtctacggtgtcggccccgactaccttattcactcgaggcatgctcctgacgtcgaggtcgaggagatggacgatgactggacggccccggctcgcgaatcaggcgaggatgaagaagaggcggaagggagtgggacagactcggtcgacgacacccagctgaacgagcccttcgcgtgcgaagatctgatttcgagggtcaccaaatcagacttcactacctttacgaggttaaatctgctgcgacttgcgtttcagcgacctaaaccgacccagagggcgcatctcccttttaccaaccctgcgattattcccacagaggatgtggtagtctcaatacccattctccgatgtggggtatcagtccccttccatcctttcatcgcagccattcttaaacggtacgatgtatcacctttccaactaactccaaacagttatcgcactgccctagccttttactcgatgtatatggagtacgttcatagggctccctcagtagaagagttcagctatttctacgatataaaaagcgtaggccttcataacggtttctactgctttagcaaatgggcgac

SEQ ID NO: 278454 - DNA, 201 bp, Cannabis indica
gcaataataggaaagtggtggatcacactaaataaggcagttaatcaattaaacagtaaaagaggaaactgcttatttggaaagttgtgctctcccttttccctatatatagcagcccttgttctcttctcttacacgacagaacacacgaattcaagagagaaaaagagagagaaatttcaaaattcctttgagtgatga

SEQ ID NO: 278455 - DNA, 621 bp, Cannabis indica
aaagagttttatttagggcataaaacccaacaatcatgtctttggttaagtgtagtctaggatttcgcctcaagagagaatcaaataaattctaagacttgtgagatcacaaaatcacatatttacacaaactttcaccaaatcacacacaattaaatgatcaaggcattcgtgctcaaaatttgacatatctcaatcaaaatgaaactagcacaagaattagtcacaagctcaaacaatatttacatttttcaacaagctatgcacactatcaatcatgtattagaatgtggaaaatcaccaaaccaaagcacatatgcctcaaattttttttttcaaacaagcaaaataaaagaaaagaaaaaaaatatttagtttcccaaaacattgtatgcacaaaattctcaaatatgtgtgagcaagtttaaaattaataaagaagagttaaagaagaactcccctttcaatgatgtgcaaactcgctagtgtcaacctccgtaagtgcgcccaattccacttgactttatgctcgcacctaaaagagagaaaaagaaaagaaagagagaaaaaaaaaaaaaagagagaaaaaaaaaactacaatgtaattctcaaagccattta

SEQ ID NO: 278456 - DNA, 461 bp, Cannabis indica
atggaccaggtgcttgtccatcttctgtgtatctaccataatactcacctcctctatctgatctcactatcttaatttgcttgttgcattgtttctctacttcagctttaaatatcttaaaaacatctaatgcttcacttttattatgaagtaagtagatatacatgtagcgtgagtaatcatctatgaatgagatgaagtatttctgaccatgtgactccatatctggactacatatatcagtatgtatgatttctaatatttcagaactcctatggacaccagctttgaaagacttggaggtttgctttcccttaatgcaatccacacaagtatcaaagtcagtaaaatctaaggtattgagtaacccacctttttaccaaccttttaattctatcaatggagatatgtcccaatctccggtgccacaatgtacaggaatcctctttcataacacatct

SEQ ID NO: 278457 - DNA, 1139 bp, Cannabis indica
tgtatgatggctattttctcggatatggctgaaagtattttggagatattcatggatgacttctctatctacggggattcatttggggtgtgtttggagaatttggaaagagtgttagcaagatgtgaagaaaccaacttggtgcttaattgggagaaatgccacttcatggttcaagagggtattgtgttgggtcacaaagtgtctagcaaggggatagaagttgacaaggcaaagctagaagtgattgagaagctaccagcccctaccacggtgaaaggcataagaagcttccttggacacgcgggtttctataggcgcttcattaaagacttttctaaggtgtccaaacccttgtgtaacttgctagaacaaaatagaccatttgagtttaccgctgaatgtaatgaagcatttttgaagttgaagacagctcttgttacggcccccgtgattgtagcacccgattggtcattgccctttgaactcatgtgtgatgcaagtgattttgccgttggggctgttcttgggcagcggaagaataagatctttcattccatttattatgcaagcaaaactcttgttgatgcccaaattaactacaccactactgagaaagagttgctagcggtggtttttgcctttgagaaattcagatcgtatcttgtgggaaccaaggtggttgtgtatactgaccattcggcaatcaagtatttgataaccaagaaagattctaaaccgaggcttattcgttgggttttgttgctacaagagtttgacttggaaattcgagacagaaaagggacagaaaacaaagtggcggatcatctctctaggttggaaactaacaatcacagcagccacttagagggagaattacaaattcaagactcattcccagatgagcaactgctagtggtagagcaaacacgggtaccatggtatgcagacattgtcaattacttagttggaggtgcctatccacctgattttaccaagcagcagctcaaaaagttccttcatgatagcaagttttatttttgggatgagccatacttgtacaagcagtgcccagatcgtattatgcggagatgtgtgccaatgggtgaagttagaagcatcttggagcattgtcattc

SEQ ID NO: 278458 - DNA, 548 bp, Cannabis indica
aaattgcttttcttgtagtgaatcctaagactcagatcgaagtatcatcaagactcatggtagggaataatccatgaataatttaacagggtaaaacttattcccttatcgtgtatgattgataaagtaagaagtttgaaaagttcaagacaacttcccaagaggcaataaggtgatatactcaaacttggtaaaaccctacccttattcgagtatgtagagatcttttaggattttgagcctcctcaagatagatgcaacacatttcttaaaaaacagaaccttctagaaggatttaaaatgatagctgactttgcatctcaagcaatacttgtaattttatgcattattttattaattgattaaatgtaaagtacgtgatatcttggtgaattttaatattaaattcaaatgtaatatcatcctaaatggcaagataatactgcgtcaggttgtattgctttaaaatgccttgatctagacgtgtaaaaaggattctaattcatttaactctctcacatacttagaaaacgagagagagagagaga

SEQ ID NO: 278459 - DNA, 534 bp, Cannabis indica
cgaatatttttttttattttattagatatgtatatatatatattcttacctatttacaattttatctctataaatttacattttatatttttatttttatcctcatatattatatttttcactaataccctttttaagaaaattattcccgaatgtagctggctcagtcactacttacatggacaattttaagctcgtctgatcaaaagtcatcgatatatgtttataaagaggaaattacactctataccctttttatattgtctttcttttatttttaccattttttttaaagtctatcatttttactttttttttttaaacattgtaccattttagtccctgtcacttcaagatactctccatgtgactctacttatgtcagggtattttgggtacaatacatataaaaagatgtatgtttcaaataaatataaaattagaggtaaattgattaattgattaatagagtggtatttttcaacttaccccatgtttaaacttctattctatttttttttaatctttttcaag

SEQ ID NO: 278460 - DNA, 134 bp, Cannabis indica
agcattccactagggttaggtttaaattatttggcattaaaataatagatgataagcctataaagtggccggccatggctatgtagatttgggcctcactttttgcaattttgcagttttatcatttctgcatc

SEQ ID NO: 278461 - DNA, 618 bp, Cannabis indica
taaactagaagttgaccgggactggaactaggacttggacttggaattgatccttctatcatttcacatgttctgaatatcgatcccaactttcggccagttcaacaaaaagaaggttgttggacaaagaacgagcagtagccctgaaggaagaagttcaaaagctacacaacaataactttataattgaagctttctacctggcttgggtcgcgaatcctgtattagtgcccaagccgaacaagaaatggcgagtctgtattgatttcacagacctcaacaaagcatgccctaaagactcttttccactacgaaggatcgatcagctcgtagatgcaacagcagggcatgaaatactaagcttcatggatgcttactcaggctacaataaaatcaaaatgcatccaccagaccaagaacatacaagttttcgaatagatatgggtctatattgcacaaagtaatgtcgtttggtatgaaaaacgctggagctacataccaaagattggtaaacaaaatgtttaaagacctgatcgggcgaaatatggaagtgtacggggatgatatgctcatcaaatccagaaaggctgggtggcacatagacgacctggacaaatg

SEQ ID NO: 278462 - DNA, 648 bp, Cannabis indica
agttttgacctagaaaaattacgaattatgatatagttatttctacaaaatttatagatctttgaattatctttccaacgccactggaattacctcaatcggaattataaaacatattgtcattttagtaaaacagtttctaaacctgcgaatttctctaaacttacgatttttctaacattaatcaaataataatattatttaataccacttatacaattaattaaatctaataaatatattacaaaaatctaagagaaaattgcattgtatacccactttactttatttgttttaatttttacctttatttccatattctttaagatatacccacttttatagatgatgtgcctattataccctttacataaatgtaaattatgtactacacttgagtgaaaggtaaggatatattagacaattcactcataaaaatgggtagattttaattaaatagaatatgaaggtatttttgattaattgatacaaaaaagaggtatttctcaacttatcccaaaatctaatggacttttatatcgggctttaattaaacgattacctacttatgaaaatatcataatattttactttcgtagttaatacaactttaactttctttagaaaattggtacaactactctaagc

SEQ ID NO: 278463 - DNA, 1101 bp, Cannabis indica
tctaagttcttgtaacgaaaaatttattttatctaattttactcaatattaagcatcccattatatataattaaaatggtgtaataatttttatttaatttagagaaaaaatagaagtatctatgaatagataaataaaaataaaaataaaaagaaaacaatagaccaaatcatttacaataaaaatataaaagaaaccattataagtttatattttgaatcacctttatcaaaaggaccaacaagagtctgttaattttgaaacataaataaagtgtgaagaatactaaatttataatctgaatactaaaataaaatgtacgttattttatagttttaattacttttatatttctttttcattacacataatcatattaaaaataagtataattattataatttaaatcttagtattattttaattaataaataaatatttatatgattattattattattaaattattaagttttttaatgtactatgttcataagttaatttatttgtgcttacatatttttagacttatcgtacttaaattcatattttttaatattatgcataaacactatattttttatgtcagtcgtgccccccgaaaaagcccctatccatatatttatttgtacttcgatagcaaatcttataaaatgattttatatatattatgtgtattcaaaaattaaattcaaaaacccaaatcaatttgcaagttgcagacactaatttattattatttattaacgatttaacgtactcttacgttacttcgtttgtttttgttttgtttccccttatgaaaacgttcaatattatacatgtccttatcatttatagttttttcatacatatatagtactcctcaattaaaggtttctttgtttttatgtactaactagggaatagatccgcgcttcgcgcggttttaataatttttttaaaattttacatgaaagaaattaatttttagttacgaataaaatctcaattcagtctaatactattttatatttttttttatgaataatataaaggggaattaccccatatactgttttttttttaactttttttctttcaaatttacggtttgggtt

SEQ ID NO: 278464 - DNA, 702 bp, Cannabis indica
cccctcactagttgagataatacttcttgcagactcagttaattgattttaattaatcaattataattctaaaattaaactgtcttatttatgaattttcactaagcatgggcttaataatgaagaaaagaggttttggggtcaacttgttaattaagagactttgtatggtctaattaataaattatacaaatgacaattttatttagtaattaattataattgttaaataaatagttttgacatttataagattgaattggaaaatatggtatttttgaaagaagaataagtggttgaaataaagtggcaaaattgtaactagaaatcgatcacattgagtgtacagcctagaagtgatttttgccaatattttattctttttaatccatataattcagccctaagccctagttgaaatactataaaaggaacatgatgctctcactcatccatttgatgccttcaaccaaatcaaacctagttttctatgtcagataactagtagatgagagagttccttccttagtgattttagcctccttcattattcttcacattcaaaacctatagtgaattagtgccatgcccacacatagcaagtcaagtactcaatcatagtgagtaagatggtggtaaccaaacttgaaggagagaaagagattctggttcagatctggataatgctctgctacataaagg

SEQ ID NO: 278465 - DNA, 431 bp, Cannabis indica
tgtagatcatctatagaggatcattgattattgggattataacaatggataattaatagcgtatctatatcgtggaacatatagagcattctatataactgagagtgcaattccaattatcattctaaaattagactatgtctagtttatgattttttcactaagggcctttgagtggttaaattggaaaattggcgtttttgagaaaatgggatgaaaaatgacaaaatggaaaaattacaaagtggggccggccactatgtgtgcgatttaccatttattttctattattttaatgctaattaattctaacataaacctaggtggttacctataaatagatagtgatgacttaaggaaattgattgatgatacatcacattccttcagtaaaattttaagactccttcctatagcaaaaccaaaaccac

SEQ ID NO: 278466 - DNA, 521 bp, Cannabis indica
ttactccatatgaatggttttaaccatagttctcttactttgcttcttagtcccttattctaactatccattacttatttaaactaacaatagatttttataacaagtgtcttccaagtcataacagggtgggtttcttgaaaccctcccactatgacgaggtaccgtggctttctatctaagaacattaatggtattgtcgtcatcggttgtgtcaatacaatagaggtaatgtgaccatcttatatagaataagatgatagaacattttagatttgaaaaatatctcctctacttttctactttatttttagaaaattagtatttgttgaaacaaacactttcttatcttaatgaccataggatggtccacccctaatcactttagaatagctatcaaacatgcaaacttcaattaacagttctaggatttcttaagttcatgatcagaacatccatgaatctagacttagcatttccctaaagggactcacgcatctgctagtaactaatcatagacc

SEQ ID NO: 278467 - DNA, 722 bp, Cannabis indica
atgctaatctgatggctatataaaacttacctaacatatatctaatatgtcattctgaggaaaactaacatgtacgctaaacatgtataagcatatgcatgacattatactaatcttaccttgattctaaattcaggtgtgccggtcaacctgagtggaacaactgctcgacgaattacaggctcctaaatcacatcaatcataacataggtgagtggcacgctaaataactttccggggacttaaacttgaaactaaaagtttccctatcgataaataacatggcaataccctaaacaacacaaaaataggaaaaactagggttccccaaattgccccaacctgtagaccggttccccaaccagaattccgattctgggaaaaattcctgagagccaaccggaattccggttcctacaggcccctctgaaccggaattccggttaagtgcaggaaagaccgaaatttccctatctcaactaaaataaccccaatccacatcaaaccttccagacctgttctaagcatcctaaagatcattttccaagcaacaaaacacagctacaagcacaaaatcaaaacttgacattaaagctccaagtttgagttctaaactcaaaacttggttaaactactcaacaatcactaaaacatgctcaaatcaacataaccaaacataaacaagcttcagaaaaacaaacccacacacaaacagcagctac

SEQ ID NO: 278468 - DNA, 750 bp, Cannabis indica
ttgagttcaaactcaaacttggctaaagctcactaacaagcctcaaaactagcttagaacttcataaacaagcataataacactgcagaaaactaaccctaattcatgcaaacactacagccacaaatttcgaaaattctctttgaaaaccaaactttgagctaaaactttcaatcttgaaatcaaagcaattaacatgcaattacactagctctaatctacttaaaacagcaagattaaacctcagaaacatcacaataattcacagcaacaagaaccactaaaacaagcatgcaacaacacttctttttcatcaaaaattcaagaaaacatacaagaaaggtgtagaaaacataccaacaactatgaacacttaaacttgctaaggagggcttgaaatccaagaggaaaatcctcttttcttgctgctcaaaggggaccgaaagagagaggaaaagagggagagttttgagaaattttctatttttttctaactttgatttttgaataaagaaaagaattaatattaatcccttatattcagccaacacttaaagaaataaaacacataaatcaactaaataaagtccactaaaggaaaaaatatcattggggcaaaaagaccaatttgcccctccacacaaaaataacataaataacactaaaggggtatttttgggaaattctaaattcccggccattcccgacattcccaatgtctaataaactgtcccaaactactaacatact

SEQ ID NO: 278469 - DNA, 643 bp, Cannabis indica
ttgttgtcgttcctctgaccttggtcagtcttaacatacttttgcaggtgcggattgtttttccttattaggaattcaatttcccgcttcaagttgtagcattcattagtgtcgtggccgtagtctctatggaaccgacaaaactttgtcatgtcccttttgttggcatctttcttcatgggcatgggcttctaatatggggccagcgactgagttgccatgtatacacttcctatatcttcagttagaatagtgaaccagtgtatttggcatgattctccaggggagcttgtttggatttgccagtaaactttcctttcttcccattcccttgcttgtggttgttactggagcgcttaccacctgagcttgaattatttgggtattggggaagttgggaagatgatccaatggaaggagcctttgacttgccaggcttttgttcaccttccgctcgttgaatagcttcttagagcttgatgaagccttcagctcggtcaaggaaatcactaattgagtctactggcccgttctttcttatatccttcaagagttcaccgaggacttcgataccccccagtattgcggataactttccttcctcagttacccgtgaaactttggtcacctccgtcatgaatct

SEQ ID NO: 278470 - DNA, 523 bp, Cannabis indica
tgtctccttccactcagatatctaacccttgaatcctttctgttgcagagtataatcaagatctgagtccgaatgtccttcacttggatttggatccttcacagtcttccaaagtatgattgaggtactgtttgctgtgtgtgggcactactctttcactaggtattcgaaattgtatctcttattgagaagaagaagaagaagaagagggtcggctatatagagagagaaaagggaaggctcaactttctgaaagaggcagtttcctgaattactgaacaattgcttaactgccttatttggtgtgagccatcactttctatttacagataactgctaggtttaggttagtaattaattggaattaagataatgaaaataataattggaaaatgcatgcacaagtggccggtctagggtgttattgggcctcacttggattttgcaattttcacaatttctatttctattttcccaaaaatgtcaattttccaattctaaccatttaaatgccaaaactaat

SEQ ID NO: 278471 - DNA, 612 bp, Cannabis indica
tgttgtacttgccttcaagcttggcaagcgatgagtttgaatcaaagtcagtaccaacaacataagactttggatgatgagcttggggagaagcctttcgtagctcgcagaggatgtaatatggtgttgatgaaatatatggattcattggtggtttattagtcaatatcattgatgaagtcgaatcaatgatgtcatgttcttcctcatcctccaatgtcacagtatctactctttcatctaacaaaccttcttcttgttgctcactctccacgtggctattcataccctcacttgtgatttcatattcaatgagttcctcttcacaaggatcttgatcttcaattgtaggctcattatcttccttgtattcaactaatgacccttcttcattgtagcaataactctcataactttcatcattggaattattacattctgaatcatgagccattgaattatcacataaggatctcaccatgtcagttaagcgattaatctctcctggaagtgattgcataagtgctagtagttgttcctctttttcagattgttgagatgaatttgggcaataaggtgggtattggtgactccaaccctgaagtgatggat

SEQ ID NO: 278472 - DNA, 611 bp, Cannabis indica
ttccattgtctgagatgagtttgtatggaataccaaatcgacaaattatggagttatagacaaactcgcgcaatttagttgctgtgatggttgcgagtgctttggcttcggcccatttcgtgaaataatctactgcgactaccgcatatttgactccacctttccctttaggtagctcgcctattaagtcgatcccccataccgcgaagggccatggacttgtgatacaatgtaggttactcggaggttggtgggtatatgtggctattcgctggcacctgtcgcatgtcttcgcaaaagcgagagcatcttgtcgcaaggttggccagtaatacccttgtcgcatgatttttaatgcaagggagttaccccctgtatgattgccgcaaattcccccgtgtacctcacgaagtatataaccgcaatcttccccgctgatgcatttgagtagcgattgactaaaacttctgcgatacaacctttgatcatacattacatatcgggcagctcgttgtcgcagctttcttgcttctaccttgtcatcgggtaaaacacccttttctaggtatgcgactattggagttatccaggtgacctcctgaacgatatct

SEQ ID NO: 278473 - DNA, 783 bp, Cannabis indica
ttgatcatgtaaattctttctaattcaccattaaggaacgctgttctaacatccatttggtgcacaactaaattgtgtatagcagccagagaaattaaaactctaatggatgttattctagtgacaggtgaaaaggtgtcaaagaaatctacattctctctttgtctaaaaccctttgctactaagcgagctttgtatttgtcaacagttccatcaggtttcaatttctttttcagaatccacttacaacctatagttttgcacccaggtggtaagtttgtataatgccaggttttattcttaataagtgagtccatttcatcatcaacggcctcttgccacaggtcagcatctatggaagacaaagcttcttggaggttggcaggatcctcctctaaggtgtaagcacaaaaatctgaaccaaaagttttttctactctagctctcttgcttcttctaggttctatttcattactctcagtgtgctcattatccctaatggtaggaacattgctagtagatgtacccccactatttcttaatttaaaaggaaatctatgttcataaaattcagcatcattagattccactataacatgtgcattcagatcatagaatctatatgctttgctattcaccgcatatccaataaatacacattcataggctctactagctagttttattctcttaggatcaggaatcctaacataagctaaacaaccccaggttctaaaataagacacatttggttgcctatttttcaagatctcataaggtgaa

SEQ ID NO: 278474 - DNA, 596 bp, Cannabis indica
ggatcttctagttgagctttttctgatttcttttctaacaaatcagaatgaagtgttaagttgtgcaactttccaacttacaaactcaatccctgcactaattatctcagaagctagttgaggggctatcaaaactgtggtgcaaacctgcccgagacctcttctactcaaagcatcagccacaacattggctttcccggggtgatacagaatttcacagtcatagtctttaaccagttccagccacctcctctacctcatgttcaaatctttctgcgtgaaaaagtatttgacactcttatggtcagtataaatctcaaatttttcatcataaagataatgccgccatatctttagagaaaaaccacagcagcaagctctaggtcatgagttgggtagcgttgctcataatctttcagttgacgagaggcataagctatgactctgtcagcttgcatcagaacagtacatctcagaccctgtctggatgcatcgcaataaacaaaaaatttctcttgatctgatggaaatgctaacaccggagctattatcaaacgttgcttcaactcctgaaaacttgcttcgcatttatctga

SEQ ID NO: 278475 - DNA, 566 bp, Cannabis indica
ggacaaatgttatcccaatttttgcactctgacgtggcatcacatgatggtgacacgtggaatcgacttcgagtatctgctcggagaatacagtccgaacaggatgcctcatacgcatgcctgaagcaaagcgatcagcaacccgcacagagcgaccaacacttagcgaattcagctttcacatcgtaagtcatcaaagaaatccctataacttggggatcagattgcagagatatggcaagctgtccaaatcccacgatcaatgtattctgtatttattatgcaatctttctgcttatatccattgtaacgagaagggaaatacttcttccccaagctcatagccctataaatagtgatgcatactcactaggcaaagggtcgaaaatattctagtagagagatattatctaagaattcaaatttagagatactgctgtaagagctataagaaaaggaacctttctttttgttcttgagtcaatacaaataacaaggattaggctattaccgaactgttcggggctgaacctttataaaattcttgtgtctttacattgatttac

SEQ ID NO: 278476 - DNA, 882 bp, Cannabis indica
gtttggagtgatttggataagttttggtagtgtttcagtgagtgcgaaaattgagatttccgtgtttcatagtttttagaaattcataagagatcataaatcgtatttttatcataacttttcactctggtgttcgttttggacgttttatataccgttttgtagcttgtgatgagctctacgatatggtgtatgtttaagagccaaagtataagttttattttagtgtatttataccacgacgtttggtagaaaatcctaaattgtcttacgcaagtgttaagtggtgttttgggataaatacttattgatttactattgttatgacatagggcccgagattatcgatcgttctccaagcaggtcggccaacatacctgatccggaacttgaggtaagaaaagtataatgtaccacatggcatgacaggttctcaaattatcgataatctgattaggcaatgataatataatgatactatagatacaatatatggtctcacctgattaggtgatgcaatatatctggcgacgtaccaggcaaaggtacggcgtcagtggcatatgatgagtaccgagcgtaggtacgagatcgtctgatcagacaatgcgatatattagtgtcaagttgtggcacgagctcacttgactaggtggcgcaatgatattatatatgatattgcattatgacacaggcttgcctgattaggcaatgcaaatatatgagcatatctatatctatacatatgactgattatattacctactattgaatgttatagtttaatcattttgtgataatgaaacgtataattagctatttaatgtatccttctttattacttttcttgctgagtgtatgtcactcacgggtgctttgtgg

SEQ ID NO: 278477 - DNA, 513 bp, Cannabis indica
acatacacataaatttaaatatatatactaacttatttattttagtaatgaatacatatatattttagtgtaaatctaaagatgggtacatatatattgacatatatgtatattggtttgatttatatatatatggagatggaaatagattattattggagattaagaaacaatagtctttttttaaataactgatctaatccgcactattgcggattgaattggatttaaactgttatgcggatcggattggattcaaaatatgaaatccgcacttagtgcggattggatgttgtttgatcaaaaaaataaaaattggaatcgaatgaacacccctattaaaaagtagtatctcatattatttatttatttatttttttgacggatagtatctcatattatgttaaattaatttaagttttgacacgttaattaattttttatttttaaaaaattaaacttctaattgagtgaaaaaaactaattaatatatttaaatgtaaattaaattaa

SEQ ID NO: 278478 - DNA, 618 bp, Cannabis indica
aattgtcgagttggcatgttttggacaatgtcattgttccggtcaggacggttgaatcgagtttccacttctcgaaagtacattgagcaaaaggttaatgcctcattaaccacaaaagattcagcaatagagccttccggacgggcacgattcctgacatattgcttgtacacagacattgaccgctcaatgggatacatccacctgtactgcactggtccacctagtatagcttctttagggagatgcataactacgtgaaccattatgtcgaagaaagccggtggaaaaattgtttctaacttgcacaaaatagttagaatatttgtttgcattttttctaaatccgaaacattaagtgttcttgagcataattgtttgaaatacacacacagctcaatgattgtgtcccggatttcttttttcaagaacttacggatacctgccggtagtaaacgttgtaacaacacatgacaatcatgtgatttgagcccgaaaatcttgcccgtatccaaattgacatttttgtctaagtttgctgcaaaaccgtccggaaatcgtacagacttagtctgcaaattcaattcgttcttgaacactaagtgtgtaactagctgg

SEQ ID NO: 278479 - DNA, 565 bp, Cannabis indica
agacaaagacctaaacctgaaccaagactacgactcgaaaccgaacctagaccgggacccaaacccacacaataataggcacctggacccagaatcagaatagggacctgggaaatagaactaggaccgggacctagtacctgacccagacccgaacttgaacctaggacccagctcgtgacccgacactagaaataaaaccagacttcgacccgtgattggatccggatctcgacccagggcttggacaaaacccatagtcggtgtcttgatttgggacgaagccctggacctgaaccttgatgaggacccgaatccacacccgaacctgaacccagtcccaaactgaaaagtggacgcgaacacgtaccctgtgacccaaaattggaacccaaaccggaagttgacagggactggaactagggcttggacttggaatcataactaaaattggacctcgatccagaaccgtaactggaccaggactcggactccaaataagacctagacccgaattgggagccggacctggatcccaacgcaaacctggactcgggaaccgaac

SEQ ID NO: 278480 - DNA, 976 bp, Cannabis indica
ttgtttgggttcccaagtcgaggatccacatcttcatccccgccttcggcggttccctatttagcaatattttttccctgtccgaactctagctagaggatacttcctttttagccttggttagggcaaggttgtaacattctcgagcaacttgctgatttcctctcaaacaccccaccccattctttgttggaaacttaaggcatgaatggaaaatcgacgtaaatcctttaagtcatataaagctggtcggcctaacatgacataaatgttgatggaacgtccaatactaaaaattgtgccattatagttatgctcttcagagcctgcccaacagtgaggggtaggcaaatatgccctagaagtacaacactttggccagagaaaccatacacgggcgggagacagggggttaagtatttgagttggagccccatcttttcatatggtgtcttgaataagatgtttgcagaggctccattgtctatcatggttcgggccaccatcttgtgtgctatctggacttcgacgaccaatgggtcattgtgcgggaaactaatcttgacatcttcatcactgaatgttatagtgggctcccctgcccgtggtattttggtttcctttcttcgcggccagaacacttcatcttgctcatgctgtactgttagggcatacctttcccgggctttgcctgaatctcccgttatgtgcggtcctccaataatgacttgcagatgtccatctactagtggtggtagtaaatcttggttgttatcgcccctttgattttgatcagccttgacatacttttgcacgtgcgaattattttttcttatcaaaaattcaatttcctgcttttgattgttgcatttgttggtgtcatggccagaatctccatgaaaacggcaaaacttggtcatgtctctcttgctcacgtcttttttcatgggtgcggcttcttctacggggctaatga

SEQ ID NO: 278481 - DNA, 537 bp, Cannabis indica
accatcatcatcatcaacttttttctcaatcgagatggaggcagacccacaagacttagatgaaggtgcgaaactcaaactcgctttgttaggattttgcgaaggggagatcggaagggggcagaagggagattgcttgtgctagaggttgatcgtcggtgccaaaatgacattgacggtgttggaaggagatggtattagaattattattgtggactaatataatcatgagcttaatatgccataaacacaatcattaactatgtgcctaatatttactcactaccataatgggatggttaataattaataaatgtattagaggcacatgagagcaccctaaaactataattgactcattaaattatagtccaccactaattatactcattagcccaataagcctaataaaaccccttagggttaggtgttggatatataaaggattaatatgtgttagtatgtgatgagagtgtgtgtgtgatgatgagaaaaagggttttgctttcataacctcctcttctaccatcttgggat

SEQ ID NO: 278482 - DNA, 634 bp, Cannabis indica
agataagtgttatgtcctttctaggacattgacaaagtatactagtatcggatgtatggagtatacattggattggaccgatattgaacttggataagatatcataaatttactattatatctttctaagtaaatatcactggttgatcttaggtctatggatcttaatcctgatattgttaggttcagcttagctgtattatttatgttcttaaagtctagtcagctgaacacttacatcttggaaacatgatagtgcaattaagtgggagcgctaatcatagatatggaatctataacttctataagtatttagaagtgaaatgatgattttctttgagcttggcttgatagagataaatgattgaagcctcatttcagtaattatattagtttactgaaatatcatctataggtagctaagtgttttaaggataaaatacattgaagggtagaagggtaaatttatccatattcagtgtagatcatctatagagaatctttgactattttgattgtaacaatggataatcataacatatctatatcttggtacatatagaacgttctatataatcaagagtgaaattctgaatctatagtggcacaaggaggaattaataaggtagagaat

SEQ ID NO: 278483 - DNA, 608 bp, Cannabis indica
aggtgatgtgaatgtgaatggagcagctcagcacaatgcctatatgtgagaggactcaaagcaaatctcatcagcattggccaattgtgtgacgacaatctctctgtaagtttcactaaaactcaatgtttagtttcatctgatgggtgtgttgtcttaacaggaaacagaactgtagaccagtgctatgctgtatgcaataccatagtgtgcaacaggaccttcttggacaaacctgacttatggcactacaggctgggacatttaaactacagagatctccaaagattggtgaagcttcaagctgtaaggggaattcctgacatgaaagtctccaaggagagagtatgtggtccatgtcagcttggaaaacagcataaggcatctcatcccacaattaatagacttctcacctctcgtgtgttggaactaatgcatgttgacttaatggggccaatgcagaatgaaagtatcagtgggaaaagatatgtaatggtcttggtggatgactactctcggtttacctgggttgaatttcttagagacaagtctgacacatttggatcattctctgccttgatactgagactgcaaaactgagaagactc

SEQ ID NO: 278484 - DNA, 687 bp, Cannabis indica
agcattaatgagccatctttttccaattctcccttatttcctatccgttggatctctattcttttaatctgacggatgtaaataccattttagaccttgtgttttgcaaaaattatagattggaccctctattttgttaaatgataaaataaaccttgtattttccaaaatgttaaaaataggactctgagcttaatttttgataactttttttttaatataaccaacttgaagacaattcctaatacgaagagatacaaaaaatatgaacagttttgtcataacacatttagatcaaattattattaaattttattttgacaaaaaattagtttagggtcctatttgtaccattttagaaaatacaaagtccattttatcatttaacaaaacagagggtctaattggtaatttttgcaaaacacagggtctaaaatggtatttacccaataaaatatctatgtaatttttatttttggggtattggcggctaaactacctgaactttacagtttgtaacacttaaccacaaaatctgaatttttggcggctaaactacctaaaccctagttctgttttgctatgcacacttccgtctaaaaatcacagttaagtgccacggtggactgtccacgtgtacacacttgtacacgtggtaaatttttagtggtccacgtaatattagtt

SEQ ID NO: 278485 - DNA, 221 bp, Cannabis indica
atgcatgcagtacggacagtatgcatgcatgcatactgtccgtgcgcgtgcaagggaggagctgatcgaggaatgccagcacaggaggctgcatgcagcctctccgcgcgcggaaggctcggtttcagacacgaaaccgtgtctgagcgcgtgctgtccgagggaagcccctcatgcgcacgcgtgtgacagttgcaccatcccgatatttttcgaaactt

SEQ ID NO: 278486 - DNA, 503 bp, Cannabis indica
ggatgaatttattaatcaaaaaagtaaatagatgatcacatgaaccaaataacacattaaacaagtaatgaaattaaatctgtttctttattgatatttgaatagagaagattacattgaaatagagttttatttagggcacaaagcccaacactaaccatttccaaaagcgtgcgattccgtctttctgcaactccattttgctgtggagtgctaggggcggttaattgggattcaattccaagttcaattaaatgatctttgaactgcatatccatatattctccacccctatcggtttccaagatctttaaagttttacccaattggttttgagccaatgcaagaaattcctaaaacttctcaaacgttttcagaatttcttatgcataaggttaaatatgaccatatcttagtataatcatcaataaaaagtgacaaaaatactctataaccacctctagtctttgacattcaggggtccacaaaaatctgaatgcact

SEQ ID NO: 278487 - DNA, 809 bp, Cannabis indica
ctaaagaaaaagctgttggcctgtaaaaacaattggcccgaagaattgccaagagtgttatgggcctactggacaaccccaagaaccacaactggccacttgccattttcaatggcatacggttgtgaagcaacggtcccagtggaaacgctattcccatcccacaggagaacgacttatgatccaacaacaaacaaggctttattacaagaagcgttagatcagattgaagaactccgggatgagtcgcaaatacgaatgacagcttatcaaaagaaggtgactaaacactttaactcaaaagttaaaaatagaaaattcgctattgatgatctggtcctaagacgggtcttcccagccactcaagaacccagagtgggggtacttaggcctaattgggaaggaccatacgaaatcgatgacgaaatcggctccgggacctacaagctcaaaagaatggacggaaccatggtgcctagggcctggaacgctgattacctccgaaagtattaccaatagtcaagaaatataaacttatgctctgtaaagtaaatttgtaccggataagtatgtgcaacctccaaattaatatttgtaaagctgagtgccctaaaaataattttcatgacactcagggggggtagtaaggcataccacacggacaaatgtaaaacaggccaaaagtttaacgaagttaaaatgcaaagcaaagtatgtatttaaacataaatataagatgttcaggcccagtagcaagctctaaaaaaatatattaagggcctggggaagggccttaaattgtctcccct

SEQ ID NO: 278488 - DNA, 515 bp, Cannabis indica
cagctttggccttgcccttacctacacataaacatagcactatgagtcaatagactcagtaagaaaagcataaatatataacatacataaatccagggttatgatcagacgcccatagccctaaccacaaacctaatccccgtgtcccacacggtgctgagtctcgaacgttcgtacgatggtacttttgacatggtaacaacttatactcggtatgctagtcatactctagccgtaccgatgtgctactatatcagcctatactcggtacactagtcatactctagtcgtaccgatgtgataccgtcaaacagtacggtgctattgaccataatatcagccgatactcggtaccctagtcatactgtagccgtaccgatgtgatactgtcaaatagtgcaaaagccaacatacatatctaatgtaatctaacaggcttactaacatgcacgccaaacatgtaaatacataagcatactattatactaatcttacctcaattctgaattcaggtg

SEQ ID NO: 278489 - DNA, 505 bp, Cannabis indica
accactacccgacctattttcttgttccttgtgttgtttctgttcatcttctctttcagatccaaaatggtgagaactaagaatctagggcacaccaaaaatttggaagaaaccgttgcaactccttccaatgcacctcctgctgcttcagtccctcctcctactgttgcaaagtctggagattcatcgcttccccaacgtgaatctcaagccgagaagccaaaacgtcctcccaagcaagttgctcgcaaatcggtaagacctcttcgtacctgaacgtcttcgtctaaatcttcgaaggaatcccctccaccgttggcagttcctcctcctgctgcatcagtccctgccaccactccaacatgcccttctactcgaactcgagcctagcaagcctctgctgagaaggaacttcgagcttctcaaagtcatgataaggcagtccctccagccaagaagaaaatcaagaccaatcctccctcggcttcttcaagttcaagttcag

SEQ ID NO: 278490 - DNA, 649 bp, Cannabis indica
agccgttactcaagtgtatcgacggagaagactgcgactatatactacgtgaggtacatgggggtatttgtggcaatcctacaggaggtaattcccttgctctaaaaatcatgcgacaagggtattactggcctaccttgcgacaagatgctttcacttttgcaaagaaatgcgaaaaatgtcagcgaatagccacatatgtccatcaacctccaagcaacttgcattccatcacaagtccttggcccttcgcagtgtgggggatcgacttaataggcgaactacctaaaggaaaaggcggagtcaagtatgttgtagtcgcagtagactattttacaaaatgggctgaagccaaagcactcgcaaccattacagcgactaagttgcgcgagtttgtctacaactccataatttgtcgatttggcatcccttacaagctcatctcagataatggaaagcagttcgattgtaaggagatgcgacaattatgcgacgacttgggaattaaaaaagcattctctgcagttgcttacccgcaaagcaatggacaaactgaagcagtcaataaaataataaagcacaccatcaaaggaaaactcgaagagcgtaagggggtatggccagacgagcttccgcaagttctatggtc

SEQ ID NO: 278491 - DNA, 644 bp, Cannabis indica
atcatgattatattccactgtgctgacgacactataatcatgaataaatatatgtatatatttatatatgctctggacttaatagaatttatacattaaatataatcctaaaataaattttgtgaaccatgcaacataaaacgatttctgatcttttattaattagtaaatctgattacattgaaatgaattttatttagggcacaaaatccaacaaactcccacttgcactaatataaaattaaaagtgcgtttcaatttatctcaataccttgatatccagatcaagagtattatgtagtattatctctgtaacaggatctggcaggttgtattcaatacaaactttctccagcattacatatccttaatcataaaatcctagatattgtgaaattcctctctatatgtctaatcctctagggatactgaattctttactttttggcaactacatttgtgttagtctggaagtagcactagtagttaataaattaatggtacaatgccaaatactgtaaagaactttccataggctgaataagtatctttcctgtaactttatcattcagtctcactggtagagttagagactcagatagttattttacacttctccaaaatcactactccacccccagagt

SEQ ID NO: 278492 - DNA, 1328 bp, Cannabis indica
gtgagatcacttggctgttggcactctcgtgactttggcatccacacaagatcccgccatccttattgtgacacactgccgccattacatctccgaaaatcccgtattccatgaacgcacaaagcacatcgagattgactgtcacgtcgtccgagaaaagatccaagaagacacactaaagctaattcatgtcaccaccaaaacaacattactgacatccttaccaagcctcttttaccaagctattttcaatctattgtaaccaagatgaacttaaaaaacatatacagttcatcttgaggggagggtattaatttctgtggcccactgggcctttattttcggcccattcctctagggcttctcctcatcccttctctataaatagacactttgtaatcacattaaacacttttggcatttctgtcgtgtgtgtatagcatatgaacaaagatagtcttttactttctatcaattttcaatttagtttacattgttgttgcaattaagaaaagttaaaaaaaaaaaaaaataccattaaaaaaaatagtgatgatatttttttcctacatttttgtcttgtttactttgacacctctcttcattttatttctaaatatctcttttcttaattttatagacctttctatagatcaagatatacacacacaaaaaaatatcgtaattccaccaataaatatatatagatattttttttatatagatatgaaagtatttagagaaagtaatcagatagataatataccccactcatgatgaaatcattacaagtaatcttatatatattaaataagatatgaaagtattttgagtaaatgggttctcatatcgaaatgacttcaccttagggaaagaaaattccaacatgtttagggatatatatgcttattacacacatgatcatattatatatatccacttcttttcttttcttcattcatgcatgtataaatgattacataattatttataggaattcataattatatctagaaagaaattttttttaataagtttgacaactaataaatataatatagaaaaatttaattgttcgatggttctagattttttatatatttcttttggtatttaaaaaaattttatttaattttttttaatgatcgtatatattgaaactatttaagattatttataaatttttagtaagatttttaataatttacaatactaaaaataaagacttaaacaattacaaattaatcatatgcataaaaaacaagttacacttataataaaataatgtaaatttatttttagtatattggaagctattcaaatttttt

SEQ ID NO: 278493 - DNA, 752 bp, Cannabis indica
gaagagcctaccagactgtaggtcagcaaacgctgaacgtcattccccttggagaaacggaggatgatccgacgataaatacctcccagacaaccaatggtcagtcgtccaatcctcgattatgagttccacttgtgggccaagaggtaggcgggcagaccttgtacgggaattcattaggaggagccatacctgacggatccaactagaataatggtattattccaagcgaatcaatcgctaaggcagccaggatcttctatgttcgataggttgggaacaacccatgacctaagaaatgatctaaacagaagaagggcaacagacgagtagaatactacaacgatcgtgcaacccagagcccatactcaaatccccgctcagaacgacgctgacgtaatccaaaccgaccaaaatgccaagcaagtcagcccagccgtacaggcccagctctacgagtcgaagaatatgtttcatggcatggccggacagcgtaacaatgatcttgagttagaccgtcctcgcggaactcctttctcaccagagatcaatctcctgccactgcctcacaagttcaaaatgccaacgtgaaagatgtatactgggagagaagatcctctctcccatctcaagtactttgagatgcaaatggatttacaaggagtacgaggggacgtatgctgtagaatcttccccgccactctatcaaaagccgcacaacaaatggtatttcaagttggctcctggaaagt

SEQ ID NO: 278494 - DNA, 614 bp, Cannabis indica
ctcttcaagagggaacaagagttggcttatatcaaggcccaagcggccgctgggaggactctgcgcctggaagctccgtcggagcggaagacccccaagcccaagcctgtggtcccggttccaaataccggagctcccgatgccagcacttcgggttctggtaagtcccctttaacaatacattacgttcctcccatccgtgagtatacccgtcttaggccgataggattcgatgagcgtctccgcaggtttagaatgccttctacgcggtgggggaatcatgccaaggagtattacttttcccacttaggtcattatttaggtcggtcccggatgggttctggacctccagcgcctatccctttggatcattcagcccatttatcttccagctagttccttccctcggacagctttctcggggatgatgaagccagttctatgattcaggactttgctagggccgaattagagagtcagggtaggactagttttattacttttttgctaagtgtagtttgttttcattaatttcctaacacttatttctttgttgcagcagcaaggcccatggacaatctcctggcaactcttgctgaggcctacagtccgga

SEQ ID NO: 278495 - DNA, 881 bp, Cannabis indica
ttttttctttaaattaaattataaaatcagaaaaatgatattaaataatcatttaattttattgaatatttatttatttttttttaaaaaaataacatgaaatttgaaaagttgttagcatttttttagaaaaagatacttaggttaattgaaacctaatatttcaaaattataggtttaattttaattttatttatttattatttatttattccgaaaaaaataatttttttatttattttattttcgaaattattaaataaataaattaatttaaaatttaataaattctatgttgacctcgcttttagccaatgacaatgagtcttatttagtaagcgataagtgatttatagcaattgatatataataaagcgatgtaaagacacaagaattttatagaggttcaggctcgaggagctcggtaatagcctaatcctcgttatttatattgacttaagaacaaggagaaaggttccttttcttatagctcttacaacagtatctctgaatatgaattcttagataatatctctagggtaaagtctcgactaaactgtttgcgaccttttgcccagtgaacatgcatcactatttatagggctgtgaacttggagaggaagtctttcccctctcgttacaatggatataaacagaaagatcgtgggataaatgcagaatacactgatcgtgggatcgtgggtatgccatatctctgtaatctgatccccaagttatagggatttcgttgatgactcacaatgcgaaagctgaattcgctaagtgttggttgctctgcgcagatcgctgatcgctttgcttcgggtatgccagcgaggcatcctgttcgggctataccctccgagcagatactcaaagtt

SEQ ID NO: 278496 - DNA, 528 bp, Cannabis indica
tgcaaagcccagtaaggaaaaacaaaatactatgtaccagcattcacacatcatagcacaaacatatacatcaaacatacaacaacctaatcataagtataaatagaggcagccacacaaatactgaaataccacacactcacactcacaatcacactccagcttccatacaaatctggagtgtcttacgttcttaaccagaacgcagtaccaataaccagtgcacccttacgtacactgcctcacttaccacatcaccatacatgtgtggtttccaaccacttccaagtacctggaacatgattaaacagccatatacaattcatcgataaaacactatttcaccgaaactatcacattccacagtttcaatacaatttattcaagcagtcatactagatactcaaaccatataaaaagcaagtataaagtataattatttttccttacctcaactccgctgtaattaactcctacgataccttctaggccctataacaattagtgaaacccttagtccaccgataa

SEQ ID NO: 278497 - DNA, 665 bp, Cannabis indica
aatcaagcgtaatatagccctaaaactagaaacaaagagtgaaaactaaccgaaatatgacccgaatcttaaactaattttagcctaacaagtagacccccccacacacacaaatatatggccaattcaggacgttgaagatcaagttctaaggtaattcttatatttagtccttgatattatagatatgcatggattctacggagaacataagcagaaaatatgtgaagaatctaaaaaggaatatgatcaagaataaacaataatgtctataaaattatacttttaaaactataaaaaaaaaaaaaactacaaaataattataaaaataaagtcacacaaaacaaatgtataaaacaaaaagacaaacccataaacatatatggaaacaaatctaatataaacaacaaaatatataagaacactaaaatctgaaaaatcaaaaaaagaacataataaccaaaacataaaccaatttaaaggaacagaataattacaatcaaaaaacacaacaaaaaaaggttaatacaacaaaaattaaaataactaaaaaatataaaccctaaaaagaaatcaaaacaatatacacaaaccaaaaaataaaattaaatgaaaaaaaaaaaaaacaaaagttggggaaaaactaaaacgaaactaaaaacaaa

SEQ ID NO: 278498 - DNA, 702 bp, Cannabis indica
aagtaaatgaatttctggttttgtatccctcacacccgacccctctctctctctctaaccctttcttttagaaatcttgattttgagaaaaaagggcttgatttggtgtagctttgtggatgttcttgcttgggaagaacttgaggaacttgtggtaatgatctttagcctttttgatttattaatttctgatgttatgtaatgaattaaggtgttcttgattttcttaaaattatggatgcatgatagtggaattagaggtgattttggtgttaatcttaatgttttagcttgattatattgttgagttgaggagtatgtttactagtaatttcagatgagatttctaaggttatattgtgtttgaaatctaaccttaagttctgatttttgttgtgttcaagcatgaggtatttggggttttgatgttcatgattatagacttgatttctaggttgaattttgctcaagtgttgagcttggcttgagtgttgttaatctaatttgtgggatacatattctgtggtgaatttaagcatgaaatttgtgtttttactctgtgatttggttgaggttcgaatatatggtaaagtgggcatgtttaagaccttaaaaatggagttttggggtgttctaaacccagtagtcgcgacgggattttcggccgtcgcgactggatctggcagtgagaaattctgtttt

SEQ ID NO: 278499 - DNA, 461 bp, Cannabis indica
gttcaaatctcttagtaagagaagcaatggcttgatcaacaaggtaaagaaaataattaattctaaaaaattcctctccagataactcaacagatggaatatttaaattttcatcaaattgtctttttcttcgaattgtgcgcctttgaggaaatactggatcgatattcatttcaatagcaatttccttagcattagccaaggcgttataaaaacctgtttctctatatcccacgaaaaaagaaattaacccttttattttgtccatagcaatatcaataagcatatcctttgattgtaaaagcttactaaccaaattaattgcagataagatttcaaaccaaataataattgctattaaaaactcaaaatcaccaagttcatttattgctaaggattttgcttcacttttgattttagaatcaagttcatccttttccgacacttcaagtaaagcttct

SEQ ID NO: 278500 - DNA, 591 bp, Cannabis indica
taagacattgatcaatcacccattaaaaaaataataattctaacacaaaagaaaataaataaataaaagtactatttataacctatatggataacaactaaaatgtctctaagcaatgtgggactttttagcttgtagtgtaatttatttttcaaataaaataagaagaatgtgtcacaaaatagaaaaaataggaagaaaaaaaagtaaaaagccacctaaactctcttgtgcattcctttatatattgatatattgattcttaaaaatataaaattaagcaattaaataaaattagaatgtgaggtgcagtttaaacaatgctgccaaatagaacaaaatcaattcatgattgctttagatactttcaattctctgagtctctactagttgtagtgacacccacatgcctagtctgctctttcacatatttttgaagttctcccacaagcgttaatgacaggaaggtctagaagagtgttgcccctaattttgcccaatatacatggaccaatcagacagggacacgtggatcaagcaattcacaatatttgctaagtcttcatgccataaggtaacgtccaggacgta

SEQ ID NO: 278501 - DNA, 750 bp, Cannabis indica
tgagtaaaaagatacttcaagctcttatgatctgagtataactcaaactttacgccatataaataacatctccaaattttcaagacaaagattaccgcagcaagttctaggtcatgcgtagggtaattcttctcatgtggtttcaattgtcgagaagcataggcaaccaccttgccgttttgcatgaggacacctcctaatccagtacctgaagcatcagtgaataccacatatggttcctcactattaggaacagtgagaacaggcgccgaagttaatctttccttcaattctctaaaagcttcttcgcaactatcatcccacataaactttacttcttttcttgttaacttcgtcaaaggcatagcaattcgtgagaaattctctacaaagcgacggtagtagcctgccaacccaagaaaacttcgaacttcagtgacattctttggtctttcccactgtagaatagagtctatctttgcaggatcaacggtgataccatcttgagaaattacatggcccaagaacttgacttcagtcatccaaaattcacacttctctttcttagcgtataattgatgatctctcaatgtctgtaatactgttgtcaagtgttcagcatgatcctcacgtgtcttagaatacaccaagatatcatcaataaataccaccacaaacttatccaagaaaggtctaaagactctattcataagatccataaatgcagcaggtgcattcgttaacccaaat

SEQ ID NO: 278502 - DNA, 964 bp, Cannabis indica
ataacacaactatgttttacttactaaatatactaacacatattttatttttataaaataaattgttcaaataattatactattttaattattaattaaaataaaaaactaaaatattaaataaaactaacactacgtggcttggcacgtaacaatcacctagtatatatatatatatttatatatatataaataaaagaaagtttaaaaccttccatgtggcagcctaattggaattctttactaatctctcttttccgaattttttctaattttttcttaattttctaatttaatgtgtattttaaacctgttaattatttatttattaaattttataatttattgcacttaaaatgaaactatcagaagaaggcgaggggaacgtttttggaacgttttttgttaattatttatgtacaaatgataaataatattgcaatataaaagaggtttagcttttactccaataactacttttaagttacaattagaatcaatatcaatatatcaatatattcaatcaatctacctatttatctatctatctatcttctatctatctatataaggaatgttagaagttatgtgcattcttaaattttttacctagcttatctatttatgggaatttcatattttacttaaaaaaaaaatacacatatatttatattatcaatcaaatatcataaatacaattaataatgtcttttcatttttctaactctcacatatataatactcaataataaataaaattaataatgtctttttatttttataactcttaaacatatagtactcattattattaatattattcttatttaaataatggtatcttttcattttcataacttacacaatataacaaaaataattacactacataaattatatttgatgttactattgaaagtataaaatgattgttggattccttacattttatcttttcttttct

SEQ ID NO: 278503 - DNA, 506 bp, Cannabis indica
gatatcatctcattttatgagataagaaaagtgaactattgagttacacttttttgtgtttgttcatttcatagcaagagcatagtgatcaaagtggatctatattgtgaaatgagctcatacaattggaaggacaattttagactcaaagaaagtggatcattgtggattcaaataatgagataaaagattataaaattggagaagcaattttgaatcttaaaaagtaaagtggtgaaacaaaattgatgagaagtaattttgttaactttggactaatctcaatgaggagataaccataaaattgaagaagcaattttatcattatgtgaattttgtgttatctattaacaaattttaagtataattttgttaataaaggacaaataatggataaaatattctattaatttgtaagtggtatttggagagattatcatgtgatatcgaaaggttcatgataattttgagtgcacattattttgaaagataatgtgtagagaaca

SEQ ID NO: 278504 - DNA, 516 bp, Cannabis indica
ctaatgttgacaacatcctttcagaatcaatagggctttttgaggtttataaagtatggcttagatatttggaaaaagaaaaaaaaaattggctaagatatcataagcacaaaagtaacccacaagcttcttctaatttcaaatttcccaaaatgttcccacaactaaccaagattgagaattttttttttcttttcccaacatcactgaattttattatttttcttgaatcatattttttttttcagtgatattgatcttaccaaatatctattttttttctcaatcttacaagttttgtttttttctatcttctctcacaccatgtattttgctcccccaaactaattgtatagcttatgatatcattgataaaatagtgaggacaaaattaacagtgtggatacatatttcggttcaacaggggaagaacaaaacaagtttagactccaaagggttaactaaggataatcatttcatggtaggcttgaaaggctcaaaactatccaacaaatg

SEQ ID NO: 278505 - DNA, 517 bp, Cannabis indica
gccaaggtgagatccttagaggaaatgcaccaggcggacttggagtccagggctaacttggccgtggagttgaaggagctcaaggacttaaaagaccaagccttcaagaaggctaataaagatgagctcctctcccgtatctcctccagtcgttgcatcaagtgcttcaacgacggcgtctacatggcctggtcgacaaatggccagagtatcaagcttgacttctacccaacctgcggagatgattgccatattctgggagaagaagaagaagttggacgccatgcttggggcgcgcattggtcctcgccttcctcctcgtattgattaggccgttccgaatccagcccatttcaaccaagatttttctctaggattttatatatatatatatatatgatcttttttgacgcacatatattttttctttctggacctgccctttgggtcaggatgtttatacatacgctctttttggcatacttttttcttttggacctgccctttgggtcaggat

SEQ ID NO: 278506 - DNA, 584 bp, Cannabis indica
tttttcttcttctcttgccgaaccctagaagcagctgggaaccaaggaaaattcatttcatttcttcaatttcctgagctaatcttaaccctagaagctagctaagtggaggtatgatccttctactcttctcttaattaattttcttgagtttagttaggttttggtaaaggttttcaatgaattctgagctggggtataaactgagggtaaggtaggttcttagggttgatttgaaacttgtttgaatgaagattgagtgagattaagggctgttcaattgaattggtgttgaaagtgatgtttagtgcaaattgtcaagtgagatggtgattttgagttaaatggtgaattgtgattaaatgatgtgttgaatatgttatacttggtatattgaactgttctggaaatgcaatttaggtctgaaatggttttggttcgagctgggggagaaaacccagaatttttctggtctgacagcaaccggtcgaccggattggttctggtgtatcagaaccggtcgaccggttacagcaggggaaaatttctcgggtttttctctgaaccctgttttggctcggggt

SEQ ID NO: 278507 - DNA, 698 bp, Cannabis indica
acctgacaagaatcgccaaactaggaccctagaaaaagactaggaccaggacccgcccctaaaccttgaaacgaacagagacctagccatagacccaaactgagactcgaactcgggcccggacacggtcgtgaacccagaccagaacagagaccctgacctggacctaaatctgggacctgatcccaaacacagacttggacctagatagggatacggatatgaacctggactcggacgaagacccaaaatgggatcgaaatgctggacctagatctcgaccgagatctttacccagactcaaacttggacccgcactcgagacccgatcctagacccagattggggtccagacctagacacaaacctggacacaaactcggaactgaactcaaacccatacctagaataagacccaaagctagacccggaaccggacacaaactcgaacccagactaggatcagaagcaaggacttagaccaagaacttaatccgcactcagatcgggattggaaattgggactcggacccaacctagacaaccacccaagacgcgaacccacaccggagcttgattcggaactagattgaaatccggacccgaacccaaactcagaacagaactctgacccgaattcaaacccaaactcgaacacagaatcgtaaatggaactagaaccgaactaggactaggac

SEQ ID NO: 278508 - DNA, 705 bp, Cannabis indica
gacgcctgttcctcatgcatgcacttttgcctataaaagccaccatctttccttcatttcggttactttccattccttgccatttttgctcgaatttcccagagagaaaattcttcaaaaacagcacgaaccttctgaacactttgccattttttcccagtttttccttgcttgctgttatcagtccttctcgtctttactcgactaaaatcaggacccccagttcaacacttcactgtaagtttcttgcatcctttggtaatgacatgcttttacttgctttgtttgttttttctgggttcgcattttgagatttctgggcatgcaagtgtttaggttcttcatgtattctgttttgtgtttactgctttagttgtaggatcgccattattatgcctctgttattatcgtgcattttcgttgaagagaaccatatgttcttcgttcaacggttgcttagggcatagaatggggtctttttctttctgttccccttactgtgtaaaaccaccttctgcgattttactgcacccgacacttgttcagggaatctttctagggtttcccatgtgacacgtgtccggagggggcctctttccagcggttaggggacccccattccctttttcttgacttagggtttggtatgggacctaactgctggaattttctctttcttttttgtttttcacagaatagaaaatg

SEQ ID NO: 278509 - DNA, 510 bp, Cannabis indica
ggaggtggtggtagttcgacgtatgcgacggagaggagagggagaccgaagggaggaggggtgggtagagatcgatggacgagagagatgagaagaaagggagatcgagagagggaggaagatggcgagagagaagggcaatggtgcggatgcgtgggtgaggtttcggagagttaagattttcgttttagggtgtggaaaatggagaagaaataggtgagaaaaaatagtgggcatgtcggaaatagaaaaaaagtaggtgggcacgtggaaaatgtagcgagaagtaggtaacgattttttattgggctcttatacccgacggttttaaaccatcgcctatacgggtccaataaaatttacgaatttcaattaaaatcgttgcctattcctgtaattactgttataaaccgtcgagaatactaatttttcttgacggttttaaacagttacttaatttttttagcgacggtccccaaaaaatatgtttttaagactgtcgcgaatttt

SEQ ID NO: 278510 - DNA, 478 bp, Cannabis indica
ttcaaaattgcatttcattatgcaagatgattttgaatttatcttgaaagatagattaaagttgtaaattaattaattttgaatcaacttaaatcaatgatcttttcatttaatgattaatttaaaataaaggaactaaaatatattattagaaattggattaattagtcaagaaaatctagatagataatatttttgcttgaagtattttttctaagtaaagtttgatttattttaatgtatttcgaaaattgtatatttttggaaatacaatatatatatttgtagaaaattttaatttgagttgcaaattaatttaaattaatacaacttaaattaagtaattttcttaatatttgttggaaaattaatactaagatggaaataattcattttattaaccatatgagtttaattttataaatattaaattaaattttatttagagttttattctaaatttaaaatttaataaata

SEQ ID NO: 278511 - DNA, 558 bp, Cannabis indica
acaacatgaaactaaatcccttaaaatgctcctttggagtcagctcgttaaagtttctaggcttcatcgtcaatgctcgaggaattgaagccaatccagaaaaaaatccaagccctcttggatatgaactcgccaaaaaaaccaaagacgtgcaaagcttaactggtcgaatcgtcacacttagcagattcgtgtcaaaatcaatggataaaagtgttctattcttcaacatcctgtgaggaaacaaaaagttcgagtgaacagaagaatgtgaaagagcttttcaagatctaaaggcacagctcgcaaaacctcccgtcccttataaacctctggacgatgaggaattggggatatacctagcagtaacagagcatgccgtgagtgccgtactgatcagagaagaggatgttggcttttgtgccctaaataaaactcatttcaatataatcagatttacttattaataaagatcagaaataacatttatgcatggttcacatgattatatgtatataatgtatgaattcttttttaagtccagaacatatgagtttg

SEQ ID NO: 278512 - DNA, 542 bp, Cannabis indica
cttcaggtggttccaatgaaagggaaaaaaaattcagaaattggtgagaaaagggagttaagtcccaggttaatcagtccgtttgagttttcggaaagggaagatcgggtaacttattagctagccatactccctgttttatttagagtttacaacatatgcttcaaggttttagaaatacaaagtggaataaatccatatacagagctgggagaatattgaatttcaaacaaatttgttatatgaggaacaatcggtacagattttagaacagaaaagagaaagtgttgcagaaccaaaactataacactagttccagtgctgtgaaagaacaataagattgaaaggcaatttgaaagatgaagtcacagttgcgagagctgtgtctcgagttgtttgaataaatttcgaggacgaaatttttataaggaggggataattgtaatatcccgagaattatattgatatttatttggccatattttattaaatatgtgattaagtgggtattagagtaggattataatcctacttaaactaat

SEQ ID NO: 278513 - DNA, 795 bp, Cannabis indica
cgggcaaccacccagtaacccaaaacaactgaaacaaaatccaaccagaaagagaacaatcattaattctgacgacttcacttgagaagacgaccggaatcaatcaaaacaggggctgttttgaattcatgaaaaaaaaagttaataggtggtatgcacagtaagtgatagtgattgtgtgtgtaagtgatagtgtaagaggtacactttgataattaaaagcacataaaaggtataaatgttgtccataccttatggaggtatttttgtaaataaagtgtcagtttgtattcatgaaataattccaaaaaagaactaaagaaaatataagaaataaaatgtgagaaattaataaaataaaataataataatttctcaggtatctattctatataaaatgtagctatgtaacataattttttgtttaaaggtgtttttaagttttctacattaactttaacagaataccccaattacttaatagaatatttttttattaattttataatataattatatatatttaataataaaaattatgcagatattttatataaaaaaataaatttattatatataaaaattatatttatatataatcacatctatatataaaatatatatatatatatttaaaccttaattttacgactaaacctttgtttaaaaataattaatgatattgttccaaaaaaaattaattaatgttacatatatttaataaatttgttacacttctattctaaccacactttcctaacaacaaattataagaatgtatctatcactatcatt

SEQ ID NO: 278514 - DNA, 670 bp, Cannabis indica
aaacaatgaaataaacacataagagtttaagaaaactttacattgggtgcatcggaatataatgactccttccgttcagatctctagcccttgattcctttatgtagcccttgttgtttggattcttcatagtcttacacactatgattgagataccacttgatgtgtgtgggctttactctatcacaaagggattttgaaattaaagagaagaaagaaaaagagagagaggggcggctatgccttttctgtgaaagaaacaatatacaagtcatagtttcctgaaactaacactttctatttatagaatgccatctgggtttaggttagaattgtatggcattaaaataatgaaaactaaaaaatggtaaaccctatacaaagtggctggccatataagtggataatgggcctcactttgcaattttgccattatgtcatttctcaatcccattttctcaaaaatgccaattttctaatttaaccatttaaatgtcaattcttattatttaataattaaaaattaattattaaataatattttcattcaatatatttattaatttagacatataaagtctcttaattaataaataaaccgaggatctcttttctttacaatttcgcccttgcttagtgaaaattcataaagtagacagagtctaacttt

SEQ ID NO: 278515 - DNA, 572 bp, Cannabis indica
aactctatatgtggacaaataaaaaataaaggatcgagacagtttgatgaacctgtgtttctatacacgagacaagtttgattacatatacctctaaagttctaatctatagccattggtagttcttaattcttatttggagaattgatatggttatatcacgatttccaagatacgatcaaatgtgaaagttttaagcttaaatcccatatcaattgggagattttcttgatggtcaaagtaaggtgaattaaagcttgtccactagaacggttggagcaactggagctcctattacacctagaagctattgttagttgttggctaggctcgatctgtaccaccgggcttacccagctaagtctaccactatacaatagttttgttatgagttgtaaagtggtgactatttggaaatcaatacataaggatatgagaactaaattcttgtttaaagatcacaccatgttaaatggctcgattaagcctggaaaaggtaactaaaaggacacccgagttcaatagatttaatcccttttgaggaaggacatcaagatagtgatgactgtaat

SEQ ID NO: 278516 - DNA, 543 bp, Cannabis indica
aaaattaattattttaaaataaaaatacaaaaaattattttctttaaaattaaaaatttaaaattaaaaaaacaattttaaaaaataaaaaaaaccctaataaccctaaccaattcccactcttctcctccttctcaatctccaccaccacttcgtcttcctcatctccttcaaacacccatccatgacctccaaaatcggaaccctaatatcaaccacttcaagagcctccttctccaactggaaccgaggccaaaggtgcatcgagtgaggtgttaggttatatttagcctatgtttcgggtctgaaaagtaagcattttctcgtctattgatgtcttttggagcggttttacgcttgattttcattgtttcaggttcccggggtgtcaaagttcaaattcagttaaatggtgaaaagacgggacaaactggcaaaaaatcggagaaatctgctcaagaggcatcagtagtcgcgaccaccaatgagccaagtcgcgaccctttttcatggtcgcgacttcgagattttggcagaacctct

SEQ ID NO: 278517 - DNA, 482 bp, Cannabis indica
caacacaaaactagcatgcaacactcatctttttcatcaaaatttcaagaaactaaaagagcaagatgaagaaactttaccaacaattaaagatcacaaaatcttgctaaaatgagcttgaatcaccaagaaaaatcccacttccttgctgctcaaggagggccgaatagagaggaaaagagagagagctttttcacaatttttctaactttttctaactttggaaaatgaaaataaaggttttaattacatacttcagccaatataaatgccacataatcacataatttccaattacaaagtccactaaaggacaaaatatcattggggcaaaatgaccaatttgcccctccatactaaaacaacataaaggcactaaaggggtattttgggaaattctaaattcccggccaatcccgacattcccaatgtctaaataaccgtcccctaatactaacatactaagttgtgattttactgag

SEQ ID NO: 278518 - DNA, 464 bp, Cannabis indica
gatcgtgggattgaggctgagtacactgatagtgggatcgtgtgtatgccatatccacgtaagttgatccctgagttgtagggattgagctgatgactcataaggcaaaagctgaattcattaagtattgatcgccctgcacgactcgttgaatatttcattctggatgtgctagcgaggtttccttctcagtctatcgttccgagcagatgctccatgtggactccacgtgtcacgtcagagtgccaaatttgggataacatttgcccccaagtctatacgagacctctgaggttgcgtgtagacttattccgagctggctctgcctttggatggggacacgtgtcgagcatgaccgttcaagactcgatgtgaagctgactgggcgtcccttcaatttttggctaattaatgctctaacaattaatattttgaaaatccaattttctctctccacggctgac

SEQ ID NO: 278519 - DNA, 581 bp, Cannabis indica
tttcttttcaaagaataacaagattagtagtgcttctaaacatatggaaataaagtatctcactgtcagagacttggtcaagaaaggagacattgtcattgaaaattgcaagaccgagtcgatgttagcagatcctctaaccaaagggttaagtgccgtgctgtttaataaacatgttgttaatatgggcattttagaatcttttgatcttttgggttagtgggagttttgttttctgtttgtttttagaaattatgatttataattttctaaagttatgaatgttgggttttgtgacctaaataaaatctatttcaatataattagatttactaattaataaaagataagaaatcgcttttatattgcttggttcacatgatttatttcatgattatgttcaatgtatattaagtccagaacatatataaatatgtatatatatttgttcatgattatagcatcgtcaacacaatggaatatgatcatgattatatgttcaaaagtttaattcccaagatttatcagttcactagatttagactggcatgataatcagcgataaggtatacttacacctt

SEQ ID NO: 278520 - DNA, 695 bp, Cannabis indica
ataagaaaaacaatccacacctgcagaagtatgttaagatcaatcagggtcaaagagacgacaataaccaagatttgctacctccaccggtagatggccatctgcaagttattattggaggcccacacattgctggagattcaggcaaagctcgggaaaggtatgcccgaacagtgcagcacgagcaagaagaggttatcctggctgtggaggaaaggaagccaaaacttccacgagcaggagagccgaccataaccttcaacgatgaagacgctatcaaaattagatttccgcacaacgacccactggtcgtggaagtctagatagccaatacaatagtgaccagaaccatgatcgataatggagcctcttccaacatcttgttcaagactgcttatgaaaagacgggactccaactcaaggatctaaccccatgcctccagcaagtctatggtttcttcggtgaaggagtcgcacctctaggacaaattcgtctacccctcactgttggacaagctttgacgagcatgactataatggcacagttcctgatattagatgttccttcagcttttaatgtaatgctaggccggccggacttgtatgacttaaacgctgtcacatcaatatttcactcgtgcctaaagtttccaacaaagaatggagtagggtgtctaagaggaaaccagcagttt

SEQ ID NO: 278521 - DNA, 444 bp, Cannabis indica
ctgcttgatgttagtcaaggcactgacctccaggttaacctttcttggggcgacaaactgtctccggaagttggtctgtaacatattccaacagcccacggatcctggctccagtttcttgaaccattcctccgcggacccgcttagagtaagcgggaagcacaaacatttagcgtcattgctgactctcatgaccgtcatgacgaggttgaaccgtgacagatggtcgcttggatcggagttcctggtataagctgccatttcgggcatcttaaagttcttggggagctatgcttccaggatatgcttggcacacggctcccggtcctcatagtctgagtcagagtcgtcgcctttctgtctccgggagactcaggcgatatcttttcagagtgttatagtgagatttctctcacctagaaactcgagaccagactcctcttt

SEQ ID NO: 278522 - DNA, 537 bp, Cannabis indica
atcaaggtaccaatcacatactccttgcaaaatcacctgatgaaatcgaagaaagacgagcagctgcaaacttaaagttgatggcccatcaacaaaaagtggctcgatatttcaataaacaagtgaaagctcggaaattcttcgtgggagatatggtcctgagaatggtattcctaaacaccaaagacagcacgacaggtgtactaggacctaactgggaaggaccatatcaagtggtcgaagttctcgactttggaacatacaaattaggtaagtatgacgaaaaaaggcaactcattccagtaccacgaaactggaatggagaacatttatggaaatactaccaataaagtactaggtcgggtgaccattttaagtactaaatgaacattcgcttttaagtgaatggccttctgggcggactacgcccaaaggtttcagaaacaaagtgctaaggtcaggtaacaactttaaagtacagtttctgatgtctgaaatttgttttatttcatgttaagctaaaagatcaaattagat

SEQ ID NO: 278523 - DNA, 483 bp, Cannabis indica
aggagattaagaaggctgttattcagtttctccgtgacaaccaagaagtattttcttgggcacattctgatatggtaggtataagtccaaatgtcatgacccacgtgctgaatctaaacgaagacgtgcccgccaaacgacaaaagaggagattacttgatgaggttagagctgtggccttgaaggaggaggtaagcaaacttttagccaacaattttattcgtgaagccttctaccctgtatgggttgcaaaccccgtgttggtgccaaagccaaacgggaagtggcgaacatgcatcgattttactgacttaaacaaggcatgtcccaaggattgcttcccacttcctcgcattgatcaactagtagatgctaccgctggtcatgaacttatgtccttcatggatgcgtattctggatatacccaaatacccatgaatgtggcggaccaggagcacacgagcttcactactgacatggggc

SEQ ID NO: 278524 - DNA, 524 bp, Cannabis indica
aatgacactgatctttgaggttgttgagtttggttatctgaaacatttaccatatcttgaataggaagttgtttgatattgtcttatcaagattctggattcacttattgatcaacgaaagtcatggaaacctaaacattgtcaaaagtgatagttggaattgagtttaacattagttccttctcaagaacaatatctataataatcttatttctcccccaaactcaacatcctcaaaattattaaagtttctcgtctcaaaattgaaccatagtgtgggatcacaaaatttgtagctttttaattactagagtgttaacgcagattttcgttaactaaatttgaacctcacagtagtgatttcacgcagaaataataaaagccatagaaataaaaatatgaacacaaggtttttttacgtggttttgcagttaaaattctgcatagtccacaagtcaatcttattcagatttctgattattttttatgaccatgagttttttcgtccccctttttgatcttct

SEQ ID NO: 278525 - DNA, 584 bp, Cannabis indica
tttcaagttgtagattacaaacagggcaagtgactgaaagatcgacatgcttaatcactagttggacacaagttggtaatgtacctgtaacggctctccacaaaaagtttttgacttttgggggaaccttcaattgccatagttgccgccagaagtctgagttttcaaccatctcttcggtacgcttttgttgttggagcatgttataagcacttttgaccgagaactcgcccgttctttccccctcccaagaccatgtatcaatggagacatttgagcttagtgggatgcccaaaataatatcagaatctcgattattgaacatctcgtacaaggtcatagtcccaagagcggctgtgcacatgaaaaagggagctaacatgttggttcattaacccagggtgtattgttgaaacatatgggttatcctgtacaggtagccacgggtggtttagtatgcttactgtgtcccctgatccgattattcttctgacacccgaacggagtagagattgggtagtccaaatacctctccagacaaagcttgggttacttcctagctctgctgacaagaaatcagagtg

SEQ ID NO: 278526 - DNA, 373 bp, Cannabis indica
atttccgtttaggtcggccagcacacttgaattcagaaaataggtaagaactgtatatagcgtgttataggagatatatgtatgttgtatatgttttggatgatatcacagcgacacaacaattgtgtcggttcgacagtacaggcatcgtactggttaagagtgatattcaccccagagagtactaattggccctatcatagcggcacaacaattgtgtcagttcagcagtacgggcacagtactggttaagagtgatatcatggccaattgtactcttgggtgccattgatgctatcatagcggcacgaacatagtgccagtcccgcagtgcgatcatagtactggtagtgggtgatatcatggtcaatag

SEQ ID NO: 278527 - DNA, 558 bp, Cannabis indica
atttatttggcaatatttgagtgagaaatgacaattatgcccttgaaaatgcttatgtttgttttatagccctaagggcaaaatggtcatttgaccataaggggtttactttgaattaaatgatttttggaaggaaaaggatttatttttctggtttaatctctctctcacccgaaccctctctttccctaaagcccttttggttttcaaagttaaattgttgagaattgcttgaagttgggtgtgaattggagctttggattgtggtttcttgagcttgaagtctaggtaacttcttgctgagtttttattgaattttaattagtggaatcttgctgaaattgttatggaaaaacatgatttaagttgtatcttgccttgtgattgcatgttcttaagtgtggttataatcttgatgaattgagggtgttaatctttggatttaagttcttgagcatggattttgattctagggtattttctagcattgaatcatgtgttattgtgatgttgtgttggctagaaaattacagagatagttaaaggtgatgctcttgt

SEQ ID NO: 278528 - DNA, 385 bp, Cannabis indica
attatatatatatatatatatatatatagtttgtgtagtgttaattaatttcatttgaaataatattcttagttttgtagctcaattatcaagagatatgattccttaataattattattcttataaatagagatatgctccattatttagttttgatgcacgagatcatgagagagtaatatttatatataataaaaataatatatataatgcaatctttgaaaaacatagctatatagatcatcatagatggagtgtcatatgtgaaaatgttccttttttttagtgaatgttcaattctatactcaaataattaacatgaccttttatatatacatacctttatgcctcaagtggctaagacactctccaaaacattcacat

SEQ ID NO: 278529 - DNA, 512 bp, Cannabis indica
atactcaggtaagtgagatcgttcccacgaggactgcagttaagtaccaatcaattaaattcttgtttctatttggcaatcgaataaataaattttgaacaaaataaactaagcaaaattaaataaaacaaacaaataaaaggtttaacaatggatgtgaaattagggatatgatttcaattactttgattacccaattattaacactaattaaccattcttcttcctcctatgtgatgacagattataaattaacctaaactcttttcagatcataaaggtcctaaattgcatgccaactactgcatctctgagatagaacaacatacaattcgcattaagcaataatctaaaagtcacataagctatgtgaatactctcgtttcacatcaaaacctatgtctattcatttagagcattctcaatactcacttttcaaattttgtattgagatcatagaacatgcaaaaggtgatcaagcttaaacatgaaataagcacaaatttgaataa

SEQ ID NO: 278530 - DNA, 270 bp, Cannabis indica
ccgtttgggatgttctttatatcgttggaaagcttgtcccgagctctatttgattatctgtgttttgaatgccatgtttatactttgtgaaactgaaattggggattaaccctatttgtgaaatcccggattatgtgactaggattaccggcacctgatcaggagaacacacgagtttggaatctcctttattgcgggacaacaggtaagacagtaattggcacgtagagtatgcgcggtgacgcttatgttgaatatgatatatgtgag

SEQ ID NO: 278531 - DNA, 1105 bp, Cannabis indica
ggtccaaagcaagaggatcccatccaattgcgaataaacgagctggaggacaagttcaggagatatcaagtgggggaactagggagacaatttggatacgactcagacgaggagcttgagccgtatcatccagatataatgaataccccttttccttcgggattcaagaacccgcatggctcttcatatgatagaatcactgatccggtctcgcatttgaataactttaacacaataatgtgagcgagtaatgtgacgaacaatttatgctgtattttgttccccacctcgcttgttggagcagcgagcaacaagtttaacaagtttactcgtcattcaataacttcctgggagcagctgtctagggatttcaagaaacagttccaggctgctagggatagacgacccggagcggcctcgctaaccaatataaagcagcaacccgatgagacacttaaggcatacttaagtcgttttagcacgactgcggctaaggttaggaatttggatgacagcacacaacttacagcccttcatgcggggatctctactaatccattaaccgtagggggcgagttgtgggatgacttacaaggtcgtccagtaagaagcatcactgagttcaacgaaagggctcaggtattcgttcagaaggaagaagcccaaaaggaaatgaatttgttaaaaacaagctcaggaggcaaaccaacaatgtttcaacaagtactgtttccacgagaattgataactcgggggcttctggttcgaagagaaaggacggtactaaggaactgtcaaaggataaaaagaaatagaagaagcacgataagtacgtgccagtgtatactatttatactgagcttaatgaaactcgggagagtatttacctcgcacatgagcaaaatgttaccttcggcaagcctgagcccatgaggaatgcaagaagcaaaagagatcctaacaagtattggaaattccataaggatattgggcatatgaccgacgaatgtcgccaattgaaagatgagatagaaagtctcatcgctcaaggccattttaaacagtacgtgaaaagaaagggccatggatacaaccagcccaatct

SEQ ID NO: 278532 - DNA, 469 bp, Cannabis indica
atcaacgaggtttatggaaatcatggttaattaaaattttgctttttaattaaatcttataatattttatacaaaatactcgggatcctgattacaaaatactttacataggttaattaattctttacaaaatatttgtcgcccaacgactaactacaaaagcactgctgtcccgaggatcgtacgctccaggctttaccgccccgacatgtacaatcttcattggctcgtcctcacggttcctcagctttggccttgcgcttacctacacataaacatagcattgtgagtcgacagacttagtaaaaaaagcataaatcgtaaacatacataaatctcgggtaatgatcagacgcccatacccctgaacacaaccctaatttctgtgtcccacacgatactgagtcccgaacgttcgtacgacggtacttttgacagagtaacatcctatacttggtacactggtcat

SEQ ID NO: 278533 - DNA, 756 bp, Cannabis indica
  modified_base (221)..(221): a, c, t, g, unknown or other
ccactcctagacgaaatagccgcctttcctccattccttttctaggcttcccaaaaggattgagcgtaagagaaagcccaacctaaaacaccttcctcatctaatagcttccgactatggacccaaagatgcatgtcgacgataccatatacaccaaagaagtgcccccatctcctctttatgaaaaacaaattcatgggcacgcaggagcgataagaganttaacccgtgttagaaaagaagaaggtagtacaaagtccaccatcttaacaatagatgaaggcttgagcacccccaaaatgcatgaaaagaagtttcaatttccactccacacacaagacaagtttgaagagtaggaaccttgtgcatacgtagtatattttcattgactttgaagttttagtgtcacgtgtacacaagtatacacagtgacaaattttgttaacatttaatagtgaaatttaattgacatctcaaatttacaaataaaagtgaagttaaaaaagaaagtatacgcaaaaaaaatcatggagttaaatgtataaatattaaaagattttgacgctaattaactcacatgaactaatagttaggactattcatgggttgagttgagccgaacaaattaactcgaaaattgactgaaattgtattgggtggtaaatgagtttaaatgttaattttgaatcaacacttaggtgtgtttgaaataattgtgtaattactatatagtgtaattattaagatactatttac

SEQ ID NO: 278534 - DNA, 622 bp, Cannabis indica
gaagaatccaattcaagagaaggagattcggactctgatcttggtgatactctgctacagaaaggatacaagggttagagatctgagtgcaggagacattatattccgttgcaaccactgtaaggttcctgatactttatatgtatttatttcatatcgttttagaagttcatatttaggatgttaataacatacttgttagtaaatctagatcctggtaaaataattccaacagtaccttcactaattagctctagatatcattcaatgagatccacagctccgtcgagtcaactctctcagatagaagctgacattcaaatgatgttgactgctgaagttcaccttgtcaccaataactacgattgttagatggagcgttatgtcttcaagcgtagaaacgacgaggtttacattatcaacctcagaaagacatgggaaaagctttagctcacaactagggttattgttgctatgttctcaatgagacgtcccaaaacgatacgctttacaacataattaatacacgtttgcattaacccagtaaaagtggaccaatcacagttgtgtgattttcaaataataaccgcatttattttacgtgggatgtaatcaaatccca

SEQ ID NO: 278535 - DNA, 595 bp, Cannabis indica
aaatatatatataaaaaaattatttatctttatctttttctttgtttattgtatcatgtttattttttcaaattaaacaatttttggagtttataaagttatgtttgtttatttattttttgatgtgaattatacttcaatagaaaattcgttcactaactcattagaaaatgatcaatttatataaacaatagaaagaaaatatacttgttgcccctgattttgcccaatatacgtagaccaaccggacagggacacgtggatcaaaacatcttaatacttgaattatttgctaagtctttatgaaataaggcagcatccgggacacgcctcccggagaaggcatgaggagctccctatgctcccggaagcctaagtaacattaaagcatctccgcggggtgtcaggcttcccctgagcagtcatttcgcatttaatgccgcatgagaggaaacgtgttgggactgctacacgcaataaagtctgacggcacaacccccaatttgcacctgcgaagtaatgatcatttaagtctattgacgactacactgtgaagagtcacgtcagttaaaagacaataaggacattccacata

SEQ ID NO: 278536 - DNA, 517 bp, Cannabis indica
aaccctcgacccaaccacctacctctaaaaacccacatatctctctcatttcttcaccatttcacctcatttttgtcttaaaagtttctattttcaatatctaatcccatacactaaaaaagttttgttttttcacccatttacactgtacccgaacctattttaaaaaaaggtggtggtttaactccgaccaccgcttttagcggagaaatcgttcaatctcaacgttcattaaggtataaatatgatttctgttcattttattaatgtacattggtattatttcgtttttgtaaattttttttaggattttttcattttattaatattatattgtgtgtgctataggtggccggatttttggtcgcaatttgtcgccggattgcgtttataaggtaaatatttatttacttgatatataatatatatgtatatattttgtattttattattgaatatgtgtttatatatatgttgtgtgtatatatattgtgtatatactatttgtgtattttgt

SEQ ID NO: 278537 - DNA, 543 bp, Cannabis indica
atgaatgtgtttctcattcctgttggaatttgtcaggacattgagcgagctattaccaagttctggtggaggtccaacaagaataaaggcatacactggctaagctgggacaagctcacgaaacacaagagcaatggtggtatgggatttcgagatttaagggacttcaacttagctctactagctaagcaagggtggagacttttgacttgtgggaatagcttgatggggcaaatttacaaggctagatacttttcgtcagggtcttttctcacatcgactttgggttgtaatccgagttatatttggagaagtgtgtttgaggccaaggagttagttcaagctggggttcggcgattggttggtgatggttctaccgttaatatcttgtctgagccttggcttcctgatgagatgaacccttacattgaatctgtccatccgggccttgtgggaaagtcggtcgactctttaatgaaggtagggctggttgaatgggatggggaagtattagctgatgtgcttgttgggttttgtgcccta

SEQ ID NO: 278538 - DNA, 757 bp, Cannabis indica
aggtacatttcagaccctggccctgaacattgggaagcactgaaatagattatgaggtacctgaaaggtactctggacactggtattgtgtttcgtaaggagaaccagtacaaggaagaaatcactggttttgtggactcagattttgcggcaaacctagacactagaaggagcctaacagggtttgtgatcactgctcttgggggctgcattagctggaaatctaacccacagaaagtagtagccttgtcatctatactagttgaatacatagctgctacagaagccatcatggaggctatatggcttaaggggttgacagaggagttaggtttcaaatctgaggatatcacagtttattgtgacaatcaaagtgctttacatctcatgaaaaatccaatgtttcatgagaggtcaaaacacattgatatcaagttacactttataagagatattgtgtcatccaagaaggtgcaagtgaagaaaataagcacacatgataaccctgcagatattttcactaaaagtgtaactaattttgttaagcattcaggacatttaatgtcctcacttatttcttttggatcttagtttaagtgagtctaattaggtgaaattgttgggattaaactcacttaacctgtcaagtgagtatgtccatctatttgctcatcagatgaatctgaagaaagttgctgcaagttataacagttggctttggagtatcactcttgaagtgatttccctcaatatgagg

SEQ ID NO: 278539 - DNA, 771 bp, Cannabis indica
ccagacacattgacttagtggatgaggaggagggtacttcctgaggaagctaaagaaggtcaagaagagcaatgggctcttcctgaggaagttgaagaaggtgaagaagagcaagaggttgctctgatccgcaagcgcaaaggaaaaatggtacctgaggaggcacctaaacggccgcggagagtggacactccggccccgagccatgattccgggatccctcccgaggtggaggaatttacagtgcctcccaacattgtgctgactccggttcccagagatgaggggaggcaggagcttcggatagccaagtacaattacgtcatggacgagtactcccgggggcatgctgaggtggaggccttgaggaggattttgcgagatgaaatgcaaaattcccttaacgatcagaagtaccaaaactcaagggatctgaaccttgatcccctgacggactggttcaatcatttcctcgggcctaccttggctccttttgtcgcggagatgaccggcgagttcgtctcccagctaacccggtgcgcgcctaagcggttcgctgcttgtgcatccctgaactccgtctttcaagttcaggatctcagccactccttgactgtggtaagtattccgtggtttacttcttttctcattatttctcttaaggcctttactcactcttgcttccttttccagcttgcggcagaggccggccgcctttcgaagaacatagttaatcacggcttcgccttgtccgaatttgagggcatggac

SEQ ID NO: 278540 - DNA, 531 bp, Cannabis indica
gaaacttagagttgcaacttggacatttgccatgaattaaagctaggccgaaggttctttgcctagtgacacggaaaatccaaggagggatgggaaggaacaatgcaaatccattcacttgaggagtggcaagcatctgaaaaattccgaggaggaaataaagggtagtggggagcccacttcaatccaaatcgacgaaaaattgagtaaaaaaactgcccaggaaattgctgataccagaccagttgatacagcaaagggtcagcaacctgacagtcagcaatccgcaccagtatgttctagtcctaaaccaccccttccatttcctcaaagattttgaaaacagcaacaagatgggcaattcaagaagtttttagatgtgttgaagcagctccatatcaatattcccttggtggaagcattggagcaaatgccgaattatgtcaagttcttaaaagatattttgacgaagaaaaggaggttgggggagtttgaaactgtagctctcaccgaaggatgcagcgccatgtt

SEQ ID NO: 278541 - DNA, 729 bp, Cannabis indica
aagactaacttattgtaattataaaggataattgtggcaaaagtctctaaaaatataggattgaggtagattagtttccaattttgaaaattgatggcaatgattcccatggtcacattttctgtacgttcgttagttctcttttctaacaaatccgtttactaattaaaaatgccacgtgtcgataacttattagtccaaattatatttttaatttaaaataaaaaactaaaataaataatttaaaaactaaaacaatttaagtatatataaaaaattaaaaaactttaataattccttttcatttttcttttcttttattgaaattaaaaaactttatcaaaaacttaaaattaaaacatattattaatcccaaactccacccacctgatttttctcctcctccttatttttcaaaccatagctcttcttctcctacaatttctcttcaacaagaaccacatctatggtctgcattccaactaggataaatttctccgaaccacatatgaaccttccaagccacaccgatcttcctcactcaaaacgactacgcaggcttcactctatagatgttccctttattctttaatgtttttttattttttggttctcttatgcatcattttaagctcctttattgagctaagcaaatgactcaatctttaccaaatacatgtacatttatataaatgagaagtgtaaagtctttttttggtcaagttagtt

SEQ ID NO: 278542 - DNA, 924 bp, Cannabis indica
caccattcattgggatgcttttctatttgcatttttagtattctctctacttgcatattgacggggtggtcagtattcgcaagaacactgaccattctatcaagtgcgactttaaagtttatgcgggtgagatcacttactttgttttcacacattcaccacgctgaaaagatcttctatctttcagatgagcgacctgtcggatagtcagctgctcggctcgggaggccacgcattcgatggtgacgaggaccaggaggaggatagctttatcccaacttcgatctcagaagaggagatcgcacctgcagtgggtatagagctaggtccgatgtcttcttcggacatcgagaaaatggtgcaagagctcgctgaacctggggccattgatattcgagacagtgagtctacggtgtcagcccgcgactatcttattcactcgaggcatgctcctgacgtcgaggtcgaggagacggacgacgactggacggccccagctcgcgagtccggcgaggaggaggaagaggcagaagggagcggtactgactcggtggacgacacccagctgaacgagcctttctcgtgcgaggatttggtttcgagagttaccaaatcggacctcaccacctttacgaggcttaacctgttgcgacttgcttctttgcgacctaagccgactcagagggcgcaccttccttttactaatccagcgattatccccacagaggatgtggtaatctcaatacccattctccgatgtggggtatcagtccctttccatccctttatcgcggctatcctcaaacgttacgacgtatctcctttccagctaacccccaacagctatcgcacaacgctggctttttatgcgatgtatatggagtatgtacatagggctccctcggtagaagagtttagctactt

SEQ ID NO: 278543 - DNA, 506 bp, Cannabis indica
acagggtccaatctgtaacttttgcaaaacacagggtccaaaatagtatttaccctaaaataaaggaagtggaattttaagatttggaaggagaaagtctacgtccacttctccccaccctctctttctccctcctaccagataatggaatttaccacccctttcaactctctccacccacccacccattctttctaccaaacatagtgttaatatctaatttacatttatatgtttcactgcataataaaataggaaaatttaaaaaactatacttaaaaaactctaatattttatgcttaaaccaatacattttaaaataaaacatatatgacacttttataaaaaaaacccaagaataaccctcaacccaactgaaccctcaaccccctcacccccactccgaccacgagatgaccccctcctctgaccgagacgactccgacgaagacccacagccccgatccgaccgagacgactcccaccgccccgacccacataacctt

SEQ ID NO: 278544 - DNA, 526 bp, Cannabis indica
gatgatttaacatgttttgaaaagccgagaacgtagctatatcattttgagtttcataagctcttcgtaaaaaataatgaaattattataaaaaatgggctcaaagatctcagtccatcacaaaatgtcttttcagcaacaaacctacacatttggagaaaacaaatcaaatctaaacaaaaataaatactaatccatctattaattgactaagaatgagtgtacaaatatgtactcattagttacaaataatcattgtttgtccttgactaaactcactgttatatatgtatatattaggtgtttgcagaggtgtttcgagtgctaaagccaggagggattttcattgtgagcttcagcaatagaatgttctatgagaaagcagtaagtgcatggagagatgggatagagtacagtagggtacagctagttaagcagtactttcaatctgtgaaggattactgaagctgaagtgattaagaaacaccaggtgacttctgcatctgctgaagctgcccaaggagta

SEQ ID NO: 278545 - DNA, 456 bp, Cannabis indica
atcgacctcactcttagtgagtttactacttgtcacgatacgtgcacttgcgtgtgtaaaatatcacaacacagggccatctctcgaaagataagtatgattagtaagtattttatttttagtatggatcaccctaatggtggcgactattaataacacttacaaaagtatgaaacaatggtggaagctcataagatagaatggcctcaactctcgcctaaacgggacaacgctggattcttatcttgatcgaataaaaggttgctagaatgtttatcattttagatgagttgacaactctattcaatggatggtatctttgactctcgcctaaatgggacactgatatcagtttgttgaagaccttgtaaattatttaggattgtatgttttactattttcgcttgtcattcctacttgctatatgtttaataatttctaaattgtgtatgaatt

SEQ ID NO: 278546 - DNA, 1259 bp, Cannabis indica
aaactttatctcgggtctaaaacaaccgccacacacataagcccgtgaatctctcgccaatatttttggaacttagacatcatttgagttgccatgtccttaataaaaggcacctctgataacatccatgattcaatgtttgtcttaatttcacatatttttggaaaaaaatattggcggtagggtactttgttccagaaattaattcggttacttcatgaaacaactctaacttatcacacaattgttgagcattttgccaatcaatttccgaaggggcacacctcaaacgcaactcccgcagccttgcacgttcaaatactgtcttgtaggataaagctgtgctaagcattagaaaagttgaattccacctcgttacacaatcaagtgatatttttttggtgtatggtactccaagttgacgagcagtgtcttcaaatttttcatgtctttttggtgtgcccgaccaataagcaacactgtctcgaattttgtcaacactatcaccaatgacagataagccttctttgacaattagatttaaaatatgtgcacaacaacgcacatgtagcaactttcccttcaaaataaaactgtcaggctcaaattgtcctttcaaaagatcaatcatggaatcattggcagtacagttatcgagagtcactgtactgatcttgtcttctattttccaatcattaagacaagatcttagggcctcaagtagtgctggagcatcgtgaggacacggaacatacttaaaactcaatatctgactgtgtaagttccaagaatcatcaataaaatgagctgttacagccatatatcccctcttctgatgatttgcagtccacatgtcactggttatggctattctgctcctacttttttccaaattttgcctgcatttttctttctcagctttatacattttcatgatgtcagacctaattgtattccttgacaccatttgaaatgtaggacatagagtacttgaatattcgatgaacccgctatgctcaaccatggacaatggatactcatgcttaacgatcatttgagccaatttgatccttgctaaatcaggatcaaaattgaaaggaactgaaggacttgtagttggattagcagcaagttgggcctttctaactggacacctcttcacgtgagtatttaaatgcgtagtccccgcagtacttcctcccaccaacttacgcccgcagtgattacaaaccgctttaattttaccatcaatttcttgt

SEQ ID NO: 278547 - DNA, 704 bp, Cannabis indica
gttcaagttagggtctgggtcgggtactaggtcgcggtcctagttctgtttcacaggtccctatactgattctgggtccaggtccaggttattgtgttggtttgggtcccggtctacgttcgggttcgagtcctagtctcggttcgggtttaggtctctgtctaggttttgatatgggttcgggtttttgtttaggtcttggtactggtcctggtcctagttcgattatagttccatttgcgattttgtgttcgagtttgggtttgagttcgggtcggagttcgagtcctgttctgagtttgggttcgggtccggatttaagtctaggtccagattaggcaccgggtgtgggttcgtgtcctgggtcttggtctaggttggtccgagtcccaagttccaatcccgatctgagtgtggattcagtttgtggtctaagtcctttgttctgatcctagtctgggttcgagtttgggtctggttccaggtctagctttgggtctgattctaggtgtgggtttgagttcgagtctgagtctgtgtccgggtttgtgtccaggtctagaccccgatctgggtctaggttcgggtctaggtccaagttggggtcccgagtgcgggtccaactttgggtctgggtcaggttctcggtcaagatctaggtccagcatttcgatcccattctcggtcttggtccgagtccaggt

SEQ ID NO: 278548 - DNA, 590 bp, Cannabis indica
acataaaatgttatttttgatctttattaactagtgaatctgattctattgaaatgggttttatttagggtataaaacccaagactatttacaaggctcaacagatgagtaagaaagttctatactagggtacaaccactataccacatacacttcgtacctcactgtacgagtgttggtagggtttgtttcataccctgagtaccactgagtgatataccacacacacttagtacattcgcgtacttgtgctggtatcactgtaatgtactctcaaataaaattcactataccaatgcactctataccttaactgtacaagtattggtagtgcaactaacactttaaacatgcttatacagatacatatacatacactcagatattgatatcacacattatatacagttcttaccttctttccagattcaagtgtgctggccgacctgaacagaaagtctcatgctagatggatgccctaatcacattatgaaactgggtaagttacatgattaaaaccctaatctcctgaaactcgaacccacaactctaggttctgctatactttttaggggttaatctaactctag

SEQ ID NO: 278549 - DNA, 514 bp, Cannabis indica
taagcatagaaattcaaatttgtgatttcattattcgttattagatcaaaattcgatggtttgataattttaaaattaatatttatagttaaatttttttagtaaccatttatgagtaatacccatcaagaaatattccatatatatatacagtagaacctctattcaagaatagacttgggaccaagcaaattatattctaattgagatgttataactaaatagagttatactagaaaaaaaaaatttaaaatactaaaaaatatcaatgtaacaataataacaattaataattattaatactatattataatagaattatttttagagtaaatataatggtaatacatatgttacaattttaaataaaattattaatttaatgtaaataaatttacaaaacatatgtatatattttattaagatgtaattattcttacatagaggtatactttgttaatatcggacttaaaaaatgtataactaattacaatttagaggttattcttattta

SEQ ID NO: 278550 - DNA, 636 bp, Cannabis indica
gttatatacttatatatatatatgggttaatttcaacaaatgacacaaaaacaacaaaaaaataacaaaatacggtttcacggtaattttaaacatttttacgtatttttttgattttatttacataaaatacggtctttttatgttgaaattttgtttcatttgttgttaattttttgttatatgtttttgttattttttagttgttattttgatgttattttcatgttacttttatgttgttttcttgttgattttatgttgttttcgtgttattttttggaaaaccgtaaaaatgtaaaaatatattctttgaacgtaaaaatgtaaatattttacaaaaaaatggtaccttatgtaattattcctatatataatatgtgtcaaaagacaatcggatcatatataatttaagatgagtcttactgctaactagtttttattacaatttttttgtatcccaaaacacacatactggaatattttttttttcaaattttttttctatagcagtgttcgttatactgggatattttaattacaatttttgtatccaatcacacatactggaaatttttcttttcaaaattttttcataacgttgttcgttatacttacaatattatctctgtaaat

SEQ ID NO: 278551 - DNA, 463 bp, Cannabis indica
gattccttatgaggatcttgctacgcgatctgctgaactagccgcgcaatcgatggctctgttcataaaagctgctgctactccttcgaaggaagccgactcgctgaagaggcagaacgctcattttcaggagaacataaaaaagctgaagcaagaagtggcgaggatggagaaagagctcgaggaactcaacaaggccaaggagaaggagctcgaagaactcggcaaggcgaaggaacaggcggagcttgaagtcaagaaatcgcaggcgacgattgtggagatggcccgcgatttggaggctgagaaagagaatgggaagaagcagtatgatcaggcagtgtctgattatatctataccactctttccaaagttccagacttccacttttctcttctcggaacagaagccgctgagatggctgaggcttttcgtgccatgtcgcctactcagactcaaggt

SEQ ID NO: 278552 - DNA, 553 bp, Cannabis indica
aataaacacataaaaatttaagaaaaccttaaattggttgcaggggaataatatgtctccttccactcagatatctaaacccttgtatcctttctgtcgcagagtattatcatgatctgagtctgaatgtccttctctttgatttggattcttcatgatcttccagactatgattgaggtaccacttgttgtgtgtggacactactctttcactagggtaattcgaaattgcaagaggaaaagagaaagagaggggtcggctattgagagaaaatgagtggctctattttctgaaaggcagtttcctgaattactgaataactgcttattttggtgtgaaccatcactttctatttataggcaactgctaggtttaggttagtaattaattggcattaaaataataaaaataataattgaaaaatgctattcaagtggccgaccatggtgttaatgggcctcacttggaatttcgcagttttcacaattttcatttctattttctcaaaaacgccaattttccaatgctaaccatttaaatgccaaaactaat

SEQ ID NO: 278553 - DNA, 595 bp, Cannabis indica
aaaaccagcttctcgatgatggggtacctagtttctgctcctatcatgtgcttgctaacatagtgcacgggatgttgagttttctcttcttcccagactacggcagcgctgaccgcatgctcggagacagccaaatatagaaataggtcctctccgagaacaagttttgacaggataggaggcttggccatatgttctttcagcttcttgaatgcctcctcgcactcgtccgaccactcaaacttttgacacttcttcagtatgttgaagaaggggatgcacttgtctgtagaccgtgagataaaacggctcagggaagcaacctttccagttaggctctgcacatctttatgcttcttgggggatggcatgctcaggagagcttggattttctctgggttttcctcaatccccctttggctgacgatgtagcccaggaacttccctgactcgaccccaaaggtacatttctttgggttgagcttcataccgtatctccggactacttcaaaacactcatctaagtcgtctgcatggctattgcatgctttggacttgatgagcatatcatctacatatacctccatgtttcgtc

SEQ ID NO: 278554 - DNA, 388 bp, Cannabis indica
gggatgcagagaatatggagtgatatgagcctattcaaaaatttcatttctaagttccacactattaggaatacagactcttgtcttaaacaacaacattctactgtctaacactgtaaagtgtttagcttgaccagttgaaacctcttctctgacttttactaactctggattagttaactaagcagttttaacacgttctaacagatcagattgcagcgtcaagttatgaagtttgcctacaacaaactcgattgagatctgaaccatgctagctacttgcccgggaccctttctgctcagggcatcagccactacattggcttttccgggatgatagaggatctcacaatcataatccttaaccaactccaaccaacgcctctgt

SEQ ID NO: 278555 - DNA, 641 bp, Cannabis indica
gaggaaatctagggttcctgaaaatcacccaaccggcagaccggttgcccaaccggaattccggttctgggaatttcagaaccccatccggaattccggatgcacaaccggaattccggttcctcgcagaccactttcaaaaattcataactcattcaattcaaacccaatttaacccaaaccttccagacctgttctaaacatcccatagaacatttctaaagcaacaaaaccacccagaattcacaggatcaaaaatcaccattaaagctccaagctttgagtttcaaactcaaacttggttaagcaacattatcatgcattcaaatcagtccaaaactacttaaacatgcatactaaagctgcagaaaacaaacacaaactcatgcaacaatcacagcaacaaatttcaaaatttctctttgaaaacttaagcttttgaactaaaaattccacaactctaaacaacctaactatcatgcatcacaagcagcttaattatcctcaattaatcatgcttaaacctctgcaaacaacaacaaaatcacagcaacaacaacaacctaaactaagcatgcaaaccataaaattcatccaaaatttccaagaaacaagaaaagaagctagagcaaggtttacct

SEQ ID NO: 278556 - DNA, 516 bp, Cannabis indica
cctccttcccttcttgctcagtcaagtcatcttcaattaagctcaattctagaggatcatctatcaactttttctcattcacaatggtatcaatcagatcaacaaagaaacaattatcacttgcctttgggaaagtcatcgcctttaacacattgaaaaccatttcttctccttgtactcgcagcttcaattcactgttttgaacatcaatcaaagcttggccagtttccaagaatggtctcccaagaatgatctggacgttgttatcttcttccatgtcttaaacaataaaatcagctgggaagatgaacttgtcaaccttgactaacacatccacaatgactcccctaggatgagctagcgatcgatcaaccaattgtaaagttactgtagtaggttttgcctcaccaagttgtaatcttctgtagactgacagaggcatcaagttaatgctggctcccaagtcacacagtgcgtttattccttcaattcttccaatggtgcaaggaatagtga

SEQ ID NO: 278557 - DNA, 587 bp, Cannabis indica
aaatattttcccgagtttcattaagctctgtataaatagtatacactaacacgtatttgtcatgcttcttttattttttctatccttcgatgattccctaattctgtcctttctttctggaccagaaacccccgagttatcaattctcgtggaagcagtccttgaagaaacattgttgggtttacctcccgagcttgttttcaacaagttcatttccttttgggcttcttcctttcggacaaacacctgagccctctcgttgaactcagtgatgttttttaccggacgtccttgtaaataatcccacaactcgcccccggcagttaatggataagtggagatccccacctgaagggctgtaagttgcgtactatcatccaaatttctaaccctagcggcagccatgctaaaacgacttaagtacgcctaaagtgtttcgccaggctgctgctttatattagttagtgaggccgtttcgggtcgcctatccctagaggcctgaaattgcttcttaaaatccctggacaactgctcccaggaagttattgaatgacgagtaaactttttaaaccagctactcgctgctc

SEQ ID NO: 278558 - DNA, 614 bp, Cannabis indica
gcgactaaacgggtcgcgtatcgggcattcgtgtatgaacctctcggggttcttatttcatggaatgcctgcgactaaatgggtcgcatatcgggcattcgtgtatgaacctctcggggttcttatttcatggaatgcctgcgactaaacgggtcgcatatcgggcattcgtgtatgaacctctcggggttcttaattcatggaatgcctgcgactaaacgggtcgcgtatcgggcattcgtgtgctgacaacatagaactcgcgggttctggtcgagttgtcgtgcacattggtcatccggaccaaatgctggtaaagatgcagtctttacataggcttgagggagaaacaccgggtcatcacatatactcgatatatgtctcgactgtgctaacttctctctacgtcccgcttttattctttttactatgcgatgcatagtgtgcgactagaccctatctcggtcgcaccttctcgcaagtttcgatcatgcaaggaaatactgtgggaattgctcccttatcatgcccctagttcttgcgatgacatgttgctgtctaatcgttgaacttttcttgagggacatttgatctgtcacattgcaggtgatctt

SEQ ID NO: 278559 - DNA, 105 bp, Cannabis indica
ttatttggcattaaaataatagaaaaaataaatggtaaattgctttaagtgtggccgaccctagatagtggataatgggcccactttgtaattttgccattttgt

SEQ ID NO: 278560 - DNA, 522 bp, Cannabis indica
actcagaatcgcaaatggaactagaacttaacttagaccaggaccaggacctaaacccaaacccgaacccagatcaaaacccagacagagacgtaaacccgaaccgagactaggactcgaaaccgaacctagaccgggacctaaacccacagaataactgggacttggacccagaataaggatagggacttgggaaacataactaggaccgggtcctagtacccgacccagactcgaacttgaacataggacccagcacgtgagttgacaccagaaatggaaccagactgggacctgagattggtatccagatttggacccacggcttggataaaacccgtagtctgtgtctggatttgggaccctgccctggacacgaaccctgacgaggacccgaacccacacccagacctgaaccaagtcccaaacccaaaagttgacctgaacccgtaacctgtgacccaaaattggaaccaaaacctgaagttgaccggacacgaactacgacttagactaggaatc

SEQ ID NO: 278561 - DNA, 663 bp, Cannabis indica
taaaaattcttaaggggaatttatgtatgattaaccggaattcatcaggaaatacatggtataatgcaaacccgccatttctaattgtttttttgaaattcaaaggttctcgactaaacctctttgacaaaagtggaattgaactgttataactccctaaccaaacttttttgatgagagaggggtcgaattgttataacatcttaatcaaacctttttgacgaagaagggatcaaacaactataatttttgatttaaaacttatctaacgggaaaggaaaatcaaaagttgtaactcgcgtataaaactgaatactaatggttctcgcgagttaggaaagtattaaacgaggcatcgcgacgccttgataacagtacttaaaccaagaaaattgatatatagtataactattcatatgagcaaattaaaaatatacaaagtgataaaattattaaagtatatttaagtttgcttaaggcagattataactgctatagcgagggagaattgacaattgctcgaaaatcaaaaagtttggtagattactaactacttaaacatgaagattacaagcaatggaaaaacccaaaagtactgtacatttgatcaaaatatagttgtttacattgtgaataagaacgcaagaaaacacaattgtatta

SEQ ID NO: 278562 - DNA, 788 bp, Cannabis indica
aactttccagacctgctaattagaccccaataaacattttccaagtgataaatcaaagcttcatgcacaaatacaaaaaccgccattaaagctccaagctttgagttcaaaactcaagcttgaataaaccccaatcacatgcatcaaaacctgctagaacctactcaaatatgcataaataagcctctgaagatagcagcaaacaactacagcaagcagagcaacaaaattcaacatatttccataaaaaccatagttttgagttaaaactccacacttgcttaaaatcaactaatcatgcatcaaaacctattctatttcattcaattaaacatttttaaactatagaaaacaacaacaacaaccaacagcagctatcaacattaaatcaccaagcatgcacttatttttcttcaaacaaatcaagaacaccaagaaggtttcaagaaccataccttcttagcttgagatcactaccaacaagctgaaataatcaagaatttcagagcaaaatcccagccctagcagccccaatcaaaaccgaaaagagagagagagctcttgagagaaaatgcaaaagttgcttcttttctttgattttttcttatttttgcaaagtgaataataaaagggtttttacatacttttattcagcataaattaactattaaaatcagattataaactttaaataaaatttataaatgacaaggcacatatggcaaaatgacctttttgccctcacacaataaaataacataaaaggggtactaaggggtattttggga

SEQ ID NO: 278563 - DNA, 254 bp, Cannabis indica
gcaactaccaggatgcattttcacactatagagttcttttgctaagatattaactaggagaggatcggggtgagggttattcatattggcactacaacacatcaataaaacagaagtaaggttttggttcataaattcatacacatgttcagaaaataacaaataatcacatatgttataaaaatactaaatctaacatagtttattttccaaggtttttcaacaaactgatacagtgtcccgtttaggcgaga

SEQ ID NO: 278564 - DNA, 531 bp, Cannabis indica
aatatattatttattaagtgtgcagctgcaacaaacattattagttaatatgattaatgagttagattattgaataatttatctattagatcaaaaattttcaaaaaaaaaattacaaaaatatgttaacatagaatttttatttttatttttatggtttgagcttttccatttacaagattatatttttaataaaaataataaatatttttttttgttttataatttatttatagttgtattataattattttgagattaattttttttgattattttatagtttatttataattgttatgaaatttattcatcgttatttttttaattattattttattctttacttaaaaaaatgtatttttatatatttttttttttgataaatcagcaatttattattgattccacaacacttttgtacaaccatttacaaagaaagagcgtctttatgttaaaaaccttatgaacaatacaacctcactttttttttcttttttttttttttttttattttttttttacttaatt

SEQ ID NO: 278565 - DNA, 644 bp, Cannabis indica
atctggatctctttactgaacacaattttagtgtatagagtacgttttagatacctcattgtcgatttcagtgcttcccaatgttcaggcccagggtttgaaatgtatctgctgagcacactagaagaatttgaggaggctgaaaaagatcacttggtgtgcttgttacagaagtctctgtacggtttgaaacaatctcttagacagtgaagtaggagttttgatgattatatgatcaagataggtctggcgaaaagtaagtttgatatttgtatatatttcttaaagagaaatggagatacattgtatttgttgctatacgtagatgatattctgattgccagcaagagtgcacaggagatcaagcaattgaaactccagctaaagacggagtttgaggagtagtgggagcataaagctcctttgaatagcagctggtattggcgaaaaatagttgaggcaaaagacaaagtgaagaaactgatgtgcaccaatacatttgcctctaaaaattataaaatagcaacaggatataagttgttgcagggtgattttgagcatcctttctagtgaaaagagatctggagtaggctcaatgtgcctaagcacagttttattctttggttagcaatgcaaaatcgatt

SEQ ID NO: 278566 - DNA, 609 bp, Cannabis indica
gataaaatgattaactttgataagcttatgtgcaggttatataagcagtagagggagatttgggaatctattatctttactgcatttacatgactcaacatttccataactcctttcaaattttatctttcacttggtaaagttgcttctttctttccaaacaaatttatttgatttttttctcttaaagctttttgttcaactcattagcgtatttatttttggaatcaaaccttatatggctgcatagtagacatagtttgattgtctaaatctagacaacattcgtcaggctcattcaaagacaagggcaatggactttcaagtttggagagaactgaaattgatgttgttgtagttatgtggttaaggatagagacaaagcattcaattgttgaaggagattaaagtatagatgatgatagtgatgagaattatgctagcatttagaaacttatgtttgctgtcaaaagagagcccaactttaattttgcttttccagaatatggaaatggtatcttaggtgtgtaaggtattgttaattctttgatgttcatttcattgattgttgacactaaattgcccaaacattagcactttctttagttt

SEQ ID NO: 278567 - DNA, 723 bp, Cannabis indica
ccaccttgagcagcaaggaagtgggggttttctttgtgattcaagcttctttttgcagatttagtgttcctaagttgttggtatgatttctttaactttcttttaagtttctaagaaattttgggaagaaaatgatggtttgcatgcttagtttaggttgatcttgttgctgtgattttgttgttgtttcggaggtttaatcttattattttgagtagattagagctagttgatgcatgctagttgctttgtttcaagttggaagtttttactcaaaaatatagttttcaaagaaagaatgaagaatttgttgctgtggtttttgttgatgctggctgttgatttctgcagtttctatatgcttgattatgtaattttaatcaaggtttgatgcatgatagtgttgtttaaccaagtttgagttttgaactcaaagcttggagctttaatggtggattttgattttatgcatgaagctttgttttatcacttggaaaatgtttattagggtctaattagcaggtctggaaagtttggttgagtttggaaacgttttggttggagaattgatttttgatggttttctgggtaaaaccggctaaccggttttacactgcttgtaaaaccggttacccggattttgcagtagggtgagaaaccggtttttctcaacttgtcgtttcgtgctagtttcgggttttcagacagtttgttctctgctag

SEQ ID NO: 278568 - DNA, 721 bp, Cannabis indica
ttgagttgcattggatgaagctaaaaattaagttttcttcacttgaacatgtgattttgagttagagattgaattgttgtgttttgaagcttggaatatgttgtcttatggttattatactgctctgtaaagtttgggatcaattggttaggtttggagcaagttttgggactttgaagagctgaaattttcgagtttctgctgttgtgaaccggaattccggatggaacatggctgcaccaaccggaattccggatggtcaattttcaggaatcgccgattttcgtattttagccataacttttcactcgggtgtccgttttagacattctatataccgtttcgaagcttatgaagagctctacagtatgagacatagattagagccaaaagatgtattttattttagggtgtttttaccataagatttggtagaaaaccctaagttattttatgcgggttttagacagtgttttggaatggacccttattgatttacctttatcgtgacataggactcgaaagtgtcgggcatcattccactcaggtcggcccacatacttgactttggacttgaggtaagaaaagtactatataccgtttgtagttaacgattataattgtgatagtctcgattatgatcgagggaaatattatgaaacgattattatcgtttgactcgattatgatcgagggaagtattatgaaacgattattatcg

SEQ ID NO: 278569 - DNA, 740 bp, Cannabis indica
aaaacatttaaaaaaaaataaaaccctaagtcagacccctctctctctctctctcgtattcaccaccttcagacaagttttcatggcttcatcttcaccattacaggcaaatctcttcctctctttatctctctctctatctctctctgtgtatttatatagctctctgttccactctttatatatctcgcctctctttctatctccctatttctcaaatttttttgttattccttcattctcagatttgaaatgaaaaaaaatgagaaaagcatgacaatgaaagaaatttcctagagagagattttttggctaatttacaggtatgattttctcttttctcttgtttttttattttgattttaggttttttgtttgagaaaatttgttcttagcttttattaggtttttggatttaatctttcaaattagtttgggatttgatatctcaatgccgagcctgattttggattgccattttctgggtttgatgttatttctctaggttcaatgggattttgggtttgggttttttgggctgagaaaagtggttgttgctatacttatttaggttatgttatttggatttctagcatttagttgttagtggaatggctttcaagctttgattagtccattttattaccttgttttcttttacaatttcgcaatgtgtagaagatttttcatatccgttctcttttttgttgttgctatatattgtctcaagttctcttttt

SEQ ID NO: 278570 - DNA, 811 bp, Cannabis indica
gtagttaagtgttgttttgttcattgttttggttgtggaagtgttgtcgtataatttttaagtattggaaatcatttagttgaaaagagtttcacatcattttaatgtactttaatgtgtaacatgcaagaagcatgaaatgtgtgtttgaaatctgaattttttcaatgccgaatggttaagttgatttgatgtgattttgggtgattacaatgcacgattttcattgtgttttggtcaatttattttttttatatagtgtatttgttgaaatatgtagtccttatcgtttaaatttgtttatctttaatttggttaggttcatcatacatggctgggaaacgcaaaaggaaagggggaaatgaacccgtaaagaaggatgtcacccccgagccgaacgataatgcggttgcttggagaaatttcttgtaagttttgaatgatggatagttgtttactcgtgtgaatgatgtttaacatttattttattatatatttgattgaaattatgtccatatgtagcaatgcgaactacaaagcccttcgagcagctgagaagggattaactgagaaagaggtttgatgtcgactgttactcaatttttttatgtcaattgtccgtaattcatcgtaattgtttgacatactttaagattctttccatgtactctgtagttgatgtaagtttgcctcatattacaggctaccgacaaattgaaagtgcaatataaaggtttcaccgacgaggagaagtctgagtggagaagctatgaccctaaccctaatcccgctaagaaggcggtgcaaacaa

SEQ ID NO: 278571 - DNA, 762 bp, Cannabis indica
gcgaggccaacgcgctgatcacgcctcacataattagatatgtggaagacctcgagttcttcttccggattccttgggggaagcactcattcgccagactcatgcactcgcttcagaaagacatgttgaaacagaaggccaactacgagaagaagctgagttcggatgttcagcacgagtgcaaatacacagcatatggcttcgcacctgcagtccaatattgggcgtacgaggccattttggaggttggcaagaggtatggcacgaaccacgggattcggttccccaggatgcttagctggacgagcaaaggcgatattgggaagaaagacgtcagcgcattattttctagacgggtatgattttcacttatgttctgaataattatttaacataaatgcttgtaataaatgctaaatggttttattttgatatttgttaaaccataaacagaatctggaagtggtgaaggggctacttccacggacagaggaggaggcatttgtgaggacaatatcttacgatggtgtggagaacctggttgatgatgctgtggatgacacagaggctgaggcaggtagtcaggtaccagagactcaggtcccagacactcaggaaagagacactcaggtaccaatttttggaacttttttttatgtcttcattttttattatttttgtgatatttgttacattgtggaattatcgtatgcttaccgtatttttttgatatatattttttcaggccactggttcagaacc

SEQ ID NO: 278572 - DNA, 525 bp, Cannabis indica
ttgtgagtaaatctaagatcctggtaaaataatttccaacaactggcctcagggccatggtaattgatttgcttgtaagaaatttggacttaaaatgatttgtttgatgtttggatggtatcatgttgttttgagtgttgtttgatgattgattgatgtttgtgaattttcatgaaaaataattaaatatctgtttctggaattatttttattggatagtatcgaaaaaattaagcaatttacttttttaaagaactcaatttcgatttaatttgaattagttatgattttttgaagtttcaaaaaatattagagtcgtgcatcatcacacgcgcgcacacgagggcttgtctctcggacagcacgcgttcagacacggttcttgtctgaaaccgaggcgtccgcgcgcggagaggctgtatgccgcctcctgcaccggcgtttctcggtcatgcacactaagatgcgcgcgcggacagtatgcatagcatactgtccgtacagctcgcatttttttcgttcttc

SEQ ID NO: 278573 - DNA, 575 bp, Cannabis indica
taattcataatataaatataaaccctaattatttaccattaggcttatcgggatattacactatgtgtgggcatggcactcattcactcaaggttcaagtaggtgaagaacaatgaaggaggtttgaatcactaaggaatgaacactctcatcaaatttggttgaatagtcaagatcacaaaaatttgacaaagtgtcaagtggatgagatgagagcatcatgttccttttatattattttcaactagggcttagggttgaattatatggattagaaaagaataaaatattgggcaaaaatccttctaggccgtgcacttaagtggaccactctctagttagatttttgccaattatttttaaccacgtattcttcttttcaataataccatattttccaattcaatcctataaatgccaaaactatttatttaatcattataattaattactaaataaaattaccatttatgtaatttataaattagaccatgcaaagtctcttaattaacaaattgaccccaaaacctcttttttcacattaagcccttgcttgttgaaaattcataaataag

SEQ ID NO: 278574 - DNA, 610 bp, Cannabis indica
ccagaagccttttggggcacataatccgaaggggttactatggccaagaatttccttgaacgaattgaggaatgttttgctaaaaatgataagattgaaatgacaatacttcttggttctttgatgaacatgaagtataagtgtcaatgaaatgtaagggagtacattatggaaatgcatcatattgtttcaagattaaggacacttaagattgagttttctgatgatgtgcttgtactcatgattttgttaatgcttcctccaccgtttaacacattcaaaattagttccaactgtcaaaaggagaaatggactctcaatgagcttttttctcattgtgtgcaagaggaagaaaggctaaaaaggacaaaactgaaagtgctcacttggccactaaacctaagaataagggcaagaaaagaaaatttgagaattcagctgctaagggtctagttcaaaagaaacaacaataggattctaagggttatttcttttgtaaccaagttagacatgtgaagaaagattgtgccaaatatcacgcatggcgtgtaaagaaacgtattaatcttgctttggtctattctgaggttaatttagtttcagtacctag

SEQ ID NO: 278575 - DNA, 587 bp, Cannabis indica
agaatggcagcagcttgggaaacaaagaaacaaaacaagtgtggcaagtgtggacaaaagggacataacaaaaagacctgcagaagaattacagcatagaagtggaaacaactacacatcaaccaaaaaacaactatattaaaacatttagaaaacacatactgcatattacgattggttgttacatacatttttttattgtgattttttatgtggagagatattgataatagggaattggtattattatcattaatatacaaaagaacatcaaatattatagttaaataattaaatgagtggaagaaggttgaaattaataagaaggaaaaataaactacataaagtgattacaaatgcaatttagttgtttgtcagatggttgtaataaggttgttaatagtatgctgtcatgagtaagagtaaatataaagattaaaaatccaaaaatatgaacaaattaaaaaccaattccaattaagaaaaaaacatgatagaaacaacaacttgtctatgattatgaacataatctggtaatagaaaaaacaaaagctacataaaaaaaagtagtatttccaacaacaacc

SEQ ID NO: 278576 - DNA, 671 bp, Cannabis indica
caagaatcctgtataccatgagaaaagcaagcacattgacattagattgtattggattcgagagaagattgaggacagggttctggaattggaaaaggtgcacacaagtgacaaccctgctgacatgggaacaaaggttcttactttcagtaaactgatgcattgtctcagtttgctgaacattggttcttgctgaacatttcgagatatcacatcatcaaggcttcagtgaaaagactctgataaattgctttagagaatcaaggtggaaatttgtggaaattgatcctctaaaccaacttattatccaactcatttaaaccaactaacttaactaactttcggttatgttagttagttagttggtgctatccttgtttgagttaggactatatataagtctagtcttttcacttctagagggagaacataaggaagacagagagagaataagagagaagattagagggatttgcttagggttctaagctgagagttctgttcttgaagagggtcaagaacaaggggtgtactcgggtgatagagagaaaactgtgactgttttctctggtgtgtatcgagtaccatctgagctgtgattgctctggttattgtaattgtactgttgctctcttattcacatattaatgaagattggtgatgtttctcag

SEQ ID NO: 278577 - DNA, 610 bp, Cannabis indica
ttgctttgcatccttgcggaagatccacaacatcataggtgtcattagagaattgagtccatctcatcatcaactgcttctctccaaaatgcactatctctagattgcatggcttctagaaaagtcttaggatcatcctcaataagaagtattaaaggaattttccttattacttcttctctagtcccttctaccacgtagaaagaaattagttgagaatctatttcatccttatttagacttttctcttttctcaccctttgacctctcctaggttcaatgggttgttctacaactttagtagtgttctcctcttgagatcctcttttagaagtagaagcttgagaattattttcatataaaacctagaggtgtggaactttgagagttgtcctcatacaacttattctcaaaaaattctacttctctagattcaattacaacattggattccacatccaatagcctatatgccttactattgttggcataaccaacaaatgcacattttatggcccttgaacccaacttggttctatttggttcggtcttcttacaataagcaagacacccccacactttgaagtaaccaatatttggttttcttcct

SEQ ID NO: 278578 - DNA, 669 bp, Cannabis indica
gccggtttacccaaaaaaccaacatcaaacccccaactaaaacgtttccaaacacaaccaaactttccagacctgcatattagaccccaatagacattttccaagcaacagaacaacaatcaaagcttagaatcaaaattcaccattaaagcttcaagcttgagttctaaaactcaaagcttgactaaagcttcaaacaactaacaattcaagcctaaatcaacatattctatcataatttaattgcagaaactcaaatcaaacatcaacagcaaataaaggactcaaactctcaaaacatgcatgatttcataacttaattttcaagaaaactataggaaggttgtctagaagcttacccttgcttgtaatcactaaaatctgctgtaaaatggcaagattgaagacacaaattccagaaccctagctgcttagggatttcgtgagagagagagagagagagaatgaaagagagaattttccactttttcctaatttttctatttttttttaaaaatgaataaataaactttgttttattaaaccatttcagccaaaataatttttttaaaaaaactgatttaattaaatcaattaaaactcacataagacaaaacaagaatgggcaaaaagaccattttgccctttccacactaaaaggcataaaag

SEQ ID NO: 278579 - DNA, 441 bp, Cannabis indica
tttatcagtacacagagtttaactaataggatgatctacaatgtagtttacttgtaccttggataagtgctatgttggatgtatggagtatgaatcgaaagggaccgatactgaacttggataagatataataaacttaccgtaatactattcaatttaatatcacctagttgatcttagatcaaattatctcaatcctgagatggttaggttctagttcagttgtattatttatgttcttcaatctgttcgttaaagtcaactaatggatcttctcgtgacatatagattaaggacatggtagttcaattgagtggtagcgctaagcatagatacagaatctataatttctatctagacatagaagtaaaacgatgatttccttcgagcatgacttaatagagataaatagttgagaattcatttcagtgattatattag

SEQ ID NO: 278580 - DNA, 1214 bp, Cannabis indica
gaaatggtcaattctatgatagtgtactccaagttgaacaacaacttatggggggaggcacttttaaccgcatgtcatattcttaatagaatacctatgaagaaaaatgacatgtctccatatgagttatggagaggaagaaaaccaaatattggttacttcaaagtgtgggggtgtcttgcttattgtaagaagaccgaccaaatagaaccaagttgggttcaagggccataaaatgtgcatttgttggttatgccaacaatagtaaggcatataggctattggatgtggaatccaatgttgtaattgaatctagagaagtagaattttttgagaataagttgtatgaggacaactctcaaaattctacacctctaggtgagaatattttatataaaaataattctcaagcttctacttctaaaagaggatctcaagaggagaattctactaaagttgtagaacaacccattgaacctaggagaggtcaaagggtgagaaaagagaaaagtctaaataaggatgaaatagattctcaattaatttctttctacgtggtagaaggaactagagaagaagtaataaggaaaattcctttaatacttcttattgaggatgatcctaagacttttctagaagccatgcaatctagagatagtgcattttggagagaagcagttgatgatgagatggactcaattctctccaatgacacctatgaagttgtggatcttccgcaaggatgcaaagcaattgggtgtaagtggatatttaaagaaatatcacactgatggctctatacaaacctttaaagctaggttagtagctaaaggttttaggcaaaaggagggtattgattattttgatacttatgctcctgttgctagaacaactaccataagggtgttgtttgcattggcttcattacacaacttgtatgttcatcaaatggatgtaaaaacggcattcctaaatggtgaccttgatgaggaggtctatatggaacaacccgaggggtttgtcctaccaaacaatgaacataaagtgtgtaagttgaagaaatccttatatggattaaagcaagctccgaaacaatggcatgtcaagtttgacaatgctattctttcaaatggctttaggcataacaatggagacaagtgtttgtattcaaaaacttgtaaaaattatgtgataattgtttgcctatatgtgga

SEQ ID NO: 278581 - DNA, 298 bp, Cannabis indica
tctttccagaacattggcaaagtttgctagttttggatgtatggagtgtacattggactgggaccgacattgatcttagtaaagatattataatcttatcgttgtatctttctacgtcaatatcactagttgatcttagatcaaaagatctcaatcctgacatggttatgctcgatcttaagagtgttatttgtgttctttgattcgttagctaagcctaccttttggtccgggtaatatgtacattgtgggaacatgatagtacaattgagtgggagcgccaaacatagatatggaa

SEQ ID NO: 278582 - DNA, 643 bp, Cannabis indica
aaaacaacaagccaagttagaccaacgatgaagattcaaaattaaactacaattagtaacagaaaataacatggttcaataaaaattcacacacaattcagaaattattaagcatttagcaagtaggaatgacaagcgaaaatactaaaacatacaatcctaaataatttccaaggtcttcaacaaactgatattaatctcccgtttacgcgagagtcaaagataccatccattgaatagagttgttagctcatctaaaatgatacaacattctagcaaccttttattcgatcaagaaaagaatccagtgttgtcccgtttaggcgagagtcaaggtcattctatcttatgagcttccacaccattgtttcatacttttgtaagtcttactaatagtcgccaccattagggtgatccatactaaaaataaaacacttacaaataatacttatctttcgagattctacgacgttaaattgctaatgaacgttcctccattagggaggattactcactaaaataagaactatgtagaaccaacaatggagatcgaatgtccttataataaagctcattatttaaagtgtattttcttctaatatttattttaatctatttatttaattaaaatttccaatttaga

SEQ ID NO: 278583 - DNA, 723 bp, Cannabis indica
tttatggtcagggaatctgtccctgaagaagttgagggagatgactcattgtctgattctgaatcaacagctgatgagaaaaataaggcttatgaggaaatgtttgcccaatggggctatatggctaagagagtgaaggaactacaagatctgaacaaagctcttgatgatagtaaatgtgaactagaagataagctcaagaagatgacattggagttgtgttccaaagacagtgagatatacaaattgacttctgaacttgtgagagcaaagcagtccctttctcatgttccctcgggcactgctgcactgaatcaagctctccaaaatcagaagccgtatggagacagaacatctattggatacaaactgttatacaatcaagggaatgatttgactattgaagataactcagcttcatcctctggtgataaaataaagtttgtatctgcctctactaccatcaaggatgatcaaccagagaaaaaacctgatgaatctaagcccaactctgtcaaaagaggtcctatgagtgaaaaatcaagagacaaacaggttgatcgatttgttccaacgtgtcacttctgcaataaaagaggacacatcaggccaagatgttacaaactccgaacttacttgacaaaccttatcaataggaaatctggccacggtaatttctcttttgccccacaacacggaactaagaagaagaggaaatccaaa

SEQ ID NO: 278584 - DNA, 986 bp, Cannabis indica
catcacgctgaaaagatcttctatctttcagatgagcgatttatcggatagccaacagctcggctcgggaggccatgcatttgacggtgagtctgaccaggagagggacagttttctccccacggacatttccgaagtggaggccgctcaaatagaattaggtccgatgtcttctgtggacatcgagaggatggtgcaggaactcgcagaacctgggaccatcgatatccgggacagcgagtccacagtgtcggcacgcgactaccttatacatacgaggcatgctcctgacgtcgaggtcgaggagatggacgaggaatggacgactccagctcgcgagtcaggtggggaagaggaggaggcggaagggagtgggacagattcggtcgacgattcccagctgaacgagcccttcgcgtgcgaggatttaatctcgagggttgccaaatcagacttcaccacctttgtgaggttgaatttgctgcgactcgcgtttcaacgtcctaaaccgtctcagagagcgcaccttccatttactaaccctgcgatcattcccacagaggatgtggtagtctcaatacccatccttcggtgtggtgtatcgatcccctttcaccccttcgtcgcagccattctcaggcgatatgatgtatcgccctttcagctaactcccaacagttatcgcactgtcctagccttctatgcgatgtacatggagtatgtccatagggctccttcagtagaagagttcagctatttctacgacataaaaagcgtaggtcttcataacggcttctactgctttagcaaatgggcgacttctgaaatcaacggagttgaaggaatggtgtcgaacatgggggattggaaatcgaagtggttttatgtctttaaagttcctgggattaggactgactttaatcgcagacctagtatgtcgcgtatttcttgacttagacattttttgcattacttttgagatcttt

SEQ ID NO: 278585 - DNA, 1009 bp, Cannabis indica
aagagtgcacttggtgctgcattgggtgcagttggcttgcgagcctcgtccaggtgggacgcaccaaactttatcctgcgatgagagtgtcttgctcgattgccatcaggaggatggtgcgccatagagttggcgtgtgtagtttccgaagggacttgtccagagggacttggcttcagtggaagcgtgttttgtaggtgccgttgggaacggttggtttgcgaacctcaccccgaggggtgcaccatacttagtccttgtcaaaaggagtatgcattggacgattggcgagtgagctgcaatcagaggatgtggtagcttcagggtcagtgttgcaagggctacttggttgactggagggacgctgtgatggactcggaggagttcatgtagggggaagtattctagtgcagaggcactactccatgggtggatctgaatagcgacagtggcacagggtctttgatcaagtccaagagtgggcgtgcgagatcatcaccaagagggtggttctacggaggtagggggacaagtgcagacttaggattcgggagaagcttggggtaagcttaggagtcgagatcaggaggatttgcctgcggtccgtcgatgagggcatcgacatgttgaagtgggggagaatgttacgtgcagtctatgatggcacgttacaagctaagtgatgcccacaagttggccaagtggtggtcaagtggtggcgcatgttgtggtgcatgcaggtggcatgctgatgcttagtttgtatgcagtggcattttcgtaaatatcttcaatattgtccggatcgggacgggacttggtattcgccatttatttgggtctacaaatagaatggtgcaatcggtttggcgaaactaggtgatttggtatatggtgcttcccatatgtctacagagcaaaaatcatctatgttcctggtagaaggctaaaagctcagaatgctctttaagggggtaccctggtgtcagctctccaccaccccttgcac

SEQ ID NO: 278586 - DNA, 538 bp, Cannabis indica
atcgacatctttgcatggcgccaagaggacatgactggcataagtccccacgtcatcacccacgtcctcaacgtcaatccggacatgccgccagtccagcaaaagcgacgcccactcgactcggtgaaagccgaggctctggagaaagaggtggataagcttttgaccaacggcatgatccgcgacgtatactatccggaatggctagccaatccggtcctggtgcccaagccgaacggaacttggcgggtctgtatagatttcactgacctaaacaaagcttgtccgaaggactgcttcccgctgcccaggatcgaccagatggtagacgccacttctggattcaaattactatccttcatggacgcctatgccgggtataatcaaataaagatgcatacggcagaccaagagtgcactagcttcaggaccgataagggggtatactgttacctagtcatgcccttcggactgaagaacgccggagcgacctaccaaagaatggtcaaccggatgttcaaaggcctcctgggacgaa

SEQ ID NO: 278587 - DNA, 511 bp, Cannabis indica
ttcttccttatatccttccagagttcaccgaggacttcgatgccccccagtatcgcggataactttccatcctcagttacccgtgaaactttggtcacctccgtcatgaatctactgatgtatgcccggagaggctcgcctggtcgttgcttaacttcgaccaagtctcccaaatgcaatgggagttggcgcgaggaggagaattgtgcatggaattctgaagagaaggttttccatgaactaaactttccaagagccaacttgaaataccattgctgagcggcttccgacagagtggcagggaagattctgcagcatacatctcctcgtaccccttgcaaatccatttgcatttccaagtacttgagatgggaaaggggatcttctctcccagtgtacatcttccacgtcagcattttaaacttatggggcaacggtaggagattgatctcaggtgagaaaggagttccgtgtgctcggtctagctaaagatcattgtttctttgtccag

SEQ ID NO: 278588 - DNA, 604 bp, Cannabis indica
ttgggtgggtcctaggcgtaagcctagttcacatttgctcaagcctgaccctgagagcactgtagcacgtcccctctgtacaaaaggtaatgtgagacctttattacaaactcaaaataacatagggatatgaacatttggttattttggcattcacttttctcatacaaaaagtggtggctttgaccttcaactgtcgcattagccctacctaccattctaattggacctccccaattgggtgggatgttgtattttactttcctaatcacatgtaagttgccctattagagtgttaagcttaattatttaataatgagtttttgttaatctagcctatgagggagacttttgcctattaatagtctcactcccactgtaaaagagatctaatttctttatttataagccaaaacaatattgttgaaatcattagaaatcactattgttgtaaacttcaaccacactaatatctaggggtgttcataaaatagttgatccaatccaatccgcacgatccaatccaatccaatccgcacttgtgcggattggattggattggaaaattcaaaatccgtacttgtgcggattggatgttgattga

SEQ ID NO: 278589 - DNA, 521 bp, Cannabis indica
gtcatcgctaccaaaaagtcatcttagttagacatcgtaagttgtctaccaatgttggacgtttgagttgtcatcggagttggacctttgaatttgacaatataaatcagtaatatttatatcagctaattaaaaatatgataccgagaaactagttatgtagattaaccaaattaaaaaactaaaccttagaaccagttatgtattataacaaaaataataatttaatatagaaaccaatttcatattactaaataaataaaaagttgaaacaaaacatatgaagcctaaagtaataaaaatatatatcaattataaaaatcaactacttaaaaaagaaaaaatacataccataaaataatttttaacgataacttataaactaaataacaaaaatctgttacaataaactaacttagcaaaaatctaatatagagaaaccagttacgtaaaataattaaattaaaaattaattcacataaaccaattacctaaataactaagatcaaaattaaatatag

SEQ ID NO: 278590 - DNA, 838 bp, Cannabis indica
catgtgacttgacttttgggctaagaaaaattggtcatttgtttttcttttggtaagtatcaacatgtgctttatttggtaaatttttgatgagtttcctcttaaaatttgatttcttattctttatattttgtttaattgttgatcatgattgtttttcagatcttaatttttgaaaaatcttggtttctttttgtctttggcccttatcgataaataaaaaggaggagtaattgggtttttaattgtatactcaactgtcgagggggagttgaggtttgtgtttgtgtttgtgttcgtctttggtcaaagttagttttttatcttggtttaatgttgtgcttctcagggggagtttttatggttgtttcactaactttgttttgtaggtgttggttaattaaaaatattttgattatctaaagtgccaaagggagagattgttaggtccttttttggcaatttatttgtcaaaatattttttaattaatgaatgcattttattgagcttttaaattgtttttattacaatgacattgtataatatgtcatacacctcaaccaactaagctatgactatttgttgtttataatacacttaattttactttaataaaagcctaataatttttttttattttgggtccccaaaatgagtgggccctaggcacgggcctagcctgcctatgcctagggccgaccctgctcctagttgctaatatttgttataggaagttttctctttaatcttgatacgatactctattgtgatctaacaattgtagtttccttatttgtgtgttggaatataaagggaaatcggaagggccttttggga

SEQ ID NO: 278591 - DNA, 590 bp, Cannabis indica
tatattccaagttcttctccatcgagaggttttgagagtacgtgacgttttgcaagttgtgcttttagctcttggaaagctttttcacattcctctgtccactcgaactgcttgtttcctcgcaggatattgaagaattggacacacttatctgttgattttgaaacaaatctgctgagtgcggcgattcgtccaggtcgtctatgtgccctcccaaccttcctggatttgacgagcatgtcatccagatacagttccatttttcgcccgatttggtctttaaacattttgtttaccaacctttggtatgttgctccagcgttttttagaccaaacgacattactttgtagcaatatagacccatatcttttcgaaaacttgtatgttctaggtctagtggatgcattttgatttgattgtagcctgtataagcgtccatgaagcttaatatttcatgccctactattgcatccacgagttgatcgatccttggaagtggaaaacagtctttggggcatgctttgttgaggtctgtgaaatcaatatagactcgccatttcttgtttgtcttgggcaccaatacaggatt

SEQ ID NO: 278592 - DNA, 794 bp, Cannabis indica
atcaagcagttgcctacagagaccttaaagaactatataaagaggttccgagagaaagcctcaaaaaccaagaaagttgatgacggacaatagcttgcccttctccaagcaggcatccgtacagggactccattctggaacgaactacaacaggaaggagcttcaaaccttcaggacttccagaaaagagtccaaaaatacatcaacctcgaagaggcccaaatagtggcctatggaggatactatcccaccgggatagcagggtatatgcccagagcccagccgtcgggtactgtcccgaccgcggctccaccaatgagcggcatacaattctctgctactcccggatacagtcagggccaggccttggcccccgcatcgtcccatttcggaaatccctcggggataaatggacaagctccctcgcactccgctccaaccgccagcctggcgggtccttcccagggctcgaggagtaaacgatcctccaaaggcagcacccggacggaggagaagcgacaaaagaggggatacactccccaatacactcagtacacggagttgacggactcccaagagcgtgtgtactttgctactaggcaaaatacgcactaccggagaccacctcctctgtacaaggatagctcccggagggaccccaacaaaagatgcgagtaccacaacgacattgggcatagcaccaatgaatgtaaaaatctcaaagatgagatcgaaaacctaatccgattggggcacctctatgaatggatcaagaatcggctgcctcacctcaa

SEQ ID NO: 278593 - DNA, 513 bp, Cannabis indica
ccgccccccatcagggggaatcgcgaccggagggatcctaaaaaattctgtaagtaccacaaggacattggtcacactactctagaatgttgggtcttgcaggatgaaatagaggagctgatccggagagggaagttcgacaagtataaaaggagcgaggaaagtcatccccaagcggatggcaaaggagaaacccagaacgcgagtggctccaaaacacctcgcaatatcctgactataatcggaggaccacacatcgcgggcgactctcgcaaatcacaagaacggtatgccagagaagccaaggagaagccgcttaccaatgtgaataatcttggtgaacggcctgagaagctctttaagaaagaatgcgacgacatcatctttatggagagcgatgcgagatgggtccatcacccgcattctgatgcactggtaatagtcgccaatattggtggggacaatgtccatcgtatactggttgacaatgggagttcagtgaatctgctgaat

SEQ ID NO: 278594 - DNA, 517 bp, Cannabis indica
tggacctagatagggatccggatacaaaactagacacggaccaagacccagactaggatcgaaatgctggagctagatctggactaagatcctaacccagacccaaacttggacctgcactcgggaatccaacatggacctggacccgaacctagacccagatcagggtccagacatggacacaaacccggacacatactcagacacgaactcaaacccacacctaaaataacacccaaagctaaaccaagactcaaacccaaacttgaacaaagaccaggactaaaaccaaggacttagacctagatctcaatccagactcagatcgggattggaacttgggactaggaccgaacctagaccaagacccaggatgtgaacccacacccggaggctgatttggacctcgactgaaatccgaacccgaacccaaactcagaccaggactcaaactctgacccaaactcaaaccctaactcgaactcaaaatcgcaaatggaaatagaaccgaactagg

SEQ ID NO: 278595 - DNA, 670 bp, Cannabis indica
gattctctaaacttaactcatattattatatagatatgttaacattataaatctaattttatatctctcattttaaatacgcgaccctctttcttttcttttttctctcctactctttgaactcacttaaaaaaacttgacccacaacccacaacctcagtcccttctctaccacgaccacaacgataccaaagacctaacgattgaccacaaattctccactcgcaatatcgtcaaaagtaagtatatttttttttatatgatttagagttaaaatatatgaaattattgatatgtttatttagatttagggttaaaggtatgtgattttgagtttggattagatttaaggttgaaatggtcgaataagtgttttgggggcaaatctagatttttggcctggttcgatgcaagcctgatacaagcttgatgtatttttgttgttggaaaaaaataaaggttgaagatactagcccaatgtaggcccgatgctaggcctgatataaggctcgatagtgtgtctaagttttatatattttttttttattggctcaattggaccaatgtattagggctgttaatctgatctaatccgtatattttttggtaaaaacttagtgcagattttatattttggatccaatattatccgatccgcatagcagtttaa

SEQ ID NO: 278596 - DNA, 383 bp, Cannabis indica
tctacaccacctccactgtctcctccacgtgcaccgcctgcagtttcagatgggtctggtgttgacccatctgcagcttcagttcctgatgggtctggtgttgacccacttgcagcgtcacagggtcctcctgttcccccgtcagcttctattcctagcacctcggaggctcgcgatccagtataccctgccatttcggcaaggttggagactgtggagagggggcaggccgctctgctaagaggacaaacaacgattatgggtcagttgaataccataatgacgctcctgcaagatcgtggaaggccggcagcagattcacagccacagccacagccacagccacagccacaaccggaagaggaggctcggacaccggaaga

SEQ ID NO: 278597 - DNA, 507 bp, Cannabis indica
tgaaagattatctgatatttctaatgagttttttgccttgggagaaaaattagatgaatctgtcttggttcggaaaattgttcgtgtgcttcctgacaggtttgacacaaaattgctagcaatggaagaagcaaaagactttggcaaaatgaaggttgaagaactcatgggttctttaagaacttttgagttaaatcaacaaatcaagaaaaagagtaagcaaagttccttaaatgagaaaagcaaaggtattgcttttaatgtttctaaacatattatttctgatgatgataatgatgatgaaatggccttgttgatgaaaaatttccaagattacatgaaatctgttggaaataaaaagaatttttcaaaaactccaaaagataacatttcaggtaacgatccctctaaacctttttcatctaacaaaggtattcgttgcagagagtgtgaagggtatggtcatattcaatctgaatgtgccaataccctaaagaaaaataaaaa

SEQ ID NO: 278598 - DNA, 694 bp, Cannabis indica
aatgtcagcttctgctcgagagaaccaactcgtcaagactataaatctcattgaaagatgtctgaagctgactggtggaagtatcaagagcgtgctttctaatagcgagataggtgcctcgctattagttgcttgggttcacccgattgttatacttagtttgtataccgtatattatacgccaagtgttttcacagttattatgcctcgcttacgtctacccaggcgtaacgaggttgatgtctcgccttttgcatccaatgctgtatggtttctcgttaatacatgaggcaacagtttgtatatctttatctcggataagaccttatagtcaacaagttgtatatatactctgtcacttccgcatttaatgagttattccattaaatgtaattaccattacacacattgatccatattcttcccaatttcgacacgtgttttccattgaaatggtagccgaatttcgggtataacacgcctccatagcaatccaatgtttctgtcagtccaagaagatggccatatatatgcactccatatccttccaagatggcatgaattggagtggatccccatgaacaagttctaagattgactcattccaaacaaagccagcgtggttagtattttccttccaactgttccatcgacccttcaacgatgaagcaaaccaagatggcatgacagtaca

SEQ ID NO: 278599 - DNA, 655 bp, Cannabis indica
ttcttttccatcattcgatttatattcgttcactaaatcatagcacaacattctaattcgcttaacttcattttgatattcaccaacataaattttaggaaagtaatactcaatcaatttcatcttgaacctaggatccaaaacagttgctatggctaatatggtccgggactcagttccggtttgggtacacgaccgtgttcgggcacgagttctagtttcagtttgggtcagaggctaggtctgtgttcagttctaggtctgggtccgggtcctggtcacggtcctagtcttattctagggtactggctcggcgattcttgtttaggttctaattttgggtcccacgtctaggtctaagttcaggtatggttcttcgtctgggttttggtcctagtctgagtcccagatatagacaccgactactggtctgttctaggcccctttacccgaatcccgagtcaagatctggatcactgtcacgggtctcggtctggttcttgttcaggtcccaggtcccatttctgagttgggttcgggatcgagactggggtgcggttctaggtcccgaccctcgttctgtgtccctagtccggttccatgtttgggtcagagttcaggttcgggttcgggtcccgagtccaggtttgggttg

SEQ ID NO: 278600 - DNA, 952 bp, Cannabis indica
tggagaggcgagattgcactgatttttgagcgagcttggtcttcgattttctggcagatttcgtcggagcagaggacgaaccagaagctccggttgctggtgcaggcggcgcaggaggggagatcggagatgcagaggcagaaccacgagagggcttcttgaacggttgggcattcttagttttggccatctctttgaaaccctagaacacaaacactctcacactttgaaaataaaaattagacctttgagagagaacaaaaaatagaaagacaagagagagtggtgatcgtgggtgaatgggtagttgagaatatatacacatgattttacttacccaaaatcagaaaaataactgaaaaggaaagtaacttccttacctttgaatcacgtgtggagagaaaagaggaaaccaaaaaggtttttcaaaaaatggtcaatgtttccttaaatggaaaaggaaaccaaatatccccacaagatctaagtattaaagaccccaccaaatctgaaattgccaccaaagaggaaaccaaaaataattaattatttaagaacaagtttcaaaaaaaaaaaaaaaaaccaaatctccaaaattaaaggaaacacaatataaagaatacaattaacccatgtttccacaaatgaaaaaataaaagaaaaaatatttacaagaatcgaaaaatatgcccccctttttctttaattttttcaaaaaatgcccccaaaagaattttgcaaataatgaacaagagaacacaaaaagacacataaagcactaatcaccacttaagagcaaaaatagtgtctaagaatataatgaaacaaaacaagataaataacaagaaatttttaagaaagctcaattgacaaactcggtcacaaattttttgtttatttatttatttatttatttattttatatattttttaaaagatagaaaaataaaat

SEQ ID NO: 278601 - DNA, 684 bp, Cannabis indica
gcgagtcactcatctgtgttacaattaatgtgattagggcatccatctagcacgagaatttccgttcaggtcggccagcacacttgaattcggaaaacaggtaagaactgtatatagcgtgttatatgagatatatgcatgatgtatgtatgattgtgtatgttttgggtgatatcatagcggcacaacaattgtgtcggttcggcagtacaagcatcgtactggttaagagtgatattcaccccagagagtattaattggcgctatcatagcggcacaacaattgtgtcggttcggcagtacaggcacagtactggttaagagtgatattatggccaattgtactcttgggtgctattgatgctatcatggcggcacgaacatagtgccggtcccgcagtgcgatcatagtgctggtagtgggtgatatcatggtcaatagcaccaaccattaagaacgttcttaatcagttgataagccttgtaaataggtgtatgggcgcctagttacaagtcgaaagttgtatgatatgttatatgcttttcttactgagtctgttgactcacagttctactttcatgtgtaggtaaaggaaaggcgataactgaactggagtgaacctgagctcggatgggattgtacatgtcaaagcagcgcgacctggagtgttcggtctcgggaca

SEQ ID NO: 278602 - DNA, 614 bp, Cannabis indica
cgggatctgagttagtttttctttgagatcttacatttttttagatatgattttcctagttttggaatgaaaatggttgaaaatggttgttggggttctacagctgggtcacgaagaaggaggatcccctctgtttttttttggcaggtatttttgtaaataacaacttttagtttctatttttgtttattttctctatgtaggtcataaatgtaaatttttttcattttcagtttattatagaaaaaatcccaatttttaactcaatcaataatgtttaattaagtgtggagaatattatttattgaactaaaaatattttattattattatttaacttttcatatatgtgtgttatactattatatttttattttataaaacaaatgatatatattaccattataatatttaaataatgtaaaaaaataaagaaattaatgtaggtataatgtaaaaaaattaagtagaatatataaagtgaggttttagtaaaatatttaaagaataaagtagacaagttaatgtgagtactgttaaagcatctccaataaaaaatattttatagaatagtacttaatgacatgaatctatttttagcatcttttaataga

SEQ ID NO: 278603 - DNA, 560 bp, Cannabis indica
cttgaaataagtaacttaaaaataaaaagtaatacaacaatattacattcatcaagcacaatcctattaaaaatatacttaataaaaaaataaatacaacagaaactaattagtataccaacaaaaattaaagccaaaaaagccactaagtcataaattgttaataacaaacacattaaaaacaaaaaacatactagaaaacctaaaataacaaatacatatatacaatccattagaaaactgtacagtaaattttaagctttaaataacaaataaacctacataaaaaataaactactcagtacaataaagaactcggtaaacaaaaaaattactaaaaaaataaagtgttaaacaacctacactaacaaaaaaaaaaaaaaataaaaaactatcctaacatatataatattcactaaaaaactatacatggatctctaaacaaaacacataaaaaaatatgaactacttagtataccaaacaactctatatacaaaaaaaaaaaaaacaaaataaacatataaatgtgcatccacactaacaaaaataaaaaaaaaaa

SEQ ID NO: 278604 - DNA, 619 bp, Cannabis indica
ttgtctattcgctcttgctgcctctcggatggttctttgtatactggctccctttgaagacttgcgttctcaggaatcagctgatgttctcgcaacttcgcagttgtacacagtaatcgccagtcgcgatcttgtactggaaggctcccgaggatttcagctgtctctctgctagtcgcgtcaagggtcggtcgaactggtctatctgcgataacaacaaagagcgagtaagcaaaagatctcaaaagtaatgcagaaaatgtctaagttaaaaaatacgcgacatactaggtctgcgattaaagtcagttctaatcccagggactttaaagacataaaaccacttcgatttccaatcccccatgttcgacaccattccttcaactccgttgatctcagaagtcgcccatttgctaaagcagtagaagccattatgaagacctacgctttttatgtcgtagaaatagctgaactcttctactgagggagccctatggacatactccatgtacatcgcatagaaggctagggcagtgcggtagctgtttggagttagctgaaaaggcgatacatcatatcgcctgagaatagctgcgatgaagggatgaaaggggaccga

SEQ ID NO: 278605 - DNA, 581 bp, Cannabis indica
tatattatttctcagtattcatcatcctaaaaatcgcagtcattctttttaaaaattttaataggtaacaactcttagtggtgagtttttctttcaatcgatagtgaatgtttccacttgaatctaaatttttcaatctaacaatttttgaatgttttttttttggtttgatgagtagaggagaaaactgccaaacaagggcctcccaaggaggaagagaagaagaaagatgagggagaggcaaaacagaggtgaaaactgttgatcaagaggcttcgaaggttgaaacagagaaagagaaagagaaggatgtagttgtggtgaccgaggttgcttctgtggatgacgatggcgctaagactgtggaagcaatcgaagaattcgtcgtatccgtaacccctgccccagtcgacgaggcaagctcatcagcaaaaacagagacggaggaaccgaagaaggaagaagaaaaggaagaacaagaagtgtagcagcaaaatgataaagatatgagaaaaacatatctctttaaagcaacatgaaagatatcagtcccctttctttttgttgatgctcttatcctt

SEQ ID NO: 278606 - DNA, 478 bp, Cannabis indica
gatcgtctccacagggattgcaaacaaaaatatcttgtaaaaccaactaattacaacttaaagtaaaaagaaataacatgaaaatgagtgagcaatgattcaaaatcaaaatgacagtagttaaacatgctaaaattaatgttattgttgctagaagaatgctttcaaagaggaaagaaaatataatatggaaaaagtggcttgaatagctaattactcctatgctggtttgctacgacattaccttagcattcctgccagagataacaaaatttcctatgtgtttgtgagaattttccaaaactcacaatttaagttctaacacctagtttcatatattcctatatcaaaccagattagagaacactaattatgcatcaatttttaagttatgcaaggtaaatgaaatatccctattccacttacaaagaaaaaaaaacctaaatctaggattcctcttgctccattcaagttgaac

SEQ ID NO: 278607 - DNA, 764 bp, Cannabis indica
catacattatacacagttcttacctgttttttgaattcaagtgtgctggccgacctgaacggaaatctcgtgctagatggatgccctaatcacaataattgtaacagagatgagtgactcgctaaatcactttccgggacttaaacttgaaactaaaagtttccttattgataaaccacatggcaataacctaaatatctcaaaattgggaaaaactagggttctgaaaaatcccctaaccggcaaatcggttccccaccggaagtccaattctgggtcaccaaccggtcgaccggttgccacaggtcccccagaaccggaattctggttatgtgctgggaacccgaaaaattcccccacgacctcaaaactcaaccaaactttaccaaactctccagtacacctaaacaatgcatacacaataaatcacagccagtatttcacagaaaaacacaccaaatcaatttatgccattaaagctcaaagctttgaacgccatgttcaaagttacatcaaaccaaccaaataaactcaaaactagctgctatggactaaattcaactcaacctaaccctagaattcgaaccaaaccaacatcaaactctaacagcccttgatttataatttcacatattcaacctaatttaaaacttgtaaactaaaggaaggtttcattggagcttaccttaggttgatttccccttaaatatttggttgaaaacacaagaaaattacagccccttccccttgttcttgctgccttc

SEQ ID NO: 278608 - DNA, 524 bp, Cannabis indica
gtgagtgtggaagaagtcagagaaaggtgaatgtttgaacaaaagaaaaaataaagtagaggtgacacctcttgagtcttgagcctgcaaagtgtacaatgctgaaaattattctctccccaaagtagcttgagtttaatcttttttcttatccatatgtgcctttgtactgtgtacatttaaaattgtgaaatgtttatttgttaagagagctatcgtcaagaaaatgcatttggtgggcaagtaagactttcaaatttcaattaaaataaaattaaaaaagttaaagaaaaaaatggggaatgagaaaactttttgatctattagtatactacaaatatggtgcagttattatactttattggaaacaataattagttcctttcaacaaaataaaaaataaaagaaacaattatagtttaacattcatattgcaccccagaaaaactaataactttaagcaaaaggaaaaagtcaaaagaacaagtcagtggtgggaatgcaagatgttcattgttaaagtt

SEQ ID NO: 278609 - DNA, 519 bp, Cannabis indica
acaaattggtcagcttgctactattgtagtgaaagggaaaaggaaaaacttcccagtcaacccattcccaatccaaagagccagtatgagataagtacatctagacctattgaagaagctaattcaatttctatccttaggtctggaaaaattattgaaaaacttgattacatatctcaacctgatgctaaaatgaacactgactcgttaaaagaaaatgaaaagagtcagcctgaaagctcacattccaaagactcggttgaaaaaatgagtcaaactttgtcgttcattccaaaagctccattcccacagagattggtcccaatcaaaagaggtggtcagtatggtgacatctcagagatattcaagcaagtaaatataaatatccctttcttagatgtcattaagcaaatacctgcgtactcaaattttttaaaagatctgtgtactgcaaaaagaaacaccaatgttccaaaaaagttagcagatcgatctgtgaaaattcttagagaatcacaa

SEQ ID NO: 278610 - DNA, 529 bp, Cannabis indica
tagtctgagtcccagatctagacaccaactactggtctgttccagctcccgttaccagaatcccgagtcaagatttggatcactgtcacaggtcttggtctggtttttgtttatgtcccaggtcccatttctgagtttgggttcgggatcgagactgaggtgcagttctaggtcccgaccctatatgtgtttctatagtctggttccttgtttaggtctgagttaatgttcgggtacaggtcccgagtccaagtttgggttgggatacgggtccggctcccaactcgagtctatgtctgatttggagtccgggtcctggtcccggtatagttccgaatcaaggtccaatttcagttatgattttttagtccaagtgctaggtcaagtcccggtcaacttccaatttagggtcacagggtacgggttcgtgtccactttatggtttgggacttggttcgggtcagggtgtcggtacgggtccttgtcacggttcgggtcttgggctgggtccagatccggatcccaatct

SEQ ID NO: 278611 - DNA, 513 bp, Cannabis indica
aacctacttcactacggatgaatatttaagatattcaaactcatctagcatgcatattatttcacccatcgatccagcgcagtacatgtattcacagaacctacttcactacggatgaatatttaagatattcaaactctactaagcattcataattaatttataataaaagttagtaaatgtatacctcgagctacctagaaaccgatcaacaccaaataagtcggatccttgcaaattgacctcacaacctacaacataaagaaatactacaaaattaccaatttctttatttagctacttactacttatataatttagagtaactatagttactaactagttaatttattactaactagttactaatgagtaactagttagtaataaaaatacatgaatatgaatgaaaattagtaacttgctaagtagttgtaactaactatttactagctactaaaaaaataaaaacacatgaataaaattgaaaaaaaaaacaattgatacaaaata

SEQ ID NO: 278612 - DNA, 514 bp, Cannabis indica
atatttagagttttctaaattggtaattttaattaaataaatatatatatataaaaatagattaaaataaatattagatgaagcttcactttaaataatgagctttattataaggataatcgatctccattgttggttctacatagttcttgttttagtgagattcatccctaatggaagaacgttcattagaaatttaacgttgtagaatctcgaaagataagtattattgtaagtcttttattcttagtaacgtccactccaaagtggctgctaagagtagggcttaaaaagtatgaaacaatggtggaagctcataagatagaatgagcttgactcttgcctaaacgggacaacggcggattcttgtcttgatcaaattaaaggttgctagaatggtgtccattttagatgagttgactgctctattaattgaattatatctttgactctcacctaaacgggacattgtatcaatttgttggaaaccttggaaattatttaggattgattt

SEQ ID NO: 278613 - DNA, 812 bp, Cannabis indica
acatcagcagattcatgacggaggcgaccaaagtttcacgggtaactgaagatggaaagttatctgcgatactaggggacattgaagtcctcggcgaactttggaaggatataaggaagaacgggctggtagactcaatgagtgattttcttgaccgtgccgaaggcttcatcaagctcgaagaagccattcaacgagcagaaggtgagcaaaagcctggcaagtcaaaggctccttctactggaacatccacccaactttcccattacccaaataattcaagctcaagtggtaaacgttccaacaacaaccacaggcaagggaataggaagaaagcaaaattcgccggcaaatccgaacaagctccccgggagaatcatgccaagtacactgcattcactatcttgactaaagatatagaaagtgtttacatggcaactcagtcgttggccccatataagaagtctgggcccatgaaaaaaggtgtcagcaagagggacatgacaaagttttgtcgattccacggagactacggccacgacactaatgaatgcagccacttgaagcgggaaatcgaattcctgataaggaaaaacaacccacacctgtagcagtatgtcaagaccgatcagggttagaggaacgacaataaccaggatttgctacctccactggtagatgggaatctgcaagttatcgttggaggcccgcacattgctagagattcgggcaaagctcgggagaggtatgcccgaacagcgcagcacgagcaagaggaagttatcctggccgtggaagaaaggaagcccaaa

SEQ ID NO: 278614 - DNA, 450 bp, Cannabis indica
aaaacagagggttcaattagtaacttttgctaaacataaaatctaaaataatatttaaccttttatggataaattcccttgttgatgaaactaaagataaaatatatggaaagggaaaaaaatgcattaattatctcttaaacaaacattcatggttagaaaactctttctgtccatttagactattgccaaagctttcagaagtatctccaaacactactacagccattcttgaaggtttaaactttgattaaccatcagcggtaaaacctccattatcagatataatttataactcttacgtttgttggattaaaatcctcaatatgggctcatatgtatattagtgtattgctatttgaagtttggcccaaaataaagtgatcaattttagtaaattatggggtcattggggtattaaagtgtcatgggctaaatgtgtagataccc

SEQ ID NO: 278615 - DNA, 773 bp, Cannabis indica
tcctcctccctccatttacttcttccccgatatggccccgctttaaagatttcttccagtgctcctccagacactattgacttagtggatgacgaggaggtgctgccgggagaaggtcaagaaaagcaatggggcttttctgaggaagttgaagaaggtgcaggagggctccgggctcttcctgaggaagctgaagaaggtgaagaagagcaagaaattgctctgattcgcaaacgtaaaggcaaaatgattgcccaggaggagcccaagcggcctcggagagctgatactccggcccacggtctcgatggtggggtctctcccatggaagaacatactgcccctcccaatattgtgctgactccggttcctggagatgaggcgagacaggagctccggatagctaaacacaactacgccatggacgaatactcccgggggtatgctgaggtggaagcccttaggagggtcttgcgggttgagatgcaaaacaccatcaacaacccggaataccagaatccgtgggacctaaatttggaccccctgtcggactggttcggtcgcttccttgggcccaccttagctccctttgctgcggagatgactggcgagtttgcgtctcagcttacccggtgtgcacctaagcggttcgctgcttgtgcatccttgaactccatctaccaagtccaggatctcagccactccctcactgtggtaagtgttttgtagtttgcttttccccttattgttttcttttttggagattcttactt

SEQ ID NO: 278616 - DNA, 520 bp, Cannabis indica
aaatagagtttttgggtgttctgaacccagtcattgcgacgggatttttggccgtcgtgactgggtttggtagtgagaaagtttgtttttcccgattttgttttggccataactttggactcgggactctgtttgggacgttctttatatcgttggaaagcttgttccgagatctatttgattatcggtgtttgaatgctatgtttatattatgtgaaagtgaaattagggattaacccgatttgtgaaatcccgagttgtgtgactaggattaccgacacatgatcaggagcacccaggggtttggaatctctgttattacagaacatcaggtaagacagcagtttgcacgtagagtatgcgcggtggcgcttatgttgaatatgatatgtgtgagtaattgtaaccgggattagggttattaccctaatatgagcggttaatagcctagggttattaccctagtaatataagttgagtaaatgctatgccatgccaagtatataattatattgagatt

SEQ ID NO: 278617 - DNA, 122 bp, Cannabis indica
tcccactcaatttcactaccgtgttcccaaaatgtacatatcaccctgagtcctggaaaggacataacacttttccaaggtctaagaatacctatcgctgattataccatgtcagtctaaat

SEQ ID NO: 278618 - DNA, 463 bp, Cannabis indica
aaattaaatttaatacctaaatacatatcaacacatacacacatatattagtatatacactcacatacacatagctattcacctacacccacttatacacatacacacacatacacatacacataaactcacatacacttatacacacccatacatacatatatacatatatatgtttacatacatatatacatacatacacacatatatacatacatatttacatacatacatacattcatatatacatacatacacatatacacatatatacatacatacacatacatacatacatacatatatacatgcatacatacatacatacatacatacatacatatataaatacatacacatacacacatatatacctacatacctacatacacatacacaatatacatacatacacatacacacatatacgtatatacactcacatacatatatatacatacat

SEQ ID NO: 278619 - DNA, 603 bp, Cannabis indica
agaagcttaagaaagatgaatccggccattgctgcatatgtggagagtatagggtttgagaagtgggctcacccttattgtttgggcgatagatacaacatcatgacgagcaacgctgctgaaagcttcaatagtgtcacagaagagttcaggaaatatccaataactactttggttgaatttatcaggttcacactccaatcgtggttcgctgatcgcctcgaaaatgctgacaaatgtgccacccctttggccacgctcttcgaaaaaaacttggcaaaaattcatgaaaatgcaaggtacaggcgcgtccaacgaaatggagccaatttgtataacgttggtaggggacctaacggtgaaagaggtggtgatgtgaatctagttgaaagaacatgcacctgcggcgtgttcacgttattgaaactcccttgccttcatgcatgtgccgcggcattgaaaacgaacacaagtgtgtacacgctttgctcaccttattattcgttgggaacatgcaaagcccgcatctgaggcgtcttgtacgtattcgttgggaaatttgatatattgtaatgatgcatattttgtcatagttatttttgt

SEQ ID NO: 278620 - DNA, 745 bp, Cannabis indica
aattaaaatgaaactcacttgaatgaacaaaggcaaacaaatgctaaagtaagcttaaaatttaatcatacccaacttagaagttcatagtcattcaagcctcaaaagtttagctcatattcaaataagaagataaaatccaagctaaaaacacttcatccatggctgctgcccaaatttacaatctcaagaagtttttaatactaagtacaaacaacaataaaagagagtaaagaaagaaaactaaagagaaggggtaaaagaaaagtcaaacactaaggcttggtcccctcttctttcttctttgtagtacttcctgctgtgaattaaaatttctccagaaaaatggcagctgctccatgtacgacaaaatgatgaagatgattatggtgtacttccctttccttctctttttgttgttgggtttttagggtacaaacttcataccccaaaatagaagcccaaacttttccactttggcccactagggttagacccctttcttccacgtcagctggctggtgcaatttgagtgactggaccgaagttgctgaggtggataagtgaaattcgtgtttccacgtcactgccaggatgctgaattcacttcagcattgctttagcattgcttcagcaatcagcccagtttcagcttgtgctccttttcttccttgcttctttttcttttacctatcaatttaattcctcctttttcaacaaaataagcacagttaattggaaaaac

SEQ ID NO: 278621 - DNA, 408 bp, Cannabis indica
aataaaggtaaatggaagagctcgtatttcagtgattatatttcactaaaatatcatttacaggaagctaagtattttaaggataaaatacattgatgagtgaaacggtaaatttattcctactcagtgtaaatcatctatagaggatctttgattattgcgattataacgatggttaaatgttgatagcgtatctatatggtggaacatatagagcgttcactttatatttttattattttaatgcctaataattcctaacctaaacttagtggtttgatggctcacacttaaaagatgatgtgaatgaaatttcttgtcttcagataagattgagcctcctattctatagtcatagccgaacctatacccctctcttttcttcgtcaaattttcaaacctttgagt

SEQ ID NO: 278622 - DNA, 526 bp, Cannabis indica
tgtattttgaggatgcttgtccgctaaactttttaaaaaaatatatatatatgtatatagtagtaaagtacttctaatttgtattttgatactcgggatcccgatccatgtgattattgatatataaattattaaaattaatttttgagtttattattataaaaatacaggcgttacagtagtaattactagggtggtaattacacagtctaataattacactatattttaaaatgcaaggcgtgtttggatatgatgtggtaattatatatgaattcctaatatcttgtttgacaaaatagttagtaattatataggaaaataatattttttttagtagctaatgtttaatatggaaagtttttagtaattacacagtgtaattacatttaattctcatggggggccataagaatgagtgtaattagaacccctcaattacttcaaattacacagttacagtgcaatttcatggtcagacaaacatgacaaattgtgtaataaactctaattacacacaaatcca

SEQ ID NO: 278623 - DNA, 524 bp, Cannabis indica
ttatcgatgatgaacgatctatcctcatccctcccaataacatccgcctgacgtacactagaagtcagcatctctcactcttctagcagttagagtagtttcttgacgtccttgctccaaaaagaagcttttatcattggaaatggaagccagtcttttcttgatgccttgtattctacgactcatcttgaaacgaaaagcaagctggttggagctggaaaagaaggtgcacacctgtggagttgtataattttatttcattttcttagaaataatttaaatcgcattcttaatatgttagtttaatgactcattttcatatcataacatgctcattcggaccagatcccatacatagatctgaacccgaacctagaccgccagacctcaaacccagcccaggacctcggacctgaccccgagtccgggtttgcgtatatattaaactacaaataatatattggtgttgtgtagtgtagctaagagtaaatacgtacctggttggccattgggttttgtaggca

SEQ ID NO: 278624 - DNA, 777 bp, Cannabis indica
acttgctcttcaaagaagccttcaccgcgacaggtcttgacgacgatcgtgacctctcgcctagtggatcccagctcacagggtttaacgggacgacacttatcccaatgggaaagtgaggctcccggtcaccctgtgcccggacactcccaagagcacattcaaatactgcaccttcgtggtggtggactgtccgacagcctacaacgcgatcctcggccgaccggccctagtagactttggcgcagtcacttcaatccgacatctgtgcctaaagttccctacccaggaggccggagtcgggactgtaaggggaaatcacggggaagcaaggcaatgttataatgttgcaacccacctgcccgtacttatggtccgggagtccgctgtactcaacgtcatcacccatgtactcaacgtcaatccggacatgcctcccgtccagcaaaagagacgcccgctcgactcggtgaaagccgaagctctagagaaagaggtggacaaacttttgactaacggcatgatccgcgacgtgtactatccggagtggctggccaatccggtcctggtgcccaagccgaacggaacttggcgagtttgtatagacttcaccgatctaaacaaagcttgtccaaaggactgcttcccgctgcccaggatcgaccagatggtagatgccacttccggattcaaactgctatccttcatggacgcctatgctgggtacaatcaaataaaaatgcatacggcagaccaggagtgcactagcttcaggac

SEQ ID NO: 278625 - DNA, 626 bp, Cannabis indica
tttagggagatgcataactacgtgaaccattatgtcgaagaaagccggtggaaaaattgtttctaacttgcacaaaatagttagaatatttgtttgcattttttctaaatccgaaacattaagtgttcttgagcataattgtttgaaatacacacacagctcaatgtgcaagtgtcctaatccaccttctcactccattacttaaagggtaaagaacatatcacattcaggtttgtaatatacaagtagtacaatctacgctcttaagattatttcatttttgtaaaaatttcggcagcacctccccacagttcttataagttagcaaacttgtagtaattaacttttccgacttacaagaacgtgtaagaagacgtggtaccaaaatatttactaatgaaataatcaaataagcaatagatcatactatccatgcggacaaacagtcctggataatttggagaagcgtatttaagagtccttactgactcagcctctccaaacgggtctaaggttatttcgtgcatgtgtaaaattaaaaaaaaaaaaattaatcactatgtgataatacaaatacaaatacaattgttctatcatatctatagtgtataaccaaagagatcaag

SEQ ID NO: 278626 - DNA, 602 bp, Cannabis indica
cacctaacttgccaaaaaaggactttacaataacatatttgtatgtgtatatatatgagatatataatatataacatgtatatgagttatgtgtattacatatatgatgagatatgacataatatatatattgtgagattaaatatgtagaaatacttattttctatgtatttatatgagacatgtatatataatatatatcatgcatattaaagtgtatatatatgttatatatgtgtgaggtatgtaacatatatagttgtgtaattaatgtatatattatgtgcatatgatatatatatattatagtatatatgttatatatataagatatgtaacatatgtatttattaatttaatattgatattatgtgtatgttacatatgagatgttaattagtaaaatacatattatattaatatatgagttatatatagtatgataataatgttgatagtaataaaatagtgtttattattattgtgagaattattatcatttattttgtgaataaagaatattttgaattcttattcaatatggtagtgaacatctcactttatgagataataaaagatggcttttgagaagttacatcttt

SEQ ID NO: 278627 - DNA, 448 bp, Cannabis indica
gtagggtgttacggtaatttagtgccttttacagtgtaaatcatccatatagaggatcattgatcacattatgattataataatggataactaatgatgtgtctatatggtggaacatatagagcattctatatactgagagtgcaattctgagttctatgtgtggattcaacgaagaattaataagtcagtgaatttaagtggtaaattctagatctgcttattggaagctcggatatatagacccatggtcccctcactagttgagataatattacttgtaagactcatttaattgattttaattaatcaattataattctcaagatagactgtgtctatttgagaatttatcacttattaagggcaaaacagtaaatagagatttgaagggcatatttattaattaggaaactttaattagttttattattaataaaataaatga

SEQ ID NO: 278628 - DNA, 546 bp, Cannabis indica
aaacaaacactttgttatccttgtgactataaaatagtccacccttagtctctttagaatttttgacaaacaagcaaacttcagttcgcgcttctagtttgccttctttctttcttaagacatgagcagggcacccccaaatcctataatggcgtaaactgggtatacgatcattccatagttcgacatgtgttttagggactgctttagatggaacaacatttaaaatgccattagccgtctgtattgcatatccccagaaggacgttgatagagttgaatagctcagtatagacctaaccatttctaaaagtgtgcattttcttctttctgctattccattttgctgtggagtgctaggggcagtatactgtgatttaattccaagttcaattaaatgatttttgaactgcatatccatatactctccacctcctatcagttcgtaagatctttaatgttttacctagctggttttgagccaaagcatgaaaatcctgaaacttctcaaacgtttcaaatttcttttgcattaggtaaagaaaa

SEQ ID NO: 278629 - DNA, 671 bp, Cannabis indica
caccctatacgactttggccaacatcaaacaagaacctggtgagtctttacaagattatttcaagcgttttaacgccgaagtaacaaaggtcgagaaggcccccgagtcttcgcttgtttgcatgttaattacaggtatcttgccaagaaccgacttctggaaggagctacaggcccgaaggccagaatccttagtagagctcttcgccatggccgaacctcacaagagaatcgagaattctctggcagagttagagaagggcaagaacaaacgacgatcacccataccgcggtcgcgctctcgcagtccgcgagggaagaattccaggggccgaagcccaagaagacgcagcccgcacagaccgcgaagcccgaagttggctaagtcacccccgaagaaggagtcctcgccgaaaaggaaggggggacctcgcttcgtcaactatacggaacttgccgtacctcgagaccatatctaagcgattgaggaaaggagcggcgtcttcaagaagccaccccccatcaggggaaatcgcgaccgaagagatcccaagaagttctgtaagtaccacaaggacattggtcacactactcttgaatgttgggtcttgcaggatgagatagagaagctgatcagaagaggaaagttcgacaagtataagagaagcgag

SEQ ID NO: 278630 - DNA, 512 bp, Cannabis indica
cccctccacgcctcaccacaacccttcctcgaccgcccctgcccaaccccaccaaacccgacacccaacctagcctcactagccgcagaagcccccaaaacaagacacccagaactcacgcccacaccatgaaactcctccaaagcttccttagctaacacatcaatcacttccaatctagattgctttttcccaaaaaaaaacagaattcctatcataccacaaccaccaccataacatagataacaaagaaaaattattctggtcaagcacctcaaagagataaacaagcaattccgccaaagacccagacctaccacgatttagcacattccaaatccgaagcttagaccacaaaggacgcaatgaagagcaaaaaactaacgcatgctctggagtctccgtatcctcaccacatcaatgacatatcggctgaatagaaagcttatgcatgataagctgggaattagtcgggagagcccggtgatacattctccaaaaaaaatttactt

SEQ ID NO: 278631 - DNA, 376 bp, Cannabis indica
gaagagctcttgtttcagtgattatattttagttcactgaaatatcatttacaggaagctaagtgttttaaggataaaataaattgaggagtgaaatggtggatttatccctactcgttgtaactcatctatagaggatctttgattattgagattagaacaatggttaaatgtttatagcgtatctatatcgtggaacatatagagggttctatatgactgagagtgcaattccaagttctatggtggatgcaataatgaattaatacgttagggaatttacttagtaaattctagttctacttattggaagctcagttgtataggcccatggttgttaggttataattagcctatgtttcgggtctttaaagtt

SEQ ID NO: 278632 - DNA, 641 bp, Cannabis indica
gttcccgaagccgttgcagtaccatctgaagatgtaactcatgctcctcttctgattgagagtacacgaggatgtcgtcgataaacacaatcacacagatatcgaggaaatccttgaatactctattcatcaagtccatgaatgctgcaggagcattggttagtccgaatgacataaccaggaattcataatgtccatacctagtgcggaaagccgtcttcggaatgtcctctcggattctcaactgatgataacccgaacggagatcaatcttagaaaagaccgtcttcccctgaagctgatcgaacaaatcatcgatcctaggtaatggatatttattcttcactgtcagcttgttcaattctctgtcagcttgttttcttcttgacgaataaaaccggggctccccagggtgacacactaggccgaataaaccctatgtcaagcaacccctggagctgaatctttaattccttaagttcagctggagccattctatatggggctttggaaaccggttccacccctggtgccaaatctatcacgaagtcaatctcccgctgaggtggtaaccctggaagttcttcgggaaaaacatctaaaaattcccgaaccaccttgatgtcctctggccgaatgct

SEQ ID NO: 278633 - DNA, 549 bp, Cannabis indica
tgccaacgcaaagaattatggtgagacatgtaccggtgatgatgatgaacatgggttatggaatgatgggaaggagttacagtgttgggttgggtgagattggaacaattgatgaggacaagccttctacttttcactacgaccatgataatcttagtttgaggttgaggaggaggaacaaattcaattcttagccataacttaatatttctattatcaccaaaatatatattaaaagattggtattatggttgtaccctgtctataaatgtttcctcatttagttgtatcaattacttgtgttcttgactcacttttaatttacgtacacatggaattgtattctataatataaacttaattatacaattgaatgtcatgtacttcctatttaaaatgatcattgattaaaatttaatgtatattataattaaaattatcactgattaaaatttaggagaattattctacatactgttttttttaatttttttttttttcaaatttacaatttgggtttataaagtggttgtagcgctagttgcagta

SEQ ID NO: 278634 - DNA, 720 bp, Cannabis indica
gaagaagttgagggagatgactctgtctgattctgaatcaacagttgatgagaaaaataaggcttatgaggaaatgtttgcccaatggggctatatggctaagagagtgaaggaactacaggatttgaacaaagctcttgatgatagtaaatgtgaactagaagataagctcaagaagatgacattggagttgtgttccaaagatagtgagatatacaaattgacttctgaacttgtgagagcgaagcaatccctttctcatgttccctcgggcactgctgccctgaatcaagctctccaaaatcagaagccgtatggagacagaacatctattggatacaaactgttatacaatcaagggaatgatttgactattgaagataactcagcttcatcctctggtgataaaataaagtttgtgtctgcctctactaccatcaaggatgatcaaccagagataaaacctgatgaatctaagcccaactctgtcaaaagaggtcctatgagtgaaaaatcaagagtcaaacaggttgatcgatttgttccaacgtgtcacttctgcaataaaagaggacacatcaggccaagatgttacaaactccgaacttacttgacaaaccttatcaataggaaatctggccacggtaatttctcttttgcccctcaacacggaactaagaagaagaggaaatccaaacgtgaaaatctggctcttgttgc

SEQ ID NO: 278635 - DNA, 636 bp, Cannabis indica
aggacatgctggcttctaccgcatatttatcaaggacttctccaaaatctcaaaacccttatctagcttacttgtcaatggtgttccatttgagtttggagaagattgtttaaaagctttcaagattttaaaggagagattgattacagcaccgatagtaacttcaccaaattgggaattgccgtttgagttgatgtgcgacgcaagtgactatgccattggagcggtcttgggcaaagagttgacagagtattccacacaatctactatgctagtagaactctgaatgatgctcaattaaattacgccactacagagaaagaaatgctggcaatagtgtttgcttgtgacaaattccgaccctacctgattggaaataaggtaattgtctacacagatcattcagcaatcaaataccttatgaccaagaaggatgcaaaaccaagactgattcggtgggtacttctacttcaagagtttgacttagagataaaagataaaaagggcaccgaaaacctggtagcagaccacttgtcaagattagagctggaagagagtcagaatacaaaggaggtacagataaatgagcaatttcctgatgaacaactttttagtgtgagggaaaacctgatggta

SEQ ID NO: 278636 - DNA, 597 bp, Cannabis indica
ctttggatggatttttagggtttatgttgttcaagttctggtgtaaggctttgaagttctgggttttgtcttgaagctttgaacttcaagcttgagtatatgtatgcttgattttgtttgtagttttgattttcttgagcttggtgtgatgctcaaatgaacactaatgttagattggtttggtttaagttaaaagaattggattttgtatggttttggttgagttttgagtatggtttggttgaggttcgaatatatggttaagtaggcatttttagaccttaaaaatggagtttttgggtgttctaaacccagtcgtcgcgacgggatttttggccgtcgcgactgggtttggcagtgagaaattctgtttttcccaattttgttttggccataacttttgactcgggactccgtttgggacgttctttatatcgttagaaagctcgttccgagctctatttgattatctgtgttttgaatgccatgtttatattttgtgaaagtgaaattggggattaaccctatttgtgaaatcccagattgtgtgactaggattaccggcacctgatcaggagcacccaggggtttggaatc

SEQ ID NO: 278637 - DNA, 706 bp, Cannabis indica
tctactttgtagtccgtgaactcgtggagcagctcccggactattgttacatacgcggccattcgctcgccacgcgtttggtactctcctgatatctgatttacgaccagctgggagtcactgtagacttccactcttttggcccctacggccttcgctagcctcagccctgctatcaaggcctcgtattcggcctcgttgtttgaagctgagaagtcgaaccgtagggctgcctggagtcgaagtccggtcggggatatcattgccacccccgctccggatccattttcattggaggctccgtccacaaacactctccatgtggggattgatggtgttggcgtattcgcggttgcctcggcttcattgcattcggtaatgaagtctgccaaggcttggccttttatggagattcggggaacgtagtgtaagtcgaactgacttaactccattgcccacttgaggagcctaccggatgcttctggtttttgtaggacttgccggagtgggtgattggtcagtaccttgatcgggtgtgcttggaaatatggccttagttttctggaggccattaggaggcagaaaaccagtttttcgatgatggggtaccgcgtctccgctcctatcatgcgcttgctaacatagtacacgggatgttgagttttctcttcttcccggactagggcagcgctgaccgcgtgctcgg

SEQ ID NO: 278638 - DNA, 565 bp, Cannabis indica
taggttctagttcagttgcattatttttgttcttaaatctgttcattaaagtcgaccaaatggttcttctcgtgacatataggttaaggacatggtagttcaattgagtgggaacgctaatcataaatacggaacctatagcttctatccgaatatagaagtcaaatgatgatttccttcgagttggcttaatagagataaatggttgaatactcatttcactgattatatgagttcactggaatatcatttataagtagctaagtgttttaaagataaaatacattgaagggtgtaacggtaaatttatccatactcaatgtaaatcatctatagggatcattgattattaggataacaacaaatagataatctcatagcgtatctatatcgtggaacatatagagcgttctatataattgagagtgcaagtccaaatttatagtggtgcaaggagaaatgaataagttagaaaatttacttggtaaattctagacctgcttattggaagctcgattatataggcccatgatccccatactagttgagacaaactgcttgtaag

SEQ ID NO: 278639 - DNA, 689 bp, Cannabis indica
ttcactaataaataaagaattcacgaatgaattaaagaagaaataatatgaagaagaagattttagttaccatcaagatttctctgaaggatgccttttttgtttccatacttaattacaccttaacttcaacacacactctcaaataataataacttttttcttttctctaattaacgtttaacacctacggttcactatatataccatatcattagtataattctactcaaattaggatttatatttaacttttaatttatttttatttaaaaaaagatagatatttcaccgaatgattttttttatttaataaaattaattattttaaactatcataatttaattttgtaaactttgaatttattgggtatttatgaaataaatgtgatttaaaatgggccttagaattgagaggagcccatattgatacagttcttcttcgggataagttgaggaatacctcttttttctatccattaactaaaaatacctttatattttattttattaaaatctgcccacttttatgagtgagttgtctaatatatccttagactccacttaggtgtaacacataatttacatttatgcaaggggtataataggaacatcatctataaaagtgggtatatctcaaagaatatggaaatgaaggtaaaaattaaaacaattaaagtaaagtgggt

SEQ ID NO: 278640 - DNA, 562 bp, Cannabis indica
tataccaggtgataagcttgtagctaaagaaaataaggtgtctaaattattgccctaaaagcaaccttagaattcaagaaatatagaagatttttaatttacattggaatctaatatatgctcaagcatgtatgtatttgtacttatacatattaagaatgttggatagatatttaagtaaccatataaggaactttcggtatgcagccaaataagctataaggaatttaaggagaacaaaatactatatgttcacttatcggaaatcagaaaaaagaaaatgtttggagatcattaagatttctgattctgatcttataaagcttttagttgtgagattttttgtcacatatggctgcaaaattaagaatggtattgaaagctattaaagatatattttgtgacaataaatcaatcaggttgcattttagtaacaacatgaactctataaggtcaaaggcacattgactttgagctaattgttattaaaataaagttcagagtaataaggtgtctatagaacataataaggacaaacaccatattttgtgtgatctggatc

SEQ ID NO: 278641 - DNA, 954 bp, Cannabis indica
aattatacatacttgatatttttgtcaataggcaaattgtgcaccaaatagcttatgagagtgatgtcatttgttttgatcaacttaggatgaataggaaagcatttagcactttatgcataatgcttgaaactaggggtgggttaaaagcatctaaatatttacaagtagatgaacaagtggctatgtttttacatgtaattgctcatcatgtgaaaaatagagtcgttagatttcgatttatgagatcgggtgagacaattagcaaatattttcataatgtgttacattcaatcattcggctacatggagagttattgaaaagacctgaacctgttcttgaaaattcaacagatgagaggtggaaatggttcaaggtataatatatatttcttgaatttcttgaattaaaatggtttaggtggaaatggtttgtttgtttgaaatactaataaaaaaaactttgtttatgatatggtagaattgcttaggagcactagatggaactcatattagagtgagagtacctatgaatgataaaccaaaatatcgtactcgaaaaggtgaaatagctacaaatgtcttaggtgtatgctcccaagacttgcaattcatatatgtgttacctggttgggaaggctctgcagcagatggtagagttttacgtgatgccatacgtagaacaaatggtttgtgtgttccaaatggtaagcttggtgttttagattgtacatttttatttttgattagtagctcatttaggagacaacttaatccccatctttattttattttaggttattattaccttgtagatgctggatatactaattgtaagggatttcttgctccatatcgaggccaacgttatcacctcaaccaatgggaagatgggaatcctcctaaaaatccacaagaattttttaatatgaagcattcatctgctaggaatgt

SEQ ID NO: 278642 - DNA, 719 bp, Cannabis indica
ctaccttgatcttctggaagaaaaacgcgatcaagcacacttaaaaaatgcggcttaccaacggcgaactgcaagatactttaactctaaggtaaacgtaaaagtcctgcgagcaggagacttggtccttagaagagtaatgccaaataccaagaacccagcgcatgggatctttggagataattgggaaggaccatatctcgtcgcggaaaaaataggtgacgccacataccgattcgcagcactcgatggtactgcaattccacgagcttggaatggcgaaagcctaaaattatattatcaatagtactcgcattattcaattatgttcgctttgtacttatacttagaaattttttataaaaaaaaatcctaagtataggggagtatatatgccataatgtactattgattatataaaggaaatgcctcatatttgttagttcttcaagtttaaacaaattttgtcaagtcttgtaagattttctacttattgcaccaggctgtaattaaagtcgaatatgtatattaaaaaacgcgagtaccggtgtactgcgaaaatactgtaaatagatatccccgcgaggatataaagtcgttcaaaataaacacaaatgtaaatttgtctaagtacaaggtgcgagtacccttgtaccgcataaacaaaaaaaaatgaaaagtcaagcattgggagcagcaggagcagatccatccgcgac

SEQ ID NO: 278643 - DNA, 95 bp, Cannabis indica
tgaaaccaacactttctatttatagaatgtcatctaggtttaggtttctcaaaaatgccaattttctaatccaaccatttaaatgccaattctaa

SEQ ID NO: 278644 - DNA, 513 bp, Cannabis indica
tgtctttttcatggaatccattgctgaatcaatgccggctgaccattgtttctgttctggacttgccattgcctgtttgtaggttaatcggtcgtcatcaataccgtcaccaacgactatattgatttcaccatccaagccataacaagatggtttagtagaaaccctcacactacaacgaggagcggtgaccttctgaacaggaactttagtggtagttctctcggtggtatcaaattgtaaaggctcaatcgaggaagtggttatcaagtagaagaggatggaacattagaatgacttatatcagaaagcatttcctctaatactactttgctttgtggcttgaaattcttaatatagtcatcttcaaggaaagtggcgtttgtggaaacgaacactttatcatccttgcgactatgaaatagtccacccctagtctctttagaatttccaacaaacatgcaaacctcagttcgcttttcaagtttgtcatctttcattcttaagacatga

SEQ ID NO: 278645 - DNA, 553 bp, Cannabis indica
ttttttcaactgatggaccaatcacagcacatataatgtaaaaatgagaattttttctaattcaataaacaaattaatcgtaaaaactcaaaattctctaatattactcattcatgggtaatacctattaagagtgcacccatatatatatatttcatatattttattaggaaaaaaaataagaaaatacaaaaaataaaaaataaaaaattactaaaatacactgggctgaccatttaaattattatacatcccacaaacaaataattacaaaaatatcatctcctctaaaccttctgccgcacgaaacagaatgatgaacaacaacaatcttcgatcgttcaaaccagcaacacaatcgaaatgaaaccaaatcaagaggaagaccaccattaattttggcaaatttcactggaaaagaagacacggaacgatctaaacgaaaattgacgaaaaaaaaaaattagaaaaaatgggacgaaactgaatttaaacattgtttttaggttttattcgatcaaaacaactcctcctaatatcgaaattcagattc

SEQ ID NO: 278646 - DNA, 501 bp, Cannabis indica
tggggacatgaaaagctgtaaaacgtttagctgataacatgaatttgttaacacatattattggtgtcaaaatataagattttctacttaaacaaagagtttagccacttacttgtgagttgtgctgtgcttccattaacagaggccaccagacaatatgtcctcttagctcactctatgacatagatctaacgaacaggacgatagttgactaatttagagttcgttaattcattaactctgcacacagatgacaattaatgcaccactcatttcatctagcaagttctggctagtgactattgctgaacattgtagaataaaaaaaaccgaacttagttggattaagaattttaacttataagaacatttaacatgcatgaaatggacagaagaataaaagaaacaaaataaaggataacaagaaaacgtgtaaactgccaataattactgaataacaattatgcaaagtttcaacaaagtacaagacacatccaagag

SEQ ID NO: 278647 - DNA, 618 bp, Cannabis indica
ttttttatgaagatgtattttaatattaatttttaaataaattaatattacttttaaattttaatcgtataaacctaaccggaaacacaatctctgaaaattttcaataaaataactaaccccaaaaggatgagcaaccaatcgtgattatttaggataatcatttataatttctttgtctaaatctcaaaccctcaaaccctatattgctattgaattattgcctcatcttattcatcactttttgttgatttgggtgtaatattcagtgttctattagcgagttatcctttgtttgctcaagtaattatttatttgagtaagtcttctattcccttgctatattgctttacttttaaacagcttttgggatatgcgaaatataatgtcatccgttagagagtttgttgggcataccaaaagtaacaaagatatccttttcaatttataatccttgaatttttgatgatgctcattttgaaaggctaggtgtaattgtaatgtcggagtagctagatttttcccagaagataaaactcacatcagcaccgccattgctggcacccattctaacgaatctatcttctaagctcatatctaatacacaatcctacggga

SEQ ID NO: 278648 - DNA, 895 bp, Cannabis indica
ccaaactgaagaagtacaaaatttaaaataagttgtacagcaaagcaattaccgagatgcgagtgggcatgtaccaaacacgaggttggtcagctaatcgactatcacgttcgtacttgttcattagtatagaaaaacagtcaatgatcgcaacaaaatgaaatatgatttacacatgtacaataaatgatacatatttagtaactactttgacacttacggatccctcaacttctcgcaagggtcgcaacgatgccatgcacctcctatccacttcaaactttcgaaatttcgcaagcacatatctgattcaattgtaatcaatgtaactgttattaaaaatttctacaagtatatgataatgagaaatacgaaaataacatttacttaccccggatctaatgtgttgctaaaaacaaacttgtaaaacccatattggttacgggggatcgcttccttcgtcttgaacggcccgacaacagttctgcccgactcaataaattgctcgtaggccttatcgttgaagtcatcctcaattaaaggcacattctccgactgtgtcttctttgatttgacgagggctttgcctttattccagaaagatgccacttcgactatatcaaagtcctcatcgtcgaaggtcttatgtgcagcaccttcatcttcaacagattttgtaacagatagtgaaggcgtacttacagaatccaccacattttcgtcggatagaccaacaacattagtcttcgaacggacaggggacttcaacggggactcctccacggcctggctgcactccgccttcttccccgtttccgcagcagcatcctcctccaactctcggtcaataccacctacaccttctcctttgtccataaatttcaaagaaaatgat

SEQ ID NO: 278649 - DNA, 797 bp, Cannabis indica
ccgagactaggactcgaacccgaaccaagaccgggacccacacccacaaaataactgggacatggacgcagaataaggatagtgacctaggaaacagaacaagtaccgagacctattacccgacccagactagaacttgaaccttggacccagctcatgacctgacaccagaaatcgaaccagactcggacccaagattgggatccggatccgaactgagagcttggacaaaaaccgtagtcggtgtttggatttgggacccagccctggacccaaacgctaacaaggacccgaacccacactcggacctaaacccggtcccaaacccaaaagtcgtcccgaacccataccctgtgtcccaaaattagaaccaaaactggaagtcgaccgggactggaacaacgacttggacttgaaatcataattgaaattggacctagatcaagaaccgtaacaagaccaggacccggactccaaatcagacctagacccgatttgggagccgaacctggctcccaacccaaatcgagactggggacccgaacctgaaccagaacttagacccaaacatggaaccagactagggagactgaactagggtcgggacctagaactgcaccccagtcccgaccccgaactcaaactcagaaatgggacatgggacctgaactagaacaagaccgagaaccgtgacagtgatcctgatgttgactcgggattccggtaacgggtcctgaaacagaccactagtcggtggctagatctgcgcctcagactaggaccagaacccagacgaa

SEQ ID NO: 278650 - DNA, 535 bp, Cannabis indica
gggtaatattaattttttttgtaattaaaatcaagcatgtataaacttctttatagcagaagataagtaacgagaactatggggaccccctgttttcaaaatattacaaactagtttattagtacttttacattataaactttgtaatcccaaaatactatcaaaatgaaacatcctgttcactgggccgaaacactgcggctgatatgtacattgctactacgaccccgaactcatggctgctcaacctttgctttccccttacctgcaccataaagcacccgtgagtcacagagactcagcaagaaaagtgaacaaaacaataactgaacaatgattatcaatttaatctcatgtcatcatgtttacacattacataatatcataaagtacccctttacacattacacaatcttggtactttataaagtacccctttaccactcgttaaccacgagctgtatatgtcactatcgttgcccgatgaagcaaacgataagtaagaaacctaaccgcggtttcaagagtaattact

SEQ ID NO: 278651 - DNA, 143 bp, Cannabis indica
gaggtgtgttattgttagtttgtatgaaactggttttcatgttaattatcgtgactgtttttgttgttttgtggctaatatttattcaagtcaatatcgcctagtttgttttaaggaataaatcaattgtagggtgtaacggt

SEQ ID NO: 278652 - DNA, 77 bp, Cannabis indica
aatacaaaagtcacaactagataactctccaaacaataaccagacatctgctattgagtgggagctatctgagatgt

SEQ ID NO: 278653 - DNA, 611 bp, Cannabis indica
actatatatatgtatatatcatataaaatagaaattattcttattacttggatttaaaacctcatttgttccattgaaagttttgtctaaaattaattttggagactcaaaaaaaaaaaaagcaggattattttgttcatattatatattaaaaataaacatatactttattatttaacatattaattatttcaactaattttttagaagtaaaacacataaattaacaataaatagatatgtgaatatttatatacgtgtttatattaagacaagtattttgatatagtatttactattggaaaattctacaatacacccccttaaaatgagtgtattgatgcacccttatctattttggtatctaaaaaactatttagtccatttttttttatggtcgtatacagtatagttatttaagacatttgacaaaattttgagaaattcgaaaaaatttaacacgttgaaaataatgttcaaagagtctgttgcacgcgtgacttttttattttatacgtcgtgtgaaatagtcgctttaaacattgatttctatattgtatttttatattgtaaattattctaaatttctcaaaattttacagaatgtctta

SEQ ID NO: 278654 - DNA, 324 bp, Cannabis indica
ttaattattaaataattagttttagcatttaattggttagaattggaaaagtggcatttttgagaaaataagggaaaattatcaaaattggaaaaatacccaagtgaagcctactaaccatggctggccacttaaagggattttccacttaatattttcattattttaatgcttaataatttctaacctaaacctagtggttacctatcaatagatagtgatggctcacacttaaaagtcgatgaaatttcttgccttcaagaaaattgagccatctattccatacccatagccgaaccacctttcctctcttttcttcttcaa

SEQ ID NO: 278655 - DNA, 554 bp, Cannabis indica
atagacctaatccaccttttggagataactaactctccgccaggtaatagggttccaaaccctgattcataactatcacacggtctatccaatttactaaagattctggctgccacataagaatgtgtggccccagaatcaaacagcactgagtaaaatgagttattaactgagagctgacctgttacaactgaagggctggcttctgcatcagcctgcgtaatggcgaacaccctagctggagtgggtctcgccggagcccttggtgcctctgatctgagctggggacaatccctcttgtaatgtccgggcatgccacactgaaagcatccctgacctctgcactcacccagatggtgccttttacaactggggcactctgggtaagaaaaccgggtctcagcaccaccctgacggctgcctctactctggttccctcggaacctcttgttctgccccgagccaccggatgcagtggatgttttcctcttctggtccatggccgaaccactacctcccctgctaaagcctgatgcaggaggggtaggagcccc

SEQ ID NO: 278656 - DNA, 931 bp, Cannabis indica
tgatctaaaaatcaatttagaaaatttagatatcattttttgtgaaataacttgtcgcacaagttagtgagccaaacttttgaacttataaatcctagtgtactatgcaaatcactttaacaagactaaagcaaatttataccatttgattgtttgtagtcttgatgtagatgagcttcctagcttgatttgcatgttttgatccaaagttgacttttcccgagagttgactttgactttgactttgactttgggttgacttttgactttggacttttgaagacctcttttgaatagggtcttgagttgttgatcccttgatgaatcttttgctcttatgaagtatgaagtagtttatatacttgttgaatctacttctttgattatgtttgactttaccgagcaaatatagatactctgtgaacttgcttgcaaaatgatcaagaaaagattagtaacaaataataatcaaatatttgtttatcatcaaaataaatgagtgaatgacttttggtcaacattctccccctttttgatgatatcaaaatatttgattattttaacggaaagaaaaagtaaattgaaacatgttgagtttagctcccctttaatgtatgcatatgttgtttataccgttttacctttgcatatttattgttaccctttcttaacatgacaaagctcccccttaatcatatactcaataaacttgttaatacttgaaaacataatatgattaatgccaaaataatcaattccaatatttctcccccttttgatttcatcaaaaagggtggcagaggaagcaaggtcaagctaaatatatttctcccccttaatcatacaagatatgacttgtatcaatgaagcacaatgggtaaagagaaatttcaaaatgcataaaaagatgaaagttcatatagtcaaaaca

SEQ ID NO: 278657 - DNA, 498 bp, Cannabis indica
tttttaaagaaccaaaaagttcagggggcacaatttactacatgtcaaagttcaaggggaaaaattactaattagccttaaaacattgatcacttgctaaaacagtccatggttataaaccagactaggcaccaccagctcttggaagagctgctaatttcagcaacaagcctcttggtgaacagacaatctatgaataagtggcagggcgtttctctgcctagctcacaaacagcacaaagatcagatatagagggcaaaatatctatgaaattttgtaattaactaaatgtgtaagttatgataagattttgactctaattattgtgaatacaaaaactattatttcaagcaaagttataaagattttgattaactttccattccaatggtatataattattaggctaattagcaattttccatcctgaactttgacatgtactaaattatgctccctgaatttttttggctgttaaaatttccccctaaactatt

SEQ ID NO: 278658 - DNA, 531 bp, Cannabis indica
cattatcacttggcttttagtttcatagataaccttccatagttatacttacataagaaatttcataaaaatttacttattaagtatagttatgtacaataaattaaatcatttacaaaacacatagtgagaaacttatttttattagatatgcataatgacatacttggaacactttaatcttattttaattccttttgtaaaagtcatagataattccatatctaatatcttttgtactttctttaacagtgttccatatgcaacatactgaatgttatctttatccttatcctttatttaaacaaagtacctaaagaagcatgtttgtctcttttctttagttaaaaatttatctcatttagcatgagaattaacttcatgttggtagatataactaaaacatgagctaaaaagagaataaaataaacaaaagttcaacaaaagaatccacataataatataagttcaaataattgcaaatcccatctcaagataccaaacacaccattaatatcaagtctttggaca

SEQ ID NO: 278659 - DNA, 960 bp, Cannabis indica
tccaaaaacgacaaatgatggaggtatagacaaactcgcgcaatttcgttgctgtgatggttgcgagtgctttggcttcggcccactttgtgaagtaatcaactgcgactacagcatatttgactccgccttttcctttgggtaactcgccgattaaatcgattccccatattgcaaagggccatggacttgtgatagaatggaggttactcggaggctggtgggtgtaagtggctattcgctgacatctatcacacctctttgcaaacgcgagagcatcttgtcgcaatgttggccaccttgccgcataatttttaaagcaagggaattacctccggtatgattgccacaaatcccctcgtgtacttcacgaagtatgtaaccacagtcttctccactgatacatttgagaagcggttgactaaaacttctgcgatacaacctttggtcatatattacataacgggctgctcgctgtcgcaattttctcgcttctactttatcatcgggtaagagccccttctcaagatatgcgaggataggagtcatccaggtaatctcctgaacatcatctatctccatgattgcttctcgatttatggttgggtgagccagtacgtctaccggaatcacatcgagcaattcggcttctctagttgaggccaaacgggccaatgcgtctgcgtgggcattttgagcacgcggtactcgagatacaactacatttttgaacttctgcattatttcgcgaacgatggctaagtatttaaccaatcttccgcctcttgctaggtattctccattcacctggcataccacgatttgggagtcgctaaaagcctgtagatactcgactttcatctcgagggccagtttcaatcctgcgattaaagcctcatactcggcttcattgttagatgcagaaaattcaaaacgtaaagcagcgtgtaccttgaaatt

SEQ ID NO: 278660 - DNA, 668 bp, Cannabis indica
ggtgatgctctgctacagaaaggaatcaagggctagagttctgaacggaaggagtcatattattccgctgcacccactgtaaggttttctaactttatatgtgtatattttcattgttttagaattcatattaggttgttaatccaacatacatggtagtaaatctagatcttggtaaaataatttccaacaaattcgtggtgttgttgatggctgaatgacaagtgaacacaggggttagggtataacaattaccattggatcgaaatccttgcaaaatacattgattatcatcattaagtacataacaacgatcactgtcaaataagacagtatacccttggtcacaaatttgactaatgctaagtagattaacccttagcccttcaactaatatcacatttttcaatctgggtaactcttcaaaattgagagttcctataccaacgacttttccagctgttgtcgagtgaatttcgcaacaccaaaatatattatttgattaatacaaaagagaatttttagagaaaacgacaagtgcgagtgttcgacctagaatggcgagtactcgactgggaatgtgagaacaatcaacaaagctggaaaatatcaataagacaaagaattatagtggttcagtcagattgtgatctgcttagtccactgta

SEQ ID NO: 278661 - DNA, 510 bp, Cannabis indica
tagcagatacactagcacagctgaaagacatacattacataatacatgctcatataagaatccaaataaaacaataaattcaaataatggttaatcccatctcaagataccaaacacaacatcaacattaatattaagtctttggacagtaatattaattgtaagcggtactcttgttgtagtgatcaaacattgacaataaattatgtcaaataatatgcaatctttggactaacatattattcacacaaaatactttataattgtcacacatttatcaccacaaacatgcatgaaattcaaccatatattaactcacctttgggttagttaataaatttatgaatcacatacacacaattatcataatatttttattaaattaatccacacaaaaaagatcactttagtgatattttgtttcaattaatttaattaaatattagatatccttaataaactttaaaccaaaatttaaatttaattgtcactgaattattattattattt

SEQ ID NO: 278662 - DNA, 730 bp, Cannabis indica
tttgtaaacggatcccgaaattttatatatgtaatattttaagtttctaattaaataagcaaattttaattattcacatttttcaataacctcgttgattagcaacgagctgcacagtacgtttaaaatcatattaacacgcctatgctagttagggtgttacatgggagtttgttgggttttgtagccctaaataaaacccatttcaatataatcagatttactaattaataaaagatcaaaaatcgttttatgttgcatggttcacatgatttatttcatgattatatttaatgtataaattctattaagtccaaaacatatatttatatccgttcatgattatagtgtcgttagtacagtggaatataatcatgattatatgttcaaaagtttaattcccatgatttgtccgttcactggatttagactgacatgataatcagtgataaggtagactgacatgatttgtcagttcagaacattagcaaagtttaccagtatcagatgtatggagtatacattggaagtgaccgatattgaactttgataagatatcataaacttaccgttatatctttttaagtcatatcaatggttgatcttaggtttatggatcttaatcctgatatggttaggttaggcttagttgtattatttatgttcttcaagttgtttgtggatgctaaccaatggttctggcagatatttacatcttgggaatatggta

SEQ ID NO: 278663 - DNA, 612 bp, Cannabis indica
attgttaaaagaaagaagaagaaaaaaaaaaaaaacaaaaaaaaaataaatgtgataatttcttcttgagaaccaaatgtgaacaatgaggtaggcacataggaaaaaaaaagaaaagtgtaatctcttactagttctttgggatgaaataatggataattgagggtgcttgttgggtataattttgcttatggtataatgtagcctaaatgacttctcatctacccgtattacctaagccatgatagtaaccgaaaaagaccttttgactccgagcaagaattgttaacattagtggagagaggtatgtcatacaagcttattgaacatggattagcagaatgccggagagtgtagaatggctgtgatatgagtgtcaaattaaagaggtgtttcgtgtcaatatgaattgcttacttctgaattgtgcatccaagttaattcttagagttattgagttgaaattctggttattgatttgcttgaagttgtgcaggtggtagtggtagttcaatcattggaaggtttagttatctattgcattgtttaatttcagtttgagttttagctttactcgagggcgagtaaagatctagtttgggggtatttgtt

SEQ ID NO: 278664 - DNA, 557 bp, Cannabis indica
taggttattttataatctgtcattcacttcaagaataggatagtaattaagcattaacgatttgggtaaacaacaacaggattctcctccctatcatctcatcttgcttaaactttaactgtgttttacgttttctgaattactttacttttcttaaatcataattgttttcgatttgccaaatagaattataagtatagtttagtggtatttaatccaattccctgtgggatcgacctcacctgtgtgagttttactacttgattgcgtatacttgcgtagtgtttataaattatagcaacaagtttttggcgccgttgccggggaattgtttaaagattaatattacataaaattatactaacttctactttggtatattttctcttgctgattttctaacctttttcttgcaatattttcttgatctatttcaggaatcctaagtgtatgcgccgtcaaggacaagcagtcatattaccagttgatcctgaaatcgagaaaacttgcaggaggaatcgaaagaacaaaaggcaagaaagagtttcagcaactgc

SEQ ID NO: 278665 - DNA, 528 bp, Cannabis indica
attcttagataatatatttagggtatagtcttagctcaactgcttttcgaccgatctcttgcccagtgaatatgcatcactatttatagggctagtaagcttggggaggaagagtttcccctctcgttacaatgcgtataaacagaaagatcgtgggatcaatgctgaatgcaaggatcgtgggattgaggctgaatacactgatatcgggatcgtgtgtatgccatatccacgtaaattgatccctgagttatagggattgtgctgatgactcacgatgcgaaagttgaattcgctaagtgtttggccattctgtgcggattactgaatactttgctctgggcatgccagtgaggcatcctgctcggactgtgcttcccgagcagatgttccaagtagattccacgtgtcaccattcatgtgatgccacgtcagagtgcaaaaattgggataacaattatagtttttaaaataatttttttttaataaaaggataaaattttgtattggtcaaagttcaaggggtaa

SEQ ID NO: 278666 - DNA, 495 bp, Cannabis indica
aaatatatatatcttttatataatcatcttcaatatatatatatatatatatatatatatatattgaagagttacacattttattggattccataatctccccacactccctaataccctccatgaccacttaagctatcccaatgttaactatttgaattcaacattttatctttactcaatgtgtattttatatatagtattaagcttttttacatattattaatgtagactccaaaaaatgggcttggcatgtatatgtgagctgttaggtccttttttggcaatttagttgtcaaaatatttcttaattaatgtgcattttattgagcattcaatttgtttttatcaactctagaccctttttccagggggagttgtgtttggtacctgtgaactatttggtttaaaagttagcatgtttctttagttattgttggttttcgattgtgttactcagggggagtagttatttgttatggctaactttatctt

SEQ ID NO: 278667 - DNA, 668 bp, Cannabis indica
attattgtgcgacattgtttcattttttattattttcttgtccttgctttaaactgaaaataataaaaaataaaacaatgtcgcacaataatcgcacaagcacaaaataatatcgcacaatgtcgcacaaaaaacacaacaagaaaataataaaaaaaaataaaagtattatcgcataatgatgtaaacatatcgcacacaaatcacaaaatcgcacaaaatcgcaaggacatcgtttaatgtcgccaaaaataatgaaagtcatccctgacctctgatttctgttggcatcgcacaaaaaatcgcacaatggtgtacaaaatcgcaaaaattcgaaaaacccagaaaaaaaaccagtgtttggatatgaactctactttcatttcagatcacaaaaatgacataatacaacaaataatgtgtagatccatgaaatataataaaaaccaacaatattttgtataaaaaatacttacccattacttttggagtgagaaaaatgaaaatttttgtgaggaaaataaagcttttggaggtccgactgcgtggttgtggtccggcgtggttgaggtgcggctgaggtcgtcgtgggtggtggtccggctggttttggtgggtggtgggtggtggtgggggctgagggaaaacgagagaatgagagagagaga

SEQ ID NO: 278668 - DNA, 472 bp, Cannabis indica
tcaaagctaagcatgcaacctataaacatttcccaaaacttcaaaaaaacttaaagaaaagctaaggaaaacataccaacaatttgatcactaaaacctttctacaaagggcttgaatcaccaagaagaatcccaccttcttgctgctcaaggagggccgaatacaagaagggaagagagagagcttttctttttttctaaattttctaacttttacttttaatgaaatgagagaaaataatcaaataataaaccttatttcagccaatataattcacataaatgacatattttccaattattaagtccactaaaggacaaaataacaatggggcaaaaagatcattttgcccctccatgctaaaataacataaagagcactaaaggggtattttgggaaaattctaaattcccggccaatcccgacattcccaatgtctaataaatcgtcccacaatactaacatactaag

SEQ ID NO: 278669 - DNA, 698 bp, Cannabis indica
agaagaaaagtcctctaggtagagcccgttctgcactagatttgcatcggaggtcaactggatgatatccctgtcttccgctggaaaccgggcaagcttttgagccctatccctaagagtaagggtgaggggaggacggtaatatgtcagaatctgttgaaaccaagtccgggtgatgttcagatccttcaccatgaagtactcatcaacaaaatgccctattttgctgatggccttgttgtccgtcccactcaaccacttgaagcctggctgagagaaataaaaataccccgacctgccttgcttgggaatagacttcaggtcgaagaaccaagcgacctcgtggggagaaggagagccccatccctgggaagcgtagaggacgaagagagcggacaaatacttaatgcccttgggagtaatctgggccgggcaatgggcaaagaagtcggccacatcccggaagtacttgtgcaagggcatcagcgccccttgctggccgtgagcccccgaccaggcgcacatccccttatcaggatttgaggcgtgattgtcgtgggcgggattgaagcagtccagcttgcccaggtacccgtcctggtcgagagtgcggaggcgtgcctccgaaatcttggacggaggactcacccatctggcgcccaaggcaccctgcctcctatgaggaaccgcctcagcaa

SEQ ID NO: 278670 - DNA, 635 bp, Cannabis indica
tttagggtcagaaatagaatagaattcaaaccacaattgctagagttaaggaataggaagttttagggttaggaagacgaattagagttagaattaaaactagttcgatcaaatttgggttcaagttatcattacgttcaattttgaaaaatataagttccaaattaccattcaaaagagtaaaaatgttagccgataatttttgcaaaacataattaaaattggtaataatagaagaaaaaagaacactaaaaattatgattgaattatttatagatatttaaggtaaaatcttgtgatcatttgacattgttaaacatatattctaattaaaaaagatagtggcgaggcgatagtccattctatattggtcctctaaacttctacctttattataaaaacaaattctataatgcacccccttaaaagggatacaccgatacatctctatctgttttagtattcgaaataattttttagtcaaattttttctcatggtcatgtaaattatacttatttaagacatcttgcaaaattttaagaaattcagaaaagtttaacacgccgaaaattgcgttcaagtagtgtgttgcacgcgtgactattttattttatacgcatgtaaaatagactgt

SEQ ID NO: 278671 - DNA, 404 bp, Cannabis indica
tttttttgtttttttcccttattattattatatatctattctataattttttattaattttataatattattaatatatttaaaataaaaattatatgtacatattttatataaaaaaatttaatttaaatttaaaataacttaaaatattataaatattttaatcatatttttttaaaaaaatattatgtaaatattttatataaagaaatttaaatttaaaatattataactatttttaaccatattttaactttattattattatatatctattctatatagagtgaatatgaatattttttattaattttataaagaaaatttgattttatatacttaaaaaaataaaaaaattattcttaaaccaaaaccttttaaactaaaaaactatgacttttttt

SEQ ID NO: 278672 - DNA, 561 bp, Cannabis indica
ataagctaagaggaaaaattcaacgttaattttgaatttaaaataagaatccaactatgtcccgatcggcaagagtcaaagttattcttatttttataaacttctccattatttcatattgtaaatactagtctaaggtatcatctatcgatgaacagctagatattgcatttacaaatatttatctatcgagatctaacactattatgtttgtctaatggatcacaattcatgagtattcgtcccattaaaaacaacaagccaagttagaccaacaatgaagattcaaaattaaactacaattaataactatggttcaatataaattcacacacaattcagaaattattaagcatttagcaaataggaatgattagtgaaaatacttaaacttacaaatcctaaataatttccaagatttccaacaaactgatactagtgtcccgtttaggcgagagtcaaagatatcatccattgaatagagtagtcagctcatctaaaatgacaagcattctagcaaccctttattcgatcaatatgagaatccagcgttgtcccgtt

SEQ ID NO: 278673 - DNA, 705 bp, Cannabis indica
tttatggagccagaaagctttgaagcagctcagaaaaaagaagtatggagaaaagctatgaatgaagagataaagatgattgtgaagaatgagacttgggagcttgtagatcgtccacaagacaaagatactatagcagtcaagtgggtctacaagacaaagctcaacgcagatggctctatccaaaagcacaaagcaagattatttgtgaaaggatactcacaacaatacggagtcgactacaacgaaacatttgctccagttgcacgccttgacattattagggctttaatagctctaccgcacagaagaaatggaagatttttcaactcgatgtgaagtcggcattcctaaattggttatcttaaagaagaaatttatgtggagcaaccttaagggtatgtggtacaaggacaggaagataaatttctcaaattgaaaaaggctttatatggcctaaagcaagctccgcgagcctggtatagcagagtcgacagctactttaccgagcaaggattcaggaggagcaagagttagccaactctttacatcaaaaatcaaggtacgaatgatacactaattgtctctttttacgttgatgatctcatctacacaggcaataatgagaagatgataaagaagtttaaagaagacatgatgaaaaattttgagatgattgacctgggattaatgcactactttctc

SEQ ID NO: 278674 - DNA, 526 bp, Cannabis indica
aggctgctgaacctccctcaacagcaaacaatgaagcaattggtaatgaattatgtactcaggaatccgaagaaaataaccaaacacagattttgaaaaaatttccaattggctttcagttagaattctcttaatgtctccaagtacagagtaatacccagatgttactactctagaatgatagaattgagatcgggtgtacttgcattcccaatcctaaaaaacagaacaataaaaaacactgataaaacaccataaaacactacgaaaaaacaataaaaaaaaacatagaacagaatgcataacatgacaaacctcaacaatcctattaacaggaatttcctcagccacacctgatgatggcaacacctttacaggggatttacccttgccctaaaataaaacaaaacaacaccaacaaaacaacaaataaaaatttaaaaaaaacacataaataaatcaaacaagatatataaaacaattacaaatacagagacaaaaacaaacatatacccagttatatgaa

SEQ ID NO: 278675 - DNA, 855 bp, Cannabis indica
cactttattgataattacagaaatacatgtaccttaattctggggatcaccccacgaaaacactataaataccccctcaaagctcattaatgggggtcgagaattctgggttgcataagtgcaagaagagtaaatactcaccaagaacattctctgtattaaatacaatcataaatatacagacacgtggactaaggctcattaacgccccaaccacgtaaaaatctctctcttaatttcttatagctctctaaactcttattattttattggttgccgaaaacctcggtcaacattttggtgctttcattgagagctgaagaaagcttctataaacatacaatacattacaacaatggtggagactcgaagcactcgcaaacctcgccctcttaaagatgctcaagacccaaatgaggaagacgtggcctcaaaggcaactgagggttccaaggaagaagaaggaattcctgacgatgattacgagggaaacctcgatgaaggtagctactcggaattggtgctcttaagacaaaaggctgtcgatcatgaagctgagatcgcagcccaaaaagcacaaaaccaaaagatgcaagaggtaatgctggccatgcaaaaagccatggaggcagctggaatccacgtgcatcctaaagccatgtctgctggacttggaaaggaaccagaggaatcctcgccaagtacccaaaggcaaaaatctagggaaccaagccctataaggtatcccgctgaggggaaccaaaagaaaaaccctacttctacccccgggaaaaagaaaaaggtgcaggatccgcgaaaggtccgctcagatttcccgaaagggaaaggtccgca

SEQ ID NO: 278676 - DNA, 565 bp, Cannabis indica
agcttactaaaaagaatcagcattttgtgtggacggaaaagtgtgaggctagcttgcaagagctgaagtagagattaattacagctctagtgttagccctaccttctgataaggaaaaagtcatagtgtattgtgatgcatccaaacagggtctggggtgcgtactgatgcaagtcgattgggttattgcctatgcctctcgtcagttgaaagattatgagcagcggtacccgactcatgacttagaacttgccacagtagtattttctttgaaaatatggctgcattatctctatggagagagatgtgaaatttatactgaccataaaagcctcaaatatttcttcactcaaaaagatttgaatatcagacagaggcgttggttggagttggttaaggactacgactatgagatcctttaccatcctggcaaggccaatgtagtggtcgatgcccttagcaggaagggtcccgagcaggtagctagtatggttcagatttcatctcagttagcggaggccatggtcagatctagcatcgagtttgttgtaggcaagcttcataa

SEQ ID NO: 278677 - DNA, 606 bp, Cannabis indica
aactggggatatacctagcagtaacggagcatgccgtgagcgcgatactaattagagaacaagacggcgtgtagcatccagtctattacatcagtaaaagactcatcgaggtcgaaggcaaatatccgttgatagaaaagctcgcctactgcctcatcctagcaacaagaaaactaagaccttactttcaagctcatcctgttcgggtgtacactgaccaaccactacgacaaatacttcaaaggccagatgcctctggacggttactcaagtgggcggtggagctcgggcagtacgaaatcaacttccaaccccgaacagctatcaaaggccaagccttggccaactttgtggtggaatgcacaggaaaaactgaaagcatcccagaaggagatctcgagtcaacaccacagccgagcaacactgaaaacaaaccgacctggaagctacatgtggatgggtcggccacagatcagctatccagcgcaggaattgcccttgtcacacctgggggggccacaactgcatgcgagcggtcaaattcggattcaaagcctcaacacgaggccatacgagccctaatcgctggactcaaactagcgaagg

SEQ ID NO: 278678 - DNA, 114 bp, Cannabis indica
cagtgtcctgtttaggcgagagtcaaagcatcatccattgaatagagttgtcaactcatcaaaaatgataatcattctagcaaccttttattcgatcgaaaagagaatccgacg

SEQ ID NO: 278679 - DNA, 544 bp, Cannabis indica
aagttagcgctaattgggaggcaacccaagtgttctttatgatttagttgaactctttttttttttaagttttactgttatttttctttttcagtttgtccagttttgttaaaaaaaaaaaaaaagaaagaaagattttgtccagtggccgcgacaatgggatgtatggccgcggccatttaagccttacagagagaggctaaatttcacgaatgctggccacggcgaggggacataccgccacagccatttaaggcttacagagagaaggttattttcacggattttcgccgcggcgaggctacataccgccgcggcgagaatggtcagtttgcttttaaaaaggggcaaatccctaacatttcaaaactcacaccacattcaaatcctcacctatccacgccgaaaaccaccttcttcaccatttttcttcttcaaatcccattaaaaccccattctatcaaatctaaccatacactttcatcatcaatcatcataacccttattctctcatcaaacactcattcccactcaaaatcaaccc

SEQ ID NO: 278680 - DNA, 688 bp, Cannabis indica
tatgaccaaaggttatatcgcagaagttttagtcaacctcttctcaaatgcattagcggagaggattgtggttatatacttcgtgaggtacacgaggggatttgtggcaatcataccggaggtaactcccttgcattgaaaatcatgcggcaagggtattactggccaaccttgcgacaagatgctctcgcgtttgcgaagaagtgtgacaggtgccagcgaatagccacatatacccaccaacctccaagtaacctccattctatcacaagtccatggccctttgcaatatgggggattgacttaatcggcgagttacctaaagggaaaggtggagtcaaatatgcggtagtcgcagtagattacttcacgaagtgggccgaagccaaagcactcgcaaccatcacagcaacaaaattgcgcgagtttgtctatacctccatcatttgtcgctttggcattccatacaaactcatctcagacaatggaagacagtttgattgcaaagagatgcgacaactatgcgacgatttgggaatcaaaaaggcattctccgcggttgcttacccgcagagcaatggacagactgaagctgttaataaaataatcaagcacaccattaaagggaaactagaagatcgcaaaggggcttggccagacgagttaccgcaagtcctatggtcttata

SEQ ID NO: 278681 - DNA, 588 bp, Cannabis indica
gataaggggatgtgcacctggtcgggggctcacggccagcaaggggcgctgatgcccttgcataagtacttccgggatgtggcggacttcttcggcctctgcccggctcagattactcccaagggcattaagtatttgtccgctctcttcgtcctctacgcttcccagggatgggatgctccttctccccacgaggtcgcttggttcttcgacctgaagtctacccccaagcaaggcaggtcggggtatttttacttctctcagccaggcttcaagtggttgagcgggacggaccacaaggccatcagcaaaatagggcgttttgttgatgagtacttcatggtgaaggatccgaacatcacccggactcggtttcagcagatcccgacatatcaccgtcctcccctcacccttactcttagggatagggctcaaaaacttgcccggttgccggcggaagacagggatatcatccagttgacctccgatgaaaatctggtgcagtacgggctttacccagaggacttttcttctaagtccgtgacggggaagaaggggaaatctgctgctgcccggcctgaacgagct

SEQ ID NO: 278682 - DNA, 625 bp, Cannabis indica
tgtcaatgtgcgagtattcgaagtgttcgtccgaatacccgcgagtattcaaagcatgaaacagtgcccattcaagtatttcttatacagtatgcggttatgccaatttacaggtcattttttatgaaattacccagtttttttacctaaaaaacgtagcctcatacataccccctacaaacattcattcttaaaccccctcatgcgtatcagaaacccagaaaacagtgttcccactcaaaccgaaaacgaaacacagaggagattcgaaaactgaccttttgtttctgatgaaattgttcccacgattcgcccttgacagcactgtagaatcaacgaaaagtccacggagagaggcgaaaaaactgggcaatttatggaagtatttttggtggtttctctgaaagagaagaaacaaggaagtttaagggagttgaaggaaaatgagggaaaatggggatttttggttcgaatcagggggtttaaatacccaaatccctcattaattgggatcacgacacgtggcagttggaatacctagagtcgcccaatccaacggccaaagatggccacgcctacacagaaaccgaagagttttgtgacgtggcaccataaatgcaataaa

SEQ ID NO: 278683 - DNA, 520 bp, Cannabis indica
ttcataaataattataaaaaaatgtctgaaattagtgctaattgcctttactaatctaaattacttaagtggtcattaaaattatccccccgttaaaaggatttcgtcctcgaaatctaacctgaatagcgttggatgttgagtcctcatgtcagactctaattcccaggtggcttcttccatcttactgttcctccagagcacgttaaccaaggcaatggtcttgtttagaaggaatttttccttcctatcaagaacctgaacaggttgttcttcataggataagtctgattacagttcaagggctccataactcaagatatgagtcgggtctgaaacatatttcctcaacattgaaatatggaatacatcatgaacagccgacaatgctgttggtaaggctagtcgatacgctacctgcctgaccttctcaagtatctgaaatggcctaatgaacctagggctcaacttacccttcttctcgaagcgcctagtacccttcattggtgaaacccgcagg

SEQ ID NO: 278684 - DNA, 684 bp, Cannabis indica
aatatcaaccattagatatttgatccaatggtcaagaataaaatacccatacatgggtaatacccattaagagcatacccatatatatatatatgacaatacacaagatacactcatacacctaataaaggcagaaaaaatgcttccacgtcggtaaaaactccatctaaatactagcttttaatttcacaatattaataatttgaagaaccacaacatataaatatggctgcttcaaattaattttcaatatatagttgaatgtttcttaccttccattgtactatttctctctcttcacacgaccactgttcttcctaatacaaattctataagaaaaatactaagagccactttaaagtttcaaaatcctatcctatcttatatattaacaatataagtttttgctaattaattatgagacgttatattaatatgtgttggacacattatttttagcaatagtcattacgctttttacaattccatgtcctgctctctattgagaattatggggttttatctcaaaaccaattgacaatgagtggattatcacaggccatgccatttgcttgcttatttttgttcggatctaagcccgctagggatatagctctgataccatgttgagaatcatgaggttccatctcaaaaccaattggcaatgagtggagtagcccatgt

SEQ ID NO: 278685 - DNA, 582 bp, Cannabis indica
aaagaaaaaaataatatttagtttcccaaaacatgttaagcacaaaattctcaaatatgtgtgagcaagtttaaaaataaataaagaagagttaaagaagaactcccctagtcaatgatgtgcaaacttgcttgtgtcaacctccataagtgcgtccaattccatttgactttatgcttgcacctacaagagagaaaaagaaaagaaagagagaaaaaactacaatgcaattgtcaaagccatttaacattgcatgtttattgaatttgaaacaaaataaagacaaagtttagaaagcttgggttgcctcccaagaagcgcttgatttaaagtcgtcggcttgactttttgagaagcactcatcaaagagcggcttccgcccatagagagtggcatatgccctcacaaatgggtctttgtcatgaacgccctcaagcttggcgagatattgaattgatgagcgcaaatgttcaacttttcttgaattcgatgaatgcacatgatggatgccaaggtaccatgccaatggtggaggaggaggtaatggccaaaaaggatcctcataaacatagtattccatta

SEQ ID NO: 278686 - DNA, 822 bp, Cannabis indica
tccgggtgtgggttcgggtccttgtcagggttcgggtccagcgctgggtcccaaatctagacaccgactacgggttttgtcgaagccctgggtccagatctggatcctaatctcgggtccctgtctggttccatttctggtgccgggtcacgagctgggtcctaggttcaagttcgggtctgggtcgggtactaggtcccggtcctagttctgtttcccaggtccctatcctgattctgggtccagctcccgattattgtgtgggtttgggccctggtcttggttcgggttcgagtcctagtctcggttcgggtttaggtctctatctgggttttgctctgggtttggatttgggtttaggtccttgtcctggtcttggtcctagttcggttatagttccatttgcgattctgagttcgagtttgggtttgagttcgagtcaagttctgagttcgggttcgggtccagatttaagtctaggtccagatcaggctccaggtgtgggttcgcatcctgggtcttggtctaggttgggtccgagtccaaagttccaatcccgatctgagtctggattcagttctgggtctaagtccttggttctggtcctggtctgggtcgagtttgggtccgggtccaggtctagctttgggtctgattttatgtgtgggtttgagttctggtccgagtctgtgtccgggtttgtgtccaggtctggaccccattctaggtctaggttcgggtccaggtccaagttagggtctgggtcaggatctcggtctagatttaggtccagcatttcgatcctgttgaccgaggttttcg

SEQ ID NO: 278687 - DNA, 505 bp, Cannabis indica
gatggaggttttggaggcttgaaattgatttccttcaactctaaagactcaaaagatctcttgaatttagggaaaggctgcattggctaaacccaagcaacttgggtttcttcatcttcactcaaagctccaagatcttcaagagaacttatcaccctttcatctttccacacttccttgtgaaaactttcagccacaatggaatcaattacactcaaatgcgaacattcttcaatctcatccgggaatctcatagcattgaacacattaaaagttactttttgatcattcaccctcatagtgagttccccattttgcacatcgatcaaggttcttccggtagcaaggaatggccgccccaaaataataggaatttctctaacggcctcatagtcaaggataataaagtcagccggaaaaatgaacttatccacttgcaccaacacatcttcaattttcccttctggatgatgttggattttgtgccctaaataaaacccattac

SEQ ID NO: 278688 - DNA, 677 bp, Cannabis indica
attactttgtagctgctggttggaggttgtgccgtcagactttattgcatgtagcagtcccaacacgcttcctcccatgcggcattaaatgcgacttgatcgctcaggggaagcctgacacctcgcggagatgccttaacattacttgggcttccgggagcgtatggggctccttatgtcttctccgggaggatggtcccggatgctgctttattacatatggacttagcaaatagtttggatgataagttgcttgatccacgtgtccttgtctggttggtccacatatattaggcaaaatcaggggcaacaacacccatggccagccacctatgcatgcattttccaattattattttcattattttaatgccaattaattactaacctaaacctagcagttatctataaatagaaagtgatggctcacaccaaataagccagttaagcaattgttcagtaattcaggaaaatgcctctttcagaaagttgagccttcccttttctctctatatatagccgaccctcttcttcttctgatatacaagagagatacaatttcgaaatcctagtgagagagtagtgcccacacacaacaaacagtacctcaatcatagtttggaagactgtgaatgatcaaatccaagagaaggacattcagactcagatcttgatta

SEQ ID NO: 278689 - DNA, 682 bp, Cannabis indica
gagtatactctagagtttgatcgattgtcaaaatttcttggtgatctggtgcctagagatttcacgagaaaacagaagtatgttcgagaactgaatgctaaaattagtcgagatttgaaaattaccacatcacatgacactctgtataagagagtcgtagacttggccttaattgctgaggtggccgagcagcaagtaatgaaagagcaggctgcaaaggatgccgtcatggcatcaaatcctcctgctggtggtagtatcagtaagggaaccgacagtggcaaccctgaacacaagcgaaaggctgaggcttccggagcttcagggggaaatagaaagttttgaggaaaccgaggtggccgtcagggtcgtgagtcctcattccgatcatatccccagtgtcctaaatgcaagaagcatcatcctggcgagtgtcgagccaaggcatgtttccagtgtggcatggtgggccactttatcagagattgtccctaagcaaagaaagaggagcctaagaagaatactgctcaaaactcggggcgacttttcactataactcaggctgacgctgatgctagtccgtcaattgtgacaagtcagttgtctattaatggttgttcttatactgtgttgattgattcgggagctaatcattcttatgtatcgagtagagtgatagaaa

SEQ ID NO: 278690 - DNA, 508 bp, Cannabis indica
ctagaatggtgtccattttagataagctgacaactctattcaatgaatgattactttgactctcgcctaccattagaaattatttaagatatgatagttttgtattttcacaagtctttgttatttgctaaatgcttaataatttctgaattgtgtttgaatttatattgaaccatgttgatttatgttattaattatagttgtaattttgtgtaaaataacaataactttgactctcacctactgggacatcgttaaatttttattttaatcgaaattatcctttattttttctcttagctttttcatttcgaatttgctataattatatatcattggatgaatggactataaatcatctgcttatgatgtcactctaattctcttatgaaattgaatggcgcggatgactatattcccgacattctatctcgaaatgatataaatcctcgatcttagaaatctcctacttgtatatgctttttttaggcaaattagacttagagtt

SEQ ID NO: 278691 - DNA, 548 bp, Cannabis indica
cacagtacgttaaaaatcacgttaacacgcctatgctagttagggtgttacagtcgagcaggttggatgggatgggaaagtgttagctagagatcgagctttggtgtggaagattccgctcagtagtcatttgaatactgatttgtggtactggttacatgatgcggcaggagttttcactgttaggagtgcatattctctgcttcaatcaatgaaacccaacagagatagctcagataactctgggatttggcggctattatggcagttacagctccctccaaaggttcttaattttctgtggagaacttctaccaacagtctcccaactcggtttaatctctccacaaaacatgttccaattgctgcaacgtgttcgttctgccttgctgctcctgagacgattctgcatgtgctggtgcggtgctcttagaagttgctggagcaaggttccaattactggtgtggcgcctgatgcaatgttgttctcgagttggttagaagcggggttggtatcgtggaactcggctgaggctcttgaggctggt

SEQ ID NO: 278692 - DNA, 351 bp, Cannabis indica
tgacgatttataattagtcacaacttttttacttttagtcacaagttttattgtgactaaaagtaaaatgttttaacatttctcaacctaattgggtgaccgatcttataacctaatctcttgataagttttgtttcattaattaattctctcttattcttcctttttaatttttattactgttgatcttattctctttgttcataatatcttcgtttgaattatacattgatcatacatatttacattttagcttcgttatttaatcatatcgatcgtgtttgtgttgagctagagcaaaattgtgtcgtatcaaaatcgtgttaacttaaaacatagtacttagttata

SEQ ID NO: 278693 - DNA, 580 bp, Cannabis indica
gaaaacatttcaaaatcaacatcaagcttctcttcttcttctccttctgccgaaccctaggagcagctgggaaccaggtgaaactcattttatttcatccactcttgagctaatctaagccctagaagctagctaagtgaaggtatgattttctactcttctcttgattggttttcttgagtttagtataggttttggtgaaggttttcaatgaattctgagctggggtataaactgagggtaaggtaggttcttagggttgaattggaacttgtttgaatgaaaattgagtgaggttaatggctggttgaaattggatatggttgttgagagaaaatttagtttttcttcactttgaagtgtgattttgagcaaattgatatattgcattgaaatggttgtttggttatgttataattgccataatatactgttctggaaagtttggttaggtttggtggaggtttgattggtttttggggtgaaaaaccagaaatcaccatggctgccaggaaaaaaaggcaggccgtttttctgggtgtctgaaaaacggccgaccgtttttcccaggaaaggggga

SEQ ID NO: 278694 - DNA, 983 bp, Cannabis indica
agatgatatgctttataatcagaggaaagagcaagagtaaacacaatgaagggcctactcaagactgagtttgaaatgaaagacctaggggaagctactaagattctaggcatctctattaagagaaacagagcagaagggacacttagcctaactcaggaagactacatacacaagataattgagaaattctcaatgaagggatctaaaattgctagccaacctataactacacagtttacactatctaagaagcaatgccctgagagcaaagcagagaaggaggaaatgagtaaaattccctatgctaatgctattggatctgttatgtacctaatggtaagcactagaccagaccttgcttatgctattagtgtgcttagcagattcatgacaaatcctggtaagacacactggcttgctatgaaatggttactaaggtacctaattgggacaactaagctaggactcaagtacaagaaacaacaaggaagcacagcaatagaatgcttcagtgatgcagactatgctggggacagagatagtaggaaatctacatcagcctacatactactactagggggaattgtgtaagttggaaagtccaattacaacctgttgtggcattatccacaactgaatcagagtacattgcaactacagaagctattaaagaaagtatatgggttaaaggagtcctagaagagctaaaattactagactcaaaaccagttatttactctgatagccagagttgtgtacacctatgcagaaaccctatgttccatgacagaaccaagcacatagagataaagtatcacttcatcagagacaaagtgacacagggacacataaatattgacaaggtgcctacagaagagaaccctgcagacatggggactaaagtgatcaccctatctaagtttaaacattgtttaaacttaatagggttggatcaaggataatgtgatctttggatcaca

SEQ ID NO: 278695 - DNA, 507 bp, Cannabis indica
gaataattttcaaaatatattttattaatcatttttttatatagaattcgaaattgtatttttttatttaaatgcaaaaattttgaatttttcgaaaaatagattaaagttggaaattaattattttttaattaattttttgaccaacttaaatcagtatttttttttatttaatgattaattaaaataaattataattagtcaatgaatctagatagatattatctatttgcttgaaatatttttctactgatatttaattaaaaagaaaattaatatttaagttgatttttatcatgatacataaatatttgataatctttttaatatttaattaaataggtcaattatatttgtgttgaaaattaatttcttaattaattttgaatcaacataaattagaataatttttcaagatttattttatcttattttatagcattttcataaattgtatttattttaaatacattatttttcgaattttgcattatatatttatagaaa

SEQ ID NO: 278696 - DNA, 1462 bp, Cannabis indica
aagatggttttgatgtagtattaagtttttgtatatgattttggtattatgtgcttcagtgtttgaacatgagtcagtttgttagctgtggctgtgtgtgagtctaactttaggcatattgccttagctgttttcctttgatggttagatttagtatttataaaatagttccccttataaaaagaagttttggaggataggtgggtggcaacatggcgggttttaaggctagaaagtaacaagggaattataaataccttgaagaaaattaagagaggctttggggtaaaattaggcattggttagccatttgcctttttaatgtataaggagtttagagatttcgttagttgagttatttagaagatgacaatattttatatatgttcttcttcactttttgctgtttgtgtgggtatcttcatccattgttgcctgcttgtattatttaatcattaataagaaactttgatgtctggttaaaagaagtcttgaagggagacctggaattaggattttacatgacagaagcaatgcaaattgaagaagcaatattttactttggtcttccctgtacaccctattgctgttttgcatttcgtacgtcagtgaatttactgtagacttttaaacaagatggccaatgggaggttctctttaggctatttgtggttggagggagaaaacgtaggaaagaagacggagagctacataagtggaggggaaaggaaggagggatttcttttggtgtgtgtggagtgggtgtattggtttttaagaggaaggggagaaaattgcattgaattatatatgaaagctttggtcaaatgttaggactaaaatattagtagcaagaatagaattagttatgattaataaggtgctgagttattgtttttcaagtggctgagttgtacatttttctagttatgagtggttctgtggtggcccttagttatagttgattgagcctagcatttaagagaggcttatttttcttagaggttagctgattgcttgtgtattttgggagagaaactctgttctggagatctccaagtgtctcggaaacttggagctttgtaactctgatatcaatgaagataagtctcttgatttcatatctagtctagtctctatcatcaaattgaaggggggaatttaattatcgtgggtggaagttactctaaaccttgcgcacactaatctgttattaatcatttcagacaaaataattgaggtaaaagactgataatctttcctccttagatttctgtagggaatggagtctgttgatgtaaaagactgataatttgttttgctttgatttgttgtaattttctttctgttattgtatacttaagctttgtttaccaaggttttcctccgccacaagtagccgcacacgcgggggaaggggcagtctaagacaagtggcttctttcactttttcaaaaaaaaa

SEQ ID NO: 278697 - DNA, 563 bp, Cannabis indica
aatcagatatgagagcccagtatttggagttgttcaggttagatttcgaggacgaaatccttttaaggggggatagttataaagaccgcttagtttaaatttggaaattagcagataattagggtttaattatgaaaattatttattgatattaaataattatttatgttgctatatttgaattcagaatgcattttatatgtcatatagtgaaatttcataattttgcattttcggtgtccggcaacatggaacgcggtgtatggctcagtagaatcacaatttagtattttggtatagtgggacagtttagttagacattgggaatgtcgggagtggtcgggaatttagagttttcccaaaatacccttagtgacttttagtaattttttagtgtttaaaggggcaaaatggtcttttgaatcaagttgtattttgtcttttgtggaatatgttaagctgatttttaggattattggctgaattatgttggtaaattaagtctttactccattttattcaagaaaaataagaaatttggaaaataaagaagaagctctttc

SEQ ID NO: 278698 - DNA, 1124 bp, Cannabis indica
tagtataccaagttgagccttagcctatttcaaaaatttccaccacttaactaagcttaattcactatctttaactactttcatcctcaacataccttattatgccataaacttttaatcaagtttgggaggaatgaagtgttgtaagtggggaataattttgaaagtaagagattggaaaaaataattgttatgtgatgtgccttgtaaaaagaaagaagaagaaaaaaaaaaaaaagaaaaaaataaatgtgataatttcttcttgagaacaaatgtgaacaatgaggtaggcacatagaagaaaaaaagtgtagtctcttactaattctttgggatgaaataatggataattgagggtacttgttgggtataattttgcttatggtataatgtagcctaaatgacttctcatctacccgttttacctaagccatgctattataaccggaaaagaccttttgattccgagcaagaattgtcaacattagtggagaaaggtatgtcattcaagcttattgaacatgggttagcggaatgtcggagagtgtagaatggttgtgatatgattgtcaaaagaggtgttttgtgtctatatgaattgcttacttttgaattgtgcatccaagttaattcttagagttattgagttgaaattctggttattgatttgcttgaagttgtgcaggtggtagtggtagttcaatcatttgaaggtttagttatctattgcattgtttaattttagtttgagttttagctttactcgggggcgagtaaagatttagtttgggggaatttgttaggctattttagcctaagtttcaggtcacattttatagttatttttcttcttgattattttttttggaatagaattacgcttgttttctttggtttcaggtttcgacacttggaatgtataatttggacaaatttcggaaaacagtgatctataaaatagagaaaatgttgaaagaaaataaagctgaaagttaaatcctagattcgactatgttttgttcatattttgaaagaagtcaaaacataaaagtcttagatctcttttttatctttccaacgcatcttgaattagcccatttggagtttgtatgagaaagtta

SEQ ID NO: 278699 - DNA, 654 bp, Cannabis indica
agacagtgattagcacgtagagtatgcgcagtggcgcttatattgtgaatgatatgcatgaaagtttagtaaccgggattagggttattaccctaacatgagtggtttaatagcctagggttattaccctagtgatatatgttgtataaatactatgccatgttggataaatgtatatattgagattatgaattatgcgcttaaggcataattaagctagactcggtaagctagtaccttgagttaattttagtgtggtctagggttattaccctagaatattatgaaaccagtgaaagcatgagttagggttaacgctcttagtaaatgttatctgagtatatagaagcgtattgtatgagtggttactcagtatgtaagttagggttattaccctaagattatatatgttgttattaatgttgaatacacgcatgtatgttaaaagttatgtgtatgagacataactgggttagacctggtatatatcaccaggataaaccatcgaaagaacgtaatgtatggattacgtatatataagaatagggttatgcaagcaaggcataatcaggttaggctcggtaatcaaaaccgaggtaaccctactaaggccttattgtatttagacgtgtgagagcaacacgtaggtctacg

SEQ ID NO: 278700 - DNA, 525 bp, Cannabis indica
aatatatatttttttaatttatatatataaaatgataaaattctaactcatttgaaaagtttttgtatgtgatgaaaaaaaatatatttttctaaatattttgaatctctttgattgggagacataagtctaaacttgaacactactactaagccatgtttggaactccggataagaactttggatttgataaaataatcctaagccatgtttggtaattttttgagttagatcaaattaaatcccaaaagcttgactattttaacccaccaagatgatggtttaatttagtccaatggtgctctttttatttttattgtttaagcttattttaaaatatataatatttatttatttaatttttgaaaatatgttatatttactatcaaaaaattcaaatattttttatttacttaatttattttgaatatattcttattttcatttacatacaattatttaatctaaaatagtattttttatttcttaaaaaattataaacttatttaaaaatattttatattt

SEQ ID NO: 278701 - DNA, 281 bp, Cannabis indica
tatgttagtgttttgggacggtttattagacattgggaatgtcgggattggctgggaatttagaatttcccaaaataccccgttagtgctctttatgctattttagtgtgaaggggcaaaatggtcattttgccccatttatgttttgtcctttagtggatttagaaattgggaatttaaatgttatttgatatattggctgaaatgaataaatgaaccttgttattttcatttttacaaacttagaaaattagaaaatttgaaaaaaaaagcaaaacttt

SEQ ID NO: 278702 - DNA, 504 bp, Cannabis indica
ttgatgaagggcctattattgaagaagctcctattgttaatgaggatcatgttatcgaataaattccaattgtggaagatgttattcacaataatgatcaacaaatagaagctattccagaagtacctcctctaagaagatctcaaagacaaaagaagtcaacaaagtatcatgataattttgtttatcttggagaatgagaatataatattggtcattttgtggatcctgtcacttatagtgaagcacttaatagtccacaatctttaaaatggttagcagctaagaatgatgagatcaactccatgaagaaaaatggtgtatgggagctagttttattacctgatggttttaaaccaataggttgtaagtggattttaaaaaataaaaggaataaaaaggaacatattgaaaggtttaaagcacatttagtggcaaaaggctttactcaaagagaaggtattgattacactgaaactttctcatttgtttccactaaagatt

SEQ ID NO: 278703 - DNA, 314 bp, Cannabis indica
gtgaaaactgcaaaaccaagtggggcccattacacacaccatggccggccactttatgtggattttcaaattgatattttcattattttaatgccaaataattcctaacctaaaccttgtagttgcctataaatagaaagtgatggctcagtcaaaatcataactccgaataatcttctaacagaaaattctctattcagaaaactgagcctttcccttttctcttctttggccgaaatctctctctctctcttttcttcttctaaatttcgaaccttagtgatagaataagtgcacacacacagcaagtggta

SEQ ID NO: 278704 - DNA, 601 bp, Cannabis indica
tatatagatatatatagattatatatagtgctatggcttcccaataattgggtggagcaagcgaggaggaggtgaatttagggatgcactttttatttgtggagtttttttttatgggaatgggttgtttgcgaacctgtttttattagcgcgataattttttgtttgaatgtgaaatgggaagggatgaggattatattttaatttcgaattaatgttataaagggtggggatgtcactttttgttttgatcagtaacctgtgtaatatttactaatttttaatagtgttttatatttttattttatttatgaatttttagtataatagtaatttttaagttgtattttgaataataatttgtatattaaatataaataatgtataatattttaattttatatattaagattttaatataaaattattttaatataaatagatatcgatgagattcttcatcgcaatagagaattcctacctcttctgaccggtagggatccaaacatctgatgggtaaaggcccatctagccacattatattggacaccagtaatactcatcactttctataagtatcactttataattagttagcgat

SEQ ID NO: 278705 - DNA, 546 bp, Cannabis indica
gcagtcaactttccttttatacaatcaacacaggcagtaaaatcagaaaaatcaagatcctgaagcacaccatctttcaccaatctctccattctatctctagaaatatggcctaaacgtttgtgccaaagcatggaagatttcaaatctgatcttgcacgtttagaaccaacaacagcattaagagaagaagaagaaggacaagagggagaagtaacaggaacaacatcaagcaaatcaagcttatataagtttccacacaaagttccatttccaatcaacatagagtcacgatacaaagtcagttttccagttccaaaatgaagactataacctagtctatccaaaatagatacagagatcaaattcctcctaatagagggtaaataagcaacatcatgcaactccaaaaaatgcccagtattcagctgcagattaacagtcccaaaaaattcaactctgactttagtatcgtctcccatgtacacatactcctccaacctactcggccttcttcgacttgtcactgcctgcaaagaattcgta

SEQ ID NO: 278706 - DNA, 537 bp, Cannabis indica
atgtttcttttgagatttttccaaattatcaaaataatttgttttaaacagataccctccgtttagtaacgacttccgccatatgggaactgtcagaagagctaacccgactcttctttttagtgcgagccatagcgttcagcatggtaggtagttttgcggtggttatagcagtctcggccaaaggaaacccccctgacaggccgatgggcacccctactggaatattgacctcaccaaagggaagagtgtatgtccactctcggggcagataagatcgtatccctttttcaagctcccaaatatgcctgttgtatgcttcaccacctattctctctcggtagaggtggtcgggcgtctctgacacactactaagcccctcgtccccagacgagttgtgtgggggcgacgctggacaatcttcaaaaaaagttgaagaaggtcttcgtctactcggtgttcacccccccaatagtcgctataacgcatctgcaaaaaggaaaaggcgaggaggtgaatacaccgagtaatgctagt

SEQ ID NO: 278707 - DNA, 775 bp, Cannabis indica
cgaccatcgagagacaacgacgcagagtcagcctcttcgtcatcgcatggacgcactccgagcaggtatacaaggtccggctctgtacagacacaataggaaggacgttatcaagtacaccgaggtgatctacgtgatcatctcaacgcagttttcagggcacgctcccgcggcccacataataccgagacactccgtgatccccaggcgggcgatcagggtgtcaacgcagataataacccgcctatcgcgccgatcgcgaccactgggattaatatcccagcaaaccttgccgcggtagttgcgagccccgcagtcgcagtgactccagcccctgcgacaggaggaatcgaccaaagcatgcttctgcaagctttaaagatgctcgagcagcagcgtaagcctatatataagctgcatggcacctcgccttttaccgcagaggtgcggcaggctcaacttccaaaagggtttcgtttatccgaatccctcaagtataaaggtacttctaacccgatagactatttagaaaaatttaatactataatggaagtagaccaggtaccacaactcgcgaagtgccgcattcttgcggcaacactcgaggaaaatgctcatgattggttcacccaattacctgaggcatcaatatcgacatgggaaaccttcgtcgacctattcctcacgcatttccaggccacaatgacgtatagaccaccctatacgactttggccaacatcaaacaagaacctggtgagtctttacaagactatt

SEQ ID NO: 278708 - DNA, 488 bp, Cannabis indica
ccaattctcaaagtctcgattataaagtaacaaagaagtattaaaatttcatctgctcattataaagccaccttcactcaaaatagcacaacaaaagtaacaaagaagtattaaaggtgtaaattttaccaaaagcaatgagaattaacaactgatgattgcattctgtttcagtaggtgaaattgagagagagaggcttttgttgtgtttgcctgtatgggtgatgaatgggttaatcgtaaagattgtttaatttttttggtttaattattgagtttattttttgaaatttgaatgaagcagtgtaaaaaaatttcaaaaaattgtagtttgttagagagatatgtaagttaatcgtaaatattatttaattttttgggtttaattattggatttattttttgaaatttgaatttagccgtgtaaaaaaatttcaaaaatggtaggatttgttagagagatatgtgggtaagatatttttttaatt

SEQ ID NO: 278709 - DNA, 659 bp, Cannabis indica
aacataattatttcaagagaatgtgacaatgctcgaaaacaacacaacaatacttgaaaacaacacagcaacaacagaatcatacacattggaacaccaattagaataaggaggagagtcaaaaacaagacaatttgaaaacgacaaattcgacatagttgactaggcgaagttggttgctaaaaaaatagtagaaaaacttgaaaacaacagtaaaaaactagatcttgaaatcgacatcaacaacgcgaagctaataacagacaaacaccacccagaagttgaaaaaggtcaagcatacaaagtttaggaaacactgaagaaaatttacagctactacgcaatcaaaaacagcttccaatacagtttttgaaaacatatttaattgggcttcagtaagaatttttttaatatcttcaataacagagtaataaccagagtttataactctagaatggtagtattccgatcgggtgtacttggattttcaatcctataaaaaacataagaaaacactactaaaacaacacaaaaaaaaaaaaaattaagaacataaaaaaacaagcataaaaaaactctggaatggtagtattccgatcgggtgtacttggattcccaatcctataaaaaaaacaaaagaaaacactagtaaaacaaaa

SEQ ID NO: 278710 - DNA, 643 bp, Cannabis indica
atatgtgtttagtctatggtaaattaattgtatctgcatatttttatttacttattaattatgtacttttatcaacgatcgtaattatctatcattatgaattaatatattaatatatctatcatcttcattcattaattagtcgtgagttacctgtctgtatatatattattatatactgtgcaggttcatatcgatgatatatctaactttatttattttattttaaaaaaaaaaaaaaaacggaaacatgcatgcacaaatgcattttataagaaacgacatagtatattgttaaaacgataatagttgaaggacatataatgatacaacaccaacaggattcacgaacgtgacaagtcaaagaaccatctcatataataataatattgtatcgtgcttatataattatatcgtgtctaaatatgtatataataaatattgtcatttgccaaaccgaaacacaacctaatatgttttaataaatataaatactctacattatatatggagattataaatatgagtcccacttttgacagggcccaaacttgattggcaagagcacggtctgaaaaattaaaatgtgttattgggtattataataatattaatatataattaaatttttacaggctaatta

SEQ ID NO: 278711 - DNA, 757 bp, Cannabis indica
ctctctctctctctctcatttgtgtagattttcaggtatgacattgacatgacaaagtgcatctattgtggtttctgtcaagaggcatgccctgttgacgccatcgttgaaggacccaattttgaatttgcaactgaaactcatgaggtaaagtagcatccttaacagttcatcaacaataatattcaaccatttttacgataagcgacaacaatcattaacctactcttctctattatttcaggagcttctgtatgacaaggaaaagcttctagagaatggagaccgttgggaaactgagattgcagagaacctccgatctgaaagcctctaccgttgaatttttctctacttcccatcccatggtttcatcatggtctagataatgcattttctcagactttttgatgatgtggaaataaatggatctatgaggagtcttgcagatctttgtattgttttcctaatctctgttgattaattccaagcaattggatactgaacgccacaaaagttttgttttggattatgtattttgctctggaagaaatatatgtgaaattacgttggaacaaagggaaagaaaaacagtttcttcatatttttaatatatttatcttttcaaatttttgatatattagccttttggggataatttcatgctctcccaagtttatattaaacgtttgtttctcatcatacttaggttgtgtttgaaagtaactgtgtaattactaggtagggtaattactaggat

SEQ ID NO: 278712 - DNA, 722 bp, Cannabis indica
acatagttggatgagcttaaaggattttgatgcttttcgtatctcttctggaacaacagagaaaaaagagtggaataaatacggatacttatgtatttctctatgtatgtacctatatatatctacatatctatctgtataatgctgtttagacgttgggttcgagactaaacatgggtttaagtcacttcaaatatatgaattttggatcaatcgctagcattaaatctatgaatattttcatgtgtatattgtgaatttttatttttatctttcaagtaatttttattattgttatttttgagaatttagagctttgaagaattttttcaagttttaatctaataatttttttttgctatattatttggagcaaaaaatattgtaagaaaacatatggcattacaacaataagagtaatgagaaagttgatgatgatactatagagtcgagcaacaactacaacattaattttggaagagaaagatatttttttatgacggtctaaatatgaaaaataatttccagaaaattctaaatctaaaccctttatgatctcatctttccctaataaatctttaatccttaattttttttttttttaatgttttttagattttttctatctctttaattggaatgaatatagggctatttacaaaagtatgggaaaataaagataagttttgatatatatggcataaaaacttaattacactaaa

SEQ ID NO: 278713 - DNA, 782 bp, Cannabis indica
attacaaaaaattttatttttagtaacaaaatattttgtgactaaaagtgaaaaggttgtacttaattataaattattattcttatgtttgactaaaagatccgtggctgaaagtattaatcacaaaaattactatttattgtaaataaatgtattttttagtcacaatatatttgttgtgactaaaattaaattagtgacaatttgtatctaaaaattatattttagttacaagtaattttttattgcgactaaaaatcacatttagtcacaaaaaatttatatagtgactaaaatattgtgactgaagataattttttttatagtgagagataatgcgggttgaattttgtgttaatcagcagaattatcccaaaaatctaatcctaaagtctttgtataacttcacatctctaaggtcgccttttaatacatttataatctatacatacacatacacaccaaataaaaacaccatcaatatattcaaggagaattacacctaaatattgtaaacaatatatacattatacaaaatatagaggtgtacttaaattaaaacatatttatttggtgaacatataaatctggtgtatatatatgtgttaaatattttatataatcaattttttatttttgtataaaataactgctcacgagtttgagttgctccatttttattttctaaaattgtatttcattgcttggatccgcttctttatactagtatcatcaaatgtactagtcaattgatacatcttcatattgagcagtaataaaag

SEQ ID NO: 278714 - DNA, 540 bp, Cannabis indica
caaggccctaaaattaaaattcgtactcttacaatacagcggaaagatcactatttttgaccaacaactacactaattcagtgaaagttgtcttcatacaaattataggaaattaaattatctttccaatgatacaaagatcactaaaaatggattaaaactgagggagttatcatagttttaccgaaacagttttttagaaatcctaaagcaaacgaactttagactacagcaacaaaacgataattttcgaccaaggaaaactccaaattagagaaaactctctgaagggaaaatgtagataactttctaagctttaaaatgatatatagattattaaaaacgggctagaattgaaaaagatattccaattttactgagacaattttttcaggaaatatgagaaaaataattcacgacaaactgtatacaaatactgattttggacatagaaagattccgaatttgtaagaggtttcttcataaaaattataggtcattgaatcagcttttcaatgatatcaagaccgctggaatcgg

SEQ ID NO: 278715 - DNA, 826 bp, Cannabis indica
gtcctcccccttcctttttggcgaggactccttctttgggggtgacttagccagcttcggacttcgctgtctgcgcgggctgcgtcttctcgggcttcggcccctggagttcttccctcgcggactgcgagatcgtgaccgcggtatgggtgaccgacgtttgtccttccccttctctaactccgctagagagttctcaattcttttgtgaggttcggccatggcgaagaactctaccaaggactccggccttcgagcttgtagttccttccaaaagtcggtcctcggcaagatacctgttatcaacatacaaacaagcgaagactcgggggccttctcgacctttgttacttctgcgttaaaacgtttgaaatagtcttgtaaagactcaccaggttcttgtttgatgttggccaaagtcgtatagggtggtctatacgtcattgtggcctggaaatgcgtgaggaataggtcgacgaaggtttcccacgtcgatattgatgcctcaggtaattgggtgaaccaatcatgagcattttcctcgagtgttgccgcaagaatgcggcacttcgcgagttgtggtacctggtctacttccattatagtattaaatttttctaaatagtctatcgggttagaagtacctttatacttgagggattcggataaacgaaaccctttcggaagttgagcctgccgcacctctgcagtaaaaggcgaggtgccatgcagcttatatataggcttacgctgctgctcgagcatctttaaagcttgcagaagcatgctttggtcgattcctcctgtcgcaggggctggagtcgct

SEQ ID NO: 278716 - DNA, 1389 bp, Cannabis indica
tagactatgtctatttgtgaatttttcactaagtaagggcgaaattgtaaagaaagagtttttaggggcatatttgttaattatgatactttgtatggttcaattaataaatatgataaatgacaatattatttaataattatttatagttattaaatagttagaattggcatttaaatggttgaattagaaaattggcgtttttgagaaaatcagatgcaaaagtgataaaactgcaaaattgcaaaaagtgaggcccaaatccaatatgccatggccggccacttttataggatttatcctctgatattttcattattttaatgccaaataattcaaacctaaccctagtggaatgctataaatagatagtgaaggcttcagaaaattacacattttcattcagaaaaacctgagcctctctctctacccttggccgccactctctctctctcttcttccttcatatttcgaaacccttagtgataataatttccaacacttttttcacaagaggtaatacttgtaagaatcaggtgccctaatcttccaaagctcgtacttcatcggccatatcctttctccaaccttcatgtttgactgccttcttaaaacctttaggaggattgcatgcatgtattgctgatatatattttctatggttattataaaatctatcacaagatacaaagtgtgagatagggtaaagagtagttgaagaagttggtaaagtggatgagttggtgaaaggacttttctttttcacaatggtacgagtcacatagtcttgatatctagtatttaggaaacttggaatatgtccctcaccctagttcaacttctgtctccttaggaataacctttgtaggtgtggatatttgcggtctctcacttgagatggagtgatgttggtcgactttgtcattttcatcacttgtcgaaactaaacctttacacaggttggtgcctccatgacaacctcatgagataccaccctgtcttcacacacaaagtcatcaaattcgtcctcatagaataattgagtacccatgatatgagcataagcattatgggaatctacaaaatttggttcagataaaggaacacattttcaaaaaatttagggaaaatggcggcaaaacccccaatactttggttttggtttctccaaaccaccacaacccaaatttctacgggtaaacccccagaaccactattctgttatcaaaaacacacttccgttcccctgaccccgttatgtgcgtacgtggctcaatccaagtaagcagcagctcgacgcgtcataaattattgtgacgtggaaataaaaataataggattaaggtttttttttggttttaactaatggctaattacccagaattaaaa

SEQ ID NO: 278717 - DNA, 652 bp, Cannabis indica
tcatctctcatggcttcactcgaggtactgcagatagcactctattcattaaacatattgacaaaggaatctttgttgcccaaatatatgtggatgatatcatttttggctcaacttgtgatactgaagtccaaacatttgtcactttaatgactaatgagtttgaaatgagtttaataggtgaccttactttctttctaggactccaaatcaaacaactagatcatggtacattcatttcacagtctaaatatgtcaagtctatgttagataagtttggctactctcaggtcaagcatgcacacacaccaataggcaccacgtccaaattgtcacgagatgagtctggtgaccctgttgaccccactctatacagaagtatgataggtggcttactgtatctcacagcaagtcgccctgatatatcctttagtgtaggtttatgtgccaggtatcaagccaatcctaaacagtctcatctctctgctgtcaaaagaattttcaaatatctagctgggacggttaattatggtctttggtatagttgtgacacgaatacctctttggtcggatatagtgactctgattgggcaggatgtatagatgataggaaaagcacttcagggggttgcttttacattgggaataacct

SEQ ID NO: 278718 - DNA, 628 bp, Cannabis indica
tcttcttccatgaaagtaattggttgatccatgagttggggcttttgagctggaagctgagtgacttcccacacctcgtcgtgtttaatggccccaacatagcgctttaattcttttcgagtggtccctctaatatggggcccaccagagatcatagccactcttccattgggtcttggtggcaggccaggggtctgttgagggattggtcctcccgagggtacagttggtgccaatgctctgggcgcacttcctggtgtcccttggggcaatggaccccctgtcagaaccgagttgagatggggcaaccggttcttgatccactcatagaggtgaccaaatcggatcaagttttcgatctcatctttaagatttttgcactcattggtactgtgtccaatgtcgttgtggtattcgcatcttttgttgggatcccttcgggagctatctttgtacagaggaggtggcctccggtagtgtgtattttgcctcgtggcaaaatacacacgctcttgtgtgtctgttagctccgtgtactaggtatattggggagtataccctcttttttggcgcttgtccttcgtccggttactgccttttgaggacctcttgctccgggagccttgag

SEQ ID NO: 278719 - DNA, 501 bp, Cannabis indica
acgagtcaatcttattcagatttctgacagttttctcagagccttttttgtatgcttttttcgtccacttttttgatcttacttgccactatttataatcacatagtaggcagttaattacaaagttgactgtaatctttttacaacgatcatcccctaaaattatggggtttgattacatatcacgttgtgtaaatgcggttattatttgagaatcatatagatgtgatcctcccgcatttattggatcaaaatgatcgtgtatttgaatacatctttaattattgtgtctgaggatgtccctacaggagcttggttccagtgaccgtgatagcgagctggagcctttttccttatccttccgaggtcgacaatgtacgccttgttgcttctttgtttaaaagtttatcactttatttgggacaatcttaattcttgttattagagtttctcgaagcttgccatatctctatgatctgatcccaaagttatagggatttc

SEQ ID NO: 278720 - DNA, 653 bp, Cannabis indica
accgcactcaccccaaacttaatgtaaaacttggctcctgacaagtgagcaattaagttaggacatgtttggaaatgcaaattaggattggtgtgatatgtatgattgggttacacaacaagaataggctaaacggctcaaacttgggtgactagggaaaaattcagttttatagggaaggttagaaaggctcaaacgtccaaggaaagatagaatccgtcagggattggccaagaccgaaaatagtgacagaagtcataagcttcttaggtctagctagttattatcgtcggtttgtagatgggttttctaaaatctcaacacccttaaccgaactcaccaaaaagaatcagcggtttatatggttagacaaatgtgaggctagctttcaggagctgaaacagaggttgattacagctccagtgctagctttgccttctgacaaagaaaagtttatggtttattgtgatgcattcagacagggtctgggatgtgtactaatgcaagtcgatcgggttatcgcttatgcctcccgccagttaaaagattatgaacagcgatatccgactcatgacctagaattggcagcaatggtgttttcttttaaaatttggtggcattacctttatggagaaaatgtgaaatttatactg

SEQ ID NO: 278721 - DNA, 807 bp, Cannabis indica
agtgaagtaatcaactactaccactgcatactgcactcctcctttgcctttgggtaattgtccgatcagatcgattccccaaatggcaaagggccactgactctgcatctgagttaactcattaggtggggctcaaggtatctttgaaaatctctgccatttgtcacatttcttaacataggcttttgaatcttcaatcattgttggccagaagtaaccttgccttacaattttcttagataagctttgcccggcggcgtgatttccacaaaatccatcgtgcacttcagataagagtcgtgcaacttcttcttgagtaacacatatgagaaatggcattgagaatcctcttctgtacataattccctctactatgatctaccgtgcatctttctttctcatttttcgagcttcacttcgattatcttggagtttcccaaagtcgaggtaggctgctattggtgtcatccagtttggggaagtatcaatcatttcaatttcttccgtgccagtgatgctaggctcttcgaggaactggatgggaactaagttcgccttgttacttacattgttgtttgccaatcgagctaacgcgtctgcaattatgttttcttcccttgggatttgtctgagatcgtagcttttgaattgtgcgagcagatcatgtatttttctcagatatgctatcatcttttctccctaagcctcgtattctccggatacatgatttaccaccagctgtgaatcactgtagatttcaatgtgttcggctttcatctcctgtgctagttttaggccagtaattag

SEQ ID NO: 278722 - DNA, 508 bp, Cannabis indica
ccaaataccacctaaattaaattattatttatacaaattaatttcactatgaaaaaagtgtgcatattgcataataatgcgaatacctatatataaatataatttttcctggttcaatattgcatgtattaattaaatctgaaaattaatctttttatgtaatcatcattatcattatcaaaattcaaaatcttattaggtatataaacttattataggccattattaatatgggaaggtgaatttttaagatagaatttttgatcttattcatgagttggaaagtgagagaattcgagtgtgtatcacatttaaccacctttaactattaattgactatatataaatatgaagaccaagacaaattattttatggtcaacgaaaattcataattatttatataatgaggtaatttggactgacatataaaaataattaaatttaatattagagataaatatttaaatttaatttttaataataattaagttatatttttaaaatttc

SEQ ID NO: 278723 - DNA, 592 bp, Cannabis indica
agagtgtggggagggcggtgataagtcaaaatctactggtactgagtgcgagtgatgcccgtgccatccaccatgaagtactcatcaacaaaacaaccaatcttgttgatggccgagtcgtccgtgcccgtcaaccacttgaagcctggttgagagaaatagaagtaccccgacctaccttgcttggcggtggaaacttcgtgaggagaaggcgtaccccactcctgggaagcgtagaggacgaagagggcaaacagatatttaatgcccttaggagtgaactgggccgggcagaggccgaagaagtctgccacattcttgaagtattgatgcaaaggcatcaatgccccttgctggccatgggcacccgaccaggcgcacatcccctttaaagggtttgtggcacgattgttgtgggcgggaatgtagcaatccagtttgcccaggtaaccgccctggtcgagagtccaaagatgcgcctcagtaaccctggacggagggcttacccacctggcgccaaaggcaccttgccttctatgaggaactgcagcggaagttcctcactgacgtagtccatgccctcaaccaggac

SEQ ID NO: 278724 - DNA, 535 bp, Cannabis indica
taagtgtaactctcatacgttctactttttttatctcaataaataagataataatcacttttaatctcaaagaatgtaacttctcactaagttactatttcttttttcaaaatcaatattggaaaaggaattccaaatattcactttattcataatagatgataataatctccacatcaatagcaataaataatattatattactatcaacattataatcatactatataactcatacattaatataatatgtatgttacaaaataacatctcatatgtgtaacatacacataatatcaatattaaattcacaaatacatatgttacatattttatatatataatatatatatatactataatatacatatatatcatatacacataatatatatatattaataacacaattatgtatgttacatacctcacaaatatataacatttatatacttcgatatacatgcatgcatgatatatattatatacacataatatatattatatatgtatgtctcatataaatacataaaaa

SEQ ID NO: 278725 - DNA, 583 bp, Cannabis indica
aggtttttttttttttttaaaaaaaaaaagatttaagtagcatttatctaattatccaattaatcaaaatgtaatcaatgtttaaaaaaaatagtatttatctaattatcaaaaatatattatagaattataatttagtagttactaaatttattataaatatcacagcttacttatacataagcaatgtaattaattttttttaaaaagaagcgtctatagtaaaaaaaaacttaaatctcccaatcattacaaatgatgttcgttggtacagtagatatctctaccataccagttaagttttgagcaaaaatctatttaactacattatggaccgcaaaattataaagtctagaaataaaagaaagttacaacccggaaataaattagagagtctattacaataatgcaagtagttaacaatactccaaacagaagagatctccttcaaggaattaataattgtcttagaatcgttctcatgttaggaatactagtaaaacttaatttagccctaattaattcaagagaatcaaacaataagattaaggaatagcggaagcgtaccggagtccatagaatc

SEQ ID NO: 278726 - DNA, 715 bp, Cannabis indica
gttatgtattctatgatggggaccatccagctgggttcttgcccaaccgtcattatggcctcttttactttgatgcttggctctgccaagcattccactggtactacccccagcccttcgatttcactatctgaagctaacttagccagacagtccgcatgagcgttcttttcccgggggattctttctattttgtagtccgtgaactcgtggagcagctcccggactattgttacatatgcggccattcgctcgccgcgcgtttggtattctcccgatatctgatttacgaccagctgggaatcacagtagacttccactcttttggcccctacggctttcgctaatttcagccctgctattaaggcttcatattctgcctcattgttcgaagctgggaagtcgaaccgtagggccgcctggagtcgcagtccggtcggggatatcattgccactcctgctccgaatttattttcattggaggctccgtccacaaacactctccatgtggggaccgatggtgctggcacatttgcggttgcctcggcttcgttgcattcggtaatgaagtctgccaaggcttggccttttatggacattcagggaatgtagtgtaagtcgaattggcttaactccattgcccacttgaggagccttccggatgcttcaggtttttggaggacttgccggagcgggtggttggttagtaccttga

SEQ ID NO: 278727 - DNA, 595 bp, Cannabis indica
caaaaaagttatttaaactaatttttaatacaaagtggagtttttgttctttaccaaaaattttccttcatacccacaattagacattgtggaagatttcaagaggtcttgcaatggaaaaagaccagaataaggaagtgaaatatggtgttcctgatttattacaactatactagtctgatcttatcatatctattgatataatttttttgttttcaaataaacgatgaatttgtctagcacagtattcaaaatcttagcgaaaacttacagcggcttgccaaacaaaagcaaatagaaaaaatagaagagggattactggcataaaatccacgattggatttaaaaaagcgtaagcctcgggcaatttggcgatgaaaaaactacttgaagaaagggcagaattaagacagatacagatcaaactaaatatgttaagcataacaaacattttattctttagggtaattgtatttattttgattgagttattaataaggcgagttattgatataaggcaagctgaataaaaagaaattttataaaaataaatgaaattagatataccaaaagaccttctttgattttttctcgc

SEQ ID NO: 278728 - DNA, 535 bp, Cannabis indica
aacttaaaattttctaaatgaaatttaattaaatatcaaaattaagtagcaactacctaatttaaggatattccaatttaagtttaaaatcaacttaaaaaaaatatcttttaagaatcttcaataaccaattcctagaattcctcaacttaatattaaattcaaaagatattcaaatttaagttaacaaggaaaattagtaataactaatttataacttaaataggaatatttaatgaaataataaaagtaagtttcagaaagaatctagttagttaaaattctttatttaattaaatacaagaaaaatacaaatagtttatctagaaataatattctacaaactatgtttttcttaaattaatttcaaagaaagaaattaattatgttgctattcaattttattaggtcaaactaatttaattaacctagcacagttatccaaatcaggcaaatgggccttcacaattggggttgttcatgtgagggggggctgggttcagtatgtcgtacccacttctaaggctcccaactc

SEQ ID NO: 278729 - DNA, 580 bp, Cannabis indica
ttgttgttggttttttttttcatttttgttcttagaaatttcgcataatttttggtgagcagaacaatcttttcttcatctgggttctcaagggattcctgcaaagagattttcgatcactttatgaggtaaaactataccacttgcagctttctttttctggtaatttaagataaaaaatgaataattcaccgagtagaaactatatttcaaatattctgtttcatatatgtaaaataatattcaacattataactacgtatgcagagttagaaacacataaaaatgatctgtataactataggtgcatttgtaacactttcttaatagttttttattttttttatttagaaaagtgaaaatatttttagaaaacacgttttataaaattgatttcagtttttaatttaacaattttgaaaaacagaaaaaaatacacattcaaaattttttttgaacatatttttttaattataatttatttgtattttcgttcatcaatattttggaccctaattccggacccggttcccaaccttgaacccaaacccagacgtgagcgttgccccggatctcgtcc

SEQ ID NO: 278730 - DNA, 504 bp, Cannabis indica
ttgccaactttgctcaaatttcccagagagaaaaaattctcagaccaagaaaacactgttgaacactttgcaatttttcccagtccatcttcgttcactactgtcaatccttcttatcttcgtttgatctacagcaggacccccagtctcaacacttcactgtaagtttcttgcaccccttgctttactgttaatgtacatggcatgcttttacttatctgctcgttttttctgggttttgtatttgaagtttctgggaatgcaaacttttagatttttcacgtaacaggtctaggttcaccatttctggtgataggattactcttgtcacgtatttgttactattttttgcaaaagaccatatgttcttcgtatactggtcgtttagggcataggagagattgctttctttcgattttctgccctttctttttctctggtgcgcaatgtcgtcttctgtgaatttattgcacccgactcttgtccagggaatccttctagggt

SEQ ID NO: 278731 - DNA, 501 bp, Cannabis indica
cttttactgggtcagaaatatcgtgtatgaaacacatctttaatttttgaatctggagatgtctcgacagaaactagactgaagtgattccaatggcgagctggaacgattcttcttttcgaggtcgacaagatatattttacgtcgattgcgggtatatagaaatcttctgacttgctagggttatgagcctcgctcctgttagttggatgaaactataggaagtttcctcgtagcgagatggtcatctcgcattcttgttcttcgagtcgatctgacttttacacttggttttcttattgtaagctaaggtatgtgttactcttccctggtgcctcactattctcctttagcggcatatggtttctcgttaatatacgaagcatcagttcgcacattgattcctcgcctaagaccttacagtcagcgggttacaaacagactctgatacttacgaaattaatgagttattccataaaaagatatggcaccgattcacat

SEQ ID NO: 278732 - DNA, 837 bp, Cannabis indica
atttttctttaaaaaaaaaaaaaatcaaagttcttagttttagttctagtttaggttctttgataaatagcttttaagaatttttagagaaaaagatgaaggagaagaagagagaagtgaatgatagtttttgttttaacaaatagatagtgatttttaacaaataattataaatgtaaaaaaattaaataagaaaataatatttaatgaaaataaaataaaataatgacacatattaaaaaaatgactctacgtaaagtcgtttttaatatctctactcaagcattatccaatactattttggatcatatattttgtaaaagttactaattggatcttttattttgttaaatgacaaaataggccctgtattttctaaaatagtacaatagaactctgaactgattttttgtcaaaataaaatttaataataatccgatctaaaagtgttataataaaactatttacattttctgaatctgttcgtattaggaattgtcttcaaattatttgtattaaaaaaattgtcaaaaattaaactcaaggtcttatctttaccattttgaaaaatacatggtcaattttatcatttataaaatagaaggtccaattggtaacttttgcaaaatacagggtccaaaatagtatttatccttaattattttgtggtatttttgaaaaattatgtaatgtttggttttagtgtgaaaagtattttaggtcagaatatattgtgaattaaattaatatttggcgcgtatatttagttatatttttaattttaattttacttatatatatttagttatattaatttttttaatgttatttaataaa

SEQ ID NO: 278733 - DNA, 563 bp, Cannabis indica
gcttccgatcaaccactctaagtcggtccgcattcacgagtgttgaagtagccctagacttcttcttcatttcagtgtactcagcgaaccacctaggccgccttctcttcctccggttctccatgagttctggagctgtctctaacacctgcacctcagaatcctgagtatccccgatgctggtgatattcgtcttctcaggtgtacaaaacatgtcatcatcatccgatttgtaatcatttgggagaatgaagtcatcttccggtgactcagcctcctcttctggttgtggctgtggctgtggctgtgaatctgctgccagccttccaggatcttgcaggagcgtcattatggtcttcaactgatccataatcgttgtttgtcctcttaacagaacggcctgcccttccctcaaagcaatctgccccctctccacagtctccaaccttgccaaaatggcagggtatactggatcgcgagcctctgaggtgctacgaatagaagctgacgggggaacaagaggatcctgtgatgctgcaggtgggtctacaccacactcatct

SEQ ID NO: 278734 - DNA, 852 bp, Cannabis indica
gtccgacaccttgagggcggaggcgtacaagaaggaagctgaggaggccagggcggagactgcagttgttcgccatgagttgggtgaggccaacaagaagctttttaccgctaataagaagatcaccgtgctgactaaggatctcgaggctgctgatcttcttgaggagaccatcgagaccttatctgccgaggttgatcgtcttcaggatgagaggacttctctgcggcaagtctatcttcggctgaaggaagataaggacgctcaggcggtcgaggcgaaccgcttgaaggagaaggttgatgctttggagactgccggcctcgagctcttctttgatttttggaaggctaatccccaggccaacttcgactacttaggcgacgccaaggaaatgtacctcgagtactgcgcggcccaagttgcctatggtgggaaagaggtggctgcttcaacttccggccaagcttctgaccaggctgctgatgcttctcccgctcaaacaacagatcctcctgctccagtcggctcagaagaaccaaatccagagcctgggactccagccgtttgaacattgatctttttattcctcctgtttatatatatatattatatatggccgtaaggcctttaagacatcatgaccggccaagcggtctttaaacttggaattaattttcattttttggacaacgggctgaccgggcagcttttaatcccggtacattatgctcttgttatccttaatgaatttcattctctgtttataattgcagtgcaattgtttttgttttatgtttaccagatgctttgtacaggtataggtgccccccaagtgagcgagcagacgta

SEQ ID NO: 278735 - DNA, 572 bp, Cannabis indica
acggctttcttcagaatgaagatgaaccttgtgtttaccaactcaaggaaaaccaagtggtagtattcctggtcctttatgttgacgacattttgatcattggcaacaatgtcaagaaaatgactgacatcaaggaatggctagacactcaattcgaaatgaaagatttgggtgaagctgcctatgttctcggtattcagattatcagaaactggaagaacagatcccttgctctctctcaaacaacttacatagataaggttttagagagattctcaatgaccaacaccaaaggggcaaccatgccttctagatttggtatccgtctatctaaggaacagtgtcccactgatcctcaagagatagaggacatgagaagggttccttatgcttctgcagttgggagtctaatgtatgcaatgttatgcactagacctgacatctgttatgcagtaggaatcgtgagcaggtatcagacaaatccaggacaggaacattggaatgctgttaagcatatcttgaagtacttgaagagtacaaggaaattcgtgttagtctacaagggtggtgct

SEQ ID NO: 278736 - DNA, 616 bp, Cannabis indica
attattattagttattaaaatattaattaatatgtaatagttttacacccacataccatagtttgttttgaaaattggtaatttttttaaaataggctgatacatatatcaatatatttagtggttctcttctaggtctcaacgttttacatttttttttttttgttgatttactttttttttttgtcttgactcataacatgtacagtaattttttttaataatgataataaacttgtcaaatattttctttcttcttagtctttttttattaaatattttaagtttttttaatacattttgttaataaataaataaataatatttaaaatttaaataaaatttaatatatcaaacaacttaataagttactaaaaaatatttttttattattttttatatttagacattacaaaattaaataaaaataaatttatttttataaaactattttgatagttttataaataatttgtaaataaattgaatagtatctgaaatatcatatacattacaactaaaaaaaaaaagtaacatcaaagtatcttaaacaataaaataacataatatataacctaaaaatataaagaagaaataaaaaagtttctttaataat

SEQ ID NO: 278737 - DNA, 688 bp, Cannabis indica
attttccattaaaaaattatcatgtcactattaacttgacacttaaaaaaaaaaaaattggtgaatctactaactaggggtgcacatgtgttagttaagttagaggtgttttaattggtcaatccactgcagtttgaagaaacaataaactatacaattttttttagcataacaatctaaactctatttagtacaataatataagagttagatttattgagttcatatgtaataattttaaagttttaatatttaatgaataaaataatttaatctagtgcatacacaaaaaattgatacatgtaaatatatatatatatggaacacttcttaaatgggtaatacccattgatagggaactaaaaaaattaataaggtaataatctaataacctttttatggcaagtttctaaaaattattttttttaaaaaaaaaattatatttattttttataaaattggaaataataattacaactaataatttgaagaaaaaaaattataaattatttttaaaaattaattaaaattactactttattatattaaaattactactttattattttatgaaattatgagtttattaataatttattattgtaaactaaaaatcatttacatgtatattaaagtgtttttttttttatttagaagaataggagcttgattgtggaatcccaattgt

SEQ ID NO: 278738 - DNA, 436 bp, Cannabis indica
taaacaacaattaaacacagcaacaacatactcaaataatcatgcattttctcaacttttcatcaaacaaactcaagaaaacaaggtagagaaatcacataaagaaatacctcaacaaaggattactagagcttgcaacccaagcttgaatcaccacaaaaattccagctcttgaaccccaagtttcagccgaaaaagagagagagaaaagagagtgttttcctttgaaattttctttctttttctaaacttagtatttttgtgaaaatgaaaatgaaataaactaaccaagcactattcatttcagccaagataatcatttaaaataaacatttaatccatttaataaatcacataagacaaaacactaatggggcaaaaagaccattttgcccctccaccataaaatcacataaatcatactaaaggggtattt

SEQ ID NO: 278739 - DNA, 550 bp, Cannabis indica
catacaacgtactatgcagtacaatatatttttcttacctttaatccaggttcatacattttggctaacccaagtgtagaactatccccgatgatctcggccctatgtcacaacaacgataaaccaataagtgtttatcctaaaacactgcttatattcacatacgacaatctagggttttctaccaaaccccgcggtataaatacactaaaataaagctgatattttgggtctaaaagatacaccatattgtagagctcgtcgcaagctttgaaacggtacatagaatgtccgaaatggacacccgagtcaaaagttatgaccaaaatatgatttctgatatcctaggaatttctaaaaactatgaaactcaaaaatcccaattttcacactcaccgaaacactatcaaaacatatcaaaatcactccaaacttcacatggcgcatatgttgggttttacgccctaaataaaacacattcaaatataatcagatttacttattaatataaatcagaaataacatttagtgttgcatggttcacatgatt

SEQ ID NO: 278740 - DNA, 492 bp, Cannabis indica
gctgagttcagtgcctcagctatgtttgatgtcatggtagagtacctataatttggacagtttctatcatagttctaattttgaaaaaaaactcaaacgcaacgcaaaaacaacgcaaatacaacgctttaaatatctgaatatatcattaattttatccttcttattagttttcacctgttgttttctgaatgataccttgaccatttttcatggccaattttctccaggtacggtcttatgcgcttatccaagttgtctagctccctcatatggaattcaaactccatttctgtgtaagcttttgcagctgcaaagaatggcactctgaaatgctttgcatttttcttgaattttgttttgaggttcgacaagaggtggaagatgcagtagccatgtgttatttcagggaacactttcctagttgctttgatgatgctttcatgtctgtctgatattaggcattgacattctcgaaccccgaatgcttct

SEQ ID NO: 278741 - DNA, 853 bp, Cannabis indica
ccgacggagattttgatttttatgaacttgtttctgtccccaaaaagggggacaaacttaaagatggtttttatggattccgggcccaccctgccaatgatggggtggtcccttataataggcaaactcatgttaaggagtatcgccaccgtttcttcttctcctccgggttccgagcagtggagcacccggagcttctcacggagtgggtcaggattcctccctatgagcggaccgcgcctactcaggtctttctccggagggcccaggtctttgcaacttatgaccgggcggaacttgacgtcgggggcctggtcacgacggagaattaccggaaggccaagctcatcctgccgcaccaatcagtggaggactctaacctctctagggttatctgtcccaatgtgagggcgcctgccgcggagaagatcttccgggacgaaatcatcgccaccgccgagaagaagtaccaggagtatctctaccggaaggctcaggagaaagcttactccaaggctcaggcagcttccgagaggccactttgcgtggggagcccggtcgagaggagaagccaggcgatcgctgggaagccccttcgcattggggactcagctgagagaagggcttctaggccaaagccttcggctcaggagccgaacactggggctcctggccccagcacttccggctccggtaagtctcctttagcagtacattacgtcccttctgttggcgaatatgccagtcttaggcctgtaggttcgatgagcgtcttcatggtttaggatgccctcgaccccggtggggaggaccatatgaaggaatttttagtttttccaacttaggagatttc

SEQ ID NO: 278742 - DNA, 686 bp, Cannabis indica
tgttttgtcttatgtgagttattaaatggaataaatgtttattttaattgattattttggctgaaatagattaatgaaaaagctttcattttattctttttgttattcaaagttagaaaatagaaaaattgcaaaactctctctttctttcctctcattttcggccaagcttgggagcagctagggctggattttcttgatgaattcaagttatttttagcaagatctaagtaatcctagacaaggtaaaccttgctctagcttcttttcatgttctttgaaattttggatgagttttaatgtgatgcatgcttgattatttgttattgttgctgctgtgattttgttgttgttactggaatttaagcatgttaatttgtggttatttaggttgttagtaatgaatgttaattgctttgctcaagtttgaatttttagctcaaaatatggttttcaaagagaaatgattgaatctgttgctgggttgttgttaatgtttttagttgatttcagaagctattttaagcatgtttaagtagaattaagctgcttggtatgcatgttgtttagatttgctcaagtttgagtttagaactcaaagcttgagctccaatggtgatttttgtttctgtgtattctgggttgttttgaggccttagaaatgttctagggaaggtttagaacag

SEQ ID NO: 278743 - DNA, 236 bp, Cannabis indica
tgccaaataattcaaacctaaccctagttaaatgctataaatagatagtgaaggcttcaggaaaattacactttcattcagagaaaaacctgagccttctctttctaaaaccctagccgccactttaaactctcttcttccctcttgaattttgaaccacttagtgattagagtagtgcccacacacaacaagtgatacctcaatcatagtgaggaagatcgtgaagaaagacatt

SEQ ID NO: 278744 - DNA, 742 bp, Cannabis indica
aattatttatttaatggttaaattcctctcctttgggccttgtgtgagagttagggggccaatagcagtgggtacgacatactgaacccagccctccctcacatgaaccaccccaattgtgaaggcccatttgccttatttaaataattgtattaggttaattatattagtctaacctaattaaaattgaattagcaacataattaacttttaaaatatatgaaattattttcattaatattttaaagttaattttagaaaaacacttagttaattgaaatatattctagatagttatttctagtactagttatattttctaatatttaattaggaaaatattttaagttgaaaattaattatttattttaattaattttggaccaacttaaattaagaatattttcctagtattaaattagaattaatgattaagtttcttttatacttgattaattaattcttgtatttaatacatttaattaaattgaaaattaaatatttaagttgatttcattcttgatacttaaatataattattttcagaatatttaattaaataaaaaattattttaagttggaaattttaatttcagaacaacttaaatctgaataattttcaaaatatattttattttattttattttattaatctttttcccacaatttcgaaattgcattaatttaatgcaggaaatttcgaattttacttgaaaaatagattaaagttgaaaattattt

SEQ ID NO: 278745 - DNA, 510 bp, Cannabis indica
accgtagcttttgaattgtgcgagcagatcatgtatttttctcagatatactatcatcttttctccccgagcctcgtattctctggatacatgatttaccaccagctgtgaatcactgttgatttcaatgtgtttggccttcatctcccgggctagttttagcccggcgattagagcttcgtactcggctttgttgttagatgctttgaatttgaacttgactgcagtgtgcaggtgttgcccgctaggcgtgacaagggcaatccctgcaccagatagttgatctgtagtcgacccatccccatgtagtttccaggtcggtttttcttcattgttacttgacttaggtgcttgtaccagctccgggttgctttctggtatgctttctttttatcctgtgcattctaccacaaagtctgctaaggcttagcctttgattgctgttcggggttggaaagtgatttcttactgacccaactctaccgcccacttgagtaaccgtccaaaagc

SEQ ID NO: 278746 - DNA, 584 bp, Cannabis indica
atcatattttgtattttaactattatttattaaaaaataattaatttaattttttaagatactacattaatattttattaagataaaaagtctaagtatattttcaaaatattatattttacatttttaccactacatacacaaaaaatataaaaagaaatttaaataaaaaacaaatattcaattagattttttaactaagacccgcaattaacttgagacgaatcacgtgacatcctcatagagaaaatatgcaattattgttgtgatgattcaacaaacaagcctttgaagctcttgtcgttgttgttgtttgttttttttttttttttttgacaatgaactttcattgaatataatcagagtttagtacatcatagagaaatggaggaaatcatccatccaaactaattcgccatccaccctgagtgcacgaactgctaactcatgtgcagccatattggccgaacgacgaacatgaattagagatgcctcaggaaaattggatagtaaactagcaatatcatctaaaatagagccaaattcattacagaaggaagctcttctagaaaaagctgaaatca

SEQ ID NO: 278747 - DNA, 764 bp, Cannabis indica
tgaagaagctcaatggcagagaaaaggaacaagaagaagcagagcaagaaacagagtaagggcagagccaaaattgccaaaaagagcttaaccttgaatggtcagcttttcatttatttatattgatcaagaattacaaagttaatatcagtaacaacttaacagaaaacaactaactaccagaactgctaactaactgtgttatttgcacatgttttctggtttacatcccccctcaaacgaaatggcgagattgccagatgaagtttgtctttaagatagttgtagcgatctgttgtgagtgactttgtgagaatgtcggcagtttgatcaacagaaggaacgtaccgaacagcaagctgttttgcaagaatgagatcacgaacgaaatgcaagtcaatctcgatgtgcttacatctagcatggaacacggggttagcggctaaggcagtggcaccttgattatccacccataatactggtgcttgtgacataggaacctgtaactcagagagaagatacgtgagccatttaacctcagcagccgcattggctaaagcacgaaactcactctcggtacttgagcgagccacgacttgttgtttcttggcagaccaagataccaaattgtggcctaagaacacagcatatcctcccgttgaacgcctatcatcgacacagctggcccaatcagcgtcactgtaggcttgaagatttagcaatcagatttgtgaagctttaacccgagcgagatactgcctttt

SEQ ID NO: 278748 - DNA, 1395 bp, Cannabis indica
cagtggtgttctcaaatctgatggcagagctgggcttaagaggaatcgtcccatttaaatggttttttttctttttcattttttctttttggatgtgggaaaccaagtcttaattctgtggaaatgatataattaattatgggagggattagattatgtaactctattgttgtcaatagtgagaaactgtttactgcctcactcataagtcatttgtccttacatttgttagacaaaggaataattgtacggaagtatcggttgtaaactatggatctaattcaattcaaggaagaaaagaagaagaaaaaaaaatccattgggggtgttttttttttttgggaaaaatgattgtgaaagactgtttaaaaaattagtctttgcctttctagttttcagttgtttcaagctcatgatcttcttattatcaacttttacagagcatcagatgagatgagatcttagtctaatcttgttgtcataaattcataaaagaatttgtggttttcttacaaaaaaaaaaaagaaaagaaaaaataaataaattcttacttatttaacttttgagtctctcaaaaagactgaaatctgatatgggtctaccaatctacttttccattaaataagtatttattattattacacacaaatcaaaatatattactactttctaaatgcaaaactccagacttgccctttcatttcactgcattttctaaccttacaaaacagacaagttagctgagaaatagagagagaaagatttttcttaagtttattattctatatatatatacaaatttcataaatgaaggggcaaaacatcctcttttgaactacactttttaggcacataaatttctacatttgattgttattttcagaaatacctgttgccaaggggtgaacataataaattctacatctacagtaagttacatggtgaagatggtatgaaataattgaaaagaaagtcagctttttttagatttatttatttatttttgagagagttttccaatcacaggccaccaccacaagaacagaatctcagataaggagttgatgagcttttgaccaatttattttttaattataattgtttctaaccaatggcaatccatttgatggttactactggcatacatataaaaaagaacttaaataaataaaataaataaatagggtatagtttaaaacaaaacaaaagcactacagttactagagaagacagatgtgtatatataaacagtgacctcaacaacatgacaagggacccaatggttctctccttttgggatggaactcaacttctccatgcttatccccttctttcctttttttttttccttaacataatatttttagttgacttattataaattaagtaccaaa

SEQ ID NO: 278749 - DNA, 666 bp, Cannabis indica
tcctcctttctgtgatcctccaatcaaattttcaaatgtctgaaggttgttgattaactcgtgaaagtcaaactctaacttgttcatgacatagttttaagtgaagggcagaaaggctggagttaaactatttaagatcaaactcacttgagttgcctgatctataacaactccatgattctcagcttcttggaagtaactaatcatctggagaaggtgatcacgcacgctctgatgaagtttcatccgtgcattgatgaaattcttagtcgcttcaaagcgagcttgaattgatgtcatcccaaacagttcagttaactggttcatgatttctgcagccgtgagagtattagcaaaccttgttttcaaggtgtcaaccatgctagacagcataaagtatcgagctttattgttggcattctgccaacgctcgaacttttctttcactgccttggttgcattctcatttggctgctcaggagcctcttcagtcaacacaaacagggcattctcaccaatgagagcaatgttaatgttctctctccatttgataaagttagctccatattgagcttattatcagtcagcggtgacaccatggggttgtgttggaaattattttacaaggatctatttactatcatgtatgttggattaacaacctaa

SEQ ID NO: 278750 - DNA, 576 bp, Cannabis indica
gtcctggtctgagtttgggttcgggtccagatttcagtgtatgtctagattaggctccgggtgtgggttcaagtcctaggtcttgtctagattgggtctgagtcccgagttccaatcccgatcttagtttggattcagttctgggtctaagtccttgcttttgatcctcgtctgggttcgggtctagctttgggtctaattctaggtgttggtttgaatttgggcccgagtttgtgtcctggtttgtgtccaggtctagacaccgatttgggtctaggttcggctccaagtccaagtttgggtctcgagtgcgggtccaagtttgggtttgggtcaagatctcagtccagatctaggttaagcatttcgatcccagtctgggtattggtccgagtccatgttcatatctgaatccctatctatcgtgtcccagatttaggtccaagtctcggtctcaattctgttctgggtacacggctgtgtccgggcccgagttccagtctcaatttgggtatgaggctaggtctgtgttcagttcttggtctgggtccgagtcctggtcatgatcctagtctt

SEQ ID NO: 278751 - DNA, 535 bp, Cannabis indica
ctctcatttctctagtcgctcatgaaaaatcttccttagtgtgtaacacctcattgttggatgattaattttctgatggaaatcatgttgcttttcttcttgagttggtaatttcgtgacaaatggcagtactacttctccatccctaatccatacttctaacaaactgcaaactttttctccatcacaaggaaattcggctagtttatcacttcgtttcccttttttatgggctttaaaattttgtctgtcttgagctagcactatgtcaacaccacgttttgaaaatttccatggtcaatgtgtttggtcgttttggttggacggtttggtcaaacggaaaacagtggcttcagtatttcttgatttagctatgagctccgcagaattgtatatggcatgattttcaatgtataagtgatattcatccaacatgcctttgatacacattttgaccagatcgtatttagccatggtcccagcacaatcaagagctttttttcctaaacttttgaacgtaattaacgagtctttc

SEQ ID NO: 278752 - DNA, 517 bp, Cannabis indica
aactatagttttcaaggaaaaatgaggaatcttgttgctgtgattgttgttgctgtgaaatctattttccagagttgaattatgttggaataggttgaattatgcatgatttagtggcattttggggagttagtcaagttttgagtttttgaactcaatcttgaacctccaatggtgaaatgcgtttctgtgcttgaagcttggttctattgcttgggttttgttatttggggtatttagaacaggtcttgaagtttttgtgtgaattggggttgatttgaatgagttatgaaattttaattgtttcctgcactgaattggaattccggttcagtgaagcctgcagcattcggtctaccggatggggcttccaggaattcccagaatcaaaattccggttgtagaaccggtctaccggttggggaaaaattgggaaccctagctcttcccatttttttttgttgtttagggtattgccatgctttttatcgatagggaaacttttagtttctagttt

SEQ ID NO: 278753 - DNA, 694 bp, Cannabis indica
atagcgtatctatatcgaggaacatatagagcgttttatataactgagagtgacaattctaagttctatagtggtgtaatgaggaattaataagttagggaatttacttggtaaattctagatctagttattggaagctcggttatataggcccatggtccccacactagttgagacaatactgcttgtaagactcatctaattgattttaattaattaattataattctaaaattagactatgtctagtttatgaatttttactaagctagggcttaattgtgaagaaaagaggttataggatttatttgttaattaagatactttattaagtctaattaataaatatgttaaatggtaattttatttgataattcattttaattattaaataaatagttttgacatttaagtggttgaattagaaaatatggcatttttgagaaaataagataaatagttgaaaaatggcaaaattgcaagtggtgggcccacatcctatggtcggccacatgtgcatgattttaccatttattttatcaattttttaatgccaaattattcaaacctaaacgtagatatattcttataaatagatagtgatggtctcaaattcaaagatgatgcactcaagcctttcagtcaaaattttgagccttctatctctctcatattcgaatccttctctctctct

SEQ ID NO: 278754 - DNA, 743 bp, Cannabis indica
tccagacagggtatgggatgtgttctgatgcaagctgacagactcatagcctatgcctctcgtcaactgaaagattataagcagcgctatctaactcatgacttagaacttgctgctatggtttttgctttaaagatctggcgacattatctttacggtgagaagtgcgagatttatactgatcataagagtctcaaatatttttttacccagaaggatttgaatatgaggtagagaaggtggttggaattggttaaggattacgattgtgaaattctgtatcaccccgggaaggccaatgttgtggccgatgctttaagcaaaaaaggtcccgggtaggtttgtaccacgatcatgatagctcttcaactagcgtctgaaatggttagtgcagggattgagttcgtagttgggaaattgcacaatttgacgctccagtctgatctgttagagagaatcagaaaggcacaactagaagatcccgagctagttaaggttcgagacaaagtaatgactggtcggcctagaggcttttcagtctcaaacagtggaatgctgttatacaaagcttgagtttgtgttcctaatgttgatgagcttaagaaggagatactaaagaagctcataccacaccttattcattgcatccgggaaccaccaaaatgtaccaggatttaaaaccctacttctggttgtatgggatgaaaagagatatggtggactacgtgtccaagtgtttaacc

SEQ ID NO: 278755 - DNA, 761 bp, Cannabis indica
ctaattaaattccaacaacaatataaatgtacaactaacatactttcagcaatagataaaaataatacaaacacaaacttccaactccaaatttcaatacacatgtatgggcttgggtttgttgctaagaagagagggtttgtgaagagttatggattttgccctaagatttataggcttgggttgggctcatatgtatgggcttaattaaataaatataaaaattgaaattttaaaacatgcggtgcggtgcggtttgaatcgcggtttaataattcaaaaccgcaaaccgcaccgcaccgcgcggtttgggaaaaattcaaaccgcaaccgcaccgcgaagaatttcaaaccccattttttttgcggtgtggtgcggtgcgggcggtttgagtggtttgagcggtttgatgtacaccactacccggtcctagttctgtttcccaggtccctatcctgattctgggtccaggtcccagttattgtgtgggtttgggtcccggtctaggttcgggttcgagtcctagtctcggttcgggtttaggtctccgtctgggttttgatctgggtaagggtttgggtttaggacctggtcctggtcctagtcctagtttggttccagttccatttgcaattttgagttcgagtttgggtttgagttcgggtcggagttcgagtcctagtctgaattttgggttcaggtctagatttcagtctaggtccagatcatgctccgggtgtgggttcgcgtcctgggtctt

SEQ ID NO: 278756 - DNA, 665 bp, Cannabis indica
aaataaatataaaattagaggtaaatttcattaattgatgaataaaagaggcatttttcaacttactccttcttcttactactataaggagttgggctattgggcctctaacattagagatggtggactaatagtttaacgggtcaacttataattattagagtcctaccatatgcctttaatattgttatcaaattgaacatcccatcactaaaccatacatataaatatacaattattcttatatgctaataatgacgttgctgtgagtggtgtttaataacgtaagtctatataaaatattctcactaaggtacatcattttatattttctgtacttaaaatacaagtgcttcataaaatcaagagaaatttgcagcaaatgtaacgccctaatctatagggatgccactgtgtgtgattttataaactagtttaatactagtagaataattaattattaaaaaccgtgataatattaaaaacttgactaaaataaaatactaaaaacggacattataacagcataaaaagtgtgttccgaggatccctgttataaaaagttttattaaagaaatatataccacaaccatttaaacataaaatcaaaatacacagcagatacagccagcccaaaacaactcctgacaactcggcacgcaggc

SEQ ID NO: 278757 - DNA, 904 bp, Cannabis indica
tctcagcagtctatcagtttccacatcagaaagagaggctgacacaataactggcagctttttatcttcacccaaaaactcatacctcaagtgactaggaagcaccttcaattcaagttctggaggcttttcagtagatggcatcagctcttttggaactgctcccaattcctcataataccttctgttcaagggcccataggagtcaagccacttcacataacccatgacatcttgtccctcttgctccgtcaattcatcttcagttaagctcagttcgagaggatcatctagcagctttttctcactcacaatttcatcaatcaaatcaatgaagaaacagttatcacttgcctttgggtatgtcatagcctttagcacattaaagaccacttcttctccttggactctcagctttaattcacccttctgaacatcgatcaaggcttggccagttgccaagaatggtctcccaagaatgattgggacattgctatcttcttccatatccagaacaatgaagtcagctggaaagatgaacttgtcaactttaactaacacatcctcaatgactcctctaggatgagctagtgatcgatccgccaattggagagttactgtggttggctttgcttctcccaactgcaatcttttaaacactgacagaggcatcaagttaatgctggctcccaagtcacatagtgcatttattccttcgattctccctatagtacaaggaatagtgaaactccctcgatctctgagtttgggagggagtttcttctgtagaatggcgctgcactcttcagttagggccactgtctcatagtcctccatctttctcttctttgacaaaatctcctttatgaacttcacataacttggcatctgctctaaagcttca

SEQ ID NO: 278758 - DNA, 622 bp, Cannabis indica
ctcttaattactttggtttatgttagggtaggtgaaagtttggtatgattgtgggttgatatagcatgaaaattggtatttttggatgcattttcgtggctggaaactgggtttcctgggtttttaaacccagtagccgcggccatttttggcagcttattgtatttttttcgggtttttgttttggtcataacttttgactcgggactccgtttgggacgttctttatatcgttggaaagctcgttccgagctctatctgaatatctggaatttaaatgcccagtttttaatttgtggaaatggattttgggattaaccctatacttgtgtatcccggaattgtgactaggattaccggcacttggtcaggagcacccggggatttggaatctccatatttgtgggacatcaggtaagacagtagttagcacgtagagatatgcgcaatggcgcttatatggaatgtgatttatatgagaaactagaaaccgggattagagttattactctaaagtgagcggtttattggcttagggttattacccaagtgaattgttaatatgtaattgttatgccatgatgtatatagctgtatattgaagtaaagggttatgtgttca

SEQ ID NO: 278759 - DNA, 609 bp, Cannabis indica
gccggtctacaggaagtttaaaaaacttagcactctgataccaaattgtaacgccctaaataattaggcacgctacccaaaaatacttatggaaccctaatccactaatcaggattactaatcaaaatagcgcagaatttaaacttttaaattaaacagaatgaaaataaaacttgtaatacttttaaaattttaaacagttgggatcccaaaaacatttacaaacgttattacaagtcatttctttctagctgacctaaacggcaaaatagaattcaaaagttcgtcactgatagacccataacccgcttggtctgaaatggcatgaacatgtacattcttcgccctgctcctgaaactcatggctgatcagctaatgccttaccctttcctgcacagtagagcacccgtgagccaagcccagcaagacagtataaatcataacaaatataatatgctcattcacatatgtctgtatagcacagacctgatcattatatcaacatgcccatttatgtctacgtggcgtagacctatgtgttgcgctcacacatctaattaaatctacatgacgtagacccacgtgttactctcacacgtctaaataca

SEQ ID NO: 278760 - DNA, 357 bp, Cannabis indica
ctccttcttgttgattagattctacacaatcttccacagtatgattgagataccacttgatgtgtgtggtcactcactcaaggttcgaaattgaagagaaggagaagaagagaaaaggggcggctatgaatagaatatgatgctaggtttttttgtggaagaaacaatatgcaagtcatagtttcctgaagccatcactttctatttatagaaagccatctaggtttaggtaagaattgtatggcattaaaataatgaaaatataaatggtaaaatgcttgcatagtgggcggccatgatagggataatgggcctcactttgcaattttgccattttgtcattttcaatcccatttt

SEQ ID NO: 278761 - DNA, 525 bp, Cannabis indica
tagaccctaataaacattttccaagtggtaaaacaaagcttcatgcacaaaatcaaaatccaccattaaagctccaagctttgagttcaaaactcaaacttggttaaatctaacaaacaagcatccaaaccaactcaaatctacttagacatgcataaaatcacctctgaaaactacagaaaacatcacaaaacagcagcaacagatttcaacaattttctttgaaaaccatagttttgagccaaaatttcataacttaataaaatcaagtaatcaccagccctaacatgcttgaatcaacattttaaatcaaaaataaacctctgaaatcaacatcaaaatacagcagcaagaacaactcaaaaataagcatgcaaaccatttctttttcatccaaaaatcaagaaactaaaagaaaggaagctaggacaaggattacctctacaagattactaagaacttgctgaaaatcacaagaatcaaccaaagaaacccagcgctagcagctcccaagcttggccgaaa

SEQ ID NO: 278762 - DNA, 622 bp, Cannabis indica
ttttaaaagtttagaaatcttaccaggtgggggatcgtgcgaaccgcgcctacggtatgtcattgttgctgtttcgcctccttacaccgtcgcctgaatggggtgggttttcttacttcggggctgggttttcttacttcggggctgggtgtgggtttccactgttgcagacgacaatggtggaagagatggtgaggttttttgtgttaggggttcgaatggacaaggggttaagtgtaagtgtggttctgtccacttttaattttgttttgattttatttcccttttattttttagttttcttttatttaaattttgttctgggtttttaattttgttttttttttctgggtatagttctgttttaattaaatttcttcttttaatttaattttttaattaagttttaaatttcttatgtcatattggtttattttaggaaggtggcatgatttaatgccaatgtggcatgagttgctgacaaggattgtgccacgtaagccatttttacctttaaacggagccaaagtgacggaatagtgcggaccaaaacggaagtggagttcaggtagtttagccgccaaaatttgagttttggtggttaactgtcacaaacccaaaa

SEQ ID NO: 278763 - DNA, 677 bp, Cannabis indica
aagttgcataaaaaacatcggtcccagacttcttcaccatgaactcaaaattcattttcaatgcaaaccttccaaccacatttttcaattcagtcttatttgtatacagcttgccaacatatatttcccctgaatgtgtaccagtaagagaagttgtataaacattattttcctctatgtcttcccttgtccacacaataggtttgaattttgtacaaacttcaaaatcagatggtacagtactacgaggaggacctgggcggctgctactggtgcctggtgtttcgtgattttcactctgaggggttcttctttcttggtctttcctttgctcccttggacgtggtggagatggtggaggtagttctaaccttaaagaaggtacctctataggttcatgaacttccaactccgcatcaccatcctcgttcaaatctactataggatcattgttgtaaaatgcaccatcaaactcattgaactggtcaaatccattgtcaaccctattatcctcatctatattagtaggggcctgctcattcatccctacggctggatctgtttctgggacaaaactcccaacaacacttcttgggaggacagttggcggagtaggccccaaaagcgcatgccttttaaccttagtcacaaacagtggcagcaagttctccacactc

SEQ ID NO: 278764 - DNA, 633 bp, Cannabis indica
cgttacttgtattgacttaagatcaaggagaaagattccttttcttattagctcttacaacagtatctctgaatatataattcttagataataatatagtcttagctcaactgcttttcgaccgatcccttgcccagtgactatgcatcaatatttataggactaggaagcttgaggaggaagagtttcctctctcattacaatgtgtataaatagaaagatcgtgggatcaatgctgaatgcaaggatcgtgggattgaggctgaatacactgatagtgggctcgtgtgtatgccatatccacgtaaattgatccctgagttatagggattgtgctaatgactcatgatgcgagagctgaattcgctaagtgtttgttgctctgcgtggatcgctaaatacgttgctccagatatgccagcaaggcatcctgctcagcctgtcttcccgagcatatgttccaagtggactccacgtgtcaccattctcgtgatgccacgtcagagtgcgaaaattgggataagaataacaaattaagttactaaccacttaatttgaaaaatattccattttaagttgatccaaagttaacaaactttcaacttaaaacaatattccaacaatctctcaata

SEQ ID NO: 278765 - DNA, 1041 bp, Cannabis indica
aaataatttccaacagtttggtcgtcttgacttgaatgatgggattctatttcttgtataattctttgaggactgccaaaatgaatgctgcagctaggaatgcaatgaaggcttattctgtgttgctccctttgttttttgatctccttggattctggaagaataggtcacatgctcctgctttaggttctgaccctacagctcctctaagaattgtggagattagtggtcttccgtctcagcagaaaaagtgagttgtttcttttaagtttattttatgttgttttttagttgctaaactgtttttcctttttctgttttttagtgattgcggagcatttgtggctgcatttgccgagttcttcatccatggaaaagatgttcctgcggattttgacatcgaagtttatcgtactcgacttgctgcccttttcttctcatatggccaaaggaaaattgatgaaagcattgatagcgaggatgagaagcaaagcaagtcttctaaggcttctaaattgaaaaagtagggtcttttaatttagtgacaatttggtgttattggttgaatctattatcagacaatagttagtgattttatgtttctaggtattatatttggttttatactctggatctggttttaaacttttaggatatttgacattaatccttataatatgtttattctatatgtttgtatcagcagaagttgtatgtttttctaattgttcaagtttttatatacagtcgcacaactatatagaaactattttacaactatatacaaacaatgtacactgttcagcgtacttgtattttttaattgactatcaatgtatttattcactgtttttccctttctccattttcctttattaattatgttttatcaattcctatctgactttttttaaaactttaataaagaagttatttttgtactaaatatttaagaagtgtcaaaactgtcaaaaaacgattttgcaactattaccaaactgtttaaaatttttcaaaaataaaatcccatgtgtatagaat

SEQ ID NO: 278766 - DNA, 584 bp, Cannabis indica
taggggtaattaggttttaaaaaatggctaccggttactttttttgaaatttaaatttattaaaaatggaaaagtgaaaagtgacatccatccatcaatcaagtctaatcaaccgtcgtactcctccactcctccacttcttcactttcattttcttttattgttctatttgtcattcgtttttccattttcgtctctgctagggcaaagttcttcctcttccattttcttttcattttccattttgtttttccattttctattttcgtttgaggtagtaaaacccatattgtacattgtggtgactgtggtgtacattactcgaagtgccattgttggagttgttagaggggggtgtcgacggtgagttatacattactccgttctactttacatacattttcttattgacagaaaaaaaaaatatttttgaagggaatgtggtgtttttccattttcgtgtacttaatagtttcattttgtctcaggtgtggagggtgaggtggtgaagggagtttgcatatctttgtcgaggtatttctttgtctctctctctctctatctctctgtctctggttctgtgt

SEQ ID NO: 278767 - DNA, 677 bp, Cannabis indica
ttattcaagttatgttttatcaattattgactgactgcctttaaaactgtaaagaagaagtcattccggtacttaatattttacaaagggtcgcaactgtaacaaaacgattttgaaactattaaaaaactgtttcaaatttcataaaaatgaaatcccatgtatttagaacatcacagatcaacctgtttgaatttgcacacaaaattaaacaattcaaatatttcatatgtatctattttattgcttgattgttgcatgtctttcgattgtgtccgtgttgtccacatttgccgcacctgttatgtttttttgtatcccattcagataaaaaccttcgtttccttggtcttccagatcttattttttggtttggtggcagaacaatgatatcttttatgttttgtggcacatcccaagttgtgtgattgtgtaccggatatgttgagccgctgtatgtttcaagccatgttcgcgtggtgtaataacccgaacagtagttgtaaacattcaagttcatctcttttataacagcaagcgcatgagcacacggtaactcatcaagttggaatctgttgcaactgcatgttttctccttgaggttgatgacccatgatctggttagttcaatgacttcgaacatggtctcgtttattggttttacctgcggattaagt

SEQ ID NO: 278768 - DNA, 544 bp, Cannabis indica
tggtaaaataatttccatcaaagcttcctcacagcttctccatggttgcgtaccagctttgccgatcaaccaccaagagccgacggtaacaatggtggtccgagcaccattactccaatgccatcaacacaagctgattttgtgggatctcaccagctgcatcataacacccacggcaatcaaggcattcccatatctcaatcccatgattctagggaggttggtcaaagacttgataaggttatttttgatcctatcgttaatgtgatagagaatgatgctatgtacatttctgatgtggacatggatttggtggaattaaaaaggaaaagaatggaaagtgctatatataaagctgctgatgtggcaaagtctaaggaagtggaccatgatgatgagcccaataatgttcttgttcaagataatattggtctttcaaaaaatgggagttcggtgggccctggtttccaggcccaccaatcattatgaatatcataagttggaattgccgtgggcttgggaacccgcgggccttacaattcct

SEQ ID NO: 278769 - DNA, 664 bp, Cannabis indica
aaatgttaaataagactatgtagaataagactaaatatagattaataaaggaaaaaacttactctaaatatggtctgatttcaggtgaattgtcaaagatgaaccactcagccttttcacgagtctttctgtctagaggcatgatatttgctcttgttaagggacgacattgtgattggaagacggtaagaattctaggaatcacttcatcttcgttgcgatcaagtcggttaaatttggtttctacccccttaaaatacatagagcaaaacgtcaatgcctcatctgcaacatagctttcagctattgacccttcaggacgagctttatttccaacataattcttcaattttttcatgtacctctcaaaagggtacatccatctcataaacacaggtccacccaaaattgcttcttcaggcaaatgtaagaccaaatgaatcatgatatcaaaaaaagctggaggaaaaatcaactccaacttacacaatatcaaaataaggtctttttgtgcttcctccatatctttaaagtttatggttcttgaacatacttgcctaaaaaagttgcataattcagcaatagttgtcgatacatctttagggagaaacttacgaacaccaattgccaataatctttgtataattacatgacaatcgtgaga

SEQ ID NO: 278770 - DNA, 746 bp, Cannabis indica
tgaataggaaagaataaaaatgacaatactctagaaaactataactacaatatgataagagatgattaaacacagggaatgcataccttcaaaatcgttgatttgcttagtttacccagaggcaatttatcagcatgtatcctataataaaataccaaaaataatgtaaagaatacatgtccaaaaaagaaagaaaaaaattaggagagacaagatccaatcaagttctagtgaatcaaagaaactgggagaaaaagaaaaacaatccagttgaccattgcccatagtttaattatcacgagtcatgaccgtaacataattgcagaatactattagctgaatcacaaacctatttccatcatttgctgtctcatcatgctgacattgcaaatcagagatataaatttggcaacacgtgcctcaagtttggtattccgggggtgtgcttggatagcagagacagactgttctttcacctgacaatgaattaacagggatcaagaaacaatagggaagataacatctcctccccgccacacaaacccacttcccagcgtgatttgggaacaagctcttcattcaaacaaaattaaccaagttttaaatgtcctaaaagtaatgagaacaaagctgaagagtagttcttctgataagtacattcacaaatgctgtccttcaacaaaaataactgtcttcaaagtttttagtagagattttttattataattaagagagagagagagaga

SEQ ID NO: 278771 - DNA, 771 bp, Cannabis indica
acacataaaccacatgaagccatccaaatcaacacaaatcatcgttttaattcatatttcatgaaagtaaatcattaccatggctctgaggccagttgttggaaatattttaccaggatctagatttactaacaagtatgtttcattaacatcctaatatgaatttctaaaacaatgaaataaacacataagggtttaagaaaaccttacattgggtgcagcggaatataatgactccttccgttcagatctctagcccttgattcctttctgtagcagagcattatcaagatctgaacctggatctctttctctccttcttgagcccgattctccttcttgttgattggattcttcacaatcttccacactatgattgagataccacttgatgtgtgtgggcactcactctatcactcaaggctgaataattgaagaagaaaagagagaatgtggtttcggttttgctataggaaggaggcttaaaattttactgaaggaatgtgatgtatcatcatctttttttccttaagccatcactatctatttataggtaaccacctaggtttaggttagatttatttagcattaaaataatagaaaaataaatggtaaatctacactaagtggccggccataggatgtggattgggccccactttgcaattttgccattttgtcatttttccatctcattttctcaaaaacaccaattttccaattcaaccacttaaaatgccaattacaattatttaataactaaaaataatt

SEQ ID NO: 278772 - DNA, 687 bp, Cannabis indica
ctaactacatgtatcatgggttatcagtaaaaatactatttatttaaattaatatttttctagtatttgagttggaaaaaaaattaaaggattaagaattttttgattattgtgagcacttacatctcatcatacttaaatagaataggaaattttgattttatatacttaaaaaattaaaaaaatttattattaaaccaaaactttaaaccctaaaaaaattatgacatttttttcaaaattccaaaaatacccccctcacaattcaaacccattctctctctctctctctctctatctcacatcccaaccgcccaccctcaccaccacctccgacctccgaccctcaccaccacctccgaccacccgcaccaacaccctcgacccagcccccctctctcggaccacccaaacgtcgcaccccctcagccccactctctcttcctctctctgaaatcgcaaaaaaaaaaaaaaatatacaggtccgatggtcggacccaatggtccgaccatcggacctgtacatttttttttttgcgatttcagagagaggaagagagattggggtccgatggtcggaccatggggtccgattggttggacccaatggtccgaccatcgaacctgggggaagtttttttttttttttttttttgttcgatttcagagagaggaaaagagagtggg

SEQ ID NO: 278773 - DNA, 832 bp, Cannabis indica
cgatttgatcgatatcatgatcaaaacgtttacacagaacctttcagaatggcctatgatgccacaataaacaaaaagttgggagatgttcatattgaaacatagcccaaatccactcaccattttcctatacaatttcatacgcctcttcaaaggtttgtcgatatcaactgttgtacgtaccctcaagtaatccctccaaacacccacaaaattcttcgggtccgacttcacatatgtcccaatgtaactccccgcactacgcaccaccttgtccatcataaacccagttttaagattatgaatctgtacccacatatcaagtttgtgcaaatgaatcattcaaggatctcccactcttcaaccgatgaaaaataagtggaaccttattaaaagtccatggacttccatcaatcaccatctgaatatcaatctcatgataaaattagaaaaggtataaattagcttccaattctttaacatgcacacctttaccgggctgccatagagatgccattagatgtcgcatagcatcgaaatcaagagatcttcccgtgagaaacttccctacaagacaccatctatcatcgaaagtctgttcatcaccatccgcctctccttcaataagtacaccctcttcttcatcatcaatctggaagttctcgtattggtccgccagatcacccattacataactactagaagccataacacacagccaaaaaaaaccaaacaaccaacaccacaacaatcttagaatctgtcagtatcaaactcaccactcatgtaaagtcctttttttgcaagttaggtgacaaaataattttccttt

SEQ ID NO: 278774 - DNA, 253 bp, Cannabis indica
gaagaaaagagattctagggcttatttgttaattaagagactttattaagtctaattaataaatatattaaattataattttatttaataattattttaattattaaataattagttttggcatttaagtggttaaattggaaaaataatatttttgagaaaataagatgaataattggaaaaatgaaaaaattgcaaagtggggcccaatgtccatggccgcccacttaaggagcaatttaccattttattt

SEQ ID NO: 278775 - DNA, 664 bp, Cannabis indica
gagcggggttatggaatttgaccattttacccctagtttcaaaactaccctagttttaagtctaaagggcattttagtcttttgttattaaggggaataggtggctgtcccatttgttgacacctagcacatgactattcagccatgagttaattaaggaaaacccttttcttttgggggaaaaatcaaagaaagtcaaattaaaagaaaatttcattttcccttgaactctctctctttctcttgttcggctgagacaaaaaccagagcaagaccaattctttccttccaaattctctgaatttaagctagggattgaaggaggagcaatcaaaggtaaccctagaactatggtgttatgttttaagctttaaaagttagtttgaacttgtaattttgagatttagtggctgttaggtttaggcttgcttaaggttcgaattgtagggtttaattgagttgattttatcttcttgtgactggttttgatggttggattaggttgtatgcaattttgagctttgagttcaaagctttgagctttaatggcaagttgatgtttattgtgtttttctgtgaaatactggctgggttttattgtgtatgcattgtttaggagctctggagagtttggtaaagattgggcttgatttgaatcaagggg

SEQ ID NO: 278776 - DNA, 724 bp, Cannabis indica
ctatgttgcatggttcacatgatttatttcatgattatatatttaatgtacaaattctattaagtccaaaacaaatatatatttgtttatgattatagtatcgtcaacataggggaatataatcatgattatatgttcaaaagtttaattgtcatgatttgtcagttcactggatttagactgacatgataattggcgataagatatacttacaccttggataagtgttatgtcctttccagggcattggcaaagtttatcagtatcggatgtatggagtatacattggaagggaccgatattgatcttggataagatatcataaacttactgttatatctttctaagtcaatattaaaggttgatcttaagtctatggatcttaatcctgatatggttaggttcaacttagttatattatttatgttcttcaagttgtttatggaagctaattaatgattatggggaatatttatatattgggaacatggtagctcaattgagtgggagtgctgatcatagatatggaatttataacttctataagtatttagaagtgaaacgatgatattcttcgagcttggcttgataaagataaatgattgagatctcatttctgtaattatattagtttactaaaatatcatttataggtagctaattcttttaaggataagatacattgaagggtcgaatggtaaatttgtccttattcagtgtagat

SEQ ID NO: 278777 - DNA, 595 bp, Cannabis indica
ggaatagttgtaaagaccgcttagcctaaatttagaaattagctaataatcaaggtttaattatgaaaattatttattgatatttaaataattatttatgctgatttatttgaattcagaatgcctttttatgtcatatagtgagatttcataattttgcatttttggtgcccggcaacatggaacgcggtgtatggctcagtagaatcacaatctaatattttagtatagcagggcggtatggttagacattgggaatgtcgggattagtcaggaatttagagtgttcccaaaataccctttagtgattttaaatatttttagtatgggaggggcaaaatggtcatttttccccataagcctttgtcctttagtggacttagtatttggtgattatttgatttatgttatttttatatggttggagtaagtaattaaaaatcattttgtcactcattttacaaaattggaaaaaataagaaaagaagcaaaacttcctctcaagctctctctctctttcggccccttttgagcagcaaggatttgatatttttctttgtgaattcaagcaaattttgagggaatccaagctcta

SEQ ID NO: 278778 - DNA, 798 bp, Cannabis indica
atgtttaattgcacaacagctaggaaggtttggagagaaactaagttcaccattgatcatacacatgcacaaaatatgtacaatggtgattacttaattcatctttcaacccttcactcaaaggaagatttcgaattgattgtttgtacaatgtgggctatttggcattatagaaacaaagtcactcatgggggagttccgagaaccagcagcaacattgcaacttttgtaggactcatttggaaaaatttagcagattaaaagcaaaaaaccagcaagtttctatctgtagcagccaacctactgctgctccaaatactcagccgattcgagacaaccccagggttataccatggacaccaccacccaattcaagtctaaagttaaatgtagatgtggcagccaatcaagagttaaagatcttggggattggtgcgatcataagggaccatcaaggcaatgtggtggctgctctatcaaagcatgtacaaggttgtttcgttctgatgaaatggaggccaaatcgctttttcatagtctaattgggtgttgcaattgcaacttccattacacatattgaaaccgatgctttgcgtgtttcttcgaccctcaattctacatcttcaaacctttctagttttaataatttgattgttgatattagctgttttttatcctttttctcaggagtaactatttctcatgttaagagaaatgctaaccaagttgcacatggtttagctaagtatgctcttgagttggatgaagatgtctgttggatgggtgaaatctcaaatc

SEQ ID NO: 278779 - DNA, 531 bp, Cannabis indica
tctactcgatacatatgaatgagtagctcccgagtcaaataacaaagtatatgaacaaccattaatagacaactgacctatcaaaactgacggattagcatcagcgtctgcctgagttatagtgaaaagtcgccccgggttttgagcaacattcttcttaggctcttctgtcttggcttgggggcagtccctaataaagtggcccaccacgccacactggaaacatgctttggctcggcactcacaaggatgatgcttcttacatttagggcactcgaggtacgaccggaatgaggacccgcgaccttgacgaccacctctgcttccccaaaactttctatttcctcctgaagctccggaagcctcagccttccgcttgtgttcagggttgctattgtcgatccccttactgacattaccaccagcaggagggtttgatgccatggccgcatcctttgcagcctgctctttcatcacttgatgctcggcctcttcagcaattaaggccaagtctaccactctcttatacag

SEQ ID NO: 278780 - DNA, 506 bp, Cannabis indica
aaaagaaacatagatcataaaaagtaattcatacagaaaacatactattatagttatgctaataaatctattagtttatttttgcatattaaaaaaaattttatttttcttttgtatattggaacaacaatttttatttcatttcatatagcctacaattatatatgttaataaacctactagttatcgtttgttgggggaacaataatttttttttttccaatacagaataaactataaccaaacataatgatattcgccaagaaacccattagtctatttttcgtgtatattggaacaacaattcattttttgtttaaagcacaatgtgtgcctataaaataacaaactaattagtctatttttttttcaagttgagacatcaaatttaattgtatacaaagtacatgactatgactgtaacatgtcttatatagtaaacttggataagaatatatgcacttgtcaaagatttaaatatgatgaaattccttgctcataagttt

SEQ ID NO: 278781 - DNA, 287 bp, Cannabis indica
tttttttttaaaaaaaatgaattaatttgataacggtacctaaaacggtacactttgatatataaatgacagcaccatatttttgtaaaaagaatggaattaaagtactgaaatgtaaattttccaaaatacattgtagggtgtaatggtaatctaaaactaatgatgtgtctatatggcggaacatatagagcgtcccgccccatagttgagataatattgcttgtaagactcatgttcaattacaattctcaaattacactgtgtatatttgtgaatttttcact

SEQ ID NO: 278782 - DNA, 565 bp, Cannabis indica
ttggcgtaaccatcccaatttcagttggaaggatacaagtcaaaatcaagcatctgggagccaatggaaacctgatcaacaaaataattctcttgagaattccatgaaaattctcgcagactctcaactagagttcaggacttattttgctcaggtgatagaggaattgaaggacataaagattcaattaacaaagttaaatgattcttcagccattcaagagcgtggtaagcttcccgctcaacctctaatcactcccaaagggcaacatatggcacaaacctctacttcttcagagtctaatcttaagggggttaatgccataactactcgaagtggtcaaagtacagtatcaccattacctaagaccactagtgtaccaatgcctgctccagatgctaatatgccacagaaccctccagtgaaggtgcccttccctcaggctttgaaatctactaggaaggtactggaaaatcaaggtgaaatcctagaaaatttaaaacaagtgaagatcaacctgcctctcttgcatgtgatcaaacaagtaccagcatatgccaaggtc

SEQ ID NO: 278783 - DNA, 507 bp, Cannabis indica
aaaatattggtggtcttctacatgtctacactcggcagtaccaatatatgcgagtatgaagtccgagcgcgcggggattatactttctacaagtccatcataacattataaagttatgataaacttggggggcaaatgttatctcttaaaaaatccaaaataatggtgcatgaaattttactctagatatggaggtccaacaaggtggagctcatggaccaaggaggagctcatgggccatggaggagctcgtggaccaaggaggagctcatggaccaaggaggagctcaagagccaaagaggagctcatgggccatggaggagctcatggaccaaggaggagctcaagggccaaagaggagctcatttgccaaagaggagcttataggccaaagaggagcattttgggcgcactaagctcccaaatccgtcagggccaaggtgcaaccgtcaggtctaaggtgtaaagggctcctcagctgtcaaattatctcaaggacctgatgg

SEQ ID NO: 278784 - DNA, 562 bp, Cannabis indica
taaaataaaatgatatactatacaataaaacttatataccatataacataaaatatataccttacaataaaaatatatataataataacaacaaataaaaataaaaatatataggatgctaataaaattatatatcatgtcaacaaaagtacaatagaaaataaaacttaaatattattttaaaaaaattatataccgtataacaaaaaatacatataccatacaccaaaacatatatacaaaaaataataataataaaaatatagattactaatacatatatatgtatactatactaactaaattatataccacaattaaaatatatataccatgaccattgtatataataaaataaaaactaattaaatattatttaaaataaataatcatacaatcaaaaaatataaaaataataattaaatatatgtagcatggcaataaaattatatacatacattaaaatatttttattatgctaataaaattatataccactattatacatatcataataaaaaataaatatcatctaagaataataatataccatacaacaaaa

SEQ ID NO: 278785 - DNA, 566 bp, Cannabis indica
taaaaggagttaaatggcttttatttttattttcatttttttttcaaaacttagaaaaattacaaatttctcaaagaaactctctctcttttcctctctcttttcggccctcttggagcagcaagaagctggccattttcttggtgattcaagctctccttagcaaaattttagtgatctcaagttgttggtatgcttcccttagctttcctttaagttttatgtaaatttgagaaagtttgataggttgcatgcttagttttgtgtggattcttgctgctgtatgttgtggttaatttccgaagtttattctagattatttttgttgatttgagctgctggtaatgcatgattagtggtgttgtttaaggttataaattttctatgtaaaagtttagttttcaaagtgaaaattgaggatttggtggctgtagttattgcatgagtttaagtttgttttctgcagtgtttttatgcatgattatgtagttctaatctaggtttgatgcttgttatgttgtttagtcaagttttgagtttagaactcaatctttgacctttaatgg

SEQ ID NO: 278786 - DNA, 609 bp, Cannabis indica
ctaggtctgggttcgggtttggttcttcatctgggttctggtcctagtttgagtcccaaatctaaacaccaactactggtctgttccaggcccctttaaccgaatcctaagtcaagatctcgatcactgtcatggctctcgatcttgttctggttcagatcccaggtcccatttctgagtttgggttcgggatcgagacaggggtgcggttctatgtcccgaccatggttctatgtccctagtatggttccatgtttgggtctgagttcaggttccggttcgggtactgagtcaaggtttgggtttggaaccgggtccggctcccaattcgggtctaggtcttatttggagtccgggtcctggtccggttacggttctggatctaggtccaatttcagttatgattcctagtccaagtcctagttccagtctgggtcaacttcaggttttggttcaaattttgggtaacagggtaccggttcatgtccacttttgggtttgggacttggttcaggtctgggtgtgggttcgggtcctcgtcagggttcgggtccagggctgggtcccaaatccagacaccgactacgggtttttgttggaaattatttt

SEQ ID NO: 278787 - DNA, 317 bp, Cannabis indica
atccaattaatttaattctgataattagaattgaaataggaatagtaaatatctaaatacaaaactacacaaaaaatcagaagttaattccatgaaatagcatgaaaaattgaagaaaaacgaaaaaattgtgagatgaatggatggtatgcaaagcacaccatccaggtgcacatccttgggcgcaaggggctgcttgggcgcacaaagggtgctgccagcagccagccgcgcgcacaagggtgtgtcaccacccccgattttttcaaaacttcaaaaaatcataactaattcaaataaaatcgaaatttagttct

SEQ ID NO: 278788 - DNA, 1144 bp, Cannabis indica
cctagttcggttctagttccatttgcgattcttacttcgagtttgggtttgagttcgggtcggagttcgagtcctggtctgagtttgggttcgggtccagatttcagactaagtccagatcaagctccgggtgtgggttcgcatcctgggtctttgtctaggttgggtccgagtcccaagttccaatcccgatctgagtcgggattcagttctgggtctaagtcctttgttctaatcctggtttgggttcgagttttggtccgggtccgggtctagctttgcgtctaattctaggtgtgggtttgagttcgggtcggagtctgtgtccgtgtttgtgtccaggtctggaccctgatctgggtctaggttcgggtccaggtccaagttcgggtcccgaatgcaggtccaagtttgggtcttggtcagcatctcggtacagatctaggtctagcatttcgatcacagactggttctttgttcgtgtccaagttcgtatttggatccctatctaggtccaagtctgcgttggggatcgggtcccagatttaggtcaaagtccgggtctatgttccgctctggttacacgacaatgtctaggcccgagttccagtctcagtttgggtctgaggctaggtctgtgttcggttctaggtttgggtacgggtcctggtgacggtcctagtcttgttagggtactggttcgacaattcttgttcagtttctaattttgggtccaaggtctaggtctgggttcgggtttggttctttgtcttggttctggtcctagtctgagtcccacatctagacaccgaccactgttctgtttaggccccgttacccgaatcccgagtcaagatctggatcactgtcacgggtctcagtctggttctgagtttgggttcgggatcgagactggggtgcggttctaggtccggacccttgttctgtgtccctagtctagttccatgtttgggtctgagttcaggtttgggttcgggtcctgagtccaggtttgggttcggatccaggtccggctcccagttcgggtctatgtcttatttggagtcccggacctggtccggttacggttctagatctaggtccaatttcagttatggttccaagtccaagtcctagttccagt

SEQ ID NO: 278789 - DNA, 604 bp, Cannabis indica
aaaaaaaaatcctatatattttaacaagcataaaattaaagctttggtaagactgataaaagaaaaactatatatacataatataacataacattaacagcaatattggtaaaattaataaataaaaggtttgacagttataatctaaaaatcatgtcctctaagtaaatacctaatctataaaccaataaacaaatactgctcagtacatttaagaaaaataagaaatcaccaaaagtttatggaagtaatcctaaatataaacattaaatagttatgaaggtgtgtattataaattagagatcaatggtgtagaattatgagagacctatttgttagcataaactaaaagttgagagctttttaaacttggaaaagtctaacaaccttttgtgctgtgagtctctacaaccccacattttcttaacagaaaacaaactgtttcttttatatttcctttttcttttttttccaaaacacattctgtttttggaacatgcgattataaatcaaatctttcattcatagagtccaaatgggcattttagccaaagagtagaaaagccccccaatcactaattattatttcacaacaaaaaaaaaa

SEQ ID NO: 278790 - DNA, 633 bp, Cannabis indica
cttgctccaatcaattaatagttcttggagaaattgcttctttcaatttttcttataatcaagcatactcaccgttctcctccgcatattagcctgaaattgtactgtttttatgcttattacttctgtcataaatctagcgtaaaaataataaactatacattaattaaataataaaagaaaaaagtaattattcttatatgatgaaaaaataaagaaaaattaaacatcaatctatcaaataggttaaaatcaataattatacatgcataatcaataggtaaaaaaatagaaaaattaatcaataggtaaaaaaaatggaaaaactaatcaataggtaaaaatagtaatgacctataatatatattaattgaataataatgaaaaaatagttattcttatatgataaaaaatagaaaaacactaaacatcaattgacctatactattaattatagaaaaattacacatatgaacactttaaaatacaaatatttacaaatatataagataaattttattatacctatattttaatattaaatagtctaactaattaattttaaacttttataataactatttatcataccattaattactaagatactaatattagcaaaattatatatat

SEQ ID NO: 278791 - DNA, 653 bp, Cannabis indica
aaatttaaaattagaggtaaatttgattaatagattaataaaagtggtatttctcaacttacccctagaggaaattacacttactatgagattttaaaggttcttatgataaatatggcacatttaaatttgaccaatttatatggtatttttttgtttttaggtctttttatggtatttgatatgtcatatatatatacgtaattaagttttcaaatcatatatttaatgtttttatttgtttatgaagttttatttgtcactaatgtcggaaaagttacgagagttattgtcggtgttggaaaaatcgccaaagtagtggtcgacgacggaaaagtcgctggagtagcggtcgatgtcgaaaaagtcgtcaaagttgctaccagcgctggaaaattcgtcggaattggcattgtcgccgaaaaaatcactaagaaaatcacaaagaaatcggtttcgaagaagaaactggtttcttgatgaagaaaccactttcttcgtgatttttctgttgaaaatgccaattcttacgctagcagctactccaacgattttttcggcaccgacagcaaacttcagaaaaatcatcagaattggtattgtcaccggtaaaaaactggaaaaatcaccaagaagaaaccagttcttgatga

SEQ ID NO: 278792 - DNA, 856 bp, Cannabis indica
acagattggcggggcaagaatattactgctttcttgatggctactctggataccaccagatagctatagcacctgaagatcaggagaagactactttcacatgtccctacggtacctttgctttcagaagaatgccattcggtttgtgtaacgcccctgctacttttcaaaggtgtatgatggctatcttttcagacttgattgaatcttgtattgaaatctttatggatgatttctcggtttttggttcctccttcgatcattgtttggaaaatttggaaaaagtgctaactaggtgcgagaagtctaacttggtgctaaactgggagaagtgccactttatggtaacagaaggaattgttcttgggcacaaaatttcaaaggcaggaattgaggtggataaggctaaagtttcaacaatagagaatttgccacctccagtttctgtaaaaggagtgaggagtttcctaggacatgctggcttctaccgcagatttatcaaggacttctccaagatctcaaaacctttgtccagcttacttgtcaatggtgttccatttgagtttggagaagattgcttgaaggctttcaaggttctaaaggagagattaatttcagcaccgatagtaacttcaccaaattgggagttgccgtttgagttgatgtgcgacgcaagtgactatgcaattggagcggtcttgggacaaagagttgacagagtgtttcacacaatctactatgctagtagaactctgaatgatgctcaattaaattacgccactacagaaaaagaaatgctggcaatagtgtttgcttgtgacaaattccgaccctacctgattggaaataaggtaat

SEQ ID NO: 278793 - DNA, 535 bp, Cannabis indica
caaaccttccagacctgttctatttaacccctagaacatttctaaagtatcaacacagcccagaaagtacagaaatgaaaatcaccattaaagcccaagctttgagttccaaactcaaacttggttaataacaactaacatgcatccaaaccatgattcaaactcatattcaagcataataacactgcagaaaactaaccctaattcatgcaaacactacagccacaaattcacacaatttctctttgaaaaccaaactttttaacaagaaacctatccaactagaacaagaataactagcatgcaattcaacctaattaaacatacttaaatcaacatttaaaacatggaaacaacaacaacaattaacagcagcaacatcatcaaaatcatccatgcatttactcatttctcatcaaaaattcaagaaagcttaaaagaaagctaaaggaaacctaccaacaacttatgatcaccaaattagattgaaactagcttgaaatcccaagaaaatggccagcttcttgctgctcca

SEQ ID NO: 278794 - DNA, 486 bp, Cannabis indica
ataattgaatttttcgagtactatttgcactatttctcgtaatggatttcaattatgtgttgcttacatggagcaagggctttatgttttgagactgaaagtacaaattgtgcttaataacgaacttttcaatgttgctaaacctagaaaccataaaagaaaagagtttgataataataatgaaacatatctatggcacttgcgacttggtcatataggctatgacagacttcacaagttaaccaaagatggtccattgaaaaatatcgtcttaggtgaattactagtttgtgaatcttgcctagaaggaaaactgactgacgttctctctctgcaaatggagagcgtgccaaagaacctcttaggttagtgcattcagatgtctgtggacctctaaatgtaaaagccaatggaggttatgagtattttgttacttttattgacgatttctctagatatatttttctttacctaatgcaaaagaaa

SEQ ID NO: 278795 - DNA, 926 bp, Cannabis indica
aaaattacaaagttaaagaaaattggaaaactctttttctctcaactctctctttctatttcggccctcttggagcagcaagaagctggccattttcttgggattttgcttgtgatttcatctctctttaaggttcaattcaagctaggttagctcctcttcttttcttcttaaaaattgttgaattttgatgaaaatagtgtaatgcatgcatgataaattgaggttgttgctgctgtgtttttgttgttgatttctgagatttaaacatgtttatgagaggttaattaagctacttgtggtgcttgatagttaggttgtttaaagttatgaattttctatgctaaaactatggttttcaaagagaattggttaaaatctgttgctgtgatgttgttgaagtttgtagttgttttcagaggctattttatgcatgtttaagtagatttgagctagtttggttgcatgttatctaggtttaaccaagtttgagtttggaactcaaagcttgggctttaatggtgatttttgtttctgtgagttctgggtagtttcgttgctttggaattgttctataggttgtttagaacaggtctggaagttttggggtggtttggaattgatttgagcattgtgtgattttttgaaaagttcctgcgaggaaccggaattccggttgtgcaaccggaattccggatgagggtccaggaattctcaaaaccggaattccggttggggaaaattcagaaaccctagtttcctcgattttatgttttttggggtattgccatgctttttatcgatagggaaacttttagttcctagtttaagtccccgggaagtgatttagcgtatcacttatagtgttgtgatttttatggtttaggagcctgtaatccgccgcgcagatagttccagtcaggttg

SEQ ID NO: 278796 - DNA, 520 bp, Cannabis indica
tgttcagttttgctgtagcagaattactgtctgctgctgcaaacacttacagtttttatattttcttatattcaactgacatttgcaaaaacacagtttttcagtagaaaaaaaaaaaaactcacataacttactagtaaaatctttaaaaaaaaaatactagtaaaatatttaaatattaaattgctaaatcgtttgaaattacatttttaattaccttttaagtttatcgtagaaactaattagatttcatataacataattgttgccctgattttgcccaatatacgtggaccaaccagataaggacacgtggatcaagcagttcgaaatatttgctaagtctttatgccataaggtaacgtccaggacgtaggtcccggagaaggcacatggaactcaatatgctcccggaagctcatataacgctaaggcatctccgcgaggtgtcaggcttctcctgagcaatcaagtcccattaaatgctgcatgggaggaagcgtgttgggactgctacacg

SEQ ID NO: 278797 - DNA, 682 bp, Cannabis indica
aattagattggcggtcaactcacaaccgtcaatccaaaaagataaggactgaatccacctagtagatactataaggtctcatgagggtaacagggttccaaaccccgaagcataaatatcacacggcttgtggaaactttcaataactctactcgatacataggagtgagtagctcccaaataaaacaacacagtatatgtacaaccattaatagacaactgacggactagcatcaccgtcagcctgagtcatggtaaacagtcgccctgggttctgtgcagtattcttcttgggctcctctttcttggcctgagggcaatccctgataaagtggtccaccacgccacactggaaacatgccttggctcgacactcactaggatggtgtttcttgcatttgggacactcaagatatgatcggaataaggacccgcgaccctgacggccacctctgtttccccgaacctttctatttcccctgatgctccagaagcctcagccttccgtttataatcagggatgccactgtcggtccccttactgatactaccactggcaagaggatttgatgccgtgacggcatcctttgcagcctactctttcattacttgttgctcagcctcctcagcaattaaggccaagtataccactctcttacatagagtgtcatgtgatgtggta

SEQ ID NO: 278798 - DNA, 772 bp, Cannabis indica
ttccgaagatcgtcacgacatgtacaatcatcatcagcagttagttcgttctatggttcagtaagcttttaattgctttagtagcttatttaattattatgaaataaggaaagcctgataggaagcatgttagtagcctgatagtagaataggcgcatgtttttaatttctaaattaagcggcattagtaagctctctttgatcatgacctgatgtgccaactcttggtttcgcaggctgttcagactagatggacgccaggcgaaataccaggagccagggcaactcagtagggtcgaatcagggtcagggagctcagtttcccccgcatgctaggggctgtggtagaggtcccaagggcagggcccatggtcgaggtgtcgataacccgccacaggctgcccaagccgatcaggaagcccagaattgggaaactaggtttgctaaaatgcaagccaggatagaggaacaagatcttgagatacagagattgaggcagcagggggctcctgcagtgcctgtgccagaagttccagtggcacccgcccctgctgctcaggccgagatagtggtagcggcaaacagaatggaacccttgtatgaaaggttccggaagcaagcacctccggtttttttttgggaggtgcagatgttatgaaggccgaacagtggctaacggtgatcaccaggatactgaactttttgggtgtcaccggaaatgatagagtggtgtgtgccacgttccagttccaagaagacgctctagtctggt

SEQ ID NO: 278799 - DNA, 256 bp, Cannabis indica
tgactatatcttagttcactaaaacatcatttacaggtaggtaagtgttttaaggggccaaatacaataattctaaggttagactatgtctaaatttttgaatttttattaaataattagttttggtatttaaatggttagaattgaaaaattggcgttttaaatagaaatgaaaattgtgaaaactgcaaaattccaagtggggcccattaacaccatggtcggccacttgtataagctttttccaattattatt

SEQ ID NO: 278800 - DNA, 511 bp, Cannabis indica
ttttcaatttcgttgcataaaactcattttcggtaaggttctagttttcttggcaattttcgaaaaacttaccgaaaatcgtcatttttcattattttttagtttttcttgtttgagcaattttgttttatcatattaaaggtattagaattggtttggggtcatttgggtaaaaattggaatttttaggacaattttagggacttttttctggtctgctgcaccaaccggaattccggttgtaccatccggaattccggatgacgcaggaaccagaaaataagccccttttcgtcttttcacctgcgatttttcccctttaaaaccctaccaccgaattttttacttcccattcagattttctactctaaaacagcagccaccttgtttcttttctctcaaaatcttactttcaaaccctaactttcatcttccaaaaatacaaacaaaaaagtagtgttcttcatggctttttcatctaatcccttctcaagagcaaacaagagattgg

SEQ ID NO: 278801 - DNA, 452 bp, Cannabis indica
aaaaatgctatttttgatttctgttagtttgggaatttgagcgatgttgtgcgagttacgtgcgattttgtgcgatgttcacctgatagttgcgcttataagaattgtgcgattatttggcgatttttgtgcgatgacttacaccatttgttctttgtttttatgcgatttcaatgcgatttttatgcgattttatgcgatttatgataaataagcatttttattttgtttgattgcagatggctccagaactgattctgccattggctgagcattttccaagccgtatcacctacagagggaatgggaactttgcttcaattaaagcaaagtttgaagccttcaacttgatgactattttcgtatgtacaatatgtacaatatgtttaaatttgtattgctatgttaaaaaatattttatgtgatataactacatttaatataagataaaa

SEQ ID NO: 278802 - DNA, 306 bp, Cannabis indica
ctatcactcaaggtatgaaaattatgaagaagaagaaggaagagagagcgggttcaaatatagaaggaatagatggctcaattttttttgaaggcaagaaatttcatcaccttttaagtgtgagccatcactatctatttgtaggcaaccacctaggtgtaggttaggatttattaggcattaaaataatggaaatattaagtggaaattccataggagtggccagccatagtaatgggccccactttggaatttttccacttttgacaaattttccctaattctcaaaaatgctatttttccaat

SEQ ID NO: 278803 - DNA, 1150 bp, Cannabis indica
cccccttcttggggacggaaacaagttcataaaaatacaaaatttccgccgggcggggagatccccatccccgggcggcataaaaaataaataagcctgaaagcaggcggtatgcttggggaataagttggtatggcgcaaggccgacaaaaactagaaaattaacaaaataatcctgaagaggaagcatggccccggccatcagatgcgtttggctccaggccccgaagccgccgtagttgtggttgggcgtctccgcgtcgcgaggtggccggtggtaagtccctgaggtggaaggcttgattccagcaacctccacaatgttctccaattgatggggacaggtcaaggtggagtaaagctcagccgcttcccatccggtcgcccgggacttatacccctcctgggcaacgggtcccagggagacctcctcaagggtagccatgcgcttaccacttttctttgatgactttgagccagaagcagacatttttctattctgtaaaaagagtaagattccagcagttaggccccataccaaaccctaaaataagaaaaagggaatgggggtcccctaaccgctggaaagaggccccctccggacacgtgtcacacaggaaaccctggaaggattccctggacaagtgtcgggtgcagtaaattcacagaagacggctttacgcgataaagaaaacagaaagaaaagagtctgtcctatgccctaagcaaccattatacgaagaacgtatggccttctacaaagaaaatacacaataacaacagaggcgtgacaatggcaatcctatcactagagcagtaaattcaaacagactacatgaaggatttaaacacttgcatgcccagaaatttcgaatgcaaacccagaaaagaacaaacagataagtaatagcatgccattcaataataaagcaaaggatgcaaaaaacttacgatgaagtgttgaactgggggtcctgctgcaagtcgagtaaagacaagaaggactggtagcaacgagcgaagaagaactgggaaaatcgcaaagtgtttgaaggccttgttctaggtctgagaattttctctctaggaaatttgagcaaagttggcaagaaatgaaaaataaccgaaatgaagaaaaggtggtggcttt

SEQ ID NO: 278804 - DNA, 580 bp, Cannabis indica
gtctatttatggacttaaacaagcatcaagacagtggtatctcaagtttgatgcagttgtcactgcaaatggtttcatggaaaacaaagttgatcaatgtatatatatgaaggtcagtgggagcagcttcatcttcctggtactgtatgttgatgatattttgcttgcttctaatgataaaaatctgttgtctgagacaaagcaattgttatctgaccattttgatatgaaagaccttggtgaggcttcatatgtacttgggatacagatccttcgggatagatctaaaggtattcttcggttgtctcagagaacttacattgatcggattttgaaaagattcaatatgcatacttgttcacctggaaaggcaccaatagtgaaaggtgacaaattctcaaagggccaatgtccacaaaatgacaaagagagagatgaaatgaaagtggttccttatgcgtcagttgtgggtagcctgatgtacgctcaagtatgcacacgccctgatattgcttttgttgttggcgtgttgggtagatacttgagtgatcctggacttagccattggaaagcggctaag

SEQ ID NO: 278805 - DNA, 257 bp, Cannabis indica
aagtaaattctccaacttattaattcctcattgaaccagtatagaacttggaattgcactcttagttacatagaacgctctatatgctctacgatatatatacactatgaattatccatttttataatcccaataatcaacgatcctctatagattatttacattgcagagggacaatattatcgttacacgcttttagtgtattttatccttaaaacacttagccacctataaatgatattttagtgaactaatat

SEQ ID NO: 278806 - DNA, 506 bp, Cannabis indica
aagattctataccaaattagtgtagattctacaccaaattaatataacccactacaaaaaactgctacctttagtgacaaatttttagttgcaatataatttttttttgtaactaaatgtgacttttagtcacaacaaaatgaaacttgtgactaaaatatagtatttagttacaagttgtcattaatttagttttagtcacaacaaattataatttttgtgactaatatctttagccacgaaccttttagtcacgacatagaaataataatttataattagtcacaagttttgttgtgactaaaagtaaaatttttttatagtggccattggagatggtcttatgtgagatatttgtcaatgtgtcacagtttctagtgttgggattgttgacttatttcaaaaagttcataattttttcgacttgtacatctacaattattttgaattgacgttgtgagattctttcaaatatcacgttgttggaatttattttaccaggatct

SEQ ID NO: 278807 - DNA, 519 bp, Cannabis indica
ttttttttacaagaggcaacataaaaatacacgaacaaaaaaaaaacattacaagaaaggctcttttaacaaatgaaattatccctccggtatatgtcatgtgtttaaatttcaaaaatctaaattgaccaactcaaatgatcaataaaagttcaaaaagtcgttttctcaactctcacaacttacaaaaaaaaatggaaaactttaagcttgaaaattttctcaactatttgtgttaacaaccatcttaccacatgtttggaaagtgcattaaagaactctgaaaatcactccttaatagctaaacatagcaaaaaccaactcaaacaaaatatttcaatcatgcttagaaaattttgagaaaatttgacttaaaaattcaacacaacaatgtaattctccaaatgaaagctcaccagaacttaccacccccaaccgaaaatcagacagtgtcctcaatgtcaaaataaatatgcaatgaaaaagataggggaaagagaacacctggaagatgacaat

SEQ ID NO: 278808 - DNA, 512 bp, Cannabis indica
aaatagatgtgtcataatgcacgccgtgaattttcccagcaggagttattgctcggtgggaagctgcgggtgatgaccaggctaactatcagtgggacgagagcatattagatttgattcgaggggatgaaagtcaattcttggccagttggaagaacaaggagagaatatatatggccctctacttcgatggagcaaagcattgggtggcattagagatagatctggatcattggttgttgaacatatttgactccagcctcggatcgatttccccgaacgaattgaaccgtcacctggcaatgtgggaaaaattactaccaaatttgctgctgcaggctggcctattcgagagtcatgacatgatcctcttgcctcaacttaccgcctcagagagccaggtcagaaatttcacttcaaaagtcatggatcgggccgttgttccacagacaaagacaaggtaacttaattacaattgatttttttgttatttaacttgaatttaatttgca

SEQ ID NO: 278809 - DNA, 759 bp, Cannabis indica
ttcgtttaggtcatccatcccttcctttgctcaagaaactgtgtccccaatatagtagtttatcttcgttagattgtgagtcatgtcagtttgccaaacatcatcgtgttagtttgagtccacgtgtcaataaacgtgctagtgttccttttgagttagttcattctgatgtttggggtccttctcctattttgtctcaacctggattcaggtattttgttacttttgtggatgattattctcgtttaacttggttatatttaatgaaaaatcgttctgagttgttttctatattctgtgctttttgtgctgagattcaaactcaatttaatgtatctattcgtactttgagaagtgataatgccaaagagtacatgtctgctcaatttcaatcttatatgacctctaatggcatgcttcatgaaacttcttgtgttgatacggcacctcagaatggtgttgcagaacgtaaaaacagacatcttcttgaaactgcacgtgctctcttgtttcaaatgaaagtccctaaacctttttgggccgatgcagtttccacggcatgctttcttattaatcgcatgccatcctctgttcttaatggtgaaattccatttaaaattctttttcctaataagtcattatttccagttgctccgcgagtatttggtagtgtttgttttgctcgcgatgtccgtccatctgtcaccaaattagaccctaaggcactaaagtgtgtctttcttggttattctcgtcttc

SEQ ID NO: 278810 - DNA, 616 bp, Cannabis indica
agcatacaaaatactttgggatcccatttacaaaacactttacaaaaagtttgctattcactacaaaatatctgtcgcccagcgactaactacaaaagccctaatctctagaagatcgtacgctctaggcctaaccgcctcgacatgtacaatcttcatctgctcgtcctcacggttcctcggccttagccttgcccttacctacacatgaacatagcactgtgagtcgacagactcagtaagaaaagcataaatcctgggttatgatcagacgcccatacccctgaccacaaccgtaatccccgtgtcccacacggtgctgagtctcgaacgttcgtgcgacggtacttttgacatagtaacagcctatactcagtacgctagtcatactctagccttactgatgtgttgctgtatcagcctatactcggtatgtcagtcatactctgagcataccgatgtgatacggtcaaatagtagagtaccatcgaccataatatcaccctatactcggtacgctagtcatactctaggcgtatcgatgtgatactgtcggatggtacgaacccaacatacatatctaatgtaatctaagaggcttcctaacatgcacgct

SEQ ID NO: 278811 - DNA, 742 bp, Cannabis indica
gggcataaaacccaacaagcttcaattatgaaattgtggttgtgtagcttttctacttcttcttttagggctagtgctcgctctttgtccaatagccttcgcttttgttgaactggtcggaaattgggatcaatatttaggacgtgcaaaatgataaaaggatcaattctgaccatatcctcatgcgaccaggcaaacacgtctaggtttgctctcagaaattttatcaatgctaattttacttcaagcaacaaaccttttccgatctttagctttctgtccgggatatctggatcaatctcgatctcttctaattcttccataggtccaacattgttgtttgggtcccaagtcgataatccacatcttcatccccgccttgggaatctccctacttggaaatgtttttttcccttgtttgtgctctggctggaggatacttccttcttagccttggccactgcaaggttataacattcccgagcagtttgctggtttcctctcagacaccctaccctattcttcgttggaaactttaagcacgagtggaatatcgatgtgacatcctttaagtcatacaaagctggacgacctagcattacgttaaaggttgaaggaacatctaatacaagaaattgtgccataatagtcatgctcgtcgaagcttgtccaacagtgaggggtaaacgaatttttcctataggtgcgactccttggctggagaaaccatatacaggtagga

SEQ ID NO: 278812 - DNA, 506 bp, Cannabis indica
ttctagttccatttgcgattctgacttcgagttgggtatgagttcgggccggagttcgagtcctggtatgtgtttaggttcgggttcagattaaagtctaggtccagatcaagctctgggtgtgggttcgcgtcctaggtcttggtctaggttgggtgcgagtcccaagttccaatcccgatctgagtctggattcagttctgggtctaagtccttggttctattcctggtttgggttcgagttttggtccgggtttgggtctagctttgggtctgattcttggtgtgggtttgacttccggtctaagtctgtgtgcgggtttgtgtctaggtctggaccccaatctgggtctaggttcgggtccagatccaagttggggtcccgagtgcgtgtccaagtttgggtctgggtcaagttctcgatccagatctaggtccagcatttcgatcccagtctgggtctttttccgagtccaggttcgtatccggatccctatctaggtcca

SEQ ID NO: 278813 - DNA, 652 bp, Cannabis indica
gatgagaggacttctctgcggaaggtcctccttcgggtgaaggatgataaggacgctcagacagtcgaggcgaaccgcttgagggagaaggttgatgctttggagactgccagcctcgagctcttctttgatttttggaaggctaatccccaggccaacttcgactacttaggcgacgccaaggaaatgtacctcgagtactgcgcggcccaagttgcctatggtggcaaagaggtggctgcttcaacttccggccaagcttctgaacaggctgctgatgcttctcccgctcaaataacagatcctcctgctccagtcggctcagaagaaccaaacccagagcctgggactccagccgtttgaacattgatctttttatccctcctgtttatatatatataaatatatatatattatatatatggccgtaaggcgtttaagacatcatgactggccaatgggtctttaaacttggaattaattttcattttttggacaacgggctgaccgggcagcttttaatcccagtacattttgctcttgttattcttaatgaatttcattctctgtttataattgcagtgcaattgtttttgttttatgtttaccagatgctttgtacaggtataggtgccccccaagtgaccgagca

SEQ ID NO: 278814 - DNA, 491 bp, Cannabis indica
aaacctcagaattctggaaatggtaataggacgaataatcctgaggcacacgttgcctctacttccaaatccaagaataagaagaagtggaaaaatgccaagaagcgagctcaagctgtgaaagcagctaagaacaaaaggaaaatgtttctactacaatgagaaaggccattggaaaccccaatgtcctaagcttcttccaaagaaacacggtattcctttcaataaactgatgtgttttagtgagactactaaccttgtttatttttcttcttatagctcaagcttcttaaactcagatgctgtcttagcgagttggatctgaaagctggataatgggatggagttcgtcaagataaagaagaagctcatttatttacttttgaattaattgtttaaattttaaaacaatttggatttcaagtttgggattttattccctgctctcataatattgcaaacattttttttatttataataaagttttttt

SEQ ID NO: 278815 - DNA, 971 bp, Cannabis indica
gtacttaacttatctttttgtgttcatcaaatttatgtttctataaaatcctagctttattcatgatattgtattcttgttttggttatagtaatttatcactgctttacagagagagagaaagagagacacttatacttaaaatgttaactacaaatgctcaaaagagaaatgataatttaatacacatttgttgtttccttgtagtatttttagatacaagctctttaaaatatctttgttgatgatttcttgttctaaatcttgcctagaagaatgttaactatcaatttcaatatatgtttgatattgaaaatttcgttaaatatagtggttttttatgcaattttttttttttctatttcagatatgagaatttgttaattatttaatttttttcttttctcgctacaatacaactttcaaataaagtaacaaaataggaataagaatgtattgaaatggaattaaatgataattgaatttttccattctattcaattatcccaaacaaacataacaatattttagaataagaataaaagtagagtgaaacaaaataaaaataaaatacgaaaaaaataaacaaaacgaaaaaaaataataaaactaaaaaactaaaaaaaaaatacaaaaaaaaaaaaaattaaatctctccccccaaactaaagatgcacattgtccccaatgtgacattaaagaaaaaggaaaggaaacttacctgagtgccacatcaataagcggttgacgcccgtaataagcgtcatgcaagacaacttgaaaattgttgttgtacttgccttcaagcttggcaagtgatgagtttgaaccaaaatcagcaccaacaacataagactttggatgatgagcttggggagatgccttttgtagcttgtagaggatataatatggtgttgatgaaatatatgaattcattggtggtttattagtcaatatcattgatgaagtcg

SEQ ID NO: 278816 - DNA, 780 bp, Cannabis indica
acatatgtgaataaaattagtcagtaatgtattgcaataaagattttttttaaatgtagtattactattatggtttactaagcaccacttagtggtgcatgtaatttttgttcggatcactaatgtggatagaaatataagtaaagtgtataatattgtaaatcctaactttattaacttttttttttttcgtttattaggttttttgattcatttgaagtttaatatatacgaataagcttacaacttttattttgaaaacttaataacatgaatagatagacatatgctatatacaataaatgaactccaagctttctgtaaaaagatcaaatattaattcacttaagagttaattctaggagttaatttagttataaagctcaagtatataattagattataaattcactattcattatgaattaattactatgaattaattgtactaaaagaattaaaagataattagaaaggtaaaatagtaattttgactaattttacttgtgaactaataaattagaggagaaactatttatattgattaaattaatggattattaggtagaattcattaaatataatattattctatatttttatatgaaaatttcatatttatagtaaaataataatagaattaataaataagattattttattaataagattaatagtaatcttatttcttaaaggttagaattattagaccgtagtcctaaggtcacccatacactgtttgcagtgacggacacactcacaatagtgtgggcgatatag

SEQ ID NO: 278817 - DNA, 748 bp, Cannabis indica
agttttctcctctgctcatcaaaacaaaaaaaaaaagcattcaaaaattgttagattgaaaattttagattcaagtggaaacgatcaccatcgattgaaagaaaaactcaccactcagagttgttacctattaaaaattttaaaaagaatggctgcgatctttaggatgatgaatattgagaaataataaagagtctcaatagcgagaatgaagccaagaatattgtagttcacggttgaggagttagagttagggtttaatttgtattttaggagctttatttatattttttaatagttaacgggagagttaacagtagagttaaatttaacggaataaaaattaaaaactccgttaaaccaagaatttctgttagataggcatttttaatatataaagatataatgttttaattatactaattatgtatattgtaaattaataggaatttgtcaaaaaaaatattattttaattattttaacatattctatattttttcatttatatttctctaattaaattagtttattatttttctttgaaaaaataattgacaacaataataattaattgattaactacctagacttttcttttctcttccaatttgatatgtgacctttgttatggaattttattcaatttttaataattaattgaataactataaagacttttcatttatcttctaatttattatgtgcatttgctatgcctatgagatattcattttttgtaattttatg

SEQ ID NO: 278818 - DNA, 520 bp, Cannabis indica
caactaaattttgaaaatttagggttgttaaaaccaaccttaaatatgtcatcaaaatttaaattttaaaaaaaaaatgatatactaatttaaaatatctaggtttatttgaattattttatcaaattgaattaaatatcaaataagataaatgatttgaaaaaaaatatcttcaatatcattctcttatcttataatttataaaattaaaattataaaataaaccaattttaaaatagatgtggttagataattattattttaagaataaaataataaataaataataattacataattatatgtcaaaatatcttaaattaagcattattcaaatttctacaaaaatatctaagttatttaaatatttaaaatataattaataaatttctaataagtaaaaatgatataaaaaataaaaaaatatcatttttcaaacttatattttataacaattaaatatttaacaaaatatcaaatttttgaatttgaaaatattacggttagaatatctataaaa

SEQ ID NO: 278819 - DNA, 551 bp, Cannabis indica
ggtccagcatttcgatcccagtctcggtctttgtccgagtacaggttcgtatccggatccctatctaggtctaagtctatgcttgggatcgagttccagatttaggtccaggttcgagtctcagtttcggtctgggtacacgaccgtgtccgggaccgagttcaagtctcagtttgggtttgaggctaggtctgtgttccgttctaggtctgggtctgggtcctggtcacagtcatagtcttgttctaggaaactggtttggcgattcttgttcaagttctaattttgggtctcaggtctagatctgggttcgggtttggttcttagtctgggtttttgtcctattctgagtcccagatctagacaccgactactggactggtccaggccccgttacccgaatctcgagtcaagatctggatcactgtcacggggctcggtctagttcttgttcaggtcccaggtcccatgtctgagtttgggttcgggatcgagactgggtttgtgattctaggtcccgaccctggttctgtgtccctagtctggttcca

SEQ ID NO: 278820 - DNA, 758 bp, Cannabis indica
attcggaattccggatgcacaaccggaattccggttcctcgcaggcagaattcaaaaattcataactccaccaaatcaaatccaattcacacaaaaccttccagacctgttctatatatcccctagaacatttctaaagcaacaaaaccgagcttcacacacagaaactcatttcaccattaaaggtcaaagattgagttctaaaactcaaaacttgactaagcaacatatcatgcatcaaaccctgattaaaaactcatattcaagcatataaaaactgcagaaactaaaacctaactcatgcaacaactacagccaccaaaattccaattttctctttgaaaactaaacttttacatagaaaaaccataactcaatcaacctaaccatcatgcattactagcagctcaattcaactcatttaaacatgcttaattctcagcaaacaacaacaaaatcccagcaacaacaataacctaaaactaagcatgcaacctaccatttctcttcaaaaattcaagaaaacataaaagaaagatgtagaaaacataccaacaacttatgaacacttaatcttgctaaggagagcttgaaattcaagaggaaaatcctcttttcttgctgctcaaatggccgaatagagagaggaaaagagagagcttttctttttaaaattttgtaatttttttctaagtttgggaaaaatgaagtaaatgccacataatccctttttacttcagccaaaataagataattaa

SEQ ID NO: 278821 - DNA, 549 bp, Cannabis indica
ccttttccaattttttgttttctggttgggatatctagatcgatctcgatctcttctaattcttccacctgtccaacattgttgattgggtccccaagtcgaggatccacatcttcatccccgccttgagaaactccctacttggaaatgttttttcctttgtttgtgctctggctggaggatacttccttcttagccttggccacggcaagattataacattcccgagcggtctcctggtttcctctcagacaccctaccccattcttcattggaaacttcaagcacgagtggaatatcgatgtgacagcctttaagtcatacaaagctggacgacctagcatgacgttaaaggctgaaggaacatctaataatagaaattgtgccataatagtcatgctcgtcggagcttgcccaacattaaggggtagggggatttgtcccagaggcgcgactccttggcgggagaaaccatagaaaggaggagatagggggttacatccttgagttggagtcccatctttcgtaggcagttttgaataagatgtt

SEQ ID NO: 278822 - DNA, 502 bp, Cannabis indica
aatttattaagatatttgaaaaattattaattaatataaattgagattggctttttatatacatgtttgacttttttatgtcacaattaaaattattaactaaactattttatattctcaatttaatatttgtatattatgtatgaagaaattaacttattatttattaatataaatagtctttttaccagagaaaataattaataaataagaatatgaaaagatcattggtttaattattataaactattttaaataaaaaaaaattattaataagatttttatacacttagagtaaaaatggtattgacattgtcatctaaaaaacttttgcgatgtattaaggaactcgtacataaaatttatacatataaaattcatcacaatacagattcaaaaaaaaaaaaaaatcgttacaaaattatacgatatcttttattaatatattttttttttgcctaaattcatattaaaaaaaatatttatctttttggaatcttta

SEQ ID NO: 278823 - DNA, 500 bp, Cannabis indica
tgtttaataatttctgaattgtgtgtaaatttatattgaaccatgttactttttgttattaattgtagttgtaaatttcgtgtaaaataagaataactctgactctcgcctatcaggacgttgttggattcttattttcatcgaaattatcctaatttttcctcttagcttattcatttcgaattttcttacacagtatatcattagatgaatggtttataaatcatctgcttatgatgtcattctattttcttttatgaaattgaatggcgcatataattatattcccgacattctatcctgaaatgatataaatcctcgatcttagaatctcctacttgtatatgcttactttacgcaaattaaacttagagtttgattagtagtcatggtccaagagagaataataactcaagaaatatttggtataaatttaagtcttcgactttaaattttagattccaaataaaaattttattttcagtttcctagaatacatt

SEQ ID NO: 278824 - DNA, 654 bp, Cannabis indica
aaagactccctaataagatttgtctatagaaaacgcatccctcaaagcaacatccaatcaaaccctagtaccatgtccaaaataattatatttctaagaatcaatgaaaattcaaaagttgttttctcaaatctcgccactcacaaaaatataaacacttgaacttggtaaatttttttgtaagcaaatatgtgctaacaatcatcttaccataaactttggcatgtgctttgtataactctagaaaaattctaagcaataaagatagtaaaaattggcttgaaaataacattctacaagaataaattactaatttttgaaaaatttgaccatgaaagtattaatatgacaaaaattaagaaaaacacttgaatatgctcaccacccccaactaaaatcagataatgtcctcattgtttaaaaatatatacataaaatgcatgaaatgggaacacttagagagtgagccaatgcaaaatgacatgatattgattcttagaaaaataaaactaaaggaagaaataaactaaaaaaaacaaaaaaaaaaaaaaaaaaccgaaaataaaagaaaagcaaggaaagatagaacctgattagtcttggcaaaccgggagacaagtctcctcaggtaggcttaccaactcaatattcttg

SEQ ID NO: 278825 - DNA, 548 bp, Cannabis indica
taatatgtagattaaaaatgtggtaatatatgttattatatgaaataatatagggtaaatagtggcataagtactcaaagttttatgtttgtaagcggcataaacccaatgtttatttttagcggcataagtacccaatgtttgcaaaactgtaattttctttaattttgtcagtacaaactctgatatgtcttaaacagggcacatataaggcctaaatttttgatcatcggacttagatagaaatatatagtatcagttacttctaaatgttcttttaataaattcaaaacagagtttgtactgacaaaactggaagaaaattacagttttacaaacattgggtacttatgccactaaaaataaacattgggtttatgtcgcttactgtaatgaccgccttagtaatttggattagaaaatgcaattagcactaatttctgtcattttataattatttgtgaatttatttaattgtgaatcccaacatttagaactaaatattagagttataatttctcaattccagagattttattaaactctag

SEQ ID NO: 278826 - DNA, 565 bp, Cannabis indica
tcactgtcacgggtctcggtctggttctggttcaggtctcaggttccatttctgagttgggttagggatcgagactagggtgcggttctaggtcccgaccctcatcctgtgtccctagtctggttccatgtttgggtctgagttcaggttcgggttcgggtcccgagtccaggtttgggttgggatccgggtccggctcccaattcgggtctaggtcagatttggagtccgggttcttgtccagttacatttctggatctaggtccaatttcagttatgattccaagtccaagtcctagttccagtcccggtcaacttccaattttgattccaattttgggtcacaggtagggatgcacatggggacggggcaatgcggggaatgcattccccgcccccgtacccgcctattatatttttccccgtccccgccccgtccccacatattccccatcggggaacgggacggggaatccccgtcggtgatggacaccataacggggacccgtttattgaaaaaaaaatgtaaaaaatacaaaatttatatttgcaaatattaaattaa

SEQ ID NO: 278827 - DNA, 504 bp, Cannabis indica
atatttttacaaacttataccttaaaaaccataaaaataaaaattcttaataaaatattacacatagtgatatgatattatttttaaaaaaacacaataggttgttcataatatgtattcctcttatgttttatgagtctatattgttagccaccacctaataaaaccgatggaaaaatcaaaattaaagtgaattaggcctacaactcaactccaacatcaaatttattatcatgcccaatccatgttccttaagcaaattcattaatgggccttaaaactgaacctaaattaatgcacaaattaatgaaagtgaaaattacatgaaatatgggattttataacaaagttagaaaaatatggcatttttaggtttgccactcttctatggcattttttcacatttaagattttttatggtatttgatatgccatatttttataaacttattatccaatcccatattttatgtttttgattttagcttaattagttttatttat

SEQ ID NO: 278828 - DNA, 600 bp, Cannabis indica
taaacaactgctaatttccaaattaactaagcgggctttacattcacattcctccgtccactcgaattgcttgtttcctcgcaggatgttgaagaatgggacacacttgtttgttgattttgaaacaaatctgttgagtgcgacgatccgaccagtcaaactttgcacttccttggttttagttggcgacttcatatccataagctcttgaatcttctctggattggcttcaattcctcgggcattgacaatgaagcccagaaactttcccgagctgactccaaaggagcactttaagggatttagtttcatgttgtactttctgaggaccttgaagcattcatccaggtcatctatgtgccccccagccttccttgatgaagaaaccactttcttggtgaagaaaccggtttcttgatgaaaaaaccactttcttggtgatttttctagtgattttgctggcgacaatgttaattctgacgactttttttatgccagcaataactccgacaatttttctgacaccggcaactactccggcgacttttccgacaccaatatcaaactccagaatagtcgtcggaattgacattgtcaccg

SEQ ID NO: 278829 - DNA, 751 bp, Cannabis indica
gcccccagcgctggcagctgtacatgatgtgttccatgtttcgatgcttcgaaaatatgtctcagattcgtcccatatcctgagttatgaagcattagaactacaaccagatttatcatatgaggaacaaccggtgcaaatacttgacagaagggagaaagtcttgagaaacaagacaattgcactggtgaaagtgttatggaggaacagtaaagtagaagaggcaacctgggaactcgagacagatatgcagcagaaatatccggagttgtttaggtaaatttcgggacgaaatttctataaggagggggtaattgtaataccctggaattaaggaaatagattagcaaagccctaactagttaatttagtattattgtagaattatattattatataatttattatatgcgaattaatttgagaaatgacatgttaagaccccgttggtgagccaggggcattttagtaattttgacccgagaagggtaaaactgtgaatttaatttatttatgtgcttatgaactatattattatatagtatatctggtgtgtcctttttcaggtgtgttctgacaagttggcgcggtatagtcacaatcgggtatttcgggctgaaccgggtttcgggccgaaatacaattatgggatgtttaattggcatattatttttatacaagaaatctgaaatttattatttgagtgtgtgaaatgtgataattatattttttttacccttatatgcttgaa

SEQ ID NO: 278830 - DNA, 505 bp, Cannabis indica
gcgtttttccaaaaaggcctaaacttggtgctgttgttgctgcaagcttgagttctacttttgcagaagtccaggaggtcaagaatgaggttcagttggtgaacaatcgtcttgctgccatggaggaggttcagcaagagatgtccaagcagctgtcctctttgatcaagctttatagggaataagtttttctttcttttcttgcttttgttggacatattactatattttcatgtttgttatctttggcccttagataaacaaaaaggggagtaatattttgttttttaactgtttgtttttatcaactctggaccctttttccagggagagttgtgtttggtacttgtgaacttatttggattaaatgttagcatttaattttgttgtttttgattttcgagtgtgttactcagggggtttgttatttgttcttgctaactttattttacaggtactttgtgttaaaaaatattttgttcatctaaagtgccaaagggggaga

SEQ ID NO: 278831 - DNA, 565 bp, Cannabis indica
aaacattaaacaacaatcatcatcctccctaaatgggaaatttagttcagaaatagatccataaccattcctatagcaatgttcaacataaagaaattaaagaggaataaagaaagaaactgttggtggatgaattctggatcttcacttgaatcactatgctcttcctgccgctctctgctgcgttttaggtttcgaaatcgcttttttttgacttccaatcgcagttttctatttataactaatttttagggttcttcggacaaaaatacccctgggccgtacgggatctcgccgcggccatgcttcatctcgccgcggcgagatggaattttctgcttcgatctgttttagtaaaatgagcataactttctcatccaaactcaaaatgagctgattcaagatgcgttagaaagataaaaaagagatctaaaacttttatgttttgacattttccaaaatatgatcagaacatagtcgaatttagccttgaagtttcagctttattctctttcaaaattttctctattttatagatcactgttttccgaaatttgtccaattt

SEQ ID NO: 278832 - DNA, 743 bp, Cannabis indica
gatacggcatgaagctcaacccgaagaaacaagtcagggaagttcctgggcttcatcgtcagccagagggggattgaggcaaacccggaaaaaatccaggctctcttgagcatgccatcccccaaaaagcacaaagatgtgcagagcctgaccggaaaggtggctgccctaagccgcttcatctcacggtctacagacaagtgcatccccttcttcaacatactgaagaagtgtcaaaagtttgagtggtcggacgagtgcgaggaggcattcaaaaaactaaaagaacacatggccaagcctcctatcctgtcaaaacccgttctcggagaagacctgtttctatatttggctgtctccgaacacgcggtcagcgctgccctagtccgggaagaagagaaaactcagcatcccgtgtactatgtcagtaagcgcatgataggagccgaaacgaggtaccccatcattgaaaagttggtcttttgcctcctgatggcctcgaggaaattgaggccatacttccaagcacatccgatcaagatactaaccaaccacccgctccggcaagtcctccaaaaacctgaagcatccggaaggctcctcaagtgggcaatggagctaagtcaatttgacttgcactacattccccgaatctccataaaaggccaagccttggcagacttcattactgaatgcaacgaagccgaggcaaccgcgaatatgccggtaccgccaatccccac

SEQ ID NO: 278833 - DNA, 762 bp, Cannabis indica
aacctagctgatccatttaccaaagttttggcaggaactgcatttgaaaagcaccgactgaatttaggattaattgaaatgtactgattgtttatattagtgcatgtgggagtttgttgggctttgtgccctaaataaaactacatttcaatgtaatctttatcatttaattatcaataaagagacagaagtattttcatcacttatttagtttgtcaattggttcatgttatcagttctatgtttatttaatttataaattcatccaaacccttatcacgttgatattcttgtttattgtgtcgtcagcacaatggaaagtaatcaagattgtgtgattaaatatatattcctagatttatcagtacaaagggtttaactgatatgataatctacaacatagtttacttgcacctaggataagtgctacgtcctttccagggcattggttaaagtaaagcttgggttggatgcatggagtatgcattggaagggaccaatattgaacttggattagatatgataaattttaccgtaatatatattcaattcaatatcacctagttgatcccagtcaaatgatcttaatcctaacaaggttaggtttgatctcaagagtatattcatgttcattgatttgtagtaagcctacttttggtcaggtgaacgtacattttgggaccatgatagtgcaattgagtgaaagcgctaatcatagatatggaatctgtagcttatatctagacatagaagtaaaatgat

SEQ ID NO: 278834 - DNA, 804 bp, Cannabis indica
attgaagtttacttaaaacagattataactgtttatgcaaaacagaattgataactgctcacaaatcaaaagcacaacagataataactgcccgcgcacatagtaaatcactaactacttaaataatatcaaaggaaaatatgagaaatggaaatcccttaagtattttaaatttgatcaaaatataattgtttaagttgtgaatgaaaacgcaaacaaacagatatattaagttcaaatatgaaagtatgaagcattcaataaagataaaatagaagcaaaattggccatccaaccttacaaatttgtctttacaaaagtgccacaaggggaaaactattgtctcggccttaaggccatttgcctagataaaataaaaataaataaaaaccaagcttacatagtaggagacttggacagttcttcttcttctgatgccttggcatcttcttcttccttcttagttttctcgcagaaggcaatgattttcttctcagactctcccaagtaactcgtatccatcctcggattttccatccaagcttggtagatggaacgtaggccaacaacgttgcatcgttcaatggtttcagcttctttctcatcgaatgttaccttggctgcatcaagttccccttggagtttctggcatgcatcgaccttatcttttgcctccttctaagcagcttcagctcggcctcgagggtcctcttcaccttcttggcttctttggttagacgagtgtctccaatttggcatcattttattgcttggtcacaacctcgcgctggcccatcaggttct

SEQ ID NO: 278835 - DNA, 577 bp, Cannabis indica
cttttggatagagccatctgcgttgagctttgtcttgtagacccacttgactcctatagtatctttgtcttgtggacgatctacaagctcccaagtctcattcttcataatcatctttatctcttcattcatagcttttctccatacttcttgtttatgagctgcttcaaagctttctggctccataagtactaagttgcatgtctcgtagatttctgatagtggtcttgttcgccttactggtgagtctggcggagattctatgacttgtgcaggttcttgtgttcttggttgagtaagaacttcattttgatcagtttcttgtcttggcggtagaggaatattgactgtctttctttcaacttcttgtgtctcccagttgtatgcagcatcttcgtcaaattttacgtctcgactgattattagcttatttgtttctaagctatagactcgataaccttttgattgagtactatagcctaagaagattcctttctctgccttctcatcaagcttgcctcttttctcttttggaatgtgactgtagcatatgcagccgaagactttgagatgcttt

SEQ ID NO: 278836 - DNA, 660 bp, Cannabis indica
atcgggcgaaatatggaagtgtacgtggatgacatgctcgtcaaatctagaaaggctgggggccacatagacgacctagacgaatgtttcaaagtcctcaggaaatacaacatgaaactaaaccacttaaaatgctccttcggagtaagctcgggaaagtttctaggcttcatcgtcaatgccagaggaattgaagccaatctagaaaaaattcaagccctcctggatatgagctcgccaacaaaaaccaaagaggtgcaaagcctaactggtcgaatcgccacacttagcagattcgtgtcaaaatcaacggacaaatgcgttgcattctttaacatcctgtgaggaaacaaaaagttcgagtggataaaattatgtgaaagagcttttcaagatttgaaggcacagctcgcaaaacgtcctgtactttctaaacctctggatggtgaggagttggggatatacctagcagttacagagcatgccgtgagtgtcgtgctgatcagagaagagaacaccgtacagcacccagtctattacatcagtaaaagattcattgaggccgaaggccgatatccgttgataaaaaagctcgcttactgccttattctagcaacaaggaagctgaggccttatttccaagctcaccctgttcgggta

SEQ ID NO: 278837 - DNA, 898 bp, Cannabis indica
atgacaacaacagtcaatagctatgtggattcagactatgcagggtgtttggataccagaaaatccttaacaggatatgtgctcaccatgtatggaacaaccataaatttgaaagccaacttacaaaaggtagtggccctgtcaaccactgaattggagtacatggcacaaacaaggttgttaaagaagctctatggcttactcctttagttgaagaattgaagctaaagttgaaaggaatatctatgcactgtgataatcaaagtgtaattcaactgtctaagaacctagtgaaccatgagaggaccaagcatatgatatcagactccacttcatcagagaagttgctgaaaagggagttgtgatgataaagaaaatccctactgaacacaacccaactgacatgatcgccaaggtagtttctagcagcaaatttgagcattgcttggagctaactggagttttgtgggttaaagccctaaagattaggggtgttcataaaataatcgatccaatccaatccaatccgcacgatccaatccaatccaattcgcaaagtgcagatatccgtacttgtgtggatcggattggattggaaaattcaaaggtcgcacttgtgcggattaaatgttgattgacatgtaaaagtaaccattattttcagtggcttctaggatagaacaatttaaaaagtatttatatttcaaaattctggcatgtaacgactctgggtatagaagtaatctccacacattttttgccaaaagagcttgattaaaaaagtaaaaaaatcttgaaaacccaagaccgcccatctccttaggctaacactgtgacagtcagtagtcccgtgatccgtaaggagaaataccgggtaagctgtgcaatcccacaccgc

SEQ ID NO: 278838 - DNA, 595 bp, Cannabis indica
ttatcttacgaaaatgttctttttctataaaaaagaagtttcccacagacggcaccaaattgttttcgatagaaaacagtcaagatttcttttcaagggttcttctttttttcagttcctaatccccttttcttttacgtgatccttctttatatatcctctacgtcttttttgcttgcatgggttatttttattttgccattattttgctgacgcgtgttctttttcttttattctttttgccctctgccacgtattcatgttttaatagcttacctttcttgctacacgtgttagcacctttaatggattttttagagttattattctttccaacttaggtgttgtgtccgtcggcattacagccatgaatttattaatttcatattttgcgctttagtttttctccgtcggcgctctcaggtatttcttccgtcggaagggtatccaggtgcctcttctggtcctgctatactatttttccttagacaatccttggtccgtcggcgtctctttccttcctgttccttcttctgcttccgtcggcattccctttacttgttccctggtttttggcgtttttctcctttttgtc

SEQ ID NO: 278839 - DNA, 525 bp, Cannabis indica
cattcccgcccacgacaatcgcactacaaaccctgataaggggatgtgcgcctggtcgggcgctcacggccagcaaggggcgctgatgcccttgcacaagtacttccgtgatgtggcagacttcttcggcctctgcccggctcagattactcccaagggcattaagtatttgtccgctctcttcgtcctctacgcttcccagggatggggcgctccttctccccacgaggtcgcttggttcttcgacctgaagtctacccccaagcaaggcaggtcggggtatttttacttctctcagccaggcttcaagtggttatgcgggacggaccacaaggccatcagcaaaatagggcgttttgttgatgagtacttcatggtgaaggatccgaacatcaatcggacacggtttcaacagattccaacatatcactgccctcccctcacccttattcttagggatagggctcagaagcttgcccggttgtacgaaaattctatttattacgcaagtgtacgtatcaagta

SEQ ID NO: 278840 - DNA, 733 bp, Cannabis indica
tggaaccagactagggacacagaaccaaggtcgggacctagaaccgcaccccagtctcgatcccgaacccaaactcagaaatgggacctatgacctgaaccaaaaccagaccgagacccgtgacagtgatccagatcttgactcgagattcgggtaacggggcctcgaacagacaagtagtcggtgtctagatcttggactcaaaataggaatcaaacctagacgaagaataaaacccgaacccagacctagactgggaccgtgaccaggacctggacccagacctagaaccgaacacagacatagccttagacccaaattgagactggaactcgggcccggacacggtcatgtacccagaccagaactgaaacccggaccgggacctaaatttgggaccgattcaaaaaacaaacttggacctacatagggatccagatacgaaactggactcggaccaagacccagacagggatcgaaatgcttgacctagatcttgaccgagatcctaacccagacccaaacttggacccgcactcaagacccgaacttggacatcgaaacgaacctagacttagatcagggtccagacctggacacaatcccggacacagactcggacctgaactcaaacacccacacctagaatcaacccgaaatgtagacctggacccggacccaactcgaacacaaaccaggatcagaaccaaggacttacacccagaactgaatc

SEQ ID NO: 278841 - DNA, 541 bp, Cannabis indica
ggggattgaggcaaacccagaaaaaatccaagctctcctaagcatgccgtcccccaagaagcataaagacgtgtagagcctaaccggaaaggttgcagccctgagccgttttatgtcccggtctacagataagtgcatccccttcttcaacatattgaagaagtgccaaaagtttgaatggtcggacgagtgcgaggagattcaaaaagttgaaagtacatatggccaagcctccgatcctatcaaaacccgttctcggagaggacctattcctatatttggccatctccgagcacgcggtcagcgctgccctagtccgggaagaagagaaaactcagcatcccgtgtactatgtcagcaagcgcatgataggagcggagacacggtaccccatcatcaaaaaactggttttctgcctcctaatggcctcaagaaaattaaggccatatttccaagcacacccgatcaaggtactgaccaaccacccactccggcaagtcctccaaaagccagaagcatccaaaaggctcctcaaatgggc

SEQ ID NO: 278842 - DNA, 523 bp, Cannabis indica
tattagacctttaagagagaaaaaaatagaaagataagagagagtggtgatcgtgggtgagtgggtagttgagcatatataacatttgatattacttacccaaaatcaaaaaaataattgaaaaggaaagtaacttccttacctttgactcacgtgtggagagaaaaaaggaaaccaaaaaaggtttttcaaaaatagtcaatgtttccttaaatggaaaaaggaaaccaaatatccccacaaaatctaagaaataaaaaccccaccaaatccgaaattgccaccaaaaaggaaaccaaaaataattaattatttaagtacaagtttcctaaaaacaccaaaataagaccaaatctccacaaataaaggaaacacaaaatagagtatacaattaaaacatgtttccataaaatgaaaaaaaataaaagaaaaatatttacaaggattcgaaaaaaaaattcgaaaagaaagaaaaaaaaattagcaaaatgaatgaacaagagaacacacagagacacaaaaa

SEQ ID NO: 278843 - DNA, 589 bp, Cannabis indica
gatctgtatgacccgcgatttgacagattcctccaacaatatttacctacccaacctcagggtagtgcaacatgtccaaggccgcaacaacctttacagcagactcagcaatctcctaatgtgcaaggaagtgcctcccaatctcctcttattccaaacatgtttggacgctcctcccagtctcctccatttttctactctgatttttttggaggatcacagtcccaacagccgatgttgggccaatttgggagttcatctcagcagccgatgtttttcgggggtccaatgcagcaaacttctccgggtcaatttttcggttcacaaaatccatactttttcccgggtcagtttcagcaacaatccccgaacttctcgccacaacaatctccaaatatttcgcaacagcaacaatctccgaatttaccacaacaacgacagactcggccatttgtggagcttttatcttcccaacaaccatattacccatcaccgccagtatcgcaagctcaggacaatgcaccaaatcctgatattaacttaaacgctactggctcaaatttcgaagatgatttgtttgatcaagaca

SEQ ID NO: 278844 - DNA, 136 bp, Cannabis indica
aggaataaaataataaataaataataattaccataattatatgtcaaaatatctcaaattaagcaatattcaaatttctacaaaatatctaagttatttaaatattaaagatatgatttaaaaatttccaataagg

SEQ ID NO: 278845 - DNA, 1044 bp, Cannabis indica
gaaagtgaaaagagtgagaaacataaaactatatagaagaatagaaaatggtataatgttaaataagcactgaagatttcaaacaatactgaaaaaagaaaaataaaagattattaaacttatgcattcaattttggaaagagagagagaaagagaattacttgaatgtttttagcacaaaatcttggtgtatgggcgctaataatccatccccattacatttagtatttgtaaatttgatatcttttgttttttacctaatatagagatagagagatatatataaaaaataatatagatatataaaacaaaatcagaaaataatatatatttatatataaaaataataatataaaatatgaaagcaaaaataaccccaacaacctaaaagtttaatttttgagtgctacaatgattactgaatgaagtcaagtagtggcttggttttttgttaagaattgagtccatgtcattacttgggagataacatgatgaagagctcaatagatgctttagagcaactggtcctttgcatattgctcttgatattcttgttctggttttcaatcctttctttatgaccttggtcttttgagtcttgctcctgaaataccaaaagagtaattttttctgtcaacaatgtaatcttttatcatacaaatattgtctaataaaaacacacatatatatatattattatttacctcctcctccaattggctctacctcaaatttgtttcatgtgattctcatattgctgtcattttccacggtagagatatcaaaatgtatattgcattatcaaactctaaaacactatatacatacatgatatatatatatacttaccatcatccttctcaccgaagcctcccctagagattggttttgggaaggcaaacaatctattatatttttttttcctgcaagaagatggagtcggtggaagatggaaggaatgagataaaataaaacctaaagaaaatgaaaagttgggaagagtatacatgataaaattaaactcattaagacccattaaaacac

SEQ ID NO: 278846 - DNA, 521 bp, Cannabis indica
tgggtgcagcagaattaaatgactccttccactcagatttctaactcttgtatcctttctgtagtagagtataaccaaaatctgaacccgaaactccttccttgtgtttggattcttcacagtcttacatactatgattgaggaccaacttgatgtttgtgggcgcttactcaatcactaatggctgaatatattttgtgaagaaaggctaagtattttcaaaaattcaagaggaagaagaagaaggaagaggcctcatcagattgctaggtttttagctttggaggcattagtttggatgaagagaccatagccttccttttatactatctttagggttgaattattaggaataaaaaattgataaaattagagttaaattgacccctaatggccggcaacatagtgggccctacattagtttgggctttgtcatttttctcaactattttatctatttttcacaaataccccttttttgcacttttaaccctataaatgcaaaaaatatttatttaata

SEQ ID NO: 278847 - DNA, 552 bp, Cannabis indica
agcaagaacttgggattttctttggtttttcaagataattttgtgtgcaaatcaagctttaggtattgttcttactcttgtcttctttgttttcttgaatttttgatgaaaaatggtgtaatgcatgcttagtttaggttgttcttgctgctggatttttgatgttgtttctgaagttaaagcatgataaattgaggttaattaagttgcttgtgatgcatgatagttaggttgtttagagttgtggagattttagctcaaaagtttagttttcaaagagaattttcgaaattggtggctgtagttattgcatgagttagagtttgttttctgcagtgttattatgcatgattatgtagttttaatctagttttgaggcttgtaagtgagctttagccaagtttgagtttgaactcaaagcttggagctcacatggtgatttttaattctgtgctttctgggctgtattgttgctttagaattgttccttagggtctaaatagcaggtctggaagttttggtatagtttggtttggatttgtgcaatgtgtg

SEQ ID NO: 278848 - DNA, 564 bp, Cannabis indica
ttgtttttgttgttgttcatttggttgtctcgagtcaaagtacacgtgagcagaatttgacgaggttaagcgtgcaatatatagagatagtacaagtaaaaggggagactaatttacacaaattccagaagaccattttggctaaaatagaggagtgtccaactttgcaatatttgttcgatattgtaaaaaaagaaaagaacaaatctaaaatgttcaatatattaaaaaatattcgaatttcctaagctcatgactttaaaaagcgcgttttagtttaggcgaaatcactagctaaccaattaatcacttttaattaggggtgtgatcatcaaaccgcccaaaccactcaaactacccgcaccacaccgcactgcaaaaaaatgcggtttgaaattctttgcggtgcggttgcggtttgaatttttcctaaatcgcgcggtgcagtgcggtgcggtttgcggttttgaattgtttatatgcggttcaaaccggaccgcaccgcacattataaaaatacaaattttatattatttaggtccaatatgtgaatgttcaactcaa

SEQ ID NO: 278849 - DNA, 485 bp, Cannabis indica
ctcgcaggaaacatgcaaaaatcataactcattcaaatcgaatccaattcataccaaaccttccagacctgttctaaataccccaaagaacatttctaaagcatcaaaaccacccagaaaacacagatactaaaaatgccattaaagctccaagctttgagttcaaaactcaaacttggttaaacatcactaacaagcatcaaaacttgattaaaactacataatcatgcatataataacctctgaaaacaacagcaagtatcaacaatctctacagcaaccaatttcacaatttcactttgaaaaaccatagttttgagtaaaaattccataactttaaataacacaactaacatgcatcacaagtagctctattctactcaaataatcatgaataaacttctgtaaacgtcatcaaaaactaatagcagcaacacaaccaaatcaagcatgcaaatcatcattttcttctaaaaaattccaag

SEQ ID NO: 278850 - DNA, 520 bp, Cannabis indica
gtggagtcaagttcaaagctatagcagcagggacctctgtaccttggttatctcttacgtcatcattgccctcaacataacattcagggtctggaccatcaaaaaaaccatcaatgaagggcatttgtgctacaatatcaacactcgacatcatagtgtttaattcaaatacatcggcaaccaacacctctggatttgtttctggaacaaaactcccaacctcgatacgattgtccttaacagaacttggtgtgggactaggatcgacacaaacattcttctttaacaaagtcacaaacaagggagtaaattcatctggcttcttcgcaagtgtagacaaaaagtaccttgcacgcttatcatttccaataacttcagggcgatacgcatagcctttcatgtacttgtaatttacttccaatttcaagtcatactccactttgtcaacatccagttcttcatacaaaagatcaaccaaacctgagtagcttacgttcggatcaatgtcaaatgtcaaatt

SEQ ID NO: 278851 - DNA, 747 bp, Cannabis indica
agattgtaaagggttttatttagggcacaaaacccaacaaaggcctcatatggagccatgcctatactagcttggtagctgttgttttatgtgaattccactagtgacaaatgttctccccaactacctccaaaatctgaaacacaagagcgaagcatgtcttccaaagtttgtatggtcctctcagactgtccatctgtctgtggatgatgggcagtactcaagtgaagttcagtccctaaggcttgttgcaaggccttccaaaaccttgatgtaaatcgaggatctctatcagaaacaatgcttgaaggcactccatgtagtcgaactatattgtctacataaattcgagctagcttggtaagcttgtaaccttcctgattggaataaaatgagcagacttagttaaacggtcaacaatcacccaaacagtgtcatgcttcaagggtgtcaatggcaacccggtaacaaagtctattgtaatcttgtcccacttccattctggtataggcaaaggttgaagtaaacctgagggtctctgatgctcagtcttcacttactgacatatatactacacacttagctacaaagctggccacatctcttttcattccttcccaccaatattgtctctttaaatcttggtacatctttgtacttccaggatgtacagcaaatttggatctatgggcctcaatcaaaatggtctccctaagatcagagatatccgcaacaactagtcttccc

SEQ ID NO: 278852 - DNA, 472 bp, Cannabis indica
ttaacatcctaaatatgactttctaaaacaatgtaatttaaacacatataaagttgaagaaatcttacattggttgcagcggaattaaatgactccttctgctcagatctctaacccttgtatcctttctgaagcagagtatcaccaagatctgaggttgattctccttcacttgatttggattcttcacagtcttaaacactatgattgagtaccaacttgttatttgtgggcatgtactccatcactatagggttcgaaattgaagagagaaagagagagagaaggattcgaatgagagagagatagaagtctcaaaatttgattgaaaggcttgaatgcatcatcttttaatttgagaccatcactatctatttataggaatccaactaggttaaggttacattttgtggcattaaaaaattgataaaataaatggtaaaatagaccccaagtggtcggccataggatg

SEQ ID NO: 278853 - DNA, 823 bp, Cannabis indica
accaaagtcagctactgaggttagaagctttctgggattagctgggtattatcgtcagtttgttgagggtttttcaaagattgttgtacccttaacggagctgacttgaaagaacttgaagtttgtttggactgatcgatttgagaaaagtttcctggagttaaagcagcgcttgattaccactccaatacgaactcttccttttaataaggaaaagtttgtggtttattgtgatgcctcgagacagggtctcagctatgtgcttatgcaagatggaaaggtaatagcctatgcttctcggctgttgaaggaatacgaacagaggtaccctactcacgatctagaactcccagcaatggactttgcactaaagatttggcggcattacctatatggcgagaaatgtgagatatacactgatcacaagagtctgcaatacttctttacccaaaaggacttgaatatgagacagagacgttggctagagttggtgaaggatgatgactgtgagatcctttatcaccctggtaaggccaacgtagttgctgatgccttgagtaggatgggtcagagtcagttaagtactgtaaaataaatatcctaatagttcgcaaatgagatgacccgagctaagattgagttggttgtggggaaattcgctaatattaccctgccatccatgcttttagagcgaatcaaagaagtacaaatacaagttaaggctgaacatcagcgaccgtcagggttactgcagccactgaacataccatagtggaaatgggaagacattgctatggatttcgtggtaggtatgcctagaacc

SEQ ID NO: 278854 - DNA, 587 bp, Cannabis indica
cgaagaggacaataccttttagattcttagacagatagtcacggtacctcgtcgtagtggaagggtttcaaggaactcaccctgttatgacttggaagacactagtgacaaaatccattgttagtttaaacatgtaatggatagtcagaataaggaactaagaagtaaagccaagagaactatggttaaaaccattcatatggagttaccaaaggttttctattacatggacaagaaagcaaaatttgaaaataagcctattcaatggacttaacaaaacttcatgttcctagtattaatggtttgagtatctaagcctatggcttgtggtatacctggtgatttaattactctagtgctagcaacttactttagtaagatgttggagcatttttctaatggcaatctatagaagcttctcaacttctagacatagattttacttatctaaggaaaagtctcaactattccagaaaagataaacgccaatgaaagaattcctttaatcaacagtgagaggtctcagatatactttcgtatgcattagaccagacacctgctgttgagtgggagtaatgagtaggtat

SEQ ID NO: 278855 - DNA, 650 bp, Cannabis indica
tgaataatctgaattttttttttttgagtttatttgtgatatgaatgaccattttgtccttgaatgcttttaagtgtgttatatggccctaaaggcaatatggtaatttggcctacatgtattatttgtagtaaatggaattatttgtaaaaaaaagagattgtattttctggtttttcacacccagccaactcctctctttctctctccctaaacttcttttccaagttttaattttgttgagaaagaacttgaatttttgctaacttttggagcttagaattgggaggtgttggggattgttcttgctataatttgaggtagtaattactgttttaaatttaattttcccttgctgaaatttgttgagagtaatgtgtttgggctttgaatgcatgagggtggaaaatgggagctaatggtgatttctttgtaacttgaacttgtttaattatgggttttgcacctatgttgttagcaagtcttaggatttttttctaagttgagaaatctgatttttatcccaatttattgttgttggatgatggtgaagcatgtggggattttcaagttcttgaattgcatgtgtgtgttaattgggttgttcttgatgttatgaacttgtgatgtcttaaactcttgatctttgc

SEQ ID NO: 278856 - DNA, 776 bp, Cannabis indica
ccggatccaccctgctaacgaaggggtggtcccgtataataggcagactcacgtcaaggagtatcgccatcgctttttcttttcctccggatttagggcaatggaccacccggagctcctcactgagtgggtgaggatccctccatatcagcggaccgcccctacccagaccttcctccggagggcccaggcctttgcttcctatgaccgagccgatcttgacgtcgggggtttggtcactacggagaactgcaggaaggccaaacttatccttccgcatcaatccgtggaggactctaacctctcccgggtcatctgtcccaatgtgagggcgccggtcgcggagaagaccttccgggacgagatcattgccacggcagagaagaaataccaggattatctctaccggaaggcccaggagaaggcatactctaaggcccaggcggcctccgggaggggacttcgtgtggggagcccggtggaaagaagaagccaggcgattgccgggaagtccgaggctaaattttttgacaagattcttcaagaagagattggagatcgtcgtgccgggaggccccttcacattgaggattcatcggagagaagggctcccaggccacagccttcggttccagagccaaacactggggctcctggtgccagcacttccggcgccggcggtaagtctcctttgataattcattatgttccttctgttggcgaatatgccagtcgtaggcccgtagggttcgacgagcgtctatataggtttagga

SEQ ID NO: 278857 - DNA, 526 bp, Cannabis indica
aacttacaaaaatactgcttttttaccaaatgttttcaaaaatactgggacacgacaaactttacatttttactgtccaagcccatttttatttcttttatactgcccaggcccaatatatttacttttatactgtaaacagtaacaaaacacaaacgacacctctccttcgtggttggggacggacaaatcaacaccggaatcatagaaacaccaggaaaaaaccataaaatctggcaaagagaaaaaattactaaatcaacaacaaattactgttttgtagtgttattttactgttgttttaatatgaaaaaaaggccacgtaaatgaaatattgtgaaaaatgacaggacatggaatctataccagttctcataaagagcaatggacaatgggaaaaagaacataattatttcaagagaatgtgacaatgctcgaaaacaacacaacaaatacttgaaaacaacacagcaacaacagaatcatacacattggaacaccaattaaaagaaggaggagagtcaga

SEQ ID NO: 278858 - DNA, 593 bp, Cannabis indica
tgttccattcttcaacatcctgcgaggaacaaagagttcgagtggacagaagaatgtgaaagagcttttcaagatctaaaggcacagctcgcaaaacctcccgtccttttctaaacctctggacggtggggaactggggatatacctagcagtaacggagcatgccgtgagtgccgtactgatcagagaagaggacagcatgcaacatccagtatattacatcagaaaaagactcgtcgaggccgaaggccgatatccgttgatagaaaagctcgcctactgcctcattctagcgacaagaaagttgaggccttactttcaagctcatcctgttcgggtgtataccgactaaccactacgtcaaatactgcagaagccagatgcctctagacggttactcaagtgggcggtagaattgggtcagtacgaaatcaatttccaaccccgaacagctatcaaaggccaagccttggccgactttgtaatggaatgcaccggcaaaatagaaagcataccagaaagcaatctcgagccaataccacagccaagtaatattgaagacaaacctgttggaatttattttaccaggatct

SEQ ID NO: 278859 - DNA, 441 bp, Cannabis indica
tctgaccttaaatttaaaaataagataagatataatcaaatttaaaaaaaagatagataattaagcaaaaaaaaaagatagatactaactatttttatttaaaaaatattttaaaaatttattatcataattagaattgaattaggaatagtaaaagtataaatatagaactacacaaaaaatcggaagttaattccatgaaaaagcatgaacaaacgaagaaaaacgaaaaaattgcaagctgtacggacgggatgttgtgcatacccgtccgcgcgcgcaagtgggtgatctgggcgtgaaatctcggcactggtggaaatccgcatgatttccgcgcgcagaattcagttgctcaatcccgaaattttttgaaacttcaaaaaatcataactaattcaaattaaatcaaaattgagttctataaaaaagtaacttgct

SEQ ID NO: 278860 - DNA, 568 bp, Cannabis indica
atgaagagcagcttgattatcacactacaattttgctggaatagaagtcttaaatctgaattcagtcaaaagttgataaatccatattacctcacacacagattgtgccatagccctatattctaattcagcattggatctagacacaacattttgtttcttactcttccaagagatcaaattgcccccaacaaatacacaatatcctgaagtgaatcatctgtctcttggagcctgcccaatctgcatcagagaaacactcaatccaggtatgtccatgatttttgtaaacaatacctcgtcctggtgctcctttcaaataacataaaattttctctagtgccgcccaatgatgaactgttggagaagacataaactgactaatgacactatctgggaatgtaatatctggacgagtcacagttagataatttaactttccaaccaatctgtgatatttctcaggatcttcaaatggttccccgtcacgtgtaagatgcacagctggattcattggagcattacaaggttttgctcctaattttcctgtctcagttaacaaatcaag

SEQ ID NO: 278861 - DNA, 509 bp, Cannabis indica
cttcttcttgttgttgggtttcgaagcaaaggcaatgtttgcctcagccttgatcgtaccattagcattgttagaattaggagctttagttcctcctttctgtgacctccaatcaaattttcaaatgtctgaaggttgttgatcaactcgtggaagtcaagctccaacttgttcatgacataatttgatgtgaaaggcagaaaagctggagtcaaactgttcaagatcaaacttacttgagttttctgatctataacagctccatgattctcagcttcttggaagaaactagtcatctagagtaggtgatcacgcacgctctgatgaggtttcatccgtgcattgatgaaattcttggtcgcctcaaagcgagcttgaattgacgccatcccaaatagtttagttaactggttcatgatttttgcagtcgtgagagtgtttgcaaaccttgttttcaaggtgtcgaccatgctagacaacataaagtatcgagctttgttgttagcatt

SEQ ID NO: 278862 - DNA, 517 bp, Cannabis indica
agaaaaaactaaaaatgtcaaatggtatttttaaaagtgacttaaaaagtcatttcaagaggaaatacacaaaagtgatattttatatacactttatggtaaaaatgtgggggtgagccacaaatttaatcaaaatgtattgagacattgttgattaatttatttgattttgaattcaaattctaaatcaaatttggctatgtgcatatgtaaaattttgacatattttggtgtcaaatttggtgaaaataatttcaagaaagaaattaaatttaagagaaattatagagacaaagtggtcttctatattttaaaatcaagatattatcttgataagtcaaatgtgaaagtgtggggtgcatactccaatatgagaatttgagacatgtttggtgtcttaaaataaagtgtaatttagacatatttggtgtctaaattagtgtttaattttgatatgcttggtatcaaaattattgagaattgagttgtgtgaaaattaatcttttatgattgaatt

SEQ ID NO: 278863 - DNA, 542 bp, Cannabis indica
cccccttgattcaattcaatcccaaactttaccaaactctccagtatacctatacaatgcatatacaatgatttccaggcagcaattcaaagaacaaaccatcacaactcaagttgccattaatgaacaaagctttacattcaaagctcaaggttgcacaaagcttaacccaatcaacaatatcagctgctaggaacttaatttaactcaaataacctatacaattcgaaccctaagcataaacaaacctaacagcccctatcaaaccaaaacaccattccaacctaacttaaaagcttgaaaataaataaccactagtctagggctttaccttacttccaatagctgaaaaccttgctgaaaatccaagaaaatgaaaggaaaagatctggtttgcctttgattttccccagccgaaagcaagaaagagagaggaaaggttaatttgattttttttctatttcttctattttctctaaatgggaaaaagtctaaggaaaatcaattttccccttgctgaaaaatatctttgctaggtgtca

SEQ ID NO: 278864 - DNA, 525 bp, Cannabis indica
aggttaattaaattagtttaacctaataaaaattgattagcaacataattaatgtcaaaatatatggtaattttttttttcattcgtatattttgaaattaatttaagaaaaatacacttagtttaatgatattatattcaagataaactatatgtatttttcttgtatttaattaaatataaaattataacttattagattctttctgaatcttattttaattatttcattaaatattcctatttaagttgtaaattagttatgtctaactaatttttttatcaacttaaatttgaatatcttttgcatttcaaaattaagctgaggaattctaggaattagttattgaagattcttaggatattttttttaagttgaaaatttgctaaattttggatcaacttaaaatgaaatatttttcaaattaagtggttgcaacttaatttgatatttaattaaattttgtttgaaaaggatttaacttggaattttagatttctctagaacaacttaaattagatatt

SEQ ID NO: 278865 - DNA, 709 bp, Cannabis indica
ttatcaattttttattcctaatgattcaaccctaaccctattgaagatagtataaaaagaaggctatggtctcttcatccaactaatgcctctaaagctaataacctagctttctgatgagacctcttccttcttcttcttcttcatcttgaattttcaaaaatacttagcctttattcacaaaatatattcagccattagtgattgagtaagtacccacacacatcaagttggtccttaatcatagtgtgtaatactgtgaagaatccaaacacaaggaaggagtttcgggctcagatcttggtgatactctgctacaaaaaggatacaagggttggagatctgagtggaaggagtcatttaattctgctgcacccactgtaaggtttctcaaactgtatatgtgtttgtttacattgttttagaaattcatatttaggatgttaaacaacatacatggtagtaaatctagatcctggtaaaatataattccaacactcaattgtactatcatgttcccaaaatgtacgtattacccgaaccaaaaggcaggctcaacaaacaaatcaaagaacacaaataacactcttgagatcgaacctaaccatgtcaggattgagatcttttgatctaagatcaaccggtgatattgacttagaaagacacaacagtaagattataatatactaagatcaatatcggtcccagt

SEQ ID NO: 278866 - DNA, 521 bp, Cannabis indica
ctgataaatattactgatttttcattgtcaaattcaaatgtccaactccgatgacaactcaaacgtccaacattggtgacaacttcgatgtctaactacgatgactttttggtagcgatgacttttccgacgatgatagcaattttgtcgaatgttctcattttattttctacttttattgtggcaaatattttgttttagtagacagtgattgttttgtgtagtgggttgatggtcgagtcttggagtttctcgaaaacttgtaactggttttaaatttggtcttgtattgattttagttttggtagtggcttggaggtcaagtcttagagcttctaagaaacatgtaaaatttatatatgacttttggtatttgtaactagtttttttcgttcaaaaattaatttttaattatatagaattaattagttaattaatttaatgtcttaataaaattattttaatattatttgagtttctataaaaaaaaaatctcaggtgagataatttttttctttatt

SEQ ID NO: 278867 - DNA, 218 bp, Cannabis indica
tgatttgtcagttcattggatttagactggcatgatatgtcatttccagggcattggcacagtttactagtatcggatgtatggagtatacattggaagggactgatattgattttaattaatcaattataattctaatattagattatgttttatttatgaattttcactaagcaaggatttaattgtgaaaaaagaggttttggggtcaatttatt

SEQ ID NO: 278868 - DNA, 1063 bp, Cannabis indica
agttttttttaagtcatgtgttgatagctaaatggaaagattgattgaaccactgttatacacttgtgcaatggattaaaacataactgtgtgcttgacttgcaattgtttgaattaagatggatgtgtgttaggaagtggttcatgtagatataaaacatttgttcttgacgcatatcacttctgttctatttggtttgtggaatgattgactgtacatgaaatagaatttgtttgacatactctcttgaagcgaaatccttgatgatttttttttttggaaagtgatttaggcaagttttctttggaacgattgagcctttcaagcctacctaaaattttaccatagtatacccaaagttgagccttagcctgttttaaaattttcaccacttaactaagctgaattcgttatctttaactcttttcactctgaacataccttattatgccatgagcctttaagcaagtttggggggataaagtgttgtaagtggagaaacaaagtgtatgagtgagtgattgaaaaaaaatatatatatatattgtgtgttgtgcctccaggaaaaaaaatagaagaaagaaaaaaaaaagagaaaagaaaatatgtgaaaatgtcttcttgaaaaaaaaagctaagaaaaatatgaggtacacacataaagaaaaaaatcgcaatctcttactactgtttttgggatatatggaagaaaagaaagaaaaataaatgtcggggcttgcttggttaatagtgcttatggtatagtgtagcttaaatgacttgtcacctacccatgtacctaagccacgtgatgataaccgaaaaagacctattgattccaaagagaaatttgtcaacattagtggagagaggtatgtcattcaaacttattgatcatgtgttagtggaatgtcgggaagtttagaacggttgtgatatggacggcaattgcgatgttttatgtttgtatgaattgcttacttgtaaattgcacatccaaattagttcttagagttggcaagttgaaattctggttattgatggcttgaagttgtgcaggtg

SEQ ID NO: 278869 - DNA, 766 bp, Cannabis indica
caaatttcttgtattgataactaatcaaattgtagtgggttttatttagggcacaaaacccaacagtatccgtcttggtcgagagtccgaaggcgcgcctcagttaccctggacagagggcttacccacctggcgcccaacgcacgttgccttctatgaggaaccgcagcagcaagttccttactgatgtaatccacgccctcaaccaggacgtctccgtcagcatcgactggctccccaacctcgttgtactcctcgtagtttggggcttcaacctctgcctcttcctccaccttggaggaactgtcaggacgtacatcgtcctgctcctcgatctgctggacctcaatgtccccttcatgatccccctccatctggacggctggatcctgttcgtcgctgggcaaagtggcgtgctgagccacttgagggtcagatgcatcagccagacacgttgttttctttgtacgagccatcattctatggctgggtacagggtttggagaatgtccttcactagaggaaggtgggctagaacgaagacgatgatgataatcgttcaaaagttgaagcacgtcttggtcgatccgatgtccgttcttccaagactcacctgagttcatctacaaaagacaacacacaagatgagtgtttggtcggaatatcgaacgatatacaagcaaatatgtcgaccaggagtactcaacagattaaagaacgagaatgttcaaaggaaagtcaaaactcaagaagtcaaaaattttct

SEQ ID NO: 278870 - DNA, 487 bp, Cannabis indica
tcgctctctcaaaccagaaggaaaaacccaaaattttcttcataatttctgtatttccatccaaggattcaagggaaaatatctaaggtaaccctagctcctttctctttcaagttcatgaagttgtatgttggtttttgaggtgattttgggtaataggggctgttagggtttaaggtttgcttagttcgaattttagggtttgtttagcttaattctagttcatggtagctggtttagagattggttgttggttttgagcaattctaagctttgagttcaagctttaagctttaatggcaagttgatatttattgtgtttttctgtgaaatactggctgggttttattgtgtatgccttgtttaggagctctggagagtttggtatcatttggtggaaaattgagcaaagaaggaagtgttttgggaatactggtgcaaaccggcaaaccggtttgccatgccccaaaaaccggtttgccggttt

SEQ ID NO: 278871 - DNA, 1360 bp, Cannabis indica
gattttgttacttttgtggatgattattctcgtttaacttggttatatttaatgaaaaatcgttctgagttgttttctatattctgtgctttttgtgctgagattcaaactcaatttaatgtatctattcgtactttgagaagtgataatgccaaagagtacatgtctgctcaatttcaatcttatatgacctctaatggcatgcttcatgaaacttcttgtgttgatacggcacctcagaatggtgttgcagaacgtaaaaacagacatcttcttgaaactgcacgtgctctcttgtttcaaatgaaagtccctaaacctttttgggccgatgcagtttccacggcatgctttcttattaatcgcatgccctcttctgttcttaatggtgaaattccatttaaaattctttttcctaataagtcattatttccagttgctccgcgagtatttggtagtgtttgttttgctcgcgatgtccgtccatctgtcaccaaattagaccctaaggcactaaagtgtgtctttcttggttattctcgtcttcagaaagggtataggtgttattgtcctgatctcaacaaatatcttgtttctattgatgttacttttgtagaaaatacaccttatttttcatcttccactacttctactagtcagggggaggatgatgatttgttggtttattctgtcacatcctatgcgcctgctccatgttctggcgggtctcttgttccttcacctgcctcggtcgtcacccccacaatgtctacacctccaccactccctcggcctcctatagtgtacaccaggcgcccccctcctccacctcctgtttcatgtcctgcacctgcatcttcgtcatcagatctggacatctcagatgatcttcccattgcactacgtaaaggtaaacgccaatgtacttttcctattacttcttttgtgtcttataatcatctctcctcttcttcttgttcttttattgcttctcttgattctatcactattcctaaaactgttcgagaagcgatgtctcatcctggttggcttgctgcaatgatagaagagatgaatgctttggttgcgaatggtacttgggtcttggttgatttaccttccggaaaacaggccatcgggtgtaaatgggtgttcacggttaaattcaatccagacggcacagttgctcgcttaaaggcccgtcttgttgccaagggttatgctcaaacctatggagtggactattgtgatactttttctcctgttgctaaactcacatctgttcgactgttcatttccatggcagctactcatcattggcctttgcatcagcttgatattaaaaatgcttttcttcatg

SEQ ID NO: 278872 - DNA, 585 bp, Cannabis indica
gccttatatgtgtctcactttttcccatgtctctaatattggactctttcctaacgttttctcctcaagctatgcactacccttctattgttgtgtcgatgggtatgtagaatctaagtatgtcactcgtgaaagttaatttctcttcttcctcttttgaatttgtgatctcctctctatagctgtttgttgtaccacccaccataaatttgtattcacaatgtattagttgtgcaattgtgacctgttccaagtagttgtcctcttgttgtctctccttcatgttgtacccaaattgttagtcgtgcctagaccttcttagtctttctcctttgaaaatgtcactgtcgaaaccatgcacattttactctattgtctcctccaccaagtagatgaccttgagtttaaagtttacaactttccttcggtaatcttttatttgttaatgctctgtttatctcttagtgtttaagataccttcataagctattacctcaagcaattttatcatgtctctttctaacttcttattttggattctattcaacacactacactcctttctatctgatggcatcgtcctct

SEQ ID NO: 278873 - DNA, 889 bp, Cannabis indica
tgcgccggtactcttcgtcaagagaaagatggaagtatgaggatgtgcgtggactaccgtgagctcaacaaggtgaccatcaagaataagtaccctttgccaaggattgacgatctctttgatcaattgcaaggctcggctgtgttctcaaagatagatctaagatctgggtatcaccagctgaaggtccggaaggaagacatacccaagacagcattcagaacacggtatggacactatgagtttttagtaatgtctttcggactaactaacgccccagcagccttcatggatatgatgaatagggtgttcaaggagtacctagataagtttgttgttgtattcattgatgacattcttatctactccaaaactgtggaggaacatgaggaacacctgaggatgactctaaaccgacttaaggagaaccaactatatgccaattcaagaaatgtgaattctggttagagaaggtggcattcctaggccatatagtttccaaagatggagtcgaggtggatcctacaaagatcgaagcggtcaagagctggccaacacctaagactgcaagtgaagtaagaagcttcttgggtctagctggttactatagacgcttcgttgaaggattttccaagatcgcaactcctctaaccaacttgactcgaaagacgcagaagtttgtctggtcagaaaagtgtgagggtagcttccaaacacttaaggacaaactaataacagcccctgtattatgtgttcccaataacaaggataagtttgtggtgtactgcgatgcatcaaaacaagggctgggatgcgtgctgatgcaaaatgacaaagtagtagcgtatgcctcaagacaacttaaggagtatgaacaaaggtacccaac

SEQ ID NO: 278874 - DNA, 681 bp, Cannabis indica
ttaaatgtaagagaattggctgtaaataaaaaaaaaaagataagaaaaaactagggttgaattcataacggcctagttaattcgaggaggaaggcgaggaccaatgcgtgcctccagcatggcgtcaagcttcttcttctcccgaaattttgcaatcatctccgcgggtttcgggtagaagtcgagcttgatattctggcaatttgttgaccaggccatgtaaacgccatcatcgaagcgcttaatgcaccggctgcaagagacgggagaaaggagctcatctttcttagccttcttcaaggcttggtctttaaagtccttgagctccttcagctccacagccaaattcgccctagactccaagtccgcctggtgcacttcctctaaggacttcaccttggcggccatttcatctaaggcttccctagcctcccggagctcgcgtctggccttggcaacagcctcgccctccaccctcagctcctcccggtgcttggcctccagcttgtccctccgaaaggtctcctcccagatcatcgcctccgcttgggcttccctccgcctggcctctcctcgaactggccttggcaaggcctcccgcgctcagcatcctcttggaacgtccgccttttagcagcagatcctgcagggtcttcatgactttgtctatgcccccaaatt

SEQ ID NO: 278875 - DNA, 519 bp, Cannabis indica
tatatatattaacttattctagtccatgtaaggcttcagacttcatgtgtttcggtgcctgatctgaatatactgtttacgaattactctcaaaccttgatcggggtatttcttttcattattattattttttcggctcccagtccgtgtgaactctgatagcctttggaccatttttatacacataatatatatatataattattacatttgtttctatatttcataagtctctaatagttcataagttttccttttcgaatcaaaatttgtttctatatttcttcggcagtcaaggcgctcattccaccgttgtctctctgttagtcttcaaagggagttttctttttcttatatttaaattattattagtttctaattctctgtgactgaatttctaggaacagatgatgttctgcaaagtcgttaccggaaaaaagttaaaagagtttcattttccgatgacgagggtggtggcggaataaccggagacatgatttgggttgttttggtttaagc

SEQ ID NO: 278876 - DNA, 523 bp, Cannabis indica
taggaccgggacctagtaaccgacccaaacccgaacttgaccttaggacccagctcgtgacctagcaccagaaatgaaaccagtttgagaccctagattgggattcgcatctagacccagggcttcgacgaaacccgtattcggtgtctggatttatgacccttcctggacccgaaccctaataaggacccgaacccacacccgaaccataactgaaattggacctagatctagaaccgtaacaggagatggacttagactccaaatcagacctagacccgaatttggagccggacccagatcccaacccaaacctagactcgagacccaaacccgaacctgaactcagaccaaaacacggaaccagactagggacacgatacaagggtcgggacatagaaccgcaccccaatcttgatcccaaacccaaactcagaaatgggatctgggtccttaaccagaacaagaccgagacccgtgacagtgatccagatcttgactcgagattcgggtaacgaggcct

SEQ ID NO: 278877 - DNA, 484 bp, Cannabis indica
cttcttcaacttcctcaggaagagcccggagccctcctgcaccttcttcaacttcctcagaaaagccccattgcttttcttgaccttctcccggcagcacctcctcgtcatccactaaatcaatagtgtcggggggagcgctggaagaaatctttagagcaggggccattggggaagaagtaaaggcaggaggagcctcaggagtgtgaaccccagcaagctgatccaagatggcgtccatggagatacctgctacaacaaaaataagcaagtgttagaacatccgtgggaaaccaccaacacaagatatggcaaataagctagtcctacccggacttcctaattcggccctagcaaagttccgaacttttatgctggcagcatcatctccgagatagctgtccgaaggccggaaccagctggatgtaatgtaagctgaaggacctaagggaacgggctccggaggaccagaacccatccggga

SEQ ID NO: 278878 - DNA, 602 bp, Cannabis indica
ggtgtaataccttgttcaagtcatagtgatccccactaatctacactcaaggttgtgagtgagtatatatatatatgggtgactattcaatggttacatttttattgtaaccatatggttacatttttctttaacctgtaatagcaggttactaataggtagactttccttttttagatttaattaattataattaactattttcttaaaataattaattaaatagacattccttttttagaattatttaattataattaactattttcttaaaataattaattaaatatttaacaagacctcttttagcaattaatatttatatttaaatccttacttgaattattttaataattaagccatttaattataatatttacaataaaatttattttttttacaaaaattaaacttcttttgacacaaattaaaattctcttcttataataaattttcaaataattaattatttttaaatgatatttaattattttgttacaattatatgaactaagtatgaggcctcaagctaatcaatcgataacaagtgcagccatttttttttctaaaaaatccttcaacttatttcattttttactttt

SEQ ID NO: 278879 - DNA, 519 bp, Cannabis indica
ttttttttttgaaaaaactgccctgaaaaacaacaccgacgactaaaattcatgaaatcaattcaaaaatgatctaaatgaataaattaagagatccatattgatttcaagcatcaaaaaatacgtaaaatgtagactttaatttcataaatattctttcgggtccgatcgtgttcttaagagaatttttcagttttcagatggttttcaaatccttttcattcataaaatcgatctaaaatattatatgaatatagtaataagtagaggattcgaaataaataccaaaaaatgaaaacgaaaaaattacagaccgaaaaataaaaccttcatgtatatatatactcgtatacaatgtatatactgcataaaatcatcattaatgtatggaagataatattacatacaattttatgcaataaaaatatgaaagcattgagtattatatataaacatatatacatgaaaaattatatgtatatacacagtatatgaatataaatatgaatgtgtgtatat

SEQ ID NO: 278880 - DNA, 584 bp, Cannabis indica
ggaattaaaaaaatgataaaaatggaccaaaaatacccttaagtggccggccactagtgggcccttcactagttagatttttcccatctttctcaaccatttgtctattttcacaaataccatttttttcaatttcaaccctataaatgcccaaactatttatttaataaataaaataattatcaaatataattgtcatttaaaatatttattaattagactccataaagtctcttaattaataaattaaccctaaaatcctatttcttcacaatcaaaccataacatattgaaaattcacaaactagacgaagtctaattttagaattaaaattgtttaactaaaatcaattaattgagttttacaagcagtttgtctcaactagtatggggaccgtgggccaatataaccgagcttccaataagcgaatctagaatttaccaagtaaattctctaacttattaattccttgttgaaccactatagaacttggaattgcactctcagttacatagaacactctataagttccacgatatagatacgctataattatctattgtataatctcaataatcaatga

SEQ ID NO: 278881 - DNA, 527 bp, Cannabis indica
tatttgaatattttcttcaatctaaccatgattagatttcgttagttttaatgcctataaatacctttcattaaatcatttcgctcatcacataagttttctaagggaaatttgattttctatacttagaaaatcaaaaaatttgattcctaaaccaataatttaaaccctaaaaaactatacgtttttttttatttttaaattctcatttcagcaacaactcagaaattagaaatggtaggagaactacctcaaatccaagcaagagcaaatctttaaatctccaaaactaagctttcttccacaagcaattcaccacaaaatcaaagctaaaaaaatgagtttttgagagagggagaggctggctgctagggttggagtaaaatgcagaaataaaatctcattttgcttaatatttcccttttaatgaatcataacccaaaatacacaattaccacattgcccttagggccaaattcccattttcaagcatataagggtaaaaaaaaatataattatcacatttc

SEQ ID NO: 278882 - DNA, 522 bp, Cannabis indica
caaaaacccaataaaactcgaaaggaaggatctcaaagtgagtggagattgagggctgatcgtgaatcgaatgttgggttggtagctcaagtttcactgtctgcatttctggaaggacagtggtacttggatagtggttgctctcgacacatgacgggcaacaagaaattgttagtcaattacaaagaagcaaaggagggagctgtcacttttggtaatggaaataagggccagattattggaaaaggagacttggtgatgagtagagctgcacctcttactgaagtactatatgtgaaaggactcaaggcaaatttgataagcatcagtcaactttgtgatgcaaattacactgtaagtttttctaaaactcattgtttagtttcatctaatgggtgctcagtcttaaaagggaagagatctagtgatgatagttatttgttagacaatgttgtcctatgtaatagtgcatcattggataaataagatattggagactttactgctattccaaaagtttta

SEQ ID NO: 278883 - DNA, 813 bp, Cannabis indica
acccatactagggctgcacacgggtcgggtttttcgggttttcagatttttgagtttgggttttcgggcttcgggtcttggaattgcccaaccgaaccatgtttttgggtgttcagatttgttgggtatctagttaggctcttcgggtttggcatggccgggttagggtcctattcggttgagcccaaatgtttaatttctgggctgaaatgaaatttaatttttaaaaatgtcatttttgtatttttaacattgtttggacctttctttataattaatagtttttgggcctgaataatgaattgaatttggttcatacccaattaaaaaaattacattcaatcaaaacttaaactaaactacttgcccaaataaataatcattaattattcataattacttaccaatttaaatattaaaaagaaacaacactataactattaatcaaaacatataaattaaaaaaaaaaaaaactaagaaccaaagctcattcaaacccatttattatttcataattacttaccaatttaaatattcaaaacaaacaacattatagctattttacttcaaaaaaaaaaaacactataactattaatcaaaacatatacatgaaaaaaaaaaggaaaagtagaaccaaaattcaatcaaaaacccacaaaagcaaaaaaaagtctaaatccatatccattatccaatctaatctataaaaaaagtctcaaagtccaaaatatagctattaatcaaaaaatattaataatccaaatctaatctactcaatatccaatctaaacaatatgaaattatggatcata

SEQ ID NO: 278884 - DNA, 1244 bp, Cannabis indica
ttgtaaattggtatagtgaatgaatagctgaattcccaaaaaaaaaataaataaataaaaaaaaagagggaggcgtggtgacttgattcatgggctaaggaaattttgtgcttaattggtaagtatcaatatttattcttccttgatttattttgatatgtttccatttaaagattgatcttttatatggtaatgtgtttttaatcttgaaagattgtcttatttttggaaataatgttggtaattctagtttccttttattttttttaaaaaaaggggaaaggagttgcaagagagtgggcggtttcctttttgttcatgggctggcggttatttttcaaattttcaaaattggtttccttttctcttctagcttccatatttatttaaaccaatcttcgtcatttatctgaccacctacccgaacctattttcttgtttctcttgttgttactgttcatcttccctttcagatcgaaaatggtgagaactaagaacctagggcatcccaaaaagttggtggaaaccgatgcaaccccttccaatgcaccccctgctgcttcaaccatgcctcctgctgctgcaaaaacaggagattcatcgcttccccagcgtgaatctcagcccgagaagccaaaatgcattcctaagcaagtggctcgaaaatctgtgcgtccttaccgaacctggtcttcatcgtcttcatcttcgaaggaatctcctccacctttagcagtccctcctcctgctgcatcagttcctgctaccactccaaccggtccttctactcgaactcgagcccagcaagcctctgctgagaaggaactttgagcatctcgaagtcgtgataagccagtgcctccagccaagaagaagcttaagtccaatcctccttcggtttcttcgagttcagaagaagaagaaccaatggaagtctcccctgacaaatcagtttctctccattccgagaaggagaatccagaggacatgggagtttcctcagacagtgaggacactgaactcgagccagagcctcaattgacaaaatctgctccaactcctgctcgttcttcttcagcagcaaaggcttctgctgctgccaaaggcaagcagccaatgaaggagtcttctcctggtagcgttccttcaactctttctcactgtcctcgattttattatcgtgataatgagcgtgattggaatctgtatgctacccgtaagtttgagagtgagaggaattatga

SEQ ID NO: 278885 - DNA, 675 bp, Cannabis indica
ctgtaaagctttaatcaactttgatatgtgggtgcagattcatggtcttctacggggtttatgacggagaagattgtctctacagctgctaactacgttggatcattgttgaatcggatcctaagaactataatggtctttggcgggattatctccgcgtcagagtgacggtgaatattgatgtcccattgaaacgacgaatgaagcttaagaaaacgggtggtgagtggttttatgccaattttaaatatgaatttgctccgacgttttgctttatatgtggtttgataggtcattcgaaaaacttttgtccgaagttatttgatacacctgaagatgagattgttaaaccctatgggagcttcatgcttgcgcaaccacggaggaagaagtatttattgagctctcagtatctgcgtacgggtacagaggctgatgagcaatttagccatgcatccccggtgcgacatgaggaggaggacgaccggccggccatgcaatctgggaagttaccttgtttagaatttaaaaataatccacagtcaaagatggttaatgatatcctgattcggtggatgatgggaatatttctcttaatgagaatgtgaataataatggcaataagaataatgtttccaagtctaatgcccatgaaagaggaaagtcggttgtgtt

SEQ ID NO: 278886 - DNA, 595 bp, Cannabis indica
gcctacgtggcaccgaaaggcttatctaaaggacacctatctcattttattttaaaatatagttgaagtttcttatattgttattgctcaaatagatgtttacaattatacaactttcatacatatcatgggttcagaaactttgattgaagtaatattggctatattccttcctccagtgggtgttttcctccgctttggttgtgcgtagtagctgaagaaattcttcagagtttcattgtccttgtatgcttgacttttttctacttctaggtgatgtttgtctgttattagcttcgcgttgttgatgtcgatttatggatcttgttttttactgttgtttttaagtttttctaccattttttcagcaaccaacttagcatagtcaactatgtcgttttcaaattctcttatttttgactctcctccttcttctgattggtgttttaatgtgtatgattctgttgttgctgtgttgttttcaagtattgttgtgttgtttttgagcattgccacattttcttgaaataattatgttcttttttccctattgtccattgtctctttattgagaactggtatagatttccatgtc

SEQ ID NO: 278887 - DNA, 675 bp, Cannabis indica
tatacaatatttttaaaaggaatgatttcttccttgggatcactttgcacatcgtgaattaatatttttttctataacatatatattgagcctttgtttttttttttgcttgggcgatttggaatcaacaaggttaatcgccaacccttttttacagcaacttgtggcagcagtgaggtatgaatgtaatcagtgtatttattatattattttttattaaaaaaaataattttgataataaatctgtgaatgagggaattcatttttttttgtggaatgagggcattccatggatgagggcatccataaatttaatggaatgagggcattccataaatttaattttagtagaataagagtattccatggatgagagcatccaaatttttagtggaataagagtattccatggatgagagcatccttacattggtaacgcttgcttttcttcatagaaattcgtgctcctttttgttgagagattgcacacataatttaaggcaatactccaaatagtgagaaaaactatgtagtatatttgttgtccaaaggagaatccaggttcagatctttaattaaactctgctacaaacatgaatcaagagttagaggtttgaacggaatgagtcataatattccactggaaccaatgtaaggatttctatatccgatatg

SEQ ID NO: 278888 - DNA, 914 bp, Cannabis indica
ccatttctgttcgcttaggtacgagtacggggttcaatgatgaagttgttgttgcgcagcttttcaacttcatctttcagggctactgctcgttctttatcaagcaatcttcatttttactgaacttgccgaatgttaggatcgatattcaggacgtgcgaaataatagaaggatcgattccgaccatatccgcatgtgaccaggaaaaaatatctaggtttgctctcagaaattttatcaattctgattttacttcgagcaacaaaccctttccaatctttagctttctggccgggatagctggatcgatctcgatctcttctaactcttccacaggtccaacattgctgcttgggtccccaagtcgaggatccacatcttcatcctcgccttgggaagtttcctacttgggaatgtttattcccttgtctgggctctggctggaggatatttccttcttagccttggccactgcaaggttgtaacattcccgagcagattgctgattccctctaagacaccctaccccatttttggttgggaacttcaggcacgagtgaaatattgatgtgacagcttttaagtcatacaaggctggtcggcctagcattacgttaaaggctgaaggaacatccaatatcaggaactgtgccatgatagttatgctcgtcggagcttgtccaactgtgaggggtagccggatttgtcctagaggtgcaactccttgaccggagaaaccatagacaggctggaggcatggagttagatccttgagctggagccccatcttctcgtaagcagtcttgaacaaaatgtttgaagaagctccattatcgatcatggttctagccaccattttgtttgctatctggacttccacgaccagcgggtcgttgtgcgggaatctgatctg

SEQ ID NO: 278889 - DNA, 1158 bp, Cannabis indica
ttaaatataagagaaattggctgtaaataaaaaaaaaataataagaaaaatctgggtcaaattcacaacggcctagtcaattcgcggaggaaggcgaggaccaatgcgcgcctccagcatggcatcaagtttcttcttcttctcccggaatttagcaatcatctccgcgggtttggggtagaagtcgagcttgatgttctggccatttgtagaccaggccatgtagacgccatcgtcgaaacgcttgacgcaccggctgcaggagacgggagaaaggagctcatctttcttagccttcttcaaggcttggtctttgaagtccttgagctccttcagctccacggccaagttggccctagactccaagtctgcctggtgaacttcctctagggacttcaccttggcagccatttcatccaaggcttccctagcctcccgaagctcacgtttggccttggcagtagcctcgccctccgccctcagctcctcctggtgcttggcctccagcctatccctccgaagggcctcatcccggatcatcgcctccgcttgtgcctccctccgcctggcctcttcctcgaacttggccttggcaagggcctcccggcgctcagcatcctcctggtacgtccgcctttcagcagtcaaatcctgaaggatcttcatgacttcgtccatgcccccaaattcggacaagacgaagccatggttaataaggttcttggaaaggcggccggcctcggcagcgagctggaaaaggatacaagtatgagtaaaagtccttaagagaaaataatgaggaaaaaagtaaactacgaaatacttaccacagtcagggagtggctgagatcctggacttgaaagatggagttcaaggatgcacaagcagcgaaccgcttgggtgcacaccgggtgagctgagacacaaactcgccggtcatctccgcggcaaagggagccaaggtaggcccgaggaaacgattgaaccaatccgacagggggtccaaatttagatcccaaggattctggtagttctgattgctaagggtattttgcatttcaattcgcaaaaccctcctcaaagcctccacgtcagcatgcccccgggagtactcgtccatggcgtgttgtgtttggctattcggagttcctgcctcg

SEQ ID NO: 278890 - DNA, 502 bp, Cannabis indica
ctgacaattgatgcaacttaagctattagtcatatttgagccttctctctctttctctatttcgaatccttccctctatctttctcttcaaattttcatcctttatagtgatagagtacatgcccacacatagcaagttagtatttaattatagtgtgtaagactgtgaagaatctaacacctgaaggagaatggggctcagatcttgataatactccatgacagaaaggaataagagttagagatctgggtggaatgagtcatttaattccactgcaatcaatgtaaggtttattgaacttaatatgtgtttaaattccattgttttagaaattcatatttaagatgtgaaacaacatacatggtagtaaatctagattctagtaaaacaatcctcaacaactagacacatagccatggtaatgatttactttcatgaaatatggattaaaacaatgatttgttgatttggatgtgttcatgttggtttatgtgcatattt

SEQ ID NO: 278891 - DNA, 602 bp, Cannabis indica
aagatctaagtaatcctagacaaggtaaaccttgctctagcttcttttcatgttctttgaaattttggatgagttttaatgtgatgcatgcttgattatttgttattgttgctgctgtgattttgttgttgttactggaatttaagcatgttaatttgtggttatttaggttgttagtaatgaatgttaattgctttgctcaagtttgaatttttagctcaaaatatggttttcaaagagaaatgattgaatctgttgctgggttgttgttaatgtttttagttgatttcagaagctattttaagcatgtttaagtagaattaagctgcttggtatgcatgttgtttagatttgctcaagtttgagtttagaactcaaagcttgagctccaatggtgatttttgtttctgtgtattctgggttgttttgaggccttagaaatgttctagggaaggtttagaacaggtctggaaagtttgaatcaatttggggttgaattggttgagttatgaaaatttgatgttgctgcctgcgaggaaccggaattccggttgtgcatccagaattccggatgggcttcaaaaattcccagaaccggaatt

SEQ ID NO: 278892 - DNA, 671 bp, Cannabis indica
ctccagcctgtaccgacgtgacacagtcggatggttcgaagccaacatacatatctaatgtaatctataagtgatacgctataagtgatacgctaaatcacttcacggggacttaaactaggaactaaaagtttccctattaaaaacgaggagaactagggtttctgaaaatcacccaaccggcagaccggttgtccaaccggaattccggttctggaaattttcaaagcccatccggaattccggatgcacaaccggaattccggttcctcgcaggcagaactcaaaaattcataactctttcaaatccaatccaaatcacacaagaccttccagacctgttctatatatcccctagaacatttctaaagcaacaaaaccgagcttcacacacagaaactcatttcaccattaaaggtcaaagattgagttctaacactcaaaacttgactaaacaacatatcatgcattaaaccttgactaaaatcacatattcaagcatttaaaaactgcagaaatcaaaccctaactcatgcaacaactacagccactaaaattccaattttctctttgaaaacttaaacttttacactaaaaattccacaactctaacatcctaacaatcatgcatcacaagcagcttaatatcatcaattagtcatgcttaaacc

SEQ ID NO: 278893 - DNA, 757 bp, Cannabis indica
atgtgtgttaaattttgcacatacttaaagttgtgctaaatttggcacaagatataatattgtgctaaatttggttcacaataaatattattttttatttgtcataatgctactaattattatgatttattgacttttactatactttacaatctttatttactatattattatattatcattatttaaacaataaaacataataatttttatgtattcttaataaaataccaaataactgtcaatataattaattattatttttttacttattttacaatttgttcattacaattgtaaatagtgggctaaatataatacaaatttattttttgtgccaaaattagcacaaaatttaaatattacattggagatggtttaacatgatgctattcttataaatttctttttagaggagtgctaccgtcaacttcctattacaacctcttagtcaatctctgtgcctgaaaataatgtcggaatattttttttaatttttttatgattgtatttgtcataattacagcatcatttctgcaaattttaaaaaaatttcgaatagtttccagtgccgaaaatagatttgaagttttttaaacatgagtggtaaactagaatatcaaaaactctattttcggtattgtaaaatattaagattattttaaaaaatttactaaaaatgatattataactataacgaataccattatagaaaaaaaaaaaaaaaaaaattccgacaagtgcatagctataagca

SEQ ID NO: 278894 - DNA, 561 bp, Cannabis indica
aaatctaaccataattggaaatatttaaaaatgaaaatatttcaaaaaacgaaatatttaaaattgaaaatatttaaaattggaagaatttaaaaatggtaaaatcaaattttggtaaacaatcccataaaaaatagatttttggggaaaaacccacaaaaatcgcactttgggaggtggctgtcaggaggctgcgcctgcagcctaggagaggctgctagcagcctcagcgcgcgcggatgagggacgttgcagggtcccgtgtgcggtagacttcggcgcttgcaggattttcctgggcggacagcaggggtgacacgggcgtgatgcacggctcatgctcgcgcatggcttccatgtccgaagcacctggtgcactcgtgcacctaacttcgacagccaagaatctcgattttccaaaattcataactttttcaatttttatcggaatcgagttccgtaaaaaataaaattgcttaatttttcacaaggaatccaaataaaatattttaaaaaaatgaaaaaaaaaatttcatggaaaaatttcgtacaacacataca

SEQ ID NO: 278895 - DNA, 204 bp, Cannabis indica
ataagcagaccaagaacttacaaggtaaattcactaacttattaattccttgttgcatccacgcatagaacttagaattgcactctcagttatatagaacgctctatatgttccaccatatagatacgctatcaattatccattgttataatccaaatgatcaatgatcctctatagatgatttacattgtatagggattaaat

SEQ ID NO: 278896 - DNA, 848 bp, Cannabis indica
ttaacctaactcttttcagatcttttaggtcctaaatcacatgttatctaatcatctctgagatagattaacatataatcagcattaagcaataatctaaatgtcacaaaggctatgcaaatactttcgtttcacatcaaaacctagtttatccaattttagcattcccaattctcacttttcagattttgaattaggatcatagaacatgtagaaggtgatcaatcttaaacatgtaattaaacacaaatatggataaattcacaatcaagaaaggagaaatagcaattatcattaaccaaaagtaatttcaatcaacattcatcatctccctaaataggagtttagttcataaaatccataataacatccataatcaaaactaaaacagaaattaacatagaaattaagagtttaagaaagaactagttggtgattgcattccggatcgccaccattgcttcctctgcctccttctttcacttttgggtccaatttctcctcctttccttctaaaacacgagccccttaaatagaaattagggttgctacctctgaaaaagtcaaaaactgcccaaaaatctcgtttttcgcccctagtcgcgactacataaagtctagtcgcgaccataggcaaaatacgaaaaaaaactcgctgtctggcctcctagtcgcgaccatggtcgcgaccatgaaaaagggtcgcgatactgaagcaaatttgacagcttcagcatctttcaataaaatgtgcataactttcacatacgaactccaaatgagttgattcaagatgcattggaaagaagaaaaataaatctaaaacttctatgttttgaatttttcca

SEQ ID NO: 278897 - DNA, 283 bp, Cannabis indica
taagtttaataaatctatgtcaaagttcaatatcagtcccttccgatgcatactccatgcatccaacccaagctttactttgaccatgctctggaacaataaacaggaacaagtatgtgaaaagggtttggatgaatttataaatcaaatagacaaataattgataaggtgaaccaaaacatacacaaatgaatgaaaaatacttctgtttctttattgatattgaataatccggattacattgaaatggagttttatttagggcataaaacccaacaaactc

SEQ ID NO: 278898 - DNA, 1066 bp, Cannabis indica
cttttcatagtcttttttattattatcctttctgaacattaaggagaaaaattccaatttccaacttggaagaagattatgctacaatattcaattacattatattattattttcagtctatgaatatatgtatttaatattcatttttttttattctacttaataaaagaaaatgtgtgtatattgttagtaattttttaatatattattgaagatgttattattattttaagagaataatctcatttagtattttgtgtttactaacaaaatagaaccgataatgtgttcaataatatatgaaagtgaaagaatatatagcaagcaccacaaaccaaatatagagtgattagttatttttattaaaatatgtgaaattcaataataaatatatcactaataatattctatcaatttgtaagagcagtgtagtgttaggtaatattagtgttggttaacaatgataagtctttttattttatttttcaaagtcaaacttcattaaaagaaactagttaaaatactagttagtattgaaatatgtttaaaaggtatttatactgtctaatactattatttatataatttaatattgagttctacttattaaatttaataaaaattatgaaaatatcgttaattattatagatgtatctcatataatggtaagtaccttgctcattaatattagactaaagagatcacatggcaatagagtatgtcaaaccaattaaaaataatacctaataaaggaattaactcaagtcatttggtatgatgtaatatttgtatgaaaatgatgatttcttatatttccatatttggtatggagtatttattattttaagtctaggaaaactgttagatggtaataaaactactctataataaggtaatcttaaattcttaaaaaaattaggtttaaatagggaaatttgattttctatacttaaaaaatcttaaatattttattcttaaaccaatacattttaaactaagaaaatatgacacttttatctaaacccaaaataacccctctcataactcaaccccactctctctct

SEQ ID NO: 278899 - DNA, 499 bp, Cannabis indica
aaataaaattaatataaaattttaaagtaaaaaaattattaataactttgttgcaaaaaaatctattagggaagaacttgatacttatatatatatatatatcaaagtaatataatttttcaaagaaaaagaaaaaattgtccaatagttatattacaaaatatctattagggaataatatatgaatgaatagtctttttcaagtaatttgaaaatataaaacatcaaaaaataagaaaaaacataataaaaacttaaaaaatgaacatacattactaagtagtgaaaataatcaacatcaagaattaaaaagaaataaaattaatataacaaaaacttcaaaagtatgagtgaactttgttaccaaaaaatctattagagaaaaacttaatacttaatttgtaattaaaaactttaacaaaaaaatttgtaattaaaaaccaaataaaaataaaagtaatataatttttcatagcaagagaaaaaattacctaataat

SEQ ID NO: 278900 - DNA, 689 bp, Cannabis indica
tttttggttttttgatttgttttaagtttattcagatttgttagctttggtgacgactatcaacaatggggagatgtatttcaacaagttaggagcgttgtttgaagatgttatagctttattatctaaatttccgggagcagttttgttccatgtggctcgctctgagaatttagcggcccatggcttgacaaagcatgctctgcggttagacgataagctatcctggttcgagaaggttccagcgctggtggcggacatgttagaaaaaatagagagattacaatggaagaataaaaataagatgaataaaagactaagacaattacaactctaaacaaaatattacaaggacaatatattaaataaagagttacaatcccaaagcacaaaatacaaataaaagaaaagagttacaactcaaaactcaaagatacaagtaaatgtaaactatataaaagcatatataaataatagtgtatatatatatgatatagaatatatatataatagagtatatatatatatatatatgatataggatatatataatagagtatatatatatgatatagaatatatatataataaatgatatatattagagatataaagaagtgtatatatagtatgtatataaaatatatataatactatataatcaagagatatataggagagtttagagg

SEQ ID NO: 278901 - DNA, 842 bp, Cannabis indica
atttaacaatcttaatagttcagggggaatttttaacggcaaaaaaagttcagggggcatgatttagtacatgtcaaagttcgggggaaaaaattgctaattagcatttttttaaagaatagagtgagcactactacaaaaatagttttctcgacgtttttaaatagtcgtttaaagtattcacatcagtttctataactgtcgcctatgcgactgtcgtaaaacggacaaaataggtgacattttaaaaccgtcgctaatgtggacttcccgatggtttaaaatcgtcacctataacagggtataggcgacgattttaaaccgtgctctatactataggcggcatttgtaaaccgtcgcctatagtatagggcacagtttaaaactgttgcctataccatatcataagtgacagttttaaacctcaggaatgtaaaaaaaagagaaaaaaatatagattttttgccattaatggcagaaaatctgttattttttttcttttttttttttacattcctgacggtttaaaaccgtcgcctataactgggtataggcgacagttttaaaccgtcgggaaatccacattagtgacggttttgaaccgtcgcctattatgcccgttttacgacggtcgtataggcgacggttatagaaaccgacgagaataccttaaacaactatttaaaaacgtcggcaaaaccgatttttgtagtagtgagtgtttcatgtttacaaatacaattttataaattgaacttttcgagttctatttgcacaatttctcgtaatggatttcaattatgtgttgcttacatggaacaagggctttatgttttaagacc

SEQ ID NO: 278902 - DNA, 652 bp, Cannabis indica
cctctcctgactcatttctataacagacttctctctaaagtctttgcatacactattcatacttcttaccatctaacttaggagtgtgtaacttatggaatatccaacaagatagtacttgctccttaaagatctattctttcatccttcttaataagtgggtttcgtaaaatatactgtcccagtctggtataacgtctactattctaagtcatccctacttcctatatgttgggcttccattcatagctaggtgcagagaccgcttcttcaaccattcatagataggtgaaaatatatgcgtagttggctattggtacatttcattatgtgcttcaagttccactactagtgttggtgatctattgcgctgagcctgtgaaaacttcttcaacaaatcatcttaatcatgctcgtagtccttccaatgcctctattagatcgttagccttactattattgggttctctggaacatcaaccatctgtgggtcagcggaacacacatccttagcccccacctctattggtcgttcctttcacattgattctaactgatcttctagttgcatgtgtgagctcttacaagaaaggttgatttaatagaaacaaaagagttcaattattgaaagagaagatttcatgtacatatc

SEQ ID NO: 278903 - DNA, 1062 bp, Cannabis indica
ccagacctgctatttagaccctaaggaacatttctaaagcatcaaaaccgagcttcatgcaaacaatccaaaatcaccattaaagcatcaagctttgagttccaaactcaaacttgattaaacaacactatcatgcattcaaatcagatcaaacctacttaaacatgcataatataacctctgaaaactacagcaagcatcaacaaaacaacagcaacagatttcaacaatttctctttgaaaaccatagttttgagccaaaatttcatatcttgataaaaccaagtaatcaccaacacattcatgcttgaatcaacaaaaacatcataattaaacctctaaaatcatttcacaaacacagcagcaacacacctcaaattaacatgcaattcatcatcatttcaagaaaaataccaagaacaaggttaaggatcttaccaagcactttgaacaacacttagattgaatgaaaaaggcttgaaaaatcaaaagaaatcccagccctagcaaccacacccagccgagagagagagagagagaaaaagagctcttgaattttctaatttttctaagttttgaaatctttgaataatgagagaaaacatgcaaaatataactcttatttcagccaacaattaacataataaaaataattatttcacatcactaagtccactaaaggacataataacaatggggcaaaatgaccaatttgccctccatactaaaataacataaagggcactaaaggggtattttgggaaattctaaattcctggccaatcccgacattccaaatgtctaataaactgtcccacaatactaacatactaagttgtgattttactgagccaaacaccgagtttcatgttaccgggcaccggaaatgcaaaattatgaaaattactatatgacataaaatatatttcagaatttaataataacagcataaataattatttaaatatctataaataatttcataaacaaacataattaactgctaatttccaaattaaactaagcggtctttacaaagcaccatcccagatgtagatttcc

SEQ ID NO: 278904 - DNA, 576 bp, Cannabis indica
atatcgatgcagcaatttttagtaatcagaacaagcatggttacggccagggacggagggactttagcccatgtgtgggctaaagccctcactcaaatatatacatcaaattttttatatgtagatatatacatatattaattcactttgctcaatttattaaagtccaattcacaaaagccctcactcaatatcttaatcatgattcatgagcctactcttattctaatcaagcccattttaaaagtagtccaatacaaataataaaaaaaataatactttattaaaaaataaaataataccattgacaatattttattttatttttgtcaacagtattattttattttgttgaagataaaaatttgaaagatacatttatcattatttttattagttttgacttaatatttattcaagccctcactcaactaaatttctggcttcgtcactggatacggctgggtggcgcgggatttttcaggaaactaggaaaaaagatatttttgatcttttattaaaaaaatattttagtatttttcaaaaattagtaaaaaaaaaaaacgtaatatttta

SEQ ID NO: 278905 - DNA, 553 bp, Cannabis indica
gcaagcgcaagggcaagatggttgcccaggacgagcccaagcggcctcggagagctgacactcctgcccatggtctcgacggtggggtctcccccatggaagaacatcctgctcctcccaacattgtgctgactccagttcctggggatgaggtgaggcaagagctccggatagccaagcataactatgccatggacgaatactcccgggggtatgccgaggtggaagcccttaggagggttttgcgggttgaggtacaggaaagtatcaacaacccggagtaccaggatccgtgggaccttaacttggaccccctgtcggactggttccgtcgcttccttgggcccaccttggctcccttcgccgcggagatgactggcgagttcgcttctcagcttacccggtgcgcgcctaagcggttcgcaacttgcgcctccctgaactctatcttccaggtccaagacctcagccattccctcaccgtggtaagtgctttaaagttttgtttttcccttcatttttcttcttgggaattctttcttacacttgtgtt

SEQ ID NO: 278906 - DNA, 559 bp, Cannabis indica
ttgtagtatttcgcattaaagagttcctgcaaccttttccaggtcatagttgtgacgtcgtgaatctgggataccatgtcccaccaaactagagcatcctcttgaaactgaaaggtggcacacaccaccctgtcattcccaatgacacccataaaattcaatatctttgtaatcaccgttagccactgctcgactttcatcacgtccggacctcctagaaaaaccagaggtgcctgcttatggaacctttcatacaagggttccattctattccccgctaccactatttaggccttaacaacaggggcaggtgccacaggaacttctggcaccggcactgcaggagcaccctgctgcctcaatctctgaatttcactgtcttgctcctctattctggcttgcatttcagctaacctagtttcccaattctgggcttcctgattggcttgggcagcctgtggcgggttaacatcatccgaccacgagccctgcccctaggacctctaccacggcccctaacattcggggaaaactgagctccttgaccctgattttaccc

SEQ ID NO: 278907 - DNA, 641 bp, Cannabis indica
ttcatatttaggatgttaattcaacatacttgttagtaaatttagatcctggtaaaatattcccaacaaaggatccatcactagttagatttttgcaattttttctcaatcatttatctatttttcacaaataccactttttgcacttttaatcttatacatgccaaaactatttatttaataattgaaataattattaaataaaattgtcatttatattatttattaattagactccatatagtctcttaattaataaataaaccctaaaatcctatttcttcacaatcaagccataacttagtgaaaatttataaactagacaaggtctaactttaaaattataattgattaattaaaatcaattaactgagtcttacgagtagtttgtctcaactagtatgagaccatgggcctatatgatcgagcttctaataagctgatgtagaatttatcaagtaaattttctaacttattaatgttccacgatatagatgcgctattagtttaatccattgttatatgatatttcaataaactaatataatcactgaaatgagtactcaaccatttatctctgttaagccaagctcgaagaaaatcatcgtttgacttctatatccggatcgaagctatagatt

SEQ ID NO: 278908 - DNA, 667 bp, Cannabis indica
cacaataattgtaacacagatgagtgactcgccaaatcacttttcgggacttaaacttgaaactaaaagtttccctatcgataaacctcatggcaataccctaaatatctcaaaattgggcaaaactagggttctgaaaattccccaacaggcagaccggttcccaaccggaaatccggttctgggtcaccaaccggtcgaccggttgccacaggtcccccagaaccagaattccggttctgtgctgggaacctaaaaatttcccccatgacctcaaaactcaaccaaactttatcaaactctccagtacacctatacaattcataaaaaaccatttccaccaataattcacagaacaaaccaataaatctcaagttgccattaaagctcaaagcttgagtttcaaaactcaagcttgcttaaaactaacatcaagcatcaaaaccagttgctagggacttacattaactcaaactaactctagaattcgaaccctaaacctttcaaaacctaacagcccctgaaattcaatttcacatactcaacctaagcttaaattcaagaattagagctaagagttgctagagcttaccttatttgaattccccttgaatctttggctgaaatccagaaaatcacagccgttccccttgatctagctgccttc

SEQ ID NO: 278909 - DNA, 508 bp, Cannabis indica
gcttggaggagatttaaagagcttggagagagatgttatcccactttctcaagtggatgttttacgtggctcttttataatggacttgatgatgaaacaaaaagttgggtggattatggagcagaggttactggagagcctttgttaaggagaggccatgaagcaataaatctgttgaatgatatggcagattttgattatgattgacattggaatccatcacttcaaggttggagtcatcaataccctccttattgtccaaactcacccctacaatcacttccaggagagattaatcgattggcggacatggtaaaagctctatgtgataatttaatggcgcaggattcagagagttttaaggataataactcaaataacgaaagttatgagagttgtttgaatatagtagaagcaccatcagatgaatacatagaagagactgagcctagaattgaagagaaagaatcctttgaagtggttgaaaatttggatacattggatgctt

SEQ ID NO: 278910 - DNA, 1094 bp, Cannabis indica
attaatatatttcttcaatttataatcttttttatttattttataatttatattttcatatatttcctaatatattatctattaatactttcttttagagcataaatgctaacaaaggtctccatacttatgtcttcagttatttcgaaataaccaagacataggtctgtaaattttttttttgcttctctttttctcactttttgccttcgggtttattttttctcttgtaaaaaaactaaaagatatacaccattttttcaagcaatagtgaaatatgcatgcattatgataggatatatggttgaaaataatgttttacgataggatggtgtaaaataatgtcttgggggatctttagagtaagcctaggtgttaaaaaacatgtgagggacccaaaggtttaaattcatatgaagaaaacctataaccaaactcatgagtcatgttactttgttagagtgtatccgctcgcagtatcaaaacctagtaaaaaacttgttgaaatgaacctgctaagggctccttagagtaagatcaggtgtggaaagatgtgtgagggatatgagtataaccatgaacaaaatgcatgcacattaattcctaattaaaaactaaaaaattcaacttaaaatgtttttgcttagttttaaagaacaagttttgtaaagaagaggagcacctgaaaaaggcatctcccgcttagatactaaaaaaagaagatagggtaagaatctaaatggaataggaagctgagatcgttgaagatactcaccatcacagccacaggtaaagagcgctatctgtgactcttgggtcttacaacatgacttaaattagagccttatacgtgaaagaaggattgttaagtggcattattgttcagggtaaatggcggcaaaacccccaaaacttttattttggttttacttaacccccaaaacccaaatttggacggtaaaacctccaatactcgtattctgttagcaatttaccctttccatccatattaggtgttaagtgccatgttggaatggacacaatgtacacgtggcacaattttattggtccacgtaaaaagttatttaaaaaaa

SEQ ID NO: 278911 - DNA, 186 bp, Cannabis indica
ggtatcacttgttgtgtgtgggacactactctatcactaagaggttcaaaattcaagagagaagaaagagagtataaggtggcggctaggttagagagagaaggctcaggttttctctgaaggaaattagaaagtaaaagtgtaattttcctgaagcattcactatctatttatagcattccacta

SEQ ID NO: 278912 - DNA, 553 bp, Cannabis indica
gaacatatttatttgttcatgataatagtgtcatcagcacagtagaatataatcatgattatatgtaaacttcaattcccattatttgtcagttcactggatttagactggcatgataatctgcaataggtatacttacagcatggataagtgttatgtcctttccagggcattggaaaagtttaccagtatcgaatgtatggagtatacttgggtattgatcttagataagatatcataaacttactgttatatctttttaagtcaatatcaatggttgatcttaggtctatggatcttaatcctgacatgattaggttcgatctcaagagtgttatttgtgttctttgatttgttagttaagcctacctttttgtctgggtgatacgtacattttgggaacatgatagtacaattgagtgggagcggtaatcatagatataaaatctatatcttctatctggacatagaagtaaaatgatgatttccttcgagcttggctgaacagaggaaaaggattgagagctcatttcagttattatattagtttatt

SEQ ID NO: 278913 - DNA, 542 bp, Cannabis indica
tcagattaatcatttttaggcttcctaaaaaaatgtgtatgtttttaggtttatacagaccatataattacaatcaataaatgttggatttaaataaatatttgaattcaaaataataaattaaatcatatttaattatttgaataaatatttataatcgaatctgttataaatatttattttgaattagatatttatgtttgaattaaatatcaaataaccgattgagggaatctttcaaccacttggagagaatcacttaactagggggaatatctcaaccaacttaaacataaatcatccaatccaatgacaaccgaccgatccaattacaaccgaccgccaatcatcggatatccaattgtgatcggatcggattagatgttatttttgaatatccaattggatcagatcggatgttggatggggtgtccaaaactccaatacatccaacatccaatcgaactaattagtattttcatttagtttggatgggcagttagattttatatggttatacgtaatatatatatatatatgta

SEQ ID NO: 278914 - DNA, 386 bp, Cannabis indica
aggataaaagagaagttgttaaacagctggagtcccaggctctcggttcggatcttctgggtcggtaggagctagaggatctattgtttgaacgggaggtacatcagcattttggccagaggtagaagcaaccgcctcagtttcaccataagccacttgggaagcgcagaacttgagatacatgtctttggcttcacccaagtaatcaaagtttgcctgagggttagccttccaaaagtcataaaagagctcgagaccggctgtctctaaggcatggactttctctcccagcctctccacctcagctgtaagctcctcctccttagacttcttctcctcttccagccgacgcaagacagctcgaagagactgttggaaattatttt

SEQ ID NO: 278915 - DNA, 599 bp, Cannabis indica
tctcctaagtttgaaaaataaaattccttcaagtgatctccccaccgggtcgagggcatcctaaacctataaagacgctcgtcgaaccctacgggcctaagactggcatactcgccaacagaaggaacataacgaattaccaaaggagacttaccgccggcgccccaggagccccagtgttcggctcctgagccgaaggctgtggcgtgggagcccttctctccgctgagtccccaatgtgaaggggcttcccggcgatcgcctgactccttctctccaccgggctccccacgcgaactgactttccggaagctgcctgggccttagagtacgccttctcctgagccttccggtagagatactcctggtacttcttctcggcagtggcaatgatctcgtcccggaaggtcttctccgcgaccggcaccctcacattgggatagataacccgggaaaggttagagtcctccacggattggtgtggaaggatgagttttgccttcctgcagttctccatagtgaccgggcccccgatgtcaagatcagcccggtcgtaagaggcaaaggcctgggctctccgaagaaaggcctgagtaggt

SEQ ID NO: 278916 - DNA, 613 bp, Cannabis indica
agtatcaccaagatttgagcccgaatgtccttctcttgattctggattcttcacaatcttccacactatgattgaggtacaacttgatgtgtgtgggcactcactcactcactatagggttcgattttcagaagagaggaagagagagagaaggtggcggctaggtttaggaagaaggctttgagttttctttgaaggaatgagatgcatcatctttttcctaaagccatcactacctatttatagcaaaccacctagggttaggttagatttatttggcattaaaataatgaaaaaaaaatgataaatagcctacataagtggccggccatgtaaaggataatgggccccacttttgcaaatttgccattttatcatttctacatctcatttactcaaaaacgccaattttccaatttaaccacttaaatgccaattctaattatttaataactaaaaattaataattaaataatattgtcttttaatatatttgttaattagactaaccaaagtctcttaattaacaaatgaaccctagaaactctttcttcacaatttagcccttgcttagtggaaattcataaaccagacagtctaattttagaattat

SEQ ID NO: 278917 - DNA, 422 bp, Cannabis indica
aatcttacctcaatttccgaattcaggtgtgccggtcaacttgagtggaacaaactgcacgacaatttacagtctcctaaaccataacagccacaacacagataagtgatacactaaatcacttcctggggacttaaactagaaactagaagtttccctatcgataaaaagtaggggtgtgcataaatcgatccaatccaatgacaaccgaccgatccaatcacaaccgaccgccaaacattggatatccaattgtgattggatcggattggatgttatttttgaatatccaattggatcggattggatgttggatggagtgtctaaaaatcaaatacatccaacatccaattaaactaattagtattttcatttagtttggatgagtaattagatttcataatgttatacgtaaaatatat

SEQ ID NO: 278918 - DNA, 593 bp, Cannabis indica
aagtgagaattgggaatgctaaaattggataaataggttttgatgtgaaacaaaagtatttgcatagcctttgtgatatttagattattgcttaatgctgattatatgttaatccatctcagagatgattagataacatgtgatttaggacctaaaagatctgaaaaaaattaggttaatttttataatctatcattcacattaagaaagagaatagtaattagcattaacaattgggtaattaaatcaacaggattcttttccctaatttctcatccttgattaaacacctttattgctttctttaattttcttgtttttctttatttcaaaatctatcaaaattatttatctaccaaatagaatcataagtctaatttagtggtattcacttcaattttctgtggttcgacctcacctgcgtgagtttactacttgattacgtgcacttgtctacctaaattggctggaggtctaggtttcaggagtatctcagattagaatctagcagccatgttcaaatatgtttgggccattataaaaaaagaagacaacccatggaaaaaatgagtgcataatgtgtacatcaagga

SEQ ID NO: 278919 - DNA, 783 bp, Cannabis indica
gcatagcaaaccacttccactataagtcatggatgtttctggttggggcttctctaatggaagatttacctactgcaacaactgttccttcctcctcacgagatggggctgcttccactacttggcattctcagttgatcaccacagttattgatctggccacttcctatgctcgtgatcaactcaggcaacgtcgctttgaaaaatcggtcattgatgttctcactgctacggccaatgtcctcaaggaatcagaagcttctccagctgttcattctcaagggattgtgtctagctcttctgcagatgaatctgaccagcatcagactgctcctggtctctctccatctcctgcagccatagatccatctgctggacaaagtcaaccacagatgtctgcagccactcccgtccctttatctgctgatgttcaaggtgctcagggtatttcctcctcagctagtcttgacaaagagattgattcctggtttcaacaaggcgaggatattgggactggtattcagggggagtcttcacacactgctgtagtccagggggagccctaaaatgtggcagctgttcagggggagatttccactgtggctccgttctctgctcctgatggtggtgactcaaggattcttggtgctcctctggtctcttattccagcagtgattgattatgatcatcgagggggagttagtttaccttttgatataaactttgtacttaccttttgatataaactttgtacactaattttttttggggttgtgttaata

SEQ ID NO: 278920 - DNA, 503 bp, Cannabis indica
gggttttttttttttttttttttttttttttttttttttacatttatatgagttttttttatgccatatttttgtaaaaaaaagatagaaatcccatatttgtaaaaaaaaataataagttttgccgaaaaagtcaccgtcaccggaaaaagttactaaaaaagccaccagaagtagatgtctcaaatataaataaaaatagaaccgggtataattgaaatataactggaacaaataaaacaaaataactcaaactaattataattaaattataaccggttataactaaaatagaaccagttatataacataattaatgcaaacaagtaacacacaataatttaaaccgattacaattaaaaaataaaagggaaatcagttcctaaaacactgaaacataaattaaaaacaaaactagttctacaataaaaaacctcataacacataatacctcataaaaccgattataatttttttaaaaaaaatggagatcaatttcaaaa

SEQ ID NO: 278921 - DNA, 1041 bp, Cannabis indica
tcatgtagtagttttcataattttgcatttccggtgcccggtattttggaactcggtgtttggctcagtaaaatcacaacttagtatgttagtagtttgggacggtttattagacattgggaatgtcgggaatggccgggaatttagaatttcccaaaaatacccctttagtgttatttatgtgattttagtgtggaggggcaaaatggtctttttgccccaatgatattttgtcctttagtggacttagtaaatgaattttatgtgtttattttattatttgttggctgaagtatatggggggtaatggcttttatttctcatttattcaaaaaaattctaagttagaaaaatagaaaattttcaaagctctctctctcttttcggccaagtctaggagctgctagggctgggtgttcttgcttgattcttgtgattttcagcagctctttgtgtaatccaagtcaaggtttgatctctagtaacttctctttgtgttttcttgagttgtaagaaaagtttggtgtgttgcatgcttagttttagatcattgttgctgctgtgtttatggattgttttcagaggtttaatcttgtttaattgagtggaatgaaactgttttgatgcatgttgggttggtttgaaactaatttagagttttggttcaaaaactatgcttttcaaagtgaaataatgaaatctgttgctgcagtggttgttgatgcttgttgttgttttctgaagttattatatgcatgtttaggaagatttgagctagtttggatgcatgttatctaggtttaaccaagtttgagttttgaactcaaagcttgggctttaatggtgatttttgattctgtgatttctgggtagtttagatgctttagaaatgttctttgggatatttagaacaggtctggaagttttggggtggtttggaattgatttgagcattgtgtgaattttttgtaaatgttcttgcgaggaaccggaattccggttgttgcaaccagaattccggatgagggtccgaggaagttc

SEQ ID NO: 278922 - DNA, 370 bp, Cannabis indica
tgaattattagaaataaaaaaaataataaaaatagagtaaaattcacccctaatgggcggccacatagtgggccctacattagtttgggctttgtcatttttctcaactattttacctatttttcataaataccactttttacactttcaaccctataaatgccaaactatttattgaacaattaaaataactatcaagtgtcatttataatatttattaattagactccataaaatctctaattaacaaaaacctaaaacactattcttcacaatcaagccactatcttatccattgttataattccaataatcaatgatcctctatagatgacctacattgcatagggataaaattaccgttacaccc

SEQ ID NO: 278923 - DNA, 834 bp, Cannabis indica
acaatgaaatcatctaattgtttaggctgtgaattcagacgatggatgtttcatcagttgggtccacatcatggcgaacatagtcaacattatccaactgtggaagtgtatttaagagtcattactgactcagcctctccaaacgggtctaaggtatttcgtgcatgtgtaaacataaaagaaaattatcactatgtgataatacaaacacaaatacaattgtcctatcttatctttggtctataaccaaagagatcaagaaaagataagaaaaattttattttatgctattttacaatatcttatcatactttacaatatcttatgctcatttatacttattacattatcttattatattttaaattatatattacatgttataatttttttttaattatttattatttaaattaaaattactaacctattaaaatttataatattagtttattatattttaaattttatattatatgtcatacttaattatttttctaatcattaattatttaaattgaaaatgtttttttttaaaaaaaaaaataagtattattttactaaatttttaattacattttttaattttatgttttatggtatttagttttttttatcaacaattaatttattattttattcttaatagtaaatcaattttattttatttaaactattaattaattttacattatctttactaaaatttggcagcataacagcttaaaaattgtaaactcaaaatttccaaaacctataaataacacaaacaaatatttcacgataatatatgaacaaaaaaatgatccacccatccaaccacagtcaatttta

SEQ ID NO: 278924 - DNA, 681 bp, Cannabis indica
aactaggaactaaaagtttccctatcgataaaaagcatggaaataccccaaataacataaaatcgaggaaaactagggtttcagaaatttccccaaccggtagaccggttgtccaaccggaattccggttctgggaatttttgaaacccatccggaattccagatgcacaactggaattctggttcctcgcaggcagaacttcaaaaattcataactcaaccaaatcaaatccaattaacctcaaaccttccagacctgttctatatgacccaaataaccattctaaagcaacaaactcacccagattgcacagaaacaaaaagtgccattaaagcccaagctttgagttccaaaactcaaacttggttaacatcaactaacatgcatccaaaccatgattcaaactcataatcaagcatataaaagctgcagaaactaaaacctaactcatgcaacaactacagccactaaaaatccaatttctctttgaaaaccttaagcttttacactaaaaactccacaactctaacaacctaaccatcaaacattacaagcagcttaataacatcaattaatcaagcttaaacctctgcaaacaactataaaatcacagcaacaataacaacttaaactatgcatgcaaacatcatcatttcatcaaaattcttcaagaaactaaa

SEQ ID NO: 278925 - DNA, 813 bp, Cannabis indica
tgtcacattggggacaatgtgtcactttagtttgggaggtgacttaatttttatttttattttgagtttttttttttttttgagttttatgtcttttaatttttagtttttagtttttattgttttgagtcaatttgcttaatatgagtcaatttgaaagtaggtagatagcatgatttgaaaagttcatttatttttcgaaaaatccgtgtgcttggtgatattacactcttgactaatttcaattttatacttaaaagaacatggaatcatattaggtaattttctagtaattgaattggtttatgtatgctaatttgatatgtggaaagttgtttggaaaattctagaacttgcttgcttgctatttgaggcgaaataataaattatgcatgactaggaaagtgatttaggcaattttttggatcgattgtgcctttcaagccatccctgtaattttatcctagttaccttttttgagccttaacctattctttgttctacacatattgagcctgaaaagataaacccatgaatatccaaactatttaaccctaattataccataagtagatctttagtttgggggaatttggatgggaaatttgttgtatgtgtggaaaaaaaagtgtgaaaattgagagaatataaaaaaaaattgattggcgacaacttgaaaaaaaaaagagaaaagaaagaaaaatctgacaaccaatgtcaaataataaaaaaaagaataaatataaagttgttgcaaccttgttgaaaaaataatatctctcatgtaattaaaaaagggctattgggattgtg

SEQ ID NO: 278926 - DNA, 720 bp, Cannabis indica
atgattgagatttttctattttattttttttcaatcaccagacatcactgaaattttcttttatttctgattttttttaattcttcttttttttttttcaagtgatgccgagttacaattcttttcttttttttcacatgtttctcaatcacgcaagatttttttcttttcttcaatacttactcacactaaatatttcactcccccaaacttattgtaaggcttatgataccattcaaaatgtaatgaggacaaaaacaatagtgtggatacatcttttagttcaatgggtgaagaaacgaaacaggtttaggctcaaaagggttcacaaaggatattcattttatggtaggcttgaaaggctcaaactatccaaacaaactgcctaaatcatgttcctattaaatgttgtcaaggatttcgcctcaagagaataagacatgcaagttctaagctattcaatcaatcttaccacaaaccacagtaaaacaattataacatatttcacagatcgtcaaattgcattcatacacaggctttacaagcatccaaactaatccaaagagttaaaagaattaagcacacagtttcaaaatttcaagacatttcacaaataacaacagcaacaaaattgatcttggcttaattaacaacaaactaaaccacgacaactaaaaaaaaactaactaaaccaactaaacaatcaaacaaataaaaaaa

SEQ ID NO: 278927 - DNA, 1190 bp, Cannabis indica
aattaataagatgaattcaaaaaaacaaggaaatattattgaaaataagagtttaatactataaacaaaagttacactaattttctaaaagaaattacattaatccaaatttaaataataaaaaatagtgtagttagtggttttataccttattaagttatcataataataaaaaaataattgatgatattcaaacatgaatccattcgattgatacgaatatatgtatataatttttttttcaaggaatcctagttgtctgctgcaagaaaagtaaatactatatttatgaattaatattaaaaaatctaaaaaaaaaaagttgagtaatctgaattctaaattatgtataaatatgtatatagagataaaattttttttactgtattatgagagttaattaaactttgataaccagaaaagattattaaataaatgaaaatagtagaaaagaagcttaatcatattatataatcatattggtgaaaaacttactctatttcttaaagcaaaacaaatattgttcctctgaattaaagcaaattagatttcatgttctatatatatactccaatttagatactttggctgaaacacttacctatatatatatgtgtgtatgttttcaaaactaaatggacaaaatattcaaatagtcaaattttttattttatttcatattttcccgactacttttcgaaacttttgatgtctccttattaattatattaaatattcaatggaacataaatactctttagaaaaagatatataattaattatcagttattattggttacatatgtttgattaaaactgaaaaagtcattctctcaataaaaaaaaaaaattaaaaagccattaataaatgaattattaagtgaaaagattaattaaaattaaacaaaataataagagttgagaaaataaagaataactaagaaaactcatcatataggatgtcaactcaatcagtaaagagtaataagtaataaattgtgtgattagcttttaataagaaaatgttcaaaaatttggaaaagctacaacaaaaaaaaattagattctcaatttgaaaagttgtcatatcatctctctaaacaacatgattatagatagatagtattataaatattatatatatggaactacttcttagtgagttattactctattaagagtgcatccat

SEQ ID NO: 278928 - DNA, 705 bp, Cannabis indica
aactaaatcgataaaacattcaaagagtcaaaatttttatttatttcatattttcagttattttttgaaacttttgatgtgtccttattaattatattaaatattcaagagaacataaatactctttaaaaaaagatatatacttaattatcaattattattcattacattaaaactgaaaagtcattctctcaaccacaaaaaactgaaaagccattagattattaagtgaaaagaataattaaaattaaacaaatgataaaaattgaaatagtagagaatagctaaactcgatctcttaaaactctcctatatatattgatttaatttaatttttttgttttcaaaacattataataccacctataattgatgggatatttctatgtactaagattatgaaagaagttcgccaaattaaataaagtgagattaatgtaaaaagacttttaagctgagagagttttgtaaaaacaacacactgaattatcattaaaatgcttgattaatctaaaatgatcaagtgcctttatttatagaataagagctcgtttggaacgtcgtattatgtcgtattgtattgtattatattaaattggattatatagcatatttttatgtaatactatgttaaactttaatttatactaaaatattatatatttaggtgcccataaaagttaataccacatatagttttacata

SEQ ID NO: 278929 - DNA, 690 bp, Cannabis indica
ataaaaggaacatgattctctcactcatctaactattgtcaacttgactattcaaccaacctagacgagagagttccttcctgagtgatttcaaacctccttcattgttcttccatattcgaaccttgagtgatgagtgtcatgcccatacatagcaagtcaagtactcaatcatagtgagtaagacagtggtaaacaaactcgaaggagagaaagagatccaagtttagatcttgataatactctgcaatagaaaggaatcaagggcttgagatcgtgaacggaaggagtcattatatctgctacaatcaatgtaaggttttcttaaacccttatgtgtttatttcattattttagagaattcacatttagcatgttaatcaacatacttgttagtaaatctagatcatggaaaaatattcccaacaactggcctcagagccatggtaatgatttactttgatgtaatatggatttaaaacgatgaatattgtttgtatgttgatttggatgtgttcacgtttctttatctgttgtttggtgattgtatgtgaattacaaaatttttcctcgaaaataattttattttctttttgaaaatattatatttggattccttgtgaaaattgagaaagttatgaaggtttgaaaaccgggtgcacatggtgctcatgttgggttttatgccct

SEQ ID NO: 278930 - DNA, 471 bp, Cannabis indica
gatggtttttactcttggggtggagtagttgtttggaaaagcgctaagcaaactacaatatcagactctaccatggaggccgagtacatagctgccgctgaggttgctaaggaacttgtttggctaagaaagttcttcttaggacttggtgttgttcctggaatggaaaaatcactggttttactgtatgacaatacttgtgctatagccaatagtaaggagcctcaaagtcacaagggaagcaaacacatagagaggaaataccacatcatcagagaatatgtggaaagaggggacgtacaggtggagaaagtggacactgaagataacctagttgatccattcaccaaagtactaactgcaactacatttgaaaagatcagattgaatttaggattaattgaaatgtactgatagttttatgttaccgtaatatctattcaattcaatatcacatagttgatcctagat

SEQ ID NO: 278931 - DNA, 514 bp, Cannabis indica
atatctatgtttgttacaaattcacgcaagcaataattcttctctaaaaaattttttagagcggagttgatcgattcgcaacgttgtgtggttctcattcctgcaacgaatgaaccgcttaaataagtttctacccattgttgtcttaactcgaatgttgtttgacaccattcattatctgttagttgttgggtttggatgacgtctaaccatcttgcttcaaattcttcctcctcgtagtagttgtacatcaaatccttaaatgtttttaagaagatcggatctttaacctttttggaagcatttgtattgagatgccaagcgcagagacggtgtgtaacatcaggcatgtgttcaatgatagcctgtttcatggccacatcttggtcagtaactacaacatttggcttcttatctccatggcattcgagaaatttttgaagcaaccaacaatatgattgaagcttctcgtggaggaggagagcaaacccgaagatgcatgtgttgaaatggt

SEQ ID NO: 278932 - DNA, 737 bp, Cannabis indica
ccagctacccggtttgcaccagttcacccaagaaattttatttcttgctcaaaactccaccaaacgtaaccaaaccttccagagtacctaattagggtatacacaacataatccaaccagtatttcatagaaaaacatacaaaataaatttatgccattagagatcaaagctttgagcttaaagctcaaacttgcataaatccaacacaacacattaaaaccagctggaagaacttgaaaccaactcaaatgaaccctaaaaatcaaaccctaaacaaacctaaccctaacagccccgatttcacaaaatcacataaccaaaccaactagaaacttgagaattaaagaagggtgctactagggcttacctacggttcaagaacctttgaatccttactgaaattccagaaaaatgagctgaaaagaggtgatctcctctagtttttgtcccgaccgaagagagaaagagagagcttcaagggaaacaagtctttttcctaaattttgatttttcttcaaatgggaaaggattttcctaactaatccttgctgaaattactagtgctaggtgtcactcaaacaaggcagccacctaacccctaaccaaaggtaattaccaaaatgcccattacttaaaacttaagtatttttaagactaggggtaaaatggtcaaaaaccataaccccgctcaacctcgatattttatttcctcaaaatatttcccactaagaaataa

SEQ ID NO: 278933 - DNA, 730 bp, Cannabis indica
acgttgctgagctagatttttacaaacacgattctccttattctttcatttcccttataacatcaataggaaggaactaatgtaaatttgtggaacttaaatcgacagccatactattcaccaaaacaccatagcaaatactaaacacaaatgacaagacagctcaagaagagttatattcatttgttcactgacccgaaaagggatccaagaattaatctttaccaattaataagctgaagacataaacacaatcacaagatataaatagtaacaaaagaaataatagtaaagcacaaacctccagaacagaagggcagatcgaagtagcgatacgtctcactgaaccaataatatcagatacatcaaaattagcaatttagcataatgccatatcaaacaataaatcaattacaatttcaatcaaatatactcaatataaatcaaaatctaaagactcgttctgaaaaaaccccccttcgacctccaaaactacctcgcatcaacgtcggtgcacattgcaaacaaaaaaaaaaaaatagctaagtcaaagaatttttttccccaaattcaattttagctccgccattataatctcgaaccagttaataacccacagattccaaaaatcaggtgaattttacagaaaaaaaaaatcgctcaaaagataaaaacgagatccgaaccgcgaagaggtcagatcggaattcagatcgaggaatatgaaatc

SEQ ID NO: 278934 - DNA, 564 bp, Cannabis indica
ttttgaaaatcggaaaaatatcgagatggtgtcacccacctacgcgcgcggatgagggtgcaaccctcagatgcacgcgctcagacatgagctcgaccgagcttcctcggtcagacaagattttgtctgaatctcgccccttacgcgcgcagagaggctgcatgcagcctcttgcgccgaggtttcatggtcagccttccctgctcgtgcgtgtggacagtatgcaagtaccacttgcaaatttttttcgttttcttcgatttttcatgctatttcatggaattaacttccaattttttgtgtagttttgtattttaatttttacttttcaattttcaaatctaattatcagaaataaattaatttgattttttaaaattaattttagatattagtgtaatatgaatttgaaaataggtaaaaatctatttttttttgcttaatttttttatcttatttttaaaattgattattatatcttattttttaaatttaaggtcagatattaaatttttttaattattttttttaaataatttgaccttatttaagtttaaaataaga

SEQ ID NO: 278935 - DNA, 376 bp, Cannabis indica
acaatgatcgtatcgtaccccttgaaattttttccgctaaaatatgtcaatgtagttaatgtgttattgtcaggtccacatatttaatttaaaattttaaaaaatattttcttattaactataaattataggataaatactattttagaccctctactttgtaaaagttatcaattagaccctctattttgttaaataacaaattagaccctatattttccaaaatagtataaaaataggatcctaaactcaatttttaacaattttattttttaatataactaactttaagataatttataacacgaacagatacagaaaatgtaactagatttgttataacatctttagataaaattattattaaattttattt

SEQ ID NO: 278936 - DNA, 596 bp, Cannabis indica
ccggaatctacttatgaagtgaaaaaaacgttaaattctataggattgaagtatgaaaaaattcatgcatgtccgaacgattgcattttatatcgtaaggaatatgcagacatgaattattgcccgacttgcggtttatcccgccataaagtaaacaagagtaaggagaataggaaacttatcccccaaaaagtgatgtggtacatgcctttgattccgcgactgaaacgattatatcgtagtgcagaacattctgaaaatttgatttggcatgagaccaagagagtgaaagatggaaaacttagacatcctgcagattcccaagcttggaaaaaagtaaactacataaatcctgaattcaaatctgaaccaagacacattcgtctcggtctgtctgcggatggagtaaatccacatagatctctaagtagtcgtcatagttcatggcctgtcttcctagttatgtacaatcttcctccctggttagtgatgaagaggaaatttaacatgctttctttaatgatatcaggcccgcaacaacctggacataatatcgatgtatatttggaaccattgattgacgatttaatagaatt

SEQ ID NO: 278937 - DNA, 550 bp, Cannabis indica
tccttgaactccatcttccaagtccaggatctcagccactccctcaccgtggtaagtatttcgtagtttacttttttcctcattattttctcttaaggacttttactcatacttgtatctttttccagcttgctgccgaggccggccgcctttccaagaacctaattaaccatggcttcgtcttgtccgactttgggggcatggacgaagtcatgaagatccttcaggatttgactgctgaaaggcagatttaccaggaggatgccgagcgccgggaggcccttgccaaggccagtgaggaagaggccaggcggagggaggctcaagcggaggcgatgatccgggaggaggcccttcggagggataggctggaggccaagcaccaggaggagctgagggcggagggcgaggctgctgctaaggccaagcgtgagcttcgggaggctagggaagccttggatgaaatggctgccaaggtgaagtccttagaggaagttcaccaggcagacttggagtctagggccaacctggccgtggagctgaaggagct

SEQ ID NO: 278938 - DNA, 441 bp, Cannabis indica
tttcggctgacgtgcatcagccacttgacttctcgcttcccggtctactgaacccacacaaatcaaatcagccaatactcttgccaacgagcttgcttcggagttattcttctgagacttgaagtatgtgttggctacattgtccgtcaccactgtaaacttcgtcccaaaagatagtgcctccacacatccaaacaatgcactaccgcagccatctccttctcatgagccgaatacctttgctcagcatcctttaactttcgactttcaaaagctattggatggccatcttgcaccagaactccacccaaggctacgatccgatgcatcagtttggacttcgaatggtaaatcaaaatcaggcaacttttagtattggttccgaagacaccgccaccttcagcttctcaaatgcctcattgcattcctcagaccaacacc

SEQ ID NO: 278939 - DNA, 1258 bp, Cannabis indica
aaatctaattaccttggaaataaacatgtgttttatacaaaaacaaaaatgggttgtcaaaaataaatgcttggtaggttcttcttgttttaaaactattgctactaacatgtggtactttgatagtgggtgttctagacacatgacaggtgaaaaagaatatcttgagaacattagaccaatgcagtgtgaagaagttacttttggtaacggtcttgttggaaaagtcatagggataggaactctcaatttcgaagggcttcctagactgaagaatgtcatgttggttgatggactaaaagctaatcttcttagcattagtcaaatttgtgatcagggttatactgtgagctttgatagtaatcattgttatgtgtataatattcttgatgaaattgtcttgcaagggttcagatctaatgataactgttacaccatcactacctatgctacttgtcactctgttattaacaccactgatttatggcatgaaaaacttggtcatattcattttaaaaatctgaggagattgtctaatgcaggaattgttcgaggattacctaaattaggtaaggagtctttgggaaaatgtggaccatgtcagcttggtaagcaactgaaaatttctcataagagtgtttctgatgtgaatacttccagagttctcgaactcctacatatggacttaatgggtccaatccaggttgaaagcttgaatggtaagaggtatatttttatgtgtgttgatgatttctcttggttttcatgggtagaattttttagagaaaacattgatacttttgatgttcttaagtatctttgcttgaaattaaaagttcaaaaagattgcaacattggtaagatagttcgtggtaagagtaatcatggaaaagattttgaaaatactgtgtatggtaaattctgtaaatcttatggtatttttcataatctttctgctcctaaaatcccacaacaaaatggagcgattaaggattcccaccttcttgatcatgttttagacaaggctttgtatggcatgaaacaagcaccccgtgcttggtatgagcgtctatctgagtttttacactctcatggttatagaaaaggaaatgttattaaaacacagttcatcacacacattcaatttgatattattttttcatatgttgatgatcttgtttttggaactacttctaactctgaagtgcaggtttttgtttcccaaatgcaaaaggagttcgaaatgagtatggtaggt

SEQ ID NO: 278940 - DNA, 570 bp, Cannabis indica
ttcataatttaattttacaagattgtgacagagaaccttcaaagcagattccatataaagatttttcaatcgaaaaaaagaaagaaatatgtaaaaaaataaagagagagatatgctaaacaaaaagcattgaagatctaagtagtaatcccagtcatattgatcttcacacatatattgtcgagaatacagcaacgtcaagtcaacaacatcgaaatttttttctaactatgcaagtattgttcaacaatcatcaaaaagattgcaaaatgatactactcacaccaccataaatgaagatgaaacttcttgtggagataatgtttctaccaatgtcgattgtgaaactaattcatttgtaaaatcatcatcttcgggcaatgtcaatttcaatcaggtaatttgcatttgacccatatttttttttcaaaactctgctacttccttcacgcgatgaaactctatatgattattttggtatgttgtttttgaattaatattaatatatataatcagaacccaaatgaatttgttgtgggaccaacctacaataaagaataacaagacctc

SEQ ID NO: 278941 - DNA, 544 bp, Cannabis indica
accacactattttccctttacaatgaaaggcatctatcataaccattcaactcaattcttttagtttccatatgtgagtgatgttggattaaaatcctcaatatgggctcatatgtatattagtgtattgctatttgaagtttggcccaaaataaagtgatcattttagtaattatgggtcattgggtattaaagtgtcatgggctaaatgtgtagataccctaagcgatatttctaatttattgaggggctaaattagaaatacttaaaattaataacctagctatgaggttataaattggtagtggtccccaagaaacaagtgccaatttctattctcatcttcccccatcaagagagaaaattagaaaacctaagtcttgttttcttggaagatcattacccaaaatcaccacaaagattatctctacaagatggattaagatcatcactatctatgaattaaggtacgcttccgccatttgaattcttctctttgaatcaacaaaggtattttttagatctatagttatacacttataat

SEQ ID NO: 278942 - DNA, 293 bp, Cannabis indica
atggaattgagataatacagcgtagacttttcttcagtaaaataactttctggtaatttcgaatttacaaagttataaatcttctctggtagagcttgaattattatagaataactcctccacccccagagtaaccaccatctcaaaatttgaatgagttggggtagatacaaggataactgatatacagttccttaatatctaacatatagatcactttcataaatctttcttgaatatcttcttgttggaaattattttaccaggatctgagatctactcacaagtatgtt

SEQ ID NO: 278943 - DNA, 779 bp, Cannabis indica
tcatttactttcagccaagaaaagaataaataaaatcaacatataattccatttacaagtcacaaaagacaaaaagtcattggggcaaaaagaccattttgcccctccattctaaaatcacataaaaatcactaaaggggtatttttgggacattctaaattcccggccattcccgacattcccaatgtctaaaacccgtccccaaaatactaacatactaagttgtgatttctactgagccaaacgccgcgttccaaaataccggacaccggaaatgcgaaatataaaaactgctgataacatactcatgcatatctgaattccataataaattatttaaatagctataaataatttcctgattaacataaataactgctaatttccaaattaactaagcgggctttacagtccatgagagattcctcgaagtttgaacctcgccaggataaagccagcgagatactgcgaatacgaccaaagtcggatcgcgtaactgtaactcgcgttatgcaggatgagaggaaggatccaactcgcatgtgtcgggacagatgcgagtatcctctctatacttctgcgaaagcatagagatcaactctctatggtacgatttggtcccaacgacccaatagcccttgataaaccgatatggactcgcatgtctaggttctatcagctcgatatgcgatgtctacaagaggcgattgcctaaggactcagacattccaaacgtaatgataacccctgcgagctcaacaacggaacatgaacagtc

SEQ ID NO: 278944 - DNA, 652 bp, Cannabis indica
ttttccctaattatttatctcattttgtaaaaaaccttaaaagaaaataccaaaaagaagaactctctccttccttattctctcttcgaaaccagcaaagccaaggggatttgctgctgaattttgaagttttcagctaaggattcaagctaggttcaagtggaggtaaaccctagaccattagttacatgtttccgaagtttttctttagtttgaacttgtgaaattgagtttcaggggctgttagggttagaattgcttagggttcaaattttatggttcatttgagttgatttaagttcctaccagctggttttgttggttggtttgagttttatgcaattttgagctttgagttcaaagctttgagctttaatggcaacttgggttttggtggtttgttctgtgaattactggctggattatattgtttatgcattgtataggagctctggaaggtttcattgcatttggtggagaattgagcaaggaatgaatggttttgggaaacctggtgcaaaccggctagccggtttgtagtgccacaaaaactggctagccggtttcggcaaggttccccgggcctttcattttctcaatttttgccttttcgatgcctcggttgggtgtttccccatttccagagttagaa

SEQ ID NO: 278945 - DNA, 704 bp, Cannabis indica
gtctcttaattaacaaattgaccccaaaacctcttttcttcacaattaagtcattgcttagtgaaaattcttaaataagacatagtctaattttagaattataattgattaagtaaaatcaattaactaagtctgcaaacagtattatctcaactagtgaggggaccgtgagcctatataatcgagctttcaataagtagaactagaatcaccaagtaaaatctcaacttattaattccgcattgcgccactatagatttggaattgaataacactctcaattatatagaacattctatatgtaccacgatatagatacgttatgattatccattattacaatcctaatagtcaaaaatcctctatagatgatctacattgaataaggacaaatttatcgttctacccttcaatgtattttatccttaaacacttagctacctataaatgatactttagtaaactaatataattactgaaatgagacatcaatcatttatctctattcaaccaagctcaaaggaaatcatcgtttcacttctaaatacttatagaagctatagattctatatctatgatcaacgctcccactcaattgaactaccatgtccttaatctgtatgtcacgagaagatccaattggtcgatttaacaaacaaattgaagaacataaataatacaactaagattgaacctaatcatat

SEQ ID NO: 278946 - DNA, 809 bp, Cannabis indica
gtaggtatatgcgttttcttgtatgatatatagtttttttgtctatagtatatcatttatttaagatgatatttagtttctattttattatatataaattttttgatatgtattcatattttaatagtggtatatataattttgtcagcacgatatatatattttttaagtatcaatttaatattgttatgctttttttgtggtatataattttattagtgcggtatattaattttcagtattacgatatatcaaatactgttgtatatatttaataatctaatatatttattcatttttgttacaatataataatatgcaatattaaaaaaaattgtataacttaattttattattatatatatttttaaaaaaatatgtgacaaatgtatttttataatttttattagctaatttattatatttggtcattttgtagtttttttaaaaatgagacatttactaagttagttttcaaatttaagattattttgcatctcagccctttatttatttaacatcacatttattgagtttcgattcgaagatatagaaccacaccagccaccactaccggtccttactagtagaaacttccagcaaataaaaataaaaagtatttgagctacccatctcaagtgatttatgtatttacttatagcatttctaatggagtgtcaaaaagatagtgtatagttatattttagtacacttaaaaaaattattgtttcactgtgttagatttttatttgagtatacattaatttttattggttttaataaaatatgagttgattggatagttcttt

SEQ ID NO: 278947 - DNA, 746 bp, Cannabis indica
tttttatgccatttttgtaaaaaaagatggaaatttcatatttttaaaacaataataagttttgctggacaagttaccggtgctggaaaagtcaccgtcgccaaaaaaagtcaccataagtagatgtctcagatataaacaaaaatagaactggttctataacataatgaataacaataaataatacaaaataactcaaatcgattataattgaaatataaccggttctgtaacataatgaataaaaacaaataacataaaataactcaaaccggttataattaaaatagaaccgtatataacagtgttataatgaataaaaataaataacacaaaataactcaaaccggttataactaacaaagagccggttatataacataatgaatagtatttttggggtagatatggtatgagtgtaattgtttggtgggttagagcatgttgaatgaataattttgtttgagttattttatttaactggcttttgagtgtgagtttttatcttagttgctttacggaactagtttttttgtctcaaatttttaactagttgataaatataaccagtttctttatattatatttgagttattgtgtgttattatttgtatttatttattttgttatggaatcggttattttcatatttatgccttaatattttttgggattgatccccatttttgttttaaaaaaattataatcggttttatgaggggtattatgtgttatgttatggaact

SEQ ID NO: 278948 - DNA, 707 bp, Cannabis indica
ttttaaccaatgcactggaaaggacatagcacttatccaatgtgcaagtaaactacattgtagatcatcatatcaattaaaccctgtgtactgataaatctaagaatacatttaattacataatcttgattacttttcattgtgctgacgacataataaacaagaatatcaatgtgataaagatttggatggatttataaatcaaataaatatataaatgatcacatgaaccaaaatcatactaaataagtaatgagaacaaatctgcttctttattaataattgaataaataattacattgaaatagaatttatttagggcacaaagcccaacaaactcccacttgcactaacataaaataattaatacatttcaattaatcctaaatttagtctgtgcttttcaaatgtagttcaagctaaaactttggtgaatggatcagctaagttaccttcagtgtctactttctccaccagtacatcccctcttgccacataatctctgatgatgtgatatttcctgtctatgtgtttgcttctcttgtggcttcgaggctctttactattggctatggctccaatgttatcagaaagtaaaaccagtggtttttcaattccaggaacaacaccaagtcctgtgaagaactttctaagccagacaagttccttagcagcctcggcggcagctatgtactcggcctccatgg

SEQ ID NO: 278949 - DNA, 591 bp, Cannabis indica
aaaggagtcactttgcacagtaaacgggccagaccaacgggactttaattttccaggaaagagtttgagccttgaattaaagagtaacacttcttgtccttttgcaaaaactctttccttgattctatcatcatgccatctctttgtcttctccttatacaatttagcattctcataggaaaacaaacgcaattcatccaactcgttcagctgtaactttcttgcttctccagctgctgaaatatccatattgagattttttagtgcccaaaacgccttgtgttctaactccacgggaagatggcatgctttcccataaactaggcgatatggagacatgcctagaggagttttatatgctgtcctatacgcccaaagtgcatcatcgaggcgttgggaccaatcttttctgttgggatttacaaccttctccaatatgcctttaatttcccgattagatatttcagcttgcccgttagtctgtgggtgataggcagtagcaattttgtgttttacactatattttgccaagagggcagccaacactttgttcacaaagtgtgttccctcatcacttatcaaagctctagg

SEQ ID NO: 278950 - DNA, 657 bp, Cannabis indica
aaatgtcaatttcgaacatagcgggtattttcacaccctttagcttccctttttataaatagggttgaaaaaactgcttctaaaagctaatattgtagtagtgacgccctctcctatccaaactcctcaatatttttaatctatttcttcttacaattggccctccaatcatgcaaacttttcaacattttatacaaagcatagtccataaaaacttgattatctcgtagatacacaaactttatctactaaaaagttacacaataaaattgatgcattaattataatagtgtagaataatatacttggaagtattacctaacaaataattaaaactaataatacattacagttacatcaaggaacatgagtggccgggtggttagagtattagctcgtttcaaaaatatttgttcatgaaaacaatttgttatggtaggcattaaatatatattaacactcaacgataatagtatgtaaacttaatttaagctattaatatatattcaagtggtcttttatcatttcaaattaactaagtagtatttgagtatatatatatatatatgactatttaatggttatatttttattgtaattatatggttacattttttttgacttggtagacatttatatgactatttaatggttata

SEQ ID NO: 278951 - DNA, 651 bp, Cannabis indica
tgttataggcataaatttaccctccccgcgagaaagacttgtctatagagaactcgttgtattgaaggtgactcgcaatattatagtactcgcagtaccgaaagaaaggatctcgcaatattaactaaaagagatctcgctatattaagaaaggcacacctcgcatatttgatgaagtcgcagtatcaatagggaaagacgcaaatacatacaccaatcaacgaaagtcaacagtcaaacattcaaggagcattcatgacaaacgttacacatattttataaccgttgtaattaatttgattaataagccaattattatcattatcattattattttgtaacggtctcattatgaccattatttgtaaccgatgcctactacctataagtagaggcttccccctccattcaaaggggctgatctgaataaagaaacagagctagagtactcttttcaacagtggattaggcaggccaagcccgaagctcctgctgaaccactatatttttctgtgtctattttatactattcacaatactcgcgtatattatacactatattctttgagtactcgctattctaagggagtactcgcatatctattttttggtatccaagtagcccttgaatactcgcacaaaactggtgtt

SEQ ID NO: 278952 - DNA, 511 bp, Cannabis indica
atccatctcttcaaatactgtagaatcctaattttacacctttttctaatttgaactgctaaaaaacgattggaattattttaataaaattatttttattaaatttttttaaaaggttatgaaatcattttttaatcatctttcattgtcagttattatgccacctcatagtcaattttccctctaaaaagagatgaaattactactctatcctttgttataataccacatcatcaatacaaacggtatttttaaacaaaataaacagaaggactaaatgtatgcatataaaattatacaaggactatttgtaacaagctgaatagattaaggggcataatagtatagtgtcataagtacagggggtaaaaaagataattattctattttttttcccctcaaaacactaaaacactatatgaacaaacatgttttctttttccttcaacaacaattaccaattacacatattgagacggatactcttatggtggtcaatgccttgaaagct

SEQ ID NO: 278953 - DNA, 652 bp, Cannabis indica
tttttgagcaatacaactttctggttcaataaaaaaaatctaataagtacaataattcataataaaatataaattaatatgtacacatcaatgtatatttaaataagtatataatcaagtaactcatattaaaataaatgagtaatttgcggtataaatatctaaatttaactttcgattgcaggataaatatttaagtttaatttttgatagtaataatacatacctaagttaaaattctagaacttccctaggtacctgaccattaagtgttaagttaatggccacatggcagaccctaattagtctagatcattaaattttatttttgatttaaaaattaatttaaatataccaataaaaaaataacacgtgtataatataactaaggtattattaccgtaaaaaattaaacttaggtatttatctacaataaagagttaaacttaagtatttacgccataaattactcaaaaataaattaataaacatttttttaattcatattaaaataaattaatattacacatgattgtgtaattggtttgaattttatttgtagggatgctaatcaagtagcacatactgtagccaatcatgcattgtaaataatgttacatgtgccatttggattgagattgaactttcttgt

SEQ ID NO: 278954 - DNA, 773 bp, Cannabis indica
actgagaagtccccggctttcccattttgtagttcgacccgcttcttgattaaaaactcatcttgggcttgttcttctttgatattctctaataaatttgattcaattgtgaggttagctagctttcctgttactaactctattccagatctctcgatttcctgttgcaacggcacttttaatgcccttaacattgataagcttgcatagttgcgtctgctaagtgcatccgccactacattagcctttccaggatggtacagtatctcacaatcgtaatcttttaccagttccaaccaccgcctctgtctcatgttgagctctttctgcgtaaagaagtattttaggcttttgtgatctgtgtatatttcacacttctctccatagaggtagtgcctccagattttcaatgcaaagaccactgctgccaactctaagtcatgagttgggtaccttgtctcatactcctttagctgcctagaggcataggctaccaccttctcattctgcatcaacacacagccgagcccttgctttgatgcgtcgcaatatactacaaatttgtctttgttagttggaacacacaggacaggtgctgttatgagtttatctttcaatgtctgaaagctttcctcacatttatctgtccatgcaaatttttgttgctttcgagtcaaattcgtcaatggtgtggctatttttgagaacccttcaacgaatctcctataatatccagctagtccgaggaaactccgaacctcacttgcggtttt

SEQ ID NO: 278955 - DNA, 487 bp, Cannabis indica
atgataaggggattagctaaatcttctcgaaaaacttgggataattgcttaatttattattccgatgttataataggaaaaaaaaaagataattacaactttcgatccgacttatgattatcaactatttatatattttgttctttttccatttcttttgtgcataatagagtatttgagatcttacttaaaaaaaaaaaaaaaaaaagaaaaaaaagaaaaagacgagagagtatttgagatattataaaatcattgtttttttcttgaacaaaataaaatcatgtttagttttgagatttctttgatattttgagttttggaatgttgccatacaataaaacataaattatgattgttgaacatttatggacggggacggacctacataggaaggggattattcctaaaaaaaaaatatatttggaggggttttttatttattttttattttttacacttttaaaaacttttttttttttttttg

SEQ ID NO: 278956 - DNA, 553 bp, Cannabis indica
agaactgaatccagactcatattgggattggaacttgggactccgacccaacctagaccaagacctaggacgcgaacccacattcggagcctgatctggacctacaatgaaatccggatctgaaccctaactcagacttggattcgaactccgacccgaactcaaacccatacttgaagtcagaatcggaaatggaactagaaccgaactaggactaggaccaggaccaggacctaaacccaaacccgaacccagatcaaaacccaaacggagacctaaacccgaaccgagactcgaacccgaacctataccgggacccaaacccacacaatatctgggacctagacccagaatcaggatagggacctgggaaatagaactaggaccgggtaggggtgtacgtcaaaccgctcaaaccactcaaaccgcccgcactgcaccacactgcaaaaaaaaaatggggtttgaaattcttcgcggtgcggttgcggtttgaatttttcccaaaccgcgcggtgcggtatggtttgcggttttgaattattaaaccgcg

SEQ ID NO: 278957 - DNA, 400 bp, Cannabis indica
taaaatgataaacattctagcaaacttttattcgatcaagataagaatttagcgttgtccgatttaggcgagagtcaagactattctatcttatgagcttccaccattgtttcatacttttgtaagccctattaaattcgcaactattaggtgatccatactaaaataaacacttacaaaaagtacttatctttcgagattctacggcgttaaattgctaatgaacgttcctccattagggaggattactcactaaaacaataactatgtaaaaccaacaatggagatcgaatatcctaataataataaagctcattatttaaaatgtattttcttctaatatttattttatctatttattttagatatatatttatttaattaaaatttccaatttaga

SEQ ID NO: 278958 - DNA, 708 bp, Cannabis indica
ggtcccctacttggaactcaacatctctgcatttcggatctgcataacttttctcactctactctgagaggcaagcattctagctttaattttctcaattgcctcattggtccgctgcactgattctggacctaggtactttctctcccctatctcatcccagtggatgggagacctacacttcctaccgtataacaactcatagggagccatccctatcgtactttgataactgttgttgtatgaaaattctatcaacggtagatatttactccaagagccttcaaaatccataacataggctcgtaacatgtcctccaatatctgaatcgtcctttcggactgcccatctgtctgaggatggaatgctgtactgaattttagtttcgtacccattgctcgttgcaaactctgccaaaacttggaggtgaacttcggatctctatccgaaactatagacttcggtaccccgtgaagccttactatctctttaacatacaattctgccaactggtccactgagtaggttgttctaacaggcagaaaatgagcagacttcgtgaatcgatccaccacaacccagatggagtcgaacaaacccgtggttctaggtaacccaaccacgaagtccatcgtgatatcctcccacttccattcaggtagggttaaaggctgtaacaaccctgctggtctctgatgttcagcctt

SEQ ID NO: 278959 - DNA, 515 bp, Cannabis indica
acctaatgcgcctattgaagatagccaattccccgctaggcattagggtttcgaaccctctttcaagaaaatcatatggcctacccaaaagatcaattacccgtgtcgccacatatgagtgtgtaggtcctgaatcaaataacacagtataaaagaagttgttgacaggaagctgacctgtcaccacaaaaggactggctgcatcatcagcttgagtgatggcaaacacccgagcaggtacgggttttgcctctggcttatgctcttctttctttgcctaagggcaatctttcttgaaatgtcccaccatgccgcactgaaagcatgtcttccggttgcactcactcggatgatgtttcttacaacgtgggcactaagggtaagagtaaccctgacgtccacctctgccttcgttcccacggaaccgcttactctgtcccgagccaccaaatgtcggggtaacttttcttttttgatcagtggtggaatcaccaccatccctaccataaacagga

SEQ ID NO: 278960 - DNA, 834 bp, Cannabis indica
tatcaatctacgacacgagccgataacagtttatataccacatgtgtctacgttctcgaaggcactcctctctttcaagaggattcgcggcatgtcaagctttagtaaggttcttcgctttacatcgaattaaatcacatgttccaccgttttggtggcctttatcaatttctttgagtttcattattgcgaacgttactactggcaagatacttaatgtgtttatttatttctttgaactaagataaatatgttttatttagttttctcttaagaggtaaattttgcattatcatattttttttaacgttttaaatctattattcgcattatatatatttgtttaaaacttataaccaaaaattattaacaaaatgaaacaattaataattcaatcagcaacaactttaccatggaagccaaggacgaacatattttttgcatccattactaaaacaaaataatcttatagtatatacatttggtattaataataatatcaaaatctaataaaaaaaaaatgtaattgatattagcaatattgccatttacaataatagagtgagagattgaaaaaaaataatgaaattagcaattcatatatacatgaattggcaaatatttcgttttcttttttctttgaatatacaaaataataatgtaaaaaatgaatcaaaaatacttttatcaacattgctacttacaacaaaatacttttatagttcttgttttttctttttctctattaatttcaataagggctcgtttgaaacgtcgtattaggtcgtattgtattgtattatattgaattatattttatactaatatttttat

SEQ ID NO: 278961 - DNA, 132 bp, Cannabis indica
gctaacataaatatggaatctgtagcttctatctggtgaatagaaagtaaaggatgatgtgttacggtaatttaatccctgtacagtgtaaatcatctatatagaggatcattgatcacattagggatataa

SEQ ID NO: 278962 - DNA, 539 bp, Cannabis indica
aagagtatccttatttttctttttttacaactttttacatgtgttatcttcacctatcaacaattttaatttacaaattaaatttttagtatttttttttattcaactcaaatttaaattctgtatgctttatttttttgaacattgatttttggtttagttttggattaacttaagatcaaattgcaattagattatcaaaatttcttaaactttcatatattgtatttagtatttacttttaattattaacaacattatttacattaattgaatatacatattaatgatctcaattacaataattaataatatttttttaattatttattgtattatttttaaataaaacaagacacacctaacataaaacttatatacaaggcacgtagcattctactagtatatatatataaatatatatatatatatatatatatctaattttgaagtttgtaaaaaaaaaataactagtgccactttttttacattttatttgtggacattcaaaaaaactagtttttgttctcaagaagtta

SEQ ID NO: 278963 - DNA, 497 bp, Cannabis indica
tttatttttaattttcccctaaaatataaaagtaataagtaaaaaaaattaataaaacctaaaaaaataaataaaacaaattaatataacaaattaattaaacaaattaatctaaaacctgaaaacatttcaaaaaaaaaaacttcattttagaactaaaaaccaacaaactgagaacacgaaatcgaggccctgtccacacccaaaccctaatcacgaattcgaacctaaatccctcaaaatcgaaggcgaacactgtgtatgcattaaaatccagtcgattttgtgaatattgaccccattcgaagagcattcctaagctaaatccctaaaggttgaagatacagcaaaggaggtccccaaaaaacagtcgtataatggaggacgacgatggtgaaggtacaatcccatttttcatttccttgcttattcatagtttattatgtaatttgagtgaataaaaatggtttgcagtaaattttttgtctatggtttta

SEQ ID NO: 278964 - DNA, 735 bp, Cannabis indica
tgggtgttctcctcgagtgttgccgcaagaatgcggcattttgcaagctgtggtacctgatccacctccattatagtattgaatttttcaagataatctatagggttagaagtacctttatactttagggattcggatagacgaaaccccttgggaagttgagcttgtcgcacttctgtagtgaagggcgaggtaccatgcaactatgggcttccttgctgctcgagcattttcaaagcctgcagaagcatgctctggtcaatccctccagtcgcaggagtcggggctgctacgactgcgggagttgcaactactgtggcgagatttgctgggacattgatcccagtggtcgcgatcggtgcggtaggcgggttattgtaagtgttgacaccctgatcgtccgcatggggatcacggagtgtctccgtattatgaggggcgcgagaacgcgctctaaaaactgcgttgaggtgatcaccccgatgtacctggtaatgtcctccctgttgcgtctgtacagagccggaccttgtatatctgcttggtgtatgaccatgcgatgacgaagaggttgattctgcgtcgttgtctcttgatggtcgactgtgaggattgcgtcgtttaggatcttcatcaacctgtgtgctttggtttggataccttgcggattgatccctcgatgttggatggttcaggtccaaaccttcagggttggttcttcgttccctgcgtaca

SEQ ID NO: 278965 - DNA, 630 bp, Cannabis indica
acacgttttaatttaaaaaaaaaagaaaattgttttaattaattaaataaattattaagaaataaattttctccaaaaaataaggtgacaccacacctgcccgctcggcacggtcggtcggacggcggcggcggcgcgcgcgcgcgtgtgtggtggtcgggtgtgtgagtcctcacccatgcgcgcaaaactgggtaccccttgggcccaaactcatatctcaaacttgcactagttatacacttcaaatgaaatgtttctatcccatgtgggactcctactcacacacatcattttttaacatttcacaaagttccaacaaagatggtgggtgaaaaatactgttaccgggatgtgttgtcgttctaggcgatgctgacaattaatggagtgaattaacgttggactaaacaccctgttcttgtaatagtatgagagagagagagatcaatattttttgggtttaagttttagtgacaaataagcttttctgtttggaataattatataagacaccatttttttgtaaaataattacatttttacattcaaagaatgtttttttttacatttttacgattttccaaaaattaacacgaaaacaacttaaaatcaataagaaaacaacat

SEQ ID NO: 278966 - DNA, 723 bp, Cannabis indica
gttagtttttatgttaaaaaaaacgttaaaaaaaaaaaaaagccacccaatataacaaaaaaaatattaaaatttgggatatacggtttgttagagagatatgtggctaatatgattttttttaatttaaaaaaagattgtttaattttttggttttaattattgggtttatttgttaacgggagatcaaactattaacatcgttaaatttaacagaattttttaaggtatattctgttaaaccaagaaatgccgttaaataggcacttttaatatataaagatacataaataagatataagctaagaatatatacgtaaattatgcatatataaagaaaaaatatatatatatatggtacgctgtattacacagtattgtattgtataatattatattaaagagaaatttgcggtgaaacctccttatgttttaatttttatatactaaactcctttatttctttttttttttttttttgtggtcaaaactcccttatgttttagtttttatacacttaatcctcttttttttttttttttttgttggtcaaaacccccttatgttttaatttttatacacttaacctctttatcttttattttggtagcaaaacccccttaacgtttacttttctttactaaatttaaagttttagttagatattaccgttaataataactggattactactgtatcgacttcgaaattttactgttacag

SEQ ID NO: 278967 - DNA, 178 bp, Cannabis indica
atcactaaggttcgaaattatgaagaggaaaagagagaggtatagggtcggctatagagagagaagtggaaggctcagtttttctgaaaaaggcaatttctgattttctgacaaaaagcttgttaaacttgatatttgactgagccatcactttctatttataggaaactactaggtt

SEQ ID NO: 278968 - DNA, 876 bp, Cannabis indica
acctcgaccagaaacttgcctatcttgtgaactccactcagaaggaagttcacctgttactaagtagttaactatgtgtgcataccacggtaacttagtaacagcaagcagttgttcatcggggaaatcatcacgaataggtggatcatcagcagaatcactaaattcaagtcgagacaagtgatctgcgacgacattctcaacacctttcttgtctttgattgtgatgtcaaattcttgcaatagaaggatccaccgtattaagcgcgccttagtatcctttttggaaaggaggtacttaagggcagaatgatctgtgaagatcgtaataggtgaaccaatcaagtaagctcgaaatttgtcaagagcaaagacaacagcaagcaactctttttcagtagtggaatagttcatttgagcactattaagagttcgacttgcataatagacaacaaaaggtttcccctcccttcgttgtcccaaaacagctccaacagcaaaattacttgcatcacacatgatttcaaaaggcaaattccaatcaggtgactgtatgatgggagcggacgttaattttgcaacaagtgttcggaatgcatcctcacacttttgtgtccactcaaaattagcatctttggctaggaggttgcacagtggacgagaaatcattgaaaagttttggatgaacctcctataaaaaccagcatgcccaagaaaagatctaacatctttgacagtctttggagtgggcaaattagaaatgagatcaatcttagactgatctacctcaatccctctttcggagacaatgtgtcccaagactatgcctgaagataccatgaaatggcatttctcccaattgagtacaagaccttt

SEQ ID NO: 278969 - DNA, 575 bp, Cannabis indica
gcggctcgcggattgggggctcgtcgatctgaaaccgtggttggggcgaagaaagagaaggtttagggcaaaccgtggttggggcgtgagtcgagagggtgagccatctgatggatttaagagagaggagtttttattttaaatggtatttcctaagtcctgacctttttaaaccgtcggtcaaagtatgggccacgatttaaaaccgtggctaatactttgcccgacggttttaaaccgtcgggaatagattttttttctacatttattaaccgttgcctaagttatacgagtgttaaaaactgtcgcctatagtacactataggcgacgatttttaacacttagataaattttttagcgacgggtcctcaaaaaaagtgtttctaggaccgtcgcgaagtttgtcttttgtagtagtgaattgagtgggagcgctaaatatagatatggaatctatagcttctatcaggatatagaagtgaaacgataatttccttcgagcttggcttaatagagataaatggaagagctcttgcttcagtggattatattagctcactgaaatataatttat

SEQ ID NO: 278970 - DNA, 680 bp, Cannabis indica
ttcttgtgtttttagggttccatctctctcccctctataattcgcgaccccttttcctttaaatagattttttcaggccaaaaatgagaaaagacaaagttatccttgacctatacgaagtcgacgccgcggcgggcaatatccttaccgcggcggctgtagaaaagtgaaaaaataggctttctgtagtcccccgccgcggcggccaaaagtcccgccgcgaccactggacccaattttttttgcttcgatctcttttagtaaaatgggcataactttctcataagaactccaaatgagctgattcaagatgcattggaaagataaagaaggagatctaaaatttttatgtttagactttgtccaaaatctgattagaacatagtcgaatttaggcttgaagtttcagcttttttctctttcaaaattttttctattttataaatcactgttttccgaaatttgtccaatttatgcattccaagtgtccaaacctgaaatcaaagaaaactagcgtaattctattccaaaaataataataaagaagaaaaacaactataaaatatgacctgaaacttaggctaaaaatagcctaacaaattcccccaaactacatctttactcgccctcgagtaagactaaaaactaagaaaaaaaatacaaactaacacataattaac

SEQ ID NO: 278971 - DNA, 469 bp, Cannabis indica
gttgtcggctgttcatgacgtatttcatatttctatattgagaaaatacgtgtcagacccgactcatatcttgagttatgaagcccttgaactgcaatcagatatgaagagcaacctgttcagatccttgataggaaagaaaaaagttcttcggaacaagactattaccttggttaaggtgctctggaggaatagtaaggttgaagaagccacctgggagttggagtctgacatgaggactcaacatccagagctattcaggttagatttcgaggacgaaatccttttaacgggggataattgtaatgaccgctttagttatttagattagtaaaggcaattagcaataatttctgttactctcgtgattatttatgaaattaattatttgtggaccccaatatttagaaatgagtattagagttataatttctcaattccgaagattttattaaactctaggggtatt

SEQ ID NO: 278972 - DNA, 914 bp, Cannabis indica
ttatactaatcttacctcgactccgaattcaggtgtgccggtcaacctgagtggaacgaactgctcggcgaattacaggctcctaaaccatagtaatcacaacactgataagtgacacgctaaatcacttcccggggacttaaactagaaacttaaagttttcctatcgataaaaagcatggcaataccctaaacaacacaaaaatgggaagaactaagattcccaaatttttcccaaccggaattccggttctgggaggaacccaggacaccaaccagaattctgattcctaaaggccaaactgaaccagaattccggttcagtgcaggaaaaaatttcatttctcaaccaaatcaacccgaaacttcatgcaaccttccagaccagctctaaataccccaaataacataacccaagtaataaaaccaagcttcatacacagaaatgcatttcaccattaaaggttcaagattgagttcaaaaactcaaaacttgactaacccctcaaacagccactaattcatgcataaatcaacctattccaacataatttaactccagaaaacacaattaaacaacaacaacaactacaacaacaaaattcatcattttaccttgaaaaccaaagttttgggttcaaaactccatactaagttaaaattaacaaaccacaacaaaatcttgcttgaatcaacatattaaaacataattaagcttcagaaatcactaacaaaccaaaacaacagccacagccacaaattctcaagcatgcaataattcattttttcttaaacttcaagaaaacaaagaaaagcttgaacaaaggttacctcctgtaaagcccgcttagtttaatttggaaattagcagttaattatgaaaattatttatagctatttaaataatttatgat

SEQ ID NO: 278973 - DNA, 782 bp, Cannabis indica
aggtgtcctaagatgagctcaacgagaacagaaatctcgtgtggaacaaaaagggtaaaagactcgtttgattctgatttccagtacgaatacgaaccgtgaaagcgtggcctatcgatcctttagaccttcggaatttgaagctagaggtgtcagaaaagttaccacagggataactggcttgtggcagccaagcgttcatagcgacgttgctttttgatccttcgatgtcggctcttcctatcattgtgaagcagaattcaccaagtgttggattgttcacccaccaatagggaacgtgagctgggtttagaccgtcgtgagacaggttagttttaccctactgatgacagtgtcgcaatagtaattcaacctagtacgagaggaaccgttgattcgcacaattggtcatcgcgcttggttgaaaagccagtggcgcgaagctaccgtgcgctggattatgactgaacgcctctaagtcagaatccgggctagaaacgacgcatgcgcccgccgtccgtttgccgacctgcagtaggggcttcggcccccaaaggcacgtgtcgttggtgaagctcgcacagcggacaagttgtgcgggccgccttgaagtacaattcctaccgaacggcgggtagaatcctttgcagacgacttaagtacgcgacggggtattgtaagtggcagagtggccttgctgccacgatccactgagattcagccctgtgtcgctcagattcgtccctcccccttttttataacaacacactttcaaggcctga

SEQ ID NO: 278974 - DNA, 579 bp, Cannabis indica
caaaaattaaaatacataaattaaaataaaaattaaacatataactaagtatacgtacagtgcacgtaacttctacctagtatatatatatatatatatctttatatattaaaagtgcctatctaacggcatttcttggtttaacagaatataccttaaaaataaaagaatattctgttaaatttaacgatgttaataggtttgatctcccgttaacaaataaacccaaaaaaattaagcaatctttttttaaattaaaaaaaatcatcttagccacatatctttttaacaaaccgtatatccctaaattttgatattttttcaattaatcgtgtaagattttaaatttcaaaaaatttaaaaataaactcaataattaaaccaaaaaaattaaacaatttttttttttttaaattaaaaaaatcatcttagccacataatcgtatatctcttgatatttttttgttattttttttttaaatttacgcgacaataaaaatcgtatatccctgatggtcagttatttgttcatataaaaaatattttaataaatatcatatactataaatatatatatat

SEQ ID NO: 278975 - DNA, 644 bp, Cannabis indica
gccatgtcagctagggagttactgcatggcggttgtttagggtttctggccgtggtgatggacaccactcggccagataccattcggccagaggacatcaaggtggttcgggaatttctagatgtttttcccgaagaacttccaggtttaccacctcagcgggagattgattttgttatagatttggcacccggagtggaaccggtttccaaggctccgtatagaatggctccagctgagcttaaagaattaaagattcagcttcaagggttacttgacatagggtttatccggcctagtgtgtcaccctggggagctccggttttattcgtcaagaagaaagatggaactatgagaatgtgcatcgactatcgagagttaaacaagctaacagtgaagaataaatatccactacctaggatcgatgatctttttgatcaacttcaggggaagacggtcttttccaagattgatctccgatcgggttatcatcagttgaaaatccgagaggacattccgaagacggctttccgtactaggtatggacattacgaattcttggttatgtcgtttggactaaccaatgctcctgcagcatttatggatttgatgaatagagtattcaaggatttcctcgatatctg

SEQ ID NO: 278976 - DNA, 795 bp, Cannabis indica
tcgttgaggctgctaaggaactattctggcttagaaagttcctctcaggacttggtgttgttcctggaatggaaaaaccacttgtttagcttagtgataacactggagctatagccaacaataaagagcctcaaagtcacaagagaagcaaacacatagagaggaaatatcatatcatcaaggaatatgtggcaagaggggatgtactggtggagaaagtggatgccgaagataacttagctaatatatttaccaaagttttaactataactacatttgaaaagcatagactgaatttaggattaattaaaatgtactgatagttctatattagtacaagtgggagtttgttgggctttgtgccctaaataaaactatatttgaatgtaatcttttcgattcaattattaatgaagaaactgttatacccgaaattcggctaccatctcagtgggggacacatgtcaggataaaaggaatatggattgatggagtcgctttttatggaataactcattaattacgtaagtattagagtatatttgtaacctgctagctgtaaggtcttatgcgagggatcaatatatattagcgagaaaccatatgtcactaaatgcgaatagcgaggcatcaaagtcaattacatctaggaaagcaaaaaagtgacacatatcaactgcgaaaagccctagtgtataatgtacaaaactcaagtgtaacagtcggttggctcgagacctagtaattcacccagttaaacttcagacattttctcagtgagacttacaatcctga

SEQ ID NO: 278977 - DNA, 684 bp, Cannabis indica
tactaatcttacctcaattccgaattcaggtgtgcgggtcaacctgagtggaacgaactgcacgacgatttacaggctcctaaaccataacaaccacaacactagataagtgatacgctaaatcacttcccggggagttaaactagaagctaaaagttttcctatcgataaaaagcatggcaataccctaaacaacataaaaacgggaaaaactagggttcccaaaatcccccaaccggcagaccagttgtgcaaccgaaattccagttctgggaatcctggaacaccatccggaattccagttgcacaaccggaattccggttcctagcaggaaacacacaaaattccataactcactcacatcaaatccaattcataccaaaccttccagacctgctatttagacccaaaagaacatttttaaagcatcaaaacccccaagaaaccacagatatgaaaaatgccatgtgagctccaagctttgagttcaaaactcaaacttggctaaagctcacctacaagcatcaaaacttgatttaaactacataatcatgcatataaaaactgcagaaaacgaactcaagcacagacaatctctacaacaactaattccacatttcactttgaaaaatcatagtttttgagctaaaattcaaaatgttgaacaacacaactaacatgca

SEQ ID NO: 278978 - DNA, 571 bp, Cannabis indica
ctactttctaatcatctcttggtttcgggcagaaagtcatattcatgtgttatgtgtacgttaaatttttgttaataggacagggaagagagtatagtcttacagaacttgaaatgtgaacctgagttgtcagtatatacataaacctcaattttggcttctttaaccagctgccacacacaagttacttactctgaatttataaccatttacaattttttaacactcaaaaagttaccgagtttgttttctatagctctacttattaaggtagaaaaatatttttagattgactcctctattccgtttattaaatgaattattttcaagttgacacattaacttaaaaatgacacaataatgacctactacaaagtatacacttatattcattctatttattgagaatcaaaacttcaatcttcttcactagattagccagacacacacaatatttggacataaacacaggacacaatattataactcaaactcagaaacacttagtcgaaacttgaatgaataatgccactcttttaagttttaagactgtatatgactaggcaatttt

SEQ ID NO: 278979 - DNA, 470 bp, Cannabis indica
ttaagagactctacatgtctaattaataattaaattaaatgacaatattatttaataatctattttaaatagaaataaaattgtgaaaaattgcaaaatccaagtgcggcccaaaaacacctgtggccggcaacttaagcagatatttccaattgatattttcattattttaatgcaaaataattgctaacctaaacctagtagttgcctataaatagaaagtggtggctcagttcaatatatgccttttggtcagaaaattagagattgccttttcagaaaaactgagccttccacttctctctctatagccgaccctatccctctctcttttcctcttctcaatttcaaaaccttagtgatagagtagtgcccacacacagcaagtggtacctcaatcatagattggaagactatgaaggatcacacacaaagagaaggacattcgggctcagatcttgataatactc

SEQ ID NO: 278980 - DNA, 645 bp, Cannabis indica
actcatgctcctcttctgattgagagtacacaaggatgtcgtcgataaacacaatcacacagatatcgaggaaatccttgaatactctattcatcaaatccataaatgctgcaggagcattggttagtccaaacgacataaccaggaattcgtaatgtccatacctagtacggaaagccgtcttcggaatgtcctcctctcggattttcaactgatgataacccgatcggagatcaatcttggaaaagaccgtcttcccctgaagttgatcgaacagatcatcgatcctaggtagtggatatttattcttcactgttagcttgtttaactcccgataatcgatgcacatcctcatagttccatctttcttcttgacgaacaaaaccggagctccccagggtgacacactaggccgaataaaccctatgtcaagcaacccctgaagctgaatctttaattccttaagttcagctggagccattctatacggagccttggaaaccggttccactcctggtgccaaatctataacgaaatcaatctcccgctgaggtggtaaccctggaagttcttcgggaaaaacatctagaaattcccgaaccaccttgatgtcctctggccgaatggtatctggccgagtggtgt

SEQ ID NO: 278981 - DNA, 533 bp, Cannabis indica
tatatagttgacggatatattatgaaagagatgaatacatatttatgtatatgttcttgtatcctttgaggacaatgaaaagtaatctaatatcgatatagattttgacaaacatttcctgaagtaatgttttatatttgtaaaaaaaaatgattgtatttatgtgaatacaactaaagaatcattaaaaatgattattattgatgcaattttatagtgggttttgaatacaaaaagaatgttaagaaaattgcattgaaacatcaaagtataagaataacaatgagcatgactaatgttatttaaatacatgaggcatgtatttattgttcatcattcagggaatgatacgaattgaattcaattacttttaaagattgttcgtattctataaattagtcatgttattatacattgttattacttgcaatatttatattggaaattattgcatgtgacatatattaaagatcaaattttgcatacatcttggagactatgcaaaaactgcattcatatattctttgaaatat

SEQ ID NO: 278982 - DNA, 624 bp, Cannabis indica
tctcaaggggcatataatcgcatatatgaccattagaatactgagatacacccaccatttggaacggcgattgataccctcgcaactcaacccacggtatataaaaatcctaaaagatctagctatcaatcaaaagaaagtaaatcttggcaatacgcgagtattcaaattgttcatctgaataccagcgaatattcgagttgttcatctgaatacccgcgagtattcaagacgtgaaacagtgcctatacaagtatatcgtgtgcggttatgtcagtttacaggtcatattctatgaatttacccaggttttttacctaaaacacatagcctcataaacataccccatacaagcatacattcctaaaaactcctcaaaaataccaaaacccagaaagtaaagcattttttctccaaacagaaaacgaaaatgcaatgatttgaaactaacctttagttttggtttctgcgattgctctcgatcacttctgagattgagaatattgtagaaagagtggtagaaatctgggcaaagaatgaaagtgggttttgagtctctgtaaaggagggaaggaggaagttaagaacaagagggaaaaatggaagttttgattcgtatcaaag

SEQ ID NO: 278983 - DNA, 435 bp, Cannabis indica
aaataggtagagagaagatggctcaaaattttactaaaggaaagtgtttgcatcatcttttcctttgaggtcatcactacctatttataagaaaccacctagggttagcttagatttattttgcattaaaataatgaaaaataaaatggtaaattgctcctcagtggccggccaaggatattgggccccactttataattttgccattttttccaattattcatcttattttctcaaaaataccattttttcaatttaaccacttaaatgccaaatctaattatttaataattaaaattaattattaaataaaattgccatttaatatatttattaattagagttaataaagtctcttaattaacaaataaaccctagaatctcttttgttcacaattaagccctcgcttagtaaaaattcacaaactagacata

SEQ ID NO: 278984 - DNA, 778 bp, Cannabis indica
ctaaaggttttaggcaaaaggagggtattgattattttgatacttatgctcctgttgctagaacaactaccataagggtgttgtttgcattggcttcattacacaacttgtatgttcatcaaatggatgtaaaacggcattcctaaatggtgaccttgatgaggaggtctatatggaacaacccgaggggtttgtcctaccaaacaatgaacataaagtgtgtaagttgaagaaatccttatatggattaaagcaagctccgaaacaatggcatgtcaagtttgacaatgctattctttcaaatggctttaggcataacaatggagacaagtgtttgtattcaaaaacttgtaaaaattatgtgataattgtttgcttatatgtggatgacatgttaatccttagtgataacatgaaaggaatagaagaaactaagaggtttctttcttcaacctttaaaatgaaagaccttggagaagtggatactattttgggtatcaaagttacaaggcatagtgggggttttgctttagggcaagcacactatattgagaaagtgttgaataagtttagccatctaaaggctaaagaggccaacacaccattcgatcatagtaaaccactagttaaaaatagtggtagagcagtggctcagttggagtatgcaagtgttatagggagctttatgtacgctgccaatgtacaaggcccgatatatcatttgcggtgagtaaacttagtaggtttactagtaatccaagtgtggatcattggaagg

SEQ ID NO: 278985 - DNA, 611 bp, Cannabis indica
tattgactacaaagtaatgccgtttggtctaaaaaacgctggagctacgtaccaaagattggtaaacaaaatgtttaaagagtagatcgggggaaatatggaagtgtacgtggatgatatgctcatcaaatccaaaaaggctgggggacacatagacgacctggacaaatgcttcaaagtcctcagaaaatacaatatgaaacaaaatcccttaaagtgttcctttagagtctgctcgggaaagtttctaggcttcatcgtcaatccccgaggaattgaagctaatccagacaagattcaagccctcctggatatgaactcgccaaaaaaaccaaagaagtgcaaagcttaactggtcggatcgccgcgctctgcatattcgtttaaaaatcaatagacaagtgtgtcccattcttcaacatcatgtgaggaaacaagcagttcaagtggacagaagagtgtgaaaaagcttttcaagagctaaaagcacaacttgcaaaacctctcgtactctcaaaacctttggacggtgaggaacagggaatatacttagctgtcacggaacatgccgtgagtgccatactaataagagaagagaatagcgtacaaca

SEQ ID NO: 278986 - DNA, 580 bp, Cannabis indica
ttccattgcgtcaactccagccatgtactcttaacacaattccacagcctcttcagatatgtagcactcaaccatacatgcttctggccgatagtggttacgcacataacttttaagtaccttcatatttctttcaaatggatacatccatctcgcccacaccggcccacacagccttgcttctctcactagatgaaccattaaatggatcatgatgtcgaaaaaagatggcggaaaaaacttttccaggttgcacaatgttttgactacatgttcatgtaatgcatctaacttatccaattctaattccttcccgcacagcctattaaagaaaatgcaaacatgtgtcaaacactctcgaacattttttggcaagactgatctaatggcaattggaagtagatgttgcattaacgcatgacaatcatgtgatttcagacccattagtttcaattcagtctcattcaccaagtttttgatgttagacgagtaaccatcgggtactttcatatttgcaagtgatttgcaaactgtttgtttctcttttttggacaaagtgaaacaagcaggaggcaaatat

SEQ ID NO: 278987 - DNA, 513 bp, Cannabis indica
caataccgataaggaattgtaagggatcgataaaaacaaatgatggaaattagatatgattaacgaagggatgaaagtaggaaatacaattaggaacgacaatgacgcatctactttcagataacacaccatgaacttaccatagagttaatcatacttaacttagagtaatctcaagatgagaaatcttttggggagtcatctcgaaaagcgtatgagagagaataaagtatgttggaaagattcatattaggaagtagaatcattagtcgttctagaaattatcaagaggaaggaatgggttaataagtaaagatttacaaggtatcgagatgagtataatattagttgatggaagtaagaaatgctataattgaatatctattagaaataaatatttagcttgttaataagttaaatcagtacatcagcttaggagatcccataagaggaatagaaagacataattataaattatgtactgtgggatcttatgatttcgaccgagtaata

SEQ ID NO: 278988 - DNA, 283 bp, Cannabis indica
ccgaagcttctcacggaatgggtaaggatccctccgtacgaacggaccgcgcctactcagctctccctccaacgggccaagaccttcgccacttatgataggaaggatctcgacgtcgggggatttgtcacgatggagaattgtcggaaggccaggctaatcctagggcctcagtcggtggaggaactccaacctttccaaggttaactgcccgaacgtaagggttccggccccacgagaagaccttccgggacgtgagatcattgttggaaagttaatttta

SEQ ID NO: 278989 - DNA, 612 bp, Cannabis indica
atgtactagttagaaatgagaaatgatggatgctaggtattattttggtattttattgacttattaaatctatctatttggtgattacataactgtggggatattactgttcttttatattgatgagtggtcctgattttattactaatattttcttattaatataggagttaatccatatcttttaaattagtattttgtaatataaataaaaggatcatttataagctttattttcctacaagggtcaaagtgtgacctttgaccacccaagttatggatattacacatctgccacagcctagggctcgggcgtgacagaaaaatggtatcagagcaccgggtttaattacctcggagtgtgtcaccaaatagtttagatttattttaaataataatagtaataaatatcttggtatttatatgtataaggcatatttatattattagcatccaatcctcactaactgattagcttttggttctcagacctaagaaaatgcctccaaaaggaaagaagacaaggagaacggttggagaagacgcccctcaagctaatgtccaacctccacaagctgaattccctatgaacgcccttctcgaagccttaag

SEQ ID NO: 278990 - DNA, 908 bp, Cannabis indica
gagttttatatgtttatttatgttagtattggctgaaatgaagttgttatgtgattagtagcttttatttcatttttacaaaaaattagaaagttagaaaaattcaaaggaaaaaccattttctctctagtctctctctccctttcggcctctttgagcagcaagaaaccagcctattcccttggtgattcaagctctctttagtcaaattttgtgatctcttgttgttggtatgttctctctagctctcctttaagttttcttgaaatttttgatgaaaatgaagtgttgttgcatgcttgtttttgttgttcttgctgctgtggtttatggtgatttacagaggtttaatcttgttgttttaagtagattagagctagtgtaatgcatgttaattgctttgatttcaagcttggaagtttttaactcaaaactatggttttcaaagagaaatggttaaaatctgttgctgtgatttcgttgatgtttgtagtagttttcagaggatattttatgcatgtttaagtaggtttggactggtttgattgtgtaacgccctaatgctaaggcacgctacagtgctttttcaattattgtgcaatctttcttaatcaaagaaatttcttgaaaaacgtgtcaaattaaaacttttactttaaatactaaactttgtaatataatataatatttacaaattccgggatcccgttttcaaactttgtaaaatatacttttcaaactatacatttcaaaatacataattttcaggtcgcacagcgactttcaaaatacaactcccagatgtcccgagaccgaacactccaggtcgcgctgcttgacatgtacaatctcacccgagctcaggttcattcttgttcagccttcgcctttcctttacctacacaaaa

SEQ ID NO: 278991 - DNA, 487 bp, Cannabis indica
cgtacgatcctcgggacagcaagactatttttgtaattaatcgctaggcgacaagtattttgattagtcagtaaacttttgtaaagtgttttgtaatcggcatcccgagtattttgtataaatattttataagtttaattaaaaagcaaaaattttaattaatcacgatttccataaacctcgttgattagcaacgagctgcacagtatgtttaaaaatcacgtaatacgcatatgctagttagggtgttacacaaatggatctgcagggagtaagaggtgatgtatgttgtagaatttttcctgctactctctcagaagccgcccagcaatggtatttcaaggtggcccctggaaagttcaactcatggaaagccttttcctcggaattccatgcgcagttctcctcctctcgccaacttccgttgcatttaggagacctggtcgaagtcaagcaaagaccaggtgagcctctccgagcatacatc

SEQ ID NO: 278992 - DNA, 499 bp, Cannabis indica
tttttgataacttttttttaatataatcaacttgaaaacaattcctaatacgaacagatacataaaatgtaaacaattttgtcataacacttttagatcggattataattaagttttattttaacaaaaaatcaatttagggtcctatttgtaccattttagaaaatacagggtctattttgtcatttaacaatacagagggtccaattgataacttttgcaaaacacatggtccaaaatagtatttaccccttacatcgcaatagtaatagggttatgtctactttaatttattatttctcatgagatggtgattacaacaatggactaagtatcagaaactctaaactctagagagagaatgtctagagagagaagctctgatcttatgagtagttttctgaatgtaaataatgagctaagggagctctccttttataggtgaaggaggcccacaaaaatatgaaaaaaaatacaaataagatattttgaccgttga

SEQ ID NO: 278993 - DNA, 123 bp, Cannabis indica
atctccttcgagcttgaccaacgaaatatatggtggagatctcattattaaatacattgtaggtgtaacggtaatctaatcctttacagtgtagatcattcatatggaggatcattgatcaaa

SEQ ID NO: 278994 - DNA, 633 bp, Cannabis indica
ctttagttttcttgaaaatttgatgaaaaatgagtaaatgcatggatgatttgaagatgttgctgctgcttgttgctgctgttgtttctatgttttaaatgttgatttaagtatgtttaattaggttgaattgcatgctagttattcttgttctagttggataggtttcttgttaaaaagtttggttttcaaagagaaattgtgtgaatttgtggctgtagtgtttgcatgaattagggttagttttctgcagtgttattatgcttgaatatgagtttgaatcatagtttggatgcatgttagttgttattaaccaagtttgagtttggaactcaaagcttgggctttaatggtgattttcatttctgtacattctgggtggatttgatgctttagaaatgttccaggggatatttagaacaggtctggaaggtttgaggttgtttggatgagatttgagcattgtgtgaatttttgaagttctgcctgcgaggaaccgaaattctggttgtgcatccggaattccggatggggttctgaaaattcccagaactagaattctggttgggcaaccagtctaccggttgggtgattttcagaaaccctagttctcctcgttttttcgttatttgg

SEQ ID NO: 278995 - DNA, 710 bp, Cannabis indica
tgactttttttttattaaagcgtttatatattacattgcataatttgggactcgaacccaggacctccaacacacaccctcctatagccacttgagggtaattggctgacttgaatgctattacttatatccccaacccctagggcacattatgtatgcaatatgatcgtattattagttgtccacccaatcagttctgtaaatagtggtggttttaatggtttggttacatcgcatcgcatttttaatttggcatttgttagattgaacaatttaatgaatttttttctgtcatttttgtatataacttggtcttgattcgttgtgttccagtgttgtgcacatatttgattgttcgaattataatcttgtttgagttggttgtgcacatatgttgtaagcaatgatttgcgatgagcctgtaaatcccagctagcaaattctgcattatctttgaagccacttgtgtacatggttatgatctgaaatcacttaggagtagggatgcacacggggcggggaattggcggggagtgctctcccgtccccatccccgttaagaattttaatccccatccccacttattccccatcggggatggggcggggaatcccctaatggggcggggacggggcggggaatcccctaataataaaataaagtttataatgaaatttttaatatacaaaaatattaaactacataaaaa

SEQ ID NO: 278996 - DNA, 537 bp, Cannabis indica
aaaaaatagaaacaaataattaagtatcgtaaataaaattaacttaattattaattctaatttaatgtctaagaaaaatattctaatttatgttggtctaacattaattgataaattaattttcaacttaaatatattttactatttaattaaatttctagaaatagaaataaataattaagtatcttgaataaaatcaacttaattattaattctaatttaagttttaagaaaaatattctaatttaaattagtctaaaattaattttcagcttaaatatattttactatttaattaaatattagaaaatataaattagttaccaaaaattactatctagaattatttcttcaaactacatgtgtttttctcaattaattttaaaataatctaataaaaaattaatttcttttatttcaaaattaattacgttgctaattcaattttaatcaggttaaactaatataattagcctaatacaattatttacataaggcaaatgggctttcacaattggggttgttcatatgagggag

SEQ ID NO: 278997 - DNA, 146 bp, Cannabis indica
gaaaaaatcattaatatgggctaattaaatttttatcccatctgtaccaatttatgcccctaaactttgaagaccattaaaatttctccctgaattattgaaattgttggatttaaagacttttgtctaattttagtaacaaaagt

SEQ ID NO: 278998 - DNA, 598 bp, Cannabis indica
ataaagctttttgggccatgaagactcttaacatggaactaaaagctgcaggggagaaaagactgttacagctgaatgagctagaggagtttcgaaacgaagcctatgaaaacgcaaaaatatacaaggagagaactaagaagtggcacgatcaaggtctagtacggaaggagtttcaaccagggcagcaagtgttactctttaattcaaggctgaaactgtttcctggaaagttgaagtcaaggtggtcaggaccattcacggtggtcaaggtgtttccttatggagcggtggagttaaaaggtgaaagtccagcaactttcaaagttaatggacagcgtttaaagctctacttgggaggtcaatttgaccaagccaagtccgccatgatcctggcgccactttgaagtacaaggctcagcgtccagctgtatgacgataaagacagcgctcttgggaggcaacccaagtgtttttctttaatttttcagactttttgattatgtttttagtatgctttagtatttttagtattttcaatttttagattagtaccagacattatttctttttaattgaatcgtgaaaagcgtgaaaa

SEQ ID NO: 278999 - DNA, 553 bp, Cannabis indica
taataaaataataataataataataataataataataataataataataataataataataataataataaataaataaataaactattcaaatctcattaattttctagtcaacatttggttagttttacaactattagtattatcctaggtttaataaatataaatggtataagaaagcttgttttgttctatgggtggaaacattttcttgatgatcatgttaatttctcactttcttttttaaattaatattattggaaaattgcttcttgagacatataatttgttttctttttatgcttgtatttaaaatggaagattggatatagtcttattttttttagtatcacatgttaattatcatttaggttgaagattagcatgtatttattgagttgtgggaggtttttataagcaatcttgaatatggtgtgtgtatataatatatataaatatatctttatatattaaaagtgcctatttaacggcaattcttggtttaacgattcttggtttaacgatttctttttttttttaacgccaagagaac

SEQ ID NO: 279000 - DNA, 767 bp, Cannabis indica
cctgctgttgcatctacaagctgatcgattcttggtagtggaaaacagtctttagggcacaccttgttgaggtctgtgaaatcaatacagactcgccatttcttgttcggcttgggcactagtacgggatttgcaacccaagtcgggtaaaaagcttcaataatgaagttgttgttgcgcagcttttcaacttcatccttcagggctactgcgcgttctttgtccaatagcctttgtttttcttgaattggccagaagttgggatcgatattcagaacatgtgaaatgatagaaggatcgattccgaccatatccgcatgtgaccaagcaaaaacttctaggtttgctctcagaaattttatcaattctgattttacttcgagcaacaaaccttttccgatctttagctttctggtcgggatatctggatcgatttcgatctcttctaattcttctacaagtccaacattacttcgatttcgatttccgatcttacagactgctagtttcctcttagacaccctaccccattctttgttgggaacttcaggcacgagtgaaatattgatgtgacagcctttaagtcatacaaggtcggccggccaagcattacgttaaaagctgaaggaacatccaatattaggaactgtgccatgatagtcatgctcgtcagatcttgtccaacagtgaggggtagacaaatttgtcctaaaggtgcaactccttgaccaaagaaaccatagccaagctggaggcatggggttaga

SEQ ID NO: 279001 - DNA, 541 bp, Cannabis indica
gtgagaagggagttccgcgtgctcggtctaactccagatcattattacgttgtccagccatgtcgtgaaacatatttttcagttcgtcaagcggggcctgtacggctgggctgacctgcttggcattttggtcgatttggattacgtcagcgtctttctgagcggggatttgagtacgggctccaagctgcacgatcgtcacagtattttgctcgtctgttccccttcttctgtttagatcgttcttcaggtcatgggttgttcccaaccttctgaacacagaagagcccggttgccttagcgattgattcgcttggttgacgagtggaatggcaccattagtctagttggagacgtcaggtatgactcctcctgatgaatttctggacaaggtctgctcgcctaccgcttggcccacgagcggaactcgtggccggggattgggcggctgaccattagtagtccgggaagtcttcatcattgggtcctcttccgtttctcccagggcaatgacgttcggcgattgctgacctacaatttg

SEQ ID NO: 279002 - DNA, 646 bp, Cannabis indica
acccgaggtgaccactttcacctttggccagactgttgacgtgccccccgctcagacaaacgatcctcaagttcaagctgacccagaagacccgtataaagagcatgtgactctagccatttgaatactttctttatctctcttttttatctgtctggccataaggcctttctcaagacaaagtgactgaccaagcggtctttaaacttggaattatttttcatttttcagacaacgggttgactgggcagcctttaatcccagttttacatgcttttgttatctttaatgaatttcattctctgtttataattttcatgcaactgtgtttgttttatttttaccaaatgcttttacaggtataggttccccccaattgaccgagcagacttattactcttggtcacttatacgtttttgcaagtgtgctcttttgtcagtttggggctgtgggttcgaccaaccttttatatgcacttgatggtaaattgacagcatgctagtaaattcgactcaattttgaatttcgaaataacatctttattcatttattgatcgaaaatatatctgttaccgtagtaagttacatcaaaattattaatttgatctaatctaatcattaacttaacattaaataaaacaaatt

SEQ ID NO: 279003 - DNA, 558 bp, Cannabis indica
tctctctctctctctctctttcggttttgcttgggctgctagggctgggattttctctctgtaattcttgttatttcagctagttggtagtgatctcaagctaaggtatagttctttaaacttttcttgttgtgttcttgaattttaaggaagaaaatatttgcatgcttgatgattttgatagtgatagctgctgttagttgttgttgttgttgttgttgttttctatagcttaaatatgtttaattgagtggattggaataggttttgatgcatgctagttagttttaaccaagtttggattttttaactcaaaatcttgaatttcaatggtgaaatgttgaaatagcttgttgtgcttgttgtattagattgttgttcttttcagaggcttgtttatgcttagttgagtggattaaagcaggttttgatgcatgttagtgggatttaaccaagcttgagttttgaactcaaagcttggagctttaattgtagtttttgtaattttgcattaaactttgttttattgctttggataggttctttggggtctaaata

SEQ ID NO: 279004 - DNA, 913 bp, Cannabis indica
atcgaaatgattgacacttccccaaattggatgacaccgatagccgcctatctcaacactagggaactcccaaataatcggaatgaagctcgaaagatgagaaggaaggctacatggtatatcatagtagagtgaattatgtacagaagaggattctctatgccgctgctcagatgtgttactcaagaagaagctgcacgactcctatctaaggtgcacgacggattctgtggaattcatgccaccgggcagagtttatctaagaaaattctaaggcaaggttatttctggccaacaatgattgaagactcaaaggcctatgttaagaaatgtgacaaatgccagagattttcgaagatacctcgagctccacccaacgagttaactcagatgcaaagtccgtggcctttcgccatttggggaatcgatttgatcggacaattacctaaaggcaatgaggagtacagtatgcagtggtagcagttgattacatcactaagtggacggaggccgaaccactcgcaaccattacatcaaagaaagttcaagactttactatgaagaacataatctgccggttcggactgccgtacaaaatagtttcggataatggcaagcagttagacagccaatccttcactgatttttgtgcgaaccatggcattatcaaaagtttctccgcagtggcacatcctcaagcaaatggtcaagttaaagcaatcaacaaaaccttgaaggatacactaaagaaaagactcaaagatgcaaaaggaaattggccggaagaacttcccgaagttctatggtcatatcgaacaactgagaaaacgacaaccagacagaccccatttgctatggcatatgggtatgaagctatgttacctgtagagctcgagccaccatcccatagaag

SEQ ID NO: 279005 - DNA, 758 bp, Cannabis indica
tgcgccggatagctgatctgtggccgatccatccacgtgaagcttccaggtcggcttgctttcagtgctggtcggctgtggtgttggctcgggatcgccttctgggatgctttcagtttttcctgtgcattccaccacaaagtcggccaaagcttggcctttgatagctgttcggggttggaaattgatttcgtactgccccaattccaccgcccacttgagtaatcgcccagaggcatctggcttttgcagtatttgccgtagtggttggtcggtgtacacccgaacaggatgagcttgaaaataaggccttagctttcttgttgctaagatgaggcagtaggcgagcttttctatcaacggatatcggccttcggcctcgacgagtcttttactgatgtaatagactggatgctgcacgccatcttcttctctgattagtacggcgcttatggcatgctccgttactgccaggtatatccccagttcctcaccgtccagaggtttagagaggacgggaggttttgcgagctgtgcctttagatcttgaaaagctctctcacattcttctgtccactcaaactttttgtttcctcgcaggatgttgaagaatgggacacatttatccgttgattttgacacgaatctgctgagtgcggcgattcgaccagttaggctttgtacctctttggtttttgttggcgagttcatatccaggagggcttggattttttccggattggcttcgattcctcgag

SEQ ID NO: 279006 - DNA, 524 bp, Cannabis indica
gggtcccagtctggttccatttctgttgccgggtcacgagttgggtcctaggttcaagtccaagtttcggtcgggtactaggtcccggtccaagttcttttccccatggcctatcttgattttgtgtccaggtcccgattattgtgtgggtttgggtctcggtctaggttcgggttcgagtcctagtctcagttcgggtttaggtctctgtctacgtcaaatttgatctgggtttgggtttaggtttaggtccttgtcctggtccttgtcctagttcggttctacttccatttgcgattcttagttcgagtttgggtttgagttcgggttagagttccagtcttggtctgagtttgggttcgggtccggatttcattctaggtccagatcaggctccgggtgtgggttcgcgtcctgtgtcttggtcaaggttgggtccgagtccagagttcaaatcccgatctaagtgtggattcagttctgggtctaagtcctttgtcttatccttgtatggcttcgagttt

SEQ ID NO: 279007 - DNA, 731 bp, Cannabis indica
cacatggccaagcctcctatcctgtcaaaacccgttctcggagaagacctatttctatatttggctgtctccgaacacgcggtcagcgctgccctagtccgggaagaagagaaaactcagcatcctgtgtactatgtcagtaagcgcatgataggagccgaaacgaggtaccccatcatcgaaaagctggtcttttgcctcctgatggcctcgaggaaattgaggccatacttccaagcacatccgatcaagatactaaccaaccacccgctccgtcaagtcctccaaaaacctgaagcatccggaaggctcctcaagtgggcaatggagctaagtcaatttgacttgcactacatgccccgaatttctataaaaggccaagccttggcggacttcattactgaatgcaacgaagccgaggcaaccgcgaatatgccggtaccgccaatccccacatggagagtatttgtggacggagcctccaatgaaaatgggtccggagccggagtggcgatgatatcaccaaccggactgcgactccaggcggccctacggttcgacttcgcagcttcaaacaatgaggccgaatatgaagccctaatagcagggctgaaattagcaaaagctgtaggagccaaaagagtggaagtctatagtgattcccaactggtcgtaaaccagatatcgggagaataccaaacacgcggcgagcgaatggccgcgtacgtaac

SEQ ID NO: 279008 - DNA, 508 bp, Cannabis indica
tagtcttggatctatcaagactacaaaagatgctttcgtttttcgtcatgtggttactacaaaaaattagcttggcagacatagaagagattattttcatcatttttctcttcaaaaaaattagcttgatgggatttctttaaacgacaagttttttcagtgtggccaatttttttacaatttggcactgtggttttcctttaaaccagcagtctttctccaagtgactttttcttttacaaatgccacatggaggatacttgtcgttattttctttttgtttttcttgtgtctttttcccatcagcttttggtttttgagaccgcggattgattttagactgaaaggcattttcagcttcactttccttatgcctttctcgtctactttcatatgcttcaagagagcccataagttcagttggtgatagagtttctaaatctttagtttcctctatcacagaaactattgaatcatatttttctgtacaagaaattagtatcttttg

SEQ ID NO: 279009 - DNA, 743 bp, Cannabis indica
tatactaggtggatcttacgtggcgagccacgtattgttagttttatttaagattttaatttttcttcgttcacctaaaaccccacttctcaaatcaaaacaataatatccagaataatcaatattctcttctttaaataacacaaaaaattgcttaaagcggcttatagaaagaaaggaaaggcatccttaatcctcacacaaaacataattcatacactttcccaattttcccacaagagtaaaatagtaatagtaaaatagtaacaagtgatgtatgtggttgtaaaattgaactttttcacaagctgaacccgttcaaaaaacacctggatcagccccagttcttctactacaccacattaatatcccaataactatacacaacaacctaaccaaaaactacaacccttgttgtatgtaataatagtaatagtatattatactaatgtaccccattgcaaagactataaatagcaggatctagttctagtactactggtttcccattcccattcccattttagtatatcatgggatcaccattataattattattatgaattctctaattacaaatgttgttgttggtctgatcaaactgcaccaaactctctaactccccacatgaggctgctataagccctgagaacaatgctgaaggctttcttggtcttgacttgaactccggatgaaactgaaccccaacatattatggatggttcctaagctcaacaatctac

SEQ ID NO: 279010 - DNA, 534 bp, Cannabis indica
tcaggggcaacatttaccccccaagccttgcttatttgaaaaaatgaaacaaggcttgctcaggtgcctccggttgactcctcggtttcttggcacaagcctagagcgcgtgagggtgtgtttaatgatggcatttaatgcagcaattcgctttttgcagaggtgtctccagtcgactcctcggtttcctggcacgagcttagggcgcgtgaaggggcatttaatgatggcatttagtgcagcgattcgcccatttcttgccaactttgctcaaatttcctagagagaaaattctcagacccagcacgaaacctttgaacactttgcaattttcccagttcttccttgcttactgctccagtccttctcgtctttactcgactcgcatcggacccccaattcaacacttcattgtaagttttttgcatcctttggaatgacatgcttttactcgttctgtttgttcttttctgggttcgctattcgagatttctgggcatgcgagtgtttaagtccttcatgtattctattttg

SEQ ID NO: 279011 - DNA, 642 bp, Cannabis indica
cccctctcgactggtccacgtattttgggcgaattctggagcgacaggaaccaaaaccagaagttgaccgggactggaactaagtcttggacttggaatcataacagaaattggacctagatccagaaccgtaaccggaccaggacccggattccaaatcagacctagattcgaattaggagccggacacagatcccaacccaaacctggactcgagacccaaactcgaacctaaactcagacacaaagatggaaccagactagggacacacaaccagggtcgggacctagaactgtaccccagtcttgatcccaaacccaaactcagaaattgcacctgggacctgaacaagaaccagaccgagacccgtgacggtgatccaaatcttgactcaagatttcggtaacggggcctggaacagactagtagtcggtgtctagatctagaactctgactaggaccaaaacacagacaaagaaccaaactcgaacctagacctagacctgggacccaaaattagaacctgtagaagaatcgcgaactaggaccctagaaaaagactaggaccgtgaccaagacccggacccagacttagaactgaacacagacctagcctcagacccaaactaagactggaactc

SEQ ID NO: 279012 - DNA, 307 bp, Cannabis indica
acaggatataagggttagagatcctgagtggaaggagccattaatattccgctgcaaccactgcaaggtttctgaaactttatatgtgtttatttacattgttctattaattcatatttaggattttaaataacatatatggtagtagggtatctccaagatccaacaattgagatctcatttcacttcgctgaaatatcatttatatggagctaagtgttttaaggataagatacattgaaggtgtaacggtatttcctattcaatgtagatcatctattagaacaatggataaataatagtgtat

SEQ ID NO: 279013 - DNA, 587 bp, Cannabis indica
aatcaattatgaacaataataataaaaaaaaaaagttacgaaaataataaaataataagtgtgtcagaaactggttatttaaaataaagcagacatttttgttcaaatatcagacaataataaaactagttttatacaaactaaaaaatatacaataacatcataaaaatagagcaactccattacagaacacttaaaacctgtgaaaccagttttgacgctgaaaaatcataacaaaatataaatgttaaataataaagctaactgaaaccagtttcatcaaacagccaaataaaaaaaacacacacaaaaatacaaaaaaaaaatactaatcaaacaaaatcaaaacaacacacaatacataccaataatttaaaaactaaatatatgtgtaagttcttaacctagaaacaaaataataaaaagtaacttaaaattaaaaatatgcaataacataataaaatagagcaaccccattgcagaactctcaaaacatgtgaaaccagtttcgaacctgtaaacccggtgaaaccagtttcgactctatgaaaaatcatagaacaccttttaaatctaaacaattttta

SEQ ID NO: 279014 - DNA, 654 bp, Cannabis indica
ttttcaagaggatgctgatttggtgggaaatggtatccctcaccagggatgtgaccagaatgacctgggaagagttccgggaattattcaacgccaaatattacaatgaggcggtccgcagtgcaaagcggaaggaatttgttgagttggtacaaggtgagggtatgtcagtgactgaatatacaaccaagtttgatcgcttggccaagttagcctccggaatcgtaccaacagacttcagcaagaaagaaaagtatttggctgggctgaatgccaagatcaggcatgacctggttattacaacgaatgataccacaacttatgcagaaatggttgataaggctcttcgagctgaaggagcagttaaatttttgcaagaaacccgagagtcttctggtgttggtgggatcactattctccctatgtctggtcctgaaaaagagagtgggggttctacctttgaacagaagaaaagaactttcccatcttcgggaagttcagggcaaggaaaaaggtttcgaggaaaccagaacagaggaggacgtcagacttattcctatcctgagtgcccgcgttgcaagaagcatcaccccggaacttgtaaccggagagcctgctttcagtgtggttcggtgggacatctcaggaaggact

SEQ ID NO: 279015 - DNA, 807 bp, Cannabis indica
gagggctcggtccctttcaaccagcagaaacatgtgaaggagtaccgtcaccccttcttcttctcctccgggttccaggctgtggagcatccggagcttctcacggagtgggttaggatccctccttatgcgcggactgaacctactcaacttttcctccaacgggctaagacctttgccacatatgacaagaaggccctcgacgtcgggtagttggtcacgacggagaactgccgaaacgccaagctgatccaggggcatcagtcagtgaatgactccaacctttccaaagtcatctgcccaaacgtgagggttccgaccgcggagaaggtactccgggaggacatcatcgccacggcggaagataagtaccagaagtacctcttccagaaggccgaggatcaggcttataataaggcccaggtggccgctggaaggctccttcgtatcgggagcccggtggagagaaggacccccaaaccaaggcctgtggtccaagtgccaaatacgggggctcgctatgccagcacttcttgttttggtaagtgccctttaatgatacattacgtccctcctgtccgtgagtatgctagccttaggcctatagggttcgatgaacatctccatagatttaggatgccctccacttggtggggggatcatgcaaaggagtattacttatctcacttaggcgatcatttaggccggtcccggatgggttctagacctccagtgtccgttcccttggactcttcagcctatctgtcttctgctggttctgtccctcagacagctatctcggggatg

SEQ ID NO: 279016 - DNA, 786 bp, Cannabis indica
ctgtagaacaaattttttattttacgaaagatattttaattaagtaacaaaaaaataaaaaaatttgagatgagatatgagagtatgggtaaaaaaaaaaagaaaagaaacatataagtaagagtattttctacatctatgtataataaaggtaagaatatttaaaataaatttacttcaatataaatttgtgcatggaaattattgattaaaccaactaattaattggagtatgaatttatgaaaatgatgaaacctgatagtgacatggctgagatcgatatatgaaacacaaacaagttttggtatatatatcctaaaccacaattcataactttgttaattagacgtataccgtacaaatggttatattatataatattaataataatttgttatttttttattttaaaaaaggtaagaatattaaaataattctttcatataaatttgtgcgtggaaattattggtaaaaccagccaattaattagagtatgaatttatgaaaatgatgaaatttgatagtgacatggctgagatcgatatatgaaatttgatagtgacatggctgacatggcggcttgctggtctgttttgggagctggtgcagatgctggatgatctcccggaggtggagctggtgtggcatcctcgagctactgtgcaggtggctcacaatctcgcgcggtggtctctctctaatgcttttttctggtttttttttctgctgaggacttggcccctcttgtggccatgtaaactttgtttgtgttcgttcttttttct

SEQ ID NO: 279017 - DNA, 296 bp, Cannabis indica
attttgaggtttaccccctttcttcttggggcctccaatcaaattttcatatgtctgaaggtcattgactaactcatgaaagtctatgtcctttttattcatgacataatttgatgtatagggcagaaatgctggagtcagactattcaagataaggcttacttgagtagtgtgatccatttcagcaccatgatcctgggcttcttggaaataacttgccatgaggagagtcgttagctttctccgaacgctcatacttttctttcacagctttggttgcattgtcccccgacact

SEQ ID NO: 279018 - DNA, 604 bp, Cannabis indica
tctatgaaagattcaaaggctgtttcagagtcgattaccaaccaataccttatgtctaaatctatgtgtcggaagaccaagttagagcaagaagaaatggctaatgttccctactctaatgcagtagggtccataatgtacttgatggttagtactagacctgaccttgcttatgcaatcagtgtgccaagcaggttcatgtctagtcttggaaaagagcattggaaagccatgaaatggcttatgagatactaaaaaggtacatctaagttgggattggtctatcagggtcaccaaacacatcagaacattgaagggttcacagatggagattatgcgggagacagggacactagaagatctacttcggcctactttttcttaatagggggaaattgtattagttggaaagtacaattacaaccagtagtggcgttgtccactactgaatctgaatatatagctattactgaagctattaaagaggccttatggttaaaaggacttatggaggagctgaagttgatggaaaaggctcctataatctactccaatagtcagagcagcatctatttgcgtaaaaacccagtttttcatgatagga

SEQ ID NO: 279019 - DNA, 506 bp, Cannabis indica
gttatgtgatatatgaccaaaggttgtatcgctatcgcaaagttttagtcaaccgcttctcaaatgtatcagtggagaagactgtggttacatacttcgtgaagtacacgaggggatttgtggcaatcataccggaggtaattcccttgctttaaaaattatgcggcaagggtattactggccaacattgcgacaagatgctctcgcgtttgcaaagaggtgtgatagatgtcagcgaatagccacttacacccaccagcctccgagtaacctccattctatcacaagtccatggccctttgcaatatggggaatcgatttaatcggcgagttacccaaaggaaaaggcggagtcaaatatgctgtagtcgcagttgattacttcacaaagtgggctgaagccaaagcactcgcaaccatcactgcaacgaaattgcgcgagtttgtctatacctccatcatttgtcgttttggcattccgcataaactcatttcagacaatggaa

SEQ ID NO: 279020 - DNA, 481 bp, Cannabis indica
gcacccttaaaactataattggcccattaaattatagtctaccattattggaccacttaagcccaattggaaaataaccctttagggttagaggggcatgatatatatatatgtcttatgtgaagaagtgggtgtgtgtgttaatggtaatgagtgagagagggttagctccacaaagtgttctctaggcttttgctcaaggttaggaatttggtggcgatttctttgacaataatcactctcatggatggtatgtgaggatttttgttttgtgatgctcttaataaaatatagatcttggttgatgattatgagtaatgaagattagcatttaatgtgtttttggttagctcataatcatgaaaaattaacaattggtatcaaaagctaatatatttaattttagagctccataatatttgaactttaacccatttttttttacttttaaaatcttgatttttttttttcggattaatgt

SEQ ID NO: 279021 - DNA, 1247 bp, Cannabis indica
actccgccggtttatcattccgtcgaccttttttatgaacttcaaaatttcatttttcttgtgccattgctatgtcaacaccatgttttgaacccttccatggccgattttgatcgttttggttagacggcttggccagccgacagacagtagcttcagtattccttgatttggcgatgagctctgcaaaattgtatatagcatggttttcgatatgtaagcgatattcatcaagcatacctttgatacacattttgactagatctttttcagccatggtttcggcacaatcaagagctttttctcgaaacttttgaacataattaacaagtctttctccgaagctttgtctttctcctgacaagtcagctatgctccatttatcttcaatcatgaagaatttggcgcagaattgagagaccatatcgtcccaactccttacacttcctgaaggcaagctcgcataccaagagtaagcgcgatcagtgagagattttaaaaactctcggatccttagttcgaaatcatgggcgtacactcccaaatcatcaatgaattggatgataagttctttagcattgccgaatttcccattgtactttctaaatacgggactcatataacctcttgggtaaggcttcattgcaacttccaaggggtaaggtgggtgaaaatcgatagaagttactgatgatgatgacttccctctttcggctttaagaagatcgatcaattcatcttttgtaacaaattcagaggaagatcgggcttcttcaccaaccctttcagcaatctcagaagttctgatccctcgaacattatcaggtgttgcttgagttctttgttcaatagtatgtacttgccttatttgagattcattcatcacacgctcttcaggtaaaccgcttctatcaacagatgcttcttggtgtgactgtggcagaagtgagctcaacaattgcatcatgccgtcttgggctttctgaagcttttccaatctttttaacataacatcatctgtgtttgtcagattggtactattattatcatttcgcaaggtttctgatctgatccgattgtcttgctctcgggtatcggagatagacatttggattcaaataagagaacaaacttgagcgttttcctttatgtatttataggaataaatatatatatatatattaaggaaaacactccccagtgaagtcgccaaaatgttcaggggttctagccaaacatttaataat

SEQ ID NO: 279022 - DNA, 693 bp, Cannabis indica
tgctctaaagatatgacgacattttctttacggtgagaagtgcgagatttatactgatcataagagtctcaaatactttttcaccaaaaaggatttgaatatgaggcagagaaggtggttggaattggttaaggactacgactgtgaaattctatataaccccgggaaggccaatgttgtggccgatgctttgagtagaaagggtcccggtcaagtttgcaccacggttctgatagcccctcaattagcctctgaaatggttagagcagggattgagttcgtagttggaaagttgcataacttaacacttcaatctgataggttagagagaatcagaaaggcacaattagaagatcccgagctaattaaggttcaagatgaggttatggctggtcggcctaaaaacttttcagtctcaaatagtggaatgttattgtacaagactcgagtttgtgttcctaatgttgatgagcttaagaaagagatacttgatgaggctcacaccacaccttattcattgcatctgtggtggactacgtgtccaaatgcttaacctgccagcaaattaaggctgaacatcaaaggccggcagggttattgcaacctctggtccttcttgagcggaagtgggaggatattgcaatggattttttaattagactgcctagaactacgggaatgtatgattcggta

SEQ ID NO: 279023 - DNA, 633 bp, Cannabis indica
ggtaatgaagtgaaatagaatgaaaggaaatcatttttattccaattttttgtttgtttgcattttaaagtattagaatatcatttcaatggaatacactttctataattttggtggaatgactattctattttgaaatagaaagaaaagattattacaatgtaatatcagaaaaaaatttaataattttattatcaatatttttattaaattttattctgttctagtactattttcattcctattcccattttatttttatattttcattcttcctaattaaatgttacttaaatttatatataatatctttttttagagctctcctcttatattttaagtaatttttggcaactttactatcaattatatatccattaaaaatatatagaatagcttttttaaaggtaaaaagtgataataatatataaataatatataaatgctaccaattcattttttagttacaatgtggtattacaatcaattaataagtaagacattatgaattcaaacttaccactaagttagtcttagtggttttgctactaactcttaactataaaattttggaatttaaataaatattatatttggcataatttaacaaaaaaataaataataaaaaaaact

SEQ ID NO: 279024 - DNA, 625 bp, Cannabis indica
agaaccgtcagcacctcttccaacattaaacaattgtgcaccgttacgtaggacacttctacgtctaccatcctcgtgttgctttatcaaatcttcctcaaaatgagttgccaaaggggtaacacacttacttgccttctcgagacggttagcaaaccaattttgtagtgtgaaccttatgaactcaactagagtagttattggatatgcccggaattcttcagtcacgttgttaaggctttctgcagcgttgtttgtcatgatgttgtacctgtctcctagacaataaggacgagcccatttttctaatcctatattgtcaacataagcagcgatgggaggatccatctgtcggagcacctgcaaatgtctatcacattccctcttcgaccatgcgtaagcggccaaccatatttgcgtgttacatacatcagtcttgaacttgtgggtgacattcatagaaatatgtttgtagcatgcacagtggcatgcttcggggaaaataacctcgacagcatgttcaatgctttgatgcctatccgatacaaacactaagttttcaacctccccaatcgcttcctttaacttctgcaagaaatacttccaagagtcatgattctcgctg

SEQ ID NO: 279025 - DNA, 513 bp, Cannabis indica
tttttattttttttaaataaatttttacgtggactaataaaattgtgccacgtgtacactgtgtacacgtagacattccaacctgacacttaacaactaaaaatggatggaaaggggctaactgctaacagactagtgggtttaggtagttttaccaccaaaattttagattagggggttagttgcaaaaacctgtccactttaggaggttttgccgcaaataacccttgattatataaagatgaattttttctttcaaatatttatagaggggtatgattttgtcctattattgtatttttacggattgtaattcgtgatgtacgacagccttcagatgaggagttatttgatttccatacaattgtttacttaattttagaaaggtagaatactagttgacccacacaaattagggagaaaacaaggggaaatgttctccccatttttatagggaatgtctttccttttcgttacttaatttattttaattttaattttattaatttaaaa

SEQ ID NO: 279026 - DNA, 233 bp, Cannabis indica
agaggaccgaaaaagcgtttccgtgcaccaagacctcggaggtagaggaggaagaggacagagacgtcctcccgttgatttgagaaatcaaatcaatgggaatcaaggtgaccttcgggatcaccttgaccaaaaaagatacgggcccgcagcctccacgggaacgttaaattaaggaatcatggcagagctcgccatactccaaaaagatatcgcccgagtttcccggagac

SEQ ID NO: 279027 - DNA, 539 bp, Cannabis indica
cctcgtcgctccccatctccctagagcattcaaaaataagatgttaatagagctaccgttatcgatcagtatacgtttagtaaaacaattcgaaataaataaagaaatgagtaaagcatcatggtgaggattaagaaaatttcaagcttcgtcgtccatgaagttgatgatttggccgtttgttaggctatttttagcctacattttgggtcactttttatagttgttttccttctttgttattctttttggaatagaattacgcttgttttctttgatttcaggtttcacacttggaatatatcaattgatcgaatttcagaaaataacaagctatagaatagagaaaattctgcaagaaaataaagctgaaacttcaagcttaaatttgactatgttctaatccgattttggaaaaagtcaaaacataaaagttttagatttatttttcttctttccaacgcatcttgaatcaactcatttggagttcgtatgtgaaagttatgcatattttactgaaagatgctgaagctgtcaaa

SEQ ID NO: 279028 - DNA, 599 bp, Cannabis indica
tcggcaacagatcagctatccggttcaggaattgcccttgtcacacctaggggcaacacctgcatgcagcggtcaaattccgattcaaagcctccaacaacgaggccgaatacgaagccctaatcatttatctggcaaatacgaggcttgaggagaaaaaatgatagcatatctgagcaaaatacacgacctgctcacacaattcaaaagctacagcctcaaaaaaattcttagagaagaaaatacaacggcagatgtgttagcccggttggcaagcagcaatataagtgacaaggcaaacctggtcccgatccagtttcttgaagagcctagcatcaccggtacggaagaaatcaaaatgatcgacacatctcccaactggatgacaccaatagcagcctatctcaactctggagaactcccagataaccgaaacgaagctcgaaaaatgagaagaaaggcaggagggtacatcatagtagaaggggtcatgtacaaaagaggattctcgatgccactacttaggtgcgtcacaccaaatgaagctgcacggcttctatatgaagttcacgacggattctgtggaaatcatgcagccg

SEQ ID NO: 279029 - DNA, 406 bp, Cannabis indica
gcgcgtcactggggtgcatgccgaggaatcacggtgcaggagttctgtaaaaaagtaaattgcttagaattttccaaactatccaacaaaaataattacagaataaaaacagtaaccatttttcccagaattcacaaacaacattcaaacatcaatatgacactcaaagcaacatgataccatccaaaaaacaagcaaatcgttttaagtccaaatttcttgcaagcaaatcaattaccatggctctggtgccagttgttggaagttattttaccaggaacttagatctactcacaagtatccgatagtccttctttgttgtttttgaattctacacagactctaacacttatagatttaaaaacagtgaaggaatagagagagagagagggtggcggctcagaga

SEQ ID NO: 279030 - DNA, 467 bp, Cannabis indica
atgtgtataattaatgtgattagggcatccatctagcacgagactttccgttcaggtcggccagcacacttgaattcggaaagaaggtaagaactgtatataatgtgtgatatgaatatctgagtgtatgtatatgttatgtgtatatgcatgcttaaaatgttatttgcactaccaacacttatacggttatggtatagagtgcattggtatagtgaatgttatctgagagtaccgtgataccagcataagtacggagaggtactaggagtgcgtggtatatcactcaggggtactcagggtatgaacaaaccctaccaacactcgtacatcgaggtacgtagtgcatgtggtatagtggctataccctagtatggaacgttcgtactcatctgttaagccttgtaaataggtgtatgggcgcctaagtacaagtcagaaattatatgatatgttatatgcttttc

SEQ ID NO: 279031 - DNA, 516 bp, Cannabis indica
cctagtctcggttcgggtttaggtctctgtttgcatttggatctaggttcgggtttgggtttatctcctggtccttgtcgtagtcctagttctgttctagttccatttgcgattctgagttcgagtttaggtttgagatcgggtagaagttcgagtcctggtctgagtttgggttcgggtgcggatttaactctatttccagatcaggctccgggtgtgggttcgcgtcctgggtcttggtctaggttgggttcgagtcccaagttccaatctcgatctgagtttggattcagttcagggtctaagtcctttgttctgtgcctggtctgggttcgagttttggtacgggtccaggtctagttttgggtctggttctaggtgtgggtttgagttcgggtccgattctatgtccgggattgtgtcgaggtctggacccagatctgggtcaatgttcggtgtaggtccaagtaggggtcccaagtgcgggtacaagtttgggtctgtgtcaggatctcg

SEQ ID NO: 279032 - DNA, 501 bp, Cannabis indica
tgtagagaattagaagagatcgagatcgatccagatatcccggccagaaagctaaagatcaaaaaaggtttgttgctcgaagtaaaatcataattgataaaatttctgagagcaaacttagacgtcatttcctggtcacatgaggatatggtcggaattgatccttctatcatttcgcacgtcctaaatattgatcccatcttccgaccagttcaacaaaagcgaaggctatttgacaaagagcgagcgctagccctaaaagaagaagtagaaaagctacgcaacagcaaattcataattgaagctttctacccaacttgggttgcaaatcccgtaatggaacccaagccgaacatgaaatggagactgtgtattgatttcacagacctcaacaaagcatgccctaaagagttttttcgcttccaagaatcgatcggcttgtggatgcaacagcagggcatgaaatattaagcttcatggatgcttactcggggtacaatc

SEQ ID NO: 279033 - DNA, 977 bp, Cannabis indica
aaagaagaaggaagaaatctcatctaggtttttagcttttgaggcattagtttggataaagagaccatagttatccttctatactatcttcaataggattagggttgaattataaagattaaaaaagaataaaatattgggcaaaaataacttgttggccgtacacttcaaagggccaatctctagttacaattttgccactttatttcaaccacttattcttcttttcaataataccatattttccaattcaaacctataaatgccaaaactatttatttatttattttttttttgaaaaagaggatactttattcaagaaacaagcaagatacaaccaaactaggcacaagccaacaaaaggcaaacggcagccactaaaccaacagccaccaagacaagcaaaggactaccaattctgaattacattaagtaaatatgcattcccatggctccttttaaagggccctttactcaaaactctaagttgaacaatgtttctaacttccaaactaatagttttgggagaagcacaagtcaagtcaaaaaaacaacaatttctatttgcccaaatctgataataaacggcagctgttaccatgttcagtaggcattttcggaggtcatgtttcttgaaatcacacctgtagctaagatcattgttcgagctcagccaactgtagtttccattccaagagttcacttcttgttgcacctgcttagttaagatgcatctatagaaaatgtgctcgtgagattcctcttcactatcgcacactgggcataaggtactttgcagcggcagaaacttgctaagaaaatcacgagtaagcagttgggtgttgatgatttgccaataaacaaatctatgttttggcagcagaaggttgtcccaaatgcctcttgagtattggactttcggcttctctacaagaaggttgtaaaatacctttgctttaagcttggatccgtcacgg

SEQ ID NO: 279034 - DNA, 734 bp, Cannabis indica
atggaagaaaatgctaagccaacaattgatgcacaacgtagactcaatccacctatgaaggaagttgtcagaaaggaagtggtcaagtggttagatgctggagtggcctatcccatctcagatagtaaatgggttagtccggtgcaagtagttccaaagaaagggggaatgacagtaatcaagaatgaaaagaatgagttgattcccacaagaacagttactggttggaggatctgtattgattatagaaaactcaacaaagcaacccggaaagatcactttcccttgcccttcattgatcagatgctagacagattggcggggcaagaatattactgttttcttgatggctactctggataccaccaaatagccatagcacctgaagatcaggaaaagactactttcacatgtccctacggtacttttgcttttagaagaatgccattcggattgtgtaacgcccctgctacatttcaaaggtgtatgatggctatcttttcggacttaattgaatcttgcattgagatctttatggatgatttctcggtctttggctcatcattcgatcattgcttagagaatttggaaaaggtgctaatcagatgcgagaagtctaacttggtgctaaattgggagaagtgccactttatggtaacagaagggataggttctgggacacaaaaatttcaaaaagcagggatcgaggtagacaaagctaaagtgtcaacaat

SEQ ID NO: 279035 - DNA, 580 bp, Cannabis indica
ccttttttaataggcttaagattttatttaattatttttttcttctattttaagatcgcacattttctttaattttcgttacataatatttgcttaaaattttgcaaaatacatatattgttcctctaaattctctataagtagataaaaaatattattttcatatattgttatgacttatatatacacaattatattttactaaccaaatataataacacaaatattatttgaagaaaacaaatcattcacataatcatacttagttacagaaatgaaagaaaaataaagaactaaattttaaataaaattaatattacgtgcctcggcacgtaatttctacctagtctatcaaatatgtgtgattcatatctatctcttaagaaggttgatgagtatttttgtttttcccttttttgttgtttttattttattttatttctactttttttctttatatctatctttatctgttatatatatgtatatatatatatatatattctatataaagtgtgtctatataactgaaattcttggtttatgagaaattcatgggtgactttttatttttatttaa

SEQ ID NO: 279036 - DNA, 528 bp, Cannabis indica
tggccgggaatttagaatgtcccaaaaatacccctttagtatgaattatgtggtttcatggtggaggggcaaaatggtctttttgccccattagtgctttgtcttatgtgagtttatgatttggaaaataaatatttattttatggattatttggctgaaatgaagtaatctatgtgacatgttttcatttttcattttacatcaaaaaaatcataagttagaaaagaaagaaaatttcaaaagaaaagctctcttttcctctccatttcggctgggttttgggattcaaaggctgggtttttcaagcttgattcaacctatatttgtgaattcttgtttgtggtatgtgatctctaactttctctctttaatttgttggaaaaaaatgatgaaaatggtgatgcatgcatgataaattgaggttgttgctgctgtgttttgttgttaatttctgaggtttaaagcatgatttttagttggtaattaagctacttgtgaagtatgattcctaggttgagcatgctaga

SEQ ID NO: 279037 - DNA, 116 bp, Cannabis indica
cttataataataaagctcattatttaatgaaggttgtattttctatataaatttatttaattaaaatttcaaatttagaataaaatattctaaatataaattttaatgtaatattt

SEQ ID NO: 279038 - DNA, 521 bp, Cannabis indica
tttttgtttttttattttatttttattattcaattacaattattatttaattatttatttgctaaaataaaaacaaaaattcaattatttgatatttaactataattcttgtaaaattagcctcattctcgtaagaattacttataaacaatacctgcactcgtgtgtttggaattttcacaacatcagtctattatttttggtttgaataaattgcccaatcaaaaaagaattaacttgacttatttaaagaaacaaaaagagatttacattgacttgacgtcagggacgatgggaggtgatgtgatatagggtcttggcctccctaattttttttttttttaatttttccacttataattttgtaatatttatttatttttttacaaatttatatataggcccccttaatttttatttttacatttcggtcccatattctttttctgcctccgtccctagtggcattagcttagcattgttggaagacatatgattaagccgaaaaaacaagttgaacg

SEQ ID NO: 279039 - DNA, 524 bp, Cannabis indica
gagagagagagggggatcaagagagattagagatggcagatgatggtggtcttccatggctgcctacctgcgagagagagaaagataagaagaagaagagggtgttgacaaaagaaagaaaaagaaaaaaaagaaagaaaagaaaaaaaaagaaaaaaaatgtaaaattatttttttttttaatttttaaagaaaaataatttttttttattttttatttttaaaataattaatttttttattttttttaaatatttatttacgtggactaataaaattgtgccacgtgtacactgtgtacacgtggacattccaacctggcacttaacagccaaaaatggatggaaagggctaactgctaacggactagtggtttaggtagttttaccaccaaaattttagattagggggttagttgcaaaaacctgtccactttaggaggttttgccgcaaattaccctatatatttatataataactaagtgaatgtacgtgctgagccacgtattgctagtttcatttaa

SEQ ID NO: 279040 - DNA, 755 bp, Cannabis indica
gaatgagaatgactcacaaaagcaaaaagatgatgatgctaagaattacaatggcccccaggtaggtactacttaaatttagaatcatgaaagtgagataggatcaagtcaattacagattgtgtttttgcaggaaacaagtagcagaagaatcagagacaatcttgaaagaattgttggaaaagatgattcaggctttagtgggattgacttggccactcttattagaaacaagtatggaaggtcttatgatgttcaactcataaagaaggtaacaaacacatacatacatatatacttctaaaatggagttgtttgagttgaacagtgtatgcatgtatgtaggagtttatgggaagaaatctgcttgctatgaatgtcatgtggaagtacatggagcaggtatgttaagacttaaatcaatgggaagaagttgtgtagcctctctttctttttgtttgtttactaagaacaatttctaatgtattagagatcatttccactgactgaagaagagtatatactgaggcttgacgatgtggcaaacacattgaagtgttggggagctgtgtcacatataagaaacagcctccaaaagtccaaggaaagacctcgtataggaaaggtgcgtattctatgtatgtatgtatgagtatggatgtatgtatgtacaaaatattaaagatgaatatatatatatatatatatatattgagatgcaggcagtcagctatttttatagacatggacgaaac

SEQ ID NO: 279041 - DNA, 113 bp, Cannabis indica
tacaaattatttacttgaccaagggagcaatcagatcattagatctagcaaaaagttaaccatggctatttgcaatcaagcaataataggttttgaaaacttacaaacaagct

SEQ ID NO: 279042 - DNA, 630 bp, Cannabis indica
tgcagcagcaggaggcacagttgaggcagcaggaggaggattcgagcgggttgcatcgatttcaaccacctttttgggatgccctaggttctttgttctaaccatagtgatctgaaagacacaatgaacagcaaacaaacaagaaagacaaggagatagaatcgggtaggtggtgagaatgattgacaaaaattggtttaaataaacatgggtgagttgagcaagaaggaaaccgatttcaaaattttgagtagccaccagcccacgactacaaaaggaaaccgcccactcttgcataaatattcccctttcccgtttttttttaaaaaaaataataaataaaaggaaactagaataaccaacattatttccaaaaataggacaatctttcaagattaaaaacatattaccatataaaagatcaatctttaaacggaaacatatcaaaataaatcaatgaagaataaatattgatacttaccaattaagcacaaaatttccttagcccatgaatcaagtcaccaacgcctccctctctttattttctattttttaattatttttaaagaaccgaaaatgaaataaaatatgtacaataaatataaggaattctaaaccaagcaatttaat

SEQ ID NO: 279043 - DNA, 673 bp, Cannabis indica
tacgctgattatcatgtcagtctaaataccagcgaactgaacaaatacagggaagttaaactttacgaacatataataagtatatattccactgtgttgacaacactataatacattaaacaaattacatatgttctggacttaaatagagttcatacgttatatgtatataatcatagagataaatcatttgaaccatgcaacattaaatatcatttctgatgtacattaataagtaaatctgattatattgaaatgagttttatttagggcataaaacccaacaaaagctgcacagtatatcatagtagagggaaatatgtacaaaagaggattctcgatgccattgctcagatgtgttactcaagaagaagatgcacgactcctatctgaagtgcacgacagattctgtggaaatcatgccgtcgggcaaagcttatctaagaaaattctaaggcaaggttacttcaggccaacgatgattgaagattcaaaagcctatgtcaagaagtgttacaaatgccagagattttcaaagatacctcgagctccacctaacaagttaacactgatgcaaagttcgtggcccttcgccatttgggggattgacctgatcagacaattacccaaaggtaaaggagaagtgctgtatgcagtggtagcagttgattac

SEQ ID NO: 279044 - DNA, 455 bp, Cannabis indica
aatgtattgttcatgaagttaaagagaagcttaaagagaagaaaatgatacaaaacgaagtggagagcaagagaaatgagtggtgagctcaaatcctttctttgatagttgtcttcttctccttcttctcaatcttcttcttctttgtactctctttctctgtactttttctatccttttttgctgctgtaattttcgtactcctcttcaaagtgcagccagcctcctttaattcatcccctctttttctttttgctccccaattagggtaccaaagtttaccctaattggaaatcccaatcatcacccacttgtccttcattttccacatgtttgttgagtcaatagccaaattccgccacctcagctcgtttttcttttcattaaagccagctggactatctgccaaaataaacttactgggctgacaaattgctacgcgatgattgctatag

SEQ ID NO: 279045 - DNA, 670 bp, Cannabis indica
acgccctgaccctcagggacgccgcgtgtgtgcttttaaaaaaacttattatcactaatctataaattttggaaaaatgtggtttaatttaaatcttgatataaattcaaaataaagactttcattttaaatactgtcgtaatataaggatcccctgtttataaaataaaaatattcttttacaatagtttacatttccaaacatagaaaggaattcgatcctgcttcccagaagccaagaccccacggctgatatgtacattgctgggagacctttgactcatggccgaacacaacttctaacttccttacctgcatcacgaagcacccgtgagtcacaatgactcagcaagaaaagctactaattagacattatggaaagtacaggcagatttcataataatataatatacataccggtaggtcttacatatgtcaatctacatatacaaaaataacataacgcttatgtaagcacacttagtacataataaagaatatttatagctattcataatcaaccatctcagtggttcataaagtaccctaatcacacatcattataaacactcactttcagtacttcataaatcactctaattcatatattacagtaaccacataatctcagtgcctcataaagcactcaaacacataatcttagtgcttc

SEQ ID NO: 279046 - DNA, 757 bp, Cannabis indica
aattcacatttcttgaacttggcatacaacttatgctctctgagacgttgtaacaccattcgaagatgtctttcatgagtctcttatgagtctgaataaattaaatatcatcaataaagacaataacaaaatcatccagaaagtctttaaacacccggttcatcaagtccataaattttgttggggcatttgttaatccgaaggacattaccagaaattcatagtggtcataccgggtccggaaagctgtcttgggaatatccttttcccgaatcctcaactggtgataaccagaccgaagatcgatcttggaaaagacggtctttccctgcatctgatcaaataaatcatcgattcttggcagagggtacttgttcttcactgtcaacttgcttaactcccggtaatcaatgcacatttgtaaagttccatctttctttttcacgaagaaaattggtgcaccccaaggtgaattattgggtccagtaaattttaaatccatcatctcctgtaattgaacttttaactcttttagctccgtaggtgccatcctgtagggagctttcgatacaggctctgcccttggtattagatcaatctcaaaattaatttcacgtttcggtggtaatcccagtaactcttctggaaacacatctagaaattctcggaccactgggacatgctccggtcccgctaatggttccctggtaatatccacaacatttgctaagaaaccaatgcacccctcacacacaaa

SEQ ID NO: 279047 - DNA, 475 bp, Cannabis indica
taatctgatcttttagcttaacatgaagtaaaacaaattgcagacataagaaactgtactttaaagtggtcagcccgacctgagtactttgtttctgaaacctttgcgcgtagtccgctcacaaggccattcacttagaagcgaatgttcatttagtacttaaaatggtcaacccgacctggtactttattgctgaaacctttgcgcctagtccgcctagaaggccattcacttagaagcgaatgtttatttagtacttaaaatggtcaaccctacctggtactttattgctgaaacctttacgcgtagtccgcccaaaaggccattcacttagaagcgaatgtttatttagtacttaaaatggtcaacccgacctggtactttattggtagtatttccttaatgttctccatttcgataccgtggcacagaatgagttgcattttttcgtcatacttacctaatttgtatgctc

SEQ ID NO: 279048 - DNA, 633 bp, Cannabis indica
ctaattattttttacaataaaaaggtctccatcttcattcctcaactcgatttcgtcaattgctaaaagaggtgccatctgaagcattttctctaccatccgtccctcgatgcaaacattgcaaagcaaagcgtttcatttatgaaacaacaggcttttgttgtgccgatggaaaaatttatctcgcaacaaacgatgtgccgaatgaactttatgaattgtttacttccagtagcgaagaatctacacattttcgaacatacattcgaacttacaacaataaatttgcttttacatcaatgggagttacttacgacaaatcgatgtgtcgaaggaataaaggaatatatactttccgaagccaagggcaaatctatcacacaatcaataatttactaccatctgatggacgtccctctaatctgcaactatatttttacgacaccgagaatgaattggagaaccgacttaatgattcaaaatgcagactggatccatctgttacaactcaacttatgaatatccttcgaatcaatccgtattctatattctttcgttcacttggagatttgccagatttggaaacacaaataattcaagtaagagaagatgctgggctagatcagcgtgtat

SEQ ID NO: 279049 - DNA, 698 bp, Cannabis indica
aagtttggttattaggtattgatataaaatttatatgttcgaaactgaattttaaaattagtattatttttaaagtttggttattaggacattgtatatatttcattatgctgttgatgaaactgttttttttttgccttcttttaatgaaataattagtttcttttaatattgatgaaaatagtttttaaagttagtatcgtttttagattataaattttttttttattatcttgataatgaaacttttttttttacttcttttaataaaattattagtttcttttaatggtgatgaaattcatttttaaagtttgtatcattttcaaattataactttttgcattatttttttcaatatgatgttgatgaaacttgttatcccattttttgtcctcatgacgtgacatgcttacgtggacagaacctgtgccacgtcgtagtatagctcactaaaagaaaggccaagtcagcatcttagcaggcaaagaccccgacattcaaagaggaatcaaatgacagaccagtgggccggccaaactagggacaacatcatggccggccaaggattgctcagtaagaaggaagacttaattgataatattgtactattaaattagggtaacttgtaggatcaagcatgtatcattttccctagaaacaaccataataataataaaaaaatgttactccccctc

SEQ ID NO: 279050 - DNA, 596 bp, Cannabis indica
ggagtatgcatcggaagggacttttgggtttgggactgggttcggatcccgagtccaggtttggtttgggatccaggtctggctcccaatttgggtctaggtctgatttggagtcttggacctggtctggttacggttctgaatctgggtccaatttcaattatgattccaagtcctagtcctagttccagtctcggtcaacttccagttttggttgcaattttgggtcacagggtacgggttggggtccacttttgggtttgggactgggttgagttccgggtgttggttcaggtgcttgtgagggttccggtccagggcttggtcccaaatcctgacaccgactacgggttttgtccaagccctgggtcacgatctggatcccaatctagggtcacatttttgttccatttctggtgccgggtcacgagttgggtcctatgttcaagttcacgtctggttcgggtattaggtcccggtcctagttctgtttcccaggtccctatcctgattctcggtcaaggtcccgattattgtgtgagtttgggtcccgctttagcttcgggttcgagtcctagtctcggtttgggtttagg

SEQ ID NO: 279051 - DNA, 514 bp, Cannabis indica
aaaaaacttactcaagattcaaatgtctggtttcgagcaacgtcaattaaacaagcagcttgtacgaaggcacttcggcgactttgaagccaagaaattttcttttcgctctgaagtttacttaacaaagaagggtgatgaaatgagtttatgtgccaatgttgtgggtatttataggaaagtcacgaaaagaggtaattgtctcaaaggaacctcagacgcctcaacttcccgccttgaaaacgaatatgggaaatcaaaagtaatcaagtgcagccatcaaccgtggagagagaaaatcggatttcaaaatattaattgtcagagcatttattagccgaaaaccgaagggacgcccagtcagcctcacatcgagtctcgaacggtcgcgctcaacacgtgtccccatccaaaggcagaaacagctcagatgaagtctacaggcaacttcagaagtcccgtacagacttggggggcaagtgttatcctaatttttgcactctgacgtggcatc

SEQ ID NO: 279052 - DNA, 724 bp, Cannabis indica
atttagtacatgtcaaagtttgagagatatgatttggtagatatcaaagtctggtaagcatggtttagtacataaacaatcactgaaataataaaactgaatgaaattagacaaaaatccttaaatccaacaatttcaatagttcatgaggtatttttaacaactaaaattcaagggcataatttagtacatatcaaagttaggattaaccttattattattatgacaaattaatagcatgtgagtccaaagatcttaattgacaataaaccaacatatatgaaggagtcatgtgagtttcaacaatgtcataaataatacaacacaataaggcaaaattattattagttttcaggtgaaaaagcaaatgaagcatataagccaaaagttcttgaaaaaatttccaaagatacccaactttttaaaattgtctacaaaccgttatatattctattattctcttttcttattctgaacatgatatgaaataagattgaaaaacaaacagatcttatgagaatagaatcaataatatttttaggtgtattagaatacttcttccattaattcaaaacatagacaagagaataataataaaccaacagcccaatcgaaaaagaagaataaagtatacacctttactcatgcaacttgaagaaaaaaaaaaaaaaaaaacgaaaaacaagaaacaaaaaaaaaatatacttataaaaaagaaaaaggt

SEQ ID NO: 279053 - DNA, 510 bp, Cannabis indica
ctgcagcccaaggctgctagcagcccatacgcgcgcggaaggaggagctcacgccgaggaaactcggcgcctgcagggtgcctgaccgagaaaactcggtcagctgcaggatgcatctgggcggaggtgcagggtgcacacgggctgggtgctcagctcacgcgcgcggatgaggagcttgtccgaagctcctgatgtgtgcgattgagcacccatgcatacccgaaatcccaattttccaaaattcataactttctcaatttttatcgaaatcaagttccgtacaaacaaaaattgcttaatttttcacaaggaatccaaataaaatattttcaaaaatcgaaaaaatatttttcatggaaaaaggtattgtacaacatatatattcatcaactaacacataaaccacatgaaaccatccaaatcaacacaaaaacatataaaacattgttttaattcatatttcatgaaagtaaatcattaccatggcgctggtgccagttgttggaa

SEQ ID NO: 279054 - DNA, 598 bp, Cannabis indica
tgggtttttttttgtttttttacatttatatgggtttttttatgctatatttctgtaaaaaaatatggaaatcccatatttgtaaacaataataagttttgccggaaagtcaccggcgccgaaaaagtcaccggaaaaatcaatgtcaccggaaaagtcatcatctttggaaaagtcaccgtcgcaagaaaaagttactgaaaaagtcaccagaagtagatgtctcaaatataaacaaaaatagaaccggttataattgaaatataaccggttatgtaacacaaagaataaaaataaataaaacaaaataactcaaactaattataattaaattagaactgattataactaaaatagaaccgattatataacataatgaatacaaacaagtaacacacaataatttaaaccgattacaaattaaaaaataaaaggaaaattaggttcttaaaacactaaaacataaattaaaaacaaaactagttctacaataaaaaatctcataacacataatacctcataaaaccgattataatttttttaaaaacaaatagagatcaaattcaaaaaatattgaggcataaatatgaaaagaacc

SEQ ID NO: 279055 - DNA, 554 bp, Cannabis indica
aatttttctaaaaaaaaaataatgataaaagaaataatggctagtacagttttaaaaaatataaatagaactgaagtccatctataaatctttttgagggtatttcatttataaaaattaataaacgtaaatgattaattttaatcaattttaatcctataatgttccagtgtaacatgatttaatttatgtggttccataattagaaaggtgtctaagtaacaagtcttcatcacttcactaaaaagtcttgtgtatatattgattaattttttttttttgtttggaaaggaagaatatatatggatgaattgatgatgataaaaaaaaaaaaaaaagaaaacaggtgaaataataataataataataaaaagaaagaaaggggaggggaatctcattttgctggggagtgcacttcaccgctttatggataagaaagagaagtggtgatggtgctgaagtgtgtccaagtgggaaccccatattatatatttatattatataaaaaaatgataattaagtttttttttactccgtaaattttaatatgcatt

SEQ ID NO: 279056 - DNA, 791 bp, Cannabis indica
tcttgaaccttctttgatgtgatagttgcgagtggttcggctttagtccactttgtaaagtagtcgactgctacaactgcgtactgcactccgcctttacctttaggtaattgcccgattaggtcaattccccagatggcaaagggccacggactttgcatttgtgtcagctcgtagggcggagctcttggtatctttgaaaatctctggcatttgtcgcacttcttgacataagttttcgaatcttcgatcatcgtcggccagaagtagccttgccttagaattttctttaataagctctgtccggttgcatgatttctgcaaaatccgtcgtgaacttcatatagaagtcatgcagcttcatttggtgtgatgcacctgagtaatggcattgagaatcctcttctgtacatgatcctgtctacgatgatgtaccgtgctgcctttcttctcattttccgagcttcattttggttatctgggagttccccagagttgagataggtttctattggcgtcatccagttcggatatgtatcaatcatttcgatttcttcaaggttcgccttgtcacttatattgctgctcgccaaacgggctagtgcatccgcaattgtattttcctctcttggaatatgcttgaggctatagcttttgaactgtgcgagaaaatcatgtattttgctcagatatgctatcattttttctcctcgagcctcgtattcctaagatacatgattaaccaccagttgtgagtcactgcagatattgatgtgctcggctttcatttc

SEQ ID NO: 279057 - DNA, 440 bp, Cannabis indica
atagtatatttattgtacttatagtaactatttaggtaaatactattttggatcccatgttttgtaaaagttactaaattgaccatttagttttattaaataataaaatggaccatgtattttttaaaattgtacaaacaagaccctgagctcacttttttaacaattttattttaatataaccaactttaagaccatttttaacaagaacagatacagaaaatgtaactagttttgtcataacatctttagatcggattataattaagttttattttgacaaaatcattctataactttgttatatatatgtctttggtgattttgagtattttttttaatatcattgttattattattatgaattctttgttagtttttagagttcatatcagagtatcagacggaaaaaaaaaaatagaatttaggtttaaaaaaaa

SEQ ID NO: 279058 - DNA, 571 bp, Cannabis indica
aagattcataacgaattatttttatggacgcatcagaagtagtgtttttgcttacagcatcttcgtacctactatagataccttcatttggtccattgaaaataacccagtgtggacctgaactcatacttgatatattgtaatgctaataactaaattacaagttaatttctctataaacttgatgctggattggaaaacgtctcaagtgtcttatataagtcgtggagaataaccctatagtacgttttttagttagctgtactccattgggatgtactccattgggcacatctgatgtgtcaaaagaggggtgcttaaatctctgaattacacaattaaatacacgtgtaggcgtacgtagtatggtcaaatgtcaacattattcatcaatcccgtttttccaaaaaacctaatgtactacggtactgttctaacgtacgacgatggtttaattcataagaagatgtaggtgaagggccccttaatatcagcccaacatatataaatgcccaacatatataaatgggagaaactacccattctactaaaaaatgtcatcactttaaca

SEQ ID NO: 279059 - DNA, 516 bp, Cannabis indica
tgtaccacgatatggatacgttatgattatccattgttacaatactaatagtcaaagatcttttatttaccgttctatccttcaatgtattttatccttaaaacacttagctacctataaatgatgcttcagtaaactaatataattactgaaatgagacctcaaccacttatctctatccagccaagctcgaagaaaatcatcgtttcacttctaaatacttatagaagctatagattccacatctatgatcagagctcccactcaattaaactatcatgttcccaagatgtaaatatccaccagaaccatttgttagcttccacgaacaacttgaagaacataaataatacaactaagttgaacctaaccatatcaggattaagatccataaacctaatgtaacgccctaaataattaggcacgctacccaataaacttgtaaaaccctaatcccctaatcgggattactagtaaaataagcgcggaaattaaaatttattaataaacggaacg

SEQ ID NO: 279060 - DNA, 224 bp, Cannabis indica
tttcctgaagccatcactacctatttatagtctaccacctagggttacataagatttatttggcattaaaataatgaaaaaataaatgataaataccctacataagtgcccggccatggttaaagataatgggccccacttttgcaatttgctgttttatcatttctacatctcattttctcaaaaacgccaatattccaatttaactatttaaatgccaattc

SEQ ID NO: 279061 - DNA, 514 bp, Cannabis indica
tttataatttcattaaatattcctatttaagttgagatttagttaaatctaacaaatcaacttagatttgaatatcttttgaatttcctattataaattaagttgaggaattttaggaattggttattaagattctttagatattttttaagttgatattttataaatatgggaacttaaaatggaatatcttctaaattaagtggttactacttaattggtaatatttaattaagtcattgattgaagaatatttaagttggatatttagatttttctaaacaacttaaataagatatttttcaaatttattccatttttgaaatttaattaaagtttttactttaatttgtaatgtttcattattgagatatggaatataaatgattaaacaaaatacatattttaaataatgagctttaatcaagagaaattcgatctccattgttggttttacatagctattgttttagtgagtaatcctccctaatggaggaacgttcattagcaagtt

SEQ ID NO: 279062 - DNA, 651 bp, Cannabis indica
gaaaaataattccaagtttaaagaccgcttggccggtcatgatgtcttaaaggccttgcggccatgtataatatatatataaacaggagagataaaaagatcagtgttcaaacagctagagtcccagggtctgggttcggttcttctgagccaactggagcaggaggatctgttgttcaagcaggagaagcatcagcagcctggtcagaagcttggccggaagttgaagcagccacctctttcccaccataggcaacttgggcggcgtagtactcgaggtacatgtccttggcgtcgcccaagtagtcgaagttggcctggggattagccttccaaaaatcaaagaagagctcgaggccggcagtctccaaagcattgaccttctccttcaagcggtctgcctcggccacctgagcgtccttatcttcctttagccgaagaaagacttgccgcaaagaactcctctcatcctgaagacgatcaacttcagcaaataaggtctcaatggtttcctcaaagcgatcagcaacctcaaggtcctttgtaaacagtaatcttcctctcggcggcaaacagcttgttgctggcctcacccaactcatgacgaacagttgcagtctccgccctggcccctggcctcctcagcttcct

SEQ ID NO: 279063 - DNA, 601 bp, Cannabis indica
ttcgatctcagaagaggagatcacacctactgtaggtatagagctaggtccgatgtcttctgcggacatcgagaaaatggtgcaggagctcgttgaacctgggaccattgatattcgagacagtgagtctacagtgtcagcctgcgattatcttattcactccaggcatgcccctgacgtcgaggtcgaggagacggatgacgactggacggccccaactcgcgaatcaggcgaggatgaagaagaggcagaagggagcgggactgactcggtggaggatacccagcttaacgagcccttttcgtgcaaggatttgatttcgagagttaccaaatcggacctcactacctttacgaggctaaacctgttgcgacttgcttctttgcgacctaaaccgactcagagggcgcaccttccttttaccaatcctgcgattattcccacagaggatgtggtaatctcaatacccattctccgatgtgggatatcagtccctttccatccctttatcgcggctatcctcaaacgatatgatgtatcacctttccagctaactcccaatagttatcgcaccaccctggctttttacgcgatgtatatg

SEQ ID NO: 279064 - DNA, 436 bp, Cannabis indica
cacaaaacccaacaaactccaacttgcactaatattaaacaaaatgtgcatttcaaataatctcaacaccttgatatacaaataaagtgtagtagtagtatactccttgtaataggatctgacagattaaattaaccacaaccttttctctaccattactcttccttaatcacaaaaacttaaagctttgaaattcctccctatatgtctactctcttgggatactgaattctatacttttggcaactacttcttggttaatcaagaaataacaatagtagttaagacaagttggaacggtgccaaaaatgtatagaactttccttagactgaataagtacctttcctgcttctttaacattcagtctctctctggtagacctagagacttcagatagatttttacacttctcctaaatcactactccacccccaa

SEQ ID NO: 279065 - DNA, 684 bp, Cannabis indica
ctcttcctgaggaagctgaaaaaagtgaagaagagcaagaaattgctctgattcgcaaacgtaaaggcaaaatgattgcccaggaggagcccaagcggcctcggagagctgatactccggcccacggtctcgatggtggggtctctcctatggaagaacatactgcccctcccaatattgtgctgactccggttcctggagatgaggctagacaggagctccggatagctaaacacaactacgccatggacgaatactcccgggggtatgctgaggtggaagcccttcggagggtcttgcgggttgagatgcaagacaccatcaacaacccggaataccagaatccgtgggacctaaatttggaccccctgtcggactggttccgtcgcttccttgggcccactttagctccctttgctgcggagatgactggcgagtttgcgtctcagcttacccggtgtgcacctaagcggttcgctacttgtgcatccttgaactccatctaccaagtccaggatctcagccactccctcaccgtggtaagtattttgtagtttgcttttccccttattgttttcttttttggagattctttcttatacttgcattgttttttagcttgctgctgagccggccgtctctccaagaacataatcaccatggcttcgtcctgtctgattttgg

SEQ ID NO: 279066 - DNA, 825 bp, Cannabis indica
agtttaaagcagcgcttgattaccgctccagtactaactcttccttcagataacgaaaagtttgtggtttattgtgatgcctcgagacagggtctcgactgtgtgcttatgcaagctggaaaggtaacaacttatgcttctcggcagttaaaagagtacgagtagaggtactctactcacgatctaaaactcgtagcagtggtatttgcgctaaagatttggcggcattacctatatggcaagaagtgtgagatatacactgatcataaaagtctgaaatacttctttacccggaaagacttgaatatgagacagaggcgctggttagagttggtgaaggattacgattttgaaatccttatcaccctggtaacgccaacgtgattgctgatgccttgagcagaaagggtcagagtcagataaatactatgaaataaatctcccagcagctagcaaatgagatgacccgagctaagattgaattggttgtggggaagttggctaatattaccctgcaatctactcttttagagcaaatcaaagaagtaatgcaagatccagagttggtgaaaaccctagatagggtttcggctgggaaggctagtgattttttagtggatgaaacgggaatgttgcaattcagaaattgtgtttgtgtgcctatggatgatggtagtaaaagagagattatggatgagtctcatatgactccttactcagttcatccaaggtcaacgaagatgtatcaagatctaaaagtcatgttctggtggccaggcatgaagaatgacattgctgagtatgttgctaagtgtcttacctgtc

SEQ ID NO: 279067 - DNA, 517 bp, Cannabis indica
caaccctagcagccctaggaattcgagagagagagggtgaaagagagagaatggtttctttttccttaagaattttctaatttcttcttagtaaatgagatacaaagtgatctatctaaatatttcagctacttactaataaaaaatcagattattacatcaacacaaagtccacaaaaggacaaactacaaatggcaaaaagactattttgcccttccctcaccaagcaacataaaatggcacttaagggtatttttgtcaactctaattctcaacaattcccattcccaatgtctaattatatcgccctgctatattaaaaatactacgatgtgattctaatagccaaacaccgcgctccaatgttgtcgggcacaaaacatgcaaaattatgaaatttctatatctgacatataaaatgtattctgaattcaaataaatcaccataaattaataaataatttccataattaaaccctaattatatgctaatttccaaatttaagctaagcgatc

SEQ ID NO: 279068 - DNA, 932 bp, Cannabis indica
gggcataaaacccaacaaacctaggcatttcattactcgccttgcacacaacacaatctcccttataattcctcctcaaagatctctacatgtttttcctccatagatcactagccgcgagaaaggaaaggttgttgctggaagttctactgaaggaacttatcaacccacctttctaacactgcctgatgattgtagcccctccaatacacatattcaactaccaagttcaaactatgattatttacatattgctgctactactgatacttttgcaatattgacaaacattgcaacactgagacaaataccacgactacaacttgtcactatcaatcaggagattgctcaaaggatacacgcaccacatcttcataatctccagtcagcaattctgtggttatctcaatggccattcctcctacatatatccatgtttcatcacctctgaataatacaggtgctactcatcaaccaggggcctttttctctgactcaaccttgattactactctccttggtgtggacaataccagtaacaatacccctgttgtccctttggctcatgatactactagtaatgtaaaccgattgtcgtctctattctctaaaaggaaattggttacttcaggtggtaatgttcacaatgtgttaaaaagatggcgtacaaaagccactcctcttgctaattccactagttccttgctgcatgaacaacttatcacctccttagatttctcgaacttgtcatcagagattgatggaagtaatgcttctttggagcaggctgatgttcatcctcaccaaatgttatgattattattagctggaatgctcggggtctgagcaactcgagagcattccgtcaacttcgtttgctcatttctcaaaatcaacctgatgtaatttttattatggagtctaaacttagt

SEQ ID NO: 279069 - DNA, 539 bp, Cannabis indica
tccaattctctttgaaaaccatagctttttacataaaaatctaaccaactagaacaaggaactcaagcatgcaattcaatctcattaaacctacttaattcaacattttaatcaaagaaacaacaacaacaataaccagcagcaacatcaccaaaaacatcatgcattactcaacttaaatcatcaaaacacaacaatttttaaagaaacaatgaagagaagctaacctagcttgaagaatgcttagattggatgagaaattacttgaaaatcagagcaaaaacccagctccttgcacccacatgcacagccgagagagagaggaaaagagagagagagttttgaatttctaactttgtgatttttttgtaaaatgaagaaatgaataaaaagccacctattaacatttcatttcagccaaattaataaaataaacttttatttttcaagtaacaaattcactaaaagacaaaatactaatggggcaaaaagaccattttgcccctccaccctaaaaccacataaatcatactaaaggg

SEQ ID NO: 279070 - DNA, 529 bp, Cannabis indica
tttttttttttttctgatcccctttctcatttttctcaggggtatttatagagattgtgggggaatagttaaaaaggggtaacttgtctttgagtgccagctatggataagcacaagttcccaaaagatacaaaatagggcatgcattacctatatagtaggtatcatagaggttaggtgagattagccttcatccttccttgattaatgtgattcttcataatggatctgtcactagtccctttgattatcgtgtaatcaccctaaatcaggcttacgatgtctgacatgtcctcttatgggcgttcccagacgatttccccatgctgcattaaatgcaaggtgactgttcgaataggtccctctcgtcccaaaggtgctttactctatcttaactcctggagaagaaggcataccttttgcacttatccgagagctaactccctgaaccatacttattgtctcttttatacgacttttaactaatacttgggtgaggtgtcttctttgtccacgtgtcatacatagc

SEQ ID NO: 279071 - DNA, 507 bp, Cannabis indica
tattccacctactaaccgaatcttgataaaactctaagagctcgaaatctcttcgatcaccttgaagagtgcttgcttcctcccgatgcaagacttgaaaagtaatctcctgaaagctttgtaaaaccttctcccgaaggttgcactgatgtcttcttctttgtagacttgaattacagactcaagacaatacaaaatacatataaacagagtaagagtttaacaactcttctctacaaaacaaagacactctttccttaagatatgaatacaattttaagtgtatgaaagagatactaaacctagctgctataaggtgtatttataatcaatatacaccttattgacaacttacagacggtctgaacaagaccccagcccactagaaacttccctaaaataaatctttaatcagcctaggaattactatttcagtacctacagaatcgtgggcagtaagtacaactctccttttatagaaaaggaaagtttagctctagttttctc

SEQ ID NO: 279072 - DNA, 553 bp, Cannabis indica
aaaaatacttctgtttctttatagatattgaataatacggactacattgaattggagttttatttagggcattaaacccaacaaactcccacttgcactaatataaaactaatcagtacatatcaattaatcctaaattctgacggtgccttttgaatgtagtccctgccaagactggtgaatggatcagctaagttgtcctctgtgtccactttctccaccagtacatccccttttgccacatattctttgatgatgtgatacttcctttctatatgcttgctccttttgtggcttcgaggctccttactattggctatggctccagtgttatcacaaagcaaaactagaggcttttccattccatgcacgacaccgagcccagtgaagaactttttgagccagacaagttctttggcagcctctgcaacagctatgtattctgcctccatggtagagtctgaaatcgcggtttgtttagcacttctccaaaccactgctccactcccaagaataaataccatcccagatgtagatttcctgtcatcaagac

SEQ ID NO: 279073 - DNA, 799 bp, Cannabis indica
tctcaattctatcattctagagtagtaacatctgggtattactctgtacttggagacattaaaaattctaactgaaagccaattggaaattttttcaaaatctgtgtttggttattttcttcggattccggagtacataattcattaccaattgcttcattgtttgctgttgagggaggttcagcagcctaatgggttggagttttgggtttgtgtccaagggaaatatcttaggtttagtatcgaagagtttgcgttggtcacggggttagattgtcatgttgattctgatttttatcagtttaagcaagatgataatgaattggtcaaacattgttttaaggggtacaaaaaaattaccaagggtgctattcagactgcttttattgctgacaatcttaaggataacgacgatcttgcagtcaagttggctgtcttgtattttgtgcagtgttatttgttgggtggtcccccgggtaaagttgtttcgtctgaggaaatagatgttgtcgatagtggtcgatataatgaatttggttggggcaagcattgttttgatatcactatgcattctttgaagggtaagatagattctggttataagagggtagttcgtagtgacgaggatggtgggtattacaggttattgggttttcctttggctattcaattctggtttttcgagtgttgcccgtacgttattgggaaactttcgttgtactcaaatgttggcattccaaggattttgaattggcctaaattacccaaggacaaggagggtcaggtgaaaatggatgtc

SEQ ID NO: 279074 - DNA, 627 bp, Cannabis indica
ctctcttcaaaccctctcttattttttttcaacttgaatttgggagaaacttgttggaattgaagcttgattgttgagaaaattgtgttggaagcttgaggcttgtttgaacaaggaattgaggtagtttttacggtttttatttttggattccttgctgaaattatttataaaaagagcatgttagagtgttggtgttcttgattatgcatgttgttgaatttgatgtttgatcttggtaaattgggtgtgaataacttgaattgttgtaggtattaattattaagttgtggctgagattttagggttttctcttggttgaaatccttgttatttttggtaaattcagaggcgtttttaggatttcattgagtttaaagtttgattgtaaactctgattttggttgtgtaaagcaagcttgagttcatggaactcaagcttggagctttaatggcactttttgattcttagtgaaattattgtgtttgagctgtggaatatgtttattatgtcatataatgatgctctggaaagtttggtggtgtttggggaagatttgagtaggtgatggggcctaaagattgaaatttttcgtgttctttctgcccagacaaccggaattccgg

SEQ ID NO: 279075 - DNA, 536 bp, Cannabis indica
agagacatgatatgcaaaatgacacaacccacattcagtggcaattacaaagtgcatgtttaaaacgaattacgtaataattatagacgtgatcttttagatcatatataattattgtatatataatatatagtagagaaatagtgtcataatttagcaatatattatattttgtctttcagaatttagtgatattattagaaaatctcaagtagttcttttatttctttctttaggagcgaggaacacatgccaaaaagaaattaaaacattagatcaactattcgtgctatccttaagcagttatataggatgaatataaaaaaaaaaaaaaaaactagttacatataaaattatacaaaacttatactacaaaaataatcaaattagtaaatattatttattattattatctattctatataaaatgtagttatgtaacggaaatactttattcaacgtaaagttttttaaattttttacgctaactttaacatatcattccaattacttaacagaatatttttattaatttt

SEQ ID NO: 279076 - DNA, 328 bp, Cannabis indica
acccttaaccgaactcaccaaaagaatcattattttgtatggacagataagtgttaagcaagttttgaggagctaaaacaaaggttaatcacagctccggtgttagccctaccttctgacaaggagaggtttgtggtttattgtgacgcatagagacaaggtctgtggtgtgtactgatgtaggctgatcgggttattgcctatgcctctcttcagttgaaagattatgaacagcggtacctgactcatgacctagaacttgctgcggtagtgtttgcttcgaagatttggcggcattatctctatggagagagatgtgaaatttata

SEQ ID NO: 279077 - DNA, 785 bp, Cannabis indica
aaatgccaaaactaattatttaataattaaaataattatcaaataaaattgtcatttataatatttattaattagattccataaagtctcttaattaacaaataaatcctaaaataccatttcttcaaaatcaagccatatcttagtgaaaaattcataaactatacatagtctaattttagaatttgattagctaaaatcaattaactgagtcttaaaagcagtttgtctcaactagtatgtggaccatgggcctatataaccgagcttccaataagtagatctaggatttaccaagtaaaaccactaacttattaattcctcattgcatccaccatagaacttggaatcgcactctcagttacatagaacactctatatgtttcacggtatagatacattattaattatctattgttataatcccaataatcaatgatcctctgtagatgatctatattgcatatggattgatttaccgttacacctttcaatgtattttatccttaaaacacttagccacatataaatgatatttcagtgaactaatataatcactgaaatgagtactcaaccatttatctctgtttagccaagcttgaaggaaatcatcgtttcacttctatgtccagatagaagatatagattccatatttatgattagcgctcccacttaattgtactatcatgttcccaaaatgtacgtatcacccagactaaaaggtaagcttaactaacaaatcaaagaacacaaataacactcttaagatcgaacctaaccatgt

SEQ ID NO: 279078 - DNA, 525 bp, Cannabis indica
cggattgtccatccgtctaaggatgaaatcccgtgctgaactttaactaagtacccatagctcgatcaagactctcccagaatcttgatgtaaacttcggatctctatctgaaataatggactttgggacaccatgaagacgaacaatttctctgacatataactcagcatactggtcaatggagaaattcgtccgaacaggtaagaagtgcgctgactttgtaaacctgtccactatgacccacacagagttaaactgtcccgtggttctacgcaaacctaccacgaacatcatagcaatatcttcccatttccactctggtatattcaatggttgcagtacccctgcaggcctctgatgttcagctttcacttgttgacatgtaaggcactttgcaacatactcagcaatataattcttcatgcctggccaccagaacatggccttcaggtcttgatacatcttcgttgaccctagatgaactgaataggagtcgtatgagactcattcgtaatctctttctt

SEQ ID NO: 279079 - DNA, 849 bp, Cannabis indica
aagagaaaaggttaagtgttagaacacctgtgaaaacagcatacacttaacaaaaaggcaatcaagttagtacctaccctaactccctaattcagccctagcaaagtcccgaatcttaacactggctgcatcatccccgagatagctgtccgagggacggaaccagctagaagatagataggctgaagagtccaagggaacgggcactggaggtccaaaacccatccgggaccgacctaaataatcgcctaagtgggagaaataatactccttggcatgattcccccaccgagtggaaggcatcctaaacctatggagacgttcatcgaaccctataggcctaaggctagcatactcacggacggaagggacataatgtatcattaaaggagacttaccagaacccgaagtgctggcatcaggagcccccgtattcggtaccgggaccacgggctttggtctgggggtcctctgctccaccggagccccaatgcgaagggcccttccggcggtcacctgggccttattataagcccgctcctgttccctcttgaagaggtacttctggtacttatcctctgccgtggcgatgatgtcatcccggaataccttctctgcggccggagccctcacattaggacagacgactttagaaaggttggagtcgtccatcgactgatgccccaagatcagcttggccttccgacagtgctctgtcgtgaccaactccccgacgtcgagggccttcttgtcatatgtggcgaaggtcttagcccgttggaggaaaagctgagtaggttcagttcgcgcataaggggggatcctaacccactccgtgagaagctacgg

SEQ ID NO: 279080 - DNA, 503 bp, Cannabis indica
agagagagagagagtcaatacattaaaaataattaaaatatcatatcaattaattaaaataatttgaatttatttttggtatgtaattacacagtgtaattacacccaattctcatggggggtatgagaattggagagagtaattgaggcctcccaattacctctaattacacagttactatgtaattacgtggccacaaaaacacgtcaaactgtgtaattacctccaattacatccaattccaattcccaggtggctttccaaacgcgccctaaaacaacattgccatcaactatgtatgtaatcatttataaaaatttgacaaataacaatataatatatgttttagggtagtaatcatagtttacgttatttaaggtatattgtttaccttattttaggcatgttgtttattttattttagatacgttatttacctaaattaacgcatgttgtttacctaaaaaaaacatgcttttttcaccttattttaaggcaattt

SEQ ID NO: 279081 - DNA, 746 bp, Cannabis indica
tttgatgggataaatgggtcccccaaagaacatctggcgtactttgtctcagcatgtggtgaatctgctcagtcagatccattactcataagacaattcgtacaattgcttaaaggggtggcattcacttggtatacgcaattaccaccaggatcgataatcacatgggatgacatgcaaagagccttcattgctcagtttgtaagctcaataagggaagtcactcttagtgacttagctgaaactaagcaaagaccagatgaatctgtcaatgaatttattgctagatggagaagtgttcgacttcaatgtccagaaaaattatctgagctatctgcagttcaattgtgtagacaaaatctcattcctgagatagcagtttacttatgctccacagaacctgaaactttcaatgagctcgtttccaaagcaagtaatgttgaggtgcaaatagctcgtcaaaacgacatgtcatatgaatgaatggctatctttgtaaaatatgacaaagacaaagaaaaagctaaaataccaccgaaagagatccaagtagagtctcaatttcaaaaaagcacattgtgacattgtgtctttaactaaggacaggttttcgttttaaatgaggagaaaggttgtcacttgttgcaacctaaaaaaaaaatgagcatagcagaaaaaactaatgctcaagaaaattgggcaaaaaaaaggaaagcccaacaaaaaagcgaatgctcaaagaaaaa

SEQ ID NO: 279082 - DNA, 765 bp, Cannabis indica
gagagagagagagtcaatacattaaaaataattaaaatatcatatcaattaattaaaataatttgaatttatttttggtatgtaattacacagtgtaattacacccaattctcatggggggtatgagaattggagagagtaattgaggcctcccaattacctctaattacacagttactatgtaattacgtggccacaaaaacacgtcaaactgtgtaattacctccaattacatccaattccaattcccaggtggctttccaaacgcgccctaaaacaacattgccatcaactatgtatgtaatcatttataaaaatttgacaaataacaatataatatatgttttagggtagtaatcatagtttacgttatttaaggtatattgtttaccttattttaggcatgttgtttattttattttagatacgttatttacctaaattaaggcatgttgtttacctaaaaaaacaatgcttttttcaccttattttaaggcaatttgtttacctaatattggatgactttttaggtaaacacctaaatctaaataaggcacgttgtttaccttattttaaggcacgttgtttaccttattttaaggcacgttgtttacctaaattaacacatgttgtttatctaatgaaatattgtttaccttattttaaggaacgttgtttacctaaattaacatatgttgtttatctaatgaaatattgtttaccttattttaaggcacgttatttaaaattttaaataaattatta

SEQ ID NO: 279083 - DNA, 651 bp, Cannabis indica
tgcatgttattcttaactttttccaccctatcagatcaaaaggtctttttaataaacaaattcttaataattgatttagaattatcaattattcataaacatagaattgatattctaagtgtttatgtagtattaattctttgcagagttgaatatactacagaatttgtatcaataataaaaatacatacacatacaaacattaaaacatataaatataattggtactggcatacacaagatacagtaaatgaagctcaattcataaatgcaattcatttttaaaatagaaaactttattatattctccaaaattaaagaaattgtctgcaataatatgaaaaatagggaataaaatccccaaactaataattgaaatccaaattgttctaaaataaaacaattttttcaaaaataataattttaaaaaaatagaagatttcgagcttcatcttcatcttggactatctccacccatccgtccaaccatccgattcaacttgctaggatagcatccaagttcaagcagctggagctgaaataagaagaaaaataaacatggttagtaggtcaagaattaacaatccaagtggataataattctctaaaagacatgagtttatagcatagaaagaaataccttgtttcttt

SEQ ID NO: 279084 - DNA, 411 bp, Cannabis indica
aacaagacatagtctaattttagaattataattaattaatcaaaatcaattaactgagtctcacaagtactattgtatttacattgtatagggattaaattaccgttacacccttcaatgtattttatccttaaaacacttagccacgtataaatgatatttcagcgaactgaaatgagtactcaaccatttatctctgtttagccaagctcgaaggaaatcatcatttcacttctatttgctagatagaagctatagattccatctctatgtttagcgctcccactcaattgtactaccatgttaccaaaatatacgtaattcaagttcaaatatcggtccctttcgatgcatactccatgcatccaacccaagctttactttaaccaatgctctggaaagaacatagca

SEQ ID NO: 279085 - DNA, 460 bp, Cannabis indica
acaacaacaattatgggttcaaccaaggaggtaaccgaaggaacagtgggttctatcagcaaagaaatcagaaccagacacacaaccaacagtacactcagcaacaaagctctaatggaaattctagtttgctgacagatttattgctacaattcatgactgaaactagatcttccactaaagatttgcagactcaaatggggcaactagcaacccaagtagcaacccgtcctcagggaaacttgcctagcacaattgatgttaatcttaaagaaaactgcaaggcaattaccctgaggagtggtaagaaatatgataggcccgagatgatgcaaccagtggatgaagagattatagataaagtggcaccaactccaacatcaacagaagagaagactactgatagtcctgcaccaccacaacagtctccaccaatcagtattgatcatcatgtgaagat

SEQ ID NO: 279086 - DNA, 537 bp, Cannabis indica
cgcctaaggtagttagggtgttacaatgtaaatccctcataccttctccgggaggcatgctccttgctgatccttttgattgagaagacttagtcgaattatctcaaagtcttactccttcaatccacatgtcacagtcgtgttggtccacgtattttgaacaaaattaagggcaacaatgtatttcaaaattaattatgttactaatcaattttattaggttaaactagtataattaacctattacagttattcaaataaggcaaatgggccttcacaattagggttgttcatgtgagggagggttgggttcattatgtcgtacccactaccaatggcttcctaactctcacacaaggcccaaaggagatgaatttaaccttaattaaacaactgtattcattgaataagcccaatactcattggacctaaataaaatcaattaaaaagtgatgattttattttagcaacctagtccattttaattacaaaaattaaatgggctccctacgaaagaagattacaaaatttacctgt

SEQ ID NO: 279087 - DNA, 517 bp, Cannabis indica
aggatgtcgacatagtagttaaattatatttctgccctatattgtcgacgatttgtcgacagtatgtcgatggtatgtcgattaaactaactcgttgattgttaggttgtattgtcgactgaatgtcgattgtatgtcgacagtatgtcgatatgttgtgtaattgttatttgattgaatttatgtttgcattgtcgaatgaatgtcgattggtagattaaatgtatttctgccatatattgtcgactgaatgtcgactgtatgtcgacagtatgtcgatatgttgtgtaattgttatttgattgaatttatgtttgtattgtcgattgaatgtcgacaggatgtcgatattttgtcgacatattagtgttgtgttgcatatgcttttgataatgtcgacataatgtcgacatgatgtcgatgttatgtcgacatttcttaacttttttgacatttaaatttgtttggtctttgatttttcagatggctcccagactcattattccagcacccgagc

SEQ ID NO: 279088 - DNA, 631 bp, Cannabis indica
gaaggttgcacacagcctacctacgtgcgtgcaagtggaagctctaggtgtaacaccctaactattataggcatgttagcgtgatttttaacgtactgtgtagctcgttgctaatcaacgagattattgaaaatcgtgaataattaaaattgtgcttaattatttaaaacataatatattacatttataaaattctgggatcccgtttacaaaatacagttacaaaagtttactattcatatacaaaatatttgtcgcctagcgaccaaagagcataagccctgatgtcccaaagatcgtacgctccaggcctagcggcccccacatgtacaatcttcacctgctcactctcacggctcctcaactttagctttgcccttatctacacatagcaatagcactgtgagtcgacagactcagtaagaaaagcataacatataacatacaaataacccgggttataacctggcgcccatacacccgatcataaccctaatccccgtgtcccacacggtactgagtctagaacgttcatacgacaaaactatcaaccataatgtcagcctacactcaatatgctagtcatactctagccatatttatgtgacaacatcgatcagtatttcagcca

SEQ ID NO: 279089 - DNA, 575 bp, Cannabis indica
agcaagaggaagaaaggttaaaaaaggacaaaactgaaagtgctcatttggccactacccctaaggataagggcaagaaaaggaaatttgagaatgaagctgctaagggtccagttcaaaagaaacaacaacaggattctaagggttgtttcttttgtaaccaacctggacatgtgaagaaagattgtgccaaatatcacgcatggcgtgtaaagaaaggtattaatcttgctttggtctgttctgaggttaatttagtttcagtacctagaaacacttggtggatagattctggtgctactactcacataagtgtttctatgcagggttgcctgagctaccgaaagccaagtgatggtgaaagatacatctttgtgggcgatggacaatcggtggaagtggaagcaattgggcatttcagattgttattaggaactggtttttatttggatttgaaagacacttttgttgtgccgtcttttagacggaatttagtttctgtttctttgttggacaaatttggatattgttgttcatttggaaacaatcagtttactttgtctttaaattcaaat

SEQ ID NO: 279090 - DNA, 871 bp, Cannabis indica
gtcaggagcatgcctcgagtgaataaggtagtcgcgggccgacaccgtggactcgctgtctcgaatgtcgatggtcccaggttcggcaagttcctgcaccattctttcgatgtctgcagaagacatcgggcctagctctattggtgcggcctcctcttctgaaatcgaggttgggagaaagctgtcttcctcctggtcatcgtcgccatcgaatgcatggcctcccgagccgagctgttggctatccgacaagtcgctcatctgaaagatagaagatcttttcagcgtgatgaatgtgtgaaaaacaaaaataagtgatctcacccgcattaaaactataaaatcgcagttgccagaatagtcagcatccttacgaatgctgaccaccccatttgtatgcgagttgaaatgcgagtaagtcgcgcatcctgggccaagtgatatatctccagaaacggctgggagaaactcagttactcaaggggcatgcgttctcaagcatgaccctgaaattactgagttactcccaccgttccgagactacctatcagccaaggagtacgctcatttgaatattaacgcatgttgcaaatggctgggtgtatctcagtatctcaaggggcatataatcgcatatatgaccattagaatactgagacacacccaccatttggaatagcgattaatactctcgcaattcaacccacagcatataaaatcctaaaaaatctagctaaatagtcaaaaggtaaataagttctgtcagtgtgcgagtattcgaactgttcatccgaatacccgcgagtattcaaagtatgaaacaacgtctatttaaatatttcttacacagtatgcggttattccaaattac

SEQ ID NO: 279091 - DNA, 1114 bp, Cannabis indica
ctgaagatgaacaacatgagatagccaacacttgctttatggccattgatgataaggtaagtaatcctaaccatacaagtgattttgaaagtgaaagtgatgatgatgcacttgatatgtcttatgatgaattatcaaaatccttcaatgatttgcttgttgattttgaaaaattgcttgctaagaactcaactcaaagaaagaaaataagtttattgcttgaagaagttgaggctttgaaagtcaaagaaaatgagtttttgattgaaacccaatgcaaaaagtgttccttatttgaaaaagatgttgtaaacttgaaagctaaaattgatgatttaaacaaggtggtttacaattttacaaaaggaaaagagaattttgaaatgatgcttgggagtcaaaaatgtgctttttcaaaaagtggtataggatataacactagtgtgaaacaaaaatttcttaggaatttctttgtcaaatcatctagtaatttgaacttaacttgcacttattgtaaccaagatggtcacactaaatcctattgccatgtgaaaaagaatgcctattttggtaaggctatttggataccaaaggttttaaagactaacatcaaaggacccaaagtcatgtgggtaccaaaaagaaagatataagtttgttttgtaggtatcaataaagaggaaccaaagttggctcttgggtgttgatgcttaaagaagaatgccaatttcctacattaccaacaagtctcaaaagcataaaaaaaaaagagcgtgtcaattcttgaacacaacccaaattaacaaatttgggaatcggtaatatcattcttattcattctacttattttgatgagattaagatgcctagatgaaaagaaaatgaaacttgaagtgtttggttaattgacttgcttttgatccttcttgttcattctcttatggatgcttaattggtatgtcacatactatttctattaataaaagttttgattagttgagttttgacattcttgaaccttacatgctcaaaaattcagattattggtcattatgcaaatttttggtgaactttggacatatatttgaactagtgaatatgtgaacttttacat

SEQ ID NO: 279092 - DNA, 592 bp, Cannabis indica
ataaagtcatgcgatttggctcaaaaatgttggggcgacataccaaagattggcgaacaagatgtttaaagaccagatcagacgaaacatggaagtatatgtggatgacatgctcatcgaatccggaaggttgggggcacatagatgacctggacgaatgcttcaaagtcctcaagaaagacaacatgaaactcaatcccttaaagtgctcctttggagtcagctctagtaagtttctaggctttattgtcaacgcccgaggaattgaagccaatctagacaagattcaagccctcctggatatgaaatcgccaacaagaatgaaggaagtgcaaagcttaactggtcagatcgccgcactcaatagatttgttacaaaatcaacagacaagtgtgttccattcttcagcatcctacgatgaaataagcaatttgagtggacggaggaatgtgaaaaagcttttcaagtgctaaaaacgcaactcgcaaaacctcctgtactctcgaaacctgtagatggagaagaactaaagatatacttagctgtaacggagcataccgtgagtgttatactgatcagagaggaaaacaa

SEQ ID NO: 279093 - DNA, 653 bp, Cannabis indica
tgcggacctttccctttcgggaaatctgagcggacctttcgtggatcctgtgcctttttctttctcccaggggtagaagtaggatttttcttttggttcccttcagcgggataccttatagggcttggttccctagacctttgctgttgggtactgggcgaggattcctctggttccttgccgagtccagcagacatagccttaggatgcacgtggatgccagccgcctccatggctttttgcatggccagcattacctcttgcatcttttggttttgtgctttttgggctgcaatctcagcttcatgatcgacaaccatttgtcttagaagcaccaactctaagtagttatcgtcgtcataggcgtactcatcgaggtttccctcgtaatcatcatcaggaattccttcttcttcctcggagccctcaactgctcttgaggctacgtcttcctcattcgggtcttgagcatcttctagagggcgaggttgacgagtgcttcgagtctccaccattgttgtaatatgttgtgtgtttacagaagctttcttcagctctcaatgaaagcaccaaaatgttgaccgaagttttcggcaaccaataaaataataagagattaaagagctgtaagaaattaagagaaggatttttac

SEQ ID NO: 279094 - DNA, 587 bp, Cannabis indica
tacaactaagctgagcctaaccatatcaggattaagatccatagacctaagatcaaccattgatattgacttagaaagatataacgataagtttatgatatcttatccaagatcaatatcggtccctttcaatgtatactccatacatctgatactgataaactttgccaatgccctagaaagggcataacacttatccaaaatgtaagtataccttatcgccgattatccaaatttgatgaaaatggaaaggaccccgtagtgattgcaaaatatgtaataaagatctacatagttttgatcaaaacgattaaattctcaaagaaagtgtaaaactcaaattatcaaagatgtcaagatattgaatatactcaagagagttgatctctacaagattcaggaagggattcgccctttttttttttttttttttctgacgtacgacgtgtcgtttatgaaaaacgacaagtcgtttgctgaaaacgacatgcagctgggtcataaacgacccgtcgtttttcgctgcaaagggctgagtctcccgttagtacgacacgtcattttttggaaacgacatgtcgttcaac

SEQ ID NO: 279095 - DNA, 568 bp, Cannabis indica
cacacttgaatctggaaaggagataagaactgtgtataatgtgtaatatgaatatgcaaatgtgagtatatgttaagtgtatatgcatgcttatatgtttcttacactacctacacttgtacgattagagtacaaagtgcattggtatagtgtatattgttaaagagtacattacagtgataccaacacaagtacgggaaagtacaaggtgtttgtggtatatcactcagtagtactcagggtacgaaacaaaccctaccaacacttgtacagtgagatacgtagtgtatgtggtatagtggctgtaccctagtaaggaacgttcttactcatctgttaagccttgtaaataggtgtatgagcgcctagatatacaagtcagtattatatgatatgttatgtgcttttcttactgagtttgtcgactcacagttctgcttccatgtgtaggtaaaggaaaggcaaaagctgaacaggagtgagcctggctgagatgagattgtacatgtcgtggcagcgggacctggggtgttcggtctcgggacatctggggttattattttgtagt

SEQ ID NO: 279096 - DNA, 551 bp, Cannabis indica
tctcgttcccacagacggcgccaaatgttgtcgagtgaatttcgcaataccaattttatatgatattattaatgacagaaagaaatctatatgaagaacaagtgcgagtattcaacctagagtggcgagtactcaaactgggaatgagaaatgattaacagaaagctggaaataacaatgagacaaagaattatagtggttcagtcagatcacagtctgcttagtccactgtagcaagagtttccttcggtgccatttcacggtggatcacccctttatatacaaagcaggtgtccgatcagttatacaaggattgcattcattgtcaatccgtttttacacattgaattacaataattaactaaacaacgttaatattaataaatgaacggcagttactaagttcatcaacgtatgcgtcttccaagtctgcgagttgacttgttcacgttctgatattaacttcgcaggtttaacattatgcttaggatgtctgcgtcctttagatagtcgccttttgtggacatcgcatgacgagctgatagaaccta

SEQ ID NO: 279097 - DNA, 607 bp, Cannabis indica
tatattaaattattatttttgttataatacataactggttctaaggtttagtttttaatttggttaatctacataactagtttctcggtatcatatttttaattagctgataaatattactgatttttcattgtcaaattcaaaggtccaactccgatgacaactcaaacgtccaacattggtgacaacttcgatgtctaactacgatgactttttggtagcgatgacttttccgacgatgatagcaattttgtcaaatgttctcattttattttctacttttattgtggcaaatattttgttttagtagacagtgattgttttgtgtagtgggttgatggtcgagtcttggagtttctcgaaaacttgtaactggttttaaatttggtcttgtattgattttagttttggtagtggcttggaggtcaagtcttagagcttctaagaaacatgtaaaatttatatatgacttttggtatttgtaactagtttttttggttcaaaaattaatttttaattacatagaattaattagttaattaatttaatgtcttaataaaattattttaatattatttgagtttctataaaaaaaaaaaaaaacaaa

SEQ ID NO: 279098 - DNA, 736 bp, Cannabis indica
ggatgtacaaccggaattccggttcctcgcaggcagcaaacataaaaatccatatcttgctcaaataaactccaaatcaaatgaaaccttccagacctgttctataccacccctagaacatttctaaagcaacaaaaccacccagattgcacataatcaaaaatcaccattaaagctcaagctttgagttctaaactcaaacttgagcaaacctagctaacatgcaatcaaaccaactcaaatccccttaaacaagcataactaagcctctggaaacaattaaaaacatcaacaatatcacagcagcagattcaagacatttctttcaaaaatcatgtttttgagctaaaaattccaaacttgatacaaagcaattaacatgcattactaacagcttaaataacttcaaattaacatgcttaaattacagaatttaacaacaaaacacagcagcaacaacatccaaataatccatgtataactcatctttttcaattattcaagaaaagagagaaagaaagctagaaatcacataccacaacaagagatcacaatttaggatgaagctatcttgaaaaatcaatgaaaatcccagccctagagtcccatgcaaccagccgagagagagaggaaaagagagagaggtttttgaatttttttctattttctaagtttgtaattttttgatgaaatgaaataaaaaaaagctttttaaacataaagccacaccatttca

SEQ ID NO: 279099 - DNA, 551 bp, Cannabis indica
ttcattgatcaaatgctagacagattggcggggcaagaatattactgctttcttgatggctactctggataccaccaaatagctatagcacctgaagatcaggagaagactactttcacatgtccctacggtacctttgctttcagaagaatgccattcggtttgtgtaacgcccctgctacttttcaaaggtgtatgatggctatcttttcagacttgattgaatcttgtattgaaatctttatggatgatttctcagtttttggttcctccttcgatcattgtttggaaaatttggaaaaagtgctaactaggtgcgagaagtctaacttggtgctaaactgggagaagtgccactttatggtaacagaaggaattgttcttgggcacaaaatttcaaaggcaggaattgaggtggataaggctaaagtttcaacaatagagaatttgccacctccagtttctgtaaaaggagtgaggagtttcctaggacatgctggcttctaccgaagatttatcaaggacttctccaagatctcaaaacctttgtc

SEQ ID NO: 279100 - DNA, 522 bp, Cannabis indica
gagctactcattcatatgtatcgagtagagtgatagaaagtttacataagccatgtgatatttatgtttcggggtttggaaccctgttaccctcgggagacctgatagtatccacaaggtggattcggtccttgtctttttggattgacggttgtgaattgaccgccaatctaattgaactgcaattatctgattttgacataatcctgggaatggattttctgtctaaatatggagcaatgattgactgtaaacggaagatggtggtgtttgagcccgagagtgctaacccagcggtgttcgtgggtaaagttcagggggcacgcataccgagaatatcgttgttgaaagctaaagacctgatgggtagaggttgtctagggttcatagttactgcagtggacactagccaacctgtgacatcagggcctgagaatacgaaattggtatgtgagttccttgatgtctttccagaagatttgccgggattgccacctgttcgggaaattgaatttgttattg

SEQ ID NO: 279101 - DNA, 227 bp, Cannabis indica
aaataatttccaacaccttcaacttagcctcacgcttaagttgaatgagctcatcctccttattagctcattcatgctggccagcatcagatttcctcctcttcctcgccatggacttaggagaaaagtcctcgagatagagcccgtactgcaccagattatcactggaggtcaactggataatatccctgtcttcccccggcaaccgggcaagtttttgagctcta

SEQ ID NO: 279102 - DNA, 767 bp, Cannabis indica
agatcctggtaaaataattcccaacaaattttaggcacagatgtcggatcgaagtgattgcaccaaagtccactagggccggccggccgaggatcgcgttgtaggctgtcggacagtctaccaccacgaaggtgcaatatttaaatgtgctttggggagtatccgggcacagagtaaccgggagccttacttttcccatcgggataagcgtcgtcccgttaaaccccgtgagctgcgacccactaggcgagaggtcacggtcggtcaaccctatcgcggtgaaggcttctttgaagagcaggttcacggaactcccattgtcaattaagactctggccaccactttattcgcgatgggggtctctatgaccaacgggtcgtgatgagggaaacgcaccgtcttggcgtcttcttccgtgaacgtgatgggttggtccatcagccgaggcctttgagctgggagttgagtaacttcccatatctcattgtgtttcgcggcctcggcgtatcgctttcgctccttgcgagtgttccctccgatatggggacctccggagatcatggctacccgcccgttaggccggggcggtagcccgggaatatgctgggcgtcacctgcgggagcagctggagccaatactcctgctgtaccccctggtgttcccggaggcatacccccagccacctgaccggattaaggtggggcaacctattcttgatccactcatagaggtggcccaatcggattagattttcgatctcgtcct

SEQ ID NO: 279103 - DNA, 880 bp, Cannabis indica
ttataaggccttacctcagctttgcatccccaaacgtgaaaaataacgcaaaatcgatttcttgccagaccacaactcgtatggcgtctttggaaccgacttgctaggcacttgattcaagatataagcagcagtccttaatgcctcaccccataaaaactctggtaagctagaatgaattaacatacaacgtaccatatcaagaagtgtgtgatttcttctttcagcaatttcattctgctggggtgtacctggcattatatatatcttgcatcaatgccacgttcgtgcaagtatctggcaaacggcctggggttccttctagtttcatcataacgcccataatactcttcacctctatcagaattgacaactttaatcttctttcccttttgaagctcaacattcgtcttgaaaatcttaaggcatttaaagattcagacttctcacgaatgagctcaatatgaccatatcgggaaaaatcatcaatgaaggtaatgaagtatttatagccgcccatagcaggtgggacaaaggacccacaaaagtcagtgtgaataagctccaatacatctgtgcacttatttgacttactctttctaaccttatcagttaactttcccttttatacaatcaacacaggcagtgaattcagagaaatcgagatcttgaagtacaccatctttcaccaatctctccattctatctctaaaaacatggcccaaacgtttatgccaaagcatggatgatttcaattctaatcttgcacgtttggaaccaacaacaacattaagagaagaagaagaaggacaagagggagaagtaacaggaacaacatcaagcaaatcaagcttatataagtttccacacaaaattccat

SEQ ID NO: 279104 - DNA, 773 bp, Cannabis indica
tttcccaggtccctatcttgattctgaatctaggtctcgattattgtgtgtgtttaagtcacggtctatgttcgggtttgagtcccagtctcagttcgggtttaggtctctatctgggttttgatctaggttcgggtttgggtttaggtcctggtcctggtcctagtcctagttcggttctagttccatttgcgattttgagttcgagtttgggtttgtgttcgggtcggagttcgagtcctggtctgagtttgggttcgggtctggatttcattctaggtccagatcaggctccgagtgtgggttcgggtcttggtctaggttgggtcaaagtctcaagttccaatcccgatgttagtctggattcagttctgcgtctaggtccttggttctgatcctggtctgggttcgagtttgggtgtgggtccgggtctagctttgggtctgattctaggtgtgggtttgagttcgggtcggagtctgtgtccgtgtttgtgtccaggtctggaccccgatctgggtctaggttcgggtccaggtcctagttggggtcccgagtgcgggtccaagtttgtgtctgggtcaggatctcggtccagatcttggtccagcattttgatcctagtctgggtcttggtccgagtccaggttcgtatctggatccctatctaggtccaagtctgtgtttgggatcgtgtcccagatttaggtcgaggtccgggtctcagttccggtctgggtatacgaccgtgtcggggcccgagttccagtct

SEQ ID NO: 279105 - DNA, 187 bp, Cannabis indica
gagtactcatttcacttcgctgaaatatcatttatacggagctaaatgttttaaggataaaatacattgaagggtgtaacggtaatttaatccctatacaatgtagatcatctatatagaggatcattgatcaaattaggattataataatggataattaatagtgtgtctatatggtggaacatat

SEQ ID NO: 279106 - DNA, 752 bp, Cannabis indica
tgaaatgaagttttatttagggcataaaacccaacactagcaactttcttttaatttcttatttttaaagagagtgaatattgcatgttttgatgttttgcttattgttcttgttgctgtgattgggttatgatttctgtagttaaagtatgtttaattgaatggattggaataggttttgatgcatgctagttggttttaactaagtttggaattttaaactcaaaactttggtttttatggtaaaatgatgaattagttactgtagttgtttattgttatattcagaagcttagatatgagtttttatgttgtttaatgcatgaattaggggttgtttgaagggttagtcaagttttgagtttttgaactcaatcttgaaccttcaatggtgaaattcttttctatgattgaagcttggttttatgatttggtttatgttcattggggtctaattagcaggtctggaaggttgaagtttggggtttaattggttgagaaatggaattttgaaaaattcctgcactgaattggaattccggttcagggaggcttgtaggaaccggtcgaccggttggggcttccaggaatttttccagaaccggaattccagttgtagaaccggtctaccgataggggaaaatttaggaaccctagttcttcccatttttgtgttatttagggtattgccatgttatttatcgatagggaaacttctgttgggttttatgccctaaataaaactctgtttc

SEQ ID NO: 279107 - DNA, 776 bp, Cannabis indica
cactgcctccaacagcctcagatggattcacatcagcaggggcaacatcagtaacaaccttatcagcattgaaatgaccatctccaacttagatttcatcaaatcaatatccgctgaatcagatttctttgaagatgacccactctcaaaggattgcttcgctacaccacggtcatcaatagactcatcgagaaataaaccgtcaagttgaagcttctgcctctcttcatcagtaggacacatgtttttgatcttcaactgaacagcataatcaaacataatatgaaaatattaaaacaattgaaaaaactaaaaattaacaacataaataaaactgaaaagaaacagtaaagaaactgtaaattaccttgtccaacggcaaatcaaaaatcttgcccttcaagtctcgaagagttggatttttggtgacaatggtgttgctccagttcagaatccttggaatagaagatgaaactcttttacagaaagagttcaccatagcaggacagcattcataaaaccaaaccgtaaaaacccaaggacatcccaaagccctataccaaccatcatactggcctcccttctctgccttcctatttttcataataatcccatgctgaattctacctttgaatgaatcaattgtcaattcaaaggattccctaccccaacaatactcgtcccaccgaccgctatccacaacatctagatcaaacctagatacttctttatcaggagtattgctaagaagaaaacactgaataaaatacaaaaca

SEQ ID NO: 279108 - DNA, 608 bp, Cannabis indica
ctgacgactctgaacaccttaagtctttctgtattctcttaatcttttcagtggtactagtgataatctggggtccaatagtgacatgctcatctggttctgcccaacacaatggtgatcttcatggtctcccacataaggcctcataaggagccatgcctatactggcttggtagctattgttgtatgtgaattccaccagtgacaagtgttctccccaactacctcccaaagccaaaacacaagagcaaatcatgtcttccaatgtctgtatggtcctctcaaactgtccatctgtctgtggttgatgggcagtacttaagtgaaattcagtcccttaggcttgttgcaaggccttccgaaaccttgatgtaaatcgaggatctctatcagaaacaatgcttgaaggcactccatgtagttgaactatattgtctacataaagttgagctagcttggtaagcttgtaatccttcctgattggaataaaatgggcagacttagttaaacgatcaacaattacccaaacagcgtcatgcttcaaagggtcaatggcaacccagtaacaaagtccattgttgtaacgccctaatgctaaggcacgctac

SEQ ID NO: 279109 - DNA, 414 bp, Cannabis indica
atgatataattgagtattgtaacagtttctaacagctagaaacttatcccattaattccataactcccatatgtaacaactcacataattacatatttatcaattttgatccttaggttacaaactattttcagatttgtaactcctcatatgttacaattatatgtgtattattatactatatatgatataatataacctccaacacataatatatattaatctcatattaatatataatttgtcacatttaaatattttaatctataatatattatcaaataatataacacaaatatttaaaaatttataaattatataatattgtattattttatataatttttatttttttttaaattataaatttatatgcatttgataaaataatttatagtatttttatattatatt

SEQ ID NO: 279110 - DNA, 572 bp, Cannabis indica
ttccaagcacatctgatcaagatactaaccaaccacccgctccgtcaagtcctccaaaaacctgaagcatcgggaaggctcctcaagtgggcaatggacctaagtcaatttgacttgcactacatgcctcgaatttctataaaaggccaagccttggcggacttcattactgaatgcaacgaagctgaggcaaccgctaatgtgccagtacagccaatccccacatggagagtatttgtggacagagcctccaatgagaatggttccggagctggagtggcgatgatatcaccaaccggactgcgactccaggcggccctgtggttcgacttcgcaacttcaaacaatgaggccgaatatgaagccctaatagcagggctgagattggcaaaagccgtaggagccaaaagagtggaagtctacagtgattcccagctggtcgtaaaccagatatcgggagaataccaaacacgcggcgagcgaatggccgcgtacgtaacaatagtccgggagctgctccacgagttcacggactacaaaatagaaaggatcccctgggaaaagaacgctca

SEQ ID NO: 279111 - DNA, 813 bp, Cannabis indica
taataattataattaattactaaataaaattgtcatttatgtaatttattaattagactatgcaaagtctcttaattaataaattgaccccaaaacctattttcttcacaattaagcccttgcttagtggaaattcttaaataagacatagtctaattttagaattataattgattaattaaaatcaattaactgagtctgcaagcagtattatcccaactagtgaggggaccattggcctatataaccgagctttcaataactagaactggattcaccaagtaaatttcctaacttataattctgccttgcgccactattgatttggaattgaatagcactctcagttatatagtttgatctatatgtaccacgatatagatacgttatgattatctattgttacaatcttaatagtcaaagatcttctataaatgatttacactggatagagataaaattacagttctaccctttaatgtattttatccttaaaatacttagctacctataaatgatacttcagtaaactaatataattactgaaatgaggcctcaatcatgtatctctattcaaccaaacttgaagaaaatcatcgtttcacttctaaatacatatagaagctatatattctatatctatgatcagcgctcccattcaattgaactaccatgtccttaatctgtatgtcacgagaagatctaattggtcgactttaacgaaaaaattgaagaacataaataatacaactaagttgaacctaaccatatttggattaagatccatagacctaagatcaaccattgatattg

SEQ ID NO: 279112 - DNA, 199 bp, Cannabis indica
aatctatagcttctatctggcggatagtaagtaaaggatgatctccttcgagcttgaccaaaagaaaataaatggtggagatctcatttcacataagctgaaataacatttatacggggttaagtattttaaggattaaatacattgtagggtgtcaatgaagaattaataagtcattgaatttaggttataaattctt

SEQ ID NO: 279113 - DNA, 521 bp, Cannabis indica
gaatgttcaaagaaaagtcaaaagtcaggaagtttgaaattttctcgagttagggaaaaaaaattcatgaagcttagaataagcagaatgaaagacagaaattatgcagttcagaaagcaaacattatggactgtgaaattgcatgaacccgtgaaaaaggagaatcgcagagtttctaaacttagggtttcctacatatcttctacagcaaagttgaaggtgcattcaaaaagtagacatgcaaaagtaaacataaaggaaatcgagaacttactcaagaatcagatgactggattcaggtaacgtcaaaccaaacaagtagtttcgatgaaggcacttcagcaaacttgaagccaaaaaacctctcttttcgctctgaacttacttagcaaaaaaggatggtgaaaatgagtttgtgtacaaatgatcgctggtatttataggcaaataacgaaaggggtaatcatttcaaaagaacctcagatgcctccggtcccccttaaaaagccgaatatgggaa

SEQ ID NO: 279114 - DNA, 288 bp, Cannabis indica
atccggcgagttcagcaaaacgaagattgttggataaagaacgagcagtagccctgaaagacgatgttaaaaacctgcgcaacaacaacaacatcattgaagccttttacccggctttgggttgacaaaccccgtactcgtgcctaagccgaacaagaaatggcgagtctgtattgacttcacggacctcaacaaagcgtgccctaaagactgtttcccacttccaagaatcgatcagctcgtcgatgcaacagccgagcacgaaatattaagctttatggatgctta

SEQ ID NO: 279115 - DNA, 61 bp, Cannabis indica
taagcagatcaagaatttataacctaaatttactgacttataaattcttcgttgaatccac

SEQ ID NO: 279116 - DNA, 626 bp, Cannabis indica
gaagaaaagtctacactgtattatctcaatttcatattttaaaatatgagagatatgtcttctgtttattcagatgtactttaaaatagtaaggatttctgtaacaccctaactagcataggcgtattatgtgatttttaaacatactgtgtagctcgttgctaatcaacgaggtttatggaaatcgtgattaattaaatttttgctttataattaaactcataaaatatttatacaaaaatactcgggatcccgattaaaaaacactttacaaaattttactgactaaacaaaatatttgtcgcctagatactaattacaaaaagcgctgctttcccgaggatcgtacgctccaggcctaattgccccgacatgtacaatcttcaccggctcgttctcacggttcttcagccttagccttgcccttacctacacataaacatagcactgtgagtcgacaaactcagtaagaaaagaataaatcataaagatacataaatccagggttatgatcagacgcccatacccctgaccataaccctaactgtcgtgtcccacacgatactgagtcccgaacgttcataagacggtactactgacaagtaacagcctatactcggtacact

SEQ ID NO: 279117 - DNA, 454 bp, Cannabis indica
cttaactaacaaatcaagaacatgtataatactcttgagattgaacctacccatatcattattaagatcacttgatctaggatcaacaggtgatattgaattgaatagatattacggtaaatttacatatcgaatcaaagttcaatatcggtcccttctgatgtatactccacatacatccaatactggtaaactttgccaatgccttagaaaggacataccacttatccaaggagtaacaatacgtatcgctgattatcatgacagtctaaatccagtgaacttataaatcagggaattaaacttttgaacatataatcaagattatattccactatgctgatcaacactataatcattaacaaattcatatgttctggacttaaatagaacttatacattatatatataatcatgtgaaccatgggacataaaattttatttctgatcttta

SEQ ID NO: 279118 - DNA, 714 bp, Cannabis indica
actctgattttgctcctccattaacgaagtgtgggagagctcctcctaagaagaaagcaaaggtcggtgtgcaagaaaaaaaggttgaagatgtttctggaaaaaacgagaatgttggtggtgctattcgaaccgaggttcgttttcagtttctttttcgtttccccctttttgtacatattcttgtattttcaattttatcgattttgtgttttctggtttgtgatattttaggtctttcattttaaaatttcgtttggttttcatcagtttttagggctttaatttttcttaatcaattttatttgttgttttgtgagttttggcattttagtttgtttattcttacttttgtttcattttgttgtgtttttcggtttttttagatatttttaaacttcagtttcgttttagtgtctcttctcacaaattttattttattattttttttttaaaaaaaaagtataaaatataaagacttattctatatatttctttttctatctttttatttttttactattctcactctaactctttcaaattattatttttaaatttccatattaccaaaaaagtattataaaatcttaccataatactttttgaaacattaataaggaaagctatattgttaaaaatcatgaacttttcataatgtattctatggtttatgttaaaatattattgaaaactcttttataatacttttta

SEQ ID NO: 279119 - DNA, 700 bp, Cannabis indica
gtaattattcttatatagaggtagactttgttagtagaggacttagaaaatgtataactaattacaattgaaaggttattcttctttataactgacccaaattgggacttgatttttttataacaaattagaggttattcttgaatagagtatacttaaatagaggttctactgtagaaccgattttataacataatgaataaaaataaatagcacaaaataactcaaacaagttataattaaaatataattggttctgtaacataatgaataaaaacaaataacactaaataatttaaactaattataattaaaatagaaccggttttataacaatgttataatgaataaaaatcaataacacgaaataactcaaaacccattataactaaaatacaaccggttatataacataatgattacaaacaagtaacatacaataatttaaaccgattacaattaaaaaataaaggggaaatcagttcctaaaatactgaaacataaattaaaaataaaattagttctacaataagaaacctcttaacacaaaatacctcaataaaaccgatttttaaatttttttaaaaggttagtaggatctaatttaagaaaaatactagaggtataaatatagaaaataaccagctccataacaaaataaataacacacaataaactaaaataataataataaaaatta

SEQ ID NO: 279120 - DNA, 509 bp, Cannabis indica
aatagagtattcttaaatagaggttctactgtagaaccgattctataacataatgaataaaaataaatagcacaaaataacttaaaccagttataattaaaatataaccggttctgtaacataatgaataaaaacaaataacactaaataatttaaactaattataattaaaatagaaccggttttataacaatgttataatgaataaaaatcaataacacgaaataactcaaaaccgattataactaaaatagaaccgattatataacataatgaatacaaaaaagtaacacacaataattcaaaccgattacaattaaaaaataaaggggaaatcagttcctaaaacactgaaacataaattaaaaacaaaactagttctacaataaaaaacctcttaacacataatacctcataaaaccgattttaatttttttaaaaggtaaggatcaatttgaaaaaatactgaggtataaatatgaaaataaccagctccataacaaaataaa

SEQ ID NO: 279121 - DNA, 470 bp, Cannabis indica
gaaactatttttaaattattgaattttaagttttttagatttattctcatatttgttcttgttatttgtttatgcaattttgtgctaattatcatcttcttaatgcttgatcaccattaattagtatagaaattttaggtcttacacttgagagaggatatctaaaattgaacttagaattacatgacataggaaaagtgtgagattgagagattccactaattctatgagtttcatttaaagagaatcatattgctttatgagtgcttatttgattaacattgaatagagatatcgtgttagttaatttaagttaaatctatcatcgctcgagagaggttaatagattacattaggattcttgaaactacaaattataggataaattaggataatcagtaaattgagattcataatttgaaatagggaaatcaatgctctaggtttttactttttgattaaaatcatta

SEQ ID NO: 279122 - DNA, 644 bp, Cannabis indica
atatggtcggatggtacgaagccaacatacatatcgaatgtaatctaacaggcttcctaaattccgaattcaggtgtgaaggtcaacctgactggaacaaactgcacggcggtttacaggctcctaaaccataacaatcacaacactaataagtgatacgctaaatcacttcccgtggacttaaactagaaactaaaagtttcccaaacgataaaaatcatggcaataccccaaataacataaaaacgagaaaatctagggttcctgaaaatttcccaaccgaaattccggttctgaaattcctgaaccccatccggaatttcggatgcacaactggaattccggttcctcgcaggaaactttcaaaaattcatactttgctcaaatcaattccaaaccacactaaaacttacagacgtgttctaaataccccatagaacacaaccaaagcaacaaaacagtccagaacacacagataccaaaaattccattaaagctcaaattaagctttgagttcaaaactcaaacttggttaaatctaactagcatgcatccaaatcagttcaaacctacttaaacatgcatactataacctctgaaaactacaacaaacatcaacaaaacaacagcaacagatttcaaca

SEQ ID NO: 279123 - DNA, 569 bp, Cannabis indica
ttttataggccaaagtgcatgaggaacaggcgctatcacctaccaatcgaacggctggggaggcgcacgattcgaattcccaaaaatcaacggttggattgattcgtaattaaggcggtggaaacgcttgagtatccgtctgacaccattaatgcgccgtatcaatcaatgggcatgaaacgaatcgacatctgcaaaaagtgaatcgctgcattaaaggcgatcattaaatgcaccttcacgcgctcaaagctcgtgccaggaaaccgaggggtcaaccggaggcacttgaacaagccttgttttctttttcaaataaacaaggcttggggggtaaatgttgcccctgattttgcccaatatacgtggaccaaccggacagggacacgtggatcaaaacgtcttaatgcttgaattatttgctaagtctttgtgatataaggtagcatccgggacatgcctcccggagaaggcatgctgagccccatacgctcccggatgcccaagtaatactaaggcatctccgcgaggtgtcaggcttcccctgagcaatcaattcgcatttaatg

SEQ ID NO: 279124 - DNA, 559 bp, Cannabis indica
attgatcccaatttttggccagtccaacaaaaacgaaggttactggacaaagaacgagcagtagccctgaaggaagaagtagaaaagttgcgcaacaacaattttataattgaagctttctaccctgcttgggtcacaaatcccgtattagtgcccaagccgaacaagaaatggcgagtctgtattgatttcacagacctcaacaaagcatgccccaaagactgttttccactaccaaggatcgatcagctcgtagatgcaacaacagggcatgaaatattaagcttcatggacgcttactcaggctacaatcaaatcaaaatgcatccaccagaccaagaacatacaagtttccgaacagatatgggtctatattgctacaaagtaatgtcgtttggtctcaaaaatgctggaactacataccgaagatttgtaaacaaaatgtttaaagactagatcggacgaaatatggaagtgtacgtggatgatatgctcgtcaaatccagaaaggctggggggcacatagacgacctggacgaatgcttcaaagtcctcagaa

SEQ ID NO: 279125 - DNA, 712 bp, Cannabis indica
aattccggttctggaaaatcctgaaccccatccggaattccggatgcacaaccggaattcctgtttctcgcaggaaactttcaaaaattcatactttgctcaaatcaattccaaaccataccaaaacttccagacctgttctaaatacccctaagaacaaatctaaagcaacaaaaccaagcttcaatcacagaaactcaattcaccattggcggttcaagattgagttcaaaaactcaaaacataactaatcctccaaacagccactaaatcatgcataactcaacatattccaacatcatttaacaccagaaaacactactcaaccatagcagcaaccacagcaacgaaaatcaagaatttgctttgaaaaccatagattttgtactaaaaattcagaaacttaaacaagggtaacaagcatgcattacaacctatctaatccattcaattcaagcattttaaacatagaaacaacaacaacaacaacatcaaaaaccatacatgcattactcatttattcataattttcaacaaacttaaagaggaaatgattagaagctaacctagcttgattagaacaccaaaaagagttgaaatcacaaggaaaaatccaagaacccttgctccacaatgaggccgaaagagagagagaggctagagagaaaatggttgatttttttctttttctaaatttttctaacttttgaaa

SEQ ID NO: 279126 - DNA, 954 bp, Cannabis indica
tattatcactaatctataaattttggaaaagtgtggtttaatttaactttaattaaattcaaaataagacttccattttaaatactattgtaatatagggatcccctgtttataaaaaaaaaaaaatctttttacaatagattacatttccaaacatagaaaggaattcgatcctgcttcctagaagccaagaccccacggctgatatgtacattgctgggagacctctgactcatggccgaacacagcttctaacttccttacctgcaccacgaagcacccgtgagtcacaatgactcagcaagaaaagctactatataaaatcatagaaagtgccagcaaatttcattacaatgtaatatatataccaataggtcatacatattcaaggtgcataaataacttaatgcctatgagagcacacttattacataatcaagtatattcatagttatttataatcaacaatctctgtgtttcatacaacctccttaacatttatcattataaatactcaccttcagtgcttcataaaacactctaattcgcacattaccataactccataatctcagtgcttcataaagcactctaattcacgcattaccataactccataatctcagtgcttcataaagcactccaatcttacatctctataagcacgaattcttacatttcgtgagtcactaagattctgcaagaaaagaaactaatttcttaagcaatataaaaatccattcattcacattataacaaagatatatccagttacaaatcatcacataataacatgcttaagtcatttcacaacttcgtaatcacacaatactggtactttataaagtacccttaccactcgttaaccacgagctacttatgtcactatcgttgcccgatacagcaaacgataagtaagaaacctatctgcggtttcaagagtaattactcata

SEQ ID NO: 279127 - DNA, 560 bp, Cannabis indica
gcggtttcaagagtaattactcataacggtaatgaccgtatcttttactcgatcataatcgagtcacaacgataataatcggttcatatcattaccctcgattataagcgagtctcaacaatgataatcgtttcctattatttccctcgatcataatcgagtcacaaccaatacataacgttaacctggactaaggttaaatcaccgagatttcaatcttaatcgatattgtaacaatcgtaatattaaccttatacagtatttaatacttttcttaccttagttatgaacttaagcgcacgggccgactcgagtggaaaaacaagctaggcgatcccggtcctatgtcacgacaaccaaaactcaataaaaaccttaatcaaatttatgataatcaactctaattcttagaatcgaacacaccctactttcccccggatcaaactaacttaaccatctctaaaacaccctgaattccactccgaaagacaccccgaatcagatcggacttgaggagaaaaacacaaaatcccccttcctgggaaaaacggtcggccgtt

SEQ ID NO: 279128 - DNA, 871 bp, Cannabis indica
ctaggagttagtcaagttgaggtgagtttggtaccattttcctttgatttctttaagtaggttaggttttggttagggtttcaagaaattcggggctggggtataagttaggattagaatctgtttttaggtttggtttaaagcttgtataggtttgagtttgctgaatataagggctgcttaacttggaaatgagttgaatgaagttttatgagttctagttcacttgggaatacaattttgagcaaatggatgagttgtggtgttttgatgcattggttatgttgtgtttatgatattatattgatctggagcagttggacaggtttggtttagttttggttcgagtttggaggagaaaactcttggttgcaatcctgccagaaccggtcgaccggttggttctggtgtagcagaaccggtcgaccggtttgcttacaggggaaaattttcagtttttgttagggccgattttagagctcggggtgatttccgtgtctggtatagattgtttggaagttgtaaaacctattttggagctaatagaagttaatgttcactggttatgggaagtagggttattcccgaatttatggattaaggtatttattgaatgttattgtcgtgacataggacccgggatcgtcaagctttgtttatccacttaggctggcatgcacgcttaatctctggactgaggtaagaaaagtattaaatactgtataaggttaatgttttgattgttacagattcgattaagatcgaaatcttgttaaacgttgttgtgacttaatcctaatcgaggttaacgatatgtactggatgtgactcgattatgatcgagggaaataataggaaacgattattatcg

SEQ ID NO: 279129 - DNA, 572 bp, Cannabis indica
atgatatacattagtcactattgaagactgtttgtagtactaattaaatttaattcctcacatataattaaatttaaaatttatttaaatatttccaacaaaataaataaatttacatattaattaaatctttacataaacacaaaataataaaataaataaatttacatattaaccgaacatttacataacacaactcttatttactcttcattaggaggatgagcatctctaagaaaagaagaatcatcacaattgaagggaagatggaccatcataggaagacgacgatgaagatgatactggcgatggagcatttaagcacatatagctcatgtctacttgcaacttctcatatagataaggtaattgaatgtatcccctcttgtattccttctccagtttcataacaatattactgcttaaaaactttctcatatattccttgcagcaatctttgcccgtgcaaagaatttgttgatcggtgccgtatattacacttgaatcgtcaaatttaagcatataagcttggttgcaccctcgaaatagtctacttccatatgaatcaataa

SEQ ID NO: 279130 - DNA, 735 bp, Cannabis indica
gtaaaataatttccaacaccacctgccttgttgcctactcctcgtcaaaactaccctactcgtcaacaacgcccatatcttggcaaatgtcaatggtgtcgggttcaaggtcatgccttgaatcaatgtcctatgtttaaggctcaatttcctgcgattcaaatcccgacacctacacaagcacgagcacctcaagctggtcgtgtttcatatcaaactcctcaagcaaacatggccacggctgccgcttcctcttcgggtggttggcttcttgatagtggagcttcccaccatgtgacgaatgacatcaacaatctttctcttcatgctccatatgatgggaccgaggaattaatcataggagatggttcatctcttccgatctctaatattggttctttctctatctctactccttcccacctttttaaattctctaatgtattacatgttccctctatctctcgtaatatattatctatctcccaattttgccaagaaaacaacaccacaatagaattcttaccttttctctttcgtgtcaaggaatgtgtgcaagggaaaacacttcttcaaggtccaactaaggctggggtttacgagtggaacccgggtcctcctcgagtcttcaccaattttaaaaagcccattcacgattggcaccatcggcttgggcatccatcaaattcagttcttaggactttaagtaataatttttctctttccatctcagat

SEQ ID NO: 279131 - DNA, 902 bp, Cannabis indica
agggatttttacactaacactatgtttggtagaggggagagaaaggagagggatagaggtaggggcggagccaggattttataatagggggggccaatatcaaacaacatacaacaagtacaaatttttgtaaccaaacatttttaggaggtgtgtcaattgagaaaaatatattataattcttttttttattattataatactttaaaaaagaataattttttaaactaaaattaaaatgtaaccggtgcttaaagtgtttggagttcaatttaattttatcaataattaatatttattgcaaattcaagtaaaaaaaatatatattaataaaaaaatggtgtaatttattaattccactaatattaattaaagaattcacttcaaaaaatatatttttaaattaacactagtctaaataaaaataagtatactacaactataatacaattatactattattaaattttattatatttgtgaaacctacttaatatatataagtaaaattatatataatcataaatcaatatcaattctttactctttttttccataaaaatcatgtagagcataatcttatatataattatctatatataacacataagttttaaaatttcagggggggccacggccacggttaggccatatgtggctctgcccttggatagagggattggagaattcttttgtttggcaagagggagagaagaagggagaggagagatggaaggagagagtctccctccaaacacattatttttaatccctcttaacatgggagaattcaagtaaaagactaaaaaaaattatacaaaatatctattctacccttaaaaaaataatatataattgtattaaaaataataaaatagtaattttaatatttattttactct

SEQ ID NO: 279132 - DNA, 500 bp, Cannabis indica
ttgcaagtattcatttattttttcattgatttttttttttaatgaaatacttacaacttgcaaacattcattctaagggaataataattttttttcatcaacaaaactctcatacctttacaaatacatatagcatcaatatactatggtgtgaaaaaggatggataaggattttttttttaggctcaaatgttattgtatagggttaaaaagaaaaaacaaagatgtcaacatttaggctcaaattgggtaaaactagggatttaacaaatagggtaggcttgaaaagctcaatcgatccaaaaaaaaaaaattgcctatatcatatctcaaaattatgtgtaatttatcaatttcgcctcaaatggttatcaaacaagttctagagtggttgagactttaaattaaaaattaaacatgcattcatctttccaaacattagcaaataggataattcaattgatgtgcaaaagtttttttttttaaaaaaatcaagtttg

SEQ ID NO: 279133 - DNA, 996 bp, Cannabis indica
  modified_base (85)..(85): a, c, t, g, unknown or other
tggaagaaaaacagagttccagtttttcctgtgtttcaggagattgatcaaaatatagagagacatctggggaaattatgcttgnggtgacagaattatgtatggcataaaatctaatctgttgttgtcttctgtactgtgatacactgtaatcgaaagcatgtgttgttaatggtattaactttggaggctttaaaattgattattatatagtaaacttattggtttgagttttttagtgagacaacctattgaactatttgtagttttaacaaaatgttactcaataattaattttataatcttattgaacgatacaataatgtcttcatttgttattttttgtgtgtaattgttgattgtgaggaaacatagcattggcattatgaaattagttgaatcatgtataattttagaaggtatcatattaaatttcttatttttcttggcatattatttggtgaataccttacccttaaattgtttttctctaactatttttttttgaaacaagtcgtgtcagctaccaaagttgccccgaaccttaacagggacaaatccctcattagttagacttagttggtggcttttctcccagatcgtttgataaaacaaatagaaacatttgaaagaatttaacaaaacaatcagtttctacaaaaactagtacaaccacaaaacaagcggtttcttcaaaagcttgagtaaattggtacactgttgtaacaagtccaaatggtgaatctgtaactttatccagctaaggaactctttcaagccaatggcctctacaacatgaggctcaactcgccccaaataatactctatagtagcttctaataacccgttggcatgatctcaaaccattaatacgctaggtttagtccaatgctcctcaacgctaatagccacaactaaagttgaatggtgttttccacctttttttgagctaataaccaagtatcaaaataagtaattgaattacttacaattttt

SEQ ID NO: 279134 - DNA, 796 bp, Cannabis indica
aacaagagcggatagacaaacgcctctccaagcaaacttctcgaccaatcttaggtaatttatctcttgttataaactaatatattgagttttatttatacttatctttaatttatcctcgcagatatgacaattttgaagtctgcgcttgtccttaagatcaagccgaagggtggagcaacgacgacctcgcccgttgtcgcccaaaagaggaagagcgatgtgatggctacccttgccacagactcttccaagaagctggccaagaccacgcaggacaaggggaagaaagtcctaatcgatccaactgttcgagctcgtgacttcttggccatgcaggagaagttcctggccgagatcccttctgaggagcttgttacgcgctctgtggagttggcctcgcagtctatgactctgttcataaaagctgctaccgcaggttcgaaggaagccgactcgctgaagaggcacaatgcccagcttcaggagaacatgaagaggctgaagcaagaggcagctaggaaggataaagagcttgaagaaatttcaaagctaaggagcaggcggagctcgaggtcaggaactcgcgggcgaagatcgaggagatgactcgtgatttggaggctgagaaagagaatgggaagaaacaatatgatcaggcagtgtctgattacatttacacctactctttccaaagttccagacttcgacttctctctcctcggagcagaagccgctgagatggccgaggctttttcgtgctatgttgccttctcagcccaaaggtggtggaggg

SEQ ID NO: 279135 - DNA, 755 bp, Cannabis indica
acatgattcaagaaaaaaaaatataataaaattcagtgatgttgggaaaaagaaagaaaatattttttctcaatcatggttagttgtgggaacactttgggaaatttgaattagaagaagcttgtgggttatttttgtgcttatgatatctttagccaaaattgtttttcattttctaaatatctaagccatactttctaaacctcaaaaagccctattgattccaaaaggatgttgtcaacattagtggagagaggtaagcatgcaagcatatgagttatcgggtagtggaatggttggaaagagtaaaaccattataacattgtttcgattgtgaagtcatcttgtgtttgtgcagtatgtgaataactgagcatctaaattaattgttagagttggtggaattgaaattctagtttgagcaacggaggaaaacagaacatgaggcaatagtattgtgattatctcatagcgtagttagtagattagtagttagtagtatttatcttactcgagggcgagtaagaatctagtttgggggaatttgttaggctaaaattagtctaagtttcgggtcataatttcggttagttttcactctttgtttctagttttagggctatattacgcttgattcttttgtttcaggtcctcgggcatttagaaagtatgtacaagaattgaggaaaaatggtgaaagaatcgagaagaaaaaccaaaaatcgtgtcgctgcctaatccagtcgcgacgggca

SEQ ID NO: 279136 - DNA, 549 bp, Cannabis indica
atatacattacgacgatttcttaaaaaagaagggagtcgtgcaaaacaataataaatcaataaaaagaaaacacacagaaggaaatcaagatacgaaacacataatcattaaaaatgagaaatcatagctgaagtgatgccgtgtaagttagagtcctcaacatccgtacgtacaagcaaagtcatacacaattttcctgtttttacacattattcggagattgctgataatgataatttgaaatgacccagccaactcatttggcacttatcttttagttttgaatgcctcattatttaattctttagattttattttctcattatacatttgatcgtagatttatgattgaaacttgtacatagaattatgttctctgaattttgttgtaaaaattctttgtaactatgcaaatctttataaatattctcttcaagttgcgttgtgctaattttttttgggaaatttgcggcaaaagtcctcaaaaggttcacgttgatgctgattagtccccaaggtccgaaaatagcggcaatagtcctcaaggt

SEQ ID NO: 279137 - DNA, 595 bp, Cannabis indica
gctcaaacattaaatattgtccttctaccgcattttacaatagtttgaccaaaacatcgaaagaaaaaaaaaagagagattgaactacaaatcaactgaacacaaacaaacaatatacacctaaacgaaaacaaaaaaaaaaaataggcatctcttacttcagtaaccaaacagagcaaatgcacaggatgaatatgattaggagaagcttccttttctcaagagaaaaccaaacagagcatctcttacttcaggagaacctttcttttctcaagataaaaccaaacagagcatctcttacttcaggagaagctttcttttctcaagagataatgaaatgaaatgtttacccaagcacaaggctatatagctatagactttagcaatatacctatcatgtggcatactacccaaatgactcgtccttaaactacaagacacaatagcataacaaaaattctaggattcaaagatcgccaaaagatgaaaaaaaaaaaaagggtctttgatcaactataaaataaaattgaataatcaatcgaaagtccaaaaatccaagagcagagaatacaaaagagaccgcaactaaccttga

SEQ ID NO: 279138 - DNA, 621 bp, Cannabis indica
gatgtatttatctttatttattcatttaatttatcagtgttatagttcttacatagtattttgcaaaatttttgaacaaaagagagaaagaaaaatatctttaaatgacaatgtgtattatgattgctaaagaagaaaaacaattagatctttctattctatttttacttttgtatattctgtgttttattttctcaatttctcaattttgttaatttttctcatttcatattaatgtaacatttaaaataaattaacaaataaacctttcaaattcttcttattagatccacttatatttatataaataaattaattttattatttaataataatatagcattatttaattaaatgaaattagtgataataatcaacgtccctttatttttctcttattaactaatatattaacaatagttattaagtgtttattgaataataattaattaaaacaaatcataccatattataaatgaagccaccatattataagatgaataggccggttttccaatctatctatatacttatataatgttgttgttagggcatgtgaggtggtcggattatatgagtattctttctattttttcttttttctcaatttttcttattttt

SEQ ID NO: 279139 - DNA, 664 bp, Cannabis indica
aaatgaggtacaaattatttaagaaaaaattttaatttaaaaaaaatttaatatctagaccttaaatttaaaaaataagattaaataatacaaatttaaaaataagataaaaaaattaagcaaaaagatagatctttacctattttcaaattcaaattacaatatatctaaaattaattttttaaaaaaattcaaattaatttatttctgataattagatttgaaatatgaaaagtaaaactcaaaatacaaaactacacaaaaaatcagaagtcaattccatgaaatagcatgaaaaattgaagaaaacgaaaaaatttgcaagtggtacggacaatatgcattgcatactgtccacacgcacgagcagagaggcttgaccgaggtccctcggcgcaggaggctgcatgcagcctttctgcgcgcgtaagggacgaatttcagacaaaatcgcgtcctgactgagaaaactcggtcgagctcttgtctaagcgcgtgcagccgagggttgctgtaacaccctaactaacataggcatattacgtgattttgaaacatgctgtgaagctcgttgctaatcaacgaggtttatggaaaacgtgattaattaaaaattttcctttttaattaaacttataaaatatttatacaaaagactcgggat

SEQ ID NO: 279140 - DNA, 552 bp, Cannabis indica
tgttttagtttaaatgctgaccaagtgggagaatgtaagaatattttattttgggaaataaatttctatttaaggaaataaaataaagaattgattttctaataaatgaatattttatattcattgaaactggacaaaattaattacgtaatattctatatatggtcagatttaaatattcattacccgatttgatttcctgaattaattgtcaaaatattctgacaattaatgtggcgcagatactgatggagtatctcacttataaataaatggtctcaatgcccgagctcctcactcattctgttcataacaacaaattctatttaaagagagttgagagagcgaggaagcccgattgcccacatcaactagtttcctttgcagatcaaagcttatgtgagtttgaagctccaaaatcaatagctggaggtatttcgatccttaagttatatagtgtatatatttatttattccgcattttatatacacatacatatatttcagtttatacatataaatgtctaacatacactacaactaggagcattg

SEQ ID NO: 279141 - DNA, 371 bp, Cannabis indica
agatcctggtaaaatcattccaacatcaacttcaaacccatcggccatattgcagcgttttttagccttttgttcctttcttctttgtctaaaagtgcgttcaatttcggggttaataggagcaagttcaaggtcttcttctttctcattcatacactagtttacacctgaaaaagaaaaatttagcgcaccaaaatgggattaaaatctcaaaccagaaaataaattgcaaaatagttgataatacacaatttttagtttcaatccccggcaacgacgctaaaaacttgttgtgaaaattatatacgtaagtatacgtagtcaaacaagtaataaagtgataagtaagatcgtctccacagggattgcaa

SEQ ID NO: 279142 - DNA, 500 bp, Cannabis indica
taaaataatttccaacagctatttgctgccgagaagaagttcttcatgttgacaaaggatcttgaagctgctgatcgctttgaggagaccatcgagatcttatatgctgaagttaacagtcttcaggatgagaggacttctctgtggtaagttcttcttcggatgaaggaggagaaggacgccaaggtggccgaggcaaacaagttgaaggagaaggtcaatgccttagagacagctggtctcgagctcttctttgacttttggaaggctaatccccttcccaactttgactacttgggcgaggctaaggacatgtaccttgagtactgcgcggcccaagttgcttatggtgggaacgaggctgctgcttcaacctcgggccaagcccctggccaggctgctgatgcttctcctgttcgaacaacagatcctcctgctccagttggctcagaagaaccgaaccaagagcctgggactcagctgtttaaacacttttcttt

SEQ ID NO: 279143 - DNA, 532 bp, Cannabis indica
ggtctagcttagggtctaattctaggtgtgggtgtttgagttcgggtccgagtctgtgtccgggtctgtgtcaaggtctggacccttatctgggtctaggtttgggtcctggtccatgtccatgttcgggtcccgagtgcgtgtccaagtttcggtctgggtcaggatctcggtccagatataggtcgaacatttttatcaaagtctgggtcttgatcagagtccaggttcgtatccggatccctatctagctccaagtctgtgtttgggattgggtcccaaatttaggtccaggtccgggtctcagttcagaattgggtacacgaccgtgtccgggcccgagttccagtctcagtttgggtctgaggctaggtctgtgttcggttctaggtcttgttccaggtcctggtcacggtcctagtattgctctagggtcctggttcggcgattgttgttcaggttctaattttgagtcccagatctagacaccgactactggtttattccaggccccgttacccgaatcccgagt

SEQ ID NO: 279144 - DNA, 387 bp, Cannabis indica
gcgttcaagcaacaaccacaagcaaggaaatagaaagaaggaaagttcgccgaaagacccggacagactccctgtgatcgcgccaaacacactgcattcactatcttaacttaagatatagaaagtgtgtacatagcgactcagtcgctaattccgtacaagaagccctgtcccatgaagaaagataccagcaaaagggacacgacaaagttttgtcggttccatggagactacggccacgacaccaacaaatgctacaacttgaagcgggaaatagaacttctgatcaagaaaaacaacccgcacttacagaagtatgccaacgccaacaaaggtcagaataaccaggatctcatgcctccgccaatagatggacactttcaagtc

SEQ ID NO: 279145 - DNA, 931 bp, Cannabis indica
ttactctcaaatagaaccctagcagctcctctttctccagccgcctcacccaattttctctctgcatctctctcgtccaggttaacgaaggtggacggccaggcggatctctctctcgtccaaatgaacggtggcagacagctctctctctctcggctaggtgaacggagcggacgactcttcctccttggtccgtatagatctgggaccgtattttttgaaccaggaagagtccatgatcttcgctatggtgatttgggtactcgggtttaggtcaagaagtttggtgactaaacggcgagcttctgaagagaaccacggtgggcatttgaaatctcctctatagatttttctgtacatggcatttgaaatctcctctgtagatttttctgtacttggcgggcaaaaagtcctgtttcaggtgctcggagaaagcacaaagaccaaagtcgatgactttaaggttgccaccttcgtcgagaagaagaaattttgggcttaaggtcacggtggtagacacctctgctatggcagaaatctatggtagagattaattagttgttggaagtagagtgtcggctagatactaaaaacttgttacagccataaattatttgtggagatactcaagttttagtttttttgttcatgaaaaattgttcttgtctgcagcatcaatggtggcctcagttgtactcgagtatacagattatttgtgtacattttttgtatttgtatcattgtaaactctggtgattttggcaatatgattaatacaaaatattgtttatttaattaagattattattgtaatatttaattatatttgtatataattaatataaattattatttataatatataaaatttgaattaaaataataaaatattatttttggtagaaaaatatttaatatagtggcatttttg

SEQ ID NO: 279146 - DNA, 463 bp, Cannabis indica
tctcattcctttcatagaaattttcttgagctgccacctctctctctctctttcttcttctttgtttcgaaatccccaagtgatagagtagtgcccacacacagcaagtagtacctcaatcatagtgaggaagactctgaagaatccagttacaacaaagaaggacattcgggctcggatcttgataatactctgcaacaaaaaggatacaagggttagagatctgagtggaaggagacatattattccgctgcatccaatgtaaggtttctcataccttctatgtgtttacttatattcatggtagaagttcatatttaggttgttaataaacatacttgtgtttacttgtaaggtttctcatactttagatgtgtttacttacaccctttcaatgtattttatccttagaacacttggcctcctataaatgatattttagtgaattaatataatcactaaa

SEQ ID NO: 279147 - DNA, 878 bp, Cannabis indica
aaatggatagataacctaactattcatacgagcaaatatgaaaatatacaaagtgataaaatcattaaaagtatatattcaagtttgtttaaggcagattataactgccatagcgaggcagaattgacaactactcgaaaatcaaaaagtttggtagataactaactacttaaacagaagattacgagcaatagaaaaacccaaaagtactttatatttgatcaaaatatagttgtttacattgtgaataaaaacgcaagcaaacacaattggattaagttcaaatgaaaagagtacaagtcatttaagataagagaaaacccaagttgggttacaaacttgtctttacaaaaattccactaggggaaaaccattaagtcatcttcctaaacaaagaatgtaaggggtcgataaactcgagaaagaccgtcttcatatagcttagagaaagactatctacacatagcttagagaaagaccggctacacatagctcgagaaagaccgtctacatgtagaaggtctcgacctctgcatagacctcattctccacatcagaggatcccatatcctacagccgagacctcattcccagcctcaggaaatttctcgataccagagagaggttggcacaaaggtcttcttgtgcaggcttgggtcttgggatggttggattctttagtaaaatctgaaaccacgccaactttcctcctggatttctcgtcagcattaggaggacctctaagattgcctgcaaaatctatgtccatccctgtggagatagaaataaaagatcaatggagcaaacaaaaaataataatatgtataatccagttcaaaccaccattcacaaggcataatacttaccctcaagaatca

SEQ ID NO: 279148 - DNA, 470 bp, Cannabis indica
atttttctctttttggacaaaatctccttcatgaacttcacataactgggcatctgttctaaagcttcagcaaaaggaatgttgatgtgtagtcttttaaagacctctagaaattttgagaactgcttgtctagattggtctttcggagtctctgaggataaggtatcttcacatgatgatcaatactgactggtggagactgttgttgtggtgcaggactatcagtagccttcttttctgttgatgttggagttggtgctgattgatctttaatctcttcatccactggttgtaccatctcaggcccatcatatttcttaccgctcctcagggtaattgccttgcagttttctttaggattaacttcagttgtactaggcaagtttccctgaggacgggttgctacctgagttgctagttgccccatttgagtctgcaaatctttaatggaagatctagtctcagtcat

SEQ ID NO: 279149 - DNA, 726 bp, Cannabis indica
gaatagctaattcctcatatgctggtttttcccagttgctacaacattacctcagcattcctgccagtgataacaaaatttcctatgtgtttatgagaattttgcaaaactcacaatttaagttctaacacctagttccatatattcctatatcgaaccagattagagaacactaattatgcatcaatttttaagttatgcaaggtaaatgaaatattcctattccatttacaaagaaaaacctaaatctaggatttctcttgctccattcaagttgaactactagatctagcccttccggaacaagatctagcttagcaaattgttattagtggccaagaaacaacaatcaattaaaaattagaactcacttgaatgaacaaaggcaaaaatactaacataagctttaaaattaaccatacccaacataggagttcatagctactcaagccttaagaaaattagctcatgttcaacacaaaaattacaatccaaattcgaaatttctcatccatggctgctgccctttttacaacttaacaagtttttgatattcaaagataagtaagaaaagaacaaaatataaaaggaaagggaagagaaatgcaaaaaaaaaaaaagcttgtgtccttctcttcttttgcacttgggtcccccttcacttttcttctctttgtactttctgcaattaaagctcttcttcagaaaaaaaaatggcagctgcac

SEQ ID NO: 279150 - DNA, 665 bp, Cannabis indica
caacacattaataactcttatacaatggacattgttttttttttttgataaaaaattaacatatttatgagttttatacaatgcgtaaaaaataaaaaaataaaaaaggaatttaagtaaccagttacttgtactctttttcctattatttttttttattttatttttttttctttttcagtatactatttttctttttgaaaaaagattgaaatttctttttatagatttcaatcccaaaaaaataacattggaaaattttacaatgcaccccccctttaaatggatatattgatgtactcctatctattttagctattcgaaaataattttttagtcaaattttttcttatggtcatgtatgttataactatttaagacatcctataaaatttgaaaaaatttaacatgctgaaaaatagggttcaaagtgactattttattttatacgtctgtgaaataaattgtttgaatactaatttctatattgtaaattatttcgaatttttcaaaaatttttgtaagattatcttgaataactataacgtaaacgaatatgaaaaaaaattagactacaaaattttttttaaatgccaaaataggtaagggttgtagaatgagccaataaccttttagagaaaattacactctatacctttttatat

SEQ ID NO: 279151 - DNA, 464 bp, Cannabis indica
atcttccaaaataaaaaaataaaaaaaaaaaaaaacgcaaaggggtgtgttcttcaatggcttcctcatctaatccctcctcaagagctcacaagagaatggctagtgcaattcaacaaagggaaataagggcaaaagcaaggcaagagcccactctattcttcaatgatgaggatcacaacaaatttgtcaatgatttctcttctaggaagattctcaaaggtaaaatttgtgatctccctagccttgattatgttgattttagtcatcactttgataccctaggatggacatctttcattcaaattaatactccattgtatcctagactagtccaaggtttttatgcttgcattaaacctaccttagaacctttaggtgttaaaggaacccttagaggagtagcttttgaactcaatgtagcatctctcaatgacatgttaggagcaccaaatagtggcata

SEQ ID NO: 279152 - DNA, 532 bp, Cannabis indica
agatatataatcttaccgctgtatcgtttctaagtccaaatatctctagttgatcttagattaaaaaaatcttaatcctaacaatgcttaggttcaatctcaggagtgctattcatgttatttgatttgttagtaaagcctactttttggtcaatggaagagctcttgtttcagtgattatattagctcactgaaacatcatttataggaagctaagtgttttaaggataaaatacattgaggggtgaaacagtaaatttatccctactcggtgtaaatcatctatagaggatctttgattattgagattagaacgatggttaaatatttatagcgtatctatatcgtggaacatatagagcgttctatatgactgagagtgcaattccaagttctatggtggatgcaataaggattaataagttagggaatttactggtaaattctagttctgcttattggaagctcggttgtataaccccatggtccccatactagttgagaccatactacttgtaagactcagataatt

SEQ ID NO: 279153 - DNA, 475 bp, Cannabis indica
taatagatatgtgataaattttttaaatttttataggtattaattgaatgtttggttttacttttttatggaattaggttcgtggtcgaccgctccgaattaccgctagctgcgtgcagttgtcatttttacactcgattgaggtattgttttttgctttcgcttagtacgtagtagggtttgttattagttaatatgtctatgcatgttagagaagtaggttctgtgataaaattgactgttgttggatgagttgattatttttttgtttatatattgtctggaaatatttgtttgtgttatttataggtattaaaaattttgtgtttacactttttaagccgttatgctgccgaaattttagtagagaaaatgtaaaattaattgaatgtttaaatgaaataaaattgaaattgaaatttaaaacatgtaattaaatagttagtaaaataatactcttttttttttttaaaaa

SEQ ID NO: 279154 - DNA, 567 bp, Cannabis indica
cagcagcaatatgtaacaaaaaaaaaagaaagaagaataataaaagaaccgggtggaatcttggttatactgggtcagttgtacagcagctcagtcagcccgcggaggaaggcgaggtccgatacgtgcctctagcacggcatcaagcttcttcttcttttcccgaaatttggcaatcatttcctcgggtttgggataaaaagtaagcttgatattttggtcgttggtggaccaagccatgtagactccatcgtcaaagcgcttcggacaccgggcgcaggaaacaggagagaggagctcggctcttttggccttcttgatggattgttctttgaagtccctaagctccttcagctccgcagctagagcggccttggactctatgttcgcctggtgagtttcctctaaagatctcaccttggcgaccatttcatccaaagcctccctggcctcccggaggtctcgcctggccttatcagcagcctcgctttgagccctcagttcctcctggtgttgggcctccatcctgtccctccgctgggcctcgtcccggatcatggcctccgc

SEQ ID NO: 279155 - DNA, 562 bp, Cannabis indica
ttactgactccagtacagctgcccagagaactcatcatgcacaatgggaaaagtcaagtcgtcttagtcttcttactatgaaaagatcaattcctgaacatcttttggtggtttgccaaacaccacaaatgccaaagagtttttcaatgctgtagaaaaactatatgacactggtgaaaacgctgaagttggacatcttatggataaaatgacaaccattcagtttgataaatcaaaggagtgctagattttattttgaaaattattattcttcagtccgagttgaaagatcataatattcctcttcctgacttttacaccattcttcaagttcttcatgaacttcttacttcttttagctttaccaagacaacctaaacacttatagtaaaatatggagtgttaataaccttatttctcagtatatagctgaaacaagcaagctaatagaatgagaagaatgaatcttctcactttgtttctcaactcaagcccaacaaaggataaagaaaatatgaaaagaagcaaccacaaccaggggctaagggatctcagaaagcca

SEQ ID NO: 279156 - DNA, 631 bp, Cannabis indica
cacccccaagagtaaacaccatcctagatgtcgatttcctgtcatcaagacatgcctggaaatctaaatcggtatagcctacgggatttaaagcactacccttgtaaactaacacgaattgccttgtacttttcaagtacttcaagatatgcttaacaacattccaatgttcctgtcgtggatttgtctgatacctgctcacgattcctactgcataacaaatgtgagtctagttcataacatagtatacattagactcccaattgctgaagcataaggaacccttctcatgtcctctacctcttgaggatcagtgtgacactattccttagatagacagataccaaatctagaaggcatggttgcccctttggtgttggtcattgagaatctctcaaaaactttgtctatgtaagttgtttgagagagagcgagggatctgttcttccggtttctgataatctgaataccgagaacataggcagcttcacccaaatctttcatttcgaattgagtgtctagccattccttgatgtcagtcattttcttgatatttttgccaataatcaaaacgtcgtcaacataaaggaccaggaagactaccacttggttttccttgagttggtaaaca

SEQ ID NO: 279157 - DNA, 511 bp, Cannabis indica
gcttgttgggtttagctggatattatcgtcggttcgtggaagggttttctaagatttcaacacccttaactgaacttacgaagaagaatcagcggtttgtttggtgtgctagctttgcctcagacaaagagaaattcgtagtttattgcgatgcatccagacaggttctggggtgtgtgctgatgcaagccgatcgggttatcgcttatgcctcccgtcagttaaaggattatgaacaacgatacccgactcatgatctagaattggctgcggtagtttttgcattgaagatctggcggcattacctttacggagaaaggtgtgaaatttataccgaccataaaagtctcaaatacttctttactcagaaagatttgaatatgagacagaggcactggttggaattgttggaattattttaccaagatctagatttactaacatgtatgttggattatcaacctaatatgaaatctaaaacaacgaaaataaacacatataaagttagaaa

SEQ ID NO: 279158 - DNA, 647 bp, Cannabis indica
tgttatgtcttttccagaatattagtaaaatatgctagtatcgaatgtatggagtatacattggactggaccgatattgacaattagataagatatcataaacttattgttatatctatccaagtcaatatcattgatcttaggtcaatagatcttaatcctaagatggttaggttcttgcttaaatgtattatttgtgttcttttgacttgttcgtcaaacctgaccaattgaatcagctcaatacttacatcttaagaacattatagtacaattgagtggaagcgctaatcataaatatgaaatctataacttctataagtatttacaagtgaaacggtgatttctttttagcttggcttaacgtgataaatgattgaggtctcatttcagtaattatattagtttactgaaatattatttacaattagctaagtgttctaaggataaaatacattgaagggtagaacggtaaatttatctctacttgatgtagatcatctatagagaatctttgactatttagattataacaatggataattagtagcgtatctatatcttaaaacatatagaacgttttatataataagagtgtgattctgaatctataatagagtcagagggaattaataagttagagaatt

SEQ ID NO: 279159 - DNA, 504 bp, Cannabis indica
aagctgctgaagagtttacagacgatttctggcttgcttgaacctggacacttgaatctttgagtaagtttctgatcccctttatgtttttcctttgcatgcttgtgctttgaatgtaactttgctgtagaaagaacactgtaggaaaccctagggtttgaaacttctgcgactcttcttttccatgtccttgcgttagctttcagccgtaaggctcgttttagaactgcattgcgtctgttttccattatgctttttttaagcttcatgaacttttttgccctaactcaagaaaaactttctggcttcttgagcttagacttttctctgaacatgatcattctttaatctgttgggtactcctagtcggcacgtttgcttgttatttcgcttgatactccgtccaacactcatcttgcgtgttgtcttttgtagatgaacccaggtgagtcttgggagcttgagcatcaaatagaccaggggctgcttcaacttctgcacgaa

SEQ ID NO: 279160 - DNA, 631 bp, Cannabis indica
aagtctcaactattccagaaaagataaagccatggaagaatttcttaaatcaacagtgagagatctcagatatgctttagtatgccttagaccagacacctgctgttgagtgggagtaatgagtagtgttgacttcgcttttagccaacgacaatgattcttttaataagcgataaacgatatgtcgtaataagaatatgtataaagcaaataataataataaggagacacaaaaattttatagaggttcagcctcgagtagttcggtaatagtctaatcctcgttagttgtattgagttaagaataaggaagaagattccttttcttatagctcttacaataatatctctgaatatataattcttagatagccttagcttatagcgttttggcgtatgatctctctttttttgtccccctacctagtgaacattcctctctatttatagggcaggaaacttgaggaggaggagtttcctctctcgttacaaaatgcataaacacaaagatcgtgggatcattgctgaatgctaggatcgtgggattgaggtcgtatacaccgatagtggaatcgtgtgtatgccatatccacgcaagttgatccctgagttatagggattgagctggtga

SEQ ID NO: 279161 - DNA, 881 bp, Cannabis indica
aaaaataataataaataattaaataattataaataactttaattagttgaatataaataattaataattgaataagtgataaattttataattaataaatccttgtaataaaaaaaattaacaaataatttgataaatactataatatttaatgtaagtatagtttaaaataaaagttaaaaaaagtttcataaaatgacataagattagccttagttcaactacacagtcaaaattaccaaattcgtgtgacagtagtcaatttgattataatgtagtcaacgtaaattttttggtagatggcaatcgataagacttgggtgaccatgagaaatcgtaaggatccagcttactgggaaggtctccaagtctttatggaacttgcgtctaaacacaaggattgtgacggaagaattttctgtccttgtgttaaatgcaagaatactagattgcatcctttgaatactgtggaggcacacatctttacaaagggtttcgagagcagctatgagaggtggatttaccatggggagccagatgaacctgtcgaggctaacatcaatgtcgatgcggatgagatggctggtgtcattgaagatttcttccctcctatagatgacgacgaaagagctggtgatgatgaaatgcagaggggtcagtattatgatgacatgtttgaggagattgaggcagagttgtatcctggttgcgattggatatcctccctcaactttatagcaaagttgatgcacttgaaaaatttgggaaaaataccaaattatatctttgatgaattgttgaagttgttgaagtttgcatttccgaaggagaataaaattcctgcaacacactatgaggcgaagaagaaattaggaaaatta

SEQ ID NO: 279162 - DNA, 745 bp, Cannabis indica
ttttgttggaggctccgtccacaaatactttccatgtggggaccgacggtaccggcgcgttcgcggttgcctcggcttcattacatttggtgatgaagtcccccaatgcttgtccctttatggagatacggggtatgtagtgcaagtcgaattgacttaactccatcgcccatttgaggagccttccggacgcctctggcttttgcaggacttgccggagtgggtgattggtcaacaccttgattgggtgcgcttggaaataaggcctcaattttcttgaggccattaggaggtagaaaactagtttttcgatgacggggtaccgcgtctccgcccctatcatgcgcttgctgacgtagtacacgggatgttgagttttctcttcctcccggactaaggccgcgctgaccgcgtgctcggagataggcaagtacaggaacaggtcatctccgagaacgggttttgataggattggaggcttggccatgtgctctttcaattttttgaatgcctcctcacactcgtcagaccattcaaacttttggcacttcttcaaaatgttgaagaagggaatgcacttgtctgtagaccgggagataaaacggctcagggcagcaacctttccggttaggctctgcacgtctttgtgcttcttggggggtggcatgctcaggagagcttgaattttctctgggtttgcctcaatccctctgtggctgacgatgaagcctagaaactttcctga

SEQ ID NO: 279163 - DNA, 1101 bp, Cannabis indica
ggagacatattattccgctgcattcaatgtaagatttctcatactttatatgtgtttatttatactcattttagaagttcatatttaggttgttaatcaacatacttgtgagtagatctaagatcgtggtaagataattccaacacagcatctagtctattacatcagtaaaagactcatcgaagctgaaggccgatacccgttgatagaaaagctcgcctactgcctcattctagcaataaggaagctgaggccttactttcaagctcatcctattcgggtgtatacctaccaaccactacgacaaatactgtaaaagccagatgcctctggacggttactcaagtgggcggtagaattgggtcattatgaaatcaacttccaaccccgaacaactatcaaaggccaagccttggctgactttgtggtagaatgcacaggcaaaaaagaaagcatagcaaaaatcgatctcgagccaataccacagccaagtaatattgaaaacaaaccgacctggaagctacatgtggatgggtcggcaacagatcaactgtctggtgcaggaattgtccttgtcacacctgggggcaacacctgcacgctgcagtcaagttcggattcaaggcccctaacaatgaagccgaatacgaggccctaatcactggacttaagctagcaaaggaaatgaaggccaaacacattaaaatttgcagcgattcacagttggtggtaaatcatgtattcggggaatacgaggctcggggagaaaaaatgatagcatatctaagcaaaatacatgacctgctcgcacaattcaaaagctacagtctcagacaaattccaagagaagaaaatacaactacagacgcgctggctcgattggcaagttgcaatgtaagtgacaaggcaaacttggtccctatctagttccttgaagagcctagcatcactggcacggaagaaatcgaaatgatcgacacatccccaaactggatgacgccaatagcggcctacctcaactctggggaactcccaaataccaaaatgaagctcggaaaatgagaagaaaggcagcacagtacatcatggtagaaggggtca

SEQ ID NO: 279164 - DNA, 500 bp, Cannabis indica
ttgttgaagatattagccatcgacaaatttgggacattaatgacaatgaagatgagactgatgttgatgttgttagtgattctaactcttcaaattttgtgttgacggttgatcttggagagttgattatgcaatcgaatgaacctccagtaattgttgaatcgtccgatcagttagtggattctgagatagagaataatgaacttgatgaaaattatgttgctgaagaagtagatgatttactagttgaacatgtggaggatgaaaatgaaaacttggtgaatgatggaaatgatagtgattcgtcggtgtaacttttattttgtaaatgtttgttactaaaactttttacaattaaatgactttttaatttctttcgcattaatatttgtgtcaactttcaattatgtgttccacattttgtgaatttttacatttttttttcgtcttcaaagtaaagtacaatgtcagctacgctagcgacataccacggtgcggat

SEQ ID NO: 279165 - DNA, 525 bp, Cannabis indica
tatgcatttttgaccactaatcacaacccccaactagcttattgctagtctctagcaattcaagcggagaagaaaattatcaagctgaataatcaagtcacaccaatcaaaaccagccatgcattttaaaatatcatcaagaaatcagaaattgctaagcaaactacttagttgtaaccccagagttgtgggtgtgtgcaccaaaccatatccatttcttaccacaagccataacacaaatagcatcgaaaaatctcaaaagcgtaaaggtctcaactccaatttcctcacaggcattgaaagtattttttttttttttatgggagagatgacactcttggagttggaattgtaacaattaacgctcaaatgagagaagacaaactttttaggacaaacaatttgaacaaatattgatcataagataggaaaatcaaataattagaatttaaatgacaaacaacctttgggatttacaagagacttgaagaataaagagccaactaaaagaaaattataaatata

SEQ ID NO: 279166 - DNA, 589 bp, Cannabis indica
aaacttaagagaataagagaaaatttttaagagtaagagataggtagaatacaagagcacttatgaataagatttccctttgcttttatagagcagtaaaaatgttgggaatgtatgaaaatttaatggtcattaaatgcgtaactgtacagggaaaaacgcatgaaatggcgtatttatcgacagaatgtcgatactatgtcgacatcttatcgacaacatgccaatttagtgtcactgctaccacatttgtcgacgacatgtcgacttcatgtcgatatgttgtcgataggacacgtgtctgacatgcaacgtttcagttgggaagggttgttgggaacgtatgtaaaatttattaacatttaatgtgcaaccgtttctattgtcgatataatgtcgatggtatgtcgatagtatgtcgatgacgagcatggttgttgttgttgtcgattgtatgtcgatattatgtcgacacaatgtcgacaatcagtgccctaatttctggtattgtgcttctcgacattatgtctattgatatcgatgggatgtcgatgtttattttttttggtgttttttcctttactcacct

SEQ ID NO: 279167 - DNA, 652 bp, Cannabis indica
ggtggtgacgcctgttcctcatgcacttttgcctataaaagccaccatctttccttcattttggttactttccattccttgccatttttgctcgaatttcccagagagaaaattcttcaaaacagcacgaaccgtcttaacacttcgccatttcttccagtttttccgtgtttgttatcatcagttcttctcaactctactcggccacatttaggacccccagttcaacaatttactgtaagtttcttgcatcctttaataatgacgtgcttttacttgctttgtttgttttcctgggttcgtactttgagatttctgggcatgcgagtgtttaggttcttcaggtgttctgttttgtgtttactgctttagttgtaggaccgccattatcatgcctctgttataatcgtgcatttttgttgaagagagccatatgttcttcgttcaatagttgcttagggcatagaatggggtcttttcccttctgtttcttttactctgtaaaaccactttctgcgattttactgcacccgacacttgttcagggaatctttctagggtttcccatgtgacacgtgtccggagggggcctctttccagcggttaggggacccccactccctttttcttgacttagggtttggtatgggac

SEQ ID NO: 279168 - DNA, 553 bp, Cannabis indica
aagactcgtcgaggccgaaggcctatatccgttgtagaaaagctcacctactgcctcatcttagcaacaagaaagctaaggccttattttcaagctcatcttgttcgggtgtacactgaccaaccgctacggcaaatactgcaaaagccagatgcctttgggcgattactcaaaggggcggtggaattgtggcagtacgaaatcaattccaaccccgaacaactatcaaaggccaagctttggccgactttgtggtgcatgcagcgatcaaattcggattcaaagcctccaacaatgaggccaatacgaagccctaatcctggactcaaactagcgaaggaaatgaaaaccgagcacatcgagatctgcagtgactcacagctggtggttaatcatgtatccggcaaatacgaggctcggggagaaaaaatgatagcatatcgaagcaaaatacatgatctgctcgcacagttcaaaagctacagccttaagcagattccaagagaggaaaatacaactacagatgcgctagcccgtttggcgagcagcaata

SEQ ID NO: 279169 - DNA, 536 bp, Cannabis indica
acacactaggccgaataaaccctatgtcaagtaaccccttgaagctgaatctttaattctttaagctcagctggagccattctatacggagccttggaaaccggttccactcctggtgccaaatctataacgaaatcaatctcccgctgaggtggtaaacctggaagttcttcgggaaaaacatctagaaattcccgaaccaccttgatgtcctctggccgaatggtatctggccgagtggtgtccatcaccacggccagaaaccctaaacaaccgccatgcagtaactccctagctgacatggccgaaatcaccgggatccgagatccccgaactgaacccacaaaaacaaacggttcttcactttccggttggaagattaccatcttcctcttgcagtcaatactggctgagtatttagatagaaaaaccattcctagaataatatcgaaatctactaagctcatttctattaggtcagcacttaactctctaccgtctattctgatcggcatagacctaatccaccttttgga

SEQ ID NO: 279170 - DNA, 720 bp, Cannabis indica
tgacttattttattttatatgcgtgtgaaattagattgtttgaacactactttctatattgtcaattattctgtaatttttcactaattttataggataatcttaaataactataacgtaaacgaatatgaatatagaaaaaaaatagtacttaaattttttctaaatgtcgaaatgctacccgtttttaaggggtgcattgtagaatcaccctaaagttttagtctattttttttcataatcgcatacgatgtacttatttaggaccatatataaaattttcagaaaattttaaatagtttacagtaccgaaaataaagctcaaacagttatttaccacacgtataagaaaaaacagtcgtgtgttcaactaaatatttaaaccttattttttacactatatactattcgaaattttctaaaaatttataagtaatcctatatagttgtaatgtacgcaattatggaaaaatatttgactaaaagttgtcctgaatgctaaaacaaatacaaccccttaaggagtatactataaatttaccctatgctctcaatgtactaaattcttcatatttgtgctaaaaaagaacaaaaaatctttatccttatgctaaaaaaaaatcaacatacttaggcccctcactaagagctggttccgccactgtatatatttataattctattattagggtagataatgtggcattctttcccctcaat

SEQ ID NO: 279171 - DNA, 498 bp, Cannabis indica
gctcttttttgttttcgcagatagaccagctcgacctgcactcaacgcgactcgcagagagacaactgaagttctcggaagccttcctgtataagatcgcgactggcgattattgtgtacgactgctaaactgcgagaacacaaactgatccctgagaacgcaaatctctagagaaagccggtgtataaggaaccttctaaaaaacaacaagagcgaattgataagcgtctttccaagcaaactcctcgaccatcatcaggtagtttatcgcatacataaactaggacgttagaacttcatccttattagtattaacccttattttttgttgtaactgtagaaatgactttcttgaagtccgctccagctcttaaccgcaagctgaagcctgggacaacagcaacttcccctatcgcttcttagaagaggaaaagcgatgtggtggttactcctgtcacaaattcttccaagaggcctgctaagggcattcaagagaa

SEQ ID NO: 279172 - DNA, 424 bp, Cannabis indica
taaacaactgctaatttccaaattaactaagcgggctttacataaagtctcttaattaattagtaagactagaatctcttttcttcacaattaagctcttgcttagtgaaaattcataaactagacatagtctaattatagaattataattgattaactaaaataaattaactgagtcttacaagcagtatgatttcaactagtatggggaccatccattgttataattccaataatcaacgatcctctatagatgatctacattccatagggataaaattaatgttacaccatttcaatgtattttatccttaaaacacttcacaacctataaatgatattttagtgaaataatataatcactaaaatgagatctcaatcatttatctctattcattcaagctcgaaggaagtcatcgtttca

SEQ ID NO: 279173 - DNA, 592 bp, Cannabis indica
gtttgagcaagtttgagctttgaataccaaactttgatctttaatggcatgttttaaatcattgtgtgtttctgagatttatgggttagaatatattgtatataccctgcttaggtactctgtaaagtttggtggcaattggacaagttttgagcaagttttggagttgttggggaaacctggtgcaaaaccagttaaccagtttgccaggtcctgtaaaaccggttaaccagttatgacagattccccaaacaactcattttctcaattctggtccatttcagtgcctttgttgggtatatccctgtttcctaggttaatgtaacccctagtgaatataatagagccaagaggtgtagattcggatttcccagattaggttttggacatgtgatttacccagttttaatatgtgattaggacatccatccagcacgagactttccgttcaggtctgccaactcacttaaatcttgaaaggaggtaagaactgtatataatgtgtaatatgaatatgcaagtgtatgtacatgttaagtgtatatgcatgcttatattttgttacactaccaacacttgtacgattatggta

SEQ ID NO: 279174 - DNA, 660 bp, Cannabis indica
taggtccttcagcttacattacatccagctggttccggccttcggacagctatcttggagatgatgctgccagcattaaagttcaggactttgctagggccgaattaggaagttcgggtaggagtagcttatttgccaaatcttgtgtaaggggtttcccacggatgtctaacacttgcctattctttgttaaacaggtacctccatggacgccatcttggaccagcttgccggagttcatactccggaggctcctccggccttcacttcttccccaatagcccctgccctaaaggcctcttccagcgctcctcctgacactattgacttagtggatgacgaggaggtgctaccgggagagggtcaagaaaagcaatggggcttttctgaggaagtcgcagaaggtgcgggagagctccgggctcttcctggggacgctgaagaaggtgaagaagagcccgaggtggctctgattcgcaagcgcaagggcaagatggttgcccaggacgagcccaagcggcctcggagagctgacactcctgcccatggtctcgacggtggggtctcccccatggaagaacatcctgctcctcccaacattgtgcttactccagttcctggggatgaggtgaggcaagagctccggatagccaagcataa

SEQ ID NO: 279175 - DNA, 631 bp, Cannabis indica
tctccaactaaataagcattaaggtaagaaattacaatgccggcattatccgtaaatggaaaccaatcctcatcattagccatgtatgctttttaatttgtagctgtatttatcaatgttgtaaagaataattaataaattataaaacaaataacagttaaataaaaaagtatattataatataattaaaatgaataacatcataattaagtgtattaattaaattaaaggttaaaaataaatcattaattatttagctgaagactatcctaaaatacatacaaataattattaattatgatatatatgactatatttgactaatcttactgtataatttttattattatcttgattaccatgtgtatcataggtgtataatttttattattatcttgattaccatgtgtatcataagtgtatcatatttgacatttttattattacacgaaatcaaagttgcatagtcaaaaagagtgaaactaagattctttctatcaattagttaagcccaacaagagatgagataagcccaatacacaaacaaacaaagaaaccctaatgccataaccctaatataaaaggtaaatttccaaaacactaatatctacttcagccgttcatttcaatt

SEQ ID NO: 279176 - DNA, 1115 bp, Cannabis indica
gggagctacagtttcaaacagaagtagaaatgatcagcatggctgtacaccgtaatctacttcgtctacgtggattttgcatgacaccaaccgaacggttgcttgtgtacccatacatggctaatggaagtgttgcatcttgtttaagaggtactttattagctgtgtatgtactgtggcttaatttccgttttacttgtttagaaatgcttttatcttcttttttgcaagctgttcaagtttcatattgccacatggtttgttcaatgcttttacgttggaaatctgtgtcaatggtggtcacaatacaattggaaagtgcagcctgttctgaagttgtggcacgaataaattgtttctgattatgacatcatgtgtctgattgagaagacacatatcctttttaagtgtttccttatactccaatgctgcaccataggtattagggagtgcatggtttaggcagctgatagagatttaatttgtaagcaacaaaattaggttgtttgaacactatcaatataaaattcagtttacatgaagcctataggttcttataccaaattgagtcaggaacaacaaagaaaaagaagataggaaaaaagaatgaaggcatgaattattaataatctaataattcattaggttctaaaatatttaacatcctcaagtcaatttgaggatagacaatttcatttagggagctggcagagattaacaagaggcacaagactatctgactatatgatggaattgctaggcctgctatataagattcacttacactagaagggggccaagcaaacaacgggtcaagggtacttggggccagtttggcacagctgtgctgtggggaaaagcagctgtagctgtgctgtgggaaaaaacagctgtagcagaactgtggaaaaaagctgagctgagtgtttggtaaattataatttttaaagtgatgtgagttgttaagattctattacaataatgataatattttaatgtagttcattataattacaaatatatataaaaaaatatgttatataaatttttaattttttatatatttttaattatttttttctatagtataaatttatatgcatttgataaaataa

SEQ ID NO: 279177 - DNA, 519 bp, Cannabis indica
atttgcttgcaagaaatttagacttaaaacaatttgtatgtgatttggatggtttcatgttgatttatgtgttatatgatgattgattgatgtttgtaaattttcgtgaaaaataattgaaattctgtttctagtaattatttttattggataatttgaaaaaaaattaagcaatttacttttttactagaactcaatttcgattttatttgaattagttatgaatttttgaaaatcgaaaaatatcgggatgctgtcaacccacctacgcgcgcggatgagggtgatatcctcaacagcacgcgctcaaacacagttttgtctgaaattcctccctcgcgcgcgcggagaggctgcatgcagcctcctgcgccgaggaccttcggtcatgcacccctgctcgtgcgtgtggacagtatagcatactgtccgtaccacttgcaatttttttcgttttcttcgatttttcatgctatttcatggaattaacttccgattttttgtgtagttttgtatttt

SEQ ID NO: 279178 - DNA, 528 bp, Cannabis indica
gtgattagcgctgccactcaactgtactaccgtgttcccaaatgtacgtatcacccggaccaaaaggtaggcttaactaacaaattaaagaacacaaatgacactctcgagatcaaacctaaccatctcaagattgagatcattcgatctaggatcaactaggtgatattgaattgaatagatattacggtaaaattatcatatctagttcaagttcaatatcggtcccttccgatgcatactctatacatccaacccaagcttactttaaccaatgccttggaaaggacataacatttatccaaggtgcaagtaaactacgttgtagattatcatatcagttaaactctgtgtaccaataaatctaggaatacatttatggcgcgtttactaaactataattggaatcagaataatcaatgagagaaatgtatcggtttaaaatagaaaataatgggaatcaatattttattatgctgtttactaaactgtccggaaagaaaactagaatcatattattttgtttac

SEQ ID NO: 279179 - DNA, 652 bp, Cannabis indica
atactatatcgcacacactatcgcacaatatcgcacaacatcgccttaagctagcataaaataaaccagttatgatgtcgcacaataaatctggaaatcaacaaaatcgcataacgacgcaatataaatcgcacacaaatcgccaaacattaatatcgcatatacaatcgtacaataatcgtacaaagtcgccaaaattaatcatgtcatccctaacctcagatttctcatggcatcgcacaacacatcgcatgatgtcgcataaaatcgccaaaaccaaaaaaaacccagaaaaacacagactgttagccacaaactctacctccatttcaaggacacaaaagtcacatattacaactaacaacgttcagatccatacaatacaacaaaaaacaacactatttactaagaaaaatacttacccattgctttgttgagtgtggtggactttgagggtgagaatcttcaaggtggcagtcggccaagacgtggaggtggcaggcggcggcagtcggcggcaacggagagagcaatgagaaagagagacaaagtgaaagagagagagtgcgagaagagagagagtgagagaagaaagagagagagatcaaacgagagggaaagagagagaaaggaggggctgatttttttgggt

SEQ ID NO: 279180 - DNA, 939 bp, Cannabis indica
gtaattcaattgagcttcatttaaagttttgctagcatagtatattacatgaggtaacttgttaattctttgtcctaaaacagcaccaattgcataatcagaagcatcacacattatttcaaaaggaacattccaatcgggagggcgaataataggtgcactagttaaaagggatttcaatttttcaaaggcaacatggcaatcattatcaaagacaaaagcattttcttttccaagtaaatgacataaagggcgtgaaattttgctaaagtcttttatgaatcttctataaaaaccggcatggcctaagaatgatctaatttcttttactgtcttaggtggaggaagttttgaaataagatctacttttgctttatcaacttctattccttgagatgaaatcacatgacctaagacaattccctttttaaccatgaaatgacatttttcccaattaagaactaaattcatttctttgcaacgaattaaaacaagagaaagatggtgcaaacaatcatcaaaagaatttccaaacacagaaaaatcatccataaacacttcaagatttctttcaaccatatcagaaaatattgcaatcatacatctttgaaatgttgcaggagcattacaaagaccaaaaggcatgcgacgatatgcaaaggttccaaaagggcaagtaaaggtagtcttttcttgatcttcgggggcaatggggatttggttatatcccgaatacccatcaagaaagcaataataagcatggccagctaatcgttcaagcatttggtcaatgaagggtaatgggaagtggtctttcctagtgacactattcaactttctatagtctatacacactctccacccagtttggactctagtagggattaactcattttgttcatttttaacaacagtgatcccagacttttttggaacaac

SEQ ID NO: 279181 - DNA, 524 bp, Cannabis indica
aaaaagaaggattttatatgtttattttgttaatttatttagtaactaattatatctagttactaattacacaatgtaactaactaagtctctcacacaatttattcatattaatctaaaaattactcaaattttcgttttacattagttcatgttattaggttgtttagttgattataatgttggtaaaattaaaaagttttcataaatgtgaatattattattttttatgtgacctaacttcttattactatgttataattaactatattatgaatggttttagtaagatttatcctaattctaccgaaatttcggcagcataacggctgtaattggacgttcccaaaaattttacaagtgcctaaaataacaaacaaaacagataaacaatacagaacaagcaaattaacataaacaatacaaaatttatccacccatccgaccgcagtacacgtattcgcagaacctacttcactacggatgaatatttaagatattcaaactcaactaacatgcattga

SEQ ID NO: 279182 - DNA, 622 bp, Cannabis indica
aaagaaaaaaaaaatcttatacaattattttgtacatcagcatcgtgaatcacttaagcaattgtgttatccactctcactgtaatgtaatattttccccaaactgtaaaaataagtgaatatttttattagtatatatatgtaatgccctaaataattaggcacacaacccaatatacttaagaaaccctaatcccctaaacgggattactaacaaaagggcgtggaatttaaactttaataacaataggaataaaaacaaacttgtaatactttaaactttataatccaaaagttacaaaagctgggatatcccaaaaatatttataaaacattattacaagtccttttctttcagctgacctaagcggcaaaacagagtctcaaaaacacatcactggtagaccccaacccgcttggtctagtgtggcccgaacgtgtacattcttcgttcagctcccatactcatggctgatcagaaacaactttaccctttcctgcacaggacagcacccgtgagccaagcccagcaagacagtataaaataatgataaacatatttatgacactatataatcagttttgccattcacatatgcttgtatgacacagacctgcatgt

SEQ ID NO: 279183 - DNA, 615 bp, Cannabis indica
ccctcgatctcttgatcgatctaacccagaaactcacccagaaacaccacacaacacatacacaaagataaagcaacaaatagtagggttagagagaaaaacaaacaccagaaatatagaggttcgccctagaaattaggggtacatcctctgatgagctcgccttgaagatcgacctcagatcttgcactatgatgaatgaatattacaacaggtacgaaatccaagtcacagatcgactggtatttcttaggtttttctctcttttgtttttctgtgtttatttctctcttattttctgatttctcacactaactctcttctgtttcttgtgcatgtacttgaaacatcatctggagctggaaaccttcacagatcttgtaacctagggcttttgcttctggtatatctcatctctcttcttttctgtattactctagtgcttttatagttgtagttttagagttgatcacagaactaggagttagttacaacttcggttgtaactaacaactagttcttgatccactagaggcgaagccacataggatctattttctgttgtactctgtttgtattttatctgtattttttttttcacttcatcttgtaaca

SEQ ID NO: 279184 - DNA, 716 bp, Cannabis indica
ttcgggaacacaagctttttgccaaattcatgaaatgtgaagttttagctatctcaggtgtctttcttagggcacattgttagtaaggatgggatcaaggtggatccaggaaagatagaatccgtcagggattggcctagaccgaacacagtgacagaaattagaagtttcttgggtctagctagttattatcgtcggttcgtagaaggattctctaaaatctcaacacccttaaccgagcttactaaaaagaatcagtggtttgtgtggtcagataaatgcgaagctagtttccaggagctgaaatagagattgattacaactccagtgttagctttgccttctgacaaggaaaagttcgtggtgtattgtgatgcatccagacagggtctagggtctgtattgatgcaagccgaccgggttatcgcttatgcctcccgtcagttgaaggattatgaacagcgctacccgattcatgacctagaattggctgcggtagtatttgctctgaagatttggcggcattacctttatggagaaaggtgcaaaatttataccgaccgcaaaagtctcaaatacttctttactcggaaagatttgaatatgagacaaaggcgttggttggagatagtaaaggattccgaattcaggtgtgccggtcaacctgactggaactgaagctgagcggcggattactggctcctaaaccataaaaa

SEQ ID NO: 279185 - DNA, 767 bp, Cannabis indica
aaacatattaaccttctttttgcttggtcattttgtcaaacgtatgtatggatattggaactattttcagtacctttaatatgatattaatgcaggttgcttttggagttaagtttgaagtttttttttttactagatgtgtaatataatgtaagattattatggaattttatcagtttggtttttgtttaatgtaagtatgtatttttttgtttgttgtattcttttttttgagtttggtctgattaagttggtatttttcttttttcaggttttgtaaaccgttgcatatatcttctgttttttatttatattttttggaaaagaggtacacactttcaaatcatagaggtatttttgtttattttttcaatttattatgtttaagaaattaagttaaagaatattgattacatttttttttactatcaaattaacaactaaattgtttatgaaaatgttaattaagaagatatttttaaaatagttttgtaaattataaatcaagattcaaattattggttttttcttttatatttttgaaatcattttatttacaaaatatttttgttatgtttattttgttaattttcgtaaaacagtaaacacatttgtgttcatctttatttatttatatgaaggtatttaaaatgaaaaatcagaagttcttagtgttcctttattttgtcttatatttgtaaaaataagaaaactgaaagtcatttttttgttgtatagtttgtttctaaagtaactttcttctcttc

SEQ ID NO: 279186 - DNA, 681 bp, Cannabis indica
acctggatctctttctctccttcttgagcccgattctccttcttgttgattggattcttcacagtcttacacactatgattgagataccacttgatgtgtgtgggcactcactctatcactaaaggttgaaaatatgaagagaaaaagagaatgtggtttcggcctaatagaaagaaggctcaggaaagttttctgaaagtgaaatttcatcaatctattaagtgtgagccatcactatctatttataggtaaccacctaggtttaggttagatttaattagcattaaaataatagaaaaataaatggtaaaatccatgcatagtggccggccatgggttggataatgggcccactttgcaattttgccattttgtcattttcccatcttattttctcaaaaacgccaattttccaatttaaccacttaaatgccaattccaattatttaataactaaaaattaattattaaataatattgtcatttaatatatttattaattagacttaataaagtctcttaattaataaataaaccttagaatctcttttcttcacatttaagcccttgcttagtgaaaattcataaactagacatagtctaattttagaattataattgattaactaaaatcaattaactgagtcttacaagcagtatggtctcaactagtatgggga

SEQ ID NO: 279187 - DNA, 565 bp, Cannabis indica
aaaacaccctgaattccactccgaaaacaccccgaatcagatcggacttgaggagaaaaacccaaaatccccctttactgtgaaaaacggtcagtttttcaggcacccagaaaaacggcctgcctttttttcctggcagccatggtgatttctggtttttcaccccaaaaaccaatcaaacctccaccaaacctgctcaaaccttccaaaacagtataataacataaatataacatatcccaagcttcaaattacaatagttcaatctctaactcaaattcatatgctcaagtgaaagaaaatcaattcctttagcttcttcaaacacaacacaatctcaacagccatgaaatcaaataaaacatgcacaaacaaacctaattcaactaagaaatcatgctcagaactcatctaagcctacagccctgaaaacttacaaaaactaacaaaaacctagctttagaaacctaggaattcaccaaaacatgaggaggaacttacctcaaggttctaggttggcttgggggttgagttcagctctgaaatggtaggtttgctgaagaaa

SEQ ID NO: 279188 - DNA, 580 bp, Cannabis indica
attgattaatttacagtttagtaaataaataaatatttatattttttatatgtatataacttacaaatatatttttaaatagaattatttatagttatttttcttgttttaaattctaaaaacaaatcaaataagtaaacatttgaaaatatctggttttaatgtgaaattcaactaaaagaatttaaattttaaataaatgtgaatttttatactgaaactaatgtgtaacttatgactaatttttaattccaaaatattgcatgtatatgaaaagaaaaaaaaaaccactatttcactcatagtattaggagatgtttgtaatgggttaggactacgtaacaatggtaatgtaaaatattaacatgtttgttttgaggtttaaatcttgaaatattattctctaatataactactttttaggagagtaatgctcactctttaaagaaatatgggtttaattatttccttccatcatattaatttgaataatatgtttaaattaataaataaacttaaataacattaatatatattattatttaggctaattagtaatttttctcccgaactttgacat

SEQ ID NO: 279189 - DNA, 400 bp, Cannabis indica
cactagtgggtgtgggagtagtgcgaggtgatcagatgctggctcacgaatgctatcgcataaagctacaacacagaaaagccgatcaccaactaatggcagtcttgacagaagaaagcgagaagaaggatgaagatcttgatcctcaaattcaagatgaaagaaacttactgaaaccaattaaagaattggaagaagttgttctagacccaggaaatcccacaaagtgtgtttacattgggaagaacctggacgaacaactgaaatagcagctaataagttttttaagggcgaaccaagatgagttcgcatggagccatggagatatgatagggattgaccctaatattatctgccatcatttaaatgtcgatccaaactcccaagcaaagagacaaaa

SEQ ID NO: 279190 - DNA, 1401 bp, Cannabis indica
ataaaattccaattactttggtattttattacactgtatttttactcattgcatgaacttaaagctaagcactataagttattcataccttttttaaaaaaaaataaatacatatgattctaaatagagtaatttgcagaaatttaactttcaattgtaaataaatatctaaattaaatttttaacagtaataatacctaaatatatttttaaaactttgtaagtatctgactgttaaatgtcaagttgttatccacgtctcattttcatattagtatatttaaatcaatttttaaaaaaaataataaaaattcataaattggaccaatcaaaaattgccacataataatttacttaacatttaacaatctgatacttacaaaattttaaaaatataattcaaatattattgttgctaaaaactaaatttaaatatttatttacgaccaaaaattaaacttaaatatttatactgcaaattactatctaaataactacagaaaaaacaaataaactaaataatacccttaggaaccgaaatatattggatttgtagtgtaaacatttttcctaaaacactaaacaagattaaagggatttcaatggataagatggtgatgggtactcgagatctcaccttcaaagttctcctatgggagatagagatcaagaaagaggaggctcaagtggagtgatatagaaagaataagaaagcttgagagaaataggaatggaaatgagtggtattttcttcttaaaaaaaaaaaaaaaaagagagagagagagagagagaatatatgtaacattagcatatttatagacgggtgaatatgtaagattatttgttaaaaagtaactagaatcaaaagaagtcaaattcccatttgttttctatttttacactaaacatgataaaaaaaaaaaaagcaaatttaagtatcaacattacaagctcatttttatttattgatgttttattctttaaaagtaaagatacaatattactatgatgatattttctcaaaaaaaataatactattatccaaatacttcatacatgttcacatatgattaaatttaggataaagactaagataagaagttataggaagaggagctactaaaaaacacatatgtgcaaaagataagaagtaattataatatttgaaaaaacactactcaacctggcttaatgtaccatacaaaagttaaaagcaaatgaatgttccttactaaactactaaaacatatatatgtattttaagcatataataaaaccatactcaacaaagtaattaataactagcatgaaaatagaacattgaacaggtttcttattacctaaaacctaccaagttatccaaaccagatacatgatagccatcacaaaagattatgtcg

SEQ ID NO: 279191 - DNA, 545 bp, Cannabis indica
ttacttagttactaaattatacatacatatatatataatcaattatatatcacactattatatcaaaaaaaaaattatatcccacactaattcaattttaaaatttttattcctaaactaattaaatccctccaatgtcattctcaatattcacaataaatatatttattacaaagaatatatacaatacaattacaaattgtatttacataaaaaaatatacacactatatacacataatatatacacacattatatacacatattcaataaaatatacaaatacatatatatactatatattgaggtttaaatttttacctaataaacgcaatccgacgagcaattccgtaaaaaatccgggcactatacacatacaacacaacaatattactaataaaatgaaaaaacccaaaaaataatttacaaaaacaaaaaataaaataacgtaaattataaaaatgaatagaaactatatttataccttaaaggaggtttagattcaaggatttctcaagaaaaaatggtggccggattttaaaccc

SEQ ID NO: 279192 - DNA, 604 bp, Cannabis indica
ctaaaacctaacaatgataccccaatattctaaaccatataatacaattctctaaaggccccaacgccgctttccacagcttccaaacacaacacagaaattaggtaattagacataaaatagcataacaacatatatgatacattaaatatatttccaaaatatgcatttcataattattaattaatctcatacataaaccttaattatttaataatacaaggtattagccatatgcggtctttacaattatccccccgttaaaaggatttcgtccccgaaatctacctgaacaactcaggatgctgagccctcatatcagcctctaactcccaagtggcttcttccactttactgtttctccaaagtaccttgaccaatgatatggttttagttcggagaaccttttccttcctatccagaatttgcactggttgttcatcatatgataggtcaggttgcaattccaatgcttcataactcaaaacgtgcattggatcagatacatacttccttaacatggaaacatgaaatacattatgcacagctgataaagatggaggtaaagccaaccgataagcaacttgcccaaccttttccagaa

SEQ ID NO: 279193 - DNA, 528 bp, Cannabis indica
ttagtgctcttgaccaaattctccttttcaatatcattgtccaaagtaagagtataaacttaggctatcttataattcgaaccatcaatgaagtgtttaagcctagacaaaaaaaggccttaccctttggtgcccttcttagttacctatttcctcttctaggcattcctaccaatgatgaaaccgaagtgctagaatttaaggattccgatattttaggggaaatcactatcaagggtatgtcctacaaattcgataccgatgaagaaagatggatttacaccaagcaagattcccaagctcaaggagggggccaagcaattcctagtgctagtgaagaagaagaagaagaagaggaagatgaagaagaagtcaatcctcaagcgcctcccatgcctcaattcaatattgaggaggcttttgctcaacttcacacatctcttgacactcaatttcaaactttgaggaatgatatcaacaccatgaggagtgacatggtccaaggatttgaaaatgttcaagatgaga

SEQ ID NO: 279194 - DNA, 686 bp, Cannabis indica
aaaaaataataactaatatttgttgtacaaactatttattagaccatctccaataattacactattttagagtactttttcattaatttgatgtaaaatctattaagtaacgattccaataattcacaccaaatatcacaacaaataaaagtattttgcttcaaaaatctcacattttatattattagcattagtaattaataataactaatttatgatgtagtattatttattgtcaacaacttaaataatatattttttatatcaaataaaaaaaaggttaaaaaaaagttatatattaatttagtatagattcaaaattcaatattattatgatgtaaaatttggtacataccaatttggtataatccttggagtagaatgatatgaggatttaacactaattcgatgtaatggtgcacttttgaaggtgctctaaataataatagtgtgtttctatagtgcactccaaaaaaataagtataatgatgcatctcctttttattttcaatattaaataatcataatttatatatatatattatatattataattatttaagacatcttacaaagttttgaaaaattcataataatttataatacagattgtaaggtttaaacaatctatttcacatgcgtataaaataccgtttatttgaattctcaaaatttacagaatatct

SEQ ID NO: 279195 - DNA, 884 bp, Cannabis indica
ccagatctcaagtcgatctttgaaagacatccctgtaactgatcaaacaaatcatcgatgcgaggcaagggatacttgttctttatagtcactttgttcagctctcgatagtctatacacatccgcatactaccgtccttcttcttgacgaacaacactggcgcaccccaaggtgagtaacttggtctaatgaaccccttgtctaaaagatcttgtagttgagccttcaattccttcaattcattgggagccatgcggtatggagccctcgagattggtgctgtgcctggcgctaactcaatcacaaattctatctctctatctgggggtagccctggtaggtcttccggaaaaacttcttggaattcacatactatgtggacattctctggcttgagggtggtttctcttgacttgtctactatgctggccaagtatgcttgacatcccgcacgtatcatcttttgtgccttcagggctgtaactagcggtaagcttgacttgactttgattccttcaaatatgaatgcctctccagattcaggggtgaaagtcactgtcctctttcggcagtctattgttgctccatgtcgtgatagccaatccatacccaagataagatcgtaatccctcatctccagctctatcagatctccactaagttccttgtctgcaatccttattggcgcatcccgcactcctctagatgatatcataacctcgcccgagggcaactccgtcatgaacttataactaaagtttacatacggtagttctaacttatctatcatctttaaagcaataaatgagtgcgtagctccagaatcaaataaaacagtacatagttttccagagatagaaatctgacctgcaaccacagtgtt

SEQ ID NO: 279196 - DNA, 591 bp, Cannabis indica
gaaagaacggagtcttcaagaagtcgccgcccattaggggaaaccgcgacagaagagaccccaaaaagttttgtaagtaccataaagatattggtcataccactttagaatgttgggtcttgcaggatgaaatcgaggagctgattcggagaggaaaatttgacaagtataagaagaacgaggaaggtcatccccgagcggatgacaaagaagaaaatcaaaacgcgagtggtttgagaacacctcatgatatattaacaatcattggagggccccatatcgcaggagactcccgcaagtctcaagagcgctatgccaaagaagctaaggagaagccgctcaccaatgtaaacaatatcagtgagcggctagagacattgtttcaaaaagaatgcgacgacatcaccttcatggagagtgatgcgagatgggtccatcacccgcattccgacgcattagttatcatcgcaaatattggcggagataatgtccaccgtatactcgtggacaatggaagttcagtgaatctcttgaatttccaagctttcaaacaaaatgggttacaagaaaaggacctgcaacacgtgacgt

SEQ ID NO: 279197 - DNA, 735 bp, Cannabis indica
cgaagaagcgtttcatagatcgggttggaatccaaattcatattgcgacggtgatgcttcatcttgggacatctcaagaatggaagaaacattagcttcctcaggtggataaagcatattttcagtatcaaagtcatggaggagatcatttaaagaattagagtcatcatgcaaaagaacttcctcctcaacaattgtgtctatcacatcagtatgatagcaatcttcctcctcgtctggtggttgtttcgcaacatgaaaaatgttgacctccatagtcatattcccgaaagataatttcatgagaccattcctatagttaatgagagcattggctgttgcaaggacaggcctacctagaatgatgggaatttttgactcagtattaacctcagactgagtgtcaaaaatcaaaaagtcagtgtggtaatataattttccaactttaatcaagacatcttcaactattcgtcgtggctttttaattgagcagtcagccaattgtagcaccacaaatgtgggcttgatttctcctaagcctagttgcaagtaaattgaataaagcattagattaacacttgcgcctaagtctaggaaagcttgaccaaatccttgggtcccaatttggcaactgattgtaggacaaccaggatctttgtatttgatcggtatcttttgttcaatcaccgcacttacttgttctgtcaagaatacatttttcttgacatggtgttt

SEQ ID NO: 279198 - DNA, 1087 bp, Cannabis indica
aagatgagatgagaaaagttaagcaatgcatgcatacttccaaactgtctgctgtatatatttatgcatgtaaatattttatagctatcataaatcatgtgttctgattttcttttaaaacagattatgatttataggtgaccctcaataattaaatataaatgtgagttggataaagaacattcagctaaaagtaccgaatctttcgttaaggagaaacatgtctttcactgatttatattaattgacaacataattatatatataaacagatcgacttattaatttataatcatcacttacgataggaatttaattgggtctctacgtaaggcgattctcatggcatcaaaacccaattggcttggggacaggttctaacatttaatattataaatatataaatattgaatgattttacaatgcgtcccactaaaatgaatgtactgacacaatctttaactgttttaagcaaaaaaatttagtttaatttttttatagtcgtggatgttatagttatttaacacatcttgtaaaattttgaaaaagttggaataatttacaatttagaatttaaatgttcaaactgtctatttcacatgcgtataaaataaaaaatcacacgtgtctttgaatcttatttttgacgttgttaaattttttgaatttctcaaaatttcgacagatatctttaataactacaacgactacgaacataaaaaaaaaatagactaaatactttttaaaataccaaaatagataaagatacatcaatatatctatcttaaagacacataatgtaaaattttccaaatatatattattaattagttaattacaaagctagcaaagtgtgatcaagaattaggaaaaattttctctttcattttttagaactagattcttattcactacaaaaaaaatcttacttttagctacaataaaatttgtgattaaaaagtgaaaaaaaaaaaattgtgaataattataaattattattcttacgttgtgactaaaagtatgtcactaaaattacaatttgttgtgactaaattttcttttagtcacaatacttgttgtgctaaaa

SEQ ID NO: 279199 - DNA, 889 bp, Cannabis indica
gttgattcctactaaccgtgaccgtggagggtgtgtatggactaccggaagctaaacaatgctactcggaaggatcatttcccgctgccatttattgaccaaatgttggatcgtttggcgggaaaagagttttattgctttcttgacggatattcgggttacaatcagatttctatagcaccggaagatcaagagaaaaccaccttcacttgtccatatggtacctttgcctttaggaggatgccatttggattgtgcaatgctcccgcgactttccaaaggtgtatgatggctattttctcggatatggctgaaagtattttggagatattcatggatgacttctctatctacggggattcatttggggtgtgtttggagaatttggaaagagtgttagcaagatgtgaagaaaccaacttggtgcttaattgggagaaatgccacttcatggttcaagagggtattgtgttgggtcacaaagtgtctagcaaggggatagaagttgacaaggcaaagctagaagtgattgagaagttaccagcccctaccacggtgaaaggcataagaagcttccttggacacgcgggtttctataggcgcttcattaaagacttttctaaggtgtccaaacccttgtgtaacttgctagaacaaaatagaccatttgagtttaccgctgaatgtaatgaagcatttttgaagttgaagacagctcttgttacggcccccgtgattgtagcacccgattggtcattgccctttgaactcatgtgtgatgcaagtgattttgccgttggggctgttcttgggcagcggaagaataagatctttcattccatttattatgcaagcaaaactcttgttgatgcccaaattaactacacca

SEQ ID NO: 279200 - DNA, 685 bp, Cannabis indica
gggagttgtattttgaaagtcgctgtgcgacctagaacttgtgtattttgaatgtatagtttgaaaagtaaattttacaaagtttaaaaacgggatcccggaatttgtaaatattatattatattacaaagtttaatatctaaagcaaaagttttaatttgacacgtttttcgagaaatttctttgattagcaaagattgcacaataattgaaaaagcactgtagcgtgccttagcattagggcgttacatcctgaacaccgagatccgctatccacaaatggaacgactagcatttgcattggtgatcgcttcgagaaagttgcgaccttacttttaggcacacagtattaaggttttaacaatctaccccttgcggcaagttttggccaaacatgaagcctcaggaagattactcaagtggtcagtagaactgagccagtttgacatcaaatacaaactaagatcgacaatcaagggacaggcccttgcagatttatactcaagtttccaaatgacgaagtagccataatcacataagagtgaaattgatcccgacgtaccaaagggcgaggggtggactttgtatgttgatggggcagtccaataatgaaggatcagggggtggcataaggcctcattagtcctaacaaattcaaggtacacgctgcccttagatttgagtt

SEQ ID NO: 279201 - DNA, 565 bp, Cannabis indica
tccatagcctccctggtttcccgcaactcgcgcttagccttagtggtagcctcgccctctgccttcagctcctcccagtgcttcgcctacgcctgagcctccatctactgggcctcctcctagaatgccctcctctcagctgataagtcccgcaaaatcttcacggcctcgtccatgcccccaaattcggacatgacgaacccgtgatcaatcagggtctttgagaggcggtcggtctctgcggtgatctgaaaaaagaaacaagaatgaaatcagatgccttaagacaaaatataagcgaaaagaaaggaatgatcgcaaaaactcaccgcagccaaggcagcactgatgtcctgaacctggtaaatagagttcattgaggcacaagccgcgtatctctggctgggaattgagtcagatgggagacaaactggctggccatctcagaagcaaaggggagaggtggaccgcgaagcgattgaaccagtccgtcaggcgatccatgttcaggtcccagggattcctgaacggcgtcctcacgcaaggtgttcattgctcctctcag

SEQ ID NO: 279202 - DNA, 117 bp, Cannabis indica
ttagtgatagagtagtgcccatacacagcaagtgatacctcaaaataagcagatcaagaattgaccaagtaaatccactgacttattaattccttgttgcatccacgcaaagaactt

SEQ ID NO: 279203 - DNA, 700 bp, Cannabis indica
atggttttatctaatgaagcacaagtttttctcaaaaaaaaaaatataacagtccttaaattggtataatttaaatattattttttattattattaatgtatgacaatgtttatcatattttattaaaaaaaaaagacaatgtttatcatatttattataaaattttcatttcgacaatttcagtaagttcattgtaaattattttgaattttttaaaaatttacaattaatcttaaaaagttatatgatatgtgctcgtcaaaaaaaaaaaattaaaaagctctcgtagatgctaaaatagaaaggagagtatagcgaaaggaactcctaaaggagtctactatatatatatatgtatatgaaacacttcctaatgggtattacccaggaatggttattaaataaatttaactataaatattaattttaaaaatatcaaaccatcgaattttgatctaataacaaataattaaatcacaaatttgaatttctatgcttaagtagactacttaattaaaaaaatatataaaaaaatatctctttttacactatatcaaaaatatgttcatacaaaaatatttaactcaaactcaactttgttttcttatttttcttgctaatttttttttaattttttttaccgtattggacaatctcagttcatatgatataaaaatgagagatttttttaatttagat

SEQ ID NO: 279204 - DNA, 601 bp, Cannabis indica
acctagtcatgcctttcggactgaaaaatgttggcacaacttatcaaagaatggtgaaccgaatgttctaaggccttctagggcgaaatatggaggtgtacgtggacgacatgctagtcaaatcaaaagcatgtactagccacgcggacgacttagaagaatgctttgaagtggtccggagatacagaatgaaactcaacccgaagaagtgcactttcggagttaagtcagggaagtttctgggcttcatcgtcagtcagaggggaattgaggcaaatccagaaaaaattcaagctctcctgagcatgccttccccaaagaaacacaaagatgtgcagagcctaaccggaaaggttgcggccctgagccgttttatctcccggtccacagacaagtgcattcccttcttcaacatcttcaagaagtgtcagaaatttgaatggtccgacgagtgcgaggaggcattcaaaaaactaaaagagcacatggccaagcctccaatcctgtcaaagcccgttcttggagaagacttgttcctgtacttggccgtctccgaacacgcggtcagcgcagccttagtccgggaagaggaaaaaactca

SEQ ID NO: 279205 - DNA, 610 bp, Cannabis indica
agagcaatcaatgatcatggtaaattggatcctcaaggaggatttcatccacttccacatttttcaattctaaaaatggtttcaatttttgtccattaactttgaatacattaccattattaggattttcaatttcaatggctccatgtggaaaaacagtgcggataatgtatggacctacccacctagagcgtaactttcccggaaagagatgcaaacgagaattgtataaaaggactttttgaccgggagaaaaatcttttctcaaaatatttttgtcatggtaaaatttcattcggtccttatactttttcgaatagtcatatgcatcatgcctaagctcttctaactcattcaattgaagctttcttttctcacccgctttgtctaaggaaaaatttagttgcttaatagcccaataggctctatgttctaactcaacgggtaagtggcatgccttcccataaacaagtctatagggagacattccaatgggcgttttgtatgcagtacgatatgcccataatgcatcaatgagtcttagggaccaatctttcctagtggggttgacagttttctctaagatgtgcttaatctccctatttgatat

SEQ ID NO: 279206 - DNA, 224 bp, Cannabis indica
cactgtcatcaatgtcttcacattattcataatttactcattagtatgaattatttgatgtaaaaaattgattttttaatgataaatatgttattatagcataaatctataaattatatttcactattattttaataaaccaattaaaattttaaatatctaactttaaatcttctctaatttttaaaaacacatatataatatatatttatatattattctat

SEQ ID NO: 279207 - DNA, 549 bp, Cannabis indica
atgcggcattccatttgatgaggaggcggcaacacttttatcccgagtcctacccgaatagatgtgtcataatgccgtgtattttcccagcaggagttattgctcggtgggaagctgcgggtgatgagcaggctaactatcagtgggacgagagcatattagatttgattcgaggggatgaaagtcaattcttggccagttggaagaacaaggagagaatatatatggccctctacttcgatggagcaaagcattgggtggcactagaggtagatctggatcattggttgttgaacatatttgactccagcctcggatcgatttccccgaacgaattgaaccgtcacctggcaatgtgggaaaaattactaccaaatttgctgctgcaggctggcctattcgagagtcatgacatgatcctcgtgcctcaacttaccgcctcagagagccaggtcagaaatttcacttcaaaagtcatggatcgggccgttgttccacagacaaagacaaggtaacttaattacaattgattttttgttatttaacttg

SEQ ID NO: 279208 - DNA, 491 bp, Cannabis indica
ggagattgggcttgatgagactaatgaaaatgaattgggccatgtgggttttagtcatagtcaaggagtcaaaaatatggatatttctaatttggttgacaatgatactacaactcatgatatgatttcaaaaaacatgctcgaggcgggtgctggtatccaggcccgccaagaattatgaatgtgttgagctggaattgccgggggcttgggaaccaacggactattcaattccttaaggaacttgtgtttcaaaagagacccgattttatctttttgtgtgaaactaagtgtcataagtcaaaagtggtgggcttggcccaatctttacattttgaaggagtctttgtggttgaagctattggggcttcgggtgggatggctctactttggaaaaataaggaggatggcactttgttgggttactctaataatcacattgatattcaaatatcaatatcttctacaaccccggattggcgtcttactgg

SEQ ID NO: 279209 - DNA, 703 bp, Cannabis indica
ataggatcattaagcactctcaatagtttctgttgagccaagagtgacttaatctttcttctccaaatcctgtaatcaccagaaccatcaaatttgtcaatgtcaacctttaaattgctcatagttaatgaatttaaataatgtaaaataaagataagtgttaataggcaatttaatttgtaaagataattataatgtgtcccagaaatcctttgttaaagatttcaagttgatctggttgagttcttgaatttcttgtttaggtttcttgatttcttgcttgagttttcctccttcctgatgagtttgattgttgatcttttccagctttaaccaagctctgataccattgtaggaaatttaagataggaatttactatcttgtccctacaccaacaaaacaaacagatcagtaattaaggtcaatttcgacctttcactgttcaaagacttttcaaagtctgaacactcaaaacggcttcgttttgtgtttgaacaaaaccaaagactcgagaatcttctcagtcactttctctctttctcagtcttctcttcgaaaccctagcagagagtttctctctgagaaactcaaagccaaaccctagaaacccagaaatcccaaacacaaacccagcaacaagatcagatctacaatgatctgatctttacacacatacacacacacaaaacagtaaagctttag

SEQ ID NO: 279210 - DNA, 585 bp, Cannabis indica
actgcttctggaagttctgctgacgagcataattatctgatagtttccaatggcgtgggcttgctccattggtcaaactgtcgacatctatagggcaggtgtcagtagtatgaggtcctccaccacaacttgcagacaacttgagcttgtttggcttgtgcagtcaccaactttgttaatgcctccacctgggctgtcaacttggttattgcatcaacttcttgcatacctgcaacctttttagttgggcctctctctgttgaccattgttgattagttatggccattttcttcaagtaattcaaaggcctcattagcacttttcctcatgaaagctccaccagcggtagcatctatcagtgttcgggtgttgttcagtaatccagtatagaagttatgcacttgtaaccacttttcaatcccatggtttgggcacttcctcaataaatccttgaatctctcccaggcttcatatagagattcattgtcatgctgggtaaagttgttaatttcagctcttaacttagccatcttcgcaggaggaaagtatttggaaaagaatttcagggccaattcctcccaagt

SEQ ID NO: 279211 - DNA, 813 bp, Cannabis indica
tagtgcaagagggtttggtcacagaatactaaactcatatgccatactaacatacagtttgaatccattgacagaaaatggatattaatcacttgtgaaagtttaattgtattgtattctggaaattagaaatattaaatttctatatggaatctagaatttaaagtcaaagacttaaatttataccaaatatacatgagtattctttcttggaccatcactactaatctaactctaagtttaatttgcctaaagtaagcataagtaggagatttctaagatcgagtatttatatcatttcgggatagaatgtcgggaatatagtcatttgcgccattcaatttcttaagagaaagtagaatgacattatatgcaaatgatttataaaccattcatccaatatattatttaagctaattcgaaatgaacaaactaagaggaaaaataaaggataatttcgattaaaaataagaatccaacgatgtcccgattagcgagagtcaaagttattcttacttttataaacttcttcattgtttcatattgtaaatactagtctaaggtgtcatctattgatgaacaactagatgttgtatttacaaatatttatctatcgagatctaacactattatgttcgtctaatggatgacaatccattagggatttgtcccattaaaaacaacaagctaagttagaccaacaatgaagatttgaaatttaaactacaattaataacagaaaataacatggtttaatataaattcacacacaattcagaaattattaaacatttagcaaataggaatgacaag

SEQ ID NO: 279212 - DNA, 729 bp, Cannabis indica
aaacagatgtgaccaccttttgagaaggatggccaagtctgttatgccacaaatcaaaaactgaaacagaaggctgagtacaatggctgctggaagctgaaacagcagggtcacttgtgacaactaaggcagattttggatcagaaaacttaacaccagaactgagagatggatgggaagaggacagcactttgaaatggcttggatcaaaagtatataggccattgtgaaggatcccagtcaacaacacttccttggtaacctggtccttaacataacaagcatcagcatgaaactcaaaccaaacattattgtctaaagcaaatttggagacacttagcaaattcttagttatctcaggtacatgcagtaaatttcgaagcaataaaggcttattatgattatgaggtgcaataaaagtgtaccatggtgttgaatggacagacctgtgccatttcccacataaatctgatcagaaccagtgtattcagcattggtcatgaagttttgaaggtctggtgtacaatgatttgtagcacctgagtcaggataccagtttccatcatccacagatgtgttctgagctaagttggcctgcattgtggaagtttcagcagtgggaacacaccagtgaagctcgtatcaaatcgataaaagcaatcaaccacagtgtgcccaagcttgtgacaagctgacactggagcctgtgttgttgctgagatggttttc

SEQ ID NO: 279213 - DNA, 327 bp, Cannabis indica
ttcacgagtgtttaataaccattttctatcaatggattcaaacagtttgagttgagtattctgtgaccagaatccacttgcactattctaagaactctttgatgtaactaaactgaagtcatcaaaagatacaaccacatattttataaatctatggcatttgtatcttgttcatagtggttttgacaaaatcattctctacaaagagttaatatgcctatatccactgaaagtataatcatctcattcgtagatggatgtacattcaggggtggatgtacattgaaattttcttctctctaaatttcgaaacacttgagtgaatga

SEQ ID NO: 279214 - DNA, 711 bp, Cannabis indica
ccgtcgcttccttgggcccaccttggctcctttcgccgcggagatgactggtgagtttgcttctcagcttacccgatgcgcgcccaagcggttcgcaacttgtgcctccctgaactctatcttccaggtccaggacctctgccactccctcactatggtaggtgttttacaagtttgcttttccctttatttttcttttttggggattctttcttacacttgtattgtttttcagcttgctactgaggctggccgcctctccaagaacatcattaatcatggcttcgttctgtctgattttggggacatgaatgacgtcaggaaggtccttcaggacctcactgcggagaggcagctctaccagccgggaggcggctgccaaggccaatgaggaggaggccaaacggagggaggcccaagcggaggccatgatccgggacgagacccagcgaaaggaccggctggaggcccagcatcaggaggagctgagggcacaaagcgaggctgctgataaggccaagcgggagctccgggaggccagggaaactttggacgaaatggttgccaaggtgagatccttagaggaaactcaccaggcgaacttagagtccaaggccgctctagccgcggagttgaaggagctcagggacttcaaggagcaaaccatcaagaaggcaaaaagagccgagctcctttctcctgtttcctgcg

SEQ ID NO: 279215 - DNA, 510 bp, Cannabis indica
atttataattgtcgtgaggttaatttctcgttatataagggatacgatttcatcgtaactcatgtgaagggttgttgggaaaaacaataaacttcaagcgcagcgaaataacaaagaaacgaagcaaagtaatttactcagtttggtaaaactaccaaacccacaaagagaaatatatttcacttatcacttcaaaattacatatactctctatctcaatctctctacccaaatcccaatacaccctttgcttctcactcactcacaccacataacaaactcacacacttttcttttcacaactcactatttttctctctccacacacacctctctctctctctcacaaaacacatatttataaagttacaaaacttgggcaccaagacaacttggagaccaagacattttcgaaagcttccttaagaagacttttcaaaacttggcaaccaagactttccttttcccataattaataattacccaaaaagaaattacaactttacaaat

SEQ ID NO: 279216 - DNA, 636 bp, Cannabis indica
actttgacacaataacataaaacaatttagacaaatttcttagaacaattttttttctgtttgctgaattatgaacaattttatttattgtttaattttattttttgtaaaatgcactttctcttacatttgttggtttactaactttacccaatacattaatgtgaatattaataaaacaaaaataataattactattatgttctacagaaaataaatacagagctgaacattgtacaataacttacctttcacaattgtacataaattgaaaatctcgtgataattatattattctagataattgaaagtgaagtataatttaactaattcccagcaaaaatatacatatatattaatatataaatacacacatgaggtaaatttgtttgattcgtttacaaaaccaaaaatatccacaccaatacaataataataaatattaggaattacatgatttacaccataatttgagtataattaaaattaattttatcgaaataaataaattaataaaaaaaatatagctgctccaaaagaaaacttaagaaaagcgtaaaacccgatcaatcaaaagaaatgagagagagagagagagagagagagagagagagagagagagagagagagagagag

SEQ ID NO: 279217 - DNA, 530 bp, Cannabis indica
ccttgtatatctacttggtgtacgaccgtgcgatgacgaagaggctgattctgcgtcgttgtctcttgatggtcgactgcgaggattgcgtcgttcagggtcttcatcaacctgtgtgctttggtttggataccttgcggattgatccctcgacgttggatggttcaggtccaaaccttcagggttggttctccgttccctgcgtacacgattagtatgacgtctagaatttgttacctgagggttatccgtgcgagtagcaggaactcgagggggcgtcgggcccatttttacccatctacttcggcctgtagcgcgcgcagttgatcctgaatcgcagtatattgatcagtggggagttggatgattccctcggataccactgccagagtgacagggggaaaatgcatggttgctggtggtgtggatgtgtccccgacttgagggtcagtcgtttccgggaacaagttgagaggtctgatattgcctctccctactccgtcgttaatgacgtccacaggtggcattcc

SEQ ID NO: 279218 - DNA, 423 bp, Cannabis indica
aatgggaaatttagttcagaaacaaatccataaccattcctatagcaatattcaacataaagaaattaaagaggaataaagaaagaaactgttggtggatgaattctggatcgtcacttgaatctctgtgctcttcctgccgctctctgctgtattttagggttccaaattgcttcccctgacttccaatcgcagttttctatttataactaatttttagggttcgatggacgaaaatgcccctgagccgtacgggatctcgccgcggccaagcttcctctcgccgcggcgagataattgcaaaataggcatccctctgtatctcttaaatggccgcggcggcactacccctcgccgcggcgactaaagctcccagggatttattggaaattattttaccagcatcttagatctactcacaag

SEQ ID NO: 279219 - DNA, 115 bp, Cannabis indica
gggaccatgggcctatataaccgagcttccaataagctgaaccgaatttaccaagtaaattctctaacttattaattccttattgaatccactcttagaacttggaattgcactc

SEQ ID NO: 279220 - DNA, 795 bp, Cannabis indica
ggccaaacagagggaagcccaggcggaggcgatgctccgagaggaagtcctgcggagggataggctggaggcgaggcaccgggaggcacttagggcgagggcgaggctactgccaaggccaagcacgagtttcgggaggctaaggaggccatagacgagatggccgccaaggcgaggtccttagaggagttgcaccaggcggacttgcagtccagggctaacttggccgtggagatgaaggagctaaaggacttcagagatcaagcgttaaagaaggctaaaagagatgagctcctgtcccctgtctcatgtaagcgttgtgtcaagcgcttcgatatggcctggtcggtaaatggccagaatatcaagcttgacttctaccccaaacctaaggaggttattgctaaatttcgggagaagaagaagaaacttgatgccatgcttgaggcgcgtattggtcctcgccttcctccccgcattgactaggccgattgagtccagcccactttaccaagctttttcttacttttttattttatttatagctatttttcttttatctaagacaatctttaacttagtagctgttttattttctaaggggagacaattattaagacctgtccccgggccctttgtacatatatttttttgtgacctgcccttagggtcaggatttttagatacatgatctttttttttttgatgcatatgtattatttttttcttttggacctgccctttgggtcaggatatttatatatatgatctttttttatgcatactttttctttt

SEQ ID NO: 279221 - DNA, 722 bp, Cannabis indica
ttaaaaaattaaaaaatgacaaaatataataaattaattatatttattacacattattttttaaaaaaatatatataataattaaattaagttatataatttttttagaattacatattattatattgtaacaaaaacgaataaatatattggattataaaataaatacagcagtatttgatttatggtatcactgaaaattaatatatcgtagtaataaaattatataccacaaagaaattataataatactaaattaatactcgaaatatatatatcatgctaacaaaattatatataccactattaaaatatgtatacataccaaaaaatttatatataataaaataaaaaccaaatatcatcttaaataaatgatatactatcattgactgagattttcggcaaccaattaaataagataatgaagagagctttgaaataattaatgcatgtggtttttacatggttcaggcattaatgagccgtagtccacgagtcttttttattaatgagagttcttatacagagaatgttcttggtgagttctctctctcttgttttctctttttcgatcaatcttcccattttgttcaggggtatttatagagtttggtaaggacactaaaaaggaatcacttgtctctgagtgtcagccatgtatgtccacaagctcctaagagatgtaaaatagggtatacatgacctatgctgtaggtatc

SEQ ID NO: 279222 - DNA, 453 bp, Cannabis indica
agccataggtttagataaacttaaacctttaatactaggaacatgaagttttattaagtccattgaatagacttacaaaagaaaattcctttcttgtccttgtaatagaaaacttttggttgttccatatgaatggttttaaccatagttctcttggctttgcttcttagcttcttattctgataatccattacttgtttaaacttacaatggattttcatcacaagtgtcttccaagtcataacagggtgagttccttgaaaccctcccactactaaaaggtaccttgaatttttgtctaagaatactaaatggtattgatctcttcggttgtaacaaaacaacaaaggcagtgggatcatcatatatcaaataagatgatagaacacttttggaattcaagaaaaaaataatactcctctacttgctacttgtttttctagacttagtcat

SEQ ID NO: 279223 - DNA, 741 bp, Cannabis indica
gccgaccgcctttccaagaacctaattaaccatggcttcgtcctgtccgactttgggggcatggacgaagtcatgaagatccttcaggatttgactgctgaaaggcggatttaccaggaggatgccgagcgccgggaggcccttgccaaggccagtgaggaagaggccaggcggagggaggcacaagcggaggcgatgatccgggaggaggcccttcggagggataggctggaggccaagcaccaggaggagctgagggcggagggcgaggctgctgctaaggccaagcgtgagcttcgggaggctagggaagccttggatgaaatggctgccaaggtgaagtccttagaggaagttcaccaggcagacttggagtctagggccaacctggccgtggagctgaaggagcttaaggacttcaaagaccaagccttgaagaaggctaagaaagatgagctcctttctcccacctcctgcagccggtgcgtcaagcgtttcgacgatggcgtctacatggcctggtctacaaatgaccagaatatcaagcttaacttctatcccaagcccgcggagatgattgcaaaattccgggagaagaagaagaagctcgatgccatgctggaggcgcgcattggtcctcgccttcctcctcgcatcgactaggccgctccgagttcaaccaagatttttcttatctcactttttttttattacagctaattatcttataattaagacaat

SEQ ID NO: 279224 - DNA, 740 bp, Cannabis indica
ccgccttctcccgtgctcagaaaagggaacctattatgtctgaaataagaggcatgtcaggtaatgatggaccttcgaggcttgctcgggcaatcatcttgcatactactgtgtcttgtttttaagcttcttgaatattgtgctttatgtttctgatgtctaccttctctaaccatattgtttttgttccgtgcagacatgtctcagaagatgcttgatgctctgaagaagaggattggcagaagctctagcgcatctcctctgaccaagaagtctagaggcggtgaggggaccttttctaaggaaaagacgcctgccggggaggtcattgatctttctaaggagctaacggttgcaaacccctctactccaaaagtttctaagtctaaggagtctcgaggagggagttcagacaagcctaaacaaccgaaaggtggatctgagctgatcaagagtggacccgaacagatgcggatccctactccacctttgtcagtgcttccagaggccaagaaaggcaaggagatactcgcccgctatatgaaccagtttattcctgaggttagtgagcaattggccggtgctgacaatgactcttctctggagctgctgatgggtggagttttgaaggaattcacaagggtaagtctttcttgacgatttcctttaatcctctttacttggcttaaatactaaagttttttctctgtgcaggcttgtttgaagttggcctacacata

SEQ ID NO: 279225 - DNA, 564 bp, Cannabis indica
aaaatcgtattttcgtctcacgtggatttcggtagtttcctaattcgaatagacatttaacatgtgcgtttttatatctttttagtccctcaaagcctatataaatggtgaactatagttgatttcagtgaagcaatttagaagcaaaaatgagtacgaattttagagaccaaagtcaatactagaggcattctacagagggttttcagcattattttattctctatcttcttctctttctgaaagttaatatgtgtgattttgcttccatgaacatgtgtagctaaacactttattagtgttagatggatattgtttgatattactttatggtataaatatgatttatttttccccaatttttatgtattctatttcattcgtgcttaattacttttaattgtctgatcaccaattaactctttatgattttgatgcgagatctgagaaatgagtgtgaattatgctatagtgaaatagaattgaatttcgatataggactagagtacctgtatggtttagatagcttatatggtttctgtgtttaatgcctgttgcatgtta

SEQ ID NO: 279226 - DNA, 915 bp, Cannabis indica
ttatagagaagttttcaatgaaagattcaaagaaaacttctcagccaataactagccagtacactttaacaaaggaacaatgtcctaagactgaagcagagaaggaagcaatgagtaaagtgccttactcaagtgctgttgggactattatgtacttaatggtttgtacaaggccagatctggcctttgccataagtaccttgagcaaatacatggcaaacccaggaaagattcattggcttgcaatgaaatgggttttcaggtacctagtagggacacctaaggttggactcatctacaagcaacaaaagttcagcaccaacatagaaggatacagcgatgccgactatgccggggacagagacagcagaaagtctacttcatcttacatgtttctactaggaggaaactgtgtgagttggaaagcccaactccaacctgtggttgcactttcaacaacagaatcggagtacatatcaaccacagaagctattaaagaagccatatggatgaaaggacttttgacagagatcaagttacttaaagaggttcctagagtgtactcagacagtcaaagttgtgtacacttatgtaggaaccctgtgttccatgaccgaactaaacatatagagattaaataccactttataagggacaaggtgactcaaggtgagatacaagtggaaaaagttcctactgaggagaacccagcagatatgggaactaaggtggtcactctcaacaagttcaaacattgtatgaacctgttgggagttgacacaggatggtaaatggacacatattcaagcaatgaccctcaaagacagcaacaagtaaataaagcaaaggcagaaacttttttggactgctagtatggaaatttaggtggaaattgttggataaattcccatacta

SEQ ID NO: 279227 - DNA, 596 bp, Cannabis indica
tggtgattactctgggggtggactagtgattttggagaagtgtaaaaacctatccgaagtctctaagtctaccagagagagactgaatgttaaagttgcaggaaagctacttattcagtctaaggaaagttctatacatttttggcattgttccaacatttattaactacaagtgttacttcctgactaacacaaaagtagttgccaaaaagtaaagaatccagtatccctagaggagtagacatatagagaggaatttcacaatatcaagtattttgtgattaaggaaatgtaatggtggaggaaaggttgtattgaatacaatctgtcagatcatattacggagagtatactacatactacacttgatttggatatcaaggtgttgagattatttgaaatgcactttatgttttatattagtgcaagtgagagtttgttgggttttgtgccctaaataaaacccatttcaagataatcagatttactaattagtaaagatcagaagtcattttatgttgcatggttcacatgatttatttcatgattataaattctattaagtctagaacatacatatttgttaatgattatag

SEQ ID NO: 279228 - DNA, 1065 bp, Cannabis indica
aaatgtcccaagattagctcgcagtgttgtgagtttgttcctagggttttagataagtgtcccgataaaaagaacaaattaacactcgaggtctataagtattgtaaaaaccctaagaaccaaaccggtcattaataatcattttagttattagtgttaaaattatttagtttatgttggtgtcttttaataatttggtcatcatatggatgttttctttgttaaatattatgttaataaataattattgcttcttattactcaaaatgttaatttctttgctctatgattcttcttcaatcaataagggatcgtctctccacaataatcacttaattttaacaaattattttttttaataagagaaaatccacaacttacaattgtattgacagtgattattaatttagattttgaaatttttaatatatattgattgagttttattctttaatattaatctccattttcgtctaaattcgaaagtttaatatttagattgttattataagttatcttattaattaacctattatattttaaaatgaacatttattatattttgttattgaaagtggttgttgaccaaatgtttctttttgttttttttttttttttaaaggtttgtacggtagtttttgtttatttatttatttattgatattaagttatctttacataaatttttattcttaaaattatgaaccaaatttcagaaagtaatatgaaaatattttattaaagtataatcaataatcctaatacaaaaagtaatgaatatcaaacaaaaatatgtatatactatgaataatgaattacatataatgccaatcaacatcgaagaatatttaataatattattattgcattttttatttaatcattgtagtaataattgtactatataattgtacaatatgaattaaataattctaataattatttcaatcaatcaacctcgaatatatttaataaatgttgcatatcatatatcccatatgctttattgaatcacaataattgtactatataataattaatacaatgaatcaactttacttaatt

SEQ ID NO: 279229 - DNA, 441 bp, Cannabis indica
tttttcttttcctctggatctaggttcttccctagccggagtactctggtggagtcgaggtcacacactgatacctcatcgacgtcctccattggttccacaattctttcggaccccacacggggtccaactcatcctcttcagccacttctggctcagctgactcccggaccattagcacgggcaggtgggtcgcgacattgtaacattgtcttgctttcccctggtttcccctcacagttccgattccggcctcccgggtagggaagtttagacacaggtgccgaatcgatgtgactgcgccaaagtccaccaaggccggtcggccgaggatcgcgttgtaggctgtcggacattccaccaccacgaagatgcagtatttgaatgtgctctggggggtgtccgggcacagggtgactgggagccttacttttccaattg

SEQ ID NO: 279230 - DNA, 925 bp, Cannabis indica
accaattattttcttctaataaaaaatagattttccttcgctttaaaattataacttctaagcattaaatgtgaaacaatttaatgtaaatacaaaaaatcaaagaatattatttttaataaaatatggaaccaagcataaataatttctaactatcaaaaatacttgatattaaagatgaaagaaattattttaagaagcgaaaatcataagcatatattgtactgagaatcaaaataaaaataaatacttaattaaatacactaggtttcatcgtcctccttaataataagggaacttagaaacccataagaaaattaactaagaaagcggtaaactaacactgagcgctctgagcgttttctctggatttttctgtctgaaactgaaactgtaactgaattctaaaaacctaagcttctatttatagaagggtaaaaggactaatgcgcaattaaacttattacaaattgcatgtgggtaaaaatgtaaatacaaaaaattaaaatcggagtgccacgtgtcaagctcggattggtggctttggtgtgcaacttgacacgtggcgagaggagagaaagccacgtgaaaagtggcttttggctgatggagctcggaccaaacgaaggccagccgcgtggggcatggcgtgaggcgcacgcacggctagggtgaggccgtgtgcctcacgcgcgcgtgaagagggagagagggccaaagggagctgctgctcctgttgcttttgccgagccaatgggcgatcgccacgtggcgctgatgtcggcaggggaagaagaagagggccaatagggcttttgtccttttgtgctctcttttgggcttcaaaaataccaattttatagctttggcctttatttttgtcattttttttatttcttttcttttcttttaataatgctattat

SEQ ID NO: 279231 - DNA, 961 bp, Cannabis indica
gcttgatattttggtcgttggtagaccaagccatgaagactccatcatcgaagcgcttagggcaccggccgcaggaaacgggagaaagaagctcggctctttttgccttcttggaggcttgttccttgaagtccctgagctccttcagctccgcggctagagcggccctggactctaagtttgcttggtgagtttcctctaaggatctcaccttggcaaccatctcgtccaaggcttccctggcctcccggagctcccgcttggcctttgcagcggcctcactttccgccctcagctcctcttgatgcttggcctccagcctgtccctccgctgggcctcatcccggatcatggcctccgcctgggcttccctccgcttggcctcctcctcattggccttggcagcagcctcccggcgctcagcagcctcctggtaaagctgcctctccgcagtaagatcctgaaggaccttcctgacgtcgttcatgtccccaaaatcagacagaacgaagccatggttaattatgttcttggagaggcggccagcctcagcagcaagctgaacaacaatacaagtgtaagaaagaatccccaaaaaagaaaaataaagggaaaagcaaaattacaaagcacttaccacagtgagggagtggctgaggtcctggacctggaagatagagttcagggaggcacaagttgcgaaccgcttaggcgcgcaccgggtaagctgagaagcaaactcgccagtcatctccgcggcgaagggagccaaggtgggcccaaggaagcgacggaaccagtccgacagggggtccaagtttaggtcccacggatcctggtactccgggttgttgatggtttcttgcacctcaacccgcagaaccctcctaagggcttccacctcggcaaacccccgggagtattcgtccatggcatagttatgcttggctatccggagctc

SEQ ID NO: 279232 - DNA, 629 bp, Cannabis indica
aatctattacttgttactaattaattgattattaatttcttttagaagcgtactgtttatattaatttttgagttagatacctgaccccacacgcaccctaattaataccttctatatcgctatatagcctcaatacaccacttgagctatacagagtatctaggattacctcctagttacatatatgaatcatattaatataggtccgagcatctctgtatatatataaatctatttattgatataattatattgctcagcaggaaagaaaaaaagaataccatatatttaaattacaaattaagggtctaatatatatttacttatatatatatatattgtatatatattaaaaaaaaagtctttatatattttgcaggagcattataggattatgtttttcttttttactaaattaaaatatgtaagatatcataccaataaaactatgtatatatgattttcttttttacttaatatattgtttaattgataaagttttttctccgaggtttaaagatactcaattttaatgaactgttgtctttgagtgagttagaaacttttttttttttaaaaaaaaaaaaaaaaaaaaaaaacgaaaaaggtgacaagtgtacttattaaa

SEQ ID NO: 279233 - DNA, 509 bp, Cannabis indica
tttcacggaccattaggacgggtaggtgggcggcaacgttgtagcactgcttggcctctccttggttccctcttacggttcctatcccagcctcctgagtagggaatttcagacacaagtgcctaattgacgtgactgcaccaaatccaccagggccggtcggccgaggattgcattgaaagctgttgggcagtccaccaccacaaatgtgcagtatttgaaagtgctttggggtgtgtccgggcacaaggtgactgggagcctcacttttcccattgggataagtgttgttccattgaacctcgtgagttgggaaccgcttggttaaagatcctggtccgtgaggcctattgctgtgaaggcttctttaaacaacaaattcacagaactccggttgtcggttaggattctagccacaatcttattggcaatgggagtctctatgaccagggggtcatgatgaggaaaacacactgtcttagctgttggaatttattttaccaggatct

SEQ ID NO: 279234 - DNA, 989 bp, Cannabis indica
attgatgaacagctagatgttgcattaacaaatatttatatatcgagatctaacactattatgtttatctaatggatgacaattcattaagatttgtcctattaaaaataacaaaccaagttagaccaacaatgaagattcaaaattaaactacaattaataacagaaaataacatggttcaatataaattcacacacaattcaaaaattattaagcatttagcaaacaggaatgactaatgaaaatactaaaacagcatttagcattcaacaaactgatatcagtgtcacgtttaggcgagagtcaaagataccatccatttaatagagttgtcagctcatctaaaatgacaaacattctaacaaccttttattcgatcaagatgagaatccagcgttgtcgcgtttaggcgagagtcaaggccattctatcttatgagcttccaccattgtttcatacttttataagtcttactaatagtcgccaccactacaagaaaataagttttcagcgactagattttttgtgaccaaatcaacttagtcactaatagttagattttgcgactaatttttagtcgcaaatatttttagtcatgagacaatgtttaattagaaccaaaaaaatcaatgaccaattttttagtcactatttgttatatttagtaactaaaatagtatttagtcactaaaattgtggcgccaaattataataatggggagactaataatttttggtgactaaaattatttagtcactaaaaatttgaaatttgtgacgaaatagttagtcagtaaaagttaatgatctttacaactaaaatattagtcttaaaataatttatttttctaattattaataatttatatgtaccaagtaattatttagttaccttaaaacataagattaattattactatattgaatatacattaactactaatttaatccttaaaaaatgtgattaacataatgaaaatattaattt

SEQ ID NO: 279235 - DNA, 1065 bp, Cannabis indica
gtagctgaagcttcgacccatttagacacataatcaacagccaaaagaatgtactgattgctaaaggatgaaggaaaaggacccataaagtctattccccacacatcaaacaattcaacttctaaaattcctgttaaaggcatctcgtttcttcttgagatattacctgttcgttgacaacgatcacatgcctttacaaaggtagtagcatccttgaatagcgttggccaaaagaatccactttgcaacacctttgcagctgttctatttccactaaaatgtcctccacatggtaaagcatgacaatgatttaggatagaatacatctcctcttcaggcacacatctcctaattatctgatcagcgcagtgcttgtagaggattggttcttcccaatagtaatgtttcacctcagaaaagaatttcttcaattgttgacgcgaaagctcgggaggagttatttttgcagccaagaaattaacatagtcagcgtaccacggtaccatcaggttttccctcacactaaagagttgttcatcaggaaattgctcatttatttgtacctcctttgtattctgactctcttccagctctaatcttgacaagtggtctgctaccaggttttcggtgccctttttatcttttatctctaagtcaaactcttgaagtagaagtacccaccgaatcagtctcggttttgcatccttcttggtcataaggtatttgattgctgaatgatctgtgtagacaattaccttatttccaatcaggtagggtcggaatttgtcacaagcaaacactattgccagcatttctttctctgtagtggcgtaatttaattgagcatcattcagagttctactagcatagtagattgtgtggaatactctgtcaactctttgacccaagaccgctccaatggcatagtcacttgcgtcgcacatcaactcaaacggcaattcccaatttggtgaagttactatcggtgctgtaatcaatctctcctttaaaatcttgaaagcttttaaacaatcttctccaaactcaaatggaacaccattgaca

SEQ ID NO: 279236 - DNA, 530 bp, Cannabis indica
gctttagcaggggaggtagtggttcgaccatggaccagaagaggaaaacatccactgcatccggtggcttggggcagaacaagaggttctgggggaaccaaaaccgaggcagtcgtcagagtggggctgagacccgttattcctacccggagtgtcccatttgtaaaaggcatcatccgggtgagttcagaggtcagtgatgctttcagtgtggcatgcccaaacattacaagagggatttccccagctcagaacagaggcaccaagggctccggcgagacccactccagctagggtgttcgccattacacaggctgatgtagaagccagcccttcagttgtaacaggtcagctctcagttaacaactctttttactcagtattgtttgattctggggccacacattcttatgtggaagccagaatcattagtaaattggatagaccgtatgatagttatgaattagggtttggaacccttttacctggcggagagttagttatctccaaaaggtggattaggtctatgc

SEQ ID NO: 279237 - DNA, 756 bp, Cannabis indica
agaccaagaacatacaagttttgcggacagatatgggtctccactgctacaaagtcatgctgtttggtcttaaaaatgccggagctacataccaaagattggtcaacaagatgtttaaagaccagatcggcagaaatatggaagtgtacgtggatgatatgctcgtcaaattaagaaaggctggggggtacatagacgacctggatgaatgttttatagtcctcaagaaatacaacatgaaactaaatcctttaaaatgttccttcggagtcagcttgggaaagtttctaggcttcatcgtcaatgctagaggaattgaagccaatccggaaaaaatccaagcactcctggatatgaacttgccaacaaaaaccaaagaggtgcaaagcctaactggtcgaatcgccgcacttagtagattcgtgtcaaaatcaacggataaatgtctcccattcttcaacatcatgcgaggaaacaaaatgttcaaatggacagaagaatgtgaaagagcttttcaagatctaaaggcacagctcgcaaatcctcccgtcctttctaaacctctggacggtgaggaactggggatatacctagcagtaacggagcatgtcgtgactgccgtattaatcatagaagaagacggcgacggcatgcagcatccggtctattacatcagtaaaagactcatcgaggccgaaggcagatatccgttgatgggtcggcaacagatcagctatccggtgcaggaattgccct

SEQ ID NO: 279238 - DNA, 667 bp, Cannabis indica
ttatgtttaattatggaaaattatttatagctatttaaataattattatgctgttattattgaattctgaaacgcattatttgtcatttagtgattttcataattttgtatttccggtgcccggtaacatggaactcggtgtttggctcagtaaactcacaacttagtatgttagtatattgggatggtttattagacattgggaacgtcgggattggccgggaatttagaatttcccaaaatacccctttagtgttattttgtcctttagtggacattttgtgatgaaattatatgtttattaatgttaattattggctgaaataaaggttgggtttgcatgttctctcattttcattcaaagtaaaaagttagaaaaaattggaaattgctttttctcttcctctctctttcggccacttcttgagcagctggaattggtgtgttccttctacatttccagcaagaatcatcttgtttttgaggtgcttaaactttaggtatttctccttgtagcttttcttggtgttttcttgtgttttaagaaaaagttagtgaattgcatgcttgattttgatgtgtttttgttgttgtatgttgtggttaatttctgaagtttattctagattatttgagttgatttgagctgctggtaatgcatgattat

SEQ ID NO: 279239 - DNA, 438 bp, Cannabis indica
cttaattttttccaaactatccaatagaaataattccagacacgaaaatcaattatttttcacaaaatctcacaaacatcaatcaatcatcatatgacacacaaaacaacatgaaaccatccaaatcacacacaaatcgttttaagtccacatttcttgcaagcaaatcaattaccatggctctaaggccagttgttggaattattttatcaggatcttagatctactcacaggtatgttatttaacaacctaaatatgaacttctaaaacgattataaataaacacatacaaagtatgagaaaccttacagtagttgtagcggaatataatgtctccttccactcagatctctaacccttgtatccttttggtcgcagagtattatcaagatctgagcccgaatgtccttcttgttgaatctggattcttcacgatc

SEQ ID NO: 279240 - DNA, 729 bp, Cannabis indica
gttcctaaaaacccccaaccggcagaccggttctgcaatcagaattccggttctgggaattcctgaaccccatccgaaattccggttgcacaaccggaatttcggttcctcgcaggaaacactcaaaattccaaaactcattcaaatcaaacccaattcataccaaaccttccagacctgttctaaataccccaaagaacaattctaaagcatcaaaacaacccagaaaacacaaacactaaaaatgccattaaagctccaagctttgagttcaaaactcaaacttggttaaacatcattaacatgcatccaaaccagttcaaatctccctaaatatgcatataataaccttagaaaacaacaacaagcatcaacaaaaacaacagcaacagattcttcattttttctttgaaaactaaagttttgagttaaaattccaaaactttaaacaacataactatcatgcatcacaagcagctcaattctactcaaataaacaagattgaacctctaaaatcatctcacaaacacagcagcaacgacacctcaagttaagcatgcaattcatcatcatatcatcaaaattccaagaaaaaaaccaagagcaagtttaaggatcttaccaacaacttgaactacacctagattggttgaaaatgcttgaaaaactaagaagaactctcagccctagcaatccacaccaagccgagagaaagagagagagagaga

SEQ ID NO: 279241 - DNA, 74 bp, Cannabis indica
ggattgtatgcatggagtatgcatcggatgggaccgatattaaacatagatatggaatctatagcttctatata

SEQ ID NO: 279242 - DNA, 328 bp, Cannabis indica
ttagaatatgtctagtttatgaatttttcactaagatatgttttaattgtgaagaaatagtgttttggggtttattcgttaattaagatactttatacactctaattaataaatattataaatgacaatttatttgataattattttaattattaaataaataattttgacatttatagggttgaaagtgtaaaaggtggtatttatgaaaaataggtaaaatagttgggaaaatgacaaaacccaaacttgagtggggctcattaattggccggccatcaagtagtttttcaccctatttttatcaattttttattcctaataattc

SEQ ID NO: 279243 - DNA, 508 bp, Cannabis indica
caacagtggattaggtaggccaagcccaaagctcctgctgaaccactatatttttctgtgtctattttatactattcacaatactcgcgtatgttatacactatattctttgagtactcgctattctaaaggagtactcgcatatctattttttggtatccaagtagcccttgaatactcgcacaaaactggtgttgtcgaaatttgctcgacaacatatcgcttaagctccttgcgagtagtccctccgatatggggacctccggagatcatggctaccctcccattaggccggaacggcagaccggggatattctgggcgtcgtccgtgggagcagctagagccaatactcctgctgtaccccccggtgttccctgaggcatacccacagtcgcctgacccgaattgaggtggggcaacctattcttgatccactcgtagaggtggcctaatcggattagattttcgatctcgtctttgagattcttacattcattggtgctatga

SEQ ID NO: 279244 - DNA, 982 bp, Cannabis indica
tatacttatccaaattttcagttgtacgtgaaatgtgagcattaagcacccattagttgtaccttttcactaagatcagattaagtaactaccatcatatttctacatatatggattcactcaaaggaaagaggggagaaaattcatacttttagaaattctgccgaattgtaaacacaaccaaaactcagaaataatatcgactcgtggagtatgtagatttaactacaaaatcgcgtaaaaatatatggtgtttatttattattttcgtctcttcttttcttgaatcaattttgaattaattatcttcttagattaagttgacaaaaattcgcgccaagagttatataaccaaagaaatatgtgtaatgtgtttatatttaaattataatatttttaaaaaaagaaaaacattatttgttatatagccatatttaatataactaggtaatgttatgtgttatgcacgtatacttagttatattcttagtttttattttgattatgtgcatttctggctgtattttttttagaaaagctagaaagatttttcttataatttcaataggtaacgaaatcacatatcataaatgttggaattttatgccctaaataaaacccatttcaatataatctaatttgttattaatagaagtttagaagtcatttatgtttgcttgtagttttcatgtttatggtttaatgtatataatttctgttaagtccagaacatatagttattcacaattacaatgatgtcaacacaggaaggtaattgtgattatatgcttcaaaaagataatgtcccattattcatcagtgcattagatttacacttatgtgatggtcaacgataaaagcttacttacaaccttggataaagtgttaatgttctttcaaaaaaacaattaggcaaaagtatgctactattggatgtatggaagtatacaattggactaggaccgatattgatcttattaaa

SEQ ID NO: 279245 - DNA, 1049 bp, Cannabis indica
taaggttggattaacctacaacagacagaaagctaatactataattgaaggctacagtgactcagactatgcaggggatagggacaataggagatctacatctgcctacttctttctaattggaggtaattgtgtaagctggaaagttcagcttcaacctgagtatgtggccacaactgaagctataaaagaagctatatggctaaaagggttaatgaaagaactaaatctacttaaaggagtacctactgtgtactcagacagccagagctgcatattcctatgtaagaaccctatgttccatgacagaacaaaacacatagaaatcaagtatcacttcatcagggacaaagtgacacaaggagagatagatattgagaaggtgcctactgaggataacccagcagacatgggaactaaaattgtgactcttaacaagttcatacattgtatgaacttgttaagaatcgacaaaggagactaaaagtaggacctatcaagctaagactctcagagataaacagacaaacatcagaactggttataagaggatttcaggtggaaattgttgattaaaatccacttataaccagtccttttacaacatatatccacatcagcaaatacaaacagaaacaaacaagtagactcgatcctagggtggcttcgcctctagtggatcaagacttagtagttagttacaactgaaattgtaactaactcctaagaccttgatcaaccgactctacaactatataaatacatagatcaaagcaaataaacctagatctacttcagaacatagaacagagagaaagagagaagtgatataccctagcctcgagctcccacatccaagatccagagagaactggtccagatctgagagtaaaactctcgtggtgaggattatttgagcaaggagaagtacatgcacaagaagaacacaaagttagattcagattacaaagaacagaaagatagaaaacaataaacttgtaaaagcaacaaaatctagtcttacctgatcgattttgtgacaggaagct

SEQ ID NO: 279246 - DNA, 631 bp, Cannabis indica
tcactgtggcagcctggtaagggagtttatatcaaggaattggacactaaccgatatctcttccagttctaccatgaacttgatatccaaacagttatcgatgggagtccatggacgtttaatcgcatgccgcttgtgtttcatcgattgaaacgaggagaggatcctagggtggtctcgttgcatgagttggatatgtgggtacaattgcatgatcttaagtacggttttatgtcggaattggtggtcaagaatgcggggaattatgtgggtacgtttatcaaatctgatgctaagaattttattggcatatggcgtgattatcttcgtgttcgggttacaatcgatattaataaacctttgaagcggcggatgaagttgatcaagcaagatggaacatggatttggactaatttcaagtacgaacacgtccctactttttgttttttctgtggatttcttggccatagtgatcggttttgcccaagacgtttcgactctcactttgatccgaatattaagccctatggagagtggatgaaagctaccacaaggaggaaaaattatctcattggggctcaatggcttcggtccagtcgtgaggaggaagaaggagtggccaacggaggag

SEQ ID NO: 279247 - DNA, 159 bp, Cannabis indica
gtaaaataatttccaacatccgctagggttaggtttgaattatttggcattagaataataaaaatatcagaggataaatcctctaaagtggctgccatgactgattggacttgggcctcactttttgcaattttgctgttttatcacttttgcatctga

SEQ ID NO: 279248 - DNA, 499 bp, Cannabis indica
ttagacgttagtttaattgttgtcactatgcagatttttacaaaatttaaaaattaatgcagggaaaaaaattgcagaaaatttgtttttttttcctatttttcaaatgtaccgaccgaaaaaaaccgtcgctaaaaaaattcaaaaacgaaaccagcatataaggcacgttttaaaaccgtcgcctataactgggtataggcgacggttaagaaccgtgcctaatactataggcgacggtttaaaaccgtcgcctatagtattaggcacggtttaaaaccgtcgcctatacccttcccagattagcgacggttttgaaccgtcgcctattgtgcccaatttacgacggcagaataggcgacggttatagaaaccgacgacaatactttaaacgactgtttaaaagcgtcgggaaaacccatttttgtagtagtgtgtccatgtaacatatgtgaaataagatattaatataattaaattattattcttaaactaacca

SEQ ID NO: 279249 - DNA, 504 bp, Cannabis indica
attccatgtttatattagcgctcccactcaattgcactaccgtgttcccaaaatatacttatcaccctgacctaaaagtaggcttaactaacaaatcaaagaacacgaatagcctcttgagatataacctaatcataacaggattaagatcatttgatctaggatcaactaggcgtgtaatatccaatttaagtatgttatgaattgataaattgtttgtgtgatataactaattttatttgtccagatgagatttattatgtatatatttatatttgttcgtgtatgcatgcatgtgatttgtgaagtttgaatataaagatttgaaatcttttagtgtatacacatttgaaggagtattgatgtgatttagaaataatataagtacattttaatataggaatataattgagttatttttttttattgtattgtattaattatttactttcaaaattaaactattatagtattattatatgtataaataaggatcaattagtg

SEQ ID NO: 279250 - DNA, 448 bp, Cannabis indica
tactaaccatgtttatttgttttcttcttatttcagccacaactgcttgaactcagatgctatcttagcgagttgattagatagttggacaaaagggtggagatagtccaagatgaagatgaagctcggaatcttctttaattttgaattaattgttttagtttaagaacaatttggatttcaattattagttttgaattttatttcctattttttttcatattgtagcagacaattccttttaattttagagaatttttaataaagttttctattttgaaatgaactgcatttatgaattgagcttcgtttatcttatcttatttataccaataccaactatatttatatattttaatgtttgtgtatgtgtttttattattgatacaaattctatagtattttcctactcttcaacgagttaatactacataaacacttagaatta

SEQ ID NO: 279251 - DNA, 641 bp, Cannabis indica
caggcgcacatccccttatcagggtttgtggcgcgattgtcgtgggagggaatgtagcagtccagctcgcccaggtatccatcctggtcgagagtgcggaggcgtgcctccgaaatcttggacggaggacttacccacctagcgcccaaggcaccctgcctcctgtgaggaaccgcctcagcaagctcctcactgacgtagtcaaagccctcaaccaggacatccccgtcagcatcgactggctgcccagcctcattgtactccccgaagttagggggttcaatctcttcctctccctcagtagcgagagggctgcccggacgcgcctcatccagctactcaacctcttggacttcaacgtccccctcatggtcctcctccattgggactgccaaatcctgttcggcgtcgggcagagtggcgagccgagccacctggggatcagaagcgttagctagacgcgtagttttcttcgtacgagccatcatcctatggctaggtacggaattagaaggagagttagcacgaagacgagggtggactttgtgcagaagttgaagcagctcctggtcgatttgatgctcgggctcccaagactcacttgggttcatctaaaaaataaaacacacaagatgagtgtt

SEQ ID NO: 279252 - DNA, 1229 bp, Cannabis indica
tttctcctttcttgattgtgaatttatccaaatttgtgtttaattacatgtttaagattgatcaccctttacatgctttatgatcccaattcaaaatctgaaaagtgagaattgggaatgctaaaattggataaactaggtttcgatgtgaaacaaaagtatttgcatagcctttgtgacatttaggttattgcttaatactgattatatgttaatctatctcagagatgattagatagcatgtgatttaggacctaaaagatcttaaaagagttaggattatttttataatctgtcacacatcaagaaaatgatagcaattaggcattaacaattgggtaaacgaaacaacatgattctttttcctattttctcatccttgattaaacacttttattgctttatttaattttcttgtttttctttattttaaaatctatcaaaattatttatctaccaaatagaatcataagtctaagttagtggtattcagttcaattccctgtggttcgacctcactcgtgtgaatttactacttgattgcgtgcacttgcgtattgttcaaaattttcgtaacaagtttttgccgctattgctgaggaattgtttaaaaattgatattataaaaaaatagattaaattctactttggttaatttttcgtgcttattgctaatctgtttcttttagattgtcttatttcaggcattcggggtgcatgcgacgtcaaggacaaagtgtaatactgccggttgatcttgaaattgagaagacttgtagaagaaacagaagaaacaagaggcaagaaagagtttcagcaactgctaaaacagaagaaatcatggctgagaatgctaatggcggtaataatggaggtgtcgttgaagatcaagcaaatggtcgtagtttgagggactacattcttccaactctaatagggggccagccttgtataagaccacccaccgtagatgccaacaactttgaaataaagcatgacatactccaaatggtgcagtcttcagtccagtttggttgactcccctctgaagaccccaatctccacttgtcaaatttcatggagttatgtcaaactttcaaagtcaatggagttagtgatgatgccatccgcttgagacttttcccattctcgctgagagagcgagctaagagttggttgatctccttgccgctgaaatctattgcaacatggactgatttggcgacaaa

SEQ ID NO: 279253 - DNA, 589 bp, Cannabis indica
gagagggcttacgagagggtatgtatgtatgtatgggttatgagtgcatagcatttatttttatgatgtcctctactttcttcatgttattcatgtgctgcctttatttcaagctaaggagaaccccattaatatgagggctgaagagtatggtgtgcatgtaggttttttttttttttttttttttttttttttgtggaatgatgaataaattattatgaatgtggagacgaggaagtatagctgctaaactagcttactgctgaatcaattttaatactattataaattttaaaagaggtgtatttaaaaattatgaatcatttttaaagttgatttttaagatgtttttttaaagagattttcaagatgtttttagtttgttgtttagcaatagaaaactattgtaatgtcttatatttttgtcgtgattttatttttgtttttgtttttgtgttttttttttggataaatactattttgaatcctgtgttttgcaaaagttatcaattgaaccctgtgttttgttaaatgacaaaatgaaccctatattttctaaaatagtacaaataggaccctgaattgattt

SEQ ID NO: 279254 - DNA, 714 bp, Cannabis indica
acactaaagaagaaactctaagaggccaaaggaaactggccagagaactccccgaagctctatggcataccgtacaacggaaaaaacagcaaccggtcagacaccatttgcaatggcgtacggttatgaagctatgctgcccgtcgaactcgagtcaccttcccacagaagattgacgtacaatcaaggtaccaatcacatactccttgcagaatcacttgatgaaatcgaagaaaaacgagcaactgtaaacttaaagttggtagctcatcaacaaaaagtagctcggtatttcaacaaacaagtgaaagctcaaaaattcttcgtgggagatatggtcctaagaagggtattcctaaacaccaaagacagcacgtcaggtgtactaggacctaactgggaaggaccataccaggtggtcgaagttctcgactccggagcatacaaattgggtaagtatgacgaaaaaatgcaaagtactcaggtcggctagaccacttcaaagtactcaggtcagctagaccacttcaaagtactcaggtcggctagaccactttaaagtactaaatgaacattcgcttctaagtgaatggccttctgggcagactacgcgcaaaggtttcagaaacaaagtactcaggtcggcaagaccactttatagtgcagttcttatttgctttatgtcatgttaagctaaaagattagattagatca

SEQ ID NO: 279255 - DNA, 462 bp, Cannabis indica
tttaaaaaattcaatttttaattctgatattagatttgaaaattgaaaagaaaaatcaaaatacaaaactacacaaaaaatcggaagttaattccatgaatagcatgaaaaatcgaagaaaaacgaaaaaaattataagtggtacggacagtatgcattgcatactgtccatgcatactgtccacacgcacaagcagccaagcgtgaccgacgtccctcggcgcaggaggctgcatgaagcctcattcgcgcgcgcatgggacaatttcagacagccaatcttgtctgaccgaggtagctcggtcgagctggatgtctgcgcgcgtgtggtcgagggtatcaccctcatccgcgcgcgtgaagggttgcgcgaccctgatattttttcaatctttaaaaaatcataactaattcaaattaaatcgaaattgagttctgtaaaaaaataaattgcttaatttt

SEQ ID NO: 279256 - DNA, 420 bp, Cannabis indica
aagtatgggcattttttttttttgaaaaatagtgatatcttatttaagtttatcttcttttagagattcttagaaacaaacaaggaacattaggaaataatgtctccaagaagatcagttcgaatcaacggtaatagaaacatccacgtggatgcaactccagcacccgcaaggggcggaggccgaggtgatggtcgacgcggaggccgacgtggaggccaaagcggtaggggaggtagacaaggagcatcggtagcaccggtagatgaagtagcactcgaacaacaacatgcacctcccaatgctcaagctgagatactccgagaaaacgctcgtatacatgaggagctaactcaagaaattgcaaggctatgagctcagaatgaggagttacgccaaaatcaaaatccacccgttaga

SEQ ID NO: 279257 - DNA, 508 bp, Cannabis indica
attagatatttgatccaatggtcaagaattaaatacacatacatgggtaatacccattaagagcatacccatacatgtaaatgattaattcttagtttgacaataataaattattaacaaactcacaatttcataaaataataaatatatgaaataaaattagtaattatatttgttatttatttaaactgtactagaagaatattttttaaaagaatatataaaaaccacttgaacagaaatatgtaaatcgcatccgctattattgaaatttgtgaacaaccatatctgccattgttggagtttttttaagaagcctacccatttgaattgaattgtatgtattcccattgtacttgtttggaatttttaatctcctcaattataaacaccaccatcatcattaaccacttttttttctccaaattttacaaatcttttcaagatttttctgcttaactattggattccgatcagaagcagtcatattagccaacgatatatgtag

SEQ ID NO: 279258 - DNA, 629 bp, Cannabis indica
gaatctatgcttgggcagagaaagattacaccaaatagatttgtaatagctatcaatattcagcgttatagtccccaaatacaatctggcagcaacaaatttacctttccttacagctgctgtcaccataggcttgctgaaatggcttctcaaatgacaaagtttcctccaataccaacttacatcccctttcaactcataatcccaaaactcatttcatatagatgttgttgacccatttgacccaaagaatgtcatgcttatccataatagcccaaacaaacttcccaagaatagaacgattccaagttgcaccattcttgaacccgagaccaccaaacggtttgggaagacaaaccttatcccaagaagccaaatgaattttacttcggtcacccttaactccccaaagaaagcctctacaaagcctctcaacctcctttattacactttgcggaagaatgaaaatgctcatccaatagttacgaagaccaaacaacaccgaatgaatgagttgaatacgtcccgcataagataagtgttttgttgcccaagtaaccagccgcatttttatcttttttatgatagcatcacaatcctcccgtctccacttagtaggtctaaggggc

SEQ ID NO: 279259 - DNA, 562 bp, Cannabis indica
taactaatcagattgtaatgggttttatttagggcatacaaacccaacatcatccagttcggagatgtgtcgatcatttcgatttcttccgtgacggtgatgctaggctcttcaagaaactggatcgggaccaggtttgccttgtcacttatattgctgctcgccaatcgggctaacgcatctgccgttgtattttcttctcttggaatttgtctgaggctgtagcttttgaattgtgcgagcagatcaggtattttgctcagatatgctatcattttttctccccgagcctcgtattcgccagatacatgagttaccactagctgtgaatcactgcagatctcaatgcgctcggccttcatctccttctctagtttgagtccagcgattagggcttcgtattcggcctcgttgttaaaggctttgaatccgaatttgactgctgcatgcaggtgttgccccccaggtgtgacaagggcaattcttgcaccggataattgatctgttgccgacccatccacatgtagcttccaggtcggtttgttttcagtattactcggct

SEQ ID NO: 279260 - DNA, 562 bp, Cannabis indica
ttaaaagcataaaaaataactctataccatagagttatcattaagcttttcttggcaatcgttttctttgctctgcaattctttctgtttctttctgttgtggtttttgcctagatgagtttctacatggtatcaattgttggtattatatttatccaggatcttagatctacttacaagtatgttgatttaacaacctaatattgaacttctaaaacgatgaactaaacacataaaagttaagaataacttacagtgattgcagcggaattaatgtctcagatctgagcccaaaagttcttcagttggatgtgatccttcacagtcttccaaactataatgaggtactgaatgatgtgtgtgggcacttctctctcactaggaatttcgaaatttctctcttgttttctctcttgatttcgtgtgacacacaatgcaaagcaaagttttctcatgcacaagaagagtagagaggggcggctataaataggaaaagggaagagcacaactttccaataaacagtttcctcttttactgtgtaattgaataactgccttattt

SEQ ID NO: 279261 - DNA, 729 bp, Cannabis indica
gagcggggttatggaatttgaccattttacccctagcttttggtttatcctagttttatgtgtaagggcattttggtcatttagtaaaatggctaatgtggattaggtggcagccttgggtgatgacacctattttattttcagcctaattgaatgaaagaagggctttactttgaaagaaagcaaactaagaaaagaaaaattaaattagagaaaatatcacttctcttttctctctcttggtgttcggccctcccaaaccagaaggaaaacccagccaactcttcatttttactgtgttttcagccaaggattcaaaggagaacattcaaggtaaaccctagctcctttccttttaagtttatgaagttgtattttagttttaagaggtgattttgggttataggagctgttaaggtttgatgtttgtttagttcgaattctagggttagtatgagttaattttagtctatagcagctggtgtggtgattgattgtaagttttatgcaactttgagctttgagttcaaagctttgggctttaatggcaacttgggttttgatggtttgttctgtgaattactggctggattttattgtttatacattgaataggagctctggaaggtttcattgcatttggaggagaattgagcaagaaatgaaggtttgtagtgccacaaaaaccggctagggcagggttccccgggcctttcattttctcaattt

SEQ ID NO: 279262 - DNA, 591 bp, Cannabis indica
taaatcctggtaaaataatttccgacatcaacatagaaagaaggaccgagcaatacataaggcaagctaaaaagggtcgtcacaagcaggtttttgagcccagtgattgggtatggttacacatgaggaaagaacgattcccagcccaaagacgttccaaattgctacctcgaggagatggtccgtttcaagtgcttgaaaggatcaatgacaatgcctaccgactcgatttacctggagaatataatgttagtgctacttttaatgtttctgatttgagcccttttgatgcaagtgaagatttgaggacaaatccttttcaagggggggaatgatgagaacactaaggctaaagatacaagtaaagttccagttggcccggtgacgagggcgcgagccaagaaattcaaagaagaactcaacaacttagtcaacagaattttaaaacaagaggagaccgtggtcaacactgaaggagagcaaaaatttgtgtttctcatcaaagtagactcaatttagtcccaaattaagctgatcacgttttccaaggcaattggcagctttcctttttaattttgtttcctttatttt

SEQ ID NO: 279263 - DNA, 536 bp, Cannabis indica
agtctcccttgataattcgctatgttccttccgttgatgaatacaccagtcataggcccgtagggttcgacgagcgtcttcgtagatttaagatgccgttgacccggtggggggatcgtttgaaggaattttatttttcgaacttaggagattacctaggtcggtcccggatgggctccggccctccggaacctattcccttaggtccatcagcttacataacgtccagctggttccggccctcggacagttatctcggagatgacgccgccagcattaaagttcaggactttgctagggccgaattaggaagttcgggtaggagtagcttatttgttgtatcttgtataagcggttcctcacggacttctaacacttgcttattttgtgaaacaggtatctccatggatgccatcctggaacagcttgccggagttcatactcccgtggctcctccggcctttacctcttctcccccggccccttccttgaaggtttcttccagcgctccccccgacactattgacttagtggat

SEQ ID NO: 279264 - DNA, 61 bp, Cannabis indica
acaccctacaatgtatttaatccttaaaacacttaaccccgtataaataatatttcagctt

SEQ ID NO: 279265 - DNA, 676 bp, Cannabis indica
cataacacttatccaatgtgcaagtaaactatgttatagattatcatatcagttaaaccctatgtactgataaatctagaaatacatttaatcgcatatccttacttactttccactgtgttgatgacacaataaaagagaatatcaatgtgataaggatttggatgaatttctaaatcaaataaacatataaatgatcatatgaaccaaatgatatactaaataagtaatgaaaataattctatttcttaattgataattgaatgaaaaagattacattgaaatagagttttattttgggcacaaagagacaagtttaggcactgtctaaacttgttgagcattcaggacatttaatgtcctcacctatctcttttggatcagagattaagtgagtctaatcaggtggaattgttgggattaaactcacttaacctctcaagtcagtatgttcatctatttgctcatcagatgaatctgaagaaagctgttgcaatttataacagttgcctttaataccaacttaaaggggacccaccagcaactatatataggggttatttcagaggtatgagttgagagttctgatctctaatctccaaagctcatactttagattcaatttagagagagagagagagagagagagagagagagagagagagagagtagtacg

SEQ ID NO: 279266 - DNA, 550 bp, Cannabis indica
taacttttacaaaacacagggtctaaaatgatatttaacttaggtgccgtttggtaacacttttagtttctaattttttaatcacaaaatgaaagtaaaatttttgcttttaaaaaataaaaatgcattgtgtaaccacttttatttttaattttaaaaacagaaaataaaagtgttttctgtaaagttcatttttattttttgtttttatttaagtcgggtctaggtccggggtcgattttgggtttgggtcagagcccggattcagcgccaaggccgttgggtttgggtcgggtctggttggagtccaaaatattgattaagaaaaaaaaactgttgaaaaaaatattaaaagtgattttgttttgtttttaaaattttgattctcaattaaaaaattgaaaagtgaaaacaattttatagaacatgattttaaaaaatattttttacttttctaattttaaaataaaaaattgattaataaagtgttcccaaacgccacatttgtttttaaaaaacaaaaatgcgttctgtaaccacttttattttt

SEQ ID NO: 279267 - DNA, 550 bp, Cannabis indica
caaagtaagtatgctaagaaccttgtcaagaagtttggtcttgagtcggctaagcaggtaagtactccaatgagcaccacattgaaattgacaaaagatgagaatggagtaaaggtagacactacactttatcgtagcatgattggaagtctattgtatttaactgctagtcgtccagatatttgttacagtgtgggtgtttgtgctagatatcaaagtaatcctatggaatctcatgtatcagctgtaaaaaggattattcgatatgttaatagtactcttgattatggaatttggtattctaaagatactaattctaaccttgcttgttttagtgatgcagattgggcaggcaatgctgatgatcgaaagagcacaagtggaggttgtttctttcttggaaataatctagtatcttggcatagcaagaaacaaaattccatttctttgtccacagccgaagctgagtacatagctgctggcagttgttgtactcaactgttatggttaaaacaaatgttgattgattatggatttgaattgggtgttt

SEQ ID NO: 279268 - DNA, 585 bp, Cannabis indica
agtggctgaggtcctggacttggaagatggagttcaaggatgcacaagcaagcgaaccgcttaggtgcacaccgggtaagctgggacgcaaactcgccagtcatctccgcagcaaagggagctaaggtgggcccgaggaagcgaccgaaccagtccgacagggggtccaaatttagatcccacggattctggtattccgggttgttgagagtattttgcatctcaactcgcaagaccctcctaagggcttccacctcagcatacccccgggagtattcgtccatggcgtagttgtgtttagctatccggagctcctgtctcgcctcgtctccaggaaccggagtcagcacaatattgggaggggcagtatgttcctccatgggaggaccccgccatcgagaccgtgggccggagtatcagctctccgtggccgtttgggctcctcctgggcaatcattttgcctttacgtttgcgaatcagagcaatttcttgctcttcttcaccttcttcaacttcctcaggaagagcccggtgccctcctgcaccttcttcaacttcctcagaaaagccccattgcttttctt

SEQ ID NO: 279269 - DNA, 683 bp, Cannabis indica
caaaccaaatttttcctaactcgaccaaatcaaacccaattggttccaaaccttccagacctgctctaaataccccaaagaacaaatctaaggcaacaaactaacccagaaaccacagaaacaaaattcaccattaaagctcaagctttgagttctaaactcaaacttgagcaaatcccacaaacatgcattcaaacctagttaattctactcaaatatgcatgaataagcctctgaaaactattagaaactacagcaacaacacagaaacagaatcacaatattttcctccaaaaatcacattttttgcatagaaactcaaagctttaaacaatctatccaacatgctttcaacatagctcaattaacattaattaacatgcttaaactcagaaacaacaaccagatttcagcagcaacaacaacaattattcaagcatgcatttcaacaattttttcatcaaaactcaagaaattaaagaagggagaaggtgagctaacctagcttgcaaaggaccttaagagatgatgaattaacaagccaaaatcaaaggagaaaacccactccttgctgctcaatgcttggccgaaaatggaagggaaagaaagagagagtttctttttgaaaattctatttttgctaagtgttgaacttttttctttttgtgaaaaggaatataaat

SEQ ID NO: 279270 - DNA, 327 bp, Cannabis indica
tatggaatctatagcttctttcaggacatagaagtgaaacgatgatttcctttgagcttagcttagtagaggtaaatggaagagctcttatttcagtgattatatttcactgaaatatcatttacaggaagctaagtgttttaaggacaaaatacattgacgagtgaaacggtaaatttatccctactctgtgtaaatcatctatagaggatctttgattattgagattagaacgatggttaaatgtttatagcgtatctatatcatggctcggatatatagacccatggtccccatactagctgagaccatactacttgtaagact

SEQ ID NO: 279271 - DNA, 785 bp, Cannabis indica
tttcaagagatgataatagtagtctccatcctactccagttggtaatgctcccattgttgatgaatatattgctcccgatatcgaagatgatgaaggtcctattattgatgaagggcttattaatgatgaagctcctattgttaatgagaatcctgttattgaagaaattccagttgtggaagatgttattcaaaacaatgatcaacaaagagaagttattccagaagtacctcctctaagaagatctcagagacaaaagaagtcaacaaagtgtcatgataattttgtttatcttggagaaggagaatatgatattgatcattttgtggatcctgtcacttttagtgaagcacttaatagtccacaatcttcaaaatggttagcagctacggatgatgagatcgactccatgaagaaaaatggtgtatgggagctagttttattacctgatggttttaaaccaataggttgtaagtggattttaaaggctaaaagggataaaaagggacagattgaaaggtttaaagcgcgtttagtggctaaaggctttactcaaagagaaggtattgattacactgaaactttctcacctgtttccactaaagattcattcagaattattatggccttagttgcgcattttgatttagagttgcatcaaatggatgttaaaactgcttttctgaatggagaattgaatgaggaagtctatatgtctcaacctgaaggctacaaggagaaaggaaaagaacacttagtttgcaagttgaaacgatccatttat

SEQ ID NO: 279272 - DNA, 303 bp, Cannabis indica
tcaataaataatgtaaaatgattacaaaagtaaaaatataactaattagagtttttatttttttgaaaaaaaagtgtccaaaatacatgtacaatagtgagctataatagctcaaatttttagctcattcaaaacagtcccaatagcttctctaccttatttaaaatacctccctaaattcttactttttgtattttacctcacacatttacattacactatatattaatttctatatattttcttgggaaattaccccataattatatactatttttaactttttttttttttttaatttac

SEQ ID NO: 279273 - DNA, 542 bp, Cannabis indica
catccacatataaaacaaataatagtatacacattatttttcagatttatagtaaatgcatttgtcactttcatttactttaaagccatgtaagatgacaagattatcaaatttctcatgccattgcttaggtgcctgtttcagactatacaaagatttatttaatttacatactttatgttcttgactacgaacaacaaaatctttaggttggtccatgtaaatctcttcttctaatttaccattcaagaaagcagttttaacatccattcggtgcacaacaagattatgaatagcagcaagagcaaaaagcacacgaatagatgtaattctagtaataggtaaaaagtatcaaagaaatctacattttctctttgtctaaaccctctggcaacaaaacgtgccttgtacttttcaacagtaccatcgggtcttaatttctttttaagaatccacttacaacctactgtcttacaacctggtggtaacacaactaaatgccaagttccgtttgactcaagagagtccatttcatcattaat

SEQ ID NO: 279274 - DNA, 540 bp, Cannabis indica
gaacgaggatggtgatgcggagttgcaagttgatgaagctatagaggtacctactttgaggttagaattacctccactacctccaccacctccaagggaccaaaggaaagagcaagaaagaagaacccctcgtagtgaaaatcaccaaacaccaggcaccagtagtagccggccaggtcctcctcgtagtaatgtaccatctacttttgaagtttgtacaaaattcaaacctattgtgtggacaaaggaagacatagaggaaaataatacttatacaacttctcttactagtacacattcaggggaaatacatgttggcaagttgtacacaaataagactgaattgaaaaatatagtgggaaggtttgcattgaaaatgaattttgagttcatggtgaagaggtctgggatcgatgtttcttatgcaacttgctagggattcaaattgaaaatagagagtgtgggggaagagggcacgttgtgacagtgtttgaggtcacgtatagtttcactaacgaacacacatgtagcctggattct

SEQ ID NO: 279275 - DNA, 658 bp, Cannabis indica
agaatacttgaagacatgggagaatcaagaagaagctacaaagatctattgcgacagcaaatcagctatagcaatggcgaaaaatccagtatttcacagtagaactaaacatataagcatcaagtaccatttcatcagggaagcagaagcaaacaaagaaatcgagctcaagcactgcaagactgaagagcaggtagccgacatattcacaaaggcactaccaagaggaaagttcgagctattgcgagacatgatcggagttaccgaaatgtgtaccaaggaggagtgatgaaaagtgctacacatttctacacttttcttatctagaaaattctagtattaactacacaaaactaagaaaattagagaaaactagaattacctagaaactatatttgtaagctaagaaacttagaaaattctagaatatcttagaaagttaaattgtaattcaaaataagaaaaatctagaaagttgtagtatcaaccttagctccctataaataccaagcttgggttgaggagctaacaaaacacaaaaaaccaaagttccaaactatcaataaaagtttactactttctcaaacaaccctctcttctaagccaaactcatttcatatactaaatcaacaactactcatcaacatcactacttcac

SEQ ID NO: 279276 - DNA, 1246 bp, Cannabis indica
tgattgaattaaaggaactcgttcttttgttgttggattttctgtagcaacagattactgcacagtaacctcgacgactgcttctgaagcttcgtcaggttccttttcctcagcagcaggttccttttccttttagatcatcaacaacaacattagcagattccataacagtttgggttctcatgttatacacacgatatgccctactatttgtggaatatcctaagaaaacaccttcatcacttttagaatcaaatttaccaatgtaatcacgatctcgtaaaatataacacttacatccgaacacatgaaagtgacttacatttggtttcttacctttccagatttcatatggtgttttgtgagtacctggacgcaagaatactctgttgatggtatagcaagcagtgttaatggcttcggcccaaaggcgctttgtgagcttcttgctattcaacattactctagccatttctgttagagtacgattctttctttcaaccactccattttgtggaggagttttaggagcagaaaattcatgagaaataccgttagctttacaaaattcatcatatacggtattttcaaattccttaccatgatcactcctaatcctaacaattttgccaatgttacaatctttttcaactcgtaatttcaaacacagagattggaaagcttcaaaagtatcagatttttctctcaaaaaatccacccatgagaatcgagaaaaatcatcaacacaaacaaaaatataccttttaccatttaagctttctacctggattggacccattaagtccatgtgcaagagttcgagaactctagaagtattcacatctgggacactcttgtgagaaattttcagttgcttacctaactggcatggaccacattttcccaatgactctttacctaatttaggtaatcctcgaacaatccctgaaacagataattttttcagatttttaaagtgaatgtgaccaagtttttcatgccataggtcagtaacattttcaatgacagaatgacaagtggcatgcgtagtgagagtataacaattatcactagatcgcagcccttgtaacacaatttcatcaagaatattatatacatagcaatgattgctatcaaagctcacagtataaccctgatcacaaatctgactaatgctaagtagattagcttttagtccttcaaccaacatgacattctttagtttaggaagcccttcgaacttgag

SEQ ID NO: 279277 - DNA, 517 bp, Cannabis indica
cttttgatgacttaggttagtttcatcaaagagttcttagaatagtccaagtggatttggtcacagaatattcaactcacattccatattaacatacagtttgaatccattgacagaaaatggatattaatcacttgtgaaagtttaactgtattgtattctgaaatagaaatatctattaggagtctaaaatttaaattcaaagacttaaatttataccaaatatacatgagtattattctagctttgaccaccattactaatctaactctaagtctaatttggctaaagtaagcatatataagtaggagatttctaagattgatgatttatatcatttcgggatagaatgtcgagaatataatcatgtgcgccattcaatttcttaagagaaaataaaatgacattgtatgcaaatgatttataaaccattcattcaatgatatattatttaagctaatttgaaatgtataagctaagaggaaaaataaggataatttcgattaaaaataagaat

SEQ ID NO: 279278 - DNA, 668 bp, Cannabis indica
aattccactcaaagggaatgtattgtcaatttttgttaggcatcatctctactcgagaactctaaatttgatgttaaatcaaccttaaaaaaattactatttcaacattaattttttttttattaaatttttacactaaaaatttattttgcacattttattacagttttacccctacacgcctacatcaacttttttacttaccattagggctgagcatcggtcggtttggtcggtttttttacaaaaaaaaatccgaaattcggttttcggtttggattggttcaatccgaaaaccgaccgaccaatccagaaacatccttaaaaccgaccaatgtgaaccgcggtttggtcggttaaaaccgaccaaaccgatttttttttttttgttaaaatataataaaatttattctataaacacattaatacaaactctaaacacatcattatatattttacaagtccaaccatacaaattataatgtctagttaaaagttcaaactctaaaatacaacataatacaacacaaatcaaatataacttataagtccaaaatagtgaatgactttaataaaattattacttttaaattttaatattaataaaataataatatattatatattatatattttacttatcagtatatactatatagtatatacaa

SEQ ID NO: 279279 - DNA, 487 bp, Cannabis indica
ttatttccccctaccacaagcacttagggaagaaagaaaatggaaatagctttctggaattatcaagcttatagtttctagcaaggtgctctctttgatagaaactcacaaaaaatattgtccctttcaagtgaaagaaaacctctatttatagtgtttgaagatcacatattttgaaattcaaataacctacacccaagggttgttaccatttcttaatggggtgtaaatgagattaaatgggtaatttggaggttatgagagttgttaaaaaccatccttataggcaaaaaacgttcaacaattaaagctgaaaaaaacagtaactagttactagttaccaaatttttcagcttttgcaaacaactcttcaaaccattccaaaccattgccactttattttatatcacttatacactttataaatgaaaaatttaatctccaacaactatatttgaattatggttttgaatttcaaaacaattaa

SEQ ID NO: 279280 - DNA, 512 bp, Cannabis indica
ttcattcaatgctcaattctccccaaatgcaatgaaaccttccagagtacctaattagggcatacacaatgatttccaggcagtaattcacagaataaaccattacaactcaagttgccattaatgaacaaagctttgcacttaaaacttaaacttgtataaaaccaacaacacactgtaaaaccagctactaggagttaaaatcaactcaaaagaaccctaaaattcgaaccctaaacctacctaaacctaacagccactatatcacaaattcattaattcaaactaacataaaacttgaaaattcacatattcaaggattctagggtttaccttagtttgattctccttgaaatcttggtagaaatcacaaatttcagcaagaaatcccttggttcctagctggttcgaagagagagagaggtgaaggaaagagagcttctcttgaattttttggtattttcttctttcttgagtttttttacaaaatgagataaatcacattagggaaa

SEQ ID NO: 279281 - DNA, 519 bp, Cannabis indica
aattttattggtcaaactactttcaattttagggttaatttgctttttaatcgatatgatatcgacaaactgtcgacaacatgtcgataatggtcatccctgacctttcttagcaggatatcgacatagcatcgatattctatcgataaactgtcgataatatctggaaaacccagatttcgacagaaaactagatctgcaagatctctaccatttcaaaccaaaaaataccagttccaataaatacgacacatataacgaaagcaaactacataaaatctaacaaaatgcttaaaacacaatttatccattataatggtgtaagattcttgagtgattggggtgtgctccggttttctaccaccgcccacagagaaataaacattcaacagggaagagagagagggaagttttttcaattttttttagagagagagaggggtgcacgagagggaagagagagaggaagagagagggaagagagagagggaagagagaggggtaagttttttagtttta

SEQ ID NO: 279282 - DNA, 533 bp, Cannabis indica
atttaaaagcgaaaattcaaaaattcaattaacacatacattttgatttagggctgtctctatcgtcacgcgacacgagtaccttcaaaatcaatcctcaactccccgaggcagaagcactgaaggaatggtaatactcataaaatcaaatacacatactattatagctacacattttacaaaaaaattaaatttttgtatactatatttataataattatcatacttactctattttaagggcggagagtaacgaaacagaaattaaaaacgcaatagcaaactgcttgacatatgaatcttctccaaaatcttttgttggattacacgaaatagtgactaacatccaaatttcagagttgacgaaaaatctgcaactgaatgaggtaaaaactactacaatatttactttataaaacttttgtttcaatatcttactattattaacaccatttgatttggatgtagaaaaaatatttttggattgaggcggcaataaaaataactgatactctccagaatttttattacat

SEQ ID NO: 279283 - DNA, 723 bp, Cannabis indica
agctgcacagtacgtttaaaactcacgtaatacgcctaaattagttagggtgttacacataaacctagagagaaaagtaggtttttagctttggaggcattagttggataatgagaccatagccttccttttatactaatttccaatagggttaggttgaattatttggaataaaaaaattgataaaaatagagtaaaatagacacctaatggccagctatataatgggccctacattagtttggttttttctatttttctcaactattttatctatttttcacaaatatcactttttgcaatttcaaccctataaatgccaaaactatttatttaataatgaaaataattatcaaataaaattgtcatttataatatttattaattagactccacaaagtctcttaattaataaattaaccctaaaatacaatttcttcacaatcaagccataacataatgaaaattcacaaactagacatagtctaattttagaattaaaaattaactaaaatcaattaactgagtcttacaagcagtttgtctcaactagtttggggaccatgggcctatataaccgagcttccaataagcagatctagaatttaccaattaaattctctaacttattaattcctcgttgaaccactatagaacttagaatcacactcttagttacattgaacgctctatatgttctacgatatagatacgttattaatt

SEQ ID NO: 279284 - DNA, 519 bp, Cannabis indica
ggttttgatctgggttcgggtttgggtttagctccttgacctggtcctagtgctagttcaattctagttccatttgcgattcttacttcgagtttgggtttgagttcgggtcggagttcgagtcctggtcttggtgtgggttcgggtccagatttcagactaagtccagatcaagctccgggtgtgggatcgcatcctgggtcttggtctaggtagggtccgagtcccaagttccaatcccgatttgagtctggattctgttctgggtctaagtccttggttctgctcctggtgtgggttcgagttttggtcctggtccgggtctagctttgcgtctaattcttggtgtgggtttcagttcgggtcggagtctgtgtctgtgtttgtgtccaggtctggaccctgatctgggtctaggttcgggtccaggtccaagttcgggtcccgagtgcaggtccaagtttgggtcttggtcagcatctcggtacagatctaggtccagcatttcgatcccagtct

SEQ ID NO: 279285 - DNA, 691 bp, Cannabis indica
ttggttgttcagtgcgaagacttgcatgattgctgcaagctgtagatagacaatatgcaagggcgtagactgagatcaagactgatcagctagtttgcggcatgtatgggcatgttttgtgtttatggggacattggtgttgtttgagacactgtaagccgaatggttcagagaacatatgccgatgggagatagcggattgggatgacttcaagtcttaagataagactgggtgtcatcaagtttgttgaaagttaacaagtcatcagagggtgcagggttgattttgggaaatatacttgtgacacagttttgagagccgacacaagtaggagctcaaaggagcaagtatgcagtgggtcaatggggccttttgcatgaagtcgtgggtgtgcggtagggccggagggccaatgttgtgatcgtcgcgaagagattttgtgcaagagtgcacttggtgctgcattgggtgcagttggcttgcgagcctcgtccaggtgggatgcatcaaactttatcctgcgatgagagtgtcttgctcgattgccatcaggaggatggtgggccatagagttggcgtgtgtagtttttgaagggacttgtccaaagggacttggcttcagtggaagcgtgttctgtaggtgccgttgggaacggttggtttgcgaacctcaccccgaggggtgcacca

SEQ ID NO: 279286 - DNA, 904 bp, Cannabis indica
attaggcacatagttaatgattgtgtattatggaattaaacctatgattgtattagtccattataataattctaacattctcccacttggacaatacaatcacgccaccataataatgtctatcgcacataaggtaaccaattaagacgtacataatatcatatcgacaggatacatgtattatgtatgaattgaccttgaagacatttatctattaacaatcattaacaatcaaactaaacatgcatgaggtacgacaaaattgagattatgcgcattcatctcgttttgtacctgtcacttccttgaacaacaacatatatgtataagcatacatatgtaacaactataaagaagtgacttcagtatcataatgcatgttctaaaacacaagccataagcaatccgtacaaaatactagcatgttcaatacataaataacaaactcccactgagcttaacaagctaggcttccaacaatcccattcgagcaacatgctccaaaaatacacatatgggtaagcctttcgttagtgggtctgctaacatgctagtgctaggcgtgtattcaatggaaataagagactctgtaactttctctttaacaaaatagtactttatgtcaatatgctttgagcgagaagtacttctagtgttcttagagaaagccactgctgcagaattatcacaatataatttcagcggcctcgtgataaaggctacaacatctagtgctgaaatgaaattctgcaaccatattgcctgacaagtagcctcataacacgccatatactatgcctctatcgcggataaagctgtgagtgtctgcttgacacttttccacgatacagctcctccagccatcatatgaatgtagcctgaagtggacccttttatcgtccac

SEQ ID NO: 279287 - DNA, 435 bp, Cannabis indica
taaaataatttccaacatccatgagggcttaatcttctctggattggcttcgattcctcaggcattgacaatgaagccgagaaactttgttgagctgactccaaaggagcactttaagggatttagtttcatgttgtatttcctaaggactttgaagcattcgtccaggtcatctaagtgccccccagccttcctaaatttgacgagcatgtcatccacatatactttcatgtttcgcccgatctggtctttaaacattttgtttaccaatctttggtatgtggctccatcattttttagaccaaacggcattactttgtagcaatatagacccatatcggttcagaaacttgtatgttcttggtttggtggatgcattttgatttgattgtaccccgagtaagcatccattaagcttaagatttcatgccctgc

SEQ ID NO: 279288 - DNA, 579 bp, Cannabis indica
ttgcccattgaggagccttccagacgcttcaggcttttggagaacttgccggagcgggtgattggtcagaatcttgatcggatgggcttggaagtatggccttaacttccttgacgccatcaggaggcaaaataccagtttttcaatgaccgggtatctcgtttcggcccctatcatgcgcttactgacatagtacacgggatgctgagttttttcttcttcccggaccagggcagcgctgaccgcgtgttcggagacggccaaataaagaaataagtcttctccgaggacgggttttgataggataggaggcttggccatgtggtcttttagctttctgaatgcctcctcgcactcgtccgaccattcgaacttttggcatttctttagcacgttgaagaagggtatgcacttgtccgtggaccgtgagataaaacggctcaatgcagctacctttccggtcaagctctgcacatctttatgcttcttgggggatggcatattcaggagagcctggattttttccggatttgcttcaatccccctttggctgactatgaaacccaggaactttcctga

SEQ ID NO: 279289 - DNA, 577 bp, Cannabis indica
gtagtacacagtagagattcgggaatgggaatggagttgaaatttgaagttgaaaactaaaagagaagaaaaggtttatatatgaagagagagtaaggacacatgtaatcttgtaagggcaaagaagctttggcagaagagaagactattgtgtcaaactttccttcttccctcaattctataatatcacttatcctattcctattatctaagagaccattttgcccaaatataaaaatcaaatgaaaacaactaactggaaagaatttaattttgaaaaataaaaacaatatagcctcaaaataaaaactaaaatttctaaaacggaaacaattatcattcatgtttaatgaaaacaattagcattcaatctcgaagtagaaattatagtttatgaaatagaaacaactagcatttaacctcaaaaaatagaaacaatttaatgttgaaatagaaactatagtttgtaaaatagaaacaactagcatttaacctcatttatgtgaaataggaaacacctattaataaaaaaaaataagaaacaactattaataaaaaaataagaaacaaactcaca

SEQ ID NO: 279290 - DNA, 530 bp, Cannabis indica
ctatttggaatctaaaatttaaagttaaagtctttaatttataccaaatatacatgagtaattattctagcttggatcaccactactaatctaactctaagtttaattcgcctaaagtaagcatatataagtaagagattctaagatcgaagatttatatcatttcggaatagaatgtcaggaatatagtaatctgcgccattcaatttcataagagaaagttgaataacttcataagcagatgatttataaaccattcatccaatgatatactatgtaagcaaattcaaaatgaatatgctcagaggaataattaaaggataatttcgattaaaataagaatccaatgatgtcccggtcagagagagtcaaagttattcttattttacacgaaatttacaactacaattaataacagaaatcaacatggttcaatataaattcacacacaattcaaaaattattaagcatttagcaaataacaaagacatgtgaaaatacaaaactatcatatcttaaataatttccaa

SEQ ID NO: 279291 - DNA, 583 bp, Cannabis indica
gaggagtaccaaaccgagtaaagatgttcttttgtagaaagcggagaactgtcttaccatcattctgtggtgtagctgcagcttcgacccatttagacacatagtcgacagccaatagaatatactgattgctaaaggatgaaggaaaaggacccatgaagtctatcccccacacatcaaacaattccacttctaaaatccctgttaaaggcatctcgtttcttcttgagatattacctgtccgttgacaacgatcacatgccttcacaaaggtagtagcatccttgaatagcgttggccaaaagaatccactttgcaacaccttagcagccgttctggttccactgaaatgtcctccacatggtaaagcatgacaatgatttaggatagaatacatctcctcttcaggcacacatctcctaattatctgatcggcgcagtgcttgtagaggattggctcttcccaataataatgtttcacctcagaaaagaacttcttcaattgttgacgcgacagctcgggaggggttatttttgcagccaagaaattaacatagtcagcgtaccatggtaccatcaggtt

SEQ ID NO: 279292 - DNA, 558 bp, Cannabis indica
aggagtagactctacatagctccctatgggtcctccatgagatgcttgaaatctttgttgtcgttgcgggcaatctttcttcttatgaccttgttgaccacaactgaaacacccgtatggtccactacgagtctttccagatgaaccactactagtgctacccccactaaattgttgtccttgggaccactgtccttgattcttcttggtcatctttcggtcatttcctcttcctctgcttgtgttcttcttctcattcccttctacatgagcctcagttcgcaaggctgctgtcacacactcagtcaggttgttaaaggtcaaaggggctattggaccacgtatcgcaggcctcaaacgacgcatgaactgttcaatcaccaagggttgatcaacaacaccaggatatgcataagaggatagctctacaaacttcatgtaaaattcattcacagtcatatccccttgtcttagaccatcaaatactccaataagagccctcctgtgagatggactaaaatattgttccctgaaaacttcctcaaattctcgccaagt

SEQ ID NO: 279293 - DNA, 546 bp, Cannabis indica
cgaaacaattaacaaaccataataatcctcccaaacaattaacaatcgaagttataatcatagttcaacatttaaaatcttactaaaacaataccttatgaacccctctgcagtagtccaggatataatcctcccacacaaagtttttcctcggacccttgtggctcgtccatgcactgctgatcatggcggtcacgaatgtggagagaatgatacccttctgaggaaatgtcagtggatagtcggtgcgtcgcctcctcagcatatgcattgctgcatctatatgctgcatataaagggaaatgtcagttagacaaaaaaatatattaattgcacataaagttgtaaagtgaagtaatattataaaatactttacttacgtcatctgtaagccattcctttggtgtgagcattatccaaaagaatcctggaccgtaatcaccacttctcaaatcccgaagtcggtggttcggaatgagtccaacacaccactttcggaaagtggttaacaatttctcatccggtggctccaggggatcaaaagtc

SEQ ID NO: 279294 - DNA, 404 bp, Cannabis indica
ataccttgctctctctcaaacaacttacattgataaggtttttgagagattctcaatgaccaatgccaaaggggcacaaatgccttctagatttggtatctgtctatctaaggaacagtgtcccacggatcctcaagagatagaggacatgagaagggttctttatgcttcagcagttgggagtctaatgtatgcaatgttatgcaatagacctgacatatgctatgcagtaggaattgtgagcaggtatcaaacaaacccaggagaggaacattggactgcaaataaatatattctaaaatatttgaaaaatactaggcattatgtgttagtctacatgggtggtgctttaaatcccgtaggctataccgacttagatttctaggcttgtcttgatgacagaa

SEQ ID NO: 279295 - DNA, 524 bp, Cannabis indica
gggcgggcagtcactctgcgctttacttctttttcagcttcttgactttcatgctttttattttctgctggtttttgctaaccacgctgtttttgttctgtgcagacatgtctcggcagatgctcgacgccttaaggaagaggatgggcagaagttctagcgcctcccctccgaccaagaagcttaagggcggagaggggtcttcggagaagagaccttctggagaggttattgacctttccgaggagctgactgctgcaaatccttccactcccaaatctgccaagtctaaggagtctgggccaccaacaactgggtccgaactggttaggaggatccctgagcgggtgcaagcaccaactccacccgtgcccgtgctgcctgaggccaagaagggcaaggagatgctagctcactacatgaaccggctggttcctgaagtcagtgagcaactggctagtactgacaacgactcatctctagatgtgttggtgggcggagtcttgaaggagctcaccagggtt

SEQ ID NO: 279296 - DNA, 886 bp, Cannabis indica
ttaactcaaaactttggtttttattggtgaaatggtgatttagctgctgtagttgctgtttgagtttgggtatgttttctgtagttatattatgattatttaaggtgatttaagcaggttttgatagccaattagttggatgagcaagctttgagtttttgaactcaagcttgactcatcaatggtgatttttgtatttgtgcatgaagctttgttttattgctttgttattgacctctaggatgtttagaacaggtctggaaagtttggggaggattggggttgaattggttgagatatggaatttttaatgtttcctgcactgaaccggaattccggttcagagaggcctgtaggaaccggaattccggttggcttccaggatttcctcccagaaccggaattccagttgaggaaccggtctaccggttggggcaaatttgggaaccctagtttttcccatttttgtgttatttagggtattgccatgttatttatcgatagggaaacttctagtttcaagtttaagtccccgggaagtgatttagcgtgtcacttatcagtgttgtgattattatgatttaggagcctgtaattcgccgagcagattgttccactcaggttgaccggcacacctgaattcggaatcgaggtaagattagtataatgttatgcatatgcttatacatgtttagcgtacatgtcagttgccatcagattaacatattagatatatgttaggcaaattttatatagccgtcagattagcatatcagggcaacagtgaggtgtacatagagttgcaccgagatgccaacagatatatgctaggctatcagttagtatggattaactgctaccacatcggtacgactagagtaccgag

SEQ ID NO: 279297 - DNA, 598 bp, Cannabis indica
tagttgaaacactataaaaggaacatgatactctcatctcatcctcttacaacttgacaaactaatgtcactatgactattcaaccgagagagttccttgcttagtgatttcacctccttcattgttcttcacattcgaaacccatagtgaatgagcaccatgcccacacatagcaagtgaagtactcaatcatagtgagtaagacggtgataaccaaactcgaaggagagaaagagatccaaattcagatcttgataatgctctgctacagaaaagaatcaagggctagagatcttgaacgaaaggagtcattatattccgatgcaatcagtgtaaggttttcttaaacccttatgtgtttattttcgttgttttagaaaattcatatttaggatgttaatcagcatacttcttaataaatctagatcctgataaaatattaacaacaactggcctcagagccatggtaatgatttactttcatgtaatatggatttaaaacaatgaatattgtttgtgtgttgatttggatgtgttcatgttggtttatatgttatttgatgatgttatgtgatttacaaaatttttccttgaaaa

SEQ ID NO: 279298 - DNA, 570 bp, Cannabis indica
caaagcacgctgaaaacactcgtgttggtctgtagggtcagtcatcgatccaggaagcagccagagtgtggcgtacccgtgtataagagccattagtccgtgggtgtaagggcccaatggaggcttgaagcggggacgttacacatggtcccctcactagttgagataatattgcttgcagactaagttaattgattttaattaatcaattataattctaaaattagactttatcttatttatgaattttcactaagcaagggcttcattgtgaacaaaagaggttttggggtcaattttttattaagagactttgtatggtctaattaataaattacataaatggcaattttatttagtaattaattattattattaaataaatagttttgacattcataaggttgaataggaaaatatggtattattgaaaagaagctaagtcgtagaaataaagcagaaaaattataactagagattggctcttaaagtgtacggcaaacaagtgtttttgcccaatattttattattttttaatccagataattcaaccctaagccctagttgaaa
